United States Patent Application Publication US 2023/0041377 A1 - sequence listing, part 2

SEQ ID NO: 14530 - protein, 214 aa, synthetic construct
  source 1..214: note = Description of Artificial Sequence: Synthetic polypeptide; note = XENP018386 1G6_H1_L1.43_IgG1_PVA_/S267K Light Chain
SIVMTQSPATLSVSPGERATLSCRASQSVSNLVAWYQQKPGQSPRLLINYASHRYTGVPDRFTGSGYGTEFTLTISSLQSEDFAVYFCQQDYSSPRTFGGGTKVEIKRTVAAPSVFIFPPSDEQLKSGTASVVCLLNNFYPREAKVQWKVDNALQSGNSQESVTEQDSKDSTYSLSSTLTLSKADYEKHKVYACEVTHQGLSSPVTKSFNRGEC

SEQ ID NO: 14531 - protein, 107 aa, synthetic construct; identical to SEQ ID NO: 8881
  source 1..107: note = Description of Artificial Sequence: Synthetic polypeptide; note = VL of XENP018386

SEQ ID NO: 14532 - protein, 11 aa, synthetic construct
  source 1..11: note = Description of Artificial Sequence: Synthetic peptide; note = XENP018386 vlCDR1
RASQSVSNLVA

SEQ ID NO: 14533 - protein, 7 aa, synthetic construct
  source 1..7: note = Description of Artificial Sequence: Synthetic peptide; note = XENP018386 vlCDR2
YASHRYT

SEQ ID NO: 14534 - protein, 9 aa, synthetic construct
  source 1..9: note = Description of Artificial Sequence: Synthetic peptide; note = XENP018386 vlCDR3
QQDYSSPRT

SEQ ID NO: 14535 - protein, 451 aa, synthetic construct; identical to SEQ ID NO: 11545
  source 1..451: note = Description of Artificial Sequence: Synthetic polypeptide; note = XENP018387 1G6_H1_L1.44_IgG1_PVA_/S267K Heavy Chain

SEQ ID NO: 14536 - protein, 122 aa, synthetic construct; identical to SEQ ID NO: 6246
  source 1..122: note = Description of Artificial Sequence: Synthetic polypeptide; note = VH of XENP018387

SEQ ID NO: 14537 - protein, 5 aa, synthetic construct
  source 1..5: note = Description of Artificial Sequence: Synthetic peptide; note = XENP018387 vhCDR1
NYWMN

SEQ ID NO: 14538 - protein, 19 aa, synthetic construct
  source 1..19: note = Description of Artificial Sequence: Synthetic peptide; note = XENP018387 vhCDR2
EIRLKSNNYATHYAEPVKG

SEQ ID NO: 14539 - protein, 11 aa, synthetic construct
  source 1..11: note = Description of Artificial Sequence: Synthetic peptide; note = XENP018387 vhCDR3
YYGNYGGYFDV

SEQ ID NO: 14540 - protein, 214 aa, synthetic construct
  source 1..214: note = Description of Artificial Sequence: Synthetic polypeptide; note = XENP018387 1G6_H1_L1.44_IgG1_PVA_/S267K Light Chain
SIVMTQSPATLSVSPGERATLSCRASQSVSNTVAWYQQKPGQSPRLLINYASHRYTGVPDRFTGSGYGTEFTLTISSLQSEDFAVYFCQQDYSSPRTFGGGTKVEIKRTVAAPSVFIFPPSDEQLKSGTASVVCLLNNFYPREAKVQWKVDNALQSGNSQESVTEQDSKDSTYSLSSTLTLSKADYEKHKVYACEVTHQGLSSPVTKSFNRGEC

SEQ ID NO: 14541 - protein, 107 aa, synthetic construct; identical to SEQ ID NO: 8890
  source 1..107: note = Description of Artificial Sequence: Synthetic polypeptide; note = VL of XENP018387

SEQ ID NO: 14542 - protein, 11 aa, synthetic construct
  source 1..11: note = Description of Artificial Sequence: Synthetic peptide; note = XENP018387 vlCDR1
RASQSVSNTVA

SEQ ID NO: 14543 - protein, 7 aa, synthetic construct
  source 1..7: note = Description of Artificial Sequence: Synthetic peptide; note = XENP018387 vlCDR2
YASHRYT

SEQ ID NO: 14544 - protein, 9 aa, synthetic construct
  source 1..9: note = Description of Artificial Sequence: Synthetic peptide; note = XENP018387 vlCDR3
QQDYSSPRT

SEQ ID NO: 14545 - protein, 451 aa, synthetic construct; identical to SEQ ID NO: 11545
  source 1..451: note = Description of Artificial Sequence: Synthetic polypeptide; note = XENP018388 1G6_H1_L1.45_IgG1_PVA_/S267K Heavy Chain

SEQ ID NO: 14546 - protein, 122 aa, synthetic construct; identical to SEQ ID NO: 6246
  source 1..122: note = Description of Artificial Sequence: Synthetic polypeptide; note = VH of XENP018388

SEQ ID NO: 14547 - protein, 5 aa, synthetic construct
  source 1..5: note = Description of Artificial Sequence: Synthetic peptide; note = XENP018388 vhCDR1
NYWMN

SEQ ID NO: 14548 - protein, 19 aa, synthetic construct
  source 1..19: note = Description of Artificial Sequence: Synthetic peptide; note = XENP018388 vhCDR2
EIRLKSNNYATHYAEPVKG

SEQ ID NO: 14549 - protein, 11 aa, synthetic construct
  source 1..11: note = Description of Artificial Sequence: Synthetic peptide; note = XENP018388 vhCDR3
YYGNYGGYFDV

SEQ ID NO: 14550 - protein, 214 aa, synthetic construct
  source 1..214: note = Description of Artificial Sequence: Synthetic polypeptide; note = XENP018388 1G6_H1_L1.45_IgG1_PVA_/S267K Light Chain
SIVMTQSPATLSVSPGERATLSCRASQSVSNGVAWYQQKPGQSPRLLINYASHRYTGVPDRFTGSGYGTEFTLTISSLQSEDFAVYFCQQDYSSPRTFGGGTKVEIKRTVAAPSVFIFPPSDEQLKSGTASVVCLLNNFYPREAKVQWKVDNALQSGNSQESVTEQDSKDSTYSLSSTLTLSKADYEKHKVYACEVTHQGLSSPVTKSFNRGEC

SEQ ID NO: 14551 - protein, 107 aa, synthetic construct; identical to SEQ ID NO: 8899
  source 1..107: note = Description of Artificial Sequence: Synthetic polypeptide; note = VL of XENP018388

SEQ ID NO: 14552 - protein, 11 aa, synthetic construct
  source 1..11: note = Description of Artificial Sequence: Synthetic peptide; note = XENP018388 vlCDR1
RASQSVSNGVA

SEQ ID NO: 14553 - protein, 7 aa, synthetic construct
  source 1..7: note = Description of Artificial Sequence: Synthetic peptide; note = XENP018388 vlCDR2
YASHRYT

SEQ ID NO: 14554 - protein, 9 aa, synthetic construct
  source 1..9: note = Description of Artificial Sequence: Synthetic peptide; note = XENP018388 vlCDR3
QQDYSSPRT

SEQ ID NO: 14555 - protein, 451 aa, synthetic construct; identical to SEQ ID NO: 11545
  source 1..451: note = Description of Artificial Sequence: Synthetic polypeptide; note = XENP018389 1G6_H1_L1.46_IgG1_PVA_/S267K Heavy Chain

SEQ ID NO: 14556 - protein, 122 aa, synthetic construct; identical to SEQ ID NO: 6246
  source 1..122: note = Description of Artificial Sequence: Synthetic polypeptide; note = VH of XENP018389

SEQ ID NO: 14557 - protein, 5 aa, synthetic construct
  source 1..5: note = Description of Artificial Sequence: Synthetic peptide; note = XENP018389 vhCDR1
NYWMN

SEQ ID NO: 14558 - protein, 19 aa, synthetic construct
  source 1..19: note = Description of Artificial Sequence: Synthetic peptide; note = XENP018389 vhCDR2
EIRLKSNNYATHYAEPVKG

SEQ ID NO: 14559 - protein, 11 aa, synthetic construct
  source 1..11: note = Description of Artificial Sequence: Synthetic peptide; note = XENP018389 vhCDR3
YYGNYGGYFDV

SEQ ID NO: 14560 - protein, 214 aa, synthetic construct
  source 1..214: note = Description of Artificial Sequence: Synthetic polypeptide; note = XENP018389 1G6_H1_L1.46_IgG1_PVA_/S267K Light Chain
SIVMTQSPATLSVSPGERATLSCRASQSVSNYVAWYQQKPGQSPRLLINYASHRYTGVPDRFTGSGYGTEFTLTISSLQSEDFAVYFCQQDYSSPRTFGGGTKVEIKRTVAAPSVFIFPPSDEQLKSGTASVVCLLNNFYPREAKVQWKVDNALQSGNSQESVTEQDSKDSTYSLSSTLTLSKADYEKHKVYACEVTHQGLSSPVTKSFNRGEC

SEQ ID NO: 14561 - protein, 107 aa, synthetic construct; identical to SEQ ID NO: 8908
  source 1..107: note = Description of Artificial Sequence: Synthetic polypeptide; note = VL of XENP018389

SEQ ID NO: 14562 - protein, 11 aa, synthetic construct
  source 1..11: note = Description of Artificial Sequence: Synthetic peptide; note = XENP018389 vlCDR1
RASQSVSNYVA

SEQ ID NO: 14563 - protein, 7 aa, synthetic construct
  source 1..7: note = Description of Artificial Sequence: Synthetic peptide; note = XENP018389 vlCDR2
YASHRYT

SEQ ID NO: 14564 - protein, 9 aa, synthetic construct
  source 1..9: note = Description of Artificial Sequence: Synthetic peptide; note = XENP018389 vlCDR3
QQDYSSPRT

SEQ ID NO: 14565 - protein, 451 aa, synthetic construct; identical to SEQ ID NO: 11545
  source 1..451: note = Description of Artificial Sequence: Synthetic polypeptide; note = XENP018390 1G6_H1_L1.47_IgG1_PVA_/S267K Heavy Chain

SEQ ID NO: 14566 - protein, 122 aa, synthetic construct; identical to SEQ ID NO: 6246
  source 1..122: note = Description of Artificial Sequence: Synthetic polypeptide; note = VH of XENP018390

SEQ ID NO: 14567 - protein, 5 aa, synthetic construct
  source 1..5: note = Description of Artificial Sequence: Synthetic peptide; note = XENP018390 vhCDR1
NYWMN

SEQ ID NO: 14568 - protein, 19 aa, synthetic construct
  source 1..19: note = Description of Artificial Sequence: Synthetic peptide; note = XENP018390 vhCDR2
EIRLKSNNYATHYAEPVKG

SEQ ID NO: 14569 - protein, 11 aa, synthetic construct
  source 1..11: note = Description of Artificial Sequence: Synthetic peptide; note = XENP018390 vhCDR3
YYGNYGGYFDV

SEQ ID NO: 14570 - protein, 214 aa, synthetic construct
  source 1..214: note = Description of Artificial Sequence: Synthetic polypeptide; note = XENP018390 1G6_H1_L1.47_IgG1_PVA_/S267K Light Chain
SIVMTQSPATLSVSPGERATLSCRASQSVSNDLAWYQQKPGQSPRLLINYASHRYTGVPDRFTGSGYGTEFTLTISSLQSEDFAVYFCQQDYSSPRTFGGGTKVEIKRTVAAPSVFIFPPSDEQLKSGTASVVCLLNNFYPREAKVQWKVDNALQSGNSQESVTEQDSKDSTYSLSSTLTLSKADYEKHKVYACEVTHQGLSSPVTKSFNRGEC

SEQ ID NO: 14571 - protein, 107 aa, synthetic construct; identical to SEQ ID NO: 8917
  source 1..107: note = Description of Artificial Sequence: Synthetic polypeptide; note = VL of XENP018390

SEQ ID NO: 14572 - protein, 11 aa, synthetic construct
  source 1..11: note = Description of Artificial Sequence: Synthetic peptide; note = XENP018390 vlCDR1
RASQSVSNDLA

SEQ ID NO: 14573 - protein, 7 aa, synthetic construct
  source 1..7: note = Description of Artificial Sequence: Synthetic peptide; note = XENP018390 vlCDR2
YASHRYT

SEQ ID NO: 14574 - protein, 9 aa, synthetic construct
  source 1..9: note = Description of Artificial Sequence: Synthetic peptide; note = XENP018390 vlCDR3
QQDYSSPRT

SEQ ID NO: 14575 - protein, 451 aa, synthetic construct; identical to SEQ ID NO: 11545
  source 1..451: note = Description of Artificial Sequence: Synthetic polypeptide; note = XENP018391 1G6_H1_L1.48_IgG1_PVA_/S267K Heavy Chain

SEQ ID NO: 14576 - protein, 122 aa, synthetic construct; identical to SEQ ID NO: 6246
  source 1..122: note = Description of Artificial Sequence: Synthetic polypeptide; note = VH of XENP018391

SEQ ID NO: 14577 - protein, 5 aa, synthetic construct
  source 1..5: note = Description of Artificial Sequence: Synthetic peptide; note = XENP018391 vhCDR1
NYWMN

SEQ ID NO: 14578 - protein, 19 aa, synthetic construct
  source 1..19: note = Description of Artificial Sequence: Synthetic peptide; note = XENP018391 vhCDR2
EIRLKSNNYATHYAEPVKG

SEQ ID NO: 14579 - protein, 11 aa, synthetic construct
  source 1..11: note = Description of Artificial Sequence: Synthetic peptide; note = XENP018391 vhCDR3
YYGNYGGYFDV

SEQ ID NO: 14580 - protein, 214 aa, synthetic construct
  source 1..214: note = Description of Artificial Sequence: Synthetic polypeptide; note = XENP018391 1G6_H1_L1.48_IgG1_PVA_/S267K Light Chain
SIVMTQSPATLSVSPGERATLSCRASQSVSNDVSWYQQKPGQSPRLLINYASHRYTGVPDRFTGSGYGTEFTLTISSLQSEDFAVYFCQQDYSSPRTFGGGTKVEIKRTVAAPSVFIFPPSDEQLKSGTASVVCLLNNFYPREAKVQWKVDNALQSGNSQESVTEQDSKDSTYSLSSTLTLSKADYEKHKVYACEVTHQGLSSPVTKSFNRGEC

SEQ ID NO: 14581 - protein, 107 aa, synthetic construct; identical to SEQ ID NO: 8926
  source 1..107: note = Description of Artificial Sequence: Synthetic polypeptide; note = VL of XENP018391

SEQ ID NO: 14582 - protein, 11 aa, synthetic construct
  source 1..11: note = Description of Artificial Sequence: Synthetic peptide; note = XENP018391 vlCDR1
RASQSVSNDVS

SEQ ID NO: 14583 - protein, 7 aa, synthetic construct
  source 1..7: note = Description of Artificial Sequence: Synthetic peptide; note = XENP018391 vlCDR2
YASHRYT

SEQ ID NO: 14584 - protein, 9 aa, synthetic construct
  source 1..9: note = Description of Artificial Sequence: Synthetic peptide; note = XENP018391 vlCDR3
QQDYSSPRT

SEQ ID NO: 14585 - protein, 451 aa, synthetic construct; identical to SEQ ID NO: 11545
  source 1..451: note = Description of Artificial Sequence: Synthetic polypeptide; note = XENP018392 1G6_H1_L1.49_IgG1_PVA_/S267K Heavy Chain

SEQ ID NO: 14586 - protein, 122 aa, synthetic construct; identical to SEQ ID NO: 6246
  source 1..122: note = Description of Artificial Sequence: Synthetic polypeptide; note = VH of XENP018392

SEQ ID NO: 14587 - protein, 5 aa, synthetic construct
  source 1..5: note = Description of Artificial Sequence: Synthetic peptide; note = XENP018392 vhCDR1
NYWMN

SEQ ID NO: 14588 - protein, 19 aa, synthetic construct
  source 1..19: note = Description of Artificial Sequence: Synthetic peptide; note = XENP018392 vhCDR2
EIRLKSNNYATHYAEPVKG

SEQ ID NO: 14589 - protein, 11 aa, synthetic construct
  source 1..11: note = Description of Artificial Sequence: Synthetic peptide; note = XENP018392 vhCDR3
YYGNYGGYFDV

SEQ ID NO: 14590 - protein, 214 aa, synthetic construct
  source 1..214: note = Description of Artificial Sequence: Synthetic polypeptide; note = XENP018392 1G6_H1_L1.49_IgG1_PVA_/S267K Light Chain
SIVMTQSPATLSVSPGERATLSCRASQSVSNDVTWYQQKPGQSPRLLINYASHRYTGVPDRFTGSGYGTEFTLTISSLQSEDFAVYFCQQDYSSPRTFGGGTKVEIKRTVAAPSVFIFPPSDEQLKSGTASVVCLLNNFYPREAKVQWKVDNALQSGNSQESVTEQDSKDSTYSLSSTLTLSKADYEKHKVYACEVTHQGLSSPVTKSFNRGEC

SEQ ID NO: 14591 - protein, 107 aa, synthetic construct; identical to SEQ ID NO: 8935
  source 1..107: note = Description of Artificial Sequence: Synthetic polypeptide; note = VL of XENP018392

SEQ ID NO: 14592 - protein, 11 aa, synthetic construct
  source 1..11: note = Description of Artificial Sequence: Synthetic peptide; note = XENP018392 vlCDR1
RASQSVSNDVT

SEQ ID NO: 14593 - protein, 7 aa, synthetic construct
  source 1..7: note = Description of Artificial Sequence: Synthetic peptide; note = XENP018392 vlCDR2
YASHRYT

SEQ ID NO: 14594 - protein, 9 aa, synthetic construct
  source 1..9: note = Description of Artificial Sequence: Synthetic peptide; note = XENP018392 vlCDR3
QQDYSSPRT

SEQ ID NO: 14595 - protein, 451 aa, synthetic construct; identical to SEQ ID NO: 11545
  source 1..451: note = Description of Artificial Sequence: Synthetic polypeptide; note = XENP018393 1G6_H1_L1.50_IgG1_PVA_/S267K Heavy Chain

SEQ ID NO: 14596 - protein, 122 aa, synthetic construct; identical to SEQ ID NO: 6246
  source 1..122: note = Description of Artificial Sequence: Synthetic polypeptide; note = VH of XENP018393

SEQ ID NO: 14597 - protein, 5 aa, synthetic construct
  source 1..5: note = Description of Artificial Sequence: Synthetic peptide; note = XENP018393 vhCDR1
NYWMN

SEQ ID NO: 14598 - protein, 19 aa, synthetic construct
  source 1..19: note = Description of Artificial Sequence: Synthetic peptide; note = XENP018393 vhCDR2
EIRLKSNNYATHYAEPVKG

SEQ ID NO: 14599 - protein, 11 aa, synthetic construct
  source 1..11: note = Description of Artificial Sequence: Synthetic peptide; note = XENP018393 vhCDR3
YYGNYGGYFDV

SEQ ID NO: 14600 - protein, 214 aa, synthetic construct
  source 1..214: note = Description of Artificial Sequence: Synthetic polypeptide; note = XENP018393 1G6_H1_L1.50_IgG1_PVA_/S267K Light Chain
SIVMTQSPATLSVSPGERATLSCRASQSVSNDVAWYQQKPGQAPRLLINYASHRYTGVPDRFTGSGYGTEFTLTISSLQSEDFAVYFCQQDYSSPRTFGGGTKVEIKRTVAAPSVFIFPPSDEQLKSGTASVVCLLNNFYPREAKVQWKVDNALQSGNSQESVTEQDSKDSTYSLSSTLTLSKADYEKHKVYACEVTHQGLSSPVTKSFNRGEC

SEQ ID NO: 14601 - protein, 107 aa, synthetic construct; identical to SEQ ID NO: 8944
  source 1..107: note = Description of Artificial Sequence: Synthetic polypeptide; note = VL of XENP018393

SEQ ID NO: 14602 - protein, 11 aa, synthetic construct
  source 1..11: note = Description of Artificial Sequence: Synthetic peptide; note = XENP018393 vlCDR1
RASQSVSNDVA

SEQ ID NO: 14603 - protein, 7 aa, synthetic construct
  source 1..7: note = Description of Artificial Sequence: Synthetic peptide; note = XENP018393 vlCDR2
YASHRYT

SEQ ID NO: 14604 - protein, 9 aa, synthetic construct
  source 1..9: note = Description of Artificial Sequence: Synthetic peptide; note = XENP018393 vlCDR3
QQDYSSPRT

SEQ ID NO: 14605 - protein, 451 aa, synthetic construct; identical to SEQ ID NO: 11545
  source 1..451: note = Description of Artificial Sequence: Synthetic polypeptide; note = XENP018394 1G6_H1_L1.51_IgG1_PVA_/S267K Heavy Chain

SEQ ID NO: 14606 - protein, 122 aa, synthetic construct; identical to SEQ ID NO: 6246
  source 1..122: note = Description of Artificial Sequence: Synthetic polypeptide; note = VH of XENP018394

SEQ ID NO: 14607 - protein, 5 aa, synthetic construct
  source 1..5: note = Description of Artificial Sequence: Synthetic peptide; note = XENP018394 vhCDR1
NYWMN

SEQ ID NO: 14608 - protein, 19 aa, synthetic construct
  source 1..19: note = Description of Artificial Sequence: Synthetic peptide; note = XENP018394 vhCDR2
EIRLKSNNYATHYAEPVKG

SEQ ID NO: 14609 - protein, 11 aa, synthetic construct
  source 1..11: note = Description of Artificial Sequence: Synthetic peptide; note = XENP018394 vhCDR3
YYGNYGGYFDV

SEQ ID NO: 14610 - protein, 214 aa, synthetic construct
  source 1..214: note = Description of Artificial Sequence: Synthetic polypeptide; note = XENP018394 1G6_H1_L1.51_IgG1_PVA_/S267K Light Chain
SIVMTQSPATLSVSPGERATLSCRASQSVSNDVAWYQQKPGQSPKLLINYASHRYTGVPDRFTGSGYGTEFTLTISSLQSEDFAVYFCQQDYSSPRTFGGGTKVEIKRTVAAPSVFIFPPSDEQLKSGTASVVCLLNNFYPREAKVQWKVDNALQSGNSQESVTEQDSKDSTYSLSSTLTLSKADYEKHKVYACEVTHQGLSSPVTKSFNRGEC

SEQ ID NO: 14611 - protein, 107 aa, synthetic construct; identical to SEQ ID NO: 8953
  source 1..107: note = Description of Artificial Sequence: Synthetic polypeptide; note = VL of XENP018394

SEQ ID NO: 14612 - protein, 11 aa, synthetic construct
  source 1..11: note = Description of Artificial Sequence: Synthetic peptide; note = XENP018394 vlCDR1
RASQSVSNDVA

SEQ ID NO: 14613 - protein, 7 aa, synthetic construct
  source 1..7: note = Description of Artificial Sequence: Synthetic peptide; note = XENP018394 vlCDR2
YASHRYT

SEQ ID NO: 14614 - protein, 9 aa, synthetic construct
  source 1..9: note = Description of Artificial Sequence: Synthetic peptide; note = XENP018394 vlCDR3
QQDYSSPRT

SEQ ID NO: 14615 - protein, 451 aa, synthetic construct; identical to SEQ ID NO: 11545
  source 1..451: note = Description of Artificial Sequence: Synthetic polypeptide; note = XENP018395 1G6_H1_L1.52_IgG1_PVA_/S267K Heavy Chain

SEQ ID NO: 14616 - protein, 122 aa, synthetic construct; identical to SEQ ID NO: 6246
  source 1..122: note = Description of Artificial Sequence: Synthetic polypeptide; note = VH of XENP018395

SEQ ID NO: 14617 - protein, 5 aa, synthetic construct
  source 1..5: note = Description of Artificial Sequence: Synthetic peptide; note = XENP018395 vhCDR1
NYWMN

SEQ ID NO: 14618 - protein, 19 aa, synthetic construct
  source 1..19: note = Description of Artificial Sequence: Synthetic peptide; note = XENP018395 vhCDR2
EIRLKSNNYATHYAEPVKG

SEQ ID NO: 14619 - protein, 11 aa, synthetic construct
  source 1..11: note = Description of Artificial Sequence: Synthetic peptide; note = XENP018395 vhCDR3
YYGNYGGYFDV

SEQ ID NO: 14620 - protein, 214 aa, synthetic construct
  source 1..214: note = Description of Artificial Sequence: Synthetic polypeptide; note = XENP018395 1G6_H1_L1.52_IgG1_PVA_/S267K Light Chain
SIVMTQSPATLSVSPGERATLSCRASQSVSNDVAWYQQKPGQSPQLLINYASHRYTGVPDRFTGSGYGTEFTLTISSLQSEDFAVYFCQQDYSSPRTFGGGTKVEIKRTVAAPSVFIFPPSDEQLKSGTASVVCLLNNFYPREAKVQWKVDNALQSGNSQESVTEQDSKDSTYSLSSTLTLSKADYEKHKVYACEVTHQGLSSPVTKSFNRGEC

SEQ ID NO: 14621 - protein, 107 aa, synthetic construct; identical to SEQ ID NO: 8962
  source 1..107: note = Description of Artificial Sequence: Synthetic polypeptide; note = VL of XENP018395

SEQ ID NO: 14622 - protein, 11 aa, synthetic construct
  source 1..11: note = Description of Artificial Sequence: Synthetic peptide; note = XENP018395 vlCDR1
RASQSVSNDVA

SEQ ID NO: 14623 - protein, 7 aa, synthetic construct
  source 1..7: note = Description of Artificial Sequence: Synthetic peptide; note = XENP018395 vlCDR2
YASHRYT

SEQ ID NO: 14624 - protein, 9 aa, synthetic construct
  source 1..9: note = Description of Artificial Sequence: Synthetic peptide; note = XENP018395 vlCDR3
QQDYSSPRT

SEQ ID NO: 14625 - protein, 451 aa, synthetic construct; identical to SEQ ID NO: 11545
  source 1..451: note = Description of Artificial Sequence: Synthetic polypeptide; note = XENP018396 1G6_H1_L1.53_IgG1_PVA_/S267K Heavy Chain

SEQ ID NO: 14626 - protein, 122 aa, synthetic construct; identical to SEQ ID NO: 6246
  source 1..122: note = Description of Artificial Sequence: Synthetic polypeptide; note = VH of XENP018396

SEQ ID NO: 14627 - protein, 5 aa, synthetic construct
  source 1..5: note = Description of Artificial Sequence: Synthetic peptide; note = XENP018396 vhCDR1
NYWMN

SEQ ID NO: 14628 - protein, 19 aa, synthetic construct
  source 1..19: note = Description of Artificial Sequence: Synthetic peptide; note = XENP018396 vhCDR2
EIRLKSNNYATHYAEPVKG

SEQ ID NO: 14629 - protein, 11 aa, synthetic construct
  source 1..11: note = Description of Artificial Sequence: Synthetic peptide; note = XENP018396 vhCDR3
YYGNYGGYFDV

SEQ ID NO: 14630 - protein, 214 aa, synthetic construct
  source 1..214: note = Description of Artificial Sequence: Synthetic polypeptide; note = XENP018396 1G6_H1_L1.53_IgG1_PVA_/S267K Light Chain
SIVMTQSPATLSVSPGERATLSCRASQSVSNDVAWYQQKPGQSPILLINYASHRYTGVPDRFTGSGYGTEFTLTISSLQSEDFAVYFCQQDYSSPRTFGGGTKVEIKRTVAAPSVFIFPPSDEQLKSGTASVVCLLNNFYPREAKVQWKVDNALQSGNSQESVTEQDSKDSTYSLSSTLTLSKADYEKHKVYACEVTHQGLSSPVTKSFNRGEC

SEQ ID NO: 14631 - protein, 107 aa, synthetic construct; identical to SEQ ID NO: 8971
  source 1..107: note = Description of Artificial Sequence: Synthetic polypeptide; note = VL of XENP018396

SEQ ID NO: 14632 - protein, 11 aa, synthetic construct
  source 1..11: note = Description of Artificial Sequence: Synthetic peptide; note = XENP018396 vlCDR1
RASQSVSNDVA

SEQ ID NO: 14633 - protein, 7 aa, synthetic construct
  source 1..7: note = Description of Artificial Sequence: Synthetic peptide; note = XENP018396 vlCDR2
YASHRYT

SEQ ID NO: 14634 - protein, 9 aa, synthetic construct
  source 1..9: note = Description of Artificial Sequence: Synthetic peptide; note = XENP018396 vlCDR3
QQDYSSPRT

SEQ ID NO: 14635 - protein, 451 aa, synthetic construct; identical to SEQ ID NO: 11545
  source 1..451: note = Description of Artificial Sequence: Synthetic polypeptide; note = XENP018401 1G6_H1_L1.54_IgG1_PVA_/S267K Heavy Chain

SEQ ID NO: 14636 - protein, 122 aa, synthetic construct; identical to SEQ ID NO: 6246
  source 1..122: note = Description of Artificial Sequence: Synthetic polypeptide; note = VH of XENP018401

SEQ ID NO: 14637 - protein, 5 aa, synthetic construct
  source 1..5: note = Description of Artificial Sequence: Synthetic peptide; note = XENP018401 vhCDR1
NYWMN

SEQ ID NO: 14638 - protein, 19 aa, synthetic construct
  source 1..19: note = Description of Artificial Sequence: Synthetic peptide; note = XENP018401 vhCDR2
EIRLKSNNYATHYAEPVKG

SEQ ID NO: 14639 - protein, 11 aa, synthetic construct
  source 1..11: note = Description of Artificial Sequence: Synthetic peptide; note = XENP018401 vhCDR3
YYGNYGGYFDV

SEQ ID NO: 14640 - protein, 214 aa, synthetic construct
  source 1..214: note = Description of Artificial Sequence: Synthetic polypeptide; note = XENP018401 1G6_H1_L1.54_IgG1_PVA_/S267K Light Chain
SIVMTQSPATLSVSPGERATLSCRASQSVSNDVAWYQQKPGQSPRLLIYYASHRYTGVPDRFTGSGYGTEFTLTISSLQSEDFAVYFCQQDYSSPRTFGGGTKVEIKRTVAAPSVFIFPPSDEQLKSGTASVVCLLNNFYPREAKVQWKVDNALQSGNSQESVTEQDSKDSTYSLSSTLTLSKADYEKHKVYACEVTHQGLSSPVTKSFNRGEC

SEQ ID NO: 14641 - protein, 107 aa, synthetic construct; identical to SEQ ID NO: 8980
  source 1..107: note = Description of Artificial Sequence: Synthetic polypeptide; note = VL of XENP018401

SEQ ID NO: 14642 - protein, 11 aa, synthetic construct
  source 1..11: note = Description of Artificial Sequence: Synthetic peptide; note = XENP018401 vlCDR1
RASQSVSNDVA

SEQ ID NO: 14643 - protein, 7 aa, synthetic construct
  source 1..7: note = Description of Artificial Sequence: Synthetic peptide; note = XENP018401 vlCDR2
YASHRYT

SEQ ID NO: 14644 - protein, 9 aa, synthetic construct
  source 1..9: note = Description of Artificial Sequence: Synthetic peptide; note = XENP018401 vlCDR3
QQDYSSPRT

SEQ ID NO: 14645 - protein, 451 aa, synthetic construct; identical to SEQ ID NO: 11545
  source 1..451: note = Description of Artificial Sequence: Synthetic polypeptide; note = XENP018402 1G6_H1_L1.55_IgG1_PVA_/S267K Heavy Chain

SEQ ID NO: 14646 - protein, 122 aa, synthetic construct; identical to SEQ ID NO: 6246
  source 1..122: note = Description of Artificial Sequence: Synthetic polypeptide; note = VH of XENP018402

SEQ ID NO: 14647 - protein, 5 aa, synthetic construct
  source 1..5: note = Description of Artificial Sequence: Synthetic peptide; note = XENP018402 vhCDR1
NYWMN

SEQ ID NO: 14648 - protein, 19 aa, synthetic construct
  source 1..19: note = Description of Artificial Sequence: Synthetic peptide; note = XENP018402 vhCDR2
EIRLKSNNYATHYAEPVKG

SEQ ID NO: 14649 - protein, 11 aa, synthetic construct
  source 1..11: note = Description of Artificial Sequence: Synthetic peptide; note = XENP018402 vhCDR3
YYGNYGGYFDV

SEQ ID NO: 14650 - protein, 214 aa, synthetic construct
  source 1..214: note = Description of Artificial Sequence: Synthetic polypeptide; note = XENP018402 1G6_H1_L1.55_IgG1_PVA_/S267K Light Chain
SIVMTQSPATLSVSPGERATLSCRASQSVSNDVAWYQQKPGQSPRLLINFASHRYTGVPDRFTGSGYGTEFTLTISSLQSEDFAVYFCQQDYSSPRTFGGGTKVEIKRTVAAPSVFIFPPSDEQLKSGTASVVCLLNNFYPREAKVQWKVDNALQSGNSQESVTEQDSKDSTYSLSSTLTLSKADYEKHKVYACEVTHQGLSSPVTKSFNRGEC

SEQ ID NO: 14651 - protein, 107 aa, synthetic construct; identical to SEQ ID NO: 8989
  source 1..107: note = Description of Artificial Sequence: Synthetic polypeptide; note = VL of XENP018402

SEQ ID NO: 14652 - protein, 11 aa, synthetic construct
  source 1..11: note = Description of Artificial Sequence: Synthetic peptide; note = XENP018402 vlCDR1
RASQSVSNDVA

SEQ ID NO: 14653 - protein, 7 aa, synthetic construct
  source 1..7: note = Description of Artificial Sequence: Synthetic peptide; note = XENP018402 vlCDR2
FASHRYT

SEQ ID NO: 14654 - protein, 9 aa, synthetic construct
  source 1..9: note = Description of Artificial Sequence: Synthetic peptide; note = XENP018402 vlCDR3
QQDYSSPRT

SEQ ID NO: 14655 - protein, 451 aa, synthetic construct; identical to SEQ ID NO: 11545
  source 1..451: note = Description of Artificial Sequence: Synthetic polypeptide; note = XENP018403 1G6_H1_L1.56_IgG1_PVA_/S267K Heavy Chain

SEQ ID NO: 14656 - protein, 122 aa, synthetic construct; identical to SEQ ID NO: 6246
  source 1..122: note = Description of Artificial Sequence: Synthetic polypeptide; note = VH of XENP018403

SEQ ID NO: 14657 - protein, 5 aa, synthetic construct
  source 1..5: note = Description of Artificial Sequence: Synthetic peptide; note = XENP018403 vhCDR1
NYWMN

SEQ ID NO: 14658 - protein, 19 aa, synthetic construct
  source 1..19: note = Description of Artificial Sequence: Synthetic peptide; note = XENP018403 vhCDR2
EIRLKSNNYATHYAEPVKG

SEQ ID NO: 14659 - protein, 11 aa, synthetic construct
  source 1..11: note = Description of Artificial Sequence: Synthetic peptide; note = XENP018403 vhCDR3
YYGNYGGYFDV

SEQ ID NO: 14660 - protein, 214 aa, synthetic construct
  source 1..214: note = Description of Artificial Sequence: Synthetic polypeptide; note = XENP018403 1G6_H1_L1.56_IgG1_PVA_/S267K Light Chain
SIVMTQSPATLSVSPGERATLSCRASQSVSNDVAWYQQKPGQSPRLLINHASHRYTGVPDRFTGSGYGTEFTLTISSLQSEDFAVYFCQQDYSSPRTFGGGTKVEIKRTVAAPSVFIFPPSDEQLKSGTASVVCLLNNFYPREAKVQWKVDNALQSGNSQESVTEQDSKDSTYSLSSTLTLSKADYEKHKVYACEVTHQGLSSPVTKSFNRGEC

SEQ ID NO: 14661 - protein, 107 aa, synthetic construct; identical to SEQ ID NO: 8998
  source 1..107: note = Description of Artificial Sequence: Synthetic polypeptide; note = VL of XENP018403

SEQ ID NO: 14662 - protein, 11 aa, synthetic construct
  source 1..11: note = Description of Artificial Sequence: Synthetic peptide; note = XENP018403 vlCDR1
RASQSVSNDVA

SEQ ID NO: 14663 - protein, 7 aa, synthetic construct
  source 1..7: note = Description of Artificial Sequence: Synthetic peptide; note = XENP018403 vlCDR2
HASHRYT

SEQ ID NO: 14664 - protein, 9 aa, synthetic construct
  source 1..9: note = Description of Artificial Sequence: Synthetic peptide; note = XENP018403 vlCDR3
QQDYSSPRT

SEQ ID NO: 14665 - protein, 451 aa, synthetic construct; identical to SEQ ID NO: 11545
  source 1..451: note = Description of Artificial Sequence: Synthetic polypeptide; note = XENP018404 1G6_H1_L1.57_IgG1_PVA_/S267K Heavy Chain

SEQ ID NO: 14666 - protein, 122 aa, synthetic construct; identical to SEQ ID NO: 6246
  source 1..122: note = Description of Artificial Sequence: Synthetic polypeptide; note = VH of XENP018404

SEQ ID NO: 14667 - protein, 5 aa, synthetic construct
  source 1..5: note = Description of Artificial Sequence: Synthetic peptide; note = XENP018404 vhCDR1
NYWMN

SEQ ID NO: 14668 - protein, 19 aa, synthetic construct
  source 1..19: note = Description of Artificial Sequence: Synthetic peptide; note = XENP018404 vhCDR2
EIRLKSNNYATHYAEPVKG

SEQ ID NO: 14669 - protein, 11 aa, synthetic construct
  source 1..11: note = Description of Artificial Sequence: Synthetic peptide; note = XENP018404 vhCDR3
YYGNYGGYFDV

SEQ ID NO: 14670 - protein, 214 aa, synthetic construct
  source 1..214: note = Description of Artificial Sequence: Synthetic polypeptide; note = XENP018404 1G6_H1_L1.57_IgG1_PVA_/S267K Light Chain
SIVMTQSPATLSVSPGERATLSCRASQSVSNDVAWYQQKPGQSPRLLINLASHRYTGVPDRFTGSGYGTEFTLTISSLQSEDFAVYFCQQDYSSPRTFGGGTKVEIKRTVAAPSVFIFPPSDEQLKSGTASVVCLLNNFYPREAKVQWKVDNALQSGNSQESVTEQDSKDSTYSLSSTLTLSKADYEKHKVYACEVTHQGLSSPVTKSFNRGEC

SEQ ID NO: 14671 - protein, 107 aa, synthetic construct; identical to SEQ ID NO: 9007
  source 1..107: note = Description of Artificial Sequence: Synthetic polypeptide; note = VL of XENP018404

SEQ ID NO: 14672 - protein, 11 aa, synthetic construct
  source 1..11: note = Description of Artificial Sequence: Synthetic peptide; note = XENP018404 vlCDR1
RASQSVSNDVA

SEQ ID NO: 14673 - protein, 7 aa, synthetic construct
  source 1..7: note = Description of Artificial Sequence: Synthetic peptide; note = XENP018404 vlCDR2
LASHRYT

SEQ ID NO: 14674 - protein, 9 aa, synthetic construct
  source 1..9: note = Description of Artificial Sequence: Synthetic peptide; note = XENP018404 vlCDR3
QQDYSSPRT

SEQ ID NO: 14675 - protein, 451 aa, synthetic construct; identical to SEQ ID NO: 11545
  source 1..451: note = Description of Artificial Sequence: Synthetic polypeptide; note = XENP018405 1G6_H1_L1.58_IgG1_PVA_/S267K Heavy Chain

SEQ ID NO: 14676 - protein, 122 aa, synthetic construct; identical to SEQ ID NO: 6246
  source 1..122: note = Description of Artificial Sequence: Synthetic polypeptide; note = VH of XENP018405

SEQ ID NO: 14677 - protein, 5 aa, synthetic construct
  source 1..5: note = Description of Artificial Sequence: Synthetic peptide; note = XENP018405 vhCDR1
NYWMN

SEQ ID NO: 14678 - protein, 19 aa, synthetic construct
  source 1..19: note = Description of Artificial Sequence: Synthetic peptide; note = XENP018405 vhCDR2
EIRLKSNNYATHYAEPVKG

SEQ ID NO: 14679 - protein, 11 aa, synthetic construct
  source 1..11: note = Description of Artificial Sequence: Synthetic peptide; note = XENP018405 vhCDR3
YYGNYGGYFDV

SEQ ID NO: 14680 - protein, 214 aa, synthetic construct
  source 1..214: note = Description of Artificial Sequence: Synthetic polypeptide; note = XENP018405 1G6_H1_L1.58_IgG1_PVA_/S267K Light Chain
SIVMTQSPATLSVSPGERATLSCRASQSVSNDVAWYQQKPGQSPRLLINWASHRYTGVPDRFTGSGYGTEFTLTISSLQSEDFAVYFCQQDYSSPRTFGGGTKVEIKRTVAAPSVFIFPPSDEQLKSGTASVVCLLNNFYPREAKVQWKVDNALQSGNSQESVTEQDSKDSTYSLSSTLTLSKADYEKHKVYACEVTHQGLSSPVTKSFNRGEC

SEQ ID NO: 14681 - protein, 107 aa, synthetic construct; identical to SEQ ID NO: 9016
  source 1..107: note = Description of Artificial Sequence: Synthetic polypeptide; note = VL of XENP018405

SEQ ID NO: 14682 - protein, 11 aa, synthetic construct
  source 1..11: note = Description of Artificial Sequence: Synthetic peptide; note = XENP018405 vlCDR1
RASQSVSNDVA

SEQ ID NO: 14683 - protein, 7 aa, synthetic construct
  source 1..7: note = Description of Artificial Sequence: Synthetic peptide; note = XENP018405 vlCDR2
WASHRYT

SEQ ID NO: 14684 - protein, 9 aa, synthetic construct
  source 1..9: note = Description of Artificial Sequence: Synthetic peptide; note = XENP018405 vlCDR3
QQDYSSPRT

SEQ ID NO: 14685 - protein, 451 aa, synthetic construct; identical to SEQ ID NO: 11545
  source 1..451: note = Description of Artificial Sequence: Synthetic polypeptide; note = XENP018406 1G6_H1_L1.59_IgG1_PVA_/S267K Heavy Chain

SEQ ID NO: 14686 - protein, 122 aa, synthetic construct; identical to SEQ ID NO: 6246
  source 1..122: note = Description of Artificial Sequence: Synthetic polypeptide; note = VH of XENP018406

SEQ ID NO: 14687 - protein, 5 aa, synthetic construct
  source 1..5: note = Description of Artificial Sequence: Synthetic peptide; note = XENP018406 vhCDR1
NYWMN

SEQ ID NO: 14688 - protein, 19 aa, synthetic construct
  source 1..19: note = Description of Artificial Sequence: Synthetic peptide; note = XENP018406 vhCDR2
EIRLKSNNYATHYAEPVKG

SEQ ID NO: 14689 - protein, 11 aa, synthetic construct
  source 1..11: note = Description of Artificial Sequence: Synthetic peptide; note = XENP018406 vhCDR3
YYGNYGGYFDV

SEQ ID NO: 14690 - protein, 214 aa, synthetic construct
  source 1..214: note = Description of Artificial Sequence: Synthetic polypeptide; note = XENP018406 1G6_H1_L1.59_IgG1_PVA_/S267K Light Chain
SIVMTQSPATLSVSPGERATLSCRASQSVSNDVAWYQQKPGQSPRLLINVASHRYTGVPDRFTGSGYGTEFTLTISSLQSEDFAVYFCQQDYSSPRTFGGGTKVEIKRTVAAPSVFIFPPSDEQLKSGTASVVCLLNNFYPREAKVQWKVDNALQSGNSQESVTEQDSKDSTYSLSSTLTLSKADYEKHKVYACEVTHQGLSSPVTKSFNRGEC

SEQ ID NO: 14691 - protein, 107 aa, synthetic construct; identical to SEQ ID NO: 9025
  source 1..107: note = Description of Artificial Sequence: Synthetic polypeptide; note = VL of XENP018406

SEQ ID NO: 14692 - protein, 11 aa, synthetic construct
  source 1..11: note = Description of Artificial Sequence: Synthetic peptide; note = XENP018406 vlCDR1
RASQSVSNDVA

SEQ ID NO: 14693 - protein, 7 aa, synthetic construct
  source 1..7: note = Description of Artificial Sequence: Synthetic peptide; note = XENP018406 vlCDR2
VASHRYT

SEQ ID NO: 14694 - protein, 9 aa, synthetic construct
  source 1..9: note = Description of Artificial Sequence: Synthetic peptide; note = XENP018406 vlCDR3
QQDYSSPRT

SEQ ID NO: 14695 - protein, 451 aa, synthetic construct; identical to SEQ ID NO: 11545
  source 1..451: note = Description of Artificial Sequence: Synthetic polypeptide; note = XENP018407 1G6_H1_L1.60_IgG1_PVA_/S267K Heavy Chain

SEQ ID NO: 14696 - protein, 122 aa, synthetic construct; identical to SEQ ID NO: 6246
  source 1..122: note = Description of Artificial Sequence: Synthetic polypeptide; note = VH of XENP018407

SEQ ID NO: 14697 - protein, 5 aa, synthetic construct
  source 1..5: note = Description of Artificial Sequence: Synthetic peptide; note = XENP018407 vhCDR1
NYWMN

SEQ ID NO: 14698 - protein, 19 aa, synthetic construct
  source 1..19: note = Description of Artificial Sequence: Synthetic peptide; note = XENP018407 vhCDR2
EIRLKSNNYATHYAEPVKG

SEQ ID NO: 14699 - protein, 11 aa, synthetic construct
  source 1..11: note = Description of Artificial Sequence: Synthetic peptide; note = XENP018407 vhCDR3
YYGNYGGYFDV

SEQ ID NO: 14700 - protein, 214 aa, synthetic construct
  source 1..214: note = Description of Artificial Sequence: Synthetic polypeptide; note = XENP018407 1G6_H1_L1.60_IgG1_PVA_/S267K Light Chain
SIVMTQSPATLSVSPGERATLSCRASQSVSNDVAWYQQKPGQSPRLLINAASHRYTGVPDRFTGSGYGTEFTLTISSLQSEDFAVYFCQQDYSSPRTFGGGTKVEIKRTVAAPSVFIFPPSDEQLKSGTASVVCLLNNFYPREAKVQWKVDNALQSGNSQESVTEQDSKDSTYSLSSTLTLSKADYEKHKVYACEVTHQGLSSPVTKSFNRGEC

SEQ ID NO: 14701 - protein, 107 aa, synthetic construct; identical to SEQ ID NO: 9034
  source 1..107: note = Description of Artificial Sequence: Synthetic polypeptide; note = VL of XENP018407

SEQ ID NO: 14702 - protein, 11 aa, synthetic construct
  source 1..11: note = Description of Artificial Sequence: Synthetic peptide; note = XENP018407 vlCDR1
RASQSVSNDVA

SEQ ID NO: 14703 - protein, 7 aa, synthetic construct
  source 1..7: note = Description of Artificial Sequence: Synthetic peptide; note = XENP018407 vlCDR2
AASHRYT

SEQ ID NO: 14704 - protein, 9 aa, synthetic construct
  source 1..9: note = Description of Artificial Sequence: Synthetic peptide; note = XENP018407 vlCDR3
QQDYSSPRT

SEQ ID NO: 14705 - protein, 451 aa, synthetic construct; identical to SEQ ID NO: 11545
  source 1..451: note = Description of Artificial Sequence: Synthetic polypeptide; note = XENP018408 1G6_H1_L1.61_IgG1_PVA_/S267K Heavy Chain

SEQ ID NO: 14706 - protein, 122 aa, synthetic construct; identical to SEQ ID NO: 6246
  source 1..122: note = Description of Artificial Sequence: Synthetic polypeptide; note = VH of XENP018408

SEQ ID NO: 14707 - protein, 5 aa, synthetic construct
  source 1..5: note = Description of Artificial Sequence: Synthetic peptide; note = XENP018408 vhCDR1
NYWMN

SEQ ID NO: 14708 - protein, 19 aa, synthetic construct
  source 1..19: note = Description of Artificial Sequence: Synthetic peptide; note = XENP018408 vhCDR2
EIRLKSNNYATHYAEPVKG

SEQ ID NO: 14709 - protein, 11 aa, synthetic construct
  source 1..11: note = Description of Artificial Sequence: Synthetic peptide; note = XENP018408 vhCDR3
YYGNYGGYFDV

SEQ ID NO: 14710 - protein, 214 aa, synthetic construct
  source 1..214: note = Description of Artificial Sequence: Synthetic polypeptide; note = XENP018408 1G6_H1_L1.61_IgG1_PVA_/S267K Light Chain
SIVMTQSPATLSVSPGERATLSCRASQSVSNDVAWYQQKPGQSPRLLINQASHRYTGVPDRFTGSGYGTEFTLTISSLQSEDFAVYFCQQDYSSPRTFGGGTKVEIKRTVAAPSVFIFPPSDEQLKSGTASVVCLLNNFYPREAKVQWKVDNALQSGNSQESVTEQDSKDSTYSLSSTLTLSKADYEKHKVYACEVTHQGLSSPVTKSFNRGEC

SEQ ID NO: 14711 - protein, 107 aa, synthetic construct; identical to SEQ ID NO: 9043
  source 1..107: note = Description of Artificial Sequence: Synthetic polypeptide; note = VL of XENP018408

SEQ ID NO: 14712 - protein, 11 aa, synthetic construct
  source 1..11: note = Description of Artificial Sequence: Synthetic peptide; note = XENP018408 vlCDR1
RASQSVSNDVA

SEQ ID NO: 14713 - protein, 7 aa, synthetic construct
  source 1..7: note = Description of Artificial Sequence: Synthetic peptide; note = XENP018408 vlCDR2
QASHRYT

SEQ ID NO: 14714 - protein, 9 aa, synthetic construct
  source 1..9: note = Description of Artificial Sequence: Synthetic peptide; note = XENP018408 vlCDR3
QQDYSSPRT

SEQ ID NO: 14715 - protein, 451 aa, synthetic construct; identical to SEQ ID NO: 11545
  source 1..451: note = Description of Artificial Sequence: Synthetic polypeptide; note = XENP018409 1G6_H1_L1.62_IgG1_PVA_/S267K Heavy Chain

SEQ ID NO: 14716 - protein, 122 aa, synthetic construct; identical to SEQ ID NO: 6246
  source 1..122: note = Description of Artificial Sequence: Synthetic polypeptide; note = VH of XENP018409

SEQ ID NO: 14717 - protein, 5 aa, synthetic construct
  source 1..5: note = Description of Artificial Sequence: Synthetic peptide; note = XENP018409 vhCDR1
NYWMN

SEQ ID NO: 14718 - protein, 19 aa, synthetic construct
  source 1..19: note = Description of Artificial Sequence: Synthetic peptide; note = XENP018409 vhCDR2
EIRLKSNNYATHYAEPVKG

SEQ ID NO: 14719 - protein, 11 aa, synthetic construct
  source 1..11: note = Description of Artificial Sequence: Synthetic peptide; note = XENP018409 vhCDR3
YYGNYGGYFDV

SEQ ID NO: 14720 - protein, 214 aa, synthetic construct
  source 1..214: note = Description of Artificial Sequence: Synthetic polypeptide; note = XENP018409 1G6_H1_L1.62_IgG1_PVA_/S267K Light Chain
SIVMTQSPATLSVSPGERATLSCRASQSVSNDVAWYQQKPGQSPRLLINDASHRYTGVPDRFTGSGYGTEFTLTISSLQSEDFAVYFCQQDYSSPRTFGGGTKVEIKRTVAAPSVFIFPPSDEQLKSGTASVVCLLNNFYPREAKVQWKVDNALQSGNSQESVTEQDSKDSTYSLSSTLTLSKADYEKHKVYACEVTHQGLSSPVTKSFNRGEC

SEQ ID NO: 14721 - protein, 107 aa, synthetic construct; identical to SEQ ID NO: 9052
  source 1..107: note = Description of Artificial Sequence: Synthetic polypeptide; note = VL of XENP018409

SEQ ID NO: 14722 - protein, 11 aa, synthetic construct
  source 1..11: note = Description of Artificial Sequence: Synthetic peptide; note = XENP018409 vlCDR1
RASQSVSNDVA

SEQ ID NO: 14723 - protein, 7 aa, synthetic construct
  source 1..7: note = Description of Artificial Sequence: Synthetic peptide; note = XENP018409 vlCDR2
DASHRYT

SEQ ID NO: 14724 - protein, 9 aa, synthetic construct
  source 1..9: note = Description of Artificial Sequence: Synthetic peptide; note = XENP018409 vlCDR3
QQDYSSPRT

SEQ ID NO: 14725 - protein, 451 aa, synthetic construct; identical to SEQ ID NO: 11545
  source 1..451: note = Description of Artificial Sequence: Synthetic polypeptide; note = XENP018410 1G6_H1_L1.63_IgG1_PVA_/S267K Heavy Chain

SEQ ID NO: 14726 - protein, 122 aa, synthetic construct; identical to SEQ ID NO: 6246
  source 1..122: note = Description of Artificial Sequence: Synthetic polypeptide; note = VH of XENP018410

SEQ ID NO: 14727 - protein, 5 aa, synthetic construct
  source 1..5: note = Description of Artificial Sequence: Synthetic peptide; note = XENP018410 vhCDR1
NYWMN

SEQ ID NO: 14728 - protein, 19 aa, synthetic construct
  source 1..19: note = Description of Artificial Sequence: Synthetic peptide; note = XENP018410 vhCDR2
EIRLKSNNYATHYAEPVKG

SEQ ID NO: 14729 - protein, 11 aa, synthetic construct
  source 1..11: note = Description of Artificial Sequence: Synthetic peptide; note = XENP018410 vhCDR3
YYGNYGGYFDV

SEQ ID NO: 14730 - protein, 214 aa, synthetic construct
  source 1..214: note = Description of Artificial Sequence: Synthetic polypeptide; note = XENP018410 1G6_H1_L1.63_IgG1_PVA_/S267K Light Chain
SIVMTQSPATLSVSPGERATLSCRASQSVSNDVAWYQQKPGQSPRLLINKASHRYTGVPDRFTGSGYGTEFTLTISSLQSEDFAVYFCQQDYSSPRTFGGGTKVEIKRTVAAPSVFIFPPSDEQLKSGTASVVCLLNNFYPREAKVQWKVDNALQSGNSQESVTEQDSKDSTYSLSSTLTLSKADYEKHKVYACEVTHQGLSSPVTKSFNRGEC

SEQ ID NO: 14731 - protein, 107 aa, synthetic construct; identical to SEQ ID NO: 9061
  source 1..107: note = Description of Artificial Sequence: Synthetic polypeptide; note = VL of XENP018410

SEQ ID NO: 14732 - protein, 11 aa, synthetic construct
  source 1..11: note = Description of Artificial Sequence: Synthetic peptide; note = XENP018410 vlCDR1
RASQSVSNDVA

SEQ ID NO: 14733 - protein, 7 aa, synthetic construct
  source 1..7: note = Description of Artificial Sequence: Synthetic peptide; note = XENP018410 vlCDR2
KASHRYT

SEQ ID NO: 14734 - protein, 9 aa, synthetic construct
  source 1..9: note = Description of Artificial Sequence: Synthetic peptide; note = XENP018410 vlCDR3
QQDYSSPRT

SEQ ID NO: 14735 - protein, 451 aa, synthetic construct; identical to SEQ ID NO: 11545
  source 1..451: note = Description of Artificial Sequence: Synthetic polypeptide; note = XENP018411 1G6_H1_L1.64_IgG1_PVA_/S267K Heavy Chain

SEQ ID NO: 14736 - protein, 122 aa, synthetic construct; identical to SEQ ID NO: 6246
  source 1..122: note = Description of Artificial Sequence: Synthetic polypeptide; note = VH of XENP018411

SEQ ID NO: 14737 - protein, 5 aa, synthetic construct
  source 1..5: note = Description of Artificial Sequence: Synthetic peptide; note = XENP018411 vhCDR1
NYWMN

SEQ ID NO: 14738 - protein, 19 aa, synthetic construct
  source 1..19: note = Description of Artificial Sequence: Synthetic peptide; note = XENP018411 vhCDR2
EIRLKSNNYATHYAEPVKG

SEQ ID NO: 14739 - protein, 11 aa, synthetic construct
  source 1..11: note = Description of Artificial Sequence: Synthetic peptide; note = XENP018411 vhCDR3
YYGNYGGYFDV

SEQ ID NO: 14740 - protein, 214 aa, synthetic construct
  source 1..214: note = Description of Artificial Sequence: Synthetic polypeptide; note = XENP018411 1G6_H1_L1.64_IgG1_PVA_/S267K Light Chain
SIVMTQSPATLSVSPGERATLSCRASQSVSNDVAWYQQKPGQSPRLLINYASYRYTGVPDRFTGSGYGTEFTLTISSLQSEDFAVYFCQQDYSSPRTFGGGTKVEIKRTVAAPSVFIFPPSDEQLKSGTASVVCLLNNFYPREAKVQWKVDNALQSGNSQESVTEQDSKDSTYSLSSTLTLSKADYEKHKVYACEVTHQGLSSPVTKSFNRGEC

SEQ ID NO: 14741 - protein, 107 aa, synthetic construct; identical to SEQ ID NO: 9070
  source 1..107: note = Description of Artificial Sequence: Synthetic polypeptide; note = VL of XENP018411

SEQ ID NO: 14742 - protein, 11 aa, synthetic construct
  source 1..11: note = Description of Artificial Sequence: Synthetic peptide; note = XENP018411 vlCDR1
RASQSVSNDVA

SEQ ID NO: 14743 - protein, 7 aa, synthetic construct
  source 1..7: note = Description of Artificial Sequence: Synthetic peptide; note = XENP018411 vlCDR2
YASYRYT

SEQ ID NO: 14744 - protein, 9 aa, synthetic construct
  source 1..9: note = Description of Artificial Sequence: Synthetic peptide; note = XENP018411 vlCDR3
QQDYSSPRT

SEQ ID NO: 14745 - protein, 451 aa, synthetic construct; identical to SEQ ID NO: 11545
  source 1..451: note = Description of Artificial Sequence: Synthetic polypeptide; note = XENP018412 1G6_H1_L1.65_IgG1_PVA_/S267K Heavy Chain

SEQ ID NO: 14746 - protein, 122 aa, synthetic construct; identical to SEQ ID NO: 6246
  source 1..122: note = Description of Artificial Sequence: Synthetic polypeptide; note = VH of XENP018412

SEQ ID NO: 14747 - protein, 5 aa, synthetic construct
  source 1..5: note = Description of Artificial Sequence: Synthetic peptide; note = XENP018412 vhCDR1
NYWMN

SEQ ID NO: 14748 - protein, 19 aa, synthetic construct
  source 1..19: note = Description of Artificial Sequence: Synthetic peptide; note = XENP018412 vhCDR2
EIRLKSNNYATHYAEPVKG

SEQ ID NO: 14749 - protein, 11 aa, synthetic construct
  source 1..11: note = Description of Artificial Sequence: Synthetic peptide; note = XENP018412 vhCDR3
YYGNYGGYFDV

SEQ ID NO: 14750 - protein, 214 aa, synthetic construct
  source 1..214: note = Description of Artificial Sequence: Synthetic polypeptide; note = XENP018412 1G6_H1_L1.65_IgG1_PVA_/S267K Light Chain
SIVMTQSPATLSVSPGERATLSCRASQSVSNDVAWYQQKPGQSPRLLINYASQRYTGVPDRFTGSGYGTEFTLTISSLQSEDFAVYFCQQDYSSPRTFGGGTKVEIKRTVAAPSVFIFPPSDEQLKSGTASVVCLLNNFYPREAKVQWKVDNALQSGNSQESVTEQDSKDSTYSLSSTLTLSKADYEKHKVYACEVTHQGLSSPVTKSFNRGEC

SEQ ID NO: 14751 - protein, 107 aa, synthetic construct; identical to SEQ ID NO: 9079
  source 1..107: note = Description of Artificial Sequence: Synthetic polypeptide; note = VL of XENP018412

SEQ ID NO: 14752 - protein, 11 aa, synthetic construct
  source 1..11: note = Description of Artificial Sequence: Synthetic peptide; note = XENP018412 vlCDR1
RASQSVSNDVA

SEQ ID NO: 14753 - protein, 7 aa, synthetic construct
  source 1..7: note = Description of Artificial Sequence: Synthetic peptide; note = XENP018412 vlCDR2
YASQRYT

SEQ ID NO: 14754 - protein, 9 aa, synthetic construct
  source 1..9: note = Description of Artificial Sequence: Synthetic peptide; note = XENP018412 vlCDR3
QQDYSSPRT

SEQ ID NO: 14755 - protein, 451 aa, synthetic construct; identical to SEQ ID NO: 11545
  source 1..451: note = Description of Artificial Sequence: Synthetic polypeptide; note = XENP018413 1G6_H1_L1.66_IgG1_PVA_/S267K Heavy Chain

SEQ ID NO: 14756 - protein, 122 aa, synthetic construct; identical to SEQ ID NO: 6246
  source 1..122: note = Description of Artificial Sequence: Synthetic polypeptide; note = VH of XENP018413

SEQ ID NO: 14757 - protein, 5 aa, synthetic construct
  source 1..5: note = Description of Artificial Sequence: Synthetic peptide; note = XENP018413 vhCDR1
NYWMN

SEQ ID NO: 14758 - protein, 19 aa, synthetic construct
  source 1..19: note = Description of Artificial Sequence: Synthetic peptide; note = XENP018413 vhCDR2
EIRLKSNNYATHYAEPVKG

SEQ ID NO: 14759 - protein, 11 aa, synthetic construct
  source 1..11: note = Description of Artificial Sequence: Synthetic peptide; note = XENP018413 vhCDR3
YYGNYGGYFDV

SEQ ID NO: 14760 - protein, 214 aa, synthetic construct
  source 1..214: note = Description of Artificial Sequence: Synthetic polypeptide; note = XENP018413 1G6_H1_L1.66_IgG1_PVA_/S267K Light Chain
SIVMTQSPATLSVSPGERATLSCRASQSVSNDVAWYQQKPGQSPRLLINYASDRYTGVPDRFTGSGYGTEFTLTISSLQSEDFAVYFCQQDYSSPRTFGGGTKVEIKRTVAAPSVFIFPPSDEQLKSGTASVVCLLNNFYPREAKVQWKVDNALQSGNSQESVTEQDSKDSTYSLSSTLTLSKADYEKHKVYACEVTHQGLSSPVTKSFNRGEC

SEQ ID NO: 14761 - protein, 107 aa, synthetic construct; identical to SEQ ID NO: 9088
  source 1..107: note = Description of Artificial Sequence: Synthetic polypeptide; note = VL of XENP018413

SEQ ID NO: 14762 - protein, 11 aa, synthetic construct
  source 1..11: note = Description of Artificial Sequence: Synthetic peptide; note = XENP018413 vlCDR1
RASQSVSNDVA

SEQ ID NO: 14763 - protein, 7 aa, synthetic construct
  source 1..7: note = Description of Artificial Sequence: Synthetic peptide; note = XENP018413 vlCDR2
YASDRYT

SEQ ID NO: 14764 - protein, 9 aa, synthetic construct
  source 1..9: note = Description of Artificial Sequence: Synthetic peptide; note = XENP018413 vlCDR3
QQDYSSPRT

SEQ ID NO: 14765 - protein, 451 aa, synthetic construct; identical to SEQ ID NO: 11545
  source 1..451: note = Description of Artificial Sequence: Synthetic polypeptide; note = XENP018414 1G6_H1_L1.67_IgG1_PVA_/S267K Heavy Chain

SEQ ID NO: 14766 - protein, 122 aa, synthetic construct; identical to SEQ ID NO: 6246
  source 1..122: note = Description of Artificial Sequence: Synthetic polypeptide; note = VH of XENP018414

SEQ ID NO: 14767 - protein, 5 aa, synthetic construct
  source 1..5: note = Description of Artificial Sequence: Synthetic peptide; note = XENP018414 vhCDR1
NYWMN

SEQ ID NO: 14768 - protein, 19 aa, synthetic construct
  source 1..19: note = Description of Artificial Sequence: Synthetic peptide; note = XENP018414 vhCDR2
EIRLKSNNYATHYAEPVKG

SEQ ID NO: 14769 - protein, 11 aa, synthetic construct
  source 1..11: note = Description of Artificial Sequence: Synthetic peptide; note = XENP018414 vhCDR3
YYGNYGGYFDV

SEQ ID NO: 14770 - protein, 214 aa, synthetic construct
  source 1..214: note = Description of Artificial Sequence: Synthetic polypeptide; note = XENP018414 1G6_H1_L1.67_IgG1_PVA_/S267K Light Chain
SIVMTQSPATLSVSPGERATLSCRASQSVSNDVAWYQQKPGQSPRLLINYASWRYTGVPDRFTGSGYGTEFTLTISSLQSEDFAVYFCQQDYSSPRTFGGGTKVEIKRTVAAPSVFIFPPSDEQLKSGTASVVCLLNNFYPREAKVQWKVDNALQSGNSQESVTEQDSKDSTYSLSSTLTLSKADYEKHKVYACEVTHQGLSSPVTKSFNRGEC

SEQ ID NO: 14771 - protein, 107 aa, synthetic construct; identical to SEQ ID NO: 9097
  source 1..107: note = Description of Artificial Sequence: Synthetic polypeptide; note = VL of XENP018414

SEQ ID NO: 14772 - protein, 11 aa, synthetic construct
  source 1..11: note = Description of Artificial Sequence: Synthetic peptide; note = XENP018414 vlCDR1
RASQSVSNDVA

SEQ ID NO: 14773 - protein, 7 aa, synthetic construct
  source 1..7: note = Description of Artificial Sequence: Synthetic peptide; note = XENP018414 vlCDR2
YASWRYT

SEQ ID NO: 14774 - protein, 9 aa, synthetic construct
  source 1..9: note = Description of Artificial Sequence: Synthetic peptide; note = XENP018414 vlCDR3
QQDYSSPRT

SEQ ID NO: 14775 - protein, 451 aa, synthetic construct; identical to SEQ ID NO: 11545
  source 1..451: note = Description of Artificial Sequence: Synthetic polypeptide; note = XENP018415 1G6_H1_L1.68_IgG1_PVA_/S267K Heavy Chain

SEQ ID NO: 14776 - protein, 122 aa, synthetic construct; identical to SEQ ID NO: 6246
  source 1..122: note = Description of Artificial Sequence: Synthetic polypeptide; note = VH of XENP018415

SEQ ID NO: 14777 - protein, 5 aa, synthetic construct
  source 1..5: note = Description of Artificial Sequence: Synthetic peptide; note = XENP018415 vhCDR1
NYWMN

SEQ ID NO: 14778 - protein, 19 aa, synthetic construct
  source 1..19: note = Description of Artificial Sequence: Synthetic peptide; note = XENP018415 vhCDR2
EIRLKSNNYATHYAEPVKG

SEQ ID NO: 14779 - protein, 11 aa, synthetic construct
  source 1..11: note = Description of Artificial Sequence: Synthetic peptide; note = XENP018415 vhCDR3
YYGNYGGYFDV

SEQ ID NO: 14780 - protein, 214 aa, synthetic construct
  source 1..214: note = Description of Artificial Sequence: Synthetic polypeptide; note = XENP018415 1G6_H1_L1.68_IgG1_PVA_/S267K Light Chain
SIVMTQSPATLSVSPGERATLSCRASQSVSNDVAWYQQKPGQSPRLLINYASARYTGVPDRFTGSGYGTEFTLTISSLQSEDFAVYFCQQDYSSPRTFGGGTKVEIKRTVAAPSVFIFPPSDEQLKSGTASVVCLLNNFYPREAKVQWKVDNALQSGNSQESVTEQDSKDSTYSLSSTLTLSKADYEKHKVYACEVTHQGLSSPVTKSFNRGEC

SEQ ID NO: 14781 - protein, 107 aa, synthetic construct; identical to SEQ ID NO: 9106
  source 1..107: note = Description of Artificial Sequence: Synthetic polypeptide; note = VL of XENP018415

SEQ ID NO: 14782 - protein, 11 aa, synthetic construct
  source 1..11: note = Description of Artificial Sequence: Synthetic peptide; note = XENP018415 vlCDR1
RASQSVSNDVA

SEQ ID NO: 14783 - protein, 7 aa, synthetic construct
  source 1..7: note = Description of Artificial Sequence: Synthetic peptide; note = XENP018415 vlCDR2
YASARYT

SEQ ID NO: 14784 - protein, 9 aa, synthetic construct
  source 1..9: note = Description of Artificial Sequence: Synthetic peptide; note = XENP018415 vlCDR3
QQDYSSPRT

SEQ ID NO: 14785 - protein, 451 aa, synthetic construct; identical to SEQ ID NO: 11545
  source 1..451: note = Description of Artificial Sequence: Synthetic polypeptide; note = XENP018416 1G6_H1_L1.69_IgG1_PVA_/S267K Heavy Chain

SEQ ID NO: 14786 - protein, 122 aa, synthetic construct; identical to SEQ ID NO: 6246
  source 1..122: note = Description of Artificial Sequence: Synthetic polypeptide; note = VH of XENP018416

SEQ ID NO: 14787 - protein, 5 aa, synthetic construct
  source 1..5: note = Description of Artificial Sequence: Synthetic peptide; note = XENP018416 vhCDR1
NYWMN

SEQ ID NO: 14788 - protein, 19 aa, synthetic construct
  source 1..19: note = Description of Artificial Sequence: Synthetic peptide; note = XENP018416 vhCDR2
EIRLKSNNYATHYAEPVKG

SEQ ID NO: 14789 - protein, 11 aa, synthetic construct
  source 1..11: note = Description of Artificial Sequence: Synthetic peptide; note = XENP018416 vhCDR3
YYGNYGGYFDV

SEQ ID NO: 14790 - protein, 214 aa, synthetic construct
  source 1..214: note = Description of Artificial Sequence: Synthetic polypeptide; note = XENP018416 1G6_H1_L1.69_IgG1_PVA_/S267K Light Chain
SIVMTQSPATLSVSPGERATLSCRASQSVSNDVAWYQQKPGQSPRLLINYASTRYTGVPDRFTGSGYGTEFTLTISSLQSEDFAVYFCQQDYSSPRTFGGGTKVEIKRTVAAPSVFIFPPSDEQLKSGTASVVCLLNNFYPREAKVQWKVDNALQSGNSQESVTEQDSKDSTYSLSSTLTLSKADYEKHKVYACEVTHQGLSSPVTKSFNRGEC

SEQ ID NO: 14791 - protein, 107 aa, synthetic construct; identical to SEQ ID NO: 9115
  source 1..107: note = Description of Artificial Sequence: Synthetic polypeptide; note = VL of XENP018416

SEQ ID NO: 14792 - protein, 11 aa, synthetic construct
  source 1..11: note = Description of Artificial Sequence: Synthetic peptide; note = XENP018416 vlCDR1
RASQSVSNDVA

SEQ ID NO: 14793 - protein, 7 aa, synthetic construct
  source 1..7: note = Description of Artificial Sequence: Synthetic peptide; note = XENP018416 vlCDR2
YASTRYT

SEQ ID NO: 14794 - protein, 9 aa, synthetic construct
  source 1..9: note = Description of Artificial Sequence: Synthetic peptide; note = XENP018416 vlCDR3
QQDYSSPRT

SEQ ID NO: 14795 - protein, 451 aa, synthetic construct; identical to SEQ ID NO: 11545
  source 1..451: note = Description of Artificial Sequence: Synthetic polypeptide; note = XENP018417 1G6_H1_L1.70_IgG1_PVA_/S267K Heavy Chain

SEQ ID NO: 14796 - protein, 122 aa, synthetic construct; identical to SEQ ID NO: 6246
  source 1..122: note = Description of Artificial Sequence: Synthetic polypeptide; note = VH of XENP018417

SEQ ID NO: 14797 - protein, 5 aa, synthetic construct
  source 1..5: note = Description of Artificial Sequence: Synthetic peptide; note = XENP018417 vhCDR1
NYWMN

SEQ ID NO: 14798 - protein, 19 aa, synthetic construct
  source 1..19: note = Description of Artificial Sequence: Synthetic peptide; note = XENP018417 vhCDR2
EIRLKSNNYATHYAEPVKG

SEQ ID NO: 14799 - protein, 11 aa, synthetic construct
  source 1..11: note = Description of Artificial Sequence: Synthetic peptide; note = XENP018417 vhCDR3
YYGNYGGYFDV

SEQ ID NO: 14800 - protein, 214 aa, synthetic construct
  source 1..214: note = Description of Artificial Sequence: Synthetic polypeptide; note = XENP018417 1G6_H1_L1.70_IgG1_PVA_/S267K Light Chain
SIVMTQSPATLSVSPGERATLSCRASQSVSNDVAWYQQKPGQSPRLLINYASKRYTGVPDRFTGSGYGTEFTLTISSLQSEDFAVYFCQQDYSSPRTFGGGTKVEIKRTVAAPSVFIFPPSDEQLKSGTASVVCLLNNFYPREAKVQWKVDNALQSGNSQESVTEQDSKDSTYSLSSTLTLSKADYEKHKVYACEVTHQGLSSPVTKSFNRGEC

SEQ ID NO: 14801 - protein, 107 aa, synthetic construct; identical to SEQ ID NO: 9124
  source 1..107: note = Description of Artificial Sequence: Synthetic polypeptide; note = VL of XENP018417

SEQ ID NO: 14802 - protein, 11 aa, synthetic construct
  source 1..11: note = Description of Artificial Sequence: Synthetic peptide; note = XENP018417 vlCDR1
RASQSVSNDVA

SEQ ID NO: 14803 - protein, 7 aa, synthetic construct
  source 1..7: note = Description of Artificial Sequence: Synthetic peptide; note = XENP018417 vlCDR2
YASKRYT

SEQ ID NO: 14804 - protein, 9 aa, synthetic construct
  source 1..9: note = Description of Artificial Sequence: Synthetic peptide; note = XENP018417 vlCDR3
QQDYSSPRT

SEQ ID NO: 14805 - protein, 451 aa, synthetic construct; identical to SEQ ID NO: 11545
  source 1..451: note = Description of Artificial Sequence: Synthetic polypeptide; note = XENP018418 1G6_H1_L1.71_IgG1_PVA_/S267K Heavy Chain

SEQ ID NO: 14806 - protein, 122 aa, synthetic construct; identical to SEQ ID NO: 6246
  source 1..122: note = Description of Artificial Sequence: Synthetic polypeptide; note = VH of XENP018418

SEQ ID NO: 14807 - protein, 5 aa, synthetic construct
  source 1..5: note = Description of Artificial Sequence: Synthetic peptide; note = XENP018418 vhCDR1
NYWMN

SEQ ID NO: 14808 - protein, 19 aa, synthetic construct
  source 1..19: note = Description of Artificial Sequence: Synthetic peptide; note = XENP018418 vhCDR2
EIRLKSNNYATHYAEPVKG

SEQ ID NO: 14809 - protein, 11 aa, synthetic construct
  source 1..11: note = Description of Artificial Sequence: Synthetic peptide; note = XENP018418 vhCDR3
YYGNYGGYFDV

SEQ ID NO: 14810 - protein, 214 aa, synthetic construct
  source 1..214: note = Description of Artificial Sequence: Synthetic polypeptide; note = XENP018418 1G6_H1_L1.71_IgG1_PVA_/S267K Light Chain
SIVMTQSPATLSVSPGERATLSCRASQSVSNDVAWYQQKPGQSPRLLINYASGRYTGVPDRFTGSGYGTEFTLTISSLQSEDFAVYFCQQDYSSPRTFGGGTKVEIKRTVAAPSVFIFPPSDEQLKSGTASVVCLLNNFYPREAKVQWKVDNALQSGNSQESVTEQDSKDSTYSLSSTLTLSKADYEKHKVYACEVTHQGLSSPVTKSFNRGEC

SEQ ID NO: 14811 - protein, 107 aa, synthetic construct; identical to SEQ ID NO: 9133
  source 1..107: note = Description of Artificial Sequence: Synthetic polypeptide; note = VL of XENP018418

SEQ ID NO: 14812 - protein, 11 aa, synthetic construct
  source 1..11: note = Description of Artificial Sequence: Synthetic peptide; note = XENP018418 vlCDR1
RASQSVSNDVA

SEQ ID NO: 14813 - protein, 7 aa, synthetic construct
  source 1..7: note = Description of Artificial Sequence: Synthetic peptide; note = XENP018418 vlCDR2
YASGRYT

SEQ ID NO: 14814 - protein, 9 aa, synthetic construct
  source 1..9: note = Description of Artificial Sequence: Synthetic peptide; note = XENP018418 vlCDR3
QQDYSSPRT

SEQ ID NO: 14815 - protein, 451 aa, synthetic construct; identical to SEQ ID NO: 11545
  source 1..451: note = Description of Artificial Sequence: Synthetic polypeptide; note = XENP018419 1G6_H1_L1.72_IgG1_PVA_/S267K Heavy Chain

SEQ ID NO: 14816 - protein, 122 aa, synthetic construct; identical to SEQ ID NO: 6246
  source 1..122: note = Description of Artificial Sequence: Synthetic polypeptide; note = VH of XENP018419

SEQ ID NO: 14817 - protein, 5 aa, synthetic construct
  source 1..5: note = Description of Artificial Sequence: Synthetic peptide; note = XENP018419 vhCDR1
NYWMN

SEQ ID NO: 14818 - protein, 19 aa, synthetic construct
  source 1..19: note = Description of Artificial Sequence: Synthetic peptide; note = XENP018419 vhCDR2
EIRLKSNNYATHYAEPVKG

SEQ ID NO: 14819 - protein, 11 aa, synthetic construct
  source 1..11: note = Description of Artificial Sequence: Synthetic peptide; note = XENP018419 vhCDR3
YYGNYGGYFDV

SEQ ID NO: 14820 - protein, 214 aa, synthetic construct
  source 1..214: note = Description of Artificial Sequence: Synthetic polypeptide; note = XENP018419 1G6_H1_L1.72_IgG1_PVA_/S267K Light Chain
SIVMTQSPATLSVSPGERATLSCRASQSVSNDVAWYQQKPGQSPRLLINYASLRYTGVPDRFTGSGYGTEFTLTISSLQSEDFAVYFCQQDYSSPRTFGGGTKVEIKRTVAAPSVFIFPPSDEQLKSGTASVVCLLNNFYPREAKVQWKVDNALQSGNSQESVTEQDSKDSTYSLSSTLTLSKADYEKHKVYACEVTHQGLSSPVTKSFNRGEC

SEQ ID NO: 14821 - protein, 107 aa, synthetic construct; identical to SEQ ID NO: 9142
  source 1..107: note = Description of Artificial Sequence: Synthetic polypeptide; note = VL of XENP018419

SEQ ID NO: 14822 - protein, 11 aa, synthetic construct
  source 1..11: note = Description of Artificial Sequence: Synthetic peptide; note = XENP018419 vlCDR1
RASQSVSNDVA

SEQ ID NO: 14823 - protein, 7 aa, synthetic construct
  source 1..7: note = Description of Artificial Sequence: Synthetic peptide; note = XENP018419 vlCDR2
YASLRYT

SEQ ID NO: 14824 - protein, 9 aa, synthetic construct
  source 1..9: note = Description of Artificial Sequence: Synthetic peptide; note = XENP018419 vlCDR3
QQDYSSPRT

SEQ ID NO: 14825 - protein, 451 aa, synthetic construct; identical to SEQ ID NO: 11545
  source 1..451: note = Description of Artificial Sequence: Synthetic polypeptide; note = XENP018420 1G6_H1_L1.73_IgG1_PVA_/S267K Heavy Chain

SEQ ID NO: 14826 - protein, 122 aa, synthetic construct; identical to SEQ ID NO: 6246
  source 1..122: note = Description of Artificial Sequence: Synthetic polypeptide; note = VH of XENP018420

SEQ ID NO: 14827 - protein, 5 aa, synthetic construct
  source 1..5: note = Description of Artificial Sequence: Synthetic peptide; note = XENP018420 vhCDR1
NYWMN

SEQ ID NO: 14828 - protein, 19 aa, synthetic construct
  source 1..19: note = Description of Artificial Sequence: Synthetic peptide; note = XENP018420 vhCDR2
EIRLKSNNYATHYAEPVKG

SEQ ID NO: 14829 - protein, 11 aa, synthetic construct
  source 1..11: note = Description of Artificial Sequence: Synthetic peptide; note = XENP018420 vhCDR3
YYGNYGGYFDV

SEQ ID NO: 14830 - protein, 214 aa, synthetic construct
  source 1..214: note = Description of Artificial Sequence: Synthetic polypeptide; note = XENP018420 1G6_H1_L1.73_IgG1_PVA_/S267K Light Chain
SIVMTQSPATLSVSPGERATLSCRASQSVSNDVAWYQQKPGQSPRLLINYASHLYTGVPDRFTGSGYGTEFTLTISSLQSEDFAVYFCQQDYSSPRTFGGGTKVEIKRTVAAPSVFIFPPSDEQLKSGTASVVCLLNNFYPREAKVQWKVDNALQSGNSQESVTEQDSKDSTYSLSSTLTLSKADYEKHKVYACEVTHQGLSSPVTKSFNRGEC

SEQ ID NO: 14831 - protein, 107 aa, synthetic construct; identical to SEQ ID NO: 9151
  source 1..107: note = Description of Artificial Sequence: Synthetic polypeptide; note = VL of XENP018420

SEQ ID NO: 14832 - protein, 11 aa, synthetic construct
  source 1..11: note = Description of Artificial Sequence: Synthetic peptide; note = XENP018420 vlCDR1
RASQSVSNDVA

SEQ ID NO: 14833 - protein, 7 aa, synthetic construct
  source 1..7: note = Description of Artificial Sequence: Synthetic peptide; note = XENP018420 vlCDR2
YASHLYT

SEQ ID NO: 14834 - protein, 9 aa, synthetic construct
  source 1..9: note = Description of Artificial Sequence: Synthetic peptide; note = XENP018420 vlCDR3
QQDYSSPRT

SEQ ID NO: 14835 - protein, 451 aa, synthetic construct; identical to SEQ ID NO: 11545
  source 1..451: note = Description of Artificial Sequence: Synthetic polypeptide; note = XENP018421 1G6_H1_L1.74_IgG1_PVA_/S267K Heavy Chain

SEQ ID NO: 14836 - protein, 122 aa, synthetic construct; identical to SEQ ID NO: 6246
  source 1..122: note = Description of Artificial Sequence: Synthetic polypeptide; note = VH of XENP018421

SEQ ID NO: 14837 - protein, 5 aa, synthetic construct
  source 1..5: note = Description of Artificial Sequence: Synthetic peptide; note = XENP018421 vhCDR1
NYWMN

SEQ ID NO: 14838 - protein, 19 aa, synthetic construct
  source 1..19: note = Description of Artificial Sequence: Synthetic peptide; note = XENP018421 vhCDR2
EIRLKSNNYATHYAEPVKG

SEQ ID NO: 14839 - protein, 11 aa, synthetic construct
  source 1..11: note = Description of Artificial Sequence: Synthetic peptide; note = XENP018421 vhCDR3
YYGNYGGYFDV

SEQ ID NO: 14840 - protein, 214 aa, synthetic construct
  source 1..214: note = Description of Artificial Sequence: Synthetic polypeptide; note = XENP018421 1G6_H1_L1.74_IgG1_PVA_/S267K Light Chain
SIVMTQSPATLSVSPGERATLSCRASQSVSNDVAWYQQKPGQSPRLLINYASHWYTGVPDRFTGSGYGTEFTLTISSLQSEDFAVYFCQQDYSSPRTFGGGTKVEIKRTVAAPSVFIFPPSDEQLKSGTASVVCLLNNFYPREAKVQWKVDNALQSGNSQESVTEQDSKDSTYSLSSTLTLSKADYEKHKVYACEVTHQGLSSPVTKSFNRGEC

SEQ ID NO: 14841 - protein, 107 aa, synthetic construct; identical to SEQ ID NO: 9160
  source 1..107: note = Description of Artificial Sequence: Synthetic polypeptide; note = VL of XENP018421

SEQ ID NO: 14842 - protein, 11 aa, synthetic construct
  source 1..11: note = Description of Artificial Sequence: Synthetic peptide; note = XENP018421 vlCDR1
RASQSVSNDVA

SEQ ID NO: 14843 - protein, 7 aa, synthetic construct
  source 1..7: note = Description of Artificial Sequence: Synthetic peptide; note = XENP018421 vlCDR2
YASHWYT

SEQ ID NO: 14844 - protein, 9 aa, synthetic construct
  source 1..9: note = Description of Artificial Sequence: Synthetic peptide; note = XENP018421 vlCDR3
QQDYSSPRT

SEQ ID NO: 14845 - protein, 451 aa, synthetic construct; identical to SEQ ID NO: 11545
  source 1..451: note = Description of Artificial Sequence: Synthetic polypeptide; note = XENP018422 1G6_H1_L1.75_IgG1_PVA_/S267K Heavy Chain

SEQ ID NO: 14846 - protein, 122 aa, synthetic construct; identical to SEQ ID NO: 6246
  source 1..122: note = Description of Artificial Sequence: Synthetic polypeptide; note = VH of XENP018422

SEQ ID NO: 14847 - protein, 5 aa, synthetic construct
  source 1..5: note = Description of Artificial Sequence: Synthetic peptide; note = XENP018422 vhCDR1
NYWMN

SEQ ID NO: 14848 - protein, 19 aa, synthetic construct
  source 1..19: note = Description of Artificial Sequence: Synthetic peptide; note = XENP018422 vhCDR2
EIRLKSNNYATHYAEPVKG

SEQ ID NO: 14849 - protein, 11 aa, synthetic construct
  source 1..11: note = Description of Artificial Sequence: Synthetic peptide; note = XENP018422 vhCDR3
YYGNYGGYFDV

SEQ ID NO: 14850 - protein, 214 aa, synthetic construct
  source 1..214: note = Description of Artificial Sequence: Synthetic polypeptide; note = XENP018422 1G6_H1_L1.75_IgG1_PVA_/S267K Light Chain
SIVMTQSPATLSVSPGERATLSCRASQSVSNDVAWYQQKPGQSPRLLINYASHSYTGVPDRFTGSGYGTEFTLTISSLQSEDFAVYFCQQDYSSPRTFGGGTKVEIKRTVAAPSVFIFPPSDEQLKSGTASVVCLLNNFYPREAKVQWKVDNALQSGNSQESVTEQDSKDSTYSLSSTLTLSKADYEKHKVYACEVTHQGLSSPVTKSFNRGEC

SEQ ID NO: 14851 - protein, 107 aa, synthetic construct; identical to SEQ ID NO: 9169
  source 1..107: note = Description of Artificial Sequence: Synthetic polypeptide; note = VL of XENP018422

SEQ ID NO: 14852 - protein, 11 aa, synthetic construct
  source 1..11: note = Description of Artificial Sequence: Synthetic peptide; note = XENP018422 vlCDR1
RASQSVSNDVA

SEQ ID NO: 14853 - protein, 7 aa, synthetic construct
  source 1..7: note = Description of Artificial Sequence: Synthetic peptide; note = XENP018422 vlCDR2
YASHSYT

SEQ ID NO: 14854 - protein, 9 aa, synthetic construct
  source 1..9: note = Description of Artificial Sequence: Synthetic peptide; note = XENP018422 vlCDR3
QQDYSSPRT

SEQ ID NO: 14855 - protein, 451 aa, synthetic construct; identical to SEQ ID NO: 11545
  source 1..451: note = Description of Artificial Sequence: Synthetic polypeptide; note = XENP018423 1G6_H1_L1.76_IgG1_PVA_/S267K Heavy Chain

SEQ ID NO: 14856 - protein, 122 aa, synthetic construct; identical to SEQ ID NO: 6246
  source 1..122: note = Description of Artificial Sequence: Synthetic polypeptide; note = VH of XENP018423

SEQ ID NO: 14857 - protein, 5 aa, synthetic construct
  source 1..5: note = Description of Artificial Sequence: Synthetic peptide; note = XENP018423 vhCDR1
NYWMN

SEQ ID NO: 14858 - protein, 19 aa, synthetic construct
  source 1..19: note = Description of Artificial Sequence: Synthetic peptide; note = XENP018423 vhCDR2
EIRLKSNNYATHYAEPVKG

SEQ ID NO: 14859 - protein, 11 aa, synthetic construct
  source 1..11: note = Description of Artificial Sequence: Synthetic peptide; note = XENP018423 vhCDR3
YYGNYGGYFDV

SEQ ID NO: 14860 - protein, 214 aa, synthetic construct
  source 1..214: note = Description of Artificial Sequence: Synthetic polypeptide; note = XENP018423 1G6_H1_L1.76_IgG1_PVA_/S267K Light Chain
SIVMTQSPATLSVSPGERATLSCRASQSVSNDVAWYQQKPGQSPRLLINYASHRFTGVPDRFTGSGYGTEFTLTISSLQSEDFAVYFCQQDYSSPRTFGGGTKVEIKRTVAAPSVFIFPPSDEQLKSGTASVVCLLNNFYPREAKVQWKVDNALQSGNSQESVTEQDSKDSTYSLSSTLTLSKADYEKHKVYACEVTHQGLSSPVTKSFNRGEC

SEQ ID NO: 14861 - protein, 107 aa, synthetic construct; identical to SEQ ID NO: 9178
  source 1..107: note = Description of Artificial Sequence: Synthetic polypeptide; note = VL of XENP018423

SEQ ID NO: 14862 - protein, 11 aa, synthetic construct
  source 1..11: note = Description of Artificial Sequence: Synthetic peptide; note = XENP018423 vlCDR1
RASQSVSNDVA

SEQ ID NO: 14863 - protein, 7 aa, synthetic construct
  source 1..7: note = Description of Artificial Sequence: Synthetic peptide; note = XENP018423 vlCDR2
YASHRFT

SEQ ID NO: 14864 - protein, 9 aa, synthetic construct
  source 1..9: note = Description of Artificial Sequence: Synthetic peptide; note = XENP018423 vlCDR3
QQDYSSPRT

SEQ ID NO: 14865 - protein, 451 aa, synthetic construct; identical to SEQ ID NO: 11545
  source 1..451: note = Description of Artificial Sequence: Synthetic polypeptide; note = XENP018424 1G6_H1_L1.77_IgG1_PVA_/S267K Heavy Chain

SEQ ID NO: 14866 - protein, 122 aa, synthetic construct; identical to SEQ ID NO: 6246
  source 1..122: note = Description of Artificial Sequence: Synthetic polypeptide; note = VH of XENP018424

SEQ ID NO: 14867 - protein, 5 aa, synthetic construct
  source 1..5: note = Description of Artificial Sequence: Synthetic peptide; note = XENP018424 vhCDR1
NYWMN

SEQ ID NO: 14868 - protein, 19 aa, synthetic construct
  source 1..19: note = Description of Artificial Sequence: Synthetic peptide; note = XENP018424 vhCDR2
EIRLKSNNYATHYAEPVKG

SEQ ID NO: 14869 - protein, 11 aa, synthetic construct
  source 1..11: note = Description of Artificial Sequence: Synthetic peptide; note = XENP018424 vhCDR3
YYGNYGGYFDV

SEQ ID NO: 14870 - protein, 214 aa, synthetic construct
  source 1..214: note = Description of Artificial Sequence: Synthetic polypeptide; note = XENP018424 1G6_H1_L1.77_IgG1_PVA_/S267K Light Chain
SIVMTQSPATLSVSPGERATLSCRASQSVSNDVAWYQQKPGQSPRLLINYASHRHTGVPDRFTGSGYGTEFTLTISSLQSEDFAVYFCQQDYSSPRTFGGGTKVEIKRTVAAPSVFIFPPSDEQLKSGTASVVCLLNNFYPREAKVQWKVDNALQSGNSQESVTEQDSKDSTYSLSSTLTLSKADYEKHKVYACEVTHQGLSSPVTKSFNRGEC

SEQ ID NO: 14871 - protein, 107 aa, synthetic construct; identical to SEQ ID NO: 9187
  source 1..107: note = Description of Artificial Sequence: Synthetic polypeptide; note = VL of XENP018424

SEQ ID NO: 14872 - protein, 11 aa, synthetic construct
  source 1..11: note = Description of Artificial Sequence: Synthetic peptide; note = XENP018424 vlCDR1
RASQSVSNDVA

SEQ ID NO: 14873 - protein, 7 aa, synthetic construct
  source 1..7: note = Description of Artificial Sequence: Synthetic peptide; note = XENP018424 vlCDR2
YASHRHT

SEQ ID NO: 14874 - protein, 9 aa, synthetic construct
  source 1..9: note = Description of Artificial Sequence: Synthetic peptide; note = XENP018424 vlCDR3
QQDYSSPRT

SEQ ID NO: 14875 - protein, 451 aa, synthetic construct; identical to SEQ ID NO: 11545
  source 1..451: note = Description of Artificial Sequence: Synthetic polypeptide; note = XENP018425 1G6_H1_L1.78_IgG1_PVA_/S267K Heavy Chain

SEQ ID NO: 14876 - protein, 122 aa, synthetic construct; identical to SEQ ID NO: 6246
  source 1..122: note = Description of Artificial Sequence: Synthetic polypeptide; note = VH of XENP018425

SEQ ID NO: 14877 - protein, 5 aa, synthetic construct
  source 1..5: note = Description of Artificial Sequence: Synthetic peptide; note = XENP018425 vhCDR1
NYWMN

SEQ ID NO: 14878 - protein, 19 aa, synthetic construct
  source 1..19: note = Description of Artificial Sequence: Synthetic peptide; note = XENP018425 vhCDR2
EIRLKSNNYATHYAEPVKG

SEQ ID NO: 14879 - protein, 11 aa, synthetic construct
  source 1..11: note = Description of Artificial Sequence: Synthetic peptide; note = XENP018425 vhCDR3
YYGNYGGYFDV

SEQ ID NO: 14880 - protein, 214 aa, synthetic construct
  source 1..214: note = Description of Artificial Sequence: Synthetic polypeptide; note = XENP018425 1G6_H1_L1.78_IgG1_PVA_/S267K Light Chain
SIVMTQSPATLSVSPGERATLSCRASQSVSNDVAWYQQKPGQSPRLLINYASHRLTGVPDRFTGSGYGTEFTLTISSLQSEDFAVYFCQQDYSSPRTFGGGTKVEIKRTVAAPSVFIFPPSDEQLKSGTASVVCLLNNFYPREAKVQWKVDNALQSGNSQESVTEQDSKDSTYSLSSTLTLSKADYEKHKVYACEVTHQGLSSPVTKSFNRGEC

SEQ ID NO: 14881 - protein, 107 aa, synthetic construct; identical to SEQ ID NO: 9196
  source 1..107: note = Description of Artificial Sequence: Synthetic polypeptide; note = VL of XENP018425

SEQ ID NO: 14882 - protein, 11 aa, synthetic construct
  source 1..11: note = Description of Artificial Sequence: Synthetic peptide; note = XENP018425 vlCDR1
RASQSVSNDVA

SEQ ID NO: 14883 - protein, 7 aa, synthetic construct
  source 1..7: note = Description of Artificial Sequence: Synthetic peptide; note = XENP018425 vlCDR2
YASHRLT

SEQ ID NO: 14884 - protein, 9 aa, synthetic construct
  source 1..9: note = Description of Artificial Sequence: Synthetic peptide; note = XENP018425 vlCDR3
QQDYSSPRT

SEQ ID NO: 14885 - protein, 451 aa, synthetic construct; identical to SEQ ID NO: 11545
  source 1..451: note = Description of Artificial Sequence: Synthetic polypeptide; note = XENP018426 1G6_H1_L1.79_IgG1_PVA_/S267K Heavy Chain

SEQ ID NO: 14886 - protein, 122 aa, synthetic construct; identical to SEQ ID NO: 6246
  source 1..122: note = Description of Artificial Sequence: Synthetic polypeptide; note = VH of XENP018426

SEQ ID NO: 14887 - protein, 5 aa, synthetic construct
  source 1..5: note = Description of Artificial Sequence: Synthetic peptide; note = XENP018426 vhCDR1
NYWMN

SEQ ID NO: 14888 - protein, 19 aa, synthetic construct
  source 1..19: note = Description of Artificial Sequence: Synthetic peptide; note = XENP018426 vhCDR2
EIRLKSNNYATHYAEPVKG

SEQ ID NO: 14889 - protein, 11 aa, synthetic construct
  source 1..11: note = Description of Artificial Sequence: Synthetic peptide; note = XENP018426 vhCDR3
YYGNYGGYFDV

SEQ ID NO: 14890 - protein, 214 aa, synthetic construct
  source 1..214: note = Description of Artificial Sequence: Synthetic polypeptide; note = XENP018426 1G6_H1_L1.79_IgG1_PVA_/S267K Light Chain
SIVMTQSPATLSVSPGERATLSCRASQSVSNDVAWYQQKPGQSPRLLINYASHRWTGVPDRFTGSGYGTEFTLTISSLQSEDFAVYFCQQDYSSPRTFGGGTKVEIKRTVAAPSVFIFPPSDEQLKSGTASVVCLLNNFYPREAKVQWKVDNALQSGNSQESVTEQDSKDSTYSLSSTLTLSKADYEKHKVYACEVTHQGLSSPVTKSFNRGEC

SEQ ID NO: 14891 - protein, 107 aa, synthetic construct; identical to SEQ ID NO: 9205
  source 1..107: note = Description of Artificial Sequence: Synthetic polypeptide; note = VL of XENP018426

SEQ ID NO: 14892 - protein, 11 aa, synthetic construct
  source 1..11: note = Description of Artificial Sequence: Synthetic peptide; note = XENP018426 vlCDR1
RASQSVSNDVA

SEQ ID NO: 14893 - protein, 7 aa, synthetic construct
  source 1..7: note = Description of Artificial Sequence: Synthetic peptide; note = XENP018426 vlCDR2
YASHRWT

SEQ ID NO: 14894 - protein, 9 aa, synthetic construct
  source 1..9: note = Description of Artificial Sequence: Synthetic peptide; note = XENP018426 vlCDR3
QQDYSSPRT

SEQ ID NO: 14895 - protein, 451 aa, synthetic construct; identical to SEQ ID NO: 11545
  source 1..451: note = Description of Artificial Sequence: Synthetic polypeptide; note = XENP018427 1G6_H1_L1.80_IgG1_PVA_/S267K Heavy Chain

SEQ ID NO: 14896 - protein, 122 aa, synthetic construct; identical to SEQ ID NO: 6246
  source 1..122: note = Description of Artificial Sequence: Synthetic polypeptide; note = VH of XENP018427

SEQ ID NO: 14897 - protein, 5 aa, synthetic construct
  source 1..5: note = Description of Artificial Sequence: Synthetic peptide; note = XENP018427 vhCDR1
NYWMN

SEQ ID NO: 14898 - protein, 19 aa, synthetic construct
  source 1..19: note = Description of Artificial Sequence: Synthetic peptide; note = XENP018427 vhCDR2
EIRLKSNNYATHYAEPVKG

SEQ ID NO: 14899 - protein, 11 aa, synthetic construct
  source 1..11: note = Description of Artificial Sequence: Synthetic peptide; note = XENP018427 vhCDR3
YYGNYGGYFDV

SEQ ID NO: 14900 - protein, 214 aa, synthetic construct
  source 1..214: note = Description of Artificial Sequence: Synthetic polypeptide; note = XENP018427 1G6_H1_L1.80_IgG1_PVA_/S267K Light Chain
SIVMTQSPATLSVSPGERATLSCRASQSVSNDVAWYQQKPGQSPRLLINYASHRVTGVPDRFTGSGYGTEFTLTISSLQSEDFAVYFCQQDYSSPRTFGGGTKVEIKRTVAAPSVFIFPPSDEQLKSGTASVVCLLNNFYPREAKVQWKVDNALQSGNSQESVTEQDSKDSTYSLSSTLTLSKADYEKHKVYACEVTHQGLSSPVTKSFNRGEC

SEQ ID NO: 14901 - protein, 107 aa, synthetic construct; identical to SEQ ID NO: 9214
  source 1..107: note = Description of Artificial Sequence: Synthetic polypeptide; note = VL of XENP018427

SEQ ID NO: 14902 - protein, 11 aa, synthetic construct
  source 1..11: note = Description of Artificial Sequence: Synthetic peptide; note = XENP018427 vlCDR1
RASQSVSNDVA

SEQ ID NO: 14903 - protein, 7 aa, synthetic construct
  source 1..7: note = Description of Artificial Sequence: Synthetic peptide; note = XENP018427 vlCDR2
YASHRVT

SEQ ID NO: 14904 - protein, 9 aa, synthetic construct
  source 1..9: note = Description of Artificial Sequence: Synthetic peptide; note = XENP018427 vlCDR3
QQDYSSPRT

SEQ ID NO: 14905 - protein, 451 aa, synthetic construct; identical to SEQ ID NO: 11545
  source 1..451: note = Description of Artificial Sequence: Synthetic polypeptide; note = XENP018428 1G6_H1_L1.81_IgG1_PVA_/S267K Heavy Chain

SEQ ID NO: 14906 - protein, 122 aa, synthetic construct; identical to SEQ ID NO: 6246
  source 1..122: note = Description of Artificial Sequence: Synthetic polypeptide; note = VH of XENP018428

SEQ ID NO: 14907 - protein, 5 aa, synthetic construct
  source 1..5: note = Description of Artificial Sequence: Synthetic peptide; note = XENP018428 vhCDR1
NYWMN

SEQ ID NO: 14908 - protein, 19 aa, synthetic construct
  source 1..19: note = Description of Artificial Sequence: Synthetic peptide; note = XENP018428 vhCDR2
EIRLKSNNYATHYAEPVKG

SEQ ID NO: 14909 - protein, 11 aa, synthetic construct
  source 1..11: note = Description of Artificial Sequence: Synthetic peptide; note = XENP018428 vhCDR3
YYGNYGGYFDV

SEQ ID NO: 14910 - protein, 214 aa, synthetic construct
  source 1..214: note = Description of Artificial Sequence: Synthetic polypeptide; note = XENP018428 1G6_H1_L1.81_IgG1_PVA_/S267K Light Chain
SIVMTQSPATLSVSPGERATLSCRASQSVSNDVAWYQQKPGQSPRLLINYASHRATGVPDRFTGSGYGTEFTLTISSLQSEDFAVYFCQQDYSSPRTFGGGTKVEIKRTVAAPSVFIFPPSDEQLKSGTASVVCLLNNFYPREAKVQWKVDNALQSGNSQESVTEQDSKDSTYSLSSTLTLSKADYEKHKVYACEVTHQGLSSPVTKSFNRGEC

SEQ ID NO: 14911 - protein, 107 aa, synthetic construct; identical to SEQ ID NO: 9223
  source 1..107: note = Description of Artificial Sequence: Synthetic polypeptide; note = VL of XENP018428

SEQ ID NO: 14912 - protein, 11 aa, synthetic construct
  source 1..11: note = Description of Artificial Sequence: Synthetic peptide; note = XENP018428 vlCDR1
RASQSVSNDVA

SEQ ID NO: 14913 - protein, 7 aa, synthetic construct
  source 1..7: note = Description of Artificial Sequence: Synthetic peptide; note = XENP018428 vlCDR2
YASHRAT

SEQ ID NO: 14914 - protein, 9 aa, synthetic construct
  source 1..9: note = Description of Artificial Sequence: Synthetic peptide; note = XENP018428 vlCDR3
QQDYSSPRT

SEQ ID NO: 14915 - protein, 451 aa, synthetic construct; identical to SEQ ID NO: 11545
  source 1..451: note = Description of Artificial Sequence: Synthetic polypeptide; note = XENP018429 1G6_H1_L1.82_IgG1_PVA_/S267K Heavy Chain

SEQ ID NO: 14916 - protein, 122 aa, synthetic construct; identical to SEQ ID NO: 6246
  source 1..122: note = Description of Artificial Sequence: Synthetic polypeptide; note = VH of XENP018429

SEQ ID NO: 14917 - protein, 5 aa, synthetic construct
  source 1..5: note = Description of Artificial Sequence: Synthetic peptide; note = XENP018429 vhCDR1
NYWMN

SEQ ID NO: 14918 - protein, 19 aa, synthetic construct
  source 1..19: note = Description of Artificial Sequence: Synthetic peptide; note = XENP018429 vhCDR2
EIRLKSNNYATHYAEPVKG

SEQ ID NO: 14919 - protein, 11 aa, synthetic construct
  source 1..11: note = Description of Artificial Sequence: Synthetic peptide; note = XENP018429 vhCDR3
YYGNYGGYFDV

SEQ ID NO: 14920 - protein, 214 aa, synthetic construct
  source 1..214: note = Description of Artificial Sequence: Synthetic polypeptide; note = XENP018429 1G6_H1_L1.82_IgG1_PVA_/S267K Light Chain
SIVMTQSPATLSVSPGERATLSCRASQSVSNDVAWYQQKPGQSPRLLINYASHRQTGVPDRFTGSGYGTEFTLTISSLQSEDFAVYFCQQDYSSPRTFGGGTKVEIKRTVAAPSVFIFPPSDEQLKSGTASVVCLLNNFYPREAKVQWKVDNALQSGNSQESVTEQDSKDSTYSLSSTLTLSKADYEKHKVYACEVTHQGLSSPVTKSFNRGEC

SEQ ID NO: 14921 - protein, 107 aa, synthetic construct; identical to SEQ ID NO: 9232
  source 1..107: note = Description of Artificial Sequence: Synthetic polypeptide; note = VL of XENP018429

SEQ ID NO: 14922 - protein, 11 aa, synthetic construct
  source 1..11: note = Description of Artificial Sequence: Synthetic peptide; note = XENP018429 vlCDR1
RASQSVSNDVA

SEQ ID NO: 14923 - protein, 7 aa, synthetic construct
  source 1..7: note = Description of Artificial Sequence: Synthetic peptide; note = XENP018429 vlCDR2
YASHRQT

SEQ ID NO: 14924 - protein, 9 aa, synthetic construct
  source 1..9: note = Description of Artificial Sequence: Synthetic peptide; note = XENP018429 vlCDR3
QQDYSSPRT

SEQ ID NO: 14925 - protein, 451 aa, synthetic construct; identical to SEQ ID NO: 11545
  source 1..451: note = Description of Artificial Sequence: Synthetic polypeptide; note = XENP018430 1G6_H1_L1.83_IgG1_PVA_/S267K Heavy Chain

SEQ ID NO: 14926 - protein, 122 aa, synthetic construct; identical to SEQ ID NO: 6246
  source 1..122: note = Description of Artificial Sequence: Synthetic polypeptide; note = VH of XENP018430

SEQ ID NO: 14927 - protein, 5 aa, synthetic construct
  source 1..5: note = Description of Artificial Sequence: Synthetic peptide; note = XENP018430 vhCDR1
NYWMN

SEQ ID NO: 14928 - protein, 19 aa, synthetic construct
  source 1..19: note = Description of Artificial Sequence: Synthetic peptide; note = XENP018430 vhCDR2
EIRLKSNNYATHYAEPVKG

SEQ ID NO: 14929 - protein, 11 aa, synthetic construct
  source 1..11: note = Description of Artificial Sequence: Synthetic peptide; note = XENP018430 vhCDR3
YYGNYGGYFDV

SEQ ID NO: 14930 - protein, 214 aa, synthetic construct
  source 1..214: note = Description of Artificial Sequence: Synthetic polypeptide; note = XENP018430 1G6_H1_L1.83_IgG1_PVA_/S267K Light Chain
SIVMTQSPATLSVSPGERATLSCRASQSVSNDVAWYQQKPGQSPRLLINYASHRDTGVPDRFTGSGYGTEFTLTISSLQSEDFAVYFCQQDYSSPRTFGGGTKVEIKRTVAAPSVFIFPPSDEQLKSGTASVVCLLNNFYPREAKVQWKVDNALQSGNSQESVTEQDSKDSTYSLSSTLTLSKADYEKHKVYACEVTHQGLSSPVTKSFNRGEC

SEQ ID NO: 14931 - protein, 107 aa, synthetic construct; identical to SEQ ID NO: 9241
  source 1..107: note = Description of Artificial Sequence: Synthetic polypeptide; note = VL of XENP018430

SEQ ID NO: 14932 - protein, 11 aa, synthetic construct
  source 1..11: note = Description of Artificial Sequence: Synthetic peptide; note = XENP018430 vlCDR1
RASQSVSNDVA

SEQ ID NO: 14933 - protein, 7 aa, synthetic construct
  source 1..7: note = Description of Artificial Sequence: Synthetic peptide; note = XENP018430 vlCDR2
YASHRDT

SEQ ID NO: 14934 - protein, 9 aa, synthetic construct
  source 1..9: note = Description of Artificial Sequence: Synthetic peptide; note = XENP018430 vlCDR3
QQDYSSPRT

SEQ ID NO: 14935 - protein, 451 aa, synthetic construct; identical to SEQ ID NO: 11545
  source 1..451: note = Description of Artificial Sequence: Synthetic polypeptide; note = XENP018431 1G6_H1_L1.84_IgG1_PVA_/S267K Heavy Chain

SEQ ID NO: 14936 - protein, 122 aa, synthetic construct; identical to SEQ ID NO: 6246
  source 1..122: note = Description of Artificial Sequence: Synthetic polypeptide; note = VH of XENP018431

SEQ ID NO: 14937 - protein, 5 aa, synthetic construct
  source 1..5: note = Description of Artificial Sequence: Synthetic peptide; note = XENP018431 vhCDR1
NYWMN

SEQ ID NO: 14938 - protein, 19 aa, synthetic construct
  source 1..19: note = Description of Artificial Sequence: Synthetic peptide; note = XENP018431 vhCDR2
EIRLKSNNYATHYAEPVKG

SEQ ID NO: 14939 - protein, 11 aa, synthetic construct
  source 1..11: note = Description of Artificial Sequence: Synthetic peptide; note = XENP018431 vhCDR3
YYGNYGGYFDV

SEQ ID NO: 14940 - protein, 214 aa, synthetic construct
  source 1..214: note = Description of Artificial Sequence: Synthetic polypeptide; note = XENP018431 1G6_H1_L1.84_IgG1_PVA_/S267K Light Chain
SIVMTQSPATLSVSPGERATLSCRASQSVSNDVAWYQQKPGQSPRLLINYASHRKTGVPDRFTGSGYGTEFTLTISSLQSEDFAVYFCQQDYSSPRTFGGGTKVEIKRTVAAPSVFIFPPSDEQLKSGTASVVCLLNNFYPREAKVQWKVDNALQSGNSQESVTEQDSKDSTYSLSSTLTLSKADYEKHKVYACEVTHQGLSSPVTKSFNRGEC

SEQ ID NO: 14941 - protein, 107 aa, synthetic construct; identical to SEQ ID NO: 9250
  source 1..107: note = Description of Artificial Sequence: Synthetic polypeptide; note = VL of XENP018431

SEQ ID NO: 14942 - protein, 11 aa, synthetic construct
  source 1..11: note = Description of Artificial Sequence: Synthetic peptide; note = XENP018431 vlCDR1
RASQSVSNDVA

SEQ ID NO: 14943 - protein, 7 aa, synthetic construct
  source 1..7: note = Description of Artificial Sequence: Synthetic peptide; note = XENP018431 vlCDR2
YASHRKT

SEQ ID NO: 14944 - protein, 9 aa, synthetic construct
  source 1..9: note = Description of Artificial Sequence: Synthetic peptide; note = XENP018431 vlCDR3
QQDYSSPRT

SEQ ID NO: 14945 - protein, 451 aa, synthetic construct; identical to SEQ ID NO: 11545
  source 1..451: note = Description of Artificial Sequence: Synthetic polypeptide; note = XENP018432 1G6_H1_L1.85_IgG1_PVA_/S267K Heavy Chain

SEQ ID NO: 14946 - protein, 122 aa, synthetic construct; identical to SEQ ID NO: 6246
  source 1..122: note = Description of Artificial Sequence: Synthetic polypeptide; note = VH of XENP018432

SEQ ID NO: 14947 - protein, 5 aa, synthetic construct
  source 1..5: note = Description of Artificial Sequence: Synthetic peptide; note = XENP018432 vhCDR1
NYWMN

SEQ ID NO: 14948 - protein, 19 aa, synthetic construct
  source 1..19: note = Description of Artificial Sequence: Synthetic peptide; note = XENP018432 vhCDR2
EIRLKSNNYATHYAEPVKG

SEQ ID NO: 14949 - protein, 11 aa, synthetic construct
  source 1..11: note = Description of Artificial Sequence: Synthetic peptide; note = XENP018432 vhCDR3
YYGNYGGYFDV

SEQ ID NO: 14950 - protein, 214 aa, synthetic construct
  source 1..214: note = Description of Artificial Sequence: Synthetic polypeptide; note = XENP018432 1G6_H1_L1.85_IgG1_PVA_/S267K Light Chain
SIVMTQSPATLSVSPGERATLSCRASQSVSNDVAWYQQKPGQSPRLLINYASHRYVGVPDRFTGSGYGTEFTLTISSLQSEDFAVYFCQQDYSSPRTFGGGTKVEIKRTVAAPSVFIFPPSDEQLKSGTASVVCLLNNFYPREAKVQWKVDNALQSGNSQESVTEQDSKDSTYSLSSTLTLSKADYEKHKVYACEVTHQGLSSPVTKSFNRGEC

SEQ ID NO: 14951 - protein, 107 aa, synthetic construct; identical to SEQ ID NO: 9259
  source 1..107: note = Description of Artificial Sequence: Synthetic polypeptide; note = VL of XENP018432

SEQ ID NO: 14952 - protein, 11 aa, synthetic construct
  source 1..11: note = Description of Artificial Sequence: Synthetic peptide; note = XENP018432 vlCDR1
RASQSVSNDVA

SEQ ID NO: 14953 - protein, 7 aa, synthetic construct
  source 1..7: note = Description of Artificial Sequence: Synthetic peptide; note = XENP018432 vlCDR2
YASHRYV

SEQ ID NO: 14954 - protein, 9 aa, synthetic construct
  source 1..9: note = Description of Artificial Sequence: Synthetic peptide; note = XENP018432 vlCDR3
QQDYSSPRT

SEQ ID NO: 14955 - protein, 451 aa, synthetic construct; identical to SEQ ID NO: 11545
  source 1..451: note = Description of Artificial Sequence: Synthetic polypeptide; note = XENP018433 1G6_H1_L1.86_IgG1_PVA_/S267K Heavy Chain

SEQ ID NO: 14956 - protein, 122 aa, synthetic construct; identical to SEQ ID NO: 6246
  source 1..122: note = Description of Artificial Sequence: Synthetic polypeptide; note = VH of XENP018433

SEQ ID NO: 14957 - protein, 5 aa, synthetic construct
  source 1..5: note = Description of Artificial Sequence: Synthetic peptide; note = XENP018433 vhCDR1
NYWMN

SEQ ID NO: 14958 - protein, 19 aa, synthetic construct
  source 1..19: note = Description of Artificial Sequence: Synthetic peptide; note = XENP018433 vhCDR2
EIRLKSNNYATHYAEPVKG

SEQ ID NO: 14959 - protein, 11 aa, synthetic construct
  source 1..11: note = Description of Artificial Sequence: Synthetic peptide; note = XENP018433 vhCDR3
YYGNYGGYFDV

SEQ ID NO: 14960 - protein, 214 aa, synthetic construct
  source 1..214: note = Description of Artificial Sequence: Synthetic polypeptide; note = XENP018433 1G6_H1_L1.86_IgG1_PVA_/S267K Light Chain
SIVMTQSPATLSVSPGERATLSCRASQSVSNDVAWYQQKPGQSPRLLINYASHRYSGVPDRFTGSGYGTEFTLTISSLQSEDFAVYFCQQDYSSPRTFGGGTKVEIKRTVAAPSVFIFPPSDEQLKSGTASVVCLLNNFYPREAKVQWKVDNALQSGNSQESVTEQDSKDSTYSLSSTLTLSKADYEKHKVYACEVTHQGLSSPVTKSFNRGEC

SEQ ID NO: 14961 - protein, 107 aa, synthetic construct; identical to SEQ ID NO: 9268
  source 1..107: note = Description of Artificial Sequence: Synthetic polypeptide; note = VL of XENP018433

SEQ ID NO: 14962 - protein, 11 aa, synthetic construct
  source 1..11: note = Description of Artificial Sequence: Synthetic peptide; note = XENP018433 vlCDR1
RASQSVSNDVA

SEQ ID NO: 14963 - protein, 7 aa, synthetic construct
  source 1..7: note = Description of Artificial Sequence: Synthetic peptide; note = XENP018433 vlCDR2
YASHRYS

SEQ ID NO: 14964 - protein, 9 aa, synthetic construct
  source 1..9: note = Description of Artificial Sequence: Synthetic peptide; note = XENP018433 vlCDR3
QQDYSSPRT

SEQ ID NO: 14965 - protein, 451 aa, synthetic construct; identical to SEQ ID NO: 11545
  source 1..451: note = Description of Artificial Sequence: Synthetic polypeptide; note = XENP018434 1G6_H1_L1.87_IgG1_PVA_/S267K Heavy Chain

SEQ ID NO: 14966 - protein, 122 aa, synthetic construct; identical to SEQ ID NO: 6246
  source 1..122: note = Description of Artificial Sequence: Synthetic polypeptide; note = VH of XENP018434

SEQ ID NO: 14967 - protein, 5 aa, synthetic construct
  source 1..5: note = Description of Artificial Sequence: Synthetic peptide; note = XENP018434 vhCDR1
NYWMN

SEQ ID NO: 14968 - protein, 19 aa, synthetic construct
  source 1..19: note = Description of Artificial Sequence: Synthetic peptide; note = XENP018434 vhCDR2
EIRLKSNNYATHYAEPVKG

SEQ ID NO: 14969 - protein, 11 aa, synthetic construct
  source 1..11: note = Description of Artificial Sequence: Synthetic peptide; note = XENP018434 vhCDR3
YYGNYGGYFDV

SEQ ID NO: 14970 - protein, 214 aa, synthetic construct
  source 1..214: note = Description of Artificial Sequence: Synthetic polypeptide; note = XENP018434 1G6_H1_L1.87_IgG1_PVA_/S267K Light Chain
SIVMTQSPATLSVSPGERATLSCRASQSVSNDVAWYQQKPGQSPRLLINYASHRYAGVPDRFTGSGYGTEFTLTISSLQSEDFAVYFCQQDYSSPRTFGGGTKVEIKRTVAAPSVFIFPPSDEQLKSGTASVVCLLNNFYPREAKVQWKVDNALQSGNSQESVTEQDSKDSTYSLSSTLTLSKADYEKHKVYACEVTHQGLSSPVTKSFNRGEC

SEQ ID NO: 14971 - protein, 107 aa, synthetic construct; identical to SEQ ID NO: 9277
  source 1..107: note = Description of Artificial Sequence: Synthetic polypeptide; note = VL of XENP018434

SEQ ID NO: 14972 - protein, 11 aa, synthetic construct
  source 1..11: note = Description of Artificial Sequence: Synthetic peptide; note = XENP018434 vlCDR1
RASQSVSNDVA

SEQ ID NO: 14973 - protein, 7 aa, synthetic construct
  source 1..7: note = Description of Artificial Sequence: Synthetic peptide; note = XENP018434 vlCDR2
YASHRYA

SEQ ID NO: 14974 - protein, 9 aa, synthetic construct
  source 1..9: note = Description of Artificial Sequence: Synthetic peptide; note = XENP018434 vlCDR3
QQDYSSPRT

SEQ ID NO: 14975 - protein, 451 aa, synthetic construct; identical to SEQ ID NO: 11545
  source 1..451: note = Description of Artificial Sequence: Synthetic polypeptide; note = XENP018435 1G6_H1_L1.88_IgG1_PVA_/S267K Heavy Chain

SEQ ID NO: 14976 - protein, 122 aa, synthetic construct; identical to SEQ ID NO: 6246
  source 1..122: note = Description of Artificial Sequence: Synthetic polypeptide; note = VH of XENP018435

SEQ ID NO: 14977 - protein, 5 aa, synthetic construct
  source 1..5: note = Description of Artificial Sequence: Synthetic peptide; note = XENP018435 vhCDR1
NYWMN

SEQ ID NO: 14978 - protein, 19 aa, synthetic construct
  source 1..19: note = Description of Artificial Sequence: Synthetic peptide; note = XENP018435 vhCDR2
EIRLKSNNYATHYAEPVKG

SEQ ID NO: 14979 - protein, 11 aa, synthetic construct
  source 1..11: note = Description of Artificial Sequence: Synthetic peptide; note = XENP018435 vhCDR3
YYGNYGGYFDV

SEQ ID NO: 14980 - protein, 214 aa, synthetic construct
  source 1..214: note = Description of Artificial Sequence: Synthetic polypeptide; note = XENP018435 1G6_H1_L1.88_IgG1_PVA_/S267K Light Chain
SIVMTQSPATLSVSPGERATLSCRASQSVSNDVAWYQQKPGQSPRLLINYASHRYIGVPDRFTGSGYGTEFTLTISSLQSEDFAVYFCQQDYSSPRTFGGGTKVEIKRTVAAPSVFIFPPSDEQLKSGTASVVCLLNNFYPREAKVQWKVDNALQSGNSQESVTEQDSKDSTYSLSSTLTLSKADYEKHKVYACEVTHQGLSSPVTKSFNRGEC

SEQ ID NO: 14981 - protein, 107 aa, synthetic construct; identical to SEQ ID NO: 9286
  source 1..107: note = Description of Artificial Sequence: Synthetic polypeptide; note = VL of XENP018435

SEQ ID NO: 14982 - protein, 11 aa, synthetic construct
  source 1..11: note = Description of Artificial Sequence: Synthetic peptide; note = XENP018435 vlCDR1
RASQSVSNDVA

SEQ ID NO: 14983 - protein, 7 aa, synthetic construct
  source 1..7: note = Description of Artificial Sequence: Synthetic peptide; note = XENP018435 vlCDR2
YASHRYI

SEQ ID NO: 14984 - protein, 9 aa, synthetic construct
  source 1..9: note = Description of Artificial Sequence: Synthetic peptide; note = XENP018435 vlCDR3
QQDYSSPRT

SEQ ID NO: 14985 - protein, 451 aa, synthetic construct; identical to SEQ ID NO: 11545
  source 1..451: note = Description of Artificial Sequence: Synthetic polypeptide; note = XENP018436 1G6_H1_L1.89_IgG1_PVA_/S267K Heavy Chain

SEQ ID NO: 14986 - protein, 122 aa, synthetic construct; identical to SEQ ID NO: 6246
  source 1..122: note = Description of Artificial Sequence: Synthetic polypeptide; note = VH of XENP018436

SEQ ID NO: 14987 - protein, 5 aa, synthetic construct
  source 1..5: note = Description of Artificial Sequence: Synthetic peptide; note = XENP018436 vhCDR1
NYWMN

SEQ ID NO: 14988 - protein, 19 aa, synthetic construct
  source 1..19: note = Description of Artificial Sequence: Synthetic peptide; note = XENP018436 vhCDR2
EIRLKSNNYATHYAEPVKG

SEQ ID NO: 14989 - protein, 11 aa, synthetic construct
  source 1..11: note = Description of Artificial Sequence: Synthetic peptide; note = XENP018436 vhCDR3
YYGNYGGYFDV

SEQ ID NO: 14990 - protein, 214 aa, synthetic construct
  source 1..214: note = Description of Artificial Sequence: Synthetic polypeptide; note = XENP018436 1G6_H1_L1.89_IgG1_PVA_/S267K Light Chain
SIVMTQSPATLSVSPGERATLSCRASQSVSNDVAWYQQKPGQSPRLLINYASHRYQGVPDRFTGSGYGTEFTLTISSLQSEDFAVYFCQQDYSSPRTFGGGTKVEIKRTVAAPSVFIFPPSDEQLKSGTASVVCLLNNFYPREAKVQWKVDNALQSGNSQESVTEQDSKDSTYSLSSTLTLSKADYEKHKVYACEVTHQGLSSPVTKSFNRGEC

SEQ ID NO: 14991 - protein, 107 aa, synthetic construct; identical to SEQ ID NO: 9295
  source 1..107: note = Description of Artificial Sequence: Synthetic polypeptide; note = VL of XENP018436

SEQ ID NO: 14992 - protein, 11 aa, synthetic construct
  source 1..11: note = Description of Artificial Sequence: Synthetic peptide; note = XENP018436 vlCDR1
RASQSVSNDVA

SEQ ID NO: 14993 - protein, 7 aa, synthetic construct
  source 1..7: note = Description of Artificial Sequence: Synthetic peptide; note = XENP018436 vlCDR2
YASHRYQ

SEQ ID NO: 14994 - protein, 9 aa, synthetic construct
  source 1..9: note = Description of Artificial Sequence: Synthetic peptide; note = XENP018436 vlCDR3
QQDYSSPRT

SEQ ID NO: 14995 - protein, 451 aa, synthetic construct; identical to SEQ ID NO: 11545
  source 1..451: note = Description of Artificial Sequence: Synthetic polypeptide; note = XENP018437 1G6_H1_L1.90_IgG1_PVA_/S267K Heavy Chain

SEQ ID NO: 14996 - protein, 122 aa, synthetic construct; identical to SEQ ID NO: 6246
  source 1..122: note = Description of Artificial Sequence: Synthetic polypeptide; note = VH of XENP018437

SEQ ID NO: 14997 - protein, 5 aa, synthetic construct
  source 1..5: note = Description of Artificial Sequence: Synthetic peptide; note = XENP018437 vhCDR1
NYWMN

SEQ ID NO: 14998 - protein, 19 aa, synthetic construct
  source 1..19: note = Description of Artificial Sequence: Synthetic peptide; note = XENP018437 vhCDR2
EIRLKSNNYATHYAEPVKG

SEQ ID NO: 14999 - protein, 11 aa, synthetic construct
  source 1..11: note = Description of Artificial Sequence: Synthetic peptide; note = XENP018437 vhCDR3
YYGNYGGYFDV

SEQ ID NO: 15000 - protein, 214 aa, synthetic construct
  source 1..214: note = Description of Artificial Sequence: Synthetic polypeptide; note = XENP018437 1G6_H1_L1.90_IgG1_PVA_/S267K Light Chain
SIVMTQSPATLSVSPGERATLSCRASQSVSNDVAWYQQKPGQSPRLLINYASHRYHGVPDRFTGSGYGTEFTLTISSLQSEDFAVYFCQQDYSSPRTFGGGTKVEIKRTVAAPSVFIFPPSDEQLKSGTASVVCLLNNFYPREAKVQWKVDNALQSGNSQESVTEQDSKDSTYSLSSTLTLSKADYEKHKVYACEVTHQGLSSPVTKSFNRGEC

SEQ ID NO: 15001 - protein, 107 aa, synthetic construct; identical to SEQ ID NO: 9304
  source 1..107: note = Description of Artificial Sequence: Synthetic polypeptide; note = VL of XENP018437

SEQ ID NO: 15002 - protein, 11 aa, synthetic construct
  source 1..11: note = Description of Artificial Sequence: Synthetic peptide; note = XENP018437 vlCDR1
RASQSVSNDVA

SEQ ID NO: 15003 - protein, 7 aa, synthetic construct
  source 1..7: note = Description of Artificial Sequence: Synthetic peptide; note = XENP018437 vlCDR2
YASHRYH

SEQ ID NO: 15004 - protein, 9 aa, synthetic construct
  source 1..9: note = Description of Artificial Sequence: Synthetic peptide; note = XENP018437 vlCDR3
QQDYSSPRT

SEQ ID NO: 15005 - protein, 451 aa, synthetic construct; identical to SEQ ID NO: 11545
  source 1..451: note = Description of Artificial Sequence: Synthetic polypeptide; note = XENP018438 1G6_H1_L1.91_IgG1_PVA_/S267K Heavy Chain

SEQ ID NO: 15006 - protein, 122 aa, synthetic construct; identical to SEQ ID NO: 6246
  source 1..122: note = Description of Artificial Sequence: Synthetic polypeptide; note = VH of XENP018438

SEQ ID NO: 15007 - protein, 5 aa, synthetic construct
  source 1..5: note = Description of Artificial Sequence: Synthetic peptide; note = XENP018438 vhCDR1
NYWMN

SEQ ID NO: 15008 - protein, 19 aa, synthetic construct
  source 1..19: note = Description of Artificial Sequence: Synthetic peptide; note = XENP018438 vhCDR2
EIRLKSNNYATHYAEPVKG

SEQ ID NO: 15009 - protein, 11 aa, synthetic construct
  source 1..11: note = Description of Artificial Sequence: Synthetic peptide; note = XENP018438 vhCDR3
YYGNYGGYFDV

SEQ ID NO: 15010 - protein, 214 aa, synthetic construct
  source 1..214: note = Description of Artificial Sequence: Synthetic polypeptide; note = XENP018438 1G6_H1_L1.91_IgG1_PVA_/S267K Light Chain
SIVMTQSPATLSVSPGERATLSCRASQSVSNDVAWYQQKPGQSPRLLINYASHRYDGVPDRFTGSGYGTEFTLTISSLQSEDFAVYFCQQDYSSPRTFGGGTKVEIKRTVAAPSVFIFPPSDEQLKSGTASVVCLLNNFYPREAKVQWKVDNALQSGNSQESVTEQDSKDSTYSLSSTLTLSKADYEKHKVYACEVTHQGLSSPVTKSFNRGEC

SEQ ID NO: 15011 - protein, 107 aa, synthetic construct; identical to SEQ ID NO: 9313
  source 1..107: note = Description of Artificial Sequence: Synthetic polypeptide; note = VL of XENP018438

SEQ ID NO: 15012 - protein, 11 aa, synthetic construct
  source 1..11: note = Description of Artificial Sequence: Synthetic peptide; note = XENP018438 vlCDR1
RASQSVSNDVA

SEQ ID NO: 15013 - protein, 7 aa, synthetic construct
  source 1..7: note = Description of Artificial Sequence: Synthetic peptide; note = XENP018438 vlCDR2
YASHRYD

SEQ ID NO: 15014 - protein, 9 aa, synthetic construct
  source 1..9: note = Description of Artificial Sequence: Synthetic peptide; note = XENP018438 vlCDR3
QQDYSSPRT

SEQ ID NO: 15015 - protein, 451 aa, synthetic construct; identical to SEQ ID NO: 11545
  source 1..451: note = Description of Artificial Sequence: Synthetic polypeptide; note = XENP018439 1G6_H1_L1.92_IgG1_PVA_/S267K Heavy Chain

SEQ ID NO: 15016 - protein, 122 aa, synthetic construct; identical to SEQ ID NO: 6246
  source 1..122: note = Description of Artificial Sequence: Synthetic polypeptide; note = VH of XENP018439

SEQ ID NO: 15017 - protein, 5 aa, synthetic construct
  source 1..5: note = Description of Artificial Sequence: Synthetic peptide; note = XENP018439 vhCDR1
NYWMN

SEQ ID NO: 15018 - protein, 19 aa, synthetic construct
  source 1..19: note = Description of Artificial Sequence: Synthetic peptide; note = XENP018439 vhCDR2
EIRLKSNNYATHYAEPVKG

SEQ ID NO: 15019 - protein, 11 aa, synthetic construct
  source 1..11: note = Description of Artificial Sequence: Synthetic peptide; note = XENP018439 vhCDR3
YYGNYGGYFDV

SEQ ID NO: 15020 - protein, 214 aa, synthetic construct
  source 1..214: note = Description of Artificial Sequence: Synthetic polypeptide; note = XENP018439 1G6_H1_L1.92_IgG1_PVA_/S267K Light Chain
SIVMTQSPATLSVSPGERATLSCRASQSVSNDVAWYQQKPGQSPRLLINYASHRYKGVPDRFTGSGYGTEFTLTISSLQSEDFAVYFCQQDYSSPRTFGGGTKVEIKRTVAAPSVFIFPPSDEQLKSGTASVVCLLNNFYPREAKVQWKVDNALQSGNSQESVTEQDSKDSTYSLSSTLTLSKADYEKHKVYACEVTHQGLSSPVTKSFNRGEC

SEQ ID NO: 15021 - protein, 107 aa, synthetic construct; identical to SEQ ID NO: 9322
  source 1..107: note = Description of Artificial Sequence: Synthetic polypeptide; note = VL of XENP018439

SEQ ID NO: 15022 - protein, 11 aa, synthetic construct
  source 1..11: note = Description of Artificial Sequence: Synthetic peptide; note = XENP018439 vlCDR1
RASQSVSNDVA

SEQ ID NO: 15023 - protein, 7 aa, synthetic construct
  source 1..7: note = Description of Artificial Sequence: Synthetic peptide; note = XENP018439 vlCDR2
YASHRYK

SEQ ID NO: 15024 - protein, 9 aa, synthetic construct
  source 1..9: note = Description of Artificial Sequence: Synthetic peptide; note = XENP018439 vlCDR3
QQDYSSPRT

SEQ ID NO: 15025 - protein, 451 aa, synthetic construct; identical to SEQ ID NO: 11545
  source 1..451: note = Description of Artificial Sequence: Synthetic polypeptide; note = XENP018440 1G6_H1_L1.93_IgG1_PVA_/S267K Heavy Chain

SEQ ID NO: 15026 - protein, 122 aa, synthetic construct; identical to SEQ ID NO: 6246
  source 1..122: note = Description of Artificial Sequence: Synthetic polypeptide; note = VH of XENP018440

SEQ ID NO: 15027 - protein, 5 aa, synthetic construct
  source 1..5: note = Description of Artificial Sequence: Synthetic peptide; note = XENP018440 vhCDR1
NYWMN

SEQ ID NO: 15028 - protein, 19 aa, synthetic construct
  source 1..19: note = Description of Artificial Sequence: Synthetic peptide; note = XENP018440 vhCDR2
EIRLKSNNYATHYAEPVKG

SEQ ID NO: 15029 - protein, 11 aa, synthetic construct
  source 1..11: note = Description of Artificial Sequence: Synthetic peptide; note = XENP018440 vhCDR3
YYGNYGGYFDV

SEQ ID NO: 15030 - protein, 214 aa, synthetic construct
  source 1..214: note = Description of Artificial Sequence: Synthetic polypeptide; note = XENP018440 1G6_H1_L1.93_IgG1_PVA_/S267K Light Chain
SIVMTQSPATLSVSPGERATLSCRASQSVSNDVAWYQQKPGQSPRLLINYASHRYYGVPDRFTGSGYGTEFTLTISSLQSEDFAVYFCQQDYSSPRTFGGGTKVEIKRTVAAPSVFIFPPSDEQLKSGTASVVCLLNNFYPREAKVQWKVDNALQSGNSQESVTEQDSKDSTYSLSSTLTLSKADYEKHKVYACEVTHQGLSSPVTKSFNRGEC

SEQ ID NO: 15031 - protein, 107 aa, synthetic construct; identical to SEQ ID NO: 9331
  source 1..107: note = Description of Artificial Sequence: Synthetic polypeptide; note = VL of XENP018440

SEQ ID NO: 15032 - protein, 11 aa, synthetic construct
  source 1..11: note = Description of Artificial Sequence: Synthetic peptide; note = XENP018440 vlCDR1
RASQSVSNDVA

SEQ ID NO: 15033 - protein, 7 aa, synthetic construct
  source 1..7: note = Description of Artificial Sequence: Synthetic peptide; note = XENP018440 vlCDR2
YASHRYY

SEQ ID NO: 15034 - protein, 9 aa, synthetic construct
  source 1..9: note = Description of Artificial Sequence: Synthetic peptide; note = XENP018440 vlCDR3
QQDYSSPRT

SEQ ID NO: 15035 - protein, 451 aa, synthetic construct; identical to SEQ ID NO: 11545
  source 1..451: note = Description of Artificial Sequence: Synthetic polypeptide; note = XENP018441 1G6_H1_L1.94_IgG1_PVA_/S267K Heavy Chain

SEQ ID NO: 15036 - protein, 122 aa, synthetic construct; identical to SEQ ID NO: 6246
  source 1..122: note = Description of Artificial Sequence: Synthetic polypeptide; note = VH of XENP018441

SEQ ID NO: 15037 - protein, 5 aa, synthetic construct
  source 1..5: note = Description of Artificial Sequence: Synthetic peptide; note = XENP018441 vhCDR1
NYWMN

SEQ ID NO: 15038 - protein, 19 aa, synthetic construct
  source 1..19: note = Description of Artificial Sequence: Synthetic peptide; note = XENP018441 vhCDR2
EIRLKSNNYATHYAEPVKG

SEQ ID NO: 15039 - protein, 11 aa, synthetic construct
  source 1..11: note = Description of Artificial Sequence: Synthetic peptide; note = XENP018441 vhCDR3
YYGNYGGYFDV

SEQ ID NO: 15040 - protein, 214 aa, synthetic construct
  source 1..214: note = Description of Artificial Sequence: Synthetic polypeptide; note = XENP018441 1G6_H1_L1.94_IgG1_PVA_/S267K Light Chain
SIVMTQSPATLSVSPGERATLSCRASQSVSNDVAWYQQKPGQSPRLLINYASHRYTSVPDRFTGSGYGTEFTLTISSLQSEDFAVYFCQQDYSSPRTFGGGTKVEIKRTVAAPSVFIFPPSDEQLKSGTASVVCLLNNFYPREAKVQWKVDNALQSGNSQESVTEQDSKDSTYSLSSTLTLSKADYEKHKVYACEVTHQGLSSPVTKSFNRGEC

SEQ ID NO: 15041 - protein, 107 aa, synthetic construct; identical to SEQ ID NO: 9340
  source 1..107: note = Description of Artificial Sequence: Synthetic polypeptide; note = VL of XENP018441

SEQ ID NO: 15042 - protein, 11 aa, synthetic construct
  source 1..11: note = Description of Artificial Sequence: Synthetic peptide; note = XENP018441 vlCDR1
RASQSVSNDVA

SEQ ID NO: 15043 - protein, 7 aa, synthetic construct
  source 1..7: note = Description of Artificial Sequence: Synthetic peptide; note = XENP018441 vlCDR2
YASHRYT

SEQ ID NO: 15044 - protein, 9 aa, synthetic construct
  source 1..9: note = Description of Artificial Sequence: Synthetic peptide; note = XENP018441 vlCDR3
QQDYSSPRT

SEQ ID NO: 15045 - protein, 451 aa, synthetic construct; identical to SEQ ID NO: 11545
  source 1..451: note = Description of Artificial Sequence: Synthetic polypeptide; note = XENP018442 1G6_H1_L1.95_IgG1_PVA_/S267K Heavy Chain

SEQ ID NO: 15046 - protein, 122 aa, synthetic construct; identical to SEQ ID NO: 6246
  source 1..122: note = Description of Artificial Sequence: Synthetic polypeptide; note = VH of XENP018442

SEQ ID NO: 15047 - protein, 5 aa, synthetic construct
  source 1..5: note = Description of Artificial Sequence: Synthetic peptide; note = XENP018442 vhCDR1
NYWMN

SEQ ID NO: 15048 - protein, 19 aa, synthetic construct
  source 1..19: note = Description of Artificial Sequence: Synthetic peptide; note = XENP018442 vhCDR2
EIRLKSNNYATHYAEPVKG

SEQ ID NO: 15049 - protein, 11 aa, synthetic construct
  source 1..11: note = Description of Artificial Sequence: Synthetic peptide; note = XENP018442 vhCDR3
YYGNYGGYFDV

SEQ ID NO: 15050 - protein, 214 aa, synthetic construct
  source 1..214: note = Description of Artificial Sequence: Synthetic polypeptide; note = XENP018442 1G6_H1_L1.95_IgG1_PVA_/S267K Light Chain
SIVMTQSPATLSVSPGERATLSCRASQSVSNDVAWYQQKPGQSPRLLINYASHRYTGIPDRFTGSGYGTEFTLTISSLQSEDFAVYFCQQDYSSPRTFGGGTKVEIKRTVAAPSVFIFPPSDEQLKSGTASVVCLLNNFYPREAKVQWKVDNALQSGNSQESVTEQDSKDSTYSLSSTLTLSKADYEKHKVYACEVTHQGLSSPVTKSFNRGEC

SEQ ID NO: 15051 - protein, 107 aa, synthetic construct; identical to SEQ ID NO: 9349
  source 1..107: note = Description of Artificial Sequence: Synthetic polypeptide; note = VL of XENP018442

SEQ ID NO: 15052 - protein, 11 aa, synthetic construct
  source 1..11: note = Description of Artificial Sequence: Synthetic peptide; note = XENP018442 vlCDR1
RASQSVSNDVA

SEQ ID NO: 15053 - protein, 7 aa, synthetic construct
  source 1..7: note = Description of Artificial Sequence: Synthetic peptide; note = XENP018442 vlCDR2
YASHRYT

SEQ ID NO: 15054 - protein, 9 aa, synthetic construct
  source 1..9: note = Description of Artificial Sequence: Synthetic peptide; note = XENP018442 vlCDR3
QQDYSSPRT

SEQ ID NO: 15055 - protein, 451 aa, synthetic construct; identical to SEQ ID NO: 11545
  source 1..451: note = Description of Artificial Sequence: Synthetic polypeptide; note = XENP018443 1G6_H1_L1.96_IgG1_PVA_/S267K Heavy Chain

SEQ ID NO: 15056 - protein, 122 aa, synthetic construct; identical to SEQ ID NO: 6246
  source 1..122: note = Description of Artificial Sequence: Synthetic polypeptide; note = VH of XENP018443

SEQ ID NO: 15057 - protein, 5 aa, synthetic construct
  source 1..5: note = Description of Artificial Sequence: Synthetic peptide; note = XENP018443 vhCDR1
NYWMN

SEQ ID NO: 15058 - protein, 19 aa, synthetic construct
  source 1..19: note = Description of Artificial Sequence: Synthetic peptide; note = XENP018443 vhCDR2
EIRLKSNNYATHYAEPVKG

SEQ ID NO: 15059 - protein, 11 aa, synthetic construct
  source 1..11: note = Description of Artificial Sequence: Synthetic peptide; note = XENP018443 vhCDR3
YYGNYGGYFDV

SEQ ID NO: 15060 - protein, 214 aa, synthetic construct
  source 1..214: note = Description of Artificial Sequence: Synthetic polypeptide; note = XENP018443 1G6_H1_L1.96_IgG1_PVA_/S267K Light Chain
SIVMTQSPATLSVSPGERATLSCRASQSVSNDVAWYQQKPGQSPRLLINYASHRYTGVPARFTGSGYGTEFTLTISSLQSEDFAVYFCQQDYSSPRTFGGGTKVEIKRTVAAPSVFIFPPSDEQLKSGTASVVCLLNNFYPREAKVQWKVDNALQSGNSQESVTEQDSKDSTYSLSSTLTLSKADYEKHKVYACEVTHQGLSSPVTKSFNRGEC

SEQ ID NO: 15061 - protein, 107 aa, synthetic construct; identical to SEQ ID NO: 9358
  source 1..107: note = Description of Artificial Sequence: Synthetic polypeptide; note = VL of XENP018443

SEQ ID NO: 15062 - protein, 11 aa, synthetic construct
  source 1..11: note = Description of Artificial Sequence: Synthetic peptide; note = XENP018443 vlCDR1
RASQSVSNDVA

SEQ ID NO: 15063 - protein, 7 aa, synthetic construct
  source 1..7: note = Description of Artificial Sequence: Synthetic peptide; note = XENP018443 vlCDR2
YASHRYT

SEQ ID NO: 15064 - protein, 9 aa, synthetic construct
  source 1..9: note = Description of Artificial Sequence: Synthetic peptide; note = XENP018443 vlCDR3
QQDYSSPRT

SEQ ID NO: 15065 - protein, 451 aa, synthetic construct; identical to SEQ ID NO: 11545
  source 1..451: note = Description of Artificial Sequence: Synthetic polypeptide; note = XENP018444 1G6_H1_L1.97_IgG1_PVA_/S267K Heavy Chain

SEQ ID NO: 15066 - protein, 122 aa, synthetic construct; identical to SEQ ID NO: 6246
  source 1..122: note = Description of Artificial Sequence: Synthetic polypeptide; note = VH of XENP018444

SEQ ID NO: 15067 - protein, 5 aa, synthetic construct
  source 1..5: note = Description of Artificial Sequence: Synthetic peptide; note = XENP018444 vhCDR1
NYWMN

SEQ ID NO: 15068 - protein, 19 aa, synthetic construct
  source 1..19: note = Description of Artificial Sequence: Synthetic peptide; note = XENP018444 vhCDR2
EIRLKSNNYATHYAEPVKG

SEQ ID NO: 15069 - protein, 11 aa, synthetic construct
  source 1..11: note = Description of Artificial Sequence: Synthetic peptide; note = XENP018444 vhCDR3
YYGNYGGYFDV

SEQ ID NO: 15070 - protein, 214 aa, synthetic construct
  source 1..214: note = Description of Artificial Sequence: Synthetic polypeptide; note = XENP018444 1G6_H1_L1.97_IgG1_PVA_/S267K Light Chain
SIVMTQSPATLSVSPGERATLSCRASQSVSNDVAWYQQKPGQSPRLLINYASHRYTGVPDRFSGSGYGTEFTLTISSLQSEDFAVYFCQQDYSSPRTFGGGTKVEIKRTVAAPSVFIFPPSDEQLKSGTASVVCLLNNFYPREAKVQWKVDNALQSGNSQESVTEQDSKDSTYSLSSTLTLSKADYEKHKVYACEVTHQGLSSPVTKSFNRGEC

SEQ ID NO: 15071 - protein, 107 aa, synthetic construct; identical to SEQ ID NO: 9367
  source 1..107: note = Description of Artificial Sequence: Synthetic polypeptide; note = VL of XENP018444

SEQ ID NO: 15072 - protein, 11 aa, synthetic construct
  source 1..11: note = Description of Artificial Sequence: Synthetic peptide; note = XENP018444 vlCDR1
RASQSVSNDVA

SEQ ID NO: 15073 - protein, 7 aa, synthetic construct
  source 1..7: note = Description of Artificial Sequence: Synthetic peptide; note = XENP018444 vlCDR2
YASHRYT

SEQ ID NO: 15074 - protein, 9 aa, synthetic construct
  source 1..9: note = Description of Artificial Sequence: Synthetic peptide; note = XENP018444 vlCDR3
QQDYSSPRT

SEQ ID NO: 15075 - protein, 451 aa, synthetic construct; identical to SEQ ID NO: 11545
  source 1..451: note = Description of Artificial Sequence: Synthetic polypeptide; note = XENP018445 1G6_H1_L1.98_IgG1_PVA_/S267K Heavy Chain

SEQ ID NO: 15076 - protein, 122 aa, synthetic construct; identical to SEQ ID NO: 6246
  source 1..122: note = Description of Artificial Sequence: Synthetic polypeptide; note = VH of XENP018445

SEQ ID NO: 15077 - protein, 5 aa, synthetic construct
  source 1..5: note = Description of Artificial Sequence: Synthetic peptide; note = XENP018445 vhCDR1
NYWMN

SEQ ID NO: 15078 - protein, 19 aa, synthetic construct
  source 1..19: note = Description of Artificial Sequence: Synthetic peptide; note = XENP018445 vhCDR2
EIRLKSNNYATHYAEPVKG

SEQ ID NO: 15079 - protein, 11 aa, synthetic construct
  source 1..11: note = Description of Artificial Sequence: Synthetic peptide; note = XENP018445 vhCDR3
YYGNYGGYFDV

SEQ ID NO: 15080 - protein, 214 aa, synthetic construct
  source 1..214: note = Description of Artificial Sequence: Synthetic polypeptide; note = XENP018445 1G6_H1_L1.98_IgG1_PVA_/S267K Light Chain
SIVMTQSPATLSVSPGERATLSCRASQSVSNDVAWYQQKPGQSPRLLINYASHRYTGVPDRFTGSGSGTEFTLTISSLQSEDFAVYFCQQDYSSPRTFGGGTKVEIKRTVAAPSVFIFPPSDEQLKSGTASVVCLLNNFYPREAKVQWKVDNALQSGNSQESVTEQDSKDSTYSLSSTLTLSKADYEKHKVYACEVTHQGLSSPVTKSFNRGEC

SEQ ID NO: 15081 - protein, 107 aa, synthetic construct; identical to SEQ ID NO: 9376
  source 1..107: note = Description of Artificial Sequence: Synthetic polypeptide; note = VL of XENP018445

SEQ ID NO: 15082 - protein, 11 aa, synthetic construct
  source 1..11: note = Description of Artificial Sequence: Synthetic peptide; note = XENP018445 vlCDR1
RASQSVSNDVA

SEQ ID NO: 15083 - protein, 7 aa, synthetic construct
  source 1..7: note = Description of Artificial Sequence: Synthetic peptide; note = XENP018445 vlCDR2
YASHRYT

SEQ ID NO: 15084 - protein, 9 aa, synthetic construct
  source 1..9: note = Description of Artificial Sequence: Synthetic peptide; note = XENP018445 vlCDR3
QQDYSSPRT

SEQ ID NO: 15085 - protein, 451 aa, synthetic construct; identical to SEQ ID NO: 11545
  source 1..451: note = Description of Artificial Sequence: Synthetic polypeptide; note = XENP018446 1G6_H1_L1.99_IgG1_PVA_/S267K Heavy Chain

SEQ ID NO: 15086 - protein, 122 aa, synthetic construct; identical to SEQ ID NO: 6246
  source 1..122: note = Description of Artificial Sequence: Synthetic polypeptide; note = VH of XENP018446

SEQ ID NO: 15087 - protein, 5 aa, synthetic construct
  source 1..5: note = Description of Artificial Sequence: Synthetic peptide; note = XENP018446 vhCDR1
NYWMN

SEQ ID NO: 15088 - protein, 19 aa, synthetic construct
  source 1..19: note = Description of Artificial Sequence: Synthetic peptide; note = XENP018446 vhCDR2
EIRLKSNNYATHYAEPVKG

SEQ ID NO: 15089 - protein, 11 aa, synthetic construct
  source 1..11: note = Description of Artificial Sequence: Synthetic peptide; note = XENP018446 vhCDR3
YYGNYGGYFDV

SEQ ID NO: 15090 - protein, 214 aa, synthetic construct
  source 1..214: note = Description of Artificial Sequence: Synthetic polypeptide; note = XENP018446 1G6_H1_L1.99_IgG1_PVA_/S267K Light Chain
SIVMTQSPATLSVSPGERATLSCRASQSVSNDVAWYQQKPGQSPRLLINYASHRYTGVPDRFTGSGPGTEFTLTISSLQSEDFAVYFCQQDYSSPRTFGGGTKVEIKRTVAAPSVFIFPPSDEQLKSGTASVVCLLNNFYPREAKVQWKVDNALQSGNSQESVTEQDSKDSTYSLSSTLTLSKADYEKHKVYACEVTHQGLSSPVTKSFNRGEC

SEQ ID NO: 15091 - protein, 107 aa, synthetic construct; identical to SEQ ID NO: 9385
  source 1..107: note = Description of Artificial Sequence: Synthetic polypeptide; note = VL of XENP018446

SEQ ID NO: 15092 - protein, 11 aa, synthetic construct
  source 1..11: note = Description of Artificial Sequence: Synthetic peptide; note = XENP018446 vlCDR1
RASQSVSNDVA

SEQ ID NO: 15093 - protein, 7 aa, synthetic construct
  source 1..7: note = Description of Artificial Sequence: Synthetic peptide; note = XENP018446 vlCDR2
YASHRYT

SEQ ID NO: 15094 - protein, 9 aa, synthetic construct
  source 1..9: note = Description of Artificial Sequence: Synthetic peptide; note = XENP018446 vlCDR3
QQDYSSPRT

SEQ ID NO: 15095 - protein, 451 aa, synthetic construct; identical to SEQ ID NO: 11545
  source 1..451: note = Description of Artificial Sequence: Synthetic polypeptide; note = XENP018447 1G6_H1_L1.100_IgG1_PVA_/S267K Heavy Chain

SEQ ID NO: 15096 - protein, 122 aa, synthetic construct; identical to SEQ ID NO: 6246
  source 1..122: note = Description of Artificial Sequence: Synthetic polypeptide; note = VH of XENP018447

SEQ ID NO: 15097 - protein, 5 aa, synthetic construct
  source 1..5: note = Description of Artificial Sequence: Synthetic peptide; note = XENP018447 vhCDR1
NYWMN

SEQ ID NO: 15098 - protein, 19 aa, synthetic construct
  source 1..19: note = Description of Artificial Sequence: Synthetic peptide; note = XENP018447 vhCDR2
EIRLKSNNYATHYAEPVKG

SEQ ID NO: 15099 - protein, 11 aa, synthetic construct
  source 1..11: note = Description of Artificial Sequence: Synthetic peptide; note = XENP018447 vhCDR3
YYGNYGGYFDV

SEQ ID NO: 15100 - protein, 214 aa, synthetic construct
  source 1..214: note = Description of Artificial Sequence: Synthetic polypeptide; note = XENP018447 1G6_H1_L1.100_IgG1_PVA_/S267K Light Chain
SIVMTQSPATLSVSPGERATLSCRASQSVSNDVAWYQQKPGQSPRLLINYASHRYTGVPDRFTGSGYGTDFTLTISSLQSEDFAVYFCQQDYSSPRTFGGGTKVEIKRTVAAPSVFIFPPSDEQLKSGTASVVCLLNNFYPREAKVQWKVDNALQSGNSQESVTEQDSKDSTYSLSSTLTLSKADYEKHKVYACEVTHQGLSSPVTKSFNRGEC

SEQ ID NO: 15101 - protein, 107 aa, synthetic construct; identical to SEQ ID NO: 9394
  source 1..107: note = Description of Artificial Sequence: Synthetic polypeptide; note = VL of XENP018447

SEQ ID NO: 15102 - protein, 11 aa, synthetic construct
  source 1..11: note = Description of Artificial Sequence: Synthetic peptide; note = XENP018447 vlCDR1
RASQSVSNDVA

SEQ ID NO: 15103 - protein, 7 aa, synthetic construct
  source 1..7: note = Description of Artificial Sequence: Synthetic peptide; note = XENP018447 vlCDR2
YASHRYT

SEQ ID NO: 15104 - protein, 9 aa, synthetic construct
  source 1..9: note = Description of Artificial Sequence: Synthetic peptide; note = XENP018447 vlCDR3
QQDYSSPRT

SEQ ID NO: 15105 - protein, 451 aa, synthetic construct; identical to SEQ ID NO: 11545
  source 1..451: note = Description of Artificial Sequence: Synthetic polypeptide; note = XENP018448 1G6_H1_L1.101_IgG1_PVA_/S267K Heavy Chain

SEQ ID NO: 15106 - protein, 122 aa, synthetic construct; identical to SEQ ID NO: 6246
  source 1..122: note = Description of Artificial Sequence: Synthetic polypeptide; note = VH of XENP018448

SEQ ID NO: 15107 - protein, 5 aa, synthetic construct
  source 1..5: note = Description of Artificial Sequence: Synthetic peptide; note = XENP018448 vhCDR1
NYWMN

SEQ ID NO: 15108 - protein, 19 aa, synthetic construct
  source 1..19: note = Description of Artificial Sequence: Synthetic peptide; note = XENP018448 vhCDR2
EIRLKSNNYATHYAEPVKG

SEQ ID NO: 15109 - protein, 11 aa, synthetic construct
  source 1..11: note = Description of Artificial Sequence: Synthetic peptide; note = XENP018448 vhCDR3
YYGNYGGYFDV

SEQ ID NO: 15110 - protein, 214 aa, synthetic construct
  source 1..214: note = Description of Artificial Sequence: Synthetic polypeptide; note = XENP018448 1G6_H1_L1.101_IgG1_PVA_/S267K Light Chain
SIVMTQSPATLSVSPGERATLSCRASQSVSNDVAWYQQKPGQSPRLLINYASHRYTGVPDRFTGSGYGTEFTFTISSLQSEDFAVYFCQQDYSSPRTFGGGTKVEIKRTVAAPSVFIFPPSDEQLKSGTASVVCLLNNFYPREAKVQWKVDNALQSGNSQESVTEQDSKDSTYSLSSTLTLSKADYEKHKVYACEVTHQGLSSPVTKSFNRGEC

SEQ ID NO: 15111 - protein, 107 aa, synthetic construct; identical to SEQ ID NO: 9403
  source 1..107: note = Description of Artificial Sequence: Synthetic polypeptide; note = VL of XENP018448

SEQ ID NO: 15112 - protein, 11 aa, synthetic construct
  source 1..11: note = Description of Artificial Sequence: Synthetic peptide; note = XENP018448 vlCDR1
RASQSVSNDVA

SEQ ID NO: 15113 - protein, 7 aa, synthetic construct
  source 1..7: note = Description of Artificial Sequence: Synthetic peptide; note = XENP018448 vlCDR2
YASHRYT

SEQ ID NO: 15114 - protein, 9 aa, synthetic construct
  source 1..9: note = Description of Artificial Sequence: Synthetic peptide; note = XENP018448 vlCDR3
QQDYSSPRT

SEQ ID NO: 15115 - protein, 451 aa, synthetic construct; identical to SEQ ID NO: 11545
  source 1..451: note = Description of Artificial Sequence: Synthetic polypeptide; note = XENP018449 1G6_H1_L1.102_IgG1_PVA_/S267K Heavy Chain

SEQ ID NO: 15116 - protein, 122 aa, synthetic construct; identical to SEQ ID NO: 6246
  source 1..122: note = Description of Artificial Sequence: Synthetic polypeptide; note = VH of XENP018449

SEQ ID NO: 15117 - protein, 5 aa, synthetic construct
  source 1..5: note = Description of Artificial Sequence: Synthetic peptide; note = XENP018449 vhCDR1
NYWMN

SEQ ID NO: 15118 - protein, 19 aa, synthetic construct
  source 1..19: note = Description of Artificial Sequence: Synthetic peptide; note = XENP018449 vhCDR2
EIRLKSNNYATHYAEPVKG

SEQ ID NO: 15119 - protein, 11 aa, synthetic construct
  source 1..11: note = Description of Artificial Sequence: Synthetic peptide; note = XENP018449 vhCDR3
YYGNYGGYFDV

SEQ ID NO: 15120 - protein, 214 aa, synthetic construct
  source 1..214: note = Description of Artificial Sequence: Synthetic polypeptide; note = XENP018449 1G6_H1_L1.102_IgG1_PVA_/S267K Light Chain
SIVMTQSPATLSVSPGERATLSCRASQSVSNDVAWYQQKPGQSPRLLINYASHRYTGVPDRFTGSGYGTEFTLTISTLQSEDFAVYFCQQDYSSPRTFGGGTKVEIKRTVAAPSVFIFPPSDEQLKSGTASVVCLLNNFYPREAKVQWKVDNALQSGNSQESVTEQDSKDSTYSLSSTLTLSKADYEKHKVYACEVTHQGLSSPVTKSFNRGEC

SEQ ID NO: 15121 - protein, 107 aa, synthetic construct; identical to SEQ ID NO: 9412
  source 1..107: note = Description of Artificial Sequence: Synthetic polypeptide; note = VL of XENP018449

SEQ ID NO: 15122 - protein, 11 aa, synthetic construct
  source 1..11: note = Description of Artificial Sequence: Synthetic peptide; note = XENP018449 vlCDR1
RASQSVSNDVA

SEQ ID NO: 15123 - protein, 7 aa, synthetic construct
  source 1..7: note = Description of Artificial Sequence: Synthetic peptide; note = XENP018449 vlCDR2
YASHRYT

SEQ ID NO: 15124 - protein, 9 aa, synthetic construct
  source 1..9: note = Description of Artificial Sequence: Synthetic peptide; note = XENP018449 vlCDR3
QQDYSSPRT

SEQ ID NO: 15125 - protein, 451 aa, synthetic construct; identical to SEQ ID NO: 11545
  source 1..451: note = Description of Artificial Sequence: Synthetic polypeptide; note = XENP018450 1G6_H1_L1.103_IgG1_PVA_/S267K Heavy Chain

SEQ ID NO: 15126 - protein, 122 aa, synthetic construct; identical to SEQ ID NO: 6246
  source 1..122: note = Description of Artificial Sequence: Synthetic polypeptide; note = VH of XENP018450

SEQ ID NO: 15127 - protein, 5 aa, synthetic construct
  source 1..5: note = Description of Artificial Sequence: Synthetic peptide; note = XENP018450 vhCDR1
NYWMN

SEQ ID NO: 15128 - protein, 19 aa, synthetic construct
  source 1..19: note = Description of Artificial Sequence: Synthetic peptide; note = XENP018450 vhCDR2
EIRLKSNNYATHYAEPVKG

SEQ ID NO: 15129 - protein, 11 aa, synthetic construct
  source 1..11: note = Description of Artificial Sequence: Synthetic peptide; note = XENP018450 vhCDR3
YYGNYGGYFDV

SEQ ID NO: 15130 - protein, 214 aa, synthetic construct
  source 1..214: note = Description of Artificial Sequence: Synthetic polypeptide; note = XENP018450 1G6_H1_L1.103_IgG1_PVA_/S267K Light Chain
SIVMTQSPATLSVSPGERATLSCRASQSVSNDVAWYQQKPGQSPRLLINYASHRYTGVPDRFTGSGYGTEFTLTISSVQSEDFAVYFCQQDYSSPRTFGGGTKVEIKRTVAAPSVFIFPPSDEQLKSGTASVVCLLNNFYPREAKVQWKVDNALQSGNSQESVTEQDSKDSTYSLSSTLTLSKADYEKHKVYACEVTHQGLSSPVTKSFNRGEC

SEQ ID NO: 15131 - protein, 107 aa, synthetic construct; identical to SEQ ID NO: 9421
  source 1..107: note = Description of Artificial Sequence: Synthetic polypeptide; note = VL of XENP018450

SEQ ID NO: 15132 - protein, 11 aa, synthetic construct
  source 1..11: note = Description of Artificial Sequence: Synthetic peptide; note = XENP018450 vlCDR1
RASQSVSNDVA

SEQ ID NO: 15133 - protein, 7 aa, synthetic construct
  source 1..7: note = Description of Artificial Sequence: Synthetic peptide; note = XENP018450 vlCDR2
YASHRYT

SEQ ID NO: 15134 - protein, 9 aa, synthetic construct
  source 1..9: note = Description of Artificial Sequence: Synthetic peptide; note = XENP018450 vlCDR3
QQDYSSPRT

SEQ ID NO: 15135 - protein, 451 aa, synthetic construct; identical to SEQ ID NO: 11545
  source 1..451: note = Description of Artificial Sequence: Synthetic polypeptide; note = XENP018451 1G6_H1_L1.104_IgG1_PVA_/S267K Heavy Chain

SEQ ID NO: 15136 - protein, 122 aa, synthetic construct; identical to SEQ ID NO: 6246
  source 1..122: note = Description of Artificial Sequence: Synthetic polypeptide; note = VH of XENP018451

SEQ ID NO: 15137 - protein, 5 aa, synthetic construct
  source 1..5: note = Description of Artificial Sequence: Synthetic peptide; note = XENP018451 vhCDR1
NYWMN

SEQ ID NO: 15138 - protein, 19 aa, synthetic construct
  source 1..19: note = Description of Artificial Sequence: Synthetic peptide; note = XENP018451 vhCDR2
EIRLKSNNYATHYAEPVKG

SEQ ID NO: 15139 - protein, 11 aa, synthetic construct
  source 1..11: note = Description of Artificial Sequence: Synthetic peptide; note = XENP018451 vhCDR3
YYGNYGGYFDV

SEQ ID NO: 15140 - protein, 214 aa, synthetic construct
  source 1..214: note = Description of Artificial Sequence: Synthetic polypeptide; note = XENP018451 1G6_H1_L1.104_IgG1_PVA_/S267K Light Chain
SIVMTQSPATLSVSPGERATLSCRASQSVSNDVAWYQQKPGQSPRLLINYASHRYTGVPDRFTGSGYGTEFTLTISSLQAEDFAVYFCQQDYSSPRTFGGGTKVEIKRTVAAPSVFIFPPSDEQLKSGTASVVCLLNNFYPREAKVQWKVDNALQSGNSQESVTEQDSKDSTYSLSSTLTLSKADYEKHKVYACEVTHQGLSSPVTKSFNRGEC

SEQ ID NO: 15141 - protein, 107 aa, synthetic construct; identical to SEQ ID NO: 9430
  source 1..107: note = Description of Artificial Sequence: Synthetic polypeptide; note = VL of XENP018451

SEQ ID NO: 15142 - protein, 11 aa, synthetic construct
  source 1..11: note = Description of Artificial Sequence: Synthetic peptide; note = XENP018451 vlCDR1
RASQSVSNDVA

SEQ ID NO: 15143 - protein, 7 aa, synthetic construct
  source 1..7: note = Description of Artificial Sequence: Synthetic peptide; note = XENP018451 vlCDR2
YASHRYT

SEQ ID NO: 15144 - protein, 9 aa, synthetic construct
  source 1..9: note = Description of Artificial Sequence: Synthetic peptide; note = XENP018451 vlCDR3
QQDYSSPRT

SEQ ID NO: 15145 - protein, 451 aa, synthetic construct; identical to SEQ ID NO: 11545
  source 1..451: note = Description of Artificial Sequence: Synthetic polypeptide; note = XENP018452 1G6_H1_L1.105_IgG1_PVA_/S267K Heavy Chain

SEQ ID NO: 15146 - protein, 122 aa, synthetic construct; identical to SEQ ID NO: 6246
  source 1..122: note = Description of Artificial Sequence: Synthetic polypeptide; note = VH of XENP018452

SEQ ID NO: 15147 - protein, 5 aa, synthetic construct
  source 1..5: note = Description of Artificial Sequence: Synthetic peptide; note = XENP018452 vhCDR1
NYWMN

SEQ ID NO: 15148 - protein, 19 aa, synthetic construct
  source 1..19: note = Description of Artificial Sequence: Synthetic peptide; note = XENP018452 vhCDR2
EIRLKSNNYATHYAEPVKG

SEQ ID NO: 15149 - protein, 11 aa, synthetic construct
  source 1..11: note = Description of Artificial Sequence: Synthetic peptide; note = XENP018452 vhCDR3
YYGNYGGYFDV

SEQ ID NO: 15150 - protein, 214 aa, synthetic construct
  source 1..214: note = Description of Artificial Sequence: Synthetic polypeptide; note = XENP018452 1G6_H1_L1.105_IgG1_PVA_/S267K Light Chain
SIVMTQSPATLSVSPGERATLSCRASQSVSNDVAWYQQKPGQSPRLLINYASHRYTGVPDRFTGSGYGTEFTLTISSLQSEDLAVYFCQQDYSSPRTFGGGTKVEIKRTVAAPSVFIFPPSDEQLKSGTASVVCLLNNFYPREAKVQWKVDNALQSGNSQESVTEQDSKDSTYSLSSTLTLSKADYEKHKVYACEVTHQGLSSPVTKSFNRGEC

SEQ ID NO: 15151 - protein, 107 aa, synthetic construct; identical to SEQ ID NO: 9439
  source 1..107: note = Description of Artificial Sequence: Synthetic polypeptide; note = VL of XENP018452

SEQ ID NO: 15152 - protein, 11 aa, synthetic construct
  source 1..11: note = Description of Artificial Sequence: Synthetic peptide; note = XENP018452 vlCDR1
RASQSVSNDVA

SEQ ID NO: 15153 - protein, 7 aa, synthetic construct
  source 1..7: note = Description of Artificial Sequence: Synthetic peptide; note = XENP018452 vlCDR2
YASHRYT

SEQ ID NO: 15154 - protein, 9 aa, synthetic construct
  source 1..9: note = Description of Artificial Sequence: Synthetic peptide; note = XENP018452 vlCDR3
QQDYSSPRT

SEQ ID NO: 15155 - protein, 451 aa, synthetic construct; identical to SEQ ID NO: 11545
  source 1..451: note = Description of Artificial Sequence: Synthetic polypeptide; note = XENP018453 1G6_H1_L1.106_IgG1_PVA_/S267K Heavy Chain

SEQ ID NO: 15156 - protein, 122 aa, synthetic construct; identical to SEQ ID NO: 6246
  source 1..122: note = Description of Artificial Sequence: Synthetic polypeptide; note = VH of XENP018453

SEQ ID NO: 15157 - protein, 5 aa, synthetic construct
  source 1..5: note = Description of Artificial Sequence: Synthetic peptide; note = XENP018453 vhCDR1
NYWMN

SEQ ID NO: 15158 - protein, 19 aa, synthetic construct
  source 1..19: note = Description of Artificial Sequence: Synthetic peptide; note = XENP018453 vhCDR2
EIRLKSNNYATHYAEPVKG

SEQ ID NO: 15159 - protein, 11 aa, synthetic construct
  source 1..11: note = Description of Artificial Sequence: Synthetic peptide; note = XENP018453 vhCDR3
YYGNYGGYFDV

SEQ ID NO: 15160 - protein, 214 aa, synthetic construct
  source 1..214: note = Description of Artificial Sequence: Synthetic polypeptide; note = XENP018453 1G6_H1_L1.106_IgG1_PVA_/S267K Light Chain
SIVMTQSPATLSVSPGERATLSCRASQSVSNDVAWYQQKPGQSPRLLINYASHRYTGVPDRFTGSGYGTEFTLTISSLQSEDFAVYYCQQDYSSPRTFGGGTKVEIKRTVAAPSVFIFPPSDEQLKSGTASVVCLLNNFYPREAKVQWKVDNALQSGNSQESVTEQDSKDSTYSLSSTLTLSKADYEKHKVYACEVTHQGLSSPVTKSFNRGEC

SEQ ID NO: 15161 - protein, 107 aa, synthetic construct; identical to SEQ ID NO: 9448
  source 1..107: note = Description of Artificial Sequence: Synthetic polypeptide; note = VL of XENP018453

SEQ ID NO: 15162 - protein, 11 aa, synthetic construct
  source 1..11: note = Description of Artificial Sequence: Synthetic peptide; note = XENP018453 vlCDR1
RASQSVSNDVA

SEQ ID NO: 15163 - protein, 7 aa, synthetic construct
  source 1..7: note = Description of Artificial Sequence: Synthetic peptide; note = XENP018453 vlCDR2
YASHRYT

SEQ ID NO: 15164 - protein, 9 aa, synthetic construct
  source 1..9: note = Description of Artificial Sequence: Synthetic peptide; note = XENP018453 vlCDR3
QQDYSSPRT

SEQ ID NO: 15165 - protein, 451 aa, synthetic construct; identical to SEQ ID NO: 11545
  source 1..451: note = Description of Artificial Sequence: Synthetic polypeptide; note = XENP018454 1G6_H1_L1.107_IgG1_PVA_/S267K Heavy Chain

SEQ ID NO: 15166 - protein, 122 aa, synthetic construct; identical to SEQ ID NO: 6246
  source 1..122: note = Description of Artificial Sequence: Synthetic polypeptide; note = VH of XENP018454

SEQ ID NO: 15167 - protein, 5 aa, synthetic construct
  source 1..5: note = Description of Artificial Sequence: Synthetic peptide; note = XENP018454 vhCDR1
NYWMN

SEQ ID NO: 15168 - protein, 19 aa, synthetic construct
  source 1..19: note = Description of Artificial Sequence: Synthetic peptide; note = XENP018454 vhCDR2
EIRLKSNNYATHYAEPVKG

SEQ ID NO: 15169 - protein, 11 aa, synthetic construct
  source 1..11: note = Description of Artificial Sequence: Synthetic peptide; note = XENP018454 vhCDR3
YYGNYGGYFDV

SEQ ID NO: 15170 - protein, 214 aa, synthetic construct
  source 1..214: note = Description of Artificial Sequence: Synthetic polypeptide; note = XENP018454 1G6_H1_L1.107_IgG1_PVA_/S267K Light Chain
SIVMTQSPATLSVSPGERATLSCRASQSVSNDVAWYQQKPGQSPRLLINYASHRYTGVPDRFTGSGYGTEFTLTISSLQSEDFAVYFCQQQYSSPRTFGGGTKVEIKRTVAAPSVFIFPPSDEQLKSGTASVVCLLNNFYPREAKVQWKVDNALQSGNSQESVTEQDSKDSTYSLSSTLTLSKADYEKHKVYACEVTHQGLSSPVTKSFNRGEC

SEQ ID NO: 15171 - protein, 107 aa, synthetic construct; identical to SEQ ID NO: 9457
  source 1..107: note = Description of Artificial Sequence: Synthetic polypeptide; note = VL of XENP018454

SEQ ID NO: 15172 - protein, 11 aa, synthetic construct
  source 1..11: note = Description of Artificial Sequence: Synthetic peptide; note = XENP018454 vlCDR1
RASQSVSNDVA

SEQ ID NO: 15173 - protein, 7 aa, synthetic construct
  source 1..7: note = Description of Artificial Sequence: Synthetic peptide; note = XENP018454 vlCDR2
YASHRYT

SEQ ID NO: 15174 - protein, 9 aa, synthetic construct
  source 1..9: note = Description of Artificial Sequence: Synthetic peptide; note = XENP018454 vlCDR3
QQQYSSPRT

SEQ ID NO: 15175 - protein, 451 aa, synthetic construct; identical to SEQ ID NO: 11545
  source 1..451: note = Description of Artificial Sequence: Synthetic polypeptide; note = XENP018455 1G6_H1_L1.108_IgG1_PVA_/S267K Heavy Chain

SEQ ID NO: 15176 - protein, 122 aa, synthetic construct; identical to SEQ ID NO: 6246
  source 1..122: note = Description of Artificial Sequence: Synthetic polypeptide; note = VH of XENP018455

SEQ ID NO: 15177 - protein, 5 aa, synthetic construct
  source 1..5: note = Description of Artificial Sequence: Synthetic peptide; note = XENP018455 vhCDR1
NYWMN

SEQ ID NO: 15178 - protein, 19 aa, synthetic construct
  source 1..19: note = Description of Artificial Sequence: Synthetic peptide; note = XENP018455 vhCDR2
EIRLKSNNYATHYAEPVKG

SEQ ID NO: 15179 - protein, 11 aa, synthetic construct
  source 1..11: note = Description of Artificial Sequence: Synthetic peptide; note = XENP018455 vhCDR3
YYGNYGGYFDV

SEQ ID NO: 15180 - protein, 214 aa, synthetic construct
  source 1..214: note = Description of Artificial Sequence: Synthetic polypeptide; note = XENP018455 1G6_H1_L1.108_IgG1_PVA_/S267K Light Chain
SIVMTQSPATLSVSPGERATLSCRASQSVSNDVAWYQQKPGQSPRLLINYASHRYTGVPDRFTGSGYGTEFTLTISSLQSEDFAVYFCQQEYSSPRTFGGGTKVEIKRTVAAPSVFIFPPSDEQLKSGTASVVCLLNNFYPREAKVQWKVDNALQSGNSQESVTEQDSKDSTYSLSSTLTLSKADYEKHKVYACEVTHQGLSSPVTKSFNRGEC

SEQ ID NO: 15181 - protein, 107 aa, synthetic construct; identical to SEQ ID NO: 9466
  source 1..107: note = Description of Artificial Sequence: Synthetic polypeptide; note = VL of XENP018455

SEQ ID NO: 15182 - protein, 11 aa, synthetic construct
  source 1..11: note = Description of Artificial Sequence: Synthetic peptide; note = XENP018455 vlCDR1
RASQSVSNDVA

SEQ ID NO: 15183 - protein, 7 aa, synthetic construct
  source 1..7: note = Description of Artificial Sequence: Synthetic peptide; note = XENP018455 vlCDR2
YASHRYT

SEQ ID NO: 15184 - protein, 9 aa, synthetic construct
  source 1..9: note = Description of Artificial Sequence: Synthetic peptide; note = XENP018455 vlCDR3
QQEYSSPRT

SEQ ID NO: 15185 - protein, 451 aa, synthetic construct; identical to SEQ ID NO: 11545
  source 1..451: note = Description of Artificial Sequence: Synthetic polypeptide; note = XENP018456 1G6_H1_L1.109_IgG1_PVA_/S267K Heavy Chain

SEQ ID NO: 15186 - protein, 122 aa, synthetic construct; identical to SEQ ID NO: 6246
  source 1..122: note = Description of Artificial Sequence: Synthetic polypeptide; note = VH of XENP018456

SEQ ID NO: 15187 - protein, 5 aa, synthetic construct
  source 1..5: note = Description of Artificial Sequence: Synthetic peptide; note = XENP018456 vhCDR1
NYWMN

SEQ ID NO: 15188 - protein, 19 aa, synthetic construct
  source 1..19: note = Description of Artificial Sequence: Synthetic peptide; note = XENP018456 vhCDR2
EIRLKSNNYATHYAEPVKG

SEQ ID NO: 15189 - protein, 11 aa, synthetic construct
  source 1..11: note = Description of Artificial Sequence: Synthetic peptide; note = XENP018456 vhCDR3
YYGNYGGYFDV

SEQ ID NO: 15190 - protein, 214 aa, synthetic construct
  source 1..214: note = Description of Artificial Sequence: Synthetic polypeptide; note = XENP018456 1G6_H1_L1.109_IgG1_PVA_/S267K Light Chain
SIVMTQSPATLSVSPGERATLSCRASQSVSNDVAWYQQKPGQSPRLLINYASHRYTGVPDRFTGSGYGTEFTLTISSLQSEDFAVYFCQQHYSSPRTFGGGTKVEIKRTVAAPSVFIFPPSDEQLKSGTASVVCLLNNFYPREAKVQWKVDNALQSGNSQESVTEQDSKDSTYSLSSTLTLSKADYEKHKVYACEVTHQGLSSPVTKSFNRGEC

SEQ ID NO: 15191 - protein, 107 aa, synthetic construct; identical to SEQ ID NO: 9475
  source 1..107: note = Description of Artificial Sequence: Synthetic polypeptide; note = VL of XENP018456

SEQ ID NO: 15192 - protein, 11 aa, synthetic construct
  source 1..11: note = Description of Artificial Sequence: Synthetic peptide; note = XENP018456 vlCDR1
RASQSVSNDVA

SEQ ID NO: 15193 - protein, 7 aa, synthetic construct
  source 1..7: note = Description of Artificial Sequence: Synthetic peptide; note = XENP018456 vlCDR2
YASHRYT

SEQ ID NO: 15194 - protein, 9 aa, synthetic construct
  source 1..9: note = Description of Artificial Sequence: Synthetic peptide; note = XENP018456 vlCDR3
QQHYSSPRT

SEQ ID NO: 15195 - protein, 451 aa, synthetic construct; identical to SEQ ID NO: 11545
  source 1..451: note = Description of Artificial Sequence: Synthetic polypeptide; note = XENP018457 1G6_H1_L1.110_IgG1_PVA_/S267K Heavy Chain

SEQ ID NO: 15196 - protein, 122 aa, synthetic construct; identical to SEQ ID NO: 6246
  source 1..122: note = Description of Artificial Sequence: Synthetic polypeptide; note = VH of XENP018457

SEQ ID NO: 15197 - protein, 5 aa, synthetic construct
  source 1..5: note = Description of Artificial Sequence: Synthetic peptide; note = XENP018457 vhCDR1
NYWMN

SEQ ID NO: 15198 - protein, 19 aa, synthetic construct
  source 1..19: note = Description of Artificial Sequence: Synthetic peptide; note = XENP018457 vhCDR2
EIRLKSNNYATHYAEPVKG

SEQ ID NO: 15199 - protein, 11 aa, synthetic construct
  source 1..11: note = Description of Artificial Sequence: Synthetic peptide; note = XENP018457 vhCDR3
YYGNYGGYFDV

SEQ ID NO: 15200 - protein, 214 aa, synthetic construct
  source 1..214: note = Description of Artificial Sequence: Synthetic polypeptide; note = XENP018457 1G6_H1_L1.110_IgG1_PVA_/S267K Light Chain
SIVMTQSPATLSVSPGERATLSCRASQSVSNDVAWYQQKPGQSPRLLINYASHRYTGVPDRFTGSGYGTEFTLTISSLQSEDFAVYFCQQSYSSPRTFGGGTKVEIKRTVAAPSVFIFPPSDEQLKSGTASVVCLLNNFYPREAKVQWKVDNALQSGNSQESVTEQDSKDSTYSLSSTLTLSKADYEKHKVYACEVTHQGLSSPVTKSFNRGEC

SEQ ID NO: 15201 - protein, 107 aa, synthetic construct; identical to SEQ ID NO: 9484
  source 1..107: note = Description of Artificial Sequence: Synthetic polypeptide; note = VL of XENP018457

SEQ ID NO: 15202 - protein, 11 aa, synthetic construct
  source 1..11: note = Description of Artificial Sequence: Synthetic peptide; note = XENP018457 vlCDR1
RASQSVSNDVA

SEQ ID NO: 15203 - protein, 7 aa, synthetic construct
  source 1..7: note = Description of Artificial Sequence: Synthetic peptide; note = XENP018457 vlCDR2
YASHRYT

SEQ ID NO: 15204 - protein, 9 aa, synthetic construct
  source 1..9: note = Description of Artificial Sequence: Synthetic peptide; note = XENP018457 vlCDR3
QQSYSSPRT

SEQ ID NO: 15205 - protein, 451 aa, synthetic construct; identical to SEQ ID NO: 11545
  source 1..451: note = Description of Artificial Sequence: Synthetic polypeptide; note = XENP018458 1G6_H1_L1.111_IgG1_PVA_/S267K Heavy Chain

SEQ ID NO: 15206 - protein, 122 aa, synthetic construct; identical to SEQ ID NO: 6246
  source 1..122: note = Description of Artificial Sequence: Synthetic polypeptide; note = VH of XENP018458

SEQ ID NO: 15207 - protein, 5 aa, synthetic construct
  source 1..5: note = Description of Artificial Sequence: Synthetic peptide; note = XENP018458 vhCDR1
NYWMN

SEQ ID NO: 15208 - protein, 19 aa, synthetic construct
  source 1..19: note = Description of Artificial Sequence: Synthetic peptide; note = XENP018458 vhCDR2
EIRLKSNNYATHYAEPVKG

SEQ ID NO: 15209 - protein, 11 aa, synthetic construct
  source 1..11: note = Description of Artificial Sequence: Synthetic peptide; note = XENP018458 vhCDR3
YYGNYGGYFDV

SEQ ID NO: 15210 - protein, 214 aa, synthetic construct
  source 1..214: note = Description of Artificial Sequence: Synthetic polypeptide; note = XENP018458 1G6_H1_L1.111_IgG1_PVA_/S267K Light Chain
SIVMTQSPATLSVSPGERATLSCRASQSVSNDVAWYQQKPGQSPRLLINYASHRYTGVPDRFTGSGYGTEFTLTISSLQSEDFAVYFCQQRYSSPRTFGGGTKVEIKRTVAAPSVFIFPPSDEQLKSGTASVVCLLNNFYPREAKVQWKVDNALQSGNSQESVTEQDSKDSTYSLSSTLTLSKADYEKHKVYACEVTHQGLSSPVTKSFNRGEC

SEQ ID NO: 15211 - protein, 107 aa, synthetic construct; identical to SEQ ID NO: 9493
  source 1..107: note = Description of Artificial Sequence: Synthetic polypeptide; note = VL of XENP018458

SEQ ID NO: 15212 - protein, 11 aa, synthetic construct
  source 1..11: note = Description of Artificial Sequence: Synthetic peptide; note = XENP018458 vlCDR1
RASQSVSNDVA

SEQ ID NO: 15213 - protein, 7 aa, synthetic construct
  source 1..7: note = Description of Artificial Sequence: Synthetic peptide; note = XENP018458 vlCDR2
YASHRYT

SEQ ID NO: 15214 - protein, 9 aa, synthetic construct
  source 1..9: note = Description of Artificial Sequence: Synthetic peptide; note = XENP018458 vlCDR3
QQRYSSPRT

SEQ ID NO: 15215 - protein, 451 aa, synthetic construct; identical to SEQ ID NO: 11545
  source 1..451: note = Description of Artificial Sequence: Synthetic polypeptide; note = XENP018459 1G6_H1_L1.112_IgG1_PVA_/S267K Heavy Chain

SEQ ID NO: 15216 - protein, 122 aa, synthetic construct; identical to SEQ ID NO: 6246
  source 1..122: note = Description of Artificial Sequence: Synthetic polypeptide; note = VH of XENP018459

SEQ ID NO: 15217 - protein, 5 aa, synthetic construct
  source 1..5: note = Description of Artificial Sequence: Synthetic peptide; note = XENP018459 vhCDR1
NYWMN

SEQ ID NO: 15218 - protein, 19 aa, synthetic construct
  source 1..19: note = Description of Artificial Sequence: Synthetic peptide; note = XENP018459 vhCDR2
EIRLKSNNYATHYAEPVKG

SEQ ID NO: 15219 - protein, 11 aa, synthetic construct
  source 1..11: note = Description of Artificial Sequence: Synthetic peptide; note = XENP018459 vhCDR3
YYGNYGGYFDV

SEQ ID NO: 15220 - protein, 214 aa, synthetic construct
  source 1..214: note = Description of Artificial Sequence: Synthetic polypeptide; note = XENP018459 1G6_H1_L1.112_IgG1_PVA_/S267K Light Chain
SIVMTQSPATLSVSPGERATLSCRASQSVSNDVAWYQQKPGQSPRLLINYASHRYTGVPDRFTGSGYGTEFTLTISSLQSEDFAVYFCQQLYSSPRTFGGGTKVEIKRTVAAPSVFIFPPSDEQLKSGTASVVCLLNNFYPREAKVQWKVDNALQSGNSQESVTEQDSKDSTYSLSSTLTLSKADYEKHKVYACEVTHQGLSSPVTKSFNRGEC

SEQ ID NO: 15221 - protein, 107 aa, synthetic construct; identical to SEQ ID NO: 9502
  source 1..107: note = Description of Artificial Sequence: Synthetic polypeptide; note = VL of XENP018459

SEQ ID NO: 15222 - protein, 11 aa, synthetic construct
  source 1..11: note = Description of Artificial Sequence: Synthetic peptide; note = XENP018459 vlCDR1
RASQSVSNDVA

SEQ ID NO: 15223 - protein, 7 aa, synthetic construct
  source 1..7: note = Description of Artificial Sequence: Synthetic peptide; note = XENP018459 vlCDR2
YASHRYT

SEQ ID NO: 15224 - protein, 9 aa, synthetic construct
  source 1..9: note = Description of Artificial Sequence: Synthetic peptide; note = XENP018459 vlCDR3
QQLYSSPRT

SEQ ID NO: 15225 - protein, 451 aa, synthetic construct; identical to SEQ ID NO: 11545
  source 1..451: note = Description of Artificial Sequence: Synthetic polypeptide; note = XENP018460 1G6_H1_L1.113_IgG1_PVA_/S267K Heavy Chain

SEQ ID NO: 15226 - protein, 122 aa, synthetic construct; identical to SEQ ID NO: 6246
  source 1..122: note = Description of Artificial Sequence: Synthetic polypeptide; note = VH of XENP018460

SEQ ID NO: 15227 - protein, 5 aa, synthetic construct
  source 1..5: note = Description of Artificial Sequence: Synthetic peptide; note = XENP018460 vhCDR1
NYWMN

SEQ ID NO: 15228 - protein, 19 aa, synthetic construct
  source 1..19: note = Description of Artificial Sequence: Synthetic peptide; note = XENP018460 vhCDR2
EIRLKSNNYATHYAEPVKG

SEQ ID NO: 15229 - protein, 11 aa, synthetic construct
  source 1..11: note = Description of Artificial Sequence: Synthetic peptide; note = XENP018460 vhCDR3
YYGNYGGYFDV

SEQ ID NO: 15230 - protein, 214 aa, synthetic construct
  source 1..214: note = Description of Artificial Sequence: Synthetic polypeptide; note = XENP018460 1G6_H1_L1.113_IgG1_PVA_/S267K Light Chain
SIVMTQSPATLSVSPGERATLSCRASQSVSNDVAWYQQKPGQSPRLLINYASHRYTGVPDRFTGSGYGTEFTLTISSLQSEDFAVYFCQQTYSSPRTFGGGTKVEIKRTVAAPSVFIFPPSDEQLKSGTASVVCLLNNFYPREAKVQWKVDNALQSGNSQESVTEQDSKDSTYSLSSTLTLSKADYEKHKVYACEVTHQGLSSPVTKSFNRGEC

SEQ ID NO: 15231 - protein, 107 aa, synthetic construct; identical to SEQ ID NO: 9511
  source 1..107: note = Description of Artificial Sequence: Synthetic polypeptide; note = VL of XENP018460

SEQ ID NO: 15232 - protein, 11 aa, synthetic construct
  source 1..11: note = Description of Artificial Sequence: Synthetic peptide; note = XENP018460 vlCDR1
RASQSVSNDVA

SEQ ID NO: 15233 - protein, 7 aa, synthetic construct
  source 1..7: note = Description of Artificial Sequence: Synthetic peptide; note = XENP018460 vlCDR2
YASHRYT

SEQ ID NO: 15234 - protein, 9 aa, synthetic construct
  source 1..9: note = Description of Artificial Sequence: Synthetic peptide; note = XENP018460 vlCDR3
QQTYSSPRT

SEQ ID NO: 15235 - protein, 451 aa, synthetic construct; identical to SEQ ID NO: 11545
  source 1..451: note = Description of Artificial Sequence: Synthetic polypeptide; note = XENP018461 1G6_H1_L1.114_IgG1_PVA_/S267K Heavy Chain

SEQ ID NO: 15236 - protein, 122 aa, synthetic construct; identical to SEQ ID NO: 6246
  source 1..122: note = Description of Artificial Sequence: Synthetic polypeptide; note = VH of XENP018461

SEQ ID NO: 15237 - protein, 5 aa, synthetic construct
  source 1..5: note = Description of Artificial Sequence: Synthetic peptide; note = XENP018461 vhCDR1
NYWMN

SEQ ID NO: 15238 - protein, 19 aa, synthetic construct
  source 1..19: note = Description of Artificial Sequence: Synthetic peptide; note = XENP018461 vhCDR2
EIRLKSNNYATHYAEPVKG

SEQ ID NO: 15239 - protein, 11 aa, synthetic construct
  source 1..11: note = Description of Artificial Sequence: Synthetic peptide; note = XENP018461 vhCDR3
YYGNYGGYFDV

SEQ ID NO: 15240 - protein, 214 aa, synthetic construct
  source 1..214: note = Description of Artificial Sequence: Synthetic polypeptide; note = XENP018461 1G6_H1_L1.114_IgG1_PVA_/S267K Light Chain
SIVMTQSPATLSVSPGERATLSCRASQSVSNDVAWYQQKPGQSPRLLINYASHRYTGVPDRFTGSGYGTEFTLTISSLQSEDFAVYFCQQGYSSPRTFGGGTKVEIKRTVAAPSVFIFPPSDEQLKSGTASVVCLLNNFYPREAKVQWKVDNALQSGNSQESVTEQDSKDSTYSLSSTLTLSKADYEKHKVYACEVTHQGLSSPVTKSFNRGEC

SEQ ID NO: 15241 - protein, 107 aa, synthetic construct; identical to SEQ ID NO: 9520
  source 1..107: note = Description of Artificial Sequence: Synthetic polypeptide; note = VL of XENP018461

SEQ ID NO: 15242 - protein, 11 aa, synthetic construct
  source 1..11: note = Description of Artificial Sequence: Synthetic peptide; note = XENP018461 vlCDR1
RASQSVSNDVA

SEQ ID NO: 15243 - protein, 7 aa, synthetic construct
  source 1..7: note = Description of Artificial Sequence: Synthetic peptide; note = XENP018461 vlCDR2
YASHRYT

SEQ ID NO: 15244 - protein, 9 aa, synthetic construct
  source 1..9: note = Description of Artificial Sequence: Synthetic peptide; note = XENP018461 vlCDR3
QQGYSSPRT

SEQ ID NO: 15245 - protein, 451 aa, synthetic construct; identical to SEQ ID NO: 11545
  source 1..451: note = Description of Artificial Sequence: Synthetic polypeptide; note = XENP018462 1G6_H1_L1.115_IgG1_PVA_/S267K Heavy Chain

SEQ ID NO: 15246 - protein, 122 aa, synthetic construct; identical to SEQ ID NO: 6246
  source 1..122: note = Description of Artificial Sequence: Synthetic polypeptide; note = VH of XENP018462

SEQ ID NO: 15247 - protein, 5 aa, synthetic construct
  source 1..5: note = Description of Artificial Sequence: Synthetic peptide; note = XENP018462 vhCDR1
NYWMN

SEQ ID NO: 15248 - protein, 19 aa, synthetic construct
  source 1..19: note = Description of Artificial Sequence: Synthetic peptide; note = XENP018462 vhCDR2
EIRLKSNNYATHYAEPVKG

SEQ ID NO: 15249 - protein, 11 aa, synthetic construct
  source 1..11: note = Description of Artificial Sequence: Synthetic peptide; note = XENP018462 vhCDR3
YYGNYGGYFDV

SEQ ID NO: 15250 - protein, 214 aa, synthetic construct
  source 1..214: note = Description of Artificial Sequence: Synthetic polypeptide; note = XENP018462 1G6_H1_L1.115_IgG1_PVA_/S267K Light Chain
SIVMTQSPATLSVSPGERATLSCRASQSVSNDVAWYQQKPGQSPRLLINYASHRYTGVPDRFTGSGYGTEFTLTISSLQSEDFAVYFCQQYYSSPRTFGGGTKVEIKRTVAAPSVFIFPPSDEQLKSGTASVVCLLNNFYPREAKVQWKVDNALQSGNSQESVTEQDSKDSTYSLSSTLTLSKADYEKHKVYACEVTHQGLSSPVTKSFNRGEC

SEQ ID NO: 15251 - protein, 107 aa, synthetic construct; identical to SEQ ID NO: 9529
  source 1..107: note = Description of Artificial Sequence: Synthetic polypeptide; note = VL of XENP018462

SEQ ID NO: 15252 - protein, 11 aa, synthetic construct
  source 1..11: note = Description of Artificial Sequence: Synthetic peptide; note = XENP018462 vlCDR1
RASQSVSNDVA

SEQ ID NO: 15253 - protein, 7 aa, synthetic construct
  source 1..7: note = Description of Artificial Sequence: Synthetic peptide; note = XENP018462 vlCDR2
YASHRYT

SEQ ID NO: 15254 - protein, 9 aa, synthetic construct
  source 1..9: note = Description of Artificial Sequence: Synthetic peptide; note = XENP018462 vlCDR3
QQYYSSPRT

SEQ ID NO: 15255 - protein, 451 aa, synthetic construct; identical to SEQ ID NO: 11545
  source 1..451: note = Description of Artificial Sequence: Synthetic polypeptide; note = XENP018463 1G6_H1_L1.116_IgG1_PVA_/S267K Heavy Chain

SEQ ID NO: 15256 - protein, 122 aa, synthetic construct; identical to SEQ ID NO: 6246
  source 1..122: note = Description of Artificial Sequence: Synthetic polypeptide; note = VH of XENP018463

SEQ ID NO: 15257 - protein, 5 aa, synthetic construct
  source 1..5: note = Description of Artificial Sequence: Synthetic peptide; note = XENP018463 vhCDR1
NYWMN

SEQ ID NO: 15258 - protein, 19 aa, synthetic construct
  source 1..19: note = Description of Artificial Sequence: Synthetic peptide; note = XENP018463 vhCDR2
EIRLKSNNYATHYAEPVKG

SEQ ID NO: 15259 - protein, 11 aa, synthetic construct
  source 1..11: note = Description of Artificial Sequence: Synthetic peptide; note = XENP018463 vhCDR3
YYGNYGGYFDV

SEQ ID NO: 15260 - protein, 214 aa, synthetic construct
  source 1..214: note = Description of Artificial Sequence: Synthetic polypeptide; note = XENP018463 1G6_H1_L1.116_IgG1_PVA_/S267K Light Chain
SIVMTQSPATLSVSPGERATLSCRASQSVSNDVAWYQQKPGQSPRLLINYASHRYTGVPDRFTGSGYGTEFTLTISSLQSEDFAVYFCQQDFSSPRTFGGGTKVEIKRTVAAPSVFIFPPSDEQLKSGTASVVCLLNNFYPREAKVQWKVDNALQSGNSQESVTEQDSKDSTYSLSSTLTLSKADYEKHKVYACEVTHQGLSSPVTKSFNRGEC

SEQ ID NO: 15261 - protein, 107 aa, synthetic construct; identical to SEQ ID NO: 9538
  source 1..107: note = Description of Artificial Sequence: Synthetic polypeptide; note = VL of XENP018463

SEQ ID NO: 15262 - protein, 11 aa, synthetic construct
  source 1..11: note = Description of Artificial Sequence: Synthetic peptide; note = XENP018463 vlCDR1
RASQSVSNDVA

SEQ ID NO: 15263 - protein, 7 aa, synthetic construct
  source 1..7: note = Description of Artificial Sequence: Synthetic peptide; note = XENP018463 vlCDR2
YASHRYT

SEQ ID NO: 15264 - protein, 9 aa, synthetic construct
  source 1..9: note = Description of Artificial Sequence: Synthetic peptide; note = XENP018463 vlCDR3
QQDFSSPRT

SEQ ID NO: 15265 - protein, 451 aa, synthetic construct; identical to SEQ ID NO: 11545
  source 1..451: note = Description of Artificial Sequence: Synthetic polypeptide; note = XENP018464 1G6_H1_L1.117_IgG1_PVA_/S267K Heavy Chain

SEQ ID NO: 15266 - protein, 122 aa, synthetic construct; identical to SEQ ID NO: 6246
  source 1..122: note = Description of Artificial Sequence: Synthetic polypeptide; note = VH of XENP018464

SEQ ID NO: 15267 - protein, 5 aa, synthetic construct
  source 1..5: note = Description of Artificial Sequence: Synthetic peptide; note = XENP018464 vhCDR1
NYWMN

SEQ ID NO: 15268 - protein, 19 aa, synthetic construct
  source 1..19: note = Description of Artificial Sequence: Synthetic peptide; note = XENP018464 vhCDR2
EIRLKSNNYATHYAEPVKG

SEQ ID NO: 15269 - protein, 11 aa, synthetic construct
  source 1..11: note = Description of Artificial Sequence: Synthetic peptide; note = XENP018464 vhCDR3
YYGNYGGYFDV

SEQ ID NO: 15270 - protein, 214 aa, synthetic construct
  source 1..214: note = Description of Artificial Sequence: Synthetic polypeptide; note = XENP018464 1G6_H1_L1.117_IgG1_PVA_/S267K Light Chain
SIVMTQSPATLSVSPGERATLSCRASQSVSNDVAWYQQKPGQSPRLLINYASHRYTGVPDRFTGSGYGTEFTLTISSLQSEDFAVYFCQQDHSSPRTFGGGTKVEIKRTVAAPSVFIFPPSDEQLKSGTASVVCLLNNFYPREAKVQWKVDNALQSGNSQESVTEQDSKDSTYSLSSTLTLSKADYEKHKVYACEVTHQGLSSPVTKSFNRGEC

SEQ ID NO: 15271 - protein, 107 aa, synthetic construct; identical to SEQ ID NO: 9547
  source 1..107: note = Description of Artificial Sequence: Synthetic polypeptide; note = VL of XENP018464

SEQ ID NO: 15272 - protein, 11 aa, synthetic construct
  source 1..11: note = Description of Artificial Sequence: Synthetic peptide; note = XENP018464 vlCDR1
RASQSVSNDVA

SEQ ID NO: 15273 - protein, 7 aa, synthetic construct
  source 1..7: note = Description of Artificial Sequence: Synthetic peptide; note = XENP018464 vlCDR2
YASHRYT

SEQ ID NO: 15274 - protein, 9 aa, synthetic construct
  source 1..9: note = Description of Artificial Sequence: Synthetic peptide; note = XENP018464 vlCDR3
QQDHSSPRT

SEQ ID NO: 15275 - protein, 451 aa, synthetic construct; identical to SEQ ID NO: 11545
  source 1..451: note = Description of Artificial Sequence: Synthetic polypeptide; note = XENP018465 1G6_H1_L1.118_IgG1_PVA_/S267K Heavy Chain

SEQ ID NO: 15276 - protein, 122 aa, synthetic construct; identical to SEQ ID NO: 6246
  source 1..122: note = Description of Artificial Sequence: Synthetic polypeptide; note = VH of XENP018465

SEQ ID NO: 15277 - protein, 5 aa, synthetic construct
  source 1..5: note = Description of Artificial Sequence: Synthetic peptide; note = XENP018465 vhCDR1
NYWMN

SEQ ID NO: 15278 - protein, 19 aa, synthetic construct
  source 1..19: note = Description of Artificial Sequence: Synthetic peptide; note = XENP018465 vhCDR2
EIRLKSNNYATHYAEPVKG

SEQ ID NO: 15279 - protein, 11 aa, synthetic construct
  source 1..11: note = Description of Artificial Sequence: Synthetic peptide; note = XENP018465 vhCDR3
YYGNYGGYFDV

SEQ ID NO: 15280 - protein, 214 aa, synthetic construct
  source 1..214: note = Description of Artificial Sequence: Synthetic polypeptide; note = XENP018465 1G6_H1_L1.118_IgG1_PVA_/S267K Light Chain
SIVMTQSPATLSVSPGERATLSCRASQSVSNDVAWYQQKPGQSPRLLINYASHRYTGVPDRFTGSGYGTEFTLTISSLQSEDFAVYFCQQDLSSPRTFGGGTKVEIKRTVAAPSVFIFPPSDEQLKSGTASVVCLLNNFYPREAKVQWKVDNALQSGNSQESVTEQDSKDSTYSLSSTLTLSKADYEKHKVYACEVTHQGLSSPVTKSFNRGEC

SEQ ID NO: 15281 - protein, 107 aa, synthetic construct; identical to SEQ ID NO: 9556
  source 1..107: note = Description of Artificial Sequence: Synthetic polypeptide; note = VL of XENP018465

SEQ ID NO: 15282 - protein, 11 aa, synthetic construct
  source 1..11: note = Description of Artificial Sequence: Synthetic peptide; note = XENP018465 vlCDR1
RASQSVSNDVA

SEQ ID NO: 15283 - protein, 7 aa, synthetic construct
  source 1..7: note = Description of Artificial Sequence: Synthetic peptide; note = XENP018465 vlCDR2
YASHRYT

SEQ ID NO: 15284 - protein, 9 aa, synthetic construct
  source 1..9: note = Description of Artificial Sequence: Synthetic peptide; note = XENP018465 vlCDR3
QQDLSSPRT

SEQ ID NO: 15285 - protein, 451 aa, synthetic construct; identical to SEQ ID NO: 11545
  source 1..451: note = Description of Artificial Sequence: Synthetic polypeptide; note = XENP018466 1G6_H1_L1.119_IgG1_PVA_/S267K Heavy Chain

SEQ ID NO: 15286 - protein, 122 aa, synthetic construct; identical to SEQ ID NO: 6246
  source 1..122: note = Description of Artificial Sequence: Synthetic polypeptide; note = VH of XENP018466

SEQ ID NO: 15287 - protein, 5 aa, synthetic construct
  source 1..5: note = Description of Artificial Sequence: Synthetic peptide; note = XENP018466 vhCDR1
NYWMN

SEQ ID NO: 15288 - protein, 19 aa, synthetic construct
  source 1..19: note = Description of Artificial Sequence: Synthetic peptide; note = XENP018466 vhCDR2
EIRLKSNNYATHYAEPVKG

SEQ ID NO: 15289 - protein, 11 aa, synthetic construct
  source 1..11: note = Description of Artificial Sequence: Synthetic peptide; note = XENP018466 vhCDR3
YYGNYGGYFDV

SEQ ID NO: 15290 - protein, 214 aa, synthetic construct
  source 1..214: note = Description of Artificial Sequence: Synthetic polypeptide; note = XENP018466 1G6_H1_L1.119_IgG1_PVA_/S267K Light Chain
SIVMTQSPATLSVSPGERATLSCRASQSVSNDVAWYQQKPGQSPRLLINYASHRYTGVPDRFTGSGYGTEFTLTISSLQSEDFAVYFCQQDWSSPRTFGGGTKVEIKRTVAAPSVFIFPPSDEQLKSGTASVVCLLNNFYPREAKVQWKVDNALQSGNSQESVTEQDSKDSTYSLSSTLTLSKADYEKHKVYACEVTHQGLSSPVTKSFNRGEC

SEQ ID NO: 15291 - protein, 107 aa, synthetic construct; identical to SEQ ID NO: 9565
  source 1..107: note = Description of Artificial Sequence: Synthetic polypeptide; note = VL of XENP018466

SEQ ID NO: 15292 - protein, 11 aa, synthetic construct
  source 1..11: note = Description of Artificial Sequence: Synthetic peptide; note = XENP018466 vlCDR1
RASQSVSNDVA

SEQ ID NO: 15293 - protein, 7 aa, synthetic construct
  source 1..7: note = Description of Artificial Sequence: Synthetic peptide; note = XENP018466 vlCDR2
YASHRYT

SEQ ID NO: 15294 - protein, 9 aa, synthetic construct
  source 1..9: note = Description of Artificial Sequence: Synthetic peptide; note = XENP018466 vlCDR3
QQDWSSPRT

SEQ ID NO: 15295 - protein, 451 aa, synthetic construct; identical to SEQ ID NO: 11545
  source 1..451: note = Description of Artificial Sequence: Synthetic polypeptide; note = XENP018467 1G6_H1_L1.120_IgG1_PVA_/S267K Heavy Chain

SEQ ID NO: 15296 - protein, 122 aa, synthetic construct; identical to SEQ ID NO: 6246
  source 1..122: note = Description of Artificial Sequence: Synthetic polypeptide; note = VH of XENP018467

SEQ ID NO: 15297 - protein, 5 aa, synthetic construct
  source 1..5: note = Description of Artificial Sequence: Synthetic peptide; note = XENP018467 vhCDR1
NYWMN

SEQ ID NO: 15298 - protein, 19 aa, synthetic construct
  source 1..19: note = Description of Artificial Sequence: Synthetic peptide; note = XENP018467 vhCDR2
EIRLKSNNYATHYAEPVKG

SEQ ID NO: 15299 - protein, 11 aa, synthetic construct
  source 1..11: note = Description of Artificial Sequence: Synthetic peptide; note = XENP018467 vhCDR3
YYGNYGGYFDV

SEQ ID NO: 15300 - protein, 214 aa, synthetic construct
  source 1..214: note = Description of Artificial Sequence: Synthetic polypeptide; note = XENP018467 1G6_H1_L1.120_IgG1_PVA_/S267K Light Chain
SIVMTQSPATLSVSPGERATLSCRASQSVSNDVAWYQQKPGQSPRLLINYASHRYTGVPDRFTGSGYGTEFTLTISSLQSEDFAVYFCQQDVSSPRTFGGGTKVEIKRTVAAPSVFIFPPSDEQLKSGTASVVCLLNNFYPREAKVQWKVDNALQSGNSQESVTEQDSKDSTYSLSSTLTLSKADYEKHKVYACEVTHQGLSSPVTKSFNRGEC

SEQ ID NO: 15301 - protein, 107 aa, synthetic construct; identical to SEQ ID NO: 9574
  source 1..107: note = Description of Artificial Sequence: Synthetic polypeptide; note = VL of XENP018467

SEQ ID NO: 15302 - protein, 11 aa, synthetic construct
  source 1..11: note = Description of Artificial Sequence: Synthetic peptide; note = XENP018467 vlCDR1
RASQSVSNDVA

SEQ ID NO: 15303 - protein, 7 aa, synthetic construct
  source 1..7: note = Description of Artificial Sequence: Synthetic peptide; note = XENP018467 vlCDR2
YASHRYT

SEQ ID NO: 15304 - protein, 9 aa, synthetic construct
  source 1..9: note = Description of Artificial Sequence: Synthetic peptide; note = XENP018467 vlCDR3
QQDVSSPRT

SEQ ID NO: 15305 - protein, 451 aa, synthetic construct; identical to SEQ ID NO: 11545
  source 1..451: note = Description of Artificial Sequence: Synthetic polypeptide; note = XENP018468 1G6_H1_L1.121_IgG1_PVA_/S267K Heavy Chain

SEQ ID NO: 15306 - protein, 122 aa, synthetic construct; identical to SEQ ID NO: 6246
  source 1..122: note = Description of Artificial Sequence: Synthetic polypeptide; note = VH of XENP018468

SEQ ID NO: 15307 - protein, 5 aa, synthetic construct
  source 1..5: note = Description of Artificial Sequence: Synthetic peptide; note = XENP018468 vhCDR1
NYWMN

SEQ ID NO: 15308 - protein, 19 aa, synthetic construct
  source 1..19: note = Description of Artificial Sequence: Synthetic peptide; note = XENP018468 vhCDR2
EIRLKSNNYATHYAEPVKG

SEQ ID NO: 15309 - protein, 11 aa, synthetic construct
  source 1..11: note = Description of Artificial Sequence: Synthetic peptide; note = XENP018468 vhCDR3
YYGNYGGYFDV

SEQ ID NO: 15310 - protein, 214 aa, synthetic construct
  source 1..214: note = Description of Artificial Sequence: Synthetic polypeptide; note = XENP018468 1G6_H1_L1.121_IgG1_PVA_/S267K Light Chain
SIVMTQSPATLSVSPGERATLSCRASQSVSNDVAWYQQKPGQSPRLLINYASHRYTGVPDRFTGSGYGTEFTLTISSLQSEDFAVYFCQQDASSPRTFGGGTKVEIKRTVAAPSVFIFPPSDEQLKSGTASVVCLLNNFYPREAKVQWKVDNALQSGNSQESVTEQDSKDSTYSLSSTLTLSKADYEKHKVYACEVTHQGLSSPVTKSFNRGEC

SEQ ID NO: 15311 - protein, 107 aa, synthetic construct; identical to SEQ ID NO: 9583
  source 1..107: note = Description of Artificial Sequence: Synthetic polypeptide; note = VL of XENP018468

SEQ ID NO: 15312 - protein, 11 aa, synthetic construct
  source 1..11: note = Description of Artificial Sequence: Synthetic peptide; note = XENP018468 vlCDR1
RASQSVSNDVA

SEQ ID NO: 15313 - protein, 7 aa, synthetic construct
  source 1..7: note = Description of Artificial Sequence: Synthetic peptide; note = XENP018468 vlCDR2
YASHRYT

SEQ ID NO: 15314 - protein, 9 aa, synthetic construct
  source 1..9: note = Description of Artificial Sequence: Synthetic peptide; note = XENP018468 vlCDR3
QQDASSPRT

SEQ ID NO: 15315 - protein, 451 aa, synthetic construct; identical to SEQ ID NO: 11545
  source 1..451: note = Description of Artificial Sequence: Synthetic polypeptide; note = XENP018469 1G6_H1_L1.122_IgG1_PVA_/S267K Heavy Chain

SEQ ID NO: 15316 - protein, 122 aa, synthetic construct; identical to SEQ ID NO: 6246
  source 1..122: note = Description of Artificial Sequence: Synthetic polypeptide; note = VH of XENP018469

SEQ ID NO: 15317 - protein, 5 aa, synthetic construct
  source 1..5: note = Description of Artificial Sequence: Synthetic peptide; note = XENP018469 vhCDR1
NYWMN

SEQ ID NO: 15318 - protein, 19 aa, synthetic construct
  source 1..19: note = Description of Artificial Sequence: Synthetic peptide; note = XENP018469 vhCDR2
EIRLKSNNYATHYAEPVKG

SEQ ID NO: 15319 - protein, 11 aa, synthetic construct
  source 1..11: note = Description of Artificial Sequence: Synthetic peptide; note = XENP018469 vhCDR3
YYGNYGGYFDV

SEQ ID NO: 15320 - protein, 214 aa, synthetic construct
  source 1..214: note = Description of Artificial Sequence: Synthetic polypeptide; note = XENP018469 1G6_H1_L1.122_IgG1_PVA_/S267K Light Chain
SIVMTQSPATLSVSPGERATLSCRASQSVSNDVAWYQQKPGQSPRLLINYASHRYTGVPDRFTGSGYGTEFTLTISSLQSEDFAVYFCQQDQSSPRTFGGGTKVEIKRTVAAPSVFIFPPSDEQLKSGTASVVCLLNNFYPREAKVQWKVDNALQSGNSQESVTEQDSKDSTYSLSSTLTLSKADYEKHKVYACEVTHQGLSSPVTKSFNRGEC

SEQ ID NO: 15321 - protein, 107 aa, synthetic construct; identical to SEQ ID NO: 9592
  source 1..107: note = Description of Artificial Sequence: Synthetic polypeptide; note = VL of XENP018469

SEQ ID NO: 15322 - protein, 11 aa, synthetic construct
  source 1..11: note = Description of Artificial Sequence: Synthetic peptide; note = XENP018469 vlCDR1
RASQSVSNDVA

SEQ ID NO: 15323 - protein, 7 aa, synthetic construct
  source 1..7: note = Description of Artificial Sequence: Synthetic peptide; note = XENP018469 vlCDR2
YASHRYT

SEQ ID NO: 15324 - protein, 9 aa, synthetic construct
  source 1..9: note = Description of Artificial Sequence: Synthetic peptide; note = XENP018469 vlCDR3
QQDQSSPRT

SEQ ID NO: 15325 - protein, 451 aa, synthetic construct; identical to SEQ ID NO: 11545
  source 1..451: note = Description of Artificial Sequence: Synthetic polypeptide; note = XENP018470 1G6_H1_L1.123_IgG1_PVA_/S267K Heavy Chain

SEQ ID NO: 15326 - protein, 122 aa, synthetic construct; identical to SEQ ID NO: 6246
  source 1..122: note = Description of Artificial Sequence: Synthetic polypeptide; note = VH of XENP018470

SEQ ID NO: 15327 - protein, 5 aa, synthetic construct
  source 1..5: note = Description of Artificial Sequence: Synthetic peptide; note = XENP018470 vhCDR1
NYWMN

SEQ ID NO: 15328 - protein, 19 aa, synthetic construct
  source 1..19: note = Description of Artificial Sequence: Synthetic peptide; note = XENP018470 vhCDR2
EIRLKSNNYATHYAEPVKG

SEQ ID NO: 15329 - protein, 11 aa, synthetic construct
  source 1..11: note = Description of Artificial Sequence: Synthetic peptide; note = XENP018470 vhCDR3
YYGNYGGYFDV

SEQ ID NO: 15330 - protein, 214 aa, synthetic construct
  source 1..214: note = Description of Artificial Sequence: Synthetic polypeptide; note = XENP018470 1G6_H1_L1.123_IgG1_PVA_/S267K Light Chain
SIVMTQSPATLSVSPGERATLSCRASQSVSNDVAWYQQKPGQSPRLLINYASHRYTGVPDRFTGSGYGTEFTLTISSLQSEDFAVYFCQQDDSSPRTFGGGTKVEIKRTVAAPSVFIFPPSDEQLKSGTASVVCLLNNFYPREAKVQWKVDNALQSGNSQESVTEQDSKDSTYSLSSTLTLSKADYEKHKVYACEVTHQGLSSPVTKSFNRGEC

SEQ ID NO: 15331 - protein, 107 aa, synthetic construct; identical to SEQ ID NO: 9601
  source 1..107: note = Description of Artificial Sequence: Synthetic polypeptide; note = VL of XENP018470

SEQ ID NO: 15332 - protein, 11 aa, synthetic construct
  source 1..11: note = Description of Artificial Sequence: Synthetic peptide; note = XENP018470 vlCDR1
RASQSVSNDVA

SEQ ID NO: 15333 - protein, 7 aa, synthetic construct
  source 1..7: note = Description of Artificial Sequence: Synthetic peptide; note = XENP018470 vlCDR2
YASHRYT

SEQ ID NO: 15334 - protein, 9 aa, synthetic construct
  source 1..9: note = Description of Artificial Sequence: Synthetic peptide; note = XENP018470 vlCDR3
QQDDSSPRT

SEQ ID NO: 15335 - protein, 451 aa, synthetic construct; identical to SEQ ID NO: 11545
  source 1..451: note = Description of Artificial Sequence: Synthetic polypeptide; note = XENP018471 1G6_H1_L1.124_IgG1_PVA_/S267K Heavy Chain

SEQ ID NO: 15336 - protein, 122 aa, synthetic construct; identical to SEQ ID NO: 6246
  source 1..122: note = Description of Artificial Sequence: Synthetic polypeptide; note = VH of XENP018471

SEQ ID NO: 15337 - protein, 5 aa, synthetic construct
  source 1..5: note = Description of Artificial Sequence: Synthetic peptide; note = XENP018471 vhCDR1
NYWMN

SEQ ID NO: 15338 - protein, 19 aa, synthetic construct
  source 1..19: note = Description of Artificial Sequence: Synthetic peptide; note = XENP018471 vhCDR2
EIRLKSNNYATHYAEPVKG

SEQ ID NO: 15339 - protein, 11 aa, synthetic construct
  source 1..11: note = Description of Artificial Sequence: Synthetic peptide; note = XENP018471 vhCDR3
YYGNYGGYFDV

SEQ ID NO: 15340 - protein, 214 aa, synthetic construct
  source 1..214: note = Description of Artificial Sequence: Synthetic polypeptide; note = XENP018471 1G6_H1_L1.124_IgG1_PVA_/S267K Light Chain
SIVMTQSPATLSVSPGERATLSCRASQSVSNDVAWYQQKPGQSPRLLINYASHRYTGVPDRFTGSGYGTEFTLTISSLQSEDFAVYFCQQDKSSPRTFGGGTKVEIKRTVAAPSVFIFPPSDEQLKSGTASVVCLLNNFYPREAKVQWKVDNALQSGNSQESVTEQDSKDSTYSLSSTLTLSKADYEKHKVYACEVTHQGLSSPVTKSFNRGEC

SEQ ID NO: 15341 - protein, 107 aa, synthetic construct; identical to SEQ ID NO: 9610
  source 1..107: note = Description of Artificial Sequence: Synthetic polypeptide; note = VL of XENP018471

SEQ ID NO: 15342 - protein, 11 aa, synthetic construct
  source 1..11: note = Description of Artificial Sequence: Synthetic peptide; note = XENP018471 vlCDR1
RASQSVSNDVA

SEQ ID NO: 15343 - protein, 7 aa, synthetic construct
  source 1..7: note = Description of Artificial Sequence: Synthetic peptide; note = XENP018471 vlCDR2
YASHRYT

SEQ ID NO: 15344 - protein, 9 aa, synthetic construct
  source 1..9: note = Description of Artificial Sequence: Synthetic peptide; note = XENP018471 vlCDR3
QQDKSSPRT

SEQ ID NO: 15345 - protein, 451 aa, synthetic construct; identical to SEQ ID NO: 11545
  source 1..451: note = Description of Artificial Sequence: Synthetic polypeptide; note = XENP018472 1G6_H1_L1.125_IgG1_PVA_/S267K Heavy Chain

SEQ ID NO: 15346 - protein, 122 aa, synthetic construct; identical to SEQ ID NO: 6246
  source 1..122: note = Description of Artificial Sequence: Synthetic polypeptide; note = VH of XENP018472

SEQ ID NO: 15347 - protein, 5 aa, synthetic construct
  source 1..5: note = Description of Artificial Sequence: Synthetic peptide; note = XENP018472 vhCDR1
NYWMN

SEQ ID NO: 15348 - protein, 19 aa, synthetic construct
  source 1..19: note = Description of Artificial Sequence: Synthetic peptide; note = XENP018472 vhCDR2
EIRLKSNNYATHYAEPVKG

SEQ ID NO: 15349 - protein, 11 aa, synthetic construct
  source 1..11: note = Description of Artificial Sequence: Synthetic peptide; note = XENP018472 vhCDR3
YYGNYGGYFDV

SEQ ID NO: 15350 - protein, 214 aa, synthetic construct
  source 1..214: note = Description of Artificial Sequence: Synthetic polypeptide; note = XENP018472 1G6_H1_L1.125_IgG1_PVA_/S267K Light Chain
SIVMTQSPATLSVSPGERATLSCRASQSVSNDVAWYQQKPGQSPRLLINYASHRYTGVPDRFTGSGYGTEFTLTISSLQSEDFAVYFCQQDSSSPRTFGGGTKVEIKRTVAAPSVFIFPPSDEQLKSGTASVVCLLNNFYPREAKVQWKVDNALQSGNSQESVTEQDSKDSTYSLSSTLTLSKADYEKHKVYACEVTHQGLSSPVTKSFNRGEC

SEQ ID NO: 15351 - protein, 107 aa, synthetic construct; identical to SEQ ID NO: 9619
  source 1..107: note = Description of Artificial Sequence: Synthetic polypeptide; note = VL of XENP018472

SEQ ID NO: 15352 - protein, 11 aa, synthetic construct
  source 1..11: note = Description of Artificial Sequence: Synthetic peptide; note = XENP018472 vlCDR1
RASQSVSNDVA

SEQ ID NO: 15353 - protein, 7 aa, synthetic construct
  source 1..7: note = Description of Artificial Sequence: Synthetic peptide; note = XENP018472 vlCDR2
YASHRYT

SEQ ID NO: 15354 - protein, 9 aa, synthetic construct
  source 1..9: note = Description of Artificial Sequence: Synthetic peptide; note = XENP018472 vlCDR3
QQDSSSPRT

SEQ ID NO: 15355 - protein, 451 aa, synthetic construct; identical to SEQ ID NO: 11545
  source 1..451: note = Description of Artificial Sequence: Synthetic polypeptide; note = XENP018473 1G6_H1_L1.126_IgG1_PVA_/S267K Heavy Chain

SEQ ID NO: 15356 - protein, 122 aa, synthetic construct; identical to SEQ ID NO: 6246
  source 1..122: note = Description of Artificial Sequence: Synthetic polypeptide; note = VH of XENP018473

SEQ ID NO: 15357 - protein, 5 aa, synthetic construct
  source 1..5: note = Description of Artificial Sequence: Synthetic peptide; note = XENP018473 vhCDR1
NYWMN

SEQ ID NO: 15358 - protein, 19 aa, synthetic construct
  source 1..19: note = Description of Artificial Sequence: Synthetic peptide; note = XENP018473 vhCDR2
EIRLKSNNYATHYAEPVKG

SEQ ID NO: 15359 - protein, 11 aa, synthetic construct
  source 1..11: note = Description of Artificial Sequence: Synthetic peptide; note = XENP018473 vhCDR3
YYGNYGGYFDV

SEQ ID NO: 15360 - protein, 214 aa, synthetic construct
  source 1..214: note = Description of Artificial Sequence: Synthetic polypeptide; note = XENP018473 1G6_H1_L1.126_IgG1_PVA_/S267K Light Chain
SIVMTQSPATLSVSPGERATLSCRASQSVSNDVAWYQQKPGQSPRLLINYASHRYTGVPDRFTGSGYGTEFTLTISSLQSEDFAVYFCQQDGSSPRTFGGGTKVEIKRTVAAPSVFIFPPSDEQLKSGTASVVCLLNNFYPREAKVQWKVDNALQSGNSQESVTEQDSKDSTYSLSSTLTLSKADYEKHKVYACEVTHQGLSSPVTKSFNRGEC

SEQ ID NO: 15361 - protein, 107 aa, synthetic construct; identical to SEQ ID NO: 9628
  source 1..107: note = Description of Artificial Sequence: Synthetic polypeptide; note = VL of XENP018473

SEQ ID NO: 15362 - protein, 11 aa, synthetic construct
  source 1..11: note = Description of Artificial Sequence: Synthetic peptide; note = XENP018473 vlCDR1
RASQSVSNDVA

SEQ ID NO: 15363 - protein, 7 aa, synthetic construct
  source 1..7: note = Description of Artificial Sequence: Synthetic peptide; note = XENP018473 vlCDR2
YASHRYT

SEQ ID NO: 15364 - protein, 9 aa, synthetic construct
  source 1..9: note = Description of Artificial Sequence: Synthetic peptide; note = XENP018473 vlCDR3
QQDGSSPRT

SEQ ID NO: 15365 - protein, 451 aa, synthetic construct; identical to SEQ ID NO: 11545
  source 1..451: note = Description of Artificial Sequence: Synthetic polypeptide; note = XENP018474 1G6_H1_L1.127_IgG1_PVA_/S267K Heavy Chain

SEQ ID NO: 15366 - protein, 122 aa, synthetic construct; identical to SEQ ID NO: 6246
  source 1..122: note = Description of Artificial Sequence: Synthetic polypeptide; note = VH of XENP018474

SEQ ID NO: 15367 - protein, 5 aa, synthetic construct
  source 1..5: note = Description of Artificial Sequence: Synthetic peptide; note = XENP018474 vhCDR1
NYWMN

SEQ ID NO: 15368 - protein, 19 aa, synthetic construct
  source 1..19: note = Description of Artificial Sequence: Synthetic peptide; note = XENP018474 vhCDR2
EIRLKSNNYATHYAEPVKG

SEQ ID NO: 15369 - protein, 11 aa, synthetic construct
  source 1..11: note = Description of Artificial Sequence: Synthetic peptide; note = XENP018474 vhCDR3
YYGNYGGYFDV

SEQ ID NO: 15370 - protein, 214 aa, synthetic construct
  source 1..214: note = Description of Artificial Sequence: Synthetic polypeptide; note = XENP018474 1G6_H1_L1.127_IgG1_PVA_/S267K Light Chain
SIVMTQSPATLSVSPGERATLSCRASQSVSNDVAWYQQKPGQSPRLLINYASHRYTGVPDRFTGSGYGTEFTLTISSLQSEDFAVYFCQQDYTSPRTFGGGTKVEIKRTVAAPSVFIFPPSDEQLKSGTASVVCLLNNFYPREAKVQWKVDNALQSGNSQESVTEQDSKDSTYSLSSTLTLSKADYEKHKVYACEVTHQGLSSPVTKSFNRGEC

SEQ ID NO: 15371 - protein, 107 aa, synthetic construct; identical to SEQ ID NO: 9637
  source 1..107: note = Description of Artificial Sequence: Synthetic polypeptide; note = VL of XENP018474

SEQ ID NO: 15372 - protein, 11 aa, synthetic construct
  source 1..11: note = Description of Artificial Sequence: Synthetic peptide; note = XENP018474 vlCDR1
RASQSVSNDVA

SEQ ID NO: 15373 - protein, 7 aa, synthetic construct
  source 1..7: note = Description of Artificial Sequence: Synthetic peptide; note = XENP018474 vlCDR2
YASHRYT

SEQ ID NO: 15374 - protein, 9 aa, synthetic construct
  source 1..9: note = Description of Artificial Sequence: Synthetic peptide; note = XENP018474 vlCDR3
QQDYTSPRT

SEQ ID NO: 15375 - protein, 451 aa, synthetic construct; identical to SEQ ID NO: 11545
  source 1..451: note = Description of Artificial Sequence: Synthetic polypeptide; note = XENP018475 1G6_H1_L1.128_IgG1_PVA_/S267K Heavy Chain

SEQ ID NO: 15376 - protein, 122 aa, synthetic construct; identical to SEQ ID NO: 6246
  source 1..122: note = Description of Artificial Sequence: Synthetic polypeptide; note = VH of XENP018475

SEQ ID NO: 15377 - protein, 5 aa, synthetic construct
  source 1..5: note = Description of Artificial Sequence: Synthetic peptide; note = XENP018475 vhCDR1
NYWMN

SEQ ID NO: 15378 - protein, 19 aa, synthetic construct
  source 1..19: note = Description of Artificial Sequence: Synthetic peptide; note = XENP018475 vhCDR2
EIRLKSNNYATHYAEPVKG

SEQ ID NO: 15379 - protein, 11 aa, synthetic construct
  source 1..11: note = Description of Artificial Sequence: Synthetic peptide; note = XENP018475 vhCDR3
YYGNYGGYFDV

SEQ ID NO: 15380 - protein, 214 aa, synthetic construct
  source 1..214: note = Description of Artificial Sequence: Synthetic polypeptide; note = XENP018475 1G6_H1_L1.128_IgG1_PVA_/S267K Light Chain
SIVMTQSPATLSVSPGERATLSCRASQSVSNDVAWYQQKPGQSPRLLINYASHRYTGVPDRFTGSGYGTEFTLTISSLQSEDFAVYFCQQDYASPRTFGGGTKVEIKRTVAAPSVFIFPPSDEQLKSGTASVVCLLNNFYPREAKVQWKVDNALQSGNSQESVTEQDSKDSTYSLSSTLTLSKADYEKHKVYACEVTHQGLSSPVTKSFNRGEC

SEQ ID NO: 15381 - protein, 107 aa, synthetic construct; identical to SEQ ID NO: 9646
  source 1..107: note = Description of Artificial Sequence: Synthetic polypeptide; note = VL of XENP018475

SEQ ID NO: 15382 - protein, 11 aa, synthetic construct
  source 1..11: note = Description of Artificial Sequence: Synthetic peptide; note = XENP018475 vlCDR1
RASQSVSNDVA

SEQ ID NO: 15383 - protein, 7 aa, synthetic construct
  source 1..7: note = Description of Artificial Sequence: Synthetic peptide; note = XENP018475 vlCDR2
YASHRYT

SEQ ID NO: 15384 - protein, 9 aa, synthetic construct
  source 1..9: note = Description of Artificial Sequence: Synthetic peptide; note = XENP018475 vlCDR3
QQDYASPRT

SEQ ID NO: 15385 - protein, 451 aa, synthetic construct; identical to SEQ ID NO: 11545
  source 1..451: note = Description of Artificial Sequence: Synthetic polypeptide; note = XENP018476 1G6_H1_L1.129_IgG1_PVA_/S267K Heavy Chain

SEQ ID NO: 15386 - protein, 122 aa, synthetic construct; identical to SEQ ID NO: 6246
  source 1..122: note = Description of Artificial Sequence: Synthetic polypeptide; note = VH of XENP018476

SEQ ID NO: 15387 - protein, 5 aa, synthetic construct
  source 1..5: note = Description of Artificial Sequence: Synthetic peptide; note = XENP018476 vhCDR1
NYWMN

SEQ ID NO: 15388 - protein, 19 aa, synthetic construct
  source 1..19: note = Description of Artificial Sequence: Synthetic peptide; note = XENP018476 vhCDR2
EIRLKSNNYATHYAEPVKG

SEQ ID NO: 15389 - protein, 11 aa, synthetic construct
  source 1..11: note = Description of Artificial Sequence: Synthetic peptide; note = XENP018476 vhCDR3
YYGNYGGYFDV

SEQ ID NO: 15390 - protein, 214 aa, synthetic construct
  source 1..214: note = Description of Artificial Sequence: Synthetic polypeptide; note = XENP018476 1G6_H1_L1.129_IgG1_PVA_/S267K Light Chain
SIVMTQSPATLSVSPGERATLSCRASQSVSNDVAWYQQKPGQSPRLLINYASHRYTGVPDRFTGSGYGTEFTLTISSLQSEDFAVYFCQQDYQSPRTFGGGTKVEIKRTVAAPSVFIFPPSDEQLKSGTASVVCLLNNFYPREAKVQWKVDNALQSGNSQESVTEQDSKDSTYSLSSTLTLSKADYEKHKVYACEVTHQGLSSPVTKSFNRGEC

SEQ ID NO: 15391 - protein, 107 aa, synthetic construct; identical to SEQ ID NO: 9655
  source 1..107: note = Description of Artificial Sequence: Synthetic polypeptide; note = VL of XENP018476

SEQ ID NO: 15392 - protein, 11 aa, synthetic construct
  source 1..11: note = Description of Artificial Sequence: Synthetic peptide; note = XENP018476 vlCDR1
RASQSVSNDVA

SEQ ID NO: 15393 - protein, 7 aa, synthetic construct
  source 1..7: note = Description of Artificial Sequence: Synthetic peptide; note = XENP018476 vlCDR2
YASHRYT

SEQ ID NO: 15394 - protein, 9 aa, synthetic construct
  source 1..9: note = Description of Artificial Sequence: Synthetic peptide; note = XENP018476 vlCDR3
QQDYQSPRT

SEQ ID NO: 15395 - protein, 451 aa, synthetic construct; identical to SEQ ID NO: 11545
  source 1..451: note = Description of Artificial Sequence: Synthetic polypeptide; note = XENP018477 1G6_H1_L1.130_IgG1_PVA_/S267K Heavy Chain

SEQ ID NO: 15396 - protein, 122 aa, synthetic construct; identical to SEQ ID NO: 6246
  source 1..122: note = Description of Artificial Sequence: Synthetic polypeptide; note = VH of XENP018477

SEQ ID NO: 15397 - protein, 5 aa, synthetic construct
  source 1..5: note = Description of Artificial Sequence: Synthetic peptide; note = XENP018477 vhCDR1
NYWMN

SEQ ID NO: 15398 - protein, 19 aa, synthetic construct
  source 1..19: note = Description of Artificial Sequence: Synthetic peptide; note = XENP018477 vhCDR2
EIRLKSNNYATHYAEPVKG

SEQ ID NO: 15399 - protein, 11 aa, synthetic construct
  source 1..11: note = Description of Artificial Sequence: Synthetic peptide; note = XENP018477 vhCDR3
YYGNYGGYFDV

SEQ ID NO: 15400 - protein, 214 aa, synthetic construct
  source 1..214: note = Description of Artificial Sequence: Synthetic polypeptide; note = XENP018477 1G6_H1_L1.130_IgG1_PVA_/S267K Light Chain
SIVMTQSPATLSVSPGERATLSCRASQSVSNDVAWYQQKPGQSPRLLINYASHRYTGVPDRFTGSGYGTEFTLTISSLQSEDFAVYFCQQDYGSPRTFGGGTKVEIKRTVAAPSVFIFPPSDEQLKSGTASVVCLLNNFYPREAKVQWKVDNALQSGNSQESVTEQDSKDSTYSLSSTLTLSKADYEKHKVYACEVTHQGLSSPVTKSFNRGEC

SEQ ID NO: 15401 - protein, 107 aa, synthetic construct; identical to SEQ ID NO: 9664
  source 1..107: note = Description of Artificial Sequence: Synthetic polypeptide; note = VL of XENP018477

SEQ ID NO: 15402 - protein, 11 aa, synthetic construct
  source 1..11: note = Description of Artificial Sequence: Synthetic peptide; note = XENP018477 vlCDR1
RASQSVSNDVA

SEQ ID NO: 15403 - protein, 7 aa, synthetic construct
  source 1..7: note = Description of Artificial Sequence: Synthetic peptide; note = XENP018477 vlCDR2
YASHRYT

SEQ ID NO: 15404 - protein, 9 aa, synthetic construct
  source 1..9: note = Description of Artificial Sequence: Synthetic peptide; note = XENP018477 vlCDR3
QQDYGSPRT

SEQ ID NO: 15405 - protein, 451 aa, synthetic construct; identical to SEQ ID NO: 11545
  source 1..451: note = Description of Artificial Sequence: Synthetic polypeptide; note = XENP018478 1G6_H1_L1.131_IgG1_PVA_/S267K Heavy Chain

SEQ ID NO: 15406 - protein, 122 aa, synthetic construct; identical to SEQ ID NO: 6246
  source 1..122: note = Description of Artificial Sequence: Synthetic polypeptide; note = VH of XENP018478

SEQ ID NO: 15407 - protein, 5 aa, synthetic construct
  source 1..5: note = Description of Artificial Sequence: Synthetic peptide; note = XENP018478 vhCDR1
NYWMN

SEQ ID NO: 15408 - protein, 19 aa, synthetic construct
  source 1..19: note = Description of Artificial Sequence: Synthetic peptide; note = XENP018478 vhCDR2
EIRLKSNNYATHYAEPVKG

SEQ ID NO: 15409 - protein, 11 aa, synthetic construct
  source 1..11: note = Description of Artificial Sequence: Synthetic peptide; note = XENP018478 vhCDR3
YYGNYGGYFDV

SEQ ID NO: 15410 - protein, 214 aa, synthetic construct
  source 1..214: note = Description of Artificial Sequence: Synthetic polypeptide; note = XENP018478 1G6_H1_L1.131_IgG1_PVA_/S267K Light Chain
SIVMTQSPATLSVSPGERATLSCRASQSVSNDVAWYQQKPGQSPRLLINYASHRYTGVPDRFTGSGYGTEFTLTISSLQSEDFAVYFCQQDYVSPRTFGGGTKVEIKRTVAAPSVFIFPPSDEQLKSGTASVVCLLNNFYPREAKVQWKVDNALQSGNSQESVTEQDSKDSTYSLSSTLTLSKADYEKHKVYACEVTHQGLSSPVTKSFNRGEC

SEQ ID NO: 15411 - protein, 107 aa, synthetic construct; identical to SEQ ID NO: 9673
  source 1..107: note = Description of Artificial Sequence: Synthetic polypeptide; note = VL of XENP018478

SEQ ID NO: 15412 - protein, 11 aa, synthetic construct
  source 1..11: note = Description of Artificial Sequence: Synthetic peptide; note = XENP018478 vlCDR1
RASQSVSNDVA

SEQ ID NO: 15413 - protein, 7 aa, synthetic construct
  source 1..7: note = Description of Artificial Sequence: Synthetic peptide; note = XENP018478 vlCDR2
YASHRYT

SEQ ID NO: 15414 - protein, 9 aa, synthetic construct
  source 1..9: note = Description of Artificial Sequence: Synthetic peptide; note = XENP018478 vlCDR3
QQDYVSPRT

SEQ ID NO: 15415 - protein, 451 aa, synthetic construct; identical to SEQ ID NO: 11545
  source 1..451: note = Description of Artificial Sequence: Synthetic polypeptide; note = XENP018479 1G6_H1_L1.132_IgG1_PVA_/S267K Heavy Chain

SEQ ID NO: 15416 - protein, 122 aa, synthetic construct; identical to SEQ ID NO: 6246
  source 1..122: note = Description of Artificial Sequence: Synthetic polypeptide; note = VH of XENP018479

SEQ ID NO: 15417 - protein, 5 aa, synthetic construct
  source 1..5: note = Description of Artificial Sequence: Synthetic peptide; note = XENP018479 vhCDR1
NYWMN

SEQ ID NO: 15418 - protein, 19 aa, synthetic construct
  source 1..19: note = Description of Artificial Sequence: Synthetic peptide; note = XENP018479 vhCDR2
EIRLKSNNYATHYAEPVKG

SEQ ID NO: 15419 - protein, 11 aa, synthetic construct
  source 1..11: note = Description of Artificial Sequence: Synthetic peptide; note = XENP018479 vhCDR3
YYGNYGGYFDV

SEQ ID NO: 15420 - protein, 214 aa, synthetic construct
  source 1..214: note = Description of Artificial Sequence: Synthetic polypeptide; note = XENP018479 1G6_H1_L1.132_IgG1_PVA_/S267K Light Chain
SIVMTQSPATLSVSPGERATLSCRASQSVSNDVAWYQQKPGQSPRLLINYASHRYTGVPDRFTGSGYGTEFTLTISSLQSEDFAVYFCQQDYHSPRTFGGGTKVEIKRTVAAPSVFIFPPSDEQLKSGTASVVCLLNNFYPREAKVQWKVDNALQSGNSQESVTEQDSKDSTYSLSSTLTLSKADYEKHKVYACEVTHQGLSSPVTKSFNRGEC

SEQ ID NO: 15421 - protein, 107 aa, synthetic construct; identical to SEQ ID NO: 9682
  source 1..107: note = Description of Artificial Sequence: Synthetic polypeptide; note = VL of XENP018479

SEQ ID NO: 15422 - protein, 11 aa, synthetic construct
  source 1..11: note = Description of Artificial Sequence: Synthetic peptide; note = XENP018479 vlCDR1
RASQSVSNDVA

SEQ ID NO: 15423 - protein, 7 aa, synthetic construct
  source 1..7: note = Description of Artificial Sequence: Synthetic peptide; note = XENP018479 vlCDR2
YASHRYT

SEQ ID NO: 15424 - protein, 9 aa, synthetic construct
  source 1..9: note = Description of Artificial Sequence: Synthetic peptide; note = XENP018479 vlCDR3
QQDYHSPRT

SEQ ID NO: 15425 - protein, 451 aa, synthetic construct; identical to SEQ ID NO: 11545
  source 1..451: note = Description of Artificial Sequence: Synthetic polypeptide; note = XENP018480 1G6_H1_L1.133_IgG1_PVA_/S267K Heavy Chain

SEQ ID NO: 15426 - protein, 122 aa, synthetic construct; identical to SEQ ID NO: 6246
  source 1..122: note = Description of Artificial Sequence: Synthetic polypeptide; note = VH of XENP018480

SEQ ID NO: 15427 - protein, 5 aa, synthetic construct
  source 1..5: note = Description of Artificial Sequence: Synthetic peptide; note = XENP018480 vhCDR1
NYWMN

SEQ ID NO: 15428 - protein, 19 aa, synthetic construct
  source 1..19: note = Description of Artificial Sequence: Synthetic peptide; note = XENP018480 vhCDR2
EIRLKSNNYATHYAEPVKG

SEQ ID NO: 15429 - protein, 11 aa, synthetic construct
  source 1..11: note = Description of Artificial Sequence: Synthetic peptide; note = XENP018480 vhCDR3
YYGNYGGYFDV

SEQ ID NO: 15430 - protein, 214 aa, synthetic construct
  source 1..214: note = Description of Artificial Sequence: Synthetic polypeptide; note = XENP018480 1G6_H1_L1.133_IgG1_PVA_/S267K Light Chain
SIVMTQSPATLSVSPGERATLSCRASQSVSNDVAWYQQKPGQSPRLLINYASHRYTGVPDRFTGSGYGTEFTLTISSLQSEDFAVYFCQQDYDSPRTFGGGTKVEIKRTVAAPSVFIFPPSDEQLKSGTASVVCLLNNFYPREAKVQWKVDNALQSGNSQESVTEQDSKDSTYSLSSTLTLSKADYEKHKVYACEVTHQGLSSPVTKSFNRGEC

SEQ ID NO: 15431 - protein, 107 aa, synthetic construct; identical to SEQ ID NO: 9691
  source 1..107: note = Description of Artificial Sequence: Synthetic polypeptide; note = VL of XENP018480

SEQ ID NO: 15432 - protein, 11 aa, synthetic construct
  source 1..11: note = Description of Artificial Sequence: Synthetic peptide; note = XENP018480 vlCDR1
RASQSVSNDVA

SEQ ID NO: 15433 - protein, 7 aa, synthetic construct
  source 1..7: note = Description of Artificial Sequence: Synthetic peptide; note = XENP018480 vlCDR2
YASHRYT

SEQ ID NO: 15434 - protein, 9 aa, synthetic construct
  source 1..9: note = Description of Artificial Sequence: Synthetic peptide; note = XENP018480 vlCDR3
QQDYDSPRT

SEQ ID NO: 15435 - protein, 451 aa, synthetic construct; identical to SEQ ID NO: 11545
  source 1..451: note = Description of Artificial Sequence: Synthetic polypeptide; note = XENP018481 1G6_H1_L1.134_IgG1_PVA_/S267K Heavy Chain

SEQ ID NO: 15436 - protein, 122 aa, synthetic construct; identical to SEQ ID NO: 6246
  source 1..122: note = Description of Artificial Sequence: Synthetic polypeptide; note = VH of XENP018481

SEQ ID NO: 15437 - protein, 5 aa, synthetic construct
  source 1..5: note = Description of Artificial Sequence: Synthetic peptide; note = XENP018481 vhCDR1
NYWMN

SEQ ID NO: 15438 - protein, 19 aa, synthetic construct
  source 1..19: note = Description of Artificial Sequence: Synthetic peptide; note = XENP018481 vhCDR2
EIRLKSNNYATHYAEPVKG

SEQ ID NO: 15439 - protein, 11 aa, synthetic construct
  source 1..11: note = Description of Artificial Sequence: Synthetic peptide; note = XENP018481 vhCDR3
YYGNYGGYFDV

SEQ ID NO: 15440 - protein, 214 aa, synthetic construct
  source 1..214: note = Description of Artificial Sequence: Synthetic polypeptide; note = XENP018481 1G6_H1_L1.134_IgG1_PVA_/S267K Light Chain
SIVMTQSPATLSVSPGERATLSCRASQSVSNDVAWYQQKPGQSPRLLINYASHRYTGVPDRFTGSGYGTEFTLTISSLQSEDFAVYFCQQDYKSPRTFGGGTKVEIKRTVAAPSVFIFPPSDEQLKSGTASVVCLLNNFYPREAKVQWKVDNALQSGNSQESVTEQDSKDSTYSLSSTLTLSKADYEKHKVYACEVTHQGLSSPVTKSFNRGEC

SEQ ID NO: 15441 - protein, 107 aa, synthetic construct; identical to SEQ ID NO: 9700
  source 1..107: note = Description of Artificial Sequence: Synthetic polypeptide; note = VL of XENP018481

SEQ ID NO: 15442 - protein, 11 aa, synthetic construct
  source 1..11: note = Description of Artificial Sequence: Synthetic peptide; note = XENP018481 vlCDR1
RASQSVSNDVA

SEQ ID NO: 15443 - protein, 7 aa, synthetic construct
  source 1..7: note = Description of Artificial Sequence: Synthetic peptide; note = XENP018481 vlCDR2
YASHRYT

SEQ ID NO: 15444 - protein, 9 aa, synthetic construct
  source 1..9: note = Description of Artificial Sequence: Synthetic peptide; note = XENP018481 vlCDR3
QQDYKSPRT

SEQ ID NO: 15445 - protein, 451 aa, synthetic construct; identical to SEQ ID NO: 11545
  source 1..451: note = Description of Artificial Sequence: Synthetic polypeptide; note = XENP018482 1G6_H1_L1.135_IgG1_PVA_/S267K Heavy Chain

SEQ ID NO: 15446 - protein, 122 aa, synthetic construct; identical to SEQ ID NO: 6246
  source 1..122: note = Description of Artificial Sequence: Synthetic polypeptide; note = VH of XENP018482

SEQ ID NO: 15447 - protein, 5 aa, synthetic construct
  source 1..5: note = Description of Artificial Sequence: Synthetic peptide; note = XENP018482 vhCDR1
NYWMN

SEQ ID NO: 15448 - protein, 19 aa, synthetic construct
  source 1..19: note = Description of Artificial Sequence: Synthetic peptide; note = XENP018482 vhCDR2
EIRLKSNNYATHYAEPVKG

SEQ ID NO: 15449 - protein, 11 aa, synthetic construct
  source 1..11: note = Description of Artificial Sequence: Synthetic peptide; note = XENP018482 vhCDR3
YYGNYGGYFDV

SEQ ID NO: 15450 - protein, 214 aa, synthetic construct
  source 1..214: note = Description of Artificial Sequence: Synthetic polypeptide; note = XENP018482 1G6_H1_L1.135_IgG1_PVA_/S267K Light Chain
SIVMTQSPATLSVSPGERATLSCRASQSVSNDVAWYQQKPGQSPRLLINYASHRYTGVPDRFTGSGYGTEFTLTISSLQSEDFAVYFCQQDYFSPRTFGGGTKVEIKRTVAAPSVFIFPPSDEQLKSGTASVVCLLNNFYPREAKVQWKVDNALQSGNSQESVTEQDSKDSTYSLSSTLTLSKADYEKHKVYACEVTHQGLSSPVTKSFNRGEC

SEQ ID NO: 15451 - protein, 107 aa, synthetic construct; identical to SEQ ID NO: 9709
  source 1..107: note = Description of Artificial Sequence: Synthetic polypeptide; note = VL of XENP018482

SEQ ID NO: 15452 - protein, 11 aa, synthetic construct
  source 1..11: note = Description of Artificial Sequence: Synthetic peptide; note = XENP018482 vlCDR1
RASQSVSNDVA

SEQ ID NO: 15453 - protein, 7 aa, synthetic construct
  source 1..7: note = Description of Artificial Sequence: Synthetic peptide; note = XENP018482 vlCDR2
YASHRYT

SEQ ID NO: 15454 - protein, 9 aa, synthetic construct
  source 1..9: note = Description of Artificial Sequence: Synthetic peptide; note = XENP018482 vlCDR3
QQDYFSPRT

SEQ ID NO: 15455 - protein, 451 aa, synthetic construct; identical to SEQ ID NO: 11545
  source 1..451: note = Description of Artificial Sequence: Synthetic polypeptide; note = XENP018483 1G6_H1_L1.136_IgG1_PVA_/S267K Heavy Chain

SEQ ID NO: 15456 - protein, 122 aa, synthetic construct; identical to SEQ ID NO: 6246
  source 1..122: note = Description of Artificial Sequence: Synthetic polypeptide; note = VH of XENP018483

SEQ ID NO: 15457 - protein, 5 aa, synthetic construct
  source 1..5: note = Description of Artificial Sequence: Synthetic peptide; note = XENP018483 vhCDR1
NYWMN

SEQ ID NO: 15458 - protein, 19 aa, synthetic construct
  source 1..19: note = Description of Artificial Sequence: Synthetic peptide; note = XENP018483 vhCDR2
EIRLKSNNYATHYAEPVKG

SEQ ID NO: 15459 - protein, 11 aa, synthetic construct
  source 1..11: note = Description of Artificial Sequence: Synthetic peptide; note = XENP018483 vhCDR3
YYGNYGGYFDV

SEQ ID NO: 15460 - protein, 214 aa, synthetic construct
  source 1..214: note = Description of Artificial Sequence: Synthetic polypeptide; note = XENP018483 1G6_H1_L1.136_IgG1_PVA_/S267K Light Chain
SIVMTQSPATLSVSPGERATLSCRASQSVSNDVAWYQQKPGQSPRLLINYASHRYTGVPDRFTGSGYGTEFTLTISSLQSEDFAVYFCQQDYSTPRTFGGGTKVEIKRTVAAPSVFIFPPSDEQLKSGTASVVCLLNNFYPREAKVQWKVDNALQSGNSQESVTEQDSKDSTYSLSSTLTLSKADYEKHKVYACEVTHQGLSSPVTKSFNRGEC

SEQ ID NO: 15461 - protein, 107 aa, synthetic construct; identical to SEQ ID NO: 9718
  source 1..107: note = Description of Artificial Sequence: Synthetic polypeptide; note = VL of XENP018483

SEQ ID NO: 15462 - protein, 11 aa, synthetic construct
  source 1..11: note = Description of Artificial Sequence: Synthetic peptide; note = XENP018483 vlCDR1
RASQSVSNDVA

SEQ ID NO: 15463 - protein, 7 aa, synthetic construct
  source 1..7: note = Description of Artificial Sequence: Synthetic peptide; note = XENP018483 vlCDR2
YASHRYT

SEQ ID NO: 15464 - protein, 9 aa, synthetic construct
  source 1..9: note = Description of Artificial Sequence: Synthetic peptide; note = XENP018483 vlCDR3
QQDYSTPRT

SEQ ID NO: 15465 - protein, 451 aa, synthetic construct; identical to SEQ ID NO: 11545
  source 1..451: note = Description of Artificial Sequence: Synthetic polypeptide; note = XENP018484 1G6_H1_L1.137_IgG1_PVA_/S267K Heavy Chain

SEQ ID NO: 15466 - protein, 122 aa, synthetic construct; identical to SEQ ID NO: 6246
  source 1..122: note = Description of Artificial Sequence: Synthetic polypeptide; note = VH of XENP018484

SEQ ID NO: 15467 - protein, 5 aa, synthetic construct
  source 1..5: note = Description of Artificial Sequence: Synthetic peptide; note = XENP018484 vhCDR1
NYWMN

SEQ ID NO: 15468 - protein, 19 aa, synthetic construct
  source 1..19: note = Description of Artificial Sequence: Synthetic peptide; note = XENP018484 vhCDR2
EIRLKSNNYATHYAEPVKG

SEQ ID NO: 15469 - protein, 11 aa, synthetic construct
  source 1..11: note = Description of Artificial Sequence: Synthetic peptide; note = XENP018484 vhCDR3
YYGNYGGYFDV

SEQ ID NO: 15470 - protein, 214 aa, synthetic construct
  source 1..214: note = Description of Artificial Sequence: Synthetic polypeptide; note = XENP018484 1G6_H1_L1.137_IgG1_PVA_/S267K Light Chain
SIVMTQSPATLSVSPGERATLSCRASQSVSNDVAWYQQKPGQSPRLLINYASHRYTGVPDRFTGSGYGTEFTLTISSLQSEDFAVYFCQQDYSAPRTFGGGTKVEIKRTVAAPSVFIFPPSDEQLKSGTASVVCLLNNFYPREAKVQWKVDNALQSGNSQESVTEQDSKDSTYSLSSTLTLSKADYEKHKVYACEVTHQGLSSPVTKSFNRGEC

SEQ ID NO: 15471 - protein, 107 aa, synthetic construct; identical to SEQ ID NO: 9727
  source 1..107: note = Description of Artificial Sequence: Synthetic polypeptide; note = VL of XENP018484

SEQ ID NO: 15472 - protein, 11 aa, synthetic construct
  source 1..11: note = Description of Artificial Sequence: Synthetic peptide; note = XENP018484 vlCDR1
RASQSVSNDVA

SEQ ID NO: 15473 - protein, 7 aa, synthetic construct
  source 1..7: note = Description of Artificial Sequence: Synthetic peptide; note = XENP018484 vlCDR2
YASHRYT

SEQ ID NO: 15474 - protein, 9 aa, synthetic construct
  source 1..9: note = Description of Artificial Sequence: Synthetic peptide; note = XENP018484 vlCDR3
QQDYSAPRT

SEQ ID NO: 15475 - protein, 451 aa, synthetic construct; identical to SEQ ID NO: 11545
  source 1..451: note = Description of Artificial Sequence: Synthetic polypeptide; note = XENP018485 1G6_H1_L1.138_IgG1_PVA_/S267K Heavy Chain

SEQ ID NO: 15476 - protein, 122 aa, synthetic construct; identical to SEQ ID NO: 6246
  source 1..122: note = Description of Artificial Sequence: Synthetic polypeptide; note = VH of XENP018485

SEQ ID NO: 15477 - protein, 5 aa, synthetic construct
  source 1..5: note = Description of Artificial Sequence: Synthetic peptide; note = XENP018485 vhCDR1
NYWMN

SEQ ID NO: 15478 - protein, 19 aa, synthetic construct
  source 1..19: note = Description of Artificial Sequence: Synthetic peptide; note = XENP018485 vhCDR2
EIRLKSNNYATHYAEPVKG

SEQ ID NO: 15479 - protein, 11 aa, synthetic construct
  source 1..11: note = Description of Artificial Sequence: Synthetic peptide; note = XENP018485 vhCDR3
YYGNYGGYFDV

SEQ ID NO: 15480 - protein, 214 aa, synthetic construct
  source 1..214: note = Description of Artificial Sequence: Synthetic polypeptide; note = XENP018485 1G6_H1_L1.138_IgG1_PVA_/S267K Light Chain
SIVMTQSPATLSVSPGERATLSCRASQSVSNDVAWYQQKPGQSPRLLINYASHRYTGVPDRFTGSGYGTEFTLTISSLQSEDFAVYFCQQDYSNPRTFGGGTKVEIKRTVAAPSVFIFPPSDEQLKSGTASVVCLLNNFYPREAKVQWKVDNALQSGNSQESVTEQDSKDSTYSLSSTLTLSKADYEKHKVYACEVTHQGLSSPVTKSFNRGEC

SEQ ID NO: 15481 - protein, 107 aa, synthetic construct; identical to SEQ ID NO: 9736
  source 1..107: note = Description of Artificial Sequence: Synthetic polypeptide; note = VL of XENP018485

SEQ ID NO: 15482 - protein, 11 aa, synthetic construct
  source 1..11: note = Description of Artificial Sequence: Synthetic peptide; note = XENP018485 vlCDR1
RASQSVSNDVA

SEQ ID NO: 15483 - protein, 7 aa, synthetic construct
  source 1..7: note = Description of Artificial Sequence: Synthetic peptide; note = XENP018485 vlCDR2
YASHRYT

SEQ ID NO: 15484 - protein, 9 aa, synthetic construct
  source 1..9: note = Description of Artificial Sequence: Synthetic peptide; note = XENP018485 vlCDR3
QQDYSNPRT

SEQ ID NO: 15485 - protein, 451 aa, synthetic construct; identical to SEQ ID NO: 11545
  source 1..451: note = Description of Artificial Sequence: Synthetic polypeptide; note = XENP018486 1G6_H1_L1.139_IgG1_PVA_/S267K Heavy Chain

SEQ ID NO: 15486 - protein, 122 aa, synthetic construct; identical to SEQ ID NO: 6246
  source 1..122: note = Description of Artificial Sequence: Synthetic polypeptide; note = VH of XENP018486

SEQ ID NO: 15487 - protein, 5 aa, synthetic construct
  source 1..5: note = Description of Artificial Sequence: Synthetic peptide; note = XENP018486 vhCDR1
NYWMN

SEQ ID NO: 15488 - protein, 19 aa, synthetic construct
  source 1..19: note = Description of Artificial Sequence: Synthetic peptide; note = XENP018486 vhCDR2
EIRLKSNNYATHYAEPVKG

SEQ ID NO: 15489 - protein, 11 aa, synthetic construct
  source 1..11: note = Description of Artificial Sequence: Synthetic peptide; note = XENP018486 vhCDR3
YYGNYGGYFDV

SEQ ID NO: 15490 - protein, 214 aa, synthetic construct
  source 1..214: note = Description of Artificial Sequence: Synthetic polypeptide; note = XENP018486 1G6_H1_L1.139_IgG1_PVA_/S267K Light Chain
SIVMTQSPATLSVSPGERATLSCRASQSVSNDVAWYQQKPGQSPRLLINYASHRYTGVPDRFTGSGYGTEFTLTISSLQSEDFAVYFCQQDYSGPRTFGGGTKVEIKRTVAAPSVFIFPPSDEQLKSGTASVVCLLNNFYPREAKVQWKVDNALQSGNSQESVTEQDSKDSTYSLSSTLTLSKADYEKHKVYACEVTHQGLSSPVTKSFNRGEC

SEQ ID NO: 15491 - protein, 107 aa, synthetic construct; identical to SEQ ID NO: 9745
  source 1..107: note = Description of Artificial Sequence: Synthetic polypeptide; note = VL of XENP018486

SEQ ID NO: 15492 - protein, 11 aa, synthetic construct
  source 1..11: note = Description of Artificial Sequence: Synthetic peptide; note = XENP018486 vlCDR1
RASQSVSNDVA

SEQ ID NO: 15493 - protein, 7 aa, synthetic construct
  source 1..7: note = Description of Artificial Sequence: Synthetic peptide; note = XENP018486 vlCDR2
YASHRYT

SEQ ID NO: 15494 - protein, 9 aa, synthetic construct
  source 1..9: note = Description of Artificial Sequence: Synthetic peptide; note = XENP018486 vlCDR3
QQDYSGPRT

SEQ ID NO: 15495 - protein, 451 aa, synthetic construct; identical to SEQ ID NO: 11545
  source 1..451: note = Description of Artificial Sequence: Synthetic polypeptide; note = XENP018487 1G6_H1_L1.140_IgG1_PVA_/S267K Heavy Chain

SEQ ID NO: 15496 - protein, 122 aa, synthetic construct; identical to SEQ ID NO: 6246
  source 1..122: note = Description of Artificial Sequence: Synthetic polypeptide; note = VH of XENP018487

SEQ ID NO: 15497 - protein, 5 aa, synthetic construct
  source 1..5: note = Description of Artificial Sequence: Synthetic peptide; note = XENP018487 vhCDR1
NYWMN

SEQ ID NO: 15498 - protein, 19 aa, synthetic construct
  source 1..19: note = Description of Artificial Sequence: Synthetic peptide; note = XENP018487 vhCDR2
EIRLKSNNYATHYAEPVKG

SEQ ID NO: 15499 - protein, 11 aa, synthetic construct
  source 1..11: note = Description of Artificial Sequence: Synthetic peptide; note = XENP018487 vhCDR3
YYGNYGGYFDV

SEQ ID NO: 15500 - protein, 214 aa, synthetic construct
  source 1..214: note = Description of Artificial Sequence: Synthetic polypeptide; note = XENP018487 1G6_H1_L1.140_IgG1_PVA_/S267K Light Chain
SIVMTQSPATLSVSPGERATLSCRASQSVSNDVAWYQQKPGQSPRLLINYASHRYTGVPDRFTGSGYGTEFTLTISSLQSEDFAVYFCQQDYSVPRTFGGGTKVEIKRTVAAPSVFIFPPSDEQLKSGTASVVCLLNNFYPREAKVQWKVDNALQSGNSQESVTEQDSKDSTYSLSSTLTLSKADYEKHKVYACEVTHQGLSSPVTKSFNRGEC

SEQ ID NO: 15501 - protein, 107 aa, synthetic construct; identical to SEQ ID NO: 9754
  source 1..107: note = Description of Artificial Sequence: Synthetic polypeptide; note = VL of XENP018487

SEQ ID NO: 15502 - protein, 11 aa, synthetic construct
  source 1..11: note = Description of Artificial Sequence: Synthetic peptide; note = XENP018487 vlCDR1
RASQSVSNDVA

SEQ ID NO: 15503 - protein, 7 aa, synthetic construct
  source 1..7: note = Description of Artificial Sequence: Synthetic peptide; note = XENP018487 vlCDR2
YASHRYT

SEQ ID NO: 15504 - protein, 9 aa, synthetic construct
  source 1..9: note = Description of Artificial Sequence: Synthetic peptide; note = XENP018487 vlCDR3
QQDYSVPRT

SEQ ID NO: 15505 - protein, 451 aa, synthetic construct; identical to SEQ ID NO: 11545
  source 1..451: note = Description of Artificial Sequence: Synthetic polypeptide; note = XENP018488 1G6_H1_L1.141_IgG1_PVA_/S267K Heavy Chain

SEQ ID NO: 15506 - protein, 122 aa, synthetic construct; identical to SEQ ID NO: 6246
  source 1..122: note = Description of Artificial Sequence: Synthetic polypeptide; note = VH of XENP018488

SEQ ID NO: 15507 - protein, 5 aa, synthetic construct
  source 1..5: note = Description of Artificial Sequence: Synthetic peptide; note = XENP018488 vhCDR1
NYWMN

SEQ ID NO: 15508 - protein, 19 aa, synthetic construct
  source 1..19: note = Description of Artificial Sequence: Synthetic peptide; note = XENP018488 vhCDR2
EIRLKSNNYATHYAEPVKG

SEQ ID NO: 15509 - protein, 11 aa, synthetic construct
  source 1..11: note = Description of Artificial Sequence: Synthetic peptide; note = XENP018488 vhCDR3
YYGNYGGYFDV

SEQ ID NO: 15510 - protein, 214 aa, synthetic construct
  source 1..214: note = Description of Artificial Sequence: Synthetic polypeptide; note = XENP018488 1G6_H1_L1.141_IgG1_PVA_/S267K Light Chain
SIVMTQSPATLSVSPGERATLSCRASQSVSNDVAWYQQKPGQSPRLLINYASHRYTGVPDRFTGSGYGTEFTLTISSLQSEDFAVYFCQQDYSHPRTFGGGTKVEIKRTVAAPSVFIFPPSDEQLKSGTASVVCLLNNFYPREAKVQWKVDNALQSGNSQESVTEQDSKDSTYSLSSTLTLSKADYEKHKVYACEVTHQGLSSPVTKSFNRGEC

SEQ ID NO: 15511 - protein, 107 aa, synthetic construct; identical to SEQ ID NO: 9763
  source 1..107: note = Description of Artificial Sequence: Synthetic polypeptide; note = VL of XENP018488

SEQ ID NO: 15512 - protein, 11 aa, synthetic construct
  source 1..11: note = Description of Artificial Sequence: Synthetic peptide; note = XENP018488 vlCDR1
RASQSVSNDVA

SEQ ID NO: 15513 - protein, 7 aa, synthetic construct
  source 1..7: note = Description of Artificial Sequence: Synthetic peptide; note = XENP018488 vlCDR2
YASHRYT

SEQ ID NO: 15514 - protein, 9 aa, synthetic construct
  source 1..9: note = Description of Artificial Sequence: Synthetic peptide; note = XENP018488 vlCDR3
QQDYSHPRT

SEQ ID NO: 15515 - protein, 451 aa, synthetic construct; identical to SEQ ID NO: 11545
  source 1..451: note = Description of Artificial Sequence: Synthetic polypeptide; note = XENP018489 1G6_H1_L1.142_IgG1_PVA_/S267K Heavy Chain

SEQ ID NO: 15516 - protein, 122 aa, synthetic construct; identical to SEQ ID NO: 6246
  source 1..122: note = Description of Artificial Sequence: Synthetic polypeptide; note = VH of XENP018489

SEQ ID NO: 15517 - protein, 5 aa, synthetic construct
  source 1..5: note = Description of Artificial Sequence: Synthetic peptide; note = XENP018489 vhCDR1
NYWMN

SEQ ID NO: 15518 - protein, 19 aa, synthetic construct
  source 1..19: note = Description of Artificial Sequence: Synthetic peptide; note = XENP018489 vhCDR2
EIRLKSNNYATHYAEPVKG

SEQ ID NO: 15519 - protein, 11 aa, synthetic construct
  source 1..11: note = Description of Artificial Sequence: Synthetic peptide; note = XENP018489 vhCDR3
YYGNYGGYFDV

SEQ ID NO: 15520 - protein, 214 aa, synthetic construct
  source 1..214: note = Description of Artificial Sequence: Synthetic polypeptide; note = XENP018489 1G6_H1_L1.142_IgG1_PVA_/S267K Light Chain
SIVMTQSPATLSVSPGERATLSCRASQSVSNDVAWYQQKPGQSPRLLINYASHRYTGVPDRFTGSGYGTEFTLTISSLQSEDFAVYFCQQDYSDPRTFGGGTKVEIKRTVAAPSVFIFPPSDEQLKSGTASVVCLLNNFYPREAKVQWKVDNALQSGNSQESVTEQDSKDSTYSLSSTLTLSKADYEKHKVYACEVTHQGLSSPVTKSFNRGEC

SEQ ID NO: 15521 - protein, 107 aa, synthetic construct; identical to SEQ ID NO: 9772
  source 1..107: note = Description of Artificial Sequence: Synthetic polypeptide; note = VL of XENP018489

SEQ ID NO: 15522 - protein, 11 aa, synthetic construct
  source 1..11: note = Description of Artificial Sequence: Synthetic peptide; note = XENP018489 vlCDR1
RASQSVSNDVA

SEQ ID NO: 15523 - protein, 7 aa, synthetic construct
  source 1..7: note = Description of Artificial Sequence: Synthetic peptide; note = XENP018489 vlCDR2
YASHRYT

SEQ ID NO: 15524 - protein, 9 aa, synthetic construct
  source 1..9: note = Description of Artificial Sequence: Synthetic peptide; note = XENP018489 vlCDR3
QQDYSDPRT

SEQ ID NO: 15525 - protein, 451 aa, synthetic construct; identical to SEQ ID NO: 11545
  source 1..451: note = Description of Artificial Sequence: Synthetic polypeptide; note = XENP018490 1G6_H1_L1.143_IgG1_PVA_/S267K Heavy Chain

SEQ ID NO: 15526 - protein, 122 aa, synthetic construct; identical to SEQ ID NO: 6246
  source 1..122: note = Description of Artificial Sequence: Synthetic polypeptide; note = VH of XENP018490

SEQ ID NO: 15527 - protein, 5 aa, synthetic construct
  source 1..5: note = Description of Artificial Sequence: Synthetic peptide; note = XENP018490 vhCDR1
NYWMN

SEQ ID NO: 15528 - protein, 19 aa, synthetic construct
  source 1..19: note = Description of Artificial Sequence: Synthetic peptide; note = XENP018490 vhCDR2
EIRLKSNNYATHYAEPVKG

SEQ ID NO: 15529 - protein, 11 aa, synthetic construct
  source 1..11: note = Description of Artificial Sequence: Synthetic peptide; note = XENP018490 vhCDR3
YYGNYGGYFDV

SEQ ID NO: 15530 - protein, 214 aa, synthetic construct
  source 1..214: note = Description of Artificial Sequence: Synthetic polypeptide; note = XENP018490 1G6_H1_L1.143_IgG1_PVA_/S267K Light Chain
SIVMTQSPATLSVSPGERATLSCRASQSVSNDVAWYQQKPGQSPRLLINYASHRYTGVPDRFTGSGYGTEFTLTISSLQSEDFAVYFCQQDYSKPRTFGGGTKVEIKRTVAAPSVFIFPPSDEQLKSGTASVVCLLNNFYPREAKVQWKVDNALQSGNSQESVTEQDSKDSTYSLSSTLTLSKADYEKHKVYACEVTHQGLSSPVTKSFNRGEC

SEQ ID NO: 15531 - protein, 107 aa, synthetic construct; identical to SEQ ID NO: 9781
  source 1..107: note = Description of Artificial Sequence: Synthetic polypeptide; note = VL of XENP018490

SEQ ID NO: 15532 - protein, 11 aa, synthetic construct
  source 1..11: note = Description of Artificial Sequence: Synthetic peptide; note = XENP018490 vlCDR1
RASQSVSNDVA

SEQ ID NO: 15533 - protein, 7 aa, synthetic construct
  source 1..7: note = Description of Artificial Sequence: Synthetic peptide; note = XENP018490 vlCDR2
YASHRYT

SEQ ID NO: 15534 - protein, 9 aa, synthetic construct
  source 1..9: note = Description of Artificial Sequence: Synthetic peptide; note = XENP018490 vlCDR3
QQDYSKPRT

SEQ ID NO: 15535 - protein, 451 aa, synthetic construct; identical to SEQ ID NO: 11545
  source 1..451: note = Description of Artificial Sequence: Synthetic polypeptide; note = XENP018491 1G6_H1_L1.144_IgG1_PVA_/S267K Heavy Chain

SEQ ID NO: 15536 - protein, 122 aa, synthetic construct; identical to SEQ ID NO: 6246
  source 1..122: note = Description of Artificial Sequence: Synthetic polypeptide; note = VH of XENP018491

SEQ ID NO: 15537 - protein, 5 aa, synthetic construct
  source 1..5: note = Description of Artificial Sequence: Synthetic peptide; note = XENP018491 vhCDR1
NYWMN

SEQ ID NO: 15538 - protein, 19 aa, synthetic construct
  source 1..19: note = Description of Artificial Sequence: Synthetic peptide; note = XENP018491 vhCDR2
EIRLKSNNYATHYAEPVKG

SEQ ID NO: 15539 - protein, 11 aa, synthetic construct
  source 1..11: note = Description of Artificial Sequence: Synthetic peptide; note = XENP018491 vhCDR3
YYGNYGGYFDV

SEQ ID NO: 15540 - protein, 214 aa, synthetic construct
  source 1..214: note = Description of Artificial Sequence: Synthetic polypeptide; note = XENP018491 1G6_H1_L1.144_IgG1_PVA_/S267K Light Chain
SIVMTQSPATLSVSPGERATLSCRASQSVSNDVAWYQQKPGQSPRLLINYASHRYTGVPDRFTGSGYGTEFTLTISSLQSEDFAVYFCQQDYSFPRTFGGGTKVEIKRTVAAPSVFIFPPSDEQLKSGTASVVCLLNNFYPREAKVQWKVDNALQSGNSQESVTEQDSKDSTYSLSSTLTLSKADYEKHKVYACEVTHQGLSSPVTKSFNRGEC

SEQ ID NO: 15541 - protein, 107 aa, synthetic construct; identical to SEQ ID NO: 9790
  source 1..107: note = Description of Artificial Sequence: Synthetic polypeptide; note = VL of XENP018491

SEQ ID NO: 15542 - protein, 11 aa, synthetic construct
  source 1..11: note = Description of Artificial Sequence: Synthetic peptide; note = XENP018491 vlCDR1
RASQSVSNDVA

SEQ ID NO: 15543 - protein, 7 aa, synthetic construct
  source 1..7: note = Description of Artificial Sequence: Synthetic peptide; note = XENP018491 vlCDR2
YASHRYT

SEQ ID NO: 15544 - protein, 9 aa, synthetic construct
  source 1..9: note = Description of Artificial Sequence: Synthetic peptide; note = XENP018491 vlCDR3
QQDYSFPRT

SEQ ID NO: 15545 - protein, 451 aa, synthetic construct; identical to SEQ ID NO: 11545
  source 1..451: note = Description of Artificial Sequence: Synthetic polypeptide; note = XENP018492 1G6_H1_L1.145_IgG1_PVA_/S267K Heavy Chain

SEQ ID NO: 15546 - protein, 122 aa, synthetic construct; identical to SEQ ID NO: 6246
  source 1..122: note = Description of Artificial Sequence: Synthetic polypeptide; note = VH of XENP018492

SEQ ID NO: 15547 - protein, 5 aa, synthetic construct
  source 1..5: note = Description of Artificial Sequence: Synthetic peptide; note = XENP018492 vhCDR1
NYWMN

SEQ ID NO: 15548 - protein, 19 aa, synthetic construct
  source 1..19: note = Description of Artificial Sequence: Synthetic peptide; note = XENP018492 vhCDR2
EIRLKSNNYATHYAEPVKG

SEQ ID NO: 15549 - protein, 11 aa, synthetic construct
  source 1..11: note = Description of Artificial Sequence: Synthetic peptide; note = XENP018492 vhCDR3
YYGNYGGYFDV

SEQ ID NO: 15550 - protein, 214 aa, synthetic construct
  source 1..214: note = Description of Artificial Sequence: Synthetic polypeptide; note = XENP018492 1G6_H1_L1.145_IgG1_PVA_/S267K Light Chain
SIVMTQSPATLSVSPGERATLSCRASQSVSNDVAWYQQKPGQSPRLLINYASHRYTGVPDRFTGSGYGTEFTLTISSLQSEDFAVYFCQQDYSSPRTFGGGTKLEIKRTVAAPSVFIFPPSDEQLKSGTASVVCLLNNFYPREAKVQWKVDNALQSGNSQESVTEQDSKDSTYSLSSTLTLSKADYEKHKVYACEVTHQGLSSPVTKSFNRGEC

SEQ ID NO: 15551 - protein, 107 aa, synthetic construct; identical to SEQ ID NO: 9799
  source 1..107: note = Description of Artificial Sequence: Synthetic polypeptide; note = VL of XENP018492

SEQ ID NO: 15552 - protein, 11 aa, synthetic construct
  source 1..11: note = Description of Artificial Sequence: Synthetic peptide; note = XENP018492 vlCDR1
RASQSVSNDVA

SEQ ID NO: 15553 - protein, 7 aa, synthetic construct
  source 1..7: note = Description of Artificial Sequence: Synthetic peptide; note = XENP018492 vlCDR2
YASHRYT

SEQ ID NO: 15554 - protein, 9 aa, synthetic construct
  source 1..9: note = Description of Artificial Sequence: Synthetic peptide; note = XENP018492 vlCDR3
QQDYSSPRT

SEQ ID NO: 15555 - protein, 451 aa, synthetic construct
  source 1..451: note = Description of Artificial Sequence: Synthetic polypeptide; note = XENP018892 1G6_H0L0_IgG1_PVA_/S267K Heavy Chain
EVKLEESGGGLVQPGGSMKLSCVASGFTFSNYWMNWVRQSPEKGLEWVAEIRLKSNNYATHYAESVKGRFTISRDDSKSSVYLQMNNLRAEDTGIYYCTRYYGNYGGYFDVWGAGTTVTVSSASTKGPSVFPLAPSSKSTSGGTAALGCLVKDYFPEPVTVSWNSGALTSGVHTFPAVLQSSGLYSLSSVVTVPSSSLGTQTYICNVNHKPSNTKVDKKVEPKSCDKTHTCPPCPAPPVAGPSVFLFPPKPKDTLMISRTPEVTCVVVDVKHEDPEVKFNWYVDGVEVHNAKTKPREEQYNSTYRVVSVLTVLHQDWLNGKEYKCKVSNKALPAPIEKTISKAKGQPREPQVYTLPPSREEMTKNQVSLTCLVKGFYPSDIAVEWESNGQPENNYKTTPPVLDSDGSFFLYSKLTVDKSRWQQGNVFSCSVMHEALHNHYTQKSLSLSPGK

SEQ ID NO: 15556 - protein, 122 aa, synthetic construct; identical to SEQ ID NO: 9807
  source 1..122: note = Description of Artificial Sequence: Synthetic polypeptide; note = VH of XENP018892

SEQ ID NO: 15557 - protein, 5 aa, synthetic construct
  source 1..5: note = Description of Artificial Sequence: Synthetic peptide; note = XENP018892 vhCDR1
NYWMN

SEQ ID NO: 15558 - protein, 19 aa, synthetic construct
  source 1..19: note = Description of Artificial Sequence: Synthetic peptide; note = XENP018892 vhCDR2
EIRLKSNNYATHYAESVKG

SEQ ID NO: 15559 - protein, 11 aa, synthetic construct
  source 1..11: note = Description of Artificial Sequence: Synthetic peptide; note = XENP018892 vhCDR3
YYGNYGGYFDV

SEQ ID NO: 15560 - protein, 214 aa, synthetic construct
  source 1..214: note = Description of Artificial Sequence: Synthetic polypeptide; note = XENP018892 1G6_H0L0_IgG1_PVA_/S267K Light Chain
SIVMTQTPKFLLVSAGDRVTITCKASQSVSNDVAWYQQKPGQSPKLLINYASHRYTGVPDRFTGSGYGTDFTFTISTVQAEDLAVYFCQQDYSSPRTFGGGTKLEIKRTVAAPSVFIFPPSDEQLKSGTASVVCLLNNFYPREAKVQWKVDNALQSGNSQESVTEQDSKDSTYSLSSTLTLSKADYEKHKVYACEVTHQGLSSPVTKSFNRGEC

SEQ ID NO: 15561 - protein, 107 aa, synthetic construct; identical to SEQ ID NO: 9808
  source 1..107: note = Description of Artificial Sequence: Synthetic polypeptide; note = VL of XENP018892

SEQ ID NO: 15562 - protein, 11 aa, synthetic construct
  source 1..11: note = Description of Artificial Sequence: Synthetic peptide; note = XENP018892 vlCDR1
KASQSVSNDVA

SEQ ID NO: 15563 - protein, 7 aa, synthetic construct
  source 1..7: note = Description of Artificial Sequence: Synthetic peptide; note = XENP018892 vlCDR2
YASHRYT

SEQ ID NO: 15564 - protein, 9 aa, synthetic construct
  source 1..9: note = Description of Artificial Sequence: Synthetic peptide; note = XENP018892 vlCDR3
QQDYSSPRT

SEQ ID NO: 15565 - protein, 449 aa, synthetic construct
  source 1..449: note = Description of Artificial Sequence: Synthetic polypeptide; note = XENP018893 4C11_H0L0_IgG1_PVA_/S267K Heavy Chain
EIHLQQSGTVLAKPGASVKMSCTASGYTFTSYWMHWVKQRPGQGLEWIGAIYPGNSDTSYNQKFKGKAKLTAVTSASTAYMELSSLTNEDSAVYYCTNLYYGSSFAMDYWGQGTSVTVSSASTKGPSVFPLAPSSKSTSGGTAALGCLVKDYFPEPVTVSWNSGALTSGVHTFPAVLQSSGLYSLSSVVTVPSSSLGTQTYICNVNHKPSNTKVDKKVEPKSCDKTHTCPPCPAPPVAGPSVFLFPPKPKDTLMISRTPEVTCVVVDVKHEDPEVKFNWYVDGVEVHNAKTKPREEQYNSTYRVVSVLTVLHQDWLNGKEYKCKVSNKALPAPIEKTISKAKGQPREPQVYTLPPSREEMTKNQVSLTCLVKGFYPSDIAVEWESNGQPENNYKTTPPVLDSDGSFFLYSKLTVDKSRWQQGNVFSCSVMHEALHNHYTQKSLSLSPGK

SEQ ID NO: 15566 - protein, 120 aa, synthetic construct
  source 1..120: note = Description of Artificial Sequence: Synthetic polypeptide; note = VH of XENP018893
EIHLQQSGTVLAKPGASVKMSCTASGYTFTSYWMHWVKQRPGQGLEWIGAIYPGNSDTSYNQKFKGKAKLTAVTSASTAYMELSSLTNEDSAVYYCTNLYYGSSFAMDYWGQGTSVTVSS

SEQ ID NO: 15567 - protein, 5 aa, synthetic construct
  source 1..5: note = Description of Artificial Sequence: Synthetic peptide; note = XENP018893 vhCDR1
SYWMH

SEQ ID NO: 15568 - protein, 17 aa, synthetic construct
  source 1..17: note = Description of Artificial Sequence: Synthetic peptide; note = XENP018893 vhCDR2
AIYPGNSDTSYNQKFKG

SEQ ID NO: 15569 - protein, 11 aa, synthetic construct
  source 1..11: note = Description of Artificial Sequence: Synthetic peptide; note = XENP018893 vhCDR3
LYYGSSFAMDY

SEQ ID NO: 15570 - protein, 214 aa, synthetic construct
  source 1..214: note = Description of Artificial Sequence: Synthetic polypeptide; note = XENP018893 4C11_H0L0_IgG1_PVA_/S267K Light Chain
DIKMTQSPSSIYASLGERVTVTCRASQDINTYLSWFQQLPGKSPKTLIYRANRLVDGVPSRFSGSGSGQDYSLTISSLEYEDMGIYYCLHYDDFPYTFGGGTKLEIKRTVAAPSVFIFPPSDEQLKSGTASVVCLLNNFYPREAKVQWKVDNALQSGNSQESVTEQDSKDSTYSLSSTLTLSKADYEKHKVYACEVTHQGLSSPVTKSFNRGEC

SEQ ID NO: 15571 - protein, 107 aa, synthetic construct
  source 1..107: note = Description of Artificial Sequence: Synthetic polypeptide; note = VL of XENP018893
DIKMTQSPSSIYASLGERVTVTCRASQDINTYLSWFQQLPGKSPKTLIYRANRLVDGVPSRFSGSGSGQDYSLTISSLEYEDMGIYYCLHYDDFPYTFGGGTKLEIK

SEQ ID NO: 15572 - protein, 11 aa, synthetic construct
  source 1..11: note = Description of Artificial Sequence: Synthetic peptide; note = XENP018893 vlCDR1
RASQDINTYLS

SEQ ID NO: 15573 - protein, 7 aa, synthetic construct
  source 1..7: note = Description of Artificial Sequence: Synthetic peptide; note = XENP018893 vlCDR2
RANRLVD

SEQ ID NO: 15574 - protein, 9 aa, synthetic construct
  source 1..9: note = Description of Artificial Sequence: Synthetic peptide; note = XENP018893 vlCDR3
LHYDDFPYT

SEQ ID NO: 15575 - protein, 446 aa, synthetic construct
  source 1..446: note = Description of Artificial Sequence: Synthetic polypeptide; note = XENP018894 6A3_H0L0_IgG1_PVA_/S267K Heavy Chain
EVKLVESGGGLVKPGGSLKLSCAASGFTFSSYGMSWVRQTPEKRLEWVATISGGGRYTYYPDSVKGRFTISRDNAKNNLYLQMSSLRSEDTALYYCASYYDSSFDYWGQGTTLTVSSASTKGPSVFPLAPSSKSTSGGTAALGCLVKDYFPEPVTVSWNSGALTSGVHTFPAVLQSSGLYSLSSVVTVPSSSLGTQTYICNVNHKPSNTKVDKKVEPKSCDKTHTCPPCPAPPVAGPSVFLFPPKPKDTLMISRTPEVTCVVVDVKHEDPEVKFNWYVDGVEVHNAKTKPREEQYNSTYRVVSVLTVLHQDWLNGKEYKCKVSNKALPAPIEKTISKAKGQPREPQVYTLPPSREEMTKNQVSLTCLVKGFYPSDIAVEWESNGQPENNYKTTPPVLDSDGSFFLYSKLTVDKSRWQQGNVFSCSVMHEALHNHYTQKSLSLSPGK

SEQ ID NO: 15576 - protein, 117 aa, synthetic construct; identical to SEQ ID NO: 9825
  source 1..117: note = Description of Artificial Sequence: Synthetic polypeptide; note = VH of XENP018894

SEQ ID NO: 15577 - protein, 5 aa, synthetic construct
  source 1..5: note = Description of Artificial Sequence: Synthetic peptide; note = XENP018894 vhCDR1
SYGMS

SEQ ID NO: 15578 - protein, 17 aa, synthetic construct
  source 1..17: note = Description of Artificial Sequence: Synthetic peptide; note = XENP018894 vhCDR2
TISGGGRYTYYPDSVKG

SEQ ID NO: 15579 - protein, 8 aa, synthetic construct
  source 1..8: note = Description of Artificial Sequence: Synthetic peptide; note = XENP018894 vhCDR3
YYDSSFDY

SEQ ID NO: 15580 - protein, 214 aa, synthetic construct
  source 1..214: note = Description of Artificial Sequence: Synthetic polypeptide; note = XENP018894 6A3_H0L0_IgG1_PVA_/S267K Light Chain
DIVMTQSHKFMSTSVGDRVSITCKASQDVGTAVAWYQQKPGQSPKLLIYWASTRHTGVPDRFTGSGSGTDFTLTISNVQSEDLADYFCQHYSIYPWTFGGGTKLEIKRTVAAPSVFIFPPSDEQLKSGTASVVCLLNNFYPREAKVQWKVDNALQSGNSQESVTEQDSKDSTYSLSSTLTLSKADYEKHKVYACEVTHQGLSSPVTKSFNRGEC

SEQ ID NO: 15581 - protein, 107 aa, synthetic construct; identical to SEQ ID NO: 9826
  source 1..107: note = Description of Artificial Sequence: Synthetic polypeptide; note = VL of XENP018894

SEQ ID NO: 15582 - protein, 11 aa, synthetic construct
  source 1..11: note = Description of Artificial Sequence: Synthetic peptide; note = XENP018894 vlCDR1
KASQDVGTAVA

SEQ ID NO: 15583 - protein, 7 aa, synthetic construct
  source 1..7: note = Description of Artificial Sequence: Synthetic peptide; note = XENP018894 vlCDR2
WASTRHT

SEQ ID NO: 15584 - protein, 9 aa, synthetic construct
  source 1..9: note = Description of Artificial Sequence: Synthetic peptide; note = XENP018894 vlCDR3
QHYSIYPWT

SEQ ID NO: 15585 - protein, 451 aa, synthetic construct; identical to SEQ ID NO: 12615
  source 1..451: note = Description of Artificial Sequence: Synthetic polypeptide; note = XENP018910 1G6_H1.90_L1.119_IgG1_PVA_/S267K Heavy Chain

SEQ ID NO: 15586 - protein, 122 aa, synthetic construct; identical to SEQ ID NO: 7161
  source 1..122: note = Description of Artificial Sequence: Synthetic polypeptide; note = VH of XENP018910

SEQ ID NO: 15587 - protein, 5 aa, synthetic construct
  source 1..5: note = Description of Artificial Sequence: Synthetic peptide; note = XENP018910 vhCDR1
NYWMN

SEQ ID NO: 15588 - protein, 19 aa, synthetic construct
  source 1..19: note = Description of Artificial Sequence: Synthetic peptide; note = XENP018910 vhCDR2
EIRLYSNNYATHYAEPVKG

SEQ ID NO: 15589 - protein, 11 aa, synthetic construct
  source 1..11: note = Description of Artificial Sequence: Synthetic peptide; note = XENP018910 vhCDR3
YYGNYGGYFDV

SEQ ID NO: 15590 - protein, 214 aa, synthetic construct; identical to SEQ ID NO: 15290
  source 1..214: note = Description of Artificial Sequence: Synthetic polypeptide; note = XENP018910 1G6_H1.90_L1.119_IgG1_PVA_/S267K Light Chain

SEQ ID NO: 15591 - protein, 107 aa, synthetic construct; identical to SEQ ID NO: 9565
  source 1..107: note = Description of Artificial Sequence: Synthetic polypeptide; note = VL of XENP018910

SEQ ID NO: 15592 - protein, 11 aa, synthetic construct
  source 1..11: note = Description of Artificial Sequence: Synthetic peptide; note = XENP018910 vlCDR1
RASQSVSNDVA

SEQ ID NO: 15593 - protein, 7 aa, synthetic construct
  source 1..7: note = Description of Artificial Sequence: Synthetic peptide; note = XENP018910 vlCDR2
YASHRYT

SEQ ID NO: 15594 - protein, 9 aa, synthetic construct
  source 1..9: note = Description of Artificial Sequence: Synthetic peptide; note = XENP018910 vlCDR3
QQDWSSPRT

SEQ ID NO: 15595 - protein, 451 aa, synthetic construct; identical to SEQ ID NO: 12615
  source 1..451: note = Description of Artificial Sequence: Synthetic polypeptide; note = XENP018911 1G6_H1.90_L1.23_IgG1_PVA_/S267K Heavy Chain

SEQ ID NO: 15596 - protein, 122 aa, synthetic construct; identical to SEQ ID NO: 7161
  source 1..122: note = Description of Artificial Sequence: Synthetic polypeptide; note = VH of XENP018911

SEQ ID NO: 15597 - protein, 5 aa, synthetic construct
  source 1..5: note = Description of Artificial Sequence: Synthetic peptide; note = XENP018911 vhCDR1
NYWMN

SEQ ID NO: 15598 - protein, 19 aa, synthetic construct
  source 1..19: note = Description of Artificial Sequence: Synthetic peptide; note = XENP018911 vhCDR2
EIRLYSNNYATHYAEPVKG

SEQ ID NO: 15599 - protein, 11 aa, synthetic construct
  source 1..11: note = Description of Artificial Sequence: Synthetic peptide; note = XENP018911 vhCDR3
YYGNYGGYFDV

SEQ ID NO: 15600 - protein, 214 aa, synthetic construct; identical to SEQ ID NO: 14330
  source 1..214: note = Description of Artificial Sequence: Synthetic polypeptide; note = XENP018911 1G6_H1.90_L1.23_IgG1_PVA_/S267K Light Chain

SEQ ID NO: 15601 - protein, 107 aa, synthetic construct; identical to SEQ ID NO: 8701
  source 1..107: note = Description of Artificial Sequence: Synthetic polypeptide; note = VL of XENP018911

SEQ ID NO: 15602 - protein, 11 aa, synthetic construct
  source 1..11: note = Description of Artificial Sequence: Synthetic peptide; note = XENP018911 vlCDR1
RASQSVGNDVA

SEQ ID NO: 15603 - protein, 7 aa, synthetic construct
  source 1..7: note = Description of Artificial Sequence: Synthetic peptide; note = XENP018911 vlCDR2
YASHRYT

SEQ ID NO: 15604 - protein, 9 aa, synthetic construct
  source 1..9: note = Description of Artificial Sequence: Synthetic peptide; note = XENP018911 vlCDR3
QQDYSSPRT

SEQ ID NO: 15605 - protein, 451 aa, synthetic construct; identical to SEQ ID NO: 12615
  source 1..451: note = Description of Artificial Sequence: Synthetic polypeptide; note = XENP018912 1G6_H1.90_L1.67_IgG1_PVA_/S267K Heavy Chain

SEQ ID NO: 15606 - protein, 122 aa, synthetic construct; identical to SEQ ID NO: 7161
  source 1..122: note = Description of Artificial Sequence: Synthetic polypeptide; note = VH of XENP018912

SEQ ID NO: 15607 - protein, 5 aa, synthetic construct
  source 1..5: note = Description of Artificial Sequence: Synthetic peptide; note = XENP018912 vhCDR1
NYWMN

SEQ ID NO: 15608 - protein, 19 aa, synthetic construct
  source 1..19: note = Description of Artificial Sequence: Synthetic peptide; note = XENP018912 vhCDR2
EIRLYSNNYATHYAEPVKG

SEQ ID NO: 15609 - protein, 11 aa, synthetic construct
  source 1..11: note = Description of Artificial Sequence: Synthetic peptide; note = XENP018912 vhCDR3
YYGNYGGYFDV

SEQ ID NO: 15610 - protein, 214 aa, synthetic construct; identical to SEQ ID NO: 14770
  source 1..214: note = Description of Artificial Sequence: Synthetic polypeptide; note = XENP018912 1G6_H1.90_L1.67_IgG1_PVA_/S267K Light Chain

SEQ ID NO: 15611 - protein, 107 aa, synthetic construct; identical to SEQ ID NO: 9097
  source 1..107: note = Description of Artificial Sequence: Synthetic polypeptide; note = VL of XENP018912

SEQ ID NO: 15612 - protein, 11 aa, synthetic construct
  source 1..11: note = Description of Artificial Sequence: Synthetic peptide; note = XENP018912 vlCDR1
RASQSVSNDVA

SEQ ID NO: 15613 - protein, 7 aa, synthetic construct
  source 1..7: note = Description of Artificial Sequence: Synthetic peptide; note = XENP018912 vlCDR2
YASWRYT

SEQ ID NO: 15614 - protein, 9 aa, synthetic construct
  source 1..9: note = Description of Artificial Sequence: Synthetic peptide; note = XENP018912 vlCDR3
QQDYSSPRT

SEQ ID NO: 15615 - protein, 451 aa, synthetic construct; identical to SEQ ID NO: 12615
  source 1..451: note = Description of Artificial Sequence: Synthetic polypeptide; note = XENP018913 1G6_H1.90_L1.94_IgG1_PVA_/S267K Heavy Chain

SEQ ID NO: 15616 - protein, 122 aa, synthetic construct; identical to SEQ ID NO: 7161
  source 1..122: note = Description of Artificial Sequence: Synthetic polypeptide; note = VH of XENP018913

SEQ ID NO: 15617 - protein, 5 aa, synthetic construct
  source 1..5: note = Description of Artificial Sequence: Synthetic peptide; note = XENP018913 vhCDR1
NYWMN

SEQ ID NO: 15618 - protein, 19 aa, synthetic construct
  source 1..19: note = Description of Artificial Sequence: Synthetic peptide; note = XENP018913 vhCDR2
EIRLYSNNYATHYAEPVKG

SEQ ID NO: 15619 - protein, 11 aa, synthetic construct
  source 1..11: note = Description of Artificial Sequence: Synthetic peptide; note = XENP018913 vhCDR3
YYGNYGGYFDV

SEQ ID NO: 15620 - protein, 214 aa, synthetic construct; identical to SEQ ID NO: 15040
  source 1..214: note = Description of Artificial Sequence: Synthetic polypeptide; note = XENP018913 1G6_H1.90_L1.94_IgG1_PVA_/S267K Light Chain

SEQ ID NO: 15621 - protein, 107 aa, synthetic construct; identical to SEQ ID NO: 9340
  source 1..107: note = Description of Artificial Sequence: Synthetic polypeptide; note = VL of XENP018913

SEQ ID NO: 15622 - protein, 11 aa, synthetic construct
  source 1..11: note = Description of Artificial Sequence: Synthetic peptide; note = XENP018913 vlCDR1
RASQSVSNDVA

SEQ ID NO: 15623 - protein, 7 aa, synthetic construct
  source 1..7: note = Description of Artificial Sequence: Synthetic peptide; note = XENP018913 vlCDR2
YASHRYT

SEQ ID NO: 15624 - protein, 9 aa, synthetic construct
  source 1..9: note = Description of Artificial Sequence: Synthetic peptide; note = XENP018913 vlCDR3
QQDYSSPRT

SEQ ID NO: 15625 - protein, 451 aa, synthetic construct; identical to SEQ ID NO: 12615
  source 1..451: note = Description of Artificial Sequence: Synthetic polypeptide; note = XENP018914 1G6_H1.90_L1.116_IgG1_PVA_/S267K Heavy Chain

SEQ ID NO: 15626 - protein, 122 aa, synthetic construct; identical to SEQ ID NO: 7161
  source 1..122: note = Description of Artificial Sequence: Synthetic polypeptide; note = VH of XENP018914

SEQ ID NO: 15627 - protein, 5 aa, synthetic construct
  source 1..5: note = Description of Artificial Sequence: Synthetic peptide; note = XENP018914 vhCDR1
NYWMN

SEQ ID NO: 15628 - protein, 19 aa, synthetic construct
  source 1..19: note = Description of Artificial Sequence: Synthetic peptide; note = XENP018914 vhCDR2
EIRLYSNNYATHYAEPVKG

SEQ ID NO: 15629 - protein, 11 aa, synthetic construct
  source 1..11: note = Description of Artificial Sequence: Synthetic peptide; note = XENP018914 vhCDR3
YYGNYGGYFDV

SEQ ID NO: 15630 - protein, 214 aa, synthetic construct; identical to SEQ ID NO: 15260
  source 1..214: note = Description of Artificial Sequence: Synthetic polypeptide; note = XENP018914 1G6_H1.90_L1.116_IgG1_PVA_/S267K Light Chain

SEQ ID NO: 15631 - protein, 107 aa, synthetic construct; identical to SEQ ID NO: 9538
  source 1..107: note = Description of Artificial Sequence: Synthetic polypeptide; note = VL of XENP018914

SEQ ID NO: 15632 - protein, 11 aa, synthetic construct
  source 1..11: note = Description of Artificial Sequence: Synthetic peptide; note = XENP018914 vlCDR1
RASQSVSNDVA

SEQ ID NO: 15633 - protein, 7 aa, synthetic construct
  source 1..7: note = Description of Artificial Sequence: Synthetic peptide; note = XENP018914 vlCDR2
YASHRYT

SEQ ID NO: 15634 - protein, 9 aa, synthetic construct
  source 1..9: note = Description of Artificial Sequence: Synthetic peptide; note = XENP018914 vlCDR3
QQDFSSPRT

SEQ ID NO: 15635 - protein, 451 aa, synthetic construct; identical to SEQ ID NO: 13265
  source 1..451: note = Description of Artificial Sequence: Synthetic polypeptide; note = XENP018915 1G6_H1.155_L1.119_IgG1_PVA_/S267K Heavy Chain

SEQ ID NO: 15636 - protein, 122 aa, synthetic construct; identical to SEQ ID NO: 7746
  source 1..122: note = Description of Artificial Sequence: Synthetic polypeptide; note = VH of XENP018915

SEQ ID NO: 15637 - protein, 5 aa, synthetic construct
  source 1..5: note = Description of Artificial Sequence: Synthetic peptide; note = XENP018915 vhCDR1
NYWMN

SEQ ID NO: 15638 - protein, 19 aa, synthetic construct
  source 1..19: note = Description of Artificial Sequence: Synthetic peptide; note = XENP018915 vhCDR2
EIRLKSNNYATHYAEPVKG

SEQ ID NO: 15639 - protein, 11 aa, synthetic construct
  source 1..11: note = Description of Artificial Sequence: Synthetic peptide; note = XENP018915 vhCDR3
YYGNYGGYFDV

SEQ ID NO: 15640 - protein, 214 aa, synthetic construct; identical to SEQ ID NO: 15290
  source 1..214: note = Description of Artificial Sequence: Synthetic polypeptide; note = XENP018915 1G6_H1.155_L1.119_IgG1_PVA_/S267K Light Chain

SEQ ID NO: 15641 - protein, 107 aa, synthetic construct; identical to SEQ ID NO: 9565
  source 1..107: note = Description of Artificial Sequence: Synthetic polypeptide; note = VL of XENP018915

SEQ ID NO: 15642 - protein, 11 aa, synthetic construct
  source 1..11: note = Description of Artificial Sequence: Synthetic peptide; note = XENP018915 vlCDR1
RASQSVSNDVA

SEQ ID NO: 15643 - protein, 7 aa, synthetic construct
  source 1..7: note = Description of Artificial Sequence: Synthetic peptide; note = XENP018915 vlCDR2
YASHRYT

SEQ ID NO: 15644 - protein, 9 aa, synthetic construct
  source 1..9: note = Description of Artificial Sequence: Synthetic peptide; note = XENP018915 vlCDR3
QQDWSSPRT

SEQ ID NO: 15645 - protein, 451 aa, synthetic construct
  source 1..451: note = Description of Artificial Sequence: Synthetic polypeptide; note = XENP018980 1G6_H1.239_L1_IgG1_PVA_/S267K Heavy Chain
EVQLKESGGGLVKPGGSLRLSCAASGFTFSNYWMNWVRQAPGKGLEWVGEIRLKSNNYATHYAEPVKGRFTISRDDSKSTVYLQMNSLKTEDTAVYYCTRYYGNYGGYFDVWGAGTLVTVSSASTKGPSVFPLAPSSKSTSGGTAALGCLVKDYFPEPVTVSWNSGALTSGVHTFPAVLQSSGLYSLSSVVTVPSSSLGTQTYICNVNHKPSNTKVDKKVEPKSCDKTHTCPPCPAPPVAGPSVFLFPPKPKDTLMISRTPEVTCVVVDVKHEDPEVKFNWYVDGVEVHNAKTKPREEQYNSTYRVVSVLTVLHQDWLNGKEYKCKVSNKALPAPIEKTISKAKGQPREPQVYTLPPSREEMTKNQVSLTCLVKGFYPSDIAVEWESNGQPENNYKTTPPVLDSDGSFFLYSKLTVDKSRWQQGNVFSCSVMHEALHNHYTQKSLSLSPGK

SEQ ID NO: 15646 - protein, 122 aa, synthetic construct; identical to SEQ ID NO: 10005
  source 1..122: note = Description of Artificial Sequence: Synthetic polypeptide; note = VH of XENP018980

SEQ ID NO: 15647 - protein, 5 aa, synthetic construct
  source 1..5: note = Description of Artificial Sequence: Synthetic peptide; note = XENP018980 vhCDR1
NYWMN

SEQ ID NO: 15648 - protein, 19 aa, synthetic construct
  source 1..19: note = Description of Artificial Sequence: Synthetic peptide; note = XENP018980 vhCDR2
EIRLKSNNYATHYAEPVKG

SEQ ID NO: 15649 - protein, 11 aa, synthetic construct
  source 1..11: note = Description of Artificial Sequence: Synthetic peptide; note = XENP018980 vhCDR3
YYGNYGGYFDV

SEQ ID NO: 15650 - protein, 214 aa, synthetic construct; identical to SEQ ID NO: 11550
  source 1..214: note = Description of Artificial Sequence: Synthetic polypeptide; note = XENP018980 1G6_H1.239_L1_IgG1_PVA_/S267K Light Chain

SEQ ID NO: 15651 - protein, 107 aa, synthetic construct; identical to SEQ ID NO: 6247
  source 1..107: note = Description of Artificial Sequence: Synthetic polypeptide; note = VL of XENP018980

SEQ ID NO: 15652 - protein, 11 aa, synthetic construct
  source 1..11: note = Description of Artificial Sequence: Synthetic peptide; note = XENP018980 vlCDR1
RASQSVSNDVA

SEQ ID NO: 15653 - protein, 7 aa, synthetic construct
  source 1..7: note = Description of Artificial Sequence: Synthetic peptide; note = XENP018980 vlCDR2
YASHRYT

SEQ ID NO: 15654 - protein, 9 aa, synthetic construct
  source 1..9: note = Description of Artificial Sequence: Synthetic peptide; note = XENP018980 vlCDR3
QQDYSSPRT

SEQ ID NO: 15655 - protein, 451 aa, synthetic construct
  source 1..451: note = Description of Artificial Sequence: Synthetic polypeptide; note = XENP018981 1G6_H1.240_L1_IgG1_PVA_/S267K Heavy Chain
EVQLVESGGGLVKPGESLRLSCAASGFTFSNYWMNWVRQAPGKGLEWVGEIRLKSNNYATHYAEPVKGRFTISRDDSKSTVYLQMNSLKTEDTAVYYCTRYYGNYGGYFDVWGAGTLVTVSSASTKGPSVFPLAPSSKSTSGGTAALGCLVKDYFPEPVTVSWNSGALTSGVHTFPAVLQSSGLYSLSSVVTVPSSSLGTQTYICNVNHKPSNTKVDKKVEPKSCDKTHTCPPCPAPPVAGPSVFLFPPKPKDTLMISRTPEVTCVVVDVKHEDPEVKFNWYVDGVEVHNAKTKPREEQYNSTYRVVSVLTVLHQDWLNGKEYKCKVSNKALPAPIEKTISKAKGQPREPQVYTLPPSREEMTKNQVSLTCLVKGFYPSDIAVEWESNGQPENNYKTTPPVLDSDGSFFLYSKLTVDKSRWQQGNVFSCSVMHEALHNHYTQKSLSLSPGK

SEQ ID NO: 15656 - protein, 122 aa, synthetic construct; identical to SEQ ID NO: 10014
  source 1..122: note = Description of Artificial Sequence: Synthetic polypeptide; note = VH of XENP018981

SEQ ID NO: 15657 - protein, 5 aa, synthetic construct
  source 1..5: note = Description of Artificial Sequence: Synthetic peptide; note = XENP018981 vhCDR1
NYWMN

SEQ ID NO: 15658 - protein, 19 aa, synthetic construct
  source 1..19: note = Description of Artificial Sequence: Synthetic peptide; note = XENP018981 vhCDR2
EIRLKSNNYATHYAEPVKG

SEQ ID NO: 15659 - protein, 11 aa, synthetic construct
  source 1..11: note = Description of Artificial Sequence: Synthetic peptide; note = XENP018981 vhCDR3
YYGNYGGYFDV

SEQ ID NO: 15660 - protein, 214 aa, synthetic construct; identical to SEQ ID NO: 11550
  source 1..214: note = Description of Artificial Sequence: Synthetic polypeptide; note = XENP018981 1G6_H1.240_L1_IgG1_PVA_/S267K Light Chain

SEQ ID NO: 15661 - protein, 107 aa, synthetic construct; identical to SEQ ID NO: 6247
  source 1..107: note = Description of Artificial Sequence: Synthetic polypeptide; note = VL of XENP018981

SEQ ID NO: 15662 - protein, 11 aa, synthetic construct
  source 1..11: note = Description of Artificial Sequence: Synthetic peptide; note = XENP018981 vlCDR1
RASQSVSNDVA

SEQ ID NO: 15663 - protein, 7 aa, synthetic construct
  source 1..7: note = Description of Artificial Sequence: Synthetic peptide; note = XENP018981 vlCDR2
YASHRYT

SEQ ID NO: 15664 - protein, 9 aa, synthetic construct
  source 1..9: note = Description of Artificial Sequence: Synthetic peptide; note = XENP018981 vlCDR3
QQDYSSPRT

SEQ ID NO: 15665 - protein, 451 aa, synthetic construct
  source 1..451: note = Description of Artificial Sequence: Synthetic polypeptide; note = XENP018982 1G6_H1.241_L1_IgG1_PVA_/S267K Heavy Chain
EVQLVESGGGLVKPGGSLRLTCAASGFTFSNYWMNWVRQAPGKGLEWVGEIRLKSNNYATHYAEPVKGRFTISRDDSKSTVYLQMNSLKTEDTAVYYCTRYYGNYGGYFDVWGAGTLVTVSSASTKGPSVFPLAPSSKSTSGGTAALGCLVKDYFPEPVTVSWNSGALTSGVHTFPAVLQSSGLYSLSSVVTVPSSSLGTQTYICNVNHKPSNTKVDKKVEPKSCDKTHTCPPCPAPPVAGPSVFLFPPKPKDTLMISRTPEVTCVVVDVKHEDPEVKFNWYVDGVEVHNAKTKPREEQYNSTYRVVSVLTVLHQDWLNGKEYKCKVSNKALPAPIEKTISKAKGQPREPQVYTLPPSREEMTKNQVSLTCLVKGFYPSDIAVEWESNGQPENNYKTTPPVLDSDGSFFLYSKLTVDKSRWQQGNVFSCSVMHEALHNHYTQKSLSLSPGK

SEQ ID NO: 15666 - protein, 122 aa, synthetic construct; identical to SEQ ID NO: 10023
  source 1..122: note = Description of Artificial Sequence: Synthetic polypeptide; note = VH of XENP018982

SEQ ID NO: 15667 - protein, 5 aa, synthetic construct
  source 1..5: note = Description of Artificial Sequence: Synthetic peptide; note = XENP018982 vhCDR1
NYWMN

SEQ ID NO: 15668 - protein, 19 aa, synthetic construct
  source 1..19: note = Description of Artificial Sequence: Synthetic peptide; note = XENP018982 vhCDR2
EIRLKSNNYATHYAEPVKG

SEQ ID NO: 15669 - protein, 11 aa, synthetic construct
  source 1..11: note = Description of Artificial Sequence: Synthetic peptide; note = XENP018982 vhCDR3
YYGNYGGYFDV

SEQ ID NO: 15670 - protein, 214 aa, synthetic construct; identical to SEQ ID NO: 11550
  source 1..214: note = Description of Artificial Sequence: Synthetic polypeptide; note = XENP018982 1G6_H1.241_L1_IgG1_PVA_/S267K Light Chain

SEQ ID NO: 15671 - protein, 107 aa, synthetic construct; identical to SEQ ID NO: 6247
  source 1..107: note = Description of Artificial Sequence: Synthetic polypeptide; note = VL of XENP018982

SEQ ID NO: 15672 - protein, 11 aa, synthetic construct
  source 1..11: note = Description of Artificial Sequence: Synthetic peptide; note = XENP018982 vlCDR1
RASQSVSNDVA

SEQ ID NO: 15673 - protein, 7 aa, synthetic construct
  source 1..7: note = Description of Artificial Sequence: Synthetic peptide; note = XENP018982 vlCDR2
YASHRYT

SEQ ID NO: 15674 - protein, 9 aa, synthetic construct
  source 1..9: note = Description of Artificial Sequence: Synthetic peptide; note = XENP018982 vlCDR3
QQDYSSPRT

SEQ ID NO: 15675 - protein, 451 aa, synthetic construct
  source 1..451: note = Description of Artificial Sequence: Synthetic polypeptide; note = XENP018983 1G6_H1.242_L1_IgG1_PVA_/S267K Heavy Chain
EVQLVESGGGLVKPGGSLRLVCAASGFTFSNYWMNWVRQAPGKGLEWVGEIRLKSNNYATHYAEPVKGRFTISRDDSKSTVYLQMNSLKTEDTAVYYCTRYYGNYGGYFDVWGAGTLVTVSSASTKGPSVFPLAPSSKSTSGGTAALGCLVKDYFPEPVTVSWNSGALTSGVHTFPAVLQSSGLYSLSSVVTVPSSSLGTQTYICNVNHKPSNTKVDKKVEPKSCDKTHTCPPCPAPPVAGPSVFLFPPKPKDTLMISRTPEVTCVVVDVKHEDPEVKFNWYVDGVEVHNAKTKPREEQYNSTYRVVSVLTVLHQDWLNGKEYKCKVSNKALPAPIEKTISKAKGQPREPQVYTLPPSREEMTKNQVSLTCLVKGFYPSDIAVEWESNGQPENNYKTTPPVLDSDGSFFLYSKLTVDKSRWQQGNVFSCSVMHEALHNHYTQKSLSLSPGK

SEQ ID NO: 15676 - protein, 122 aa, synthetic construct; identical to SEQ ID NO: 10032
  source 1..122: note = Description of Artificial Sequence: Synthetic polypeptide; note = VH of XENP018983

SEQ ID NO: 15677 - protein, 5 aa, synthetic construct
  source 1..5: note = Description of Artificial Sequence: Synthetic peptide; note = XENP018983 vhCDR1
NYWMN

SEQ ID NO: 15678 - protein, 19 aa, synthetic construct
  source 1..19: note = Description of Artificial Sequence: Synthetic peptide; note = XENP018983 vhCDR2
EIRLKSNNYATHYAEPVKG

SEQ ID NO: 15679 - protein, 11 aa, synthetic construct
  source 1..11: note = Description of Artificial Sequence: Synthetic peptide; note = XENP018983 vhCDR3
YYGNYGGYFDV

SEQ ID NO: 15680 - protein, 214 aa, synthetic construct; identical to SEQ ID NO: 11550
  source 1..214: note = Description of Artificial Sequence: Synthetic polypeptide; note = XENP018983 1G6_H1.242_L1_IgG1_PVA_/S267K Light Chain

SEQ ID NO: 15681 - protein, 107 aa, synthetic construct; identical to SEQ ID NO: 6247
  source 1..107: note = Description of Artificial Sequence: Synthetic polypeptide; note = VL of XENP018983

SEQ ID NO: 15682 - protein, 11 aa, synthetic construct
  source 1..11: note = Description of Artificial Sequence: Synthetic peptide; note = XENP018983 vlCDR1
RASQSVSNDVA

SEQ ID NO: 15683 - protein, 7 aa, synthetic construct
  source 1..7: note = Description of Artificial Sequence: Synthetic peptide; note = XENP018983 vlCDR2
YASHRYT

SEQ ID NO: 15684 - protein, 9 aa, synthetic construct
  source 1..9: note = Description of Artificial Sequence: Synthetic peptide; note = XENP018983 vlCDR3
QQDYSSPRT

SEQ ID NO: 15685 - protein, 451 aa, synthetic construct
  source 1..451: note = Description of Artificial Sequence: Synthetic polypeptide; note = XENP018984 1G6_H1.243_L1_IgG1_PVA_/S267K Heavy Chain
EVQLVESGGGLVKPGGSLRLSCAASGFTLSNYWMNWVRQAPGKGLEWVGEIRLKSNNYATHYAEPVKGRFTISRDDSKSTVYLQMNSLKTEDTAVYYCTRYYGNYGGYFDVWGAGTLVTVSSASTKGPSVFPLAPSSKSTSGGTAALGCLVKDYFPEPVTVSWNSGALTSGVHTFPAVLQSSGLYSLSSVVTVPSSSLGTQTYICNVNHKPSNTKVDKKVEPKSCDKTHTCPPCPAPPVAGPSVFLFPPKPKDTLMISRTPEVTCVVVDVKHEDPEVKFNWYVDGVEVHNAKTKPREEQYNSTYRVVSVLTVLHQDWLNGKEYKCKVSNKALPAPIEKTISKAKGQPREPQVYTLPPSREEMTKNQVSLTCLVKGFYPSDIAVEWESNGQPENNYKTTPPVLDSDGSFFLYSKLTVDKSRWQQGNVFSCSVMHEALHNHYTQKSLSLSPGK

SEQ ID NO: 15686 - protein, 122 aa, synthetic construct; identical to SEQ ID NO: 10041
  source 1..122: note = Description of Artificial Sequence: Synthetic polypeptide; note = VH of XENP018984

SEQ ID NO: 15687 - protein, 5 aa, synthetic construct
  source 1..5: note = Description of Artificial Sequence: Synthetic peptide; note = XENP018984 vhCDR1
NYWMN

SEQ ID NO: 15688 - protein, 19 aa, synthetic construct
  source 1..19: note = Description of Artificial Sequence: Synthetic peptide; note = XENP018984 vhCDR2
EIRLKSNNYATHYAEPVKG

SEQ ID NO: 15689 - protein, 11 aa, synthetic construct
  source 1..11: note = Description of Artificial Sequence: Synthetic peptide; note = XENP018984 vhCDR3
YYGNYGGYFDV

SEQ ID NO: 15690 - protein, 214 aa, synthetic construct; identical to SEQ ID NO: 11550
  source 1..214: note = Description of Artificial Sequence: Synthetic polypeptide; note = XENP018984 1G6_H1.243_L1_IgG1_PVA_/S267K Light Chain

SEQ ID NO: 15691 - protein, 107 aa, synthetic construct; identical to SEQ ID NO: 6247
  source 1..107: note = Description of Artificial Sequence: Synthetic polypeptide; note = VL of XENP018984

SEQ ID NO: 15692 - protein, 11 aa, synthetic construct
  source 1..11: note = Description of Artificial Sequence: Synthetic peptide; note = XENP018984 vlCDR1
RASQSVSNDVA

SEQ ID NO: 15693 - protein, 7 aa, synthetic construct
  source 1..7: note = Description of Artificial Sequence: Synthetic peptide; note = XENP018984 vlCDR2
YASHRYT

SEQ ID NO: 15694 - protein, 9 aa, synthetic construct
  source 1..9: note = Description of Artificial Sequence: Synthetic peptide; note = XENP018984 vlCDR3
QQDYSSPRT

SEQ ID NO: 15695 - protein, 451 aa, synthetic construct
  source 1..451: note = Description of Artificial Sequence: Synthetic polypeptide; note = XENP018985 1G6_H1.244_L1_IgG1_PVA_/S267K Heavy Chain
EVQLVESGGGLVKPGGSLRLSCAASGFTFSNYWMNWVRQAPGKGLQWVGEIRLKSNNYATHYAEPVKGRFTISRDDSKSTVYLQMNSLKTEDTAVYYCTRYYGNYGGYFDVWGAGTLVTVSSASTKGPSVFPLAPSSKSTSGGTAALGCLVKDYFPEPVTVSWNSGALTSGVHTFPAVLQSSGLYSLSSVVTVPSSSLGTQTYICNVNHKPSNTKVDKKVEPKSCDKTHTCPPCPAPPVAGPSVFLFPPKPKDTLMISRTPEVTCVVVDVKHEDPEVKFNWYVDGVEVHNAKTKPREEQYNSTYRVVSVLTVLHQDWLNGKEYKCKVSNKALPAPIEKTISKAKGQPREPQVYTLPPSREEMTKNQVSLTCLVKGFYPSDIAVEWESNGQPENNYKTTPPVLDSDGSFFLYSKLTVDKSRWQQGNVFSCSVMHEALHNHYTQKSLSLSPGK

SEQ ID NO: 15696 - protein, 122 aa, synthetic construct; identical to SEQ ID NO: 10050
  source 1..122: note = Description of Artificial Sequence: Synthetic polypeptide; note = VH of XENP018985

SEQ ID NO: 15697 - protein, 5 aa, synthetic construct
  source 1..5: note = Description of Artificial Sequence: Synthetic peptide; note = XENP018985 vhCDR1
NYWMN

SEQ ID NO: 15698 - protein, 19 aa, synthetic construct
  source 1..19: note = Description of Artificial Sequence: Synthetic peptide; note = XENP018985 vhCDR2
EIRLKSNNYATHYAEPVKG

SEQ ID NO: 15699 - protein, 11 aa, synthetic construct
  source 1..11: note = Description of Artificial Sequence: Synthetic peptide; note = XENP018985 vhCDR3
YYGNYGGYFDV

SEQ ID NO: 15700 - protein, 214 aa, synthetic construct; identical to SEQ ID NO: 11550
  source 1..214: note = Description of Artificial Sequence: Synthetic polypeptide; note = XENP018985 1G6_H1.244_L1_IgG1_PVA_/S267K Light Chain

SEQ ID NO: 15701 - protein, 107 aa, synthetic construct; identical to SEQ ID NO: 6247
  source 1..107: note = Description of Artificial Sequence: Synthetic polypeptide; note = VL of XENP018985

SEQ ID NO: 15702 - protein, 11 aa, synthetic construct
  source 1..11: note = Description of Artificial Sequence: Synthetic peptide; note = XENP018985 vlCDR1
RASQSVSNDVA

SEQ ID NO: 15703 - protein, 7 aa, synthetic construct
  source 1..7: note = Description of Artificial Sequence: Synthetic peptide; note = XENP018985 vlCDR2
YASHRYT

SEQ ID NO: 15704 - protein, 9 aa, synthetic construct
  source 1..9: note = Description of Artificial Sequence: Synthetic peptide; note = XENP018985 vlCDR3
QQDYSSPRT

SEQ ID NO: 15705 - protein, 451 aa, synthetic construct
  source 1..451: note = Description of Artificial Sequence: Synthetic polypeptide; note = XENP018986 1G6_H1.245_L1_IgG1_PVA_/S267K Heavy Chain
EVQLVESGGGLVKPGGSLRLSCAASGFTFSNYWMNWVRQAPGKGLEWIGEIRLKSNNYATHYAEPVKGRFTISRDDSKSTVYLQMNSLKTEDTAVYYCTRYYGNYGGYFDVWGAGTLVTVSSASTKGPSVFPLAPSSKSTSGGTAALGCLVKDYFPEPVTVSWNSGALTSGVHTFPAVLQSSGLYSLSSVVTVPSSSLGTQTYICNVNHKPSNTKVDKKVEPKSCDKTHTCPPCPAPPVAGPSVFLFPPKPKDTLMISRTPEVTCVVVDVKHEDPEVKFNWYVDGVEVHNAKTKPREEQYNSTYRVVSVLTVLHQDWLNGKEYKCKVSNKALPAPIEKTISKAKGQPREPQVYTLPPSREEMTKNQVSLTCLVKGFYPSDIAVEWESNGQPENNYKTTPPVLDSDGSFFLYSKLTVDKSRWQQGNVFSCSVMHEALHNHYTQKSLSLSPGK

SEQ ID NO: 15706 - protein, 122 aa, synthetic construct; identical to SEQ ID NO: 10059
  source 1..122: note = Description of Artificial Sequence: Synthetic polypeptide; note = VH of XENP018986

SEQ ID NO: 15707 - protein, 5 aa, synthetic construct
  source 1..5: note = Description of Artificial Sequence: Synthetic peptide; note = XENP018986 vhCDR1
NYWMN

SEQ ID NO: 15708 - protein, 19 aa, synthetic construct
  source 1..19: note = Description of Artificial Sequence: Synthetic peptide; note = XENP018986 vhCDR2
EIRLKSNNYATHYAEPVKG

SEQ ID NO: 15709 - protein, 11 aa, synthetic construct
  source 1..11: note = Description of Artificial Sequence: Synthetic peptide; note = XENP018986 vhCDR3
YYGNYGGYFDV

SEQ ID NO: 15710 - protein, 214 aa, synthetic construct; identical to SEQ ID NO: 11550
  source 1..214: note = Description of Artificial Sequence: Synthetic polypeptide; note = XENP018986 1G6_H1.245_L1_IgG1_PVA_/S267K Light Chain

SEQ ID NO: 15711 - protein, 107 aa, synthetic construct; identical to SEQ ID NO: 6247
  source 1..107: note = Description of Artificial Sequence: Synthetic polypeptide; note = VL of XENP018986

SEQ ID NO: 15712 - protein, 11 aa, synthetic construct
  source 1..11: note = Description of Artificial Sequence: Synthetic peptide; note = XENP018986 vlCDR1
RASQSVSNDVA

SEQ ID NO: 15713 - protein, 7 aa, synthetic construct
  source 1..7: note = Description of Artificial Sequence: Synthetic peptide; note = XENP018986 vlCDR2
YASHRYT

SEQ ID NO: 15714 - protein, 9 aa, synthetic construct
  source 1..9: note = Description of Artificial Sequence: Synthetic peptide; note = XENP018986 vlCDR3
QQDYSSPRT

SEQ ID NO: 15715 - protein, 451 aa, synthetic construct
  source 1..451: note = Description of Artificial Sequence: Synthetic polypeptide; note = XENP018987 1G6_H1.246_L1_IgG1_PVA_/S267K Heavy Chain
EVQLVESGGGLVKPGGSLRLSCAASGFTFSNYWMNWVRQAPGKGLEWMGEIRLKSNNYATHYAEPVKGRFTISRDDSKSTVYLQMNSLKTEDTAVYYCTRYYGNYGGYFDVWGAGTLVTVSSASTKGPSVFPLAPSSKSTSGGTAALGCLVKDYFPEPVTVSWNSGALTSGVHTFPAVLQSSGLYSLSSVVTVPSSSLGTQTYICNVNHKPSNTKVDKKVEPKSCDKTHTCPPCPAPPVAGPSVFLFPPKPKDTLMISRTPEVTCVVVDVKHEDPEVKFNWYVDGVEVHNAKTKPREEQYNSTYRVVSVLTVLHQDWLNGKEYKCKVSNKALPAPIEKTISKAKGQPREPQVYTLPPSREEMTKNQVSLTCLVKGFYPSDIAVEWESNGQPENNYKTTPPVLDSDGSFFLYSKLTVDKSRWQQGNVFSCSVMHEALHNHYTQKSLSLSPGK

SEQ ID NO: 15716 - protein, 122 aa, synthetic construct; identical to SEQ ID NO: 10068
  source 1..122: note = Description of Artificial Sequence: Synthetic polypeptide; note = VH of XENP018987

SEQ ID NO: 15717 - protein, 5 aa, synthetic construct
  source 1..5: note = Description of Artificial Sequence: Synthetic peptide; note = XENP018987 vhCDR1
NYWMN

SEQ ID NO: 15718 - protein, 19 aa, synthetic construct
  source 1..19: note = Description of Artificial Sequence: Synthetic peptide; note = XENP018987 vhCDR2
EIRLKSNNYATHYAEPVKG

SEQ ID NO: 15719 - protein, 11 aa, synthetic construct
  source 1..11: note = Description of Artificial Sequence: Synthetic peptide; note = XENP018987 vhCDR3
YYGNYGGYFDV

SEQ ID NO: 15720 - protein, 214 aa, synthetic construct; identical to SEQ ID NO: 11550
  source 1..214: note = Description of Artificial Sequence: Synthetic polypeptide; note = XENP018987 1G6_H1.246_L1_IgG1_PVA_/S267K Light Chain

SEQ ID NO: 15721 - protein, 107 aa, synthetic construct; identical to SEQ ID NO: 6247
  source 1..107: note = Description of Artificial Sequence: Synthetic polypeptide; note = VL of XENP018987

SEQ ID NO: 15722 - protein, 11 aa, synthetic construct
  source 1..11: note = Description of Artificial Sequence: Synthetic peptide; note = XENP018987 vlCDR1
RASQSVSNDVA

SEQ ID NO: 15723 - protein, 7 aa, synthetic construct
  source 1..7: note = Description of Artificial Sequence: Synthetic peptide; note = XENP018987 vlCDR2
YASHRYT

SEQ ID NO: 15724 - protein, 9 aa, synthetic construct
  source 1..9: note = Description of Artificial Sequence: Synthetic peptide; note = XENP018987 vlCDR3
QQDYSSPRT

SEQ ID NO: 15725 - protein, 451 aa, synthetic construct
  source 1..451: note = Description of Artificial Sequence: Synthetic polypeptide; note = XENP018988 1G6_H1.247_L1_IgG1_PVA_/S267K Heavy Chain
EVQLVESGGGLVKPGGSLRLSCAASGFTFSNYWMNWVRQAPGKGLEWVGEIRLKSNNYATHYAEPFKGRFTISRDDSKSTVYLQMNSLKTEDTAVYYCTRYYGNYGGYFDVWGAGTLVTVSSASTKGPSVFPLAPSSKSTSGGTAALGCLVKDYFPEPVTVSWNSGALTSGVHTFPAVLQSSGLYSLSSVVTVPSSSLGTQTYICNVNHKPSNTKVDKKVEPKSCDKTHTCPPCPAPPVAGPSVFLFPPKPKDTLMISRTPEVTCVVVDVKHEDPEVKFNWYVDGVEVHNAKTKPREEQYNSTYRVVSVLTVLHQDWLNGKEYKCKVSNKALPAPIEKTISKAKGQPREPQVYTLPPSREEMTKNQVSLTCLVKGFYPSDIAVEWESNGQPENNYKTTPPVLDSDGSFFLYSKLTVDKSRWQQGNVFSCSVMHEALHNHYTQKSLSLSPGK

SEQ ID NO: 15726 - protein, 122 aa, synthetic construct; identical to SEQ ID NO: 10077
  source 1..122: note = Description of Artificial Sequence: Synthetic polypeptide; note = VH of XENP018988

SEQ ID NO: 15727 - protein, 5 aa, synthetic construct
  source 1..5: note = Description of Artificial Sequence: Synthetic peptide; note = XENP018988 vhCDR1
NYWMN

SEQ ID NO: 15728 - protein, 19 aa, synthetic construct
  source 1..19: note = Description of Artificial Sequence: Synthetic peptide; note = XENP018988 vhCDR2
EIRLKSNNYATHYAEPFKG

SEQ ID NO: 15729 - protein, 11 aa, synthetic construct
  source 1..11: note = Description of Artificial Sequence: Synthetic peptide; note = XENP018988 vhCDR3
YYGNYGGYFDV

SEQ ID NO: 15730 - protein, 214 aa, synthetic construct; identical to SEQ ID NO: 11550
  source 1..214: note = Description of Artificial Sequence: Synthetic polypeptide; note = XENP018988 1G6_H1.247_L1_IgG1_PVA_/S267K Light Chain

SEQ ID NO: 15731 - protein, 107 aa, synthetic construct; identical to SEQ ID NO: 6247
  source 1..107: note = Description of Artificial Sequence: Synthetic polypeptide; note = VL of XENP018988

SEQ ID NO: 15732 - protein, 11 aa, synthetic construct
  source 1..11: note = Description of Artificial Sequence: Synthetic peptide; note = XENP018988 vlCDR1
RASQSVSNDVA

SEQ ID NO: 15733 - protein, 7 aa, synthetic construct
  source 1..7: note = Description of Artificial Sequence: Synthetic peptide; note = XENP018988 vlCDR2
YASHRYT

SEQ ID NO: 15734 - protein, 9 aa, synthetic construct
  source 1..9: note = Description of Artificial Sequence: Synthetic peptide; note = XENP018988 vlCDR3
QQDYSSPRT

SEQ ID NO: 15735 - protein, 451 aa, synthetic construct
  source 1..451: note = Description of Artificial Sequence: Synthetic polypeptide; note = XENP018989 1G6_H1.248_L1_IgG1_PVA_/S267K Heavy Chain
EVQLVESGGGLVKPGGSLRLSCAASGFTFSNYWMNWVRQAPGKGLEWVGEIRLKSNNYATHYAEPVKGRATISRDDSKSTVYLQMNSLKTEDTAVYYCTRYYGNYGGYFDVWGAGTLVTVSSASTKGPSVFPLAPSSKSTSGGTAALGCLVKDYFPEPVTVSWNSGALTSGVHTFPAVLQSSGLYSLSSVVTVPSSSLGTQTYICNVNHKPSNTKVDKKVEPKSCDKTHTCPPCPAPPVAGPSVFLFPPKPKDTLMISRTPEVTCVVVDVKHEDPEVKFNWYVDGVEVHNAKTKPREEQYNSTYRVVSVLTVLHQDWLNGKEYKCKVSNKALPAPIEKTISKAKGQPREPQVYTLPPSREEMTKNQVSLTCLVKGFYPSDIAVEWESNGQPENNYKTTPPVLDSDGSFFLYSKLTVDKSRWQQGNVFSCSVMHEALHNHYTQKSLSLSPGK

SEQ ID NO: 15736 - protein, 122 aa, synthetic construct; identical to SEQ ID NO: 10086
  source 1..122: note = Description of Artificial Sequence: Synthetic polypeptide; note = VH of XENP018989

SEQ ID NO: 15737 - protein, 5 aa, synthetic construct
  source 1..5: note = Description of Artificial Sequence: Synthetic peptide; note = XENP018989 vhCDR1
NYWMN

SEQ ID NO: 15738 - protein, 19 aa, synthetic construct
  source 1..19: note = Description of Artificial Sequence: Synthetic peptide; note = XENP018989 vhCDR2
EIRLKSNNYATHYAEPVKG

SEQ ID NO: 15739 - protein, 11 aa, synthetic construct
  source 1..11: note = Description of Artificial Sequence: Synthetic peptide; note = XENP018989 vhCDR3
YYGNYGGYFDV

SEQ ID NO: 15740 - protein, 214 aa, synthetic construct; identical to SEQ ID NO: 11550
  source 1..214: note = Description of Artificial Sequence: Synthetic polypeptide; note = XENP018989 1G6_H1.248_L1_IgG1_PVA_/S267K Light Chain

SEQ ID NO: 15741 - protein, 107 aa, synthetic construct; identical to SEQ ID NO: 6247
  source 1..107: note = Description of Artificial Sequence: Synthetic polypeptide; note = VL of XENP018989

SEQ ID NO: 15742 - protein, 11 aa, synthetic construct
  source 1..11: note = Description of Artificial Sequence: Synthetic peptide; note = XENP018989 vlCDR1
RASQSVSNDVA

SEQ ID NO: 15743 - protein, 7 aa, synthetic construct
  source 1..7: note = Description of Artificial Sequence: Synthetic peptide; note = XENP018989 vlCDR2
YASHRYT

SEQ ID NO: 15744 - protein, 9 aa, synthetic construct
  source 1..9: note = Description of Artificial Sequence: Synthetic peptide; note = XENP018989 vlCDR3
QQDYSSPRT

SEQ ID NO: 15745 - protein, 451 aa, synthetic construct
  source 1..451: note = Description of Artificial Sequence: Synthetic polypeptide; note = XENP018990 1G6_H1.249_L1_IgG1_PVA_/S267K Heavy Chain
EVQLVESGGGLVKPGGSLRLSCAASGFTFSNYWMNWVRQAPGKGLEWVGEIRLKSNNYATHYAEPVKGRVTISRDDSKSTVYLQMNSLKTEDTAVYYCTRYYGNYGGYFDVWGAGTLVTVSSASTKGPSVFPLAPSSKSTSGGTAALGCLVKDYFPEPVTVSWNSGALTSGVHTFPAVLQSSGLYSLSSVVTVPSSSLGTQTYICNVNHKPSNTKVDKKVEPKSCDKTHTCPPCPAPPVAGPSVFLFPPKPKDTLMISRTPEVTCVVVDVKHEDPEVKFNWYVDGVEVHNAKTKPREEQYNSTYRVVSVLTVLHQDWLNGKEYKCKVSNKALPAPIEKTISKAKGQPREPQVYTLPPSREEMTKNQVSLTCLVKGFYPSDIAVEWESNGQPENNYKTTPPVLDSDGSFFLYSKLTVDKSRWQQGNVFSCSVMHEALHNHYTQKSLSLSPGK

SEQ ID NO: 15746 - protein, 122 aa, synthetic construct; identical to SEQ ID NO: 10095
  source 1..122: note = Description of Artificial Sequence: Synthetic polypeptide; note = VH of XENP018990

SEQ ID NO: 15747 - protein, 5 aa, synthetic construct
  source 1..5: note = Description of Artificial Sequence: Synthetic peptide; note = XENP018990 vhCDR1
NYWMN

SEQ ID NO: 15748 - protein, 19 aa, synthetic construct
  source 1..19: note = Description of Artificial Sequence: Synthetic peptide; note = XENP018990 vhCDR2
EIRLKSNNYATHYAEPVKG

SEQ ID NO: 15749 - protein, 11 aa, synthetic construct
  source 1..11: note = Description of Artificial Sequence: Synthetic peptide; note = XENP018990 vhCDR3
YYGNYGGYFDV

SEQ ID NO: 15750 - protein, 214 aa, synthetic construct; identical to SEQ ID NO: 11550
  source 1..214: note = Description of Artificial Sequence: Synthetic polypeptide; note = XENP018990 1G6_H1.249_L1_IgG1_PVA_/S267K Light Chain

SEQ ID NO: 15751 - protein, 107 aa, synthetic construct; identical to SEQ ID NO: 6247
  source 1..107: note = Description of Artificial Sequence: Synthetic polypeptide; note = VL of XENP018990

SEQ ID NO: 15752 - protein, 11 aa, synthetic construct
  source 1..11: note = Description of Artificial Sequence: Synthetic peptide; note = XENP018990 vlCDR1
RASQSVSNDVA

SEQ ID NO: 15753 - protein, 7 aa, synthetic construct
  source 1..7: note = Description of Artificial Sequence: Synthetic peptide; note = XENP018990 vlCDR2
YASHRYT

SEQ ID NO: 15754 - protein, 9 aa, synthetic construct
  source 1..9: note = Description of Artificial Sequence: Synthetic peptide; note = XENP018990 vlCDR3
QQDYSSPRT

SEQ ID NO: 15755 - protein, 451 aa, synthetic construct
  source 1..451: note = Description of Artificial Sequence: Synthetic polypeptide; note = XENP018991 1G6_H1.250_L1_IgG1_PVA_/S267K Heavy Chain
EVQLVESGGGLVKPGGSLRLSCAASGFTFSNYWMNWVRQAPGKGLEWVGEIRLKSNNYATHYAEPVKGRFTISRDDSSSTVYLQMNSLKTEDTAVYYCTRYYGNYGGYFDVWGAGTLVTVSSASTKGPSVFPLAPSSKSTSGGTAALGCLVKDYFPEPVTVSWNSGALTSGVHTFPAVLQSSGLYSLSSVVTVPSSSLGTQTYICNVNHKPSNTKVDKKVEPKSCDKTHTCPPCPAPPVAGPSVFLFPPKPKDTLMISRTPEVTCVVVDVKHEDPEVKFNWYVDGVEVHNAKTKPREEQYNSTYRVVSVLTVLHQDWLNGKEYKCKVSNKALPAPIEKTISKAKGQPREPQVYTLPPSREEMTKNQVSLTCLVKGFYPSDIAVEWESNGQPENNYKTTPPVLDSDGSFFLYSKLTVDKSRWQQGNVFSCSVMHEALHNHYTQKSLSLSPGK

SEQ ID NO: 15756 - protein, 122 aa, synthetic construct; identical to SEQ ID NO: 10104
  source 1..122: note = Description of Artificial Sequence: Synthetic polypeptide; note = VH of XENP018991

SEQ ID NO: 15757 - protein, 5 aa, synthetic construct
  source 1..5: note = Description of Artificial Sequence: Synthetic peptide; note = XENP018991 vhCDR1
NYWMN

SEQ ID NO: 15758 - protein, 19 aa, synthetic construct
  source 1..19: note = Description of Artificial Sequence: Synthetic peptide; note = XENP018991 vhCDR2
EIRLKSNNYATHYAEPVKG

SEQ ID NO: 15759 - protein, 11 aa, synthetic construct
  source 1..11: note = Description of Artificial Sequence: Synthetic peptide; note = XENP018991 vhCDR3
YYGNYGGYFDV

SEQ ID NO: 15760 - protein, 214 aa, synthetic construct; identical to SEQ ID NO: 11550
  source 1..214: note = Description of Artificial Sequence: Synthetic polypeptide; note = XENP018991 1G6_H1.250_L1_IgG1_PVA_/S267K Light Chain

SEQ ID NO: 15761 - protein, 107 aa, synthetic construct; identical to SEQ ID NO: 6247
  source 1..107: note = Description of Artificial Sequence: Synthetic polypeptide; note = VL of XENP018991

SEQ ID NO: 15762 - protein, 11 aa, synthetic construct
  source 1..11: note = Description of Artificial Sequence: Synthetic peptide; note = XENP018991 vlCDR1
RASQSVSNDVA

SEQ ID NO: 15763 - protein, 7 aa, synthetic construct
  source 1..7: note = Description of Artificial Sequence: Synthetic peptide; note = XENP018991 vlCDR2
YASHRYT

SEQ ID NO: 15764 - protein, 9 aa, synthetic construct
  source 1..9: note = Description of Artificial Sequence: Synthetic peptide; note = XENP018991 vlCDR3
QQDYSSPRT

SEQ ID NO: 15765 - protein, 451 aa, synthetic construct
  source 1..451: note = Description of Artificial Sequence: Synthetic polypeptide; note = XENP018992 1G6_H1.251_L1_IgG1_PVA_/S267K Heavy Chain
EVQLVESGGGLVKPGGSLRLSCAASGFTFSNYWMNWVRQAPGKGLEWVGEIRLKSNNYATHYAEPVKGRFTISRDDSKSMVYLQMNSLKTEDTAVYYCTRYYGNYGGYFDVWGAGTLVTVSSASTKGPSVFPLAPSSKSTSGGTAALGCLVKDYFPEPVTVSWNSGALTSGVHTFPAVLQSSGLYSLSSVVTVPSSSLGTQTYICNVNHKPSNTKVDKKVEPKSCDKTHTCPPCPAPPVAGPSVFLFPPKPKDTLMISRTPEVTCVVVDVKHEDPEVKFNWYVDGVEVHNAKTKPREEQYNSTYRVVSVLTVLHQDWLNGKEYKCKVSNKALPAPIEKTISKAKGQPREPQVYTLPPSREEMTKNQVSLTCLVKGFYPSDIAVEWESNGQPENNYKTTPPVLDSDGSFFLYSKLTVDKSRWQQGNVFSCSVMHEALHNHYTQKSLSLSPGK

SEQ ID NO: 15766 - protein, 122 aa, synthetic construct; identical to SEQ ID NO: 10113
  source 1..122: note = Description of Artificial Sequence: Synthetic polypeptide; note = VH of XENP018992

SEQ ID NO: 15767 - protein, 5 aa, synthetic construct
  source 1..5: note = Description of Artificial Sequence: Synthetic peptide; note = XENP018992 vhCDR1
NYWMN

SEQ ID NO: 15768 - protein, 19 aa, synthetic construct
  source 1..19: note = Description of Artificial Sequence: Synthetic peptide; note = XENP018992 vhCDR2
EIRLKSNNYATHYAEPVKG

SEQ ID NO: 15769 - protein, 11 aa, synthetic construct
  source 1..11: note = Description of Artificial Sequence: Synthetic peptide; note = XENP018992 vhCDR3
YYGNYGGYFDV

SEQ ID NO: 15770 - protein, 214 aa, synthetic construct; identical to SEQ ID NO: 11550
  source 1..214: note = Description of Artificial Sequence: Synthetic polypeptide; note = XENP018992 1G6_H1.251_L1_IgG1_PVA_/S267K Light Chain

SEQ ID NO: 15771 - protein, 107 aa, synthetic construct; identical to SEQ ID NO: 6247
  source 1..107: note = Description of Artificial Sequence: Synthetic polypeptide; note = VL of XENP018992

SEQ ID NO: 15772 - protein, 11 aa, synthetic construct
  source 1..11: note = Description of Artificial Sequence: Synthetic peptide; note = XENP018992 vlCDR1
RASQSVSNDVA

SEQ ID NO: 15773 - protein, 7 aa, synthetic construct
  source 1..7: note = Description of Artificial Sequence: Synthetic peptide; note = XENP018992 vlCDR2
YASHRYT

SEQ ID NO: 15774 - protein, 9 aa, synthetic construct
  source 1..9: note = Description of Artificial Sequence: Synthetic peptide; note = XENP018992 vlCDR3
QQDYSSPRT

SEQ ID NO: 15775 - protein, 451 aa, synthetic construct
  source 1..451: note = Description of Artificial Sequence: Synthetic polypeptide; note = XENP018993 1G6_H1.252_L1_IgG1_PVA_/S267K Heavy Chain
EVQLVESGGGLVKPGGSLRLSCAASGFTFSNYWMNWVRQAPGKGLEWVGEIRLKSNNYATHYAEPVKGRFTISRDDSKSQVYLQMNSLKTEDTAVYYCTRYYGNYGGYFDVWGAGTLVTVSSASTKGPSVFPLAPSSKSTSGGTAALGCLVKDYFPEPVTVSWNSGALTSGVHTFPAVLQSSGLYSLSSVVTVPSSSLGTQTYICNVNHKPSNTKVDKKVEPKSCDKTHTCPPCPAPPVAGPSVFLFPPKPKDTLMISRTPEVTCVVVDVKHEDPEVKFNWYVDGVEVHNAKTKPREEQYNSTYRVVSVLTVLHQDWLNGKEYKCKVSNKALPAPIEKTISKAKGQPREPQVYTLPPSREEMTKNQVSLTCLVKGFYPSDIAVEWESNGQPENNYKTTPPVLDSDGSFFLYSKLTVDKSRWQQGNVFSCSVMHEALHNHYTQKSLSLSPGK

SEQ ID NO: 15776 - protein, 122 aa, synthetic construct; identical to SEQ ID NO: 10122
  source 1..122: note = Description of Artificial Sequence: Synthetic polypeptide; note = VH of XENP018993

SEQ ID NO: 15777 - protein, 5 aa, synthetic construct
  source 1..5: note = Description of Artificial Sequence: Synthetic peptide; note = XENP018993 vhCDR1
NYWMN

SEQ ID NO: 15778 - protein, 19 aa, synthetic construct
  source 1..19: note = Description of Artificial Sequence: Synthetic peptide; note = XENP018993 vhCDR2
EIRLKSNNYATHYAEPVKG

SEQ ID NO: 15779 - protein, 11 aa, synthetic construct
  source 1..11: note = Description of Artificial Sequence: Synthetic peptide; note = XENP018993 vhCDR3
YYGNYGGYFDV

SEQ ID NO: 15780 - protein, 214 aa, synthetic construct; identical to SEQ ID NO: 11550
  source 1..214: note = Description of Artificial Sequence: Synthetic polypeptide; note = XENP018993 1G6_H1.252_L1_IgG1_PVA_/S267K Light Chain

SEQ ID NO: 15781 - protein, 107 aa, synthetic construct; identical to SEQ ID NO: 6247
  source 1..107: note = Description of Artificial Sequence: Synthetic polypeptide; note = VL of XENP018993

SEQ ID NO: 15782 - protein, 11 aa, synthetic construct
  source 1..11: note = Description of Artificial Sequence: Synthetic peptide; note = XENP018993 vlCDR1
RASQSVSNDVA

SEQ ID NO: 15783 - protein, 7 aa, synthetic construct
  source 1..7: note = Description of Artificial Sequence: Synthetic peptide; note = XENP018993 vlCDR2
YASHRYT

SEQ ID NO: 15784 - protein, 9 aa, synthetic construct
  source 1..9: note = Description of Artificial Sequence: Synthetic peptide; note = XENP018993 vlCDR3
QQDYSSPRT

SEQ ID NO: 15785 - protein, 451 aa, synthetic construct
  source 1..451: note = Description of Artificial Sequence: Synthetic polypeptide; note = XENP018994 1G6_H1.253_L1_IgG1_PVA_/S267K Heavy Chain
EVQLVESGGGLVKPGGSLRLSCAASGFTFSNYWMNWVRQAPGKGLEWVGEIRLKSNNYATHYAEPVKGRFTISRDDSKSTVVLQMNSLKTEDTAVYYCTRYYGNYGGYFDVWGAGTLVTVSSASTKGPSVFPLAPSSKSTSGGTAALGCLVKDYFPEPVTVSWNSGALTSGVHTFPAVLQSSGLYSLSSVVTVPSSSLGTQTYICNVNHKPSNTKVDKKVEPKSCDKTHTCPPCPAPPVAGPSVFLFPPKPKDTLMISRTPEVTCVVVDVKHEDPEVKFNWYVDGVEVHNAKTKPREEQYNSTYRVVSVLTVLHQDWLNGKEYKCKVSNKALPAPIEKTISKAKGQPREPQVYTLPPSREEMTKNQVSLTCLVKGFYPSDIAVEWESNGQPENNYKTTPPVLDSDGSFFLYSKLTVDKSRWQQGNVFSCSVMHEALHNHYTQKSLSLSPGK

SEQ ID NO: 15786 - protein, 122 aa, synthetic construct; identical to SEQ ID NO: 10131
  source 1..122: note = Description of Artificial Sequence: Synthetic polypeptide; note = VH of XENP018994

SEQ ID NO: 15787 - protein, 5 aa, synthetic construct
  source 1..5: note = Description of Artificial Sequence: Synthetic peptide; note = XENP018994 vhCDR1
NYWMN

SEQ ID NO: 15788 - protein, 19 aa, synthetic construct
  source 1..19: note = Description of Artificial Sequence: Synthetic peptide; note = XENP018994 vhCDR2
EIRLKSNNYATHYAEPVKG

SEQ ID NO: 15789 - protein, 11 aa, synthetic construct
  source 1..11: note = Description of Artificial Sequence: Synthetic peptide; note = XENP018994 vhCDR3
YYGNYGGYFDV

SEQ ID NO: 15790 - protein, 214 aa, synthetic construct; identical to SEQ ID NO: 11550
  source 1..214: note = Description of Artificial Sequence: Synthetic polypeptide; note = XENP018994 1G6_H1.253_L1_IgG1_PVA_/S267K Light Chain

SEQ ID NO: 15791 - protein, 107 aa, synthetic construct; identical to SEQ ID NO: 6247
  source 1..107: note = Description of Artificial Sequence: Synthetic polypeptide; note = VL of XENP018994

SEQ ID NO: 15792 - protein, 11 aa, synthetic construct
  source 1..11: note = Description of Artificial Sequence: Synthetic peptide; note = XENP018994 vlCDR1
RASQSVSNDVA

SEQ ID NO: 15793 - protein, 7 aa, synthetic construct
  source 1..7: note = Description of Artificial Sequence: Synthetic peptide; note = XENP018994 vlCDR2
YASHRYT

SEQ ID NO: 15794 - protein, 9 aa, synthetic construct
  source 1..9: note = Description of Artificial Sequence: Synthetic peptide; note = XENP018994 vlCDR3
QQDYSSPRT

SEQ ID NO: 15795 - protein, 451 aa, synthetic construct
  source 1..451: note = Description of Artificial Sequence: Synthetic polypeptide; note = XENP018995 1G6_H1.254_L1_IgG1_PVA_/S267K Heavy Chain
EVQLVESGGGLVKPGGSLRLSCAASGFTFSNYWMNWVRQAPGKGLEWVGEIRLKSNNYATHYAEPVKGRFTISRDDSKSTVYLEMNSLKTEDTAVYYCTRYYGNYGGYFDVWGAGTLVTVSSASTKGPSVFPLAPSSKSTSGGTAALGCLVKDYFPEPVTVSWNSGALTSGVHTFPAVLQSSGLYSLSSVVTVPSSSLGTQTYICNVNHKPSNTKVDKKVEPKSCDKTHTCPPCPAPPVAGPSVFLFPPKPKDTLMISRTPEVTCVVVDVKHEDPEVKFNWYVDGVEVHNAKTKPREEQYNSTYRVVSVLTVLHQDWLNGKEYKCKVSNKALPAPIEKTISKAKGQPREPQVYTLPPSREEMTKNQVSLTCLVKGFYPSDIAVEWESNGQPENNYKTTPPVLDSDGSFFLYSKLTVDKSRWQQGNVFSCSVMHEALHNHYTQKSLSLSPGK

SEQ ID NO: 15796 - protein, 122 aa, synthetic construct; identical to SEQ ID NO: 10140
  source 1..122: note = Description of Artificial Sequence: Synthetic polypeptide; note = VH of XENP018995

SEQ ID NO: 15797 - protein, 5 aa, synthetic construct
  source 1..5: note = Description of Artificial Sequence: Synthetic peptide; note = XENP018995 vhCDR1
NYWMN

SEQ ID NO: 15798 - protein, 19 aa, synthetic construct
  source 1..19: note = Description of Artificial Sequence: Synthetic peptide; note = XENP018995 vhCDR2
EIRLKSNNYATHYAEPVKG

SEQ ID NO: 15799 - protein, 11 aa, synthetic construct
  source 1..11: note = Description of Artificial Sequence: Synthetic peptide; note = XENP018995 vhCDR3
YYGNYGGYFDV

SEQ ID NO: 15800 - protein, 214 aa, synthetic construct; identical to SEQ ID NO: 11550
  source 1..214: note = Description of Artificial Sequence: Synthetic polypeptide; note = XENP018995 1G6_H1.254_L1_IgG1_PVA_/S267K Light Chain

SEQ ID NO: 15801 - protein, 107 aa, synthetic construct; identical to SEQ ID NO: 6247
  source 1..107: note = Description of Artificial Sequence: Synthetic polypeptide; note = VL of XENP018995

SEQ ID NO: 15802 - protein, 11 aa, synthetic construct
  source 1..11: note = Description of Artificial Sequence: Synthetic peptide; note = XENP018995 vlCDR1
RASQSVSNDVA

SEQ ID NO: 15803 - protein, 7 aa, synthetic construct
  source 1..7: note = Description of Artificial Sequence: Synthetic peptide; note = XENP018995 vlCDR2
YASHRYT

SEQ ID NO: 15804 - protein, 9 aa, synthetic construct
  source 1..9: note = Description of Artificial Sequence: Synthetic peptide; note = XENP018995 vlCDR3
QQDYSSPRT

SEQ ID NO: 15805 - protein, 451 aa, synthetic construct
  source 1..451: note = Description of Artificial Sequence: Synthetic polypeptide; note = XENP018996 1G6_H1.255_L1_IgG1_PVA_/S267K Heavy Chain
EVQLVESGGGLVKPGGSLRLSCAASGFTFSNYWMNWVRQAPGKGLEWVGEIRLKSNNYATHYAEPVKGRFTISRDDSKSTVYLQMNSEKTEDTAVYYCTRYYGNYGGYFDVWGAGTLVTVSSASTKGPSVFPLAPSSKSTSGGTAALGCLVKDYFPEPVTVSWNSGALTSGVHTFPAVLQSSGLYSLSSVVTVPSSSLGTQTYICNVNHKPSNTKVDKKVEPKSCDKTHTCPPCPAPPVAGPSVFLFPPKPKDTLMISRTPEVTCVVVDVKHEDPEVKFNWYVDGVEVHNAKTKPREEQYNSTYRVVSVLTVLHQDWLNGKEYKCKVSNKALPAPIEKTISKAKGQPREPQVYTLPPSREEMTKNQVSLTCLVKGFYPSDIAVEWESNGQPENNYKTTPPVLDSDGSFFLYSKLTVDKSRWQQGNVFSCSVMHEALHNHYTQKSLSLSPGK

SEQ ID NO: 15806 - protein, 122 aa, synthetic construct; identical to SEQ ID NO: 10149
  source 1..122: note = Description of Artificial Sequence: Synthetic polypeptide; note = VH of XENP018996

SEQ ID NO: 15807 - protein, 5 aa, synthetic construct
  source 1..5: note = Description of Artificial Sequence: Synthetic peptide; note = XENP018996 vhCDR1
NYWMN

SEQ ID NO: 15808 - protein, 19 aa, synthetic construct
  source 1..19: note = Description of Artificial Sequence: Synthetic peptide; note = XENP018996 vhCDR2
EIRLKSNNYATHYAEPVKG

SEQ ID NO: 15809 - protein, 11 aa, synthetic construct
  source 1..11: note = Description of Artificial Sequence: Synthetic peptide; note = XENP018996 vhCDR3
YYGNYGGYFDV

SEQ ID NO: 15810 - protein, 214 aa, synthetic construct; identical to SEQ ID NO: 11550
  source 1..214: note = Description of Artificial Sequence: Synthetic polypeptide; note = XENP018996 1G6_H1.255_L1_IgG1_PVA_/S267K Light Chain

SEQ ID NO: 15811 - protein, 107 aa, synthetic construct; identical to SEQ ID NO: 6247
  source 1..107: note = Description of Artificial Sequence: Synthetic polypeptide; note = VL of XENP018996

SEQ ID NO: 15812 - protein, 11 aa, synthetic construct
  source 1..11: note = Description of Artificial Sequence: Synthetic peptide; note = XENP018996 vlCDR1
RASQSVSNDVA

SEQ ID NO: 15813 - protein, 7 aa, synthetic construct
  source 1..7: note = Description of Artificial Sequence: Synthetic peptide; note = XENP018996 vlCDR2
YASHRYT

SEQ ID NO: 15814 - protein, 9 aa, synthetic construct
  source 1..9: note = Description of Artificial Sequence: Synthetic peptide; note = XENP018996 vlCDR3
QQDYSSPRT

SEQ ID NO: 15815 - protein, 451 aa, synthetic construct
  source 1..451: note = Description of Artificial Sequence: Synthetic polypeptide; note = XENP019001 1G6_H1.256_L1_IgG1_PVA_/S267K Heavy Chain
EVQLVESGGGLVKPGGSLRLSCAASGFTFSNYWMNWVRQAPGKGLEWVGEIRLKSNNYATHYAEPVKGRFTISRDDSKSTVYLQMNSVKTEDTAVYYCTRYYGNYGGYFDVWGAGTLVTVSSASTKGPSVFPLAPSSKSTSGGTAALGCLVKDYFPEPVTVSWNSGALTSGVHTFPAVLQSSGLYSLSSVVTVPSSSLGTQTYICNVNHKPSNTKVDKKVEPKSCDKTHTCPPCPAPPVAGPSVFLFPPKPKDTLMISRTPEVTCVVVDVKHEDPEVKFNWYVDGVEVHNAKTKPREEQYNSTYRVVSVLTVLHQDWLNGKEYKCKVSNKALPAPIEKTISKAKGQPREPQVYTLPPSREEMTKNQVSLTCLVKGFYPSDIAVEWESNGQPENNYKTTPPVLDSDGSFFLYSKLTVDKSRWQQGNVFSCSVMHEALHNHYTQKSLSLSPGK

SEQ ID NO: 15816 - protein, 122 aa, synthetic construct; identical to SEQ ID NO: 10158
  source 1..122: note = Description of Artificial Sequence: Synthetic polypeptide; note = VH of XENP019001

SEQ ID NO: 15817 - protein, 5 aa, synthetic construct
  source 1..5: note = Description of Artificial Sequence: Synthetic peptide; note = XENP019001 vhCDR1
NYWMN

SEQ ID NO: 15818 - protein, 19 aa, synthetic construct
  source 1..19: note = Description of Artificial Sequence: Synthetic peptide; note = XENP019001 vhCDR2
EIRLKSNNYATHYAEPVKG

SEQ ID NO: 15819 - protein, 11 aa, synthetic construct
  source 1..11: note = Description of Artificial Sequence: Synthetic peptide; note = XENP019001 vhCDR3
YYGNYGGYFDV

SEQ ID NO: 15820 - protein, 214 aa, synthetic construct; identical to SEQ ID NO: 11550
  source 1..214: note = Description of Artificial Sequence: Synthetic polypeptide; note = XENP019001 1G6_H1.256_L1_IgG1_PVA_/S267K Light Chain

SEQ ID NO: 15821 - protein, 107 aa, synthetic construct; identical to SEQ ID NO: 6247
  source 1..107: note = Description of Artificial Sequence: Synthetic polypeptide; note = VL of XENP019001

SEQ ID NO: 15822 - protein, 11 aa, synthetic construct
  source 1..11: note = Description of Artificial Sequence: Synthetic peptide; note = XENP019001 vlCDR1
RASQSVSNDVA

SEQ ID NO: 15823 - protein, 7 aa, synthetic construct
  source 1..7: note = Description of Artificial Sequence: Synthetic peptide; note = XENP019001 vlCDR2
YASHRYT

SEQ ID NO: 15824 - protein, 9 aa, synthetic construct
  source 1..9: note = Description of Artificial Sequence: Synthetic peptide; note = XENP019001 vlCDR3
QQDYSSPRT

SEQ ID NO: 15825 - protein, 451 aa, synthetic construct
  source 1..451: note = Description of Artificial Sequence: Synthetic polypeptide; note = XENP019002 1G6_H1.257_L1_IgG1_PVA_/S267K Heavy Chain
EVQLVESGGGLVKPGGSLRLSCAASGFTFSNYWMNWVRQAPGKGLEWVGEIRLKSNNYATHYAEPVKGRFTISRDDSKSTVYLQMNSLKTEDTAVYYCTRYYGNYGGYFDVWGRGTLVTVSSASTKGPSVFPLAPSSKSTSGGTAALGCLVKDYFPEPVTVSWNSGALTSGVHTFPAVLQSSGLYSLSSVVTVPSSSLGTQTYICNVNHKPSNTKVDKKVEPKSCDKTHTCPPCPAPPVAGPSVFLFPPKPKDTLMISRTPEVTCVVVDVKHEDPEVKFNWYVDGVEVHNAKTKPREEQYNSTYRVVSVLTVLHQDWLNGKEYKCKVSNKALPAPIEKTISKAKGQPREPQVYTLPPSREEMTKNQVSLTCLVKGFYPSDIAVEWESNGQPENNYKTTPPVLDSDGSFFLYSKLTVDKSRWQQGNVFSCSVMHEALHNHYTQKSLSLSPGK

SEQ ID NO: 15826 - protein, 122 aa, synthetic construct; identical to SEQ ID NO: 10167
  source 1..122: note = Description of Artificial Sequence: Synthetic polypeptide; note = VH of XENP019002

SEQ ID NO: 15827 - protein, 5 aa, synthetic construct
  source 1..5: note = Description of Artificial Sequence: Synthetic peptide; note = XENP019002 vhCDR1
NYWMN

SEQ ID NO: 15828 - protein, 19 aa, synthetic construct
  source 1..19: note = Description of Artificial Sequence: Synthetic peptide; note = XENP019002 vhCDR2
EIRLKSNNYATHYAEPVKG

SEQ ID NO: 15829 - protein, 11 aa, synthetic construct
  source 1..11: note = Description of Artificial Sequence: Synthetic peptide; note = XENP019002 vhCDR3
YYGNYGGYFDV

SEQ ID NO: 15830 - protein, 214 aa, synthetic construct; identical to SEQ ID NO: 11550
  source 1..214: note = Description of Artificial Sequence: Synthetic polypeptide; note = XENP019002 1G6_H1.257_L1_IgG1_PVA_/S267K Light Chain

SEQ ID NO: 15831 - protein, 107 aa, synthetic construct; identical to SEQ ID NO: 6247
  source 1..107: note = Description of Artificial Sequence: Synthetic polypeptide; note = VL of XENP019002

SEQ ID NO: 15832 - protein, 11 aa, synthetic construct
  source 1..11: note = Description of Artificial Sequence: Synthetic peptide; note = XENP019002 vlCDR1
RASQSVSNDVA

SEQ ID NO: 15833 - protein, 7 aa, synthetic construct
  source 1..7: note = Description of Artificial Sequence: Synthetic peptide; note = XENP019002 vlCDR2
YASHRYT

SEQ ID NO: 15834 - protein, 9 aa, synthetic construct
  source 1..9: note = Description of Artificial Sequence: Synthetic peptide; note = XENP019002 vlCDR3
QQDYSSPRT

SEQ ID NO: 15835 - protein, 451 aa, synthetic construct
  source 1..451: note = Description of Artificial Sequence: Synthetic polypeptide; note = XENP019003 1G6_H1.258_L1_IgG1_PVA_/S267K Heavy Chain
EVQLVESGGGLKKPGESLRLSCAASGFTFSNYWMNWVRQAPGKGLEWVGEIRLKSNNYATHYAEPVKGRFTISRDDSKSTVYLQMNSLKTEDTAVYYCTRYYGNYGGYFDVWGAGTLVTVSSASTKGPSVFPLAPSSKSTSGGTAALGCLVKDYFPEPVTVSWNSGALTSGVHTFPAVLQSSGLYSLSSVVTVPSSSLGTQTYICNVNHKPSNTKVDKKVEPKSCDKTHTCPPCPAPPVAGPSVFLFPPKPKDTLMISRTPEVTCVVVDVKHEDPEVKFNWYVDGVEVHNAKTKPREEQYNSTYRVVSVLTVLHQDWLNGKEYKCKVSNKALPAPIEKTISKAKGQPREPQVYTLPPSREEMTKNQVSLTCLVKGFYPSDIAVEWESNGQPENNYKTTPPVLDSDGSFFLYSKLTVDKSRWQQGNVFSCSVMHEALHNHYTQKSLSLSPGK

SEQ ID NO: 15836 - protein, 122 aa, synthetic construct; identical to SEQ ID NO: 10176
  source 1..122: note = Description of Artificial Sequence: Synthetic polypeptide; note = VH of XENP019003

SEQ ID NO: 15837 - protein, 5 aa, synthetic construct
  source 1..5: note = Description of Artificial Sequence: Synthetic peptide; note = XENP019003 vhCDR1
NYWMN

SEQ ID NO: 15838 - protein, 19 aa, synthetic construct
  source 1..19: note = Description of Artificial Sequence: Synthetic peptide; note = XENP019003 vhCDR2
EIRLKSNNYATHYAEPVKG

SEQ ID NO: 15839 - protein, 11 aa, synthetic construct
  source 1..11: note = Description of Artificial Sequence: Synthetic peptide; note = XENP019003 vhCDR3
YYGNYGGYFDV

SEQ ID NO: 15840 - protein, 214 aa, synthetic construct; identical to SEQ ID NO: 11550
  source 1..214: note = Description of Artificial Sequence: Synthetic polypeptide; note = XENP019003 1G6_H1.258_L1_IgG1_PVA_/S267K Light Chain

SEQ ID NO: 15841 - protein, 107 aa, synthetic construct; identical to SEQ ID NO: 6247
  source 1..107: note = Description of Artificial Sequence: Synthetic polypeptide; note = VL of XENP019003

SEQ ID NO: 15842 - protein, 11 aa, synthetic construct
  source 1..11: note = Description of Artificial Sequence: Synthetic peptide; note = XENP019003 vlCDR1
RASQSVSNDVA

SEQ ID NO: 15843 - protein, 7 aa, synthetic construct
  source 1..7: note = Description of Artificial Sequence: Synthetic peptide; note = XENP019003 vlCDR2
YASHRYT

SEQ ID NO: 15844 - protein, 9 aa, synthetic construct
  source 1..9: note = Description of Artificial Sequence: Synthetic peptide; note = XENP019003 vlCDR3
QQDYSSPRT

SEQ ID NO: 15845 - protein, 451 aa, synthetic construct
  source 1..451: note = Description of Artificial Sequence: Synthetic polypeptide; note = XENP019004 1G6_H1.259_L1_IgG1_PVA_/S267K Heavy Chain
EVQLVESGGGLVKPGGSLRLSCAASGFTFSNYWMDWVRQAPGKGLEWVGEIRLKSNNYATHYAEPVKGRFTISRDDSKSTVYLQMNSLKTEDTAVYYCKRYYGNYGGYFDVWGAGTLVTVSSASTKGPSVFPLAPSSKSTSGGTAALGCLVKDYFPEPVTVSWNSGALTSGVHTFPAVLQSSGLYSLSSVVTVPSSSLGTQTYICNVNHKPSNTKVDKKVEPKSCDKTHTCPPCPAPPVAGPSVFLFPPKPKDTLMISRTPEVTCVVVDVKHEDPEVKFNWYVDGVEVHNAKTKPREEQYNSTYRVVSVLTVLHQDWLNGKEYKCKVSNKALPAPIEKTISKAKGQPREPQVYTLPPSREEMTKNQVSLTCLVKGFYPSDIAVEWESNGQPENNYKTTPPVLDSDGSFFLYSKLTVDKSRWQQGNVFSCSVMHEALHNHYTQKSLSLSPGK

SEQ ID NO: 15846 - protein, 122 aa, synthetic construct; identical to SEQ ID NO: 10185
  source 1..122: note = Description of Artificial Sequence: Synthetic polypeptide; note = VH of XENP019004

SEQ ID NO: 15847 - protein, 5 aa, synthetic construct
  source 1..5: note = Description of Artificial Sequence: Synthetic peptide; note = XENP019004 vhCDR1
NYWMD

SEQ ID NO: 15848 - protein, 19 aa, synthetic construct
  source 1..19: note = Description of Artificial Sequence: Synthetic peptide; note = XENP019004 vhCDR2
EIRLKSNNYATHYAEPVKG

SEQ ID NO: 15849 - protein, 11 aa, synthetic construct
  source 1..11: note = Description of Artificial Sequence: Synthetic peptide; note = XENP019004 vhCDR3
YYGNYGGYFDV

SEQ ID NO: 15850 - protein, 214 aa, synthetic construct; identical to SEQ ID NO: 11550
  source 1..214: note = Description of Artificial Sequence: Synthetic polypeptide; note = XENP019004 1G6_H1.259_L1_IgG1_PVA_/S267K Light Chain

SEQ ID NO: 15851 - protein, 107 aa, synthetic construct; identical to SEQ ID NO: 6247
  source 1..107: note = Description of Artificial Sequence: Synthetic polypeptide; note = VL of XENP019004

SEQ ID NO: 15852 - protein, 11 aa, synthetic construct
  source 1..11: note = Description of Artificial Sequence: Synthetic peptide; note = XENP019004 vlCDR1
RASQSVSNDVA

SEQ ID NO: 15853 - protein, 7 aa, synthetic construct
  source 1..7: note = Description of Artificial Sequence: Synthetic peptide; note = XENP019004 vlCDR2
YASHRYT

SEQ ID NO: 15854 - protein, 9 aa, synthetic construct
  source 1..9: note = Description of Artificial Sequence: Synthetic peptide; note = XENP019004 vlCDR3
QQDYSSPRT

SEQ ID NO: 15855 - protein, 451 aa, synthetic construct
  source 1..451: note = Description of Artificial Sequence: Synthetic polypeptide; note = XENP019005 1G6_H1.260_L1_IgG1_PVA_/S267K Heavy Chain
EVQLVESGGGLVKPGESLRLSCAASGFTFSNYWMNWVRQAPGKGLEWVGEIRLKSNNYATHYAEPVKGRFTISRDDSKSTVYLQMNSRKTEDTAVYYCTRYYGNYGGYFDVWGAGTLVTVSSASTKGPSVFPLAPSSKSTSGGTAALGCLVKDYFPEPVTVSWNSGALTSGVHTFPAVLQSSGLYSLSSVVTVPSSSLGTQTYICNVNHKPSNTKVDKKVEPKSCDKTHTCPPCPAPPVAGPSVFLFPPKPKDTLMISRTPEVTCVVVDVKHEDPEVKFNWYVDGVEVHNAKTKPREEQYNSTYRVVSVLTVLHQDWLNGKEYKCKVSNKALPAPIEKTISKAKGQPREPQVYTLPPSREEMTKNQVSLTCLVKGFYPSDIAVEWESNGQPENNYKTTPPVLDSDGSFFLYSKLTVDKSRWQQGNVFSCSVMHEALHNHYTQKSLSLSPGK

SEQ ID NO: 15856 - protein, 122 aa, synthetic construct; identical to SEQ ID NO: 10194
  source 1..122: note = Description of Artificial Sequence: Synthetic polypeptide; note = VH of XENP019005

SEQ ID NO: 15857 - protein, 5 aa, synthetic construct
  source 1..5: note = Description of Artificial Sequence: Synthetic peptide; note = XENP019005 vhCDR1
NYWMN

SEQ ID NO: 15858 - protein, 19 aa, synthetic construct
  source 1..19: note = Description of Artificial Sequence: Synthetic peptide; note = XENP019005 vhCDR2
EIRLKSNNYATHYAEPVKG

SEQ ID NO: 15859 - protein, 11 aa, synthetic construct
  source 1..11: note = Description of Artificial Sequence: Synthetic peptide; note = XENP019005 vhCDR3
YYGNYGGYFDV

SEQ ID NO: 15860 - protein, 214 aa, synthetic construct; identical to SEQ ID NO: 11550
  source 1..214: note = Description of Artificial Sequence: Synthetic polypeptide; note = XENP019005 1G6_H1.260_L1_IgG1_PVA_/S267K Light Chain

SEQ ID NO: 15861 - protein, 107 aa, synthetic construct; identical to SEQ ID NO: 6247
  source 1..107: note = Description of Artificial Sequence: Synthetic polypeptide; note = VL of XENP019005

SEQ ID NO: 15862 - protein, 11 aa, synthetic construct
  source 1..11: note = Description of Artificial Sequence: Synthetic peptide; note = XENP019005 vlCDR1
RASQSVSNDVA

SEQ ID NO: 15863 - protein, 7 aa, synthetic construct
  source 1..7: note = Description of Artificial Sequence: Synthetic peptide; note = XENP019005 vlCDR2
YASHRYT

SEQ ID NO: 15864 - protein, 9 aa, synthetic construct
  source 1..9: note = Description of Artificial Sequence: Synthetic peptide; note = XENP019005 vlCDR3
QQDYSSPRT

SEQ ID NO: 15865 - protein, 451 aa, synthetic construct
  source 1..451: note = Description of Artificial Sequence: Synthetic polypeptide; note = XENP019006 1G6_H1.261_L1_IgG1_PVA_/S267K Heavy Chain
EVQLVESGGGLVKPGGSLRLSCKASGFTFSNYWMNWVRQAPGKGLEWVGEIRLKSNNYATHYAEPVKGRFTISRDDSKDTVYLQMNSLKTEDTAVYYCTRYYGNYGGYFDVWGAGTLVTVSSASTKGPSVFPLAPSSKSTSGGTAALGCLVKDYFPEPVTVSWNSGALTSGVHTFPAVLQSSGLYSLSSVVTVPSSSLGTQTYICNVNHKPSNTKVDKKVEPKSCDKTHTCPPCPAPPVAGPSVFLFPPKPKDTLMISRTPEVTCVVVDVKHEDPEVKFNWYVDGVEVHNAKTKPREEQYNSTYRVVSVLTVLHQDWLNGKEYKCKVSNKALPAPIEKTISKAKGQPREPQVYTLPPSREEMTKNQVSLTCLVKGFYPSDIAVEWESNGQPENNYKTTPPVLDSDGSFFLYSKLTVDKSRWQQGNVFSCSVMHEALHNHYTQKSLSLSPGK

SEQ ID NO: 15866 - protein, 122 aa, synthetic construct; identical to SEQ ID NO: 10203
  source 1..122: note = Description of Artificial Sequence: Synthetic polypeptide; note = VH of XENP019006

SEQ ID NO: 15867 - protein, 5 aa, synthetic construct
  source 1..5: note = Description of Artificial Sequence: Synthetic peptide; note = XENP019006 vhCDR1
NYWMN

SEQ ID NO: 15868 - protein, 19 aa, synthetic construct
  source 1..19: note = Description of Artificial Sequence: Synthetic peptide; note = XENP019006 vhCDR2
EIRLKSNNYATHYAEPVKG

SEQ ID NO: 15869 - protein, 11 aa, synthetic construct
  source 1..11: note = Description of Artificial Sequence: Synthetic peptide; note = XENP019006 vhCDR3
YYGNYGGYFDV

SEQ ID NO: 15870 - protein, 214 aa, synthetic construct; identical to SEQ ID NO: 11550
  source 1..214: note = Description of Artificial Sequence: Synthetic polypeptide; note = XENP019006 1G6_H1.261_L1_IgG1_PVA_/S267K Light Chain

SEQ ID NO: 15871 - protein, 107 aa, synthetic construct; identical to SEQ ID NO: 6247
  source 1..107: note = Description of Artificial Sequence: Synthetic polypeptide; note = VL of XENP019006

SEQ ID NO: 15872 - protein, 11 aa, synthetic construct
  source 1..11: note = Description of Artificial Sequence: Synthetic peptide; note = XENP019006 vlCDR1
RASQSVSNDVA

SEQ ID NO: 15873 - protein, 7 aa, synthetic construct
  source 1..7: note = Description of Artificial Sequence: Synthetic peptide; note = XENP019006 vlCDR2
YASHRYT

SEQ ID NO: 15874 - protein, 9 aa, synthetic construct
  source 1..9: note = Description of Artificial Sequence: Synthetic peptide; note = XENP019006 vlCDR3
QQDYSSPRT

SEQ ID NO: 15875 - protein, 451 aa, synthetic construct
  source 1..451: note = Description of Artificial Sequence: Synthetic polypeptide; note = XENP019007 1G6_H1.262_L1_IgG1_PVA_/S267K Heavy Chain
EVQLVESGGGLVKPGESLRLSCAASGFTFSNYWMNWVRQAPGKGLEWVGEIRLKSNNYATHYAEPVKGRFTISRDDSKSTVYLQMNRLKTEDTAVYYCTRYYGNYGGYFDVWGAGTLVTVSSASTKGPSVFPLAPSSKSTSGGTAALGCLVKDYFPEPVTVSWNSGALTSGVHTFPAVLQSSGLYSLSSVVTVPSSSLGTQTYICNVNHKPSNTKVDKKVEPKSCDKTHTCPPCPAPPVAGPSVFLFPPKPKDTLMISRTPEVTCVVVDVKHEDPEVKFNWYVDGVEVHNAKTKPREEQYNSTYRVVSVLTVLHQDWLNGKEYKCKVSNKALPAPIEKTISKAKGQPREPQVYTLPPSREEMTKNQVSLTCLVKGFYPSDIAVEWESNGQPENNYKTTPPVLDSDGSFFLYSKLTVDKSRWQQGNVFSCSVMHEALHNHYTQKSLSLSPGK

SEQ ID NO: 15876 - protein, 122 aa, synthetic construct; identical to SEQ ID NO: 10212
  source 1..122: note = Description of Artificial Sequence: Synthetic polypeptide; note = VH of XENP019007

SEQ ID NO: 15877 - protein, 5 aa, synthetic construct
  source 1..5: note = Description of Artificial Sequence: Synthetic peptide; note = XENP019007 vhCDR1
NYWMN

SEQ ID NO: 15878 - protein, 19 aa, synthetic construct
  source 1..19: note = Description of Artificial Sequence: Synthetic peptide; note = XENP019007 vhCDR2
EIRLKSNNYATHYAEPVKG

SEQ ID NO: 15879 - protein, 11 aa, synthetic construct
  source 1..11: note = Description of Artificial Sequence: Synthetic peptide; note = XENP019007 vhCDR3
YYGNYGGYFDV

SEQ ID NO: 15880 - protein, 214 aa, synthetic construct; identical to SEQ ID NO: 11550
  source 1..214: note = Description of Artificial Sequence: Synthetic polypeptide; note = XENP019007 1G6_H1.262_L1_IgG1_PVA_/S267K Light Chain

SEQ ID NO: 15881 - protein, 107 aa, synthetic construct; identical to SEQ ID NO: 6247
  source 1..107: note = Description of Artificial Sequence: Synthetic polypeptide; note = VL of XENP019007

SEQ ID NO: 15882 - protein, 11 aa, synthetic construct
  source 1..11: note = Description of Artificial Sequence: Synthetic peptide; note = XENP019007 vlCDR1
RASQSVSNDVA

SEQ ID NO: 15883 - protein, 7 aa, synthetic construct
  source 1..7: note = Description of Artificial Sequence: Synthetic peptide; note = XENP019007 vlCDR2
YASHRYT

SEQ ID NO: 15884 - protein, 9 aa, synthetic construct
  source 1..9: note = Description of Artificial Sequence: Synthetic peptide; note = XENP019007 vlCDR3
QQDYSSPRT

SEQ ID NO: 15885 - protein, 451 aa, synthetic construct
  source 1..451: note = Description of Artificial Sequence: Synthetic polypeptide; note = XENP019008 1G6_H1.263_L1_IgG1_PVA_/S267K Heavy Chain
EVQLVESGGGLVKPGGSLRLSCAASGFTFSNYWMNWVRQAPGKGLEWVGEIRLKSNNYATHYAEKVKGLFTISRDDSKSTVYLQMNSLKTEDTAVYYCTRYYGNYGGYFDVWGAGTLVTVSSASTKGPSVFPLAPSSKSTSGGTAALGCLVKDYFPEPVTVSWNSGALTSGVHTFPAVLQSSGLYSLSSVVTVPSSSLGTQTYICNVNHKPSNTKVDKKVEPKSCDKTHTCPPCPAPPVAGPSVFLFPPKPKDTLMISRTPEVTCVVVDVKHEDPEVKFNWYVDGVEVHNAKTKPREEQYNSTYRVVSVLTVLHQDWLNGKEYKCKVSNKALPAPIEKTISKAKGQPREPQVYTLPPSREEMTKNQVSLTCLVKGFYPSDIAVEWESNGQPENNYKTTPPVLDSDGSFFLYSKLTVDKSRWQQGNVFSCSVMHEALHNHYTQKSLSLSPGK

SEQ ID NO: 15886 - protein, 122 aa, synthetic construct; identical to SEQ ID NO: 10221
  source 1..122: note = Description of Artificial Sequence: Synthetic polypeptide; note = VH of XENP019008

SEQ ID NO: 15887 - protein, 5 aa, synthetic construct
  source 1..5: note = Description of Artificial Sequence: Synthetic peptide; note = XENP019008 vhCDR1
NYWMN

SEQ ID NO: 15888 - protein, 19 aa, synthetic construct
  source 1..19: note = Description of Artificial Sequence: Synthetic peptide; note = XENP019008 vhCDR2
EIRLKSNNYATHYAEKVKG

SEQ ID NO: 15889 - protein, 11 aa, synthetic construct
  source 1..11: note = Description of Artificial Sequence: Synthetic peptide; note = XENP019008 vhCDR3
YYGNYGGYFDV

SEQ ID NO: 15890 - protein, 214 aa, synthetic construct; identical to SEQ ID NO: 11550
  source 1..214: note = Description of Artificial Sequence: Synthetic polypeptide; note = XENP019008 1G6_H1.263_L1_IgG1_PVA_/S267K Light Chain

SEQ ID NO: 15891 - protein, 107 aa, synthetic construct; identical to SEQ ID NO: 6247
  source 1..107: note = Description of Artificial Sequence: Synthetic polypeptide; note = VL of XENP019008

SEQ ID NO: 15892 - protein, 11 aa, synthetic construct
  source 1..11: note = Description of Artificial Sequence: Synthetic peptide; note = XENP019008 vlCDR1
RASQSVSNDVA

SEQ ID NO: 15893 - protein, 7 aa, synthetic construct
  source 1..7: note = Description of Artificial Sequence: Synthetic peptide; note = XENP019008 vlCDR2
YASHRYT

SEQ ID NO: 15894 - protein, 9 aa, synthetic construct
  source 1..9: note = Description of Artificial Sequence: Synthetic peptide; note = XENP019008 vlCDR3
QQDYSSPRT

SEQ ID NO: 15895 - protein, 451 aa, synthetic construct
  source 1..451: note = Description of Artificial Sequence: Synthetic polypeptide; note = XENP019009 1G6_H1.264_L1_IgG1_PVA_/S267K Heavy Chain
EVQLVESGGGLVKPGGSLRLSCKASGDTFSNYWMNWVRQAPGKGLEWVGEIRLKSNNYATHYAEPVKGRFTISRDDSKSTVYLQMNSLKTEDTAVYYCTRYYGNYGGYFDVWGAGTLVTVSSASTKGPSVFPLAPSSKSTSGGTAALGCLVKDYFPEPVTVSWNSGALTSGVHTFPAVLQSSGLYSLSSVVTVPSSSLGTQTYICNVNHKPSNTKVDKKVEPKSCDKTHTCPPCPAPPVAGPSVFLFPPKPKDTLMISRTPEVTCVVVDVKHEDPEVKFNWYVDGVEVHNAKTKPREEQYNSTYRVVSVLTVLHQDWLNGKEYKCKVSNKALPAPIEKTISKAKGQPREPQVYTLPPSREEMTKNQVSLTCLVKGFYPSDIAVEWESNGQPENNYKTTPPVLDSDGSFFLYSKLTVDKSRWQQGNVFSCSVMHEALHNHYTQKSLSLSPGK

SEQ ID NO: 15896 - protein, 122 aa, synthetic construct; identical to SEQ ID NO: 10230
  source 1..122: note = Description of Artificial Sequence: Synthetic polypeptide; note = VH of XENP019009

SEQ ID NO: 15897 - protein, 5 aa, synthetic construct
  source 1..5: note = Description of Artificial Sequence: Synthetic peptide; note = XENP019009 vhCDR1
NYWMN

SEQ ID NO: 15898 - protein, 19 aa, synthetic construct
  source 1..19: note = Description of Artificial Sequence: Synthetic peptide; note = XENP019009 vhCDR2
EIRLKSNNYATHYAEPVKG

SEQ ID NO: 15899 - protein, 11 aa, synthetic construct
  source 1..11: note = Description of Artificial Sequence: Synthetic peptide; note = XENP019009 vhCDR3
YYGNYGGYFDV

SEQ ID NO: 15900 - protein, 214 aa, synthetic construct; identical to SEQ ID NO: 11550
  source 1..214: note = Description of Artificial Sequence: Synthetic polypeptide; note = XENP019009 1G6_H1.264_L1_IgG1_PVA_/S267K Light Chain

SEQ ID NO: 15901 - protein, 107 aa, synthetic construct; identical to SEQ ID NO: 6247
  source 1..107: note = Description of Artificial Sequence: Synthetic polypeptide; note = VL of XENP019009

SEQ ID NO: 15902 - protein, 11 aa, synthetic construct
  source 1..11: note = Description of Artificial Sequence: Synthetic peptide; note = XENP019009 vlCDR1
RASQSVSNDVA

SEQ ID NO: 15903 - protein, 7 aa, synthetic construct
  source 1..7: note = Description of Artificial Sequence: Synthetic peptide; note = XENP019009 vlCDR2
YASHRYT

SEQ ID NO: 15904 - protein, 9 aa, synthetic construct
  source 1..9: note = Description of Artificial Sequence: Synthetic peptide; note = XENP019009 vlCDR3
QQDYSSPRT

SEQ ID NO: 15905 - protein, 451 aa, synthetic construct
  source 1..451: note = Description of Artificial Sequence: Synthetic polypeptide; note = XENP019010 1G6_H1.265_L1_IgG1_PVA_/S267K Heavy Chain
EVQLVESGGGLVKPGESLRLSCAASGFTFSNYWMNWVRQAPGKGLEWVGEIRLKSNNYATHYAEPVKGRFTISRDDSKSTVYLKMNSLKTEDTAVYYCTRYYGNYGGYFDVWGAGTLVTVSSASTKGPSVFPLAPSSKSTSGGTAALGCLVKDYFPEPVTVSWNSGALTSGVHTFPAVLQSSGLYSLSSVVTVPSSSLGTQTYICNVNHKPSNTKVDKKVEPKSCDKTHTCPPCPAPPVAGPSVFLFPPKPKDTLMISRTPEVTCVVVDVKHEDPEVKFNWYVDGVEVHNAKTKPREEQYNSTYRVVSVLTVLHQDWLNGKEYKCKVSNKALPAPIEKTISKAKGQPREPQVYTLPPSREEMTKNQVSLTCLVKGFYPSDIAVEWESNGQPENNYKTTPPVLDSDGSFFLYSKLTVDKSRWQQGNVFSCSVMHEALHNHYTQKSLSLSPGK

SEQ ID NO: 15906 - protein, 122 aa, synthetic construct; identical to SEQ ID NO: 10239
  source 1..122: note = Description of Artificial Sequence: Synthetic polypeptide; note = VH of XENP019010

SEQ ID NO: 15907 - protein, 5 aa, synthetic construct
  source 1..5: note = Description of Artificial Sequence: Synthetic peptide; note = XENP019010 vhCDR1
NYWMN

SEQ ID NO: 15908 - protein, 19 aa, synthetic construct
  source 1..19: note = Description of Artificial Sequence: Synthetic peptide; note = XENP019010 vhCDR2
EIRLKSNNYATHYAEPVKG

SEQ ID NO: 15909 - protein, 11 aa, synthetic construct
  source 1..11: note = Description of Artificial Sequence: Synthetic peptide; note = XENP019010 vhCDR3
YYGNYGGYFDV

SEQ ID NO: 15910 - protein, 214 aa, synthetic construct; identical to SEQ ID NO: 11550
  source 1..214: note = Description of Artificial Sequence: Synthetic polypeptide; note = XENP019010 1G6_H1.265_L1_IgG1_PVA_/S267K Light Chain

SEQ ID NO: 15911 - protein, 107 aa, synthetic construct; identical to SEQ ID NO: 6247
  source 1..107: note = Description of Artificial Sequence: Synthetic polypeptide; note = VL of XENP019010

SEQ ID NO: 15912 - protein, 11 aa, synthetic construct
  source 1..11: note = Description of Artificial Sequence: Synthetic peptide; note = XENP019010 vlCDR1
RASQSVSNDVA

SEQ ID NO: 15913 - protein, 7 aa, synthetic construct
  source 1..7: note = Description of Artificial Sequence: Synthetic peptide; note = XENP019010 vlCDR2
YASHRYT

SEQ ID NO: 15914 - protein, 9 aa, synthetic construct
  source 1..9: note = Description of Artificial Sequence: Synthetic peptide; note = XENP019010 vlCDR3
QQDYSSPRT

SEQ ID NO: 15915 - protein, 451 aa, synthetic construct
  source 1..451: note = Description of Artificial Sequence: Synthetic polypeptide; note = XENP019011 1G6_H1.266_L1_IgG1_PVA_/S267K Heavy Chain
EVQLVESGGGLVKPGGSLRLSCAASGFTFSNYWMNWVRQAPGKGLEWVGEIRLKSNNYATHYAQPVKDRFTISRDDSKSTVYLQMNSLKTEDTAVYYCTRYYGNYGGYFDVWGAGTLVTVSSASTKGPSVFPLAPSSKSTSGGTAALGCLVKDYFPEPVTVSWNSGALTSGVHTFPAVLQSSGLYSLSSVVTVPSSSLGTQTYICNVNHKPSNTKVDKKVEPKSCDKTHTCPPCPAPPVAGPSVFLFPPKPKDTLMISRTPEVTCVVVDVKHEDPEVKFNWYVDGVEVHNAKTKPREEQYNSTYRVVSVLTVLHQDWLNGKEYKCKVSNKALPAPIEKTISKAKGQPREPQVYTLPPSREEMTKNQVSLTCLVKGFYPSDIAVEWESNGQPENNYKTTPPVLDSDGSFFLYSKLTVDKSRWQQGNVFSCSVMHEALHNHYTQKSLSLSPGK

SEQ ID NO: 15916 - protein, 122 aa, synthetic construct; identical to SEQ ID NO: 10248
  source 1..122: note = Description of Artificial Sequence: Synthetic polypeptide; note = VH of XENP019011

SEQ ID NO: 15917 - protein, 5 aa, synthetic construct
  source 1..5: note = Description of Artificial Sequence: Synthetic peptide; note = XENP019011 vhCDR1
NYWMN

SEQ ID NO: 15918 - protein, 19 aa, synthetic construct
  source 1..19: note = Description of Artificial Sequence: Synthetic peptide; note = XENP019011 vhCDR2
EIRLKSNNYATHYAQPVKD

SEQ ID NO: 15919 - protein, 11 aa, synthetic construct
  source 1..11: note = Description of Artificial Sequence: Synthetic peptide; note = XENP019011 vhCDR3
YYGNYGGYFDV

SEQ ID NO: 15920 - protein, 214 aa, synthetic construct; identical to SEQ ID NO: 11550
  source 1..214: note = Description of Artificial Sequence: Synthetic polypeptide; note = XENP019011 1G6_H1.266_L1_IgG1_PVA_/S267K Light Chain

SEQ ID NO: 15921 - protein, 107 aa, synthetic construct; identical to SEQ ID NO: 6247
  source 1..107: note = Description of Artificial Sequence: Synthetic polypeptide; note = VL of XENP019011

SEQ ID NO: 15922 - protein, 11 aa, synthetic construct
  source 1..11: note = Description of Artificial Sequence: Synthetic peptide; note = XENP019011 vlCDR1
RASQSVSNDVA

SEQ ID NO: 15923 - protein, 7 aa, synthetic construct
  source 1..7: note = Description of Artificial Sequence: Synthetic peptide; note = XENP019011 vlCDR2
YASHRYT

SEQ ID NO: 15924 - protein, 9 aa, synthetic construct
  source 1..9: note = Description of Artificial Sequence: Synthetic peptide; note = XENP019011 vlCDR3
QQDYSSPRT

SEQ ID NO: 15925 - protein, 451 aa, synthetic construct
  source 1..451: note = Description of Artificial Sequence: Synthetic polypeptide; note = XENP019012 1G6_H1.267_L1_IgG1_PVA_/S267K Heavy Chain
EVQLVESGGGLVKPGGSLRLSCAASGFTFSNYWMNWVRQAPGKGLEWVGEIRLKSNNYATHYAEPVKGRFTISRDDSKSTVYLEMNSRKTEDTAVYYCTRYYGNYGGYFDVWGAGTLVTVSSASTKGPSVFPLAPSSKSTSGGTAALGCLVKDYFPEPVTVSWNSGALTSGVHTFPAVLQSSGLYSLSSVVTVPSSSLGTQTYICNVNHKPSNTKVDKKVEPKSCDKTHTCPPCPAPPVAGPSVFLFPPKPKDTLMISRTPEVTCVVVDVKHEDPEVKFNWYVDGVEVHNAKTKPREEQYNSTYRVVSVLTVLHQDWLNGKEYKCKVSNKALPAPIEKTISKAKGQPREPQVYTLPPSREEMTKNQVSLTCLVKGFYPSDIAVEWESNGQPENNYKTTPPVLDSDGSFFLYSKLTVDKSRWQQGNVFSCSVMHEALHNHYTQKSLSLSPGK

SEQ ID NO: 15926 - protein, 122 aa, synthetic construct; identical to SEQ ID NO: 10257
  source 1..122: note = Description of Artificial Sequence: Synthetic polypeptide; note = VH of XENP019012

SEQ ID NO: 15927 - protein, 5 aa, synthetic construct
  source 1..5: note = Description of Artificial Sequence: Synthetic peptide; note = XENP019012 vhCDR1
NYWMN

SEQ ID NO: 15928 - protein, 19 aa, synthetic construct
  source 1..19: note = Description of Artificial Sequence: Synthetic peptide; note = XENP019012 vhCDR2
EIRLKSNNYATHYAEPVKG

SEQ ID NO: 15929 - protein, 11 aa, synthetic construct
  source 1..11: note = Description of Artificial Sequence: Synthetic peptide; note = XENP019012 vhCDR3
YYGNYGGYFDV

SEQ ID NO: 15930 - protein, 214 aa, synthetic construct; identical to SEQ ID NO: 11550
  source 1..214: note = Description of Artificial Sequence: Synthetic polypeptide; note = XENP019012 1G6_H1.267_L1_IgG1_PVA_/S267K Light Chain

SEQ ID NO: 15931 - protein, 107 aa, synthetic construct; identical to SEQ ID NO: 6247
  source 1..107: note = Description of Artificial Sequence: Synthetic polypeptide; note = VL of XENP019012

SEQ ID NO: 15932 - protein, 11 aa, synthetic construct
  source 1..11: note = Description of Artificial Sequence: Synthetic peptide; note = XENP019012 vlCDR1
RASQSVSNDVA

SEQ ID NO: 15933 - protein, 7 aa, synthetic construct
  source 1..7: note = Description of Artificial Sequence: Synthetic peptide; note = XENP019012 vlCDR2
YASHRYT

SEQ ID NO: 15934 - protein, 9 aa, synthetic construct
  source 1..9: note = Description of Artificial Sequence: Synthetic peptide; note = XENP019012 vlCDR3
QQDYSSPRT

SEQ ID NO: 15935 - protein, 451 aa, synthetic construct
  source 1..451: note = Description of Artificial Sequence: Synthetic polypeptide; note = XENP019013 1G6_H1.268_L1_IgG1_PVA_/S267K Heavy Chain
EVQLVESGGGLVKPGESLRLSCAASGFTFSNYWMNWVRQAPGKGLEWVGEIRLKSNNYATHYAEPVKGRFTISRDDSKSTVYLQMRSLKTEDTAVYYCTRYYGNYGGYFDVWGAGTLVTVSSASTKGPSVFPLAPSSKSTSGGTAALGCLVKDYFPEPVTVSWNSGALTSGVHTFPAVLQSSGLYSLSSVVTVPSSSLGTQTYICNVNHKPSNTKVDKKVEPKSCDKTHTCPPCPAPPVAGPSVFLFPPKPKDTLMISRTPEVTCVVVDVKHEDPEVKFNWYVDGVEVHNAKTKPREEQYNSTYRVVSVLTVLHQDWLNGKEYKCKVSNKALPAPIEKTISKAKGQPREPQVYTLPPSREEMTKNQVSLTCLVKGFYPSDIAVEWESNGQPENNYKTTPPVLDSDGSFFLYSKLTVDKSRWQQGNVFSCSVMHEALHNHYTQKSLSLSPGK

SEQ ID NO: 15936 - protein, 122 aa, synthetic construct; identical to SEQ ID NO: 10266
  source 1..122: note = Description of Artificial Sequence: Synthetic polypeptide; note = VH of XENP019013

SEQ ID NO: 15937 - protein, 5 aa, synthetic construct
  source 1..5: note = Description of Artificial Sequence: Synthetic peptide; note = XENP019013 vhCDR1
NYWMN

SEQ ID NO: 15938 - protein, 19 aa, synthetic construct
  source 1..19: note = Description of Artificial Sequence: Synthetic peptide; note = XENP019013 vhCDR2
EIRLKSNNYATHYAEPVKG

SEQ ID NO: 15939 - protein, 11 aa, synthetic construct
  source 1..11: note = Description of Artificial Sequence: Synthetic peptide; note = XENP019013 vhCDR3
YYGNYGGYFDV

SEQ ID NO: 15940 - protein, 214 aa, synthetic construct; identical to SEQ ID NO: 11550
  source 1..214: note = Description of Artificial Sequence: Synthetic polypeptide; note = XENP019013 1G6_H1.268_L1_IgG1_PVA_/S267K Light Chain

SEQ ID NO: 15941 - protein, 107 aa, synthetic construct; identical to SEQ ID NO: 6247
  source 1..107: note = Description of Artificial Sequence: Synthetic polypeptide; note = VL of XENP019013

SEQ ID NO: 15942 - protein, 11 aa, synthetic construct
  source 1..11: note = Description of Artificial Sequence: Synthetic peptide; note = XENP019013 vlCDR1
RASQSVSNDVA

SEQ ID NO: 15943 - protein, 7 aa, synthetic construct
  source 1..7: note = Description of Artificial Sequence: Synthetic peptide; note = XENP019013 vlCDR2
YASHRYT

SEQ ID NO: 15944 - protein, 9 aa, synthetic construct
  source 1..9: note = Description of Artificial Sequence: Synthetic peptide; note = XENP019013 vlCDR3
QQDYSSPRT

SEQ ID NO: 15945 - protein, 451 aa, synthetic construct
  source 1..451: note = Description of Artificial Sequence: Synthetic polypeptide; note = XENP019014 1G6_H1.269_L1_IgG1_PVA_/S267K Heavy Chain
EVQLVESGGGLVKPGGSLRLSCAASGFTFSNFWMNWVRQAPGKGLEWVGEIRLYSNNYATHYAEPVKGRFTISRDDSKSTVYLQMNSLKTEDTAVYYCTRYYGNYGGYFDVWGAGTLVTVSSASTKGPSVFPLAPSSKSTSGGTAALGCLVKDYFPEPVTVSWNSGALTSGVHTFPAVLQSSGLYSLSSVVTVPSSSLGTQTYICNVNHKPSNTKVDKKVEPKSCDKTHTCPPCPAPPVAGPSVFLFPPKPKDTLMISRTPEVTCVVVDVKHEDPEVKFNWYVDGVEVHNAKTKPREEQYNSTYRVVSVLTVLHQDWLNGKEYKCKVSNKALPAPIEKTISKAKGQPREPQVYTLPPSREEMTKNQVSLTCLVKGFYPSDIAVEWESNGQPENNYKTTPPVLDSDGSFFLYSKLTVDKSRWQQGNVFSCSVMHEALHNHYTQKSLSLSPGK

SEQ ID NO: 15946 - protein, 122 aa, synthetic construct; identical to SEQ ID NO: 10275
  source 1..122: note = Description of Artificial Sequence: Synthetic polypeptide; note = VH of XENP019014

SEQ ID NO: 15947 - protein, 5 aa, synthetic construct
  source 1..5: note = Description of Artificial Sequence: Synthetic peptide; note = XENP019014 vhCDR1
NFWMN

SEQ ID NO: 15948 - protein, 19 aa, synthetic construct
  source 1..19: note = Description of Artificial Sequence: Synthetic peptide; note = XENP019014 vhCDR2
EIRLYSNNYATHYAEPVKG

SEQ ID NO: 15949 - protein, 11 aa, synthetic construct
  source 1..11: note = Description of Artificial Sequence: Synthetic peptide; note = XENP019014 vhCDR3
YYGNYGGYFDV

SEQ ID NO: 15950 - protein, 214 aa, synthetic construct; identical to SEQ ID NO: 11550
  source 1..214: note = Description of Artificial Sequence: Synthetic polypeptide; note = XENP019014 1G6_H1.269_L1_IgG1_PVA_/S267K Light Chain

SEQ ID NO: 15951 - protein, 107 aa, synthetic construct; identical to SEQ ID NO: 6247
  source 1..107: note = Description of Artificial Sequence: Synthetic polypeptide; note = VL of XENP019014

SEQ ID NO: 15952 - protein, 11 aa, synthetic construct
  source 1..11: note = Description of Artificial Sequence: Synthetic peptide; note = XENP019014 vlCDR1
RASQSVSNDVA

SEQ ID NO: 15953 - protein, 7 aa, synthetic construct
  source 1..7: note = Description of Artificial Sequence: Synthetic peptide; note = XENP019014 vlCDR2
YASHRYT

SEQ ID NO: 15954 - protein, 9 aa, synthetic construct
  source 1..9: note = Description of Artificial Sequence: Synthetic peptide; note = XENP019014 vlCDR3
QQDYSSPRT

SEQ ID NO: 15955 - protein, 451 aa, synthetic construct
  source 1..451: note = Description of Artificial Sequence: Synthetic polypeptide; note = XENP019015 1G6_H1.270_L1_IgG1_PVA_/S267K Heavy Chain
EVQLVESGGGLVKPGGSLRLSCAASGFTFSNYWMNWVRQAPGKGLEWVGEIRWYSNNYATHYAEPVKGRFTISRDDSKSTVYLQMNSLKTEDTAVYYCTRYYGNYGGYFDVWGAGTLVTVSSASTKGPSVFPLAPSSKSTSGGTAALGCLVKDYFPEPVTVSWNSGALTSGVHTFPAVLQSSGLYSLSSVVTVPSSSLGTQTYICNVNHKPSNTKVDKKVEPKSCDKTHTCPPCPAPPVAGPSVFLFPPKPKDTLMISRTPEVTCVVVDVKHEDPEVKFNWYVDGVEVHNAKTKPREEQYNSTYRVVSVLTVLHQDWLNGKEYKCKVSNKALPAPIEKTISKAKGQPREPQVYTLPPSREEMTKNQVSLTCLVKGFYPSDIAVEWESNGQPENNYKTTPPVLDSDGSFFLYSKLTVDKSRWQQGNVFSCSVMHEALHNHYTQKSLSLSPGK

SEQ ID NO: 15956 - protein, 122 aa, synthetic construct; identical to SEQ ID NO: 10284
  source 1..122: note = Description of Artificial Sequence: Synthetic polypeptide; note = VH of XENP019015

SEQ ID NO: 15957 - protein, 5 aa, synthetic construct
  source 1..5: note = Description of Artificial Sequence: Synthetic peptide; note = XENP019015 vhCDR1
NYWMN

SEQ ID NO: 15958 - protein, 19 aa, synthetic construct
  source 1..19: note = Description of Artificial Sequence: Synthetic peptide; note = XENP019015 vhCDR2
EIRWYSNNYATHYAEPVKG

SEQ ID NO: 15959 - protein, 11 aa, synthetic construct
  source 1..11: note = Description of Artificial Sequence: Synthetic peptide; note = XENP019015 vhCDR3
YYGNYGGYFDV

SEQ ID NO: 15960 - protein, 214 aa, synthetic construct; identical to SEQ ID NO: 11550
  source 1..214: note = Description of Artificial Sequence: Synthetic polypeptide; note = XENP019015 1G6_H1.270_L1_IgG1_PVA_/S267K Light Chain

SEQ ID NO: 15961 - protein, 107 aa, synthetic construct; identical to SEQ ID NO: 6247
  source 1..107: note = Description of Artificial Sequence: Synthetic polypeptide; note = VL of XENP019015

SEQ ID NO: 15962 - protein, 11 aa, synthetic construct
  source 1..11: note = Description of Artificial Sequence: Synthetic peptide; note = XENP019015 vlCDR1
RASQSVSNDVA

SEQ ID NO: 15963 - protein, 7 aa, synthetic construct
  source 1..7: note = Description of Artificial Sequence: Synthetic peptide; note = XENP019015 vlCDR2
YASHRYT

SEQ ID NO: 15964 - protein, 9 aa, synthetic construct
  source 1..9: note = Description of Artificial Sequence: Synthetic peptide; note = XENP019015 vlCDR3
QQDYSSPRT

SEQ ID NO: 15965 - protein, 451 aa, synthetic construct
  source 1..451: note = Description of Artificial Sequence: Synthetic polypeptide; note = XENP019016 1G6_H1.271_L1_IgG1_PVA_/S267K Heavy Chain
EVQLVESGGGLVKPGGSLRLSCAASGFTFSNYWMNWVRQAPGKGLEWVGEIRLYSNNYATHYAEPVKGRFTISRDDSKSTLYLQMNSLKTEDTAVYYCTRYYGNYGGYFDVWGAGTLVTVSSASTKGPSVFPLAPSSKSTSGGTAALGCLVKDYFPEPVTVSWNSGALTSGVHTFPAVLQSSGLYSLSSVVTVPSSSLGTQTYICNVNHKPSNTKVDKKVEPKSCDKTHTCPPCPAPPVAGPSVFLFPPKPKDTLMISRTPEVTCVVVDVKHEDPEVKFNWYVDGVEVHNAKTKPREEQYNSTYRVVSVLTVLHQDWLNGKEYKCKVSNKALPAPIEKTISKAKGQPREPQVYTLPPSREEMTKNQVSLTCLVKGFYPSDIAVEWESNGQPENNYKTTPPVLDSDGSFFLYSKLTVDKSRWQQGNVFSCSVMHEALHNHYTQKSLSLSPGK

SEQ ID NO: 15966 - protein, 122 aa, synthetic construct; identical to SEQ ID NO: 10293
  source 1..122: note = Description of Artificial Sequence: Synthetic polypeptide; note = VH of XENP019016

SEQ ID NO: 15967 - protein, 5 aa, synthetic construct
  source 1..5: note = Description of Artificial Sequence: Synthetic peptide; note = XENP019016 vhCDR1
NYWMN

SEQ ID NO: 15968 - protein, 19 aa, synthetic construct
  source 1..19: note = Description of Artificial Sequence: Synthetic peptide; note = XENP019016 vhCDR2
EIRLYSNNYATHYAEPVKG

SEQ ID NO: 15969 - protein, 11 aa, synthetic construct
  source 1..11: note = Description of Artificial Sequence: Synthetic peptide; note = XENP019016 vhCDR3
YYGNYGGYFDV

SEQ ID NO: 15970 - protein, 214 aa, synthetic construct; identical to SEQ ID NO: 11550
  source 1..214: note = Description of Artificial Sequence: Synthetic polypeptide; note = XENP019016 1G6_H1.271_L1_IgG1_PVA_/S267K Light Chain

SEQ ID NO: 15971 - protein, 107 aa, synthetic construct; identical to SEQ ID NO: 6247
  source 1..107: note = Description of Artificial Sequence: Synthetic polypeptide; note = VL of XENP019016

SEQ ID NO: 15972 - protein, 11 aa, synthetic construct
  source 1..11: note = Description of Artificial Sequence: Synthetic peptide; note = XENP019016 vlCDR1
RASQSVSNDVA

SEQ ID NO: 15973 - protein, 7 aa, synthetic construct
  source 1..7: note = Description of Artificial Sequence: Synthetic peptide; note = XENP019016 vlCDR2
YASHRYT

SEQ ID NO: 15974 - protein, 9 aa, synthetic construct
  source 1..9: note = Description of Artificial Sequence: Synthetic peptide; note = XENP019016 vlCDR3
QQDYSSPRT

SEQ ID NO: 15975 - protein, 451 aa, synthetic construct
  source 1..451: note = Description of Artificial Sequence: Synthetic polypeptide; note = XENP019017 1G6_H1.272_L1_IgG1_PVA_/S267K Heavy Chain
EVQLVESGGGLVKPGGSLRLSCAASGFTFSNFWMNWVRQAPGKGLEWVGEIRLYSNNYATHYAEPVKGRFTISRDDSKSTLYLQMNSLKTEDTAVYYCTRYYGNYGGYFDVWGAGTLVTVSSASTKGPSVFPLAPSSKSTSGGTAALGCLVKDYFPEPVTVSWNSGALTSGVHTFPAVLQSSGLYSLSSVVTVPSSSLGTQTYICNVNHKPSNTKVDKKVEPKSCDKTHTCPPCPAPPVAGPSVFLFPPKPKDTLMISRTPEVTCVVVDVKHEDPEVKFNWYVDGVEVHNAKTKPREEQYNSTYRVVSVLTVLHQDWLNGKEYKCKVSNKALPAPIEKTISKAKGQPREPQVYTLPPSREEMTKNQVSLTCLVKGFYPSDIAVEWESNGQPENNYKTTPPVLDSDGSFFLYSKLTVDKSRWQQGNVFSCSVMHEALHNHYTQKSLSLSPGK

SEQ ID NO: 15976 - protein, 122 aa, synthetic construct; identical to SEQ ID NO: 10302
  source 1..122: note = Description of Artificial Sequence: Synthetic polypeptide; note = VH of XENP019017

SEQ ID NO: 15977 - protein, 5 aa, synthetic construct
  source 1..5: note = Description of Artificial Sequence: Synthetic peptide; note = XENP019017 vhCDR1
NFWMN

SEQ ID NO: 15978 - protein, 19 aa, synthetic construct
  source 1..19: note = Description of Artificial Sequence: Synthetic peptide; note = XENP019017 vhCDR2
EIRLYSNNYATHYAEPVKG

SEQ ID NO: 15979 - protein, 11 aa, synthetic construct
  source 1..11: note = Description of Artificial Sequence: Synthetic peptide; note = XENP019017 vhCDR3
YYGNYGGYFDV

SEQ ID NO: 15980 - protein, 214 aa, synthetic construct; identical to SEQ ID NO: 11550
  source 1..214: note = Description of Artificial Sequence: Synthetic polypeptide; note = XENP019017 1G6_H1.272_L1_IgG1_PVA_/S267K Light Chain

SEQ ID NO: 15981 - protein, 107 aa, synthetic construct; identical to SEQ ID NO: 6247
  source 1..107: note = Description of Artificial Sequence: Synthetic polypeptide; note = VL of XENP019017

SEQ ID NO: 15982 - protein, 11 aa, synthetic construct
  source 1..11: note = Description of Artificial Sequence: Synthetic peptide; note = XENP019017 vlCDR1
RASQSVSNDVA

SEQ ID NO: 15983 - protein, 7 aa, synthetic construct
  source 1..7: note = Description of Artificial Sequence: Synthetic peptide; note = XENP019017 vlCDR2
YASHRYT

SEQ ID NO: 15984 - protein, 9 aa, synthetic construct
  source 1..9: note = Description of Artificial Sequence: Synthetic peptide; note = XENP019017 vlCDR3
QQDYSSPRT

SEQ ID NO: 15985 - protein, 451 aa, synthetic construct
  source 1..451: note = Description of Artificial Sequence: Synthetic polypeptide; note = XENP019018 1G6_H1.273_L1_IgG1_PVA_/S267K Heavy Chain
EVQLVESGGGLVKPGGSLRLSCAASGFTFSNFWMNWVRQAPGKGLEWVGEIRWKSNNYATHYAEPVKGRFTISRDDSKSTLYLQMNSLKTEDTAVYYCTRYYGNYGGYFDVWGAGTLVTVSSASTKGPSVFPLAPSSKSTSGGTAALGCLVKDYFPEPVTVSWNSGALTSGVHTFPAVLQSSGLYSLSSVVTVPSSSLGTQTYICNVNHKPSNTKVDKKVEPKSCDKTHTCPPCPAPPVAGPSVFLFPPKPKDTLMISRTPEVTCVVVDVKHEDPEVKFNWYVDGVEVHNAKTKPREEQYNSTYRVVSVLTVLHQDWLNGKEYKCKVSNKALPAPIEKTISKAKGQPREPQVYTLPPSREEMTKNQVSLTCLVKGFYPSDIAVEWESNGQPENNYKTTPPVLDSDGSFFLYSKLTVDKSRWQQGNVFSCSVMHEALHNHYTQKSLSLSPGK

SEQ ID NO: 15986 - protein, 122 aa, synthetic construct; identical to SEQ ID NO: 10311
  source 1..122: note = Description of Artificial Sequence: Synthetic polypeptide; note = VH of XENP019018

SEQ ID NO: 15987 - protein, 5 aa, synthetic construct
  source 1..5: note = Description of Artificial Sequence: Synthetic peptide; note = XENP019018 vhCDR1
NFWMN

SEQ ID NO: 15988 - protein, 19 aa, synthetic construct
  source 1..19: note = Description of Artificial Sequence: Synthetic peptide; note = XENP019018 vhCDR2
EIRWKSNNYATHYAEPVKG

SEQ ID NO: 15989 - protein, 11 aa, synthetic construct
  source 1..11: note = Description of Artificial Sequence: Synthetic peptide; note = XENP019018 vhCDR3
YYGNYGGYFDV

SEQ ID NO: 15990 - protein, 214 aa, synthetic construct; identical to SEQ ID NO: 11550
  source 1..214: note = Description of Artificial Sequence: Synthetic polypeptide; note = XENP019018 1G6_H1.273_L1_IgG1_PVA_/S267K Light Chain

SEQ ID NO: 15991 - protein, 107 aa, synthetic construct; identical to SEQ ID NO: 6247
  source 1..107: note = Description of Artificial Sequence: Synthetic polypeptide; note = VL of XENP019018

SEQ ID NO: 15992 - protein, 11 aa, synthetic construct
  source 1..11: note = Description of Artificial Sequence: Synthetic peptide; note = XENP019018 vlCDR1
RASQSVSNDVA

SEQ ID NO: 15993 - protein, 7 aa, synthetic construct
  source 1..7: note = Description of Artificial Sequence: Synthetic peptide; note = XENP019018 vlCDR2
YASHRYT

SEQ ID NO: 15994 - protein, 9 aa, synthetic construct
  source 1..9: note = Description of Artificial Sequence: Synthetic peptide; note = XENP019018 vlCDR3
QQDYSSPRT

SEQ ID NO: 15995 - protein, 451 aa, synthetic construct
  source 1..451: note = Description of Artificial Sequence: Synthetic polypeptide; note = XENP019019 1G6_H1.274_L1_IgG1_PVA_/S267K Heavy Chain
EVQLVESGGGLVKPGGSLRLSCAASGFTFSNFWMNWVRQAPGKGLEWVGEIRLKKNNYATHYAEPVKGRFTISRDDSKSTLYLQMNSLKTEDTAVYYCTRYYGNYGGYFDVWGAGTLVTVSSASTKGPSVFPLAPSSKSTSGGTAALGCLVKDYFPEPVTVSWNSGALTSGVHTFPAVLQSSGLYSLSSVVTVPSSSLGTQTYICNVNHKPSNTKVDKKVEPKSCDKTHTCPPCPAPPVAGPSVFLFPPKPKDTLMISRTPEVTCVVVDVKHEDPEVKFNWYVDGVEVHNAKTKPREEQYNSTYRVVSVLTVLHQDWLNGKEYKCKVSNKALPAPIEKTISKAKGQPREPQVYTLPPSREEMTKNQVSLTCLVKGFYPSDIAVEWESNGQPENNYKTTPPVLDSDGSFFLYSKLTVDKSRWQQGNVFSCSVMHEALHNHYTQKSLSLSPGK

SEQ ID NO: 15996 - protein, 122 aa, synthetic construct; identical to SEQ ID NO: 10320
  source 1..122: note = Description of Artificial Sequence: Synthetic polypeptide; note = VH of XENP019019

SEQ ID NO: 15997 - protein, 5 aa, synthetic construct
  source 1..5: note = Description of Artificial Sequence: Synthetic peptide; note = XENP019019 vhCDR1
NFWMN

SEQ ID NO: 15998 - protein, 19 aa, synthetic construct
  source 1..19: note = Description of Artificial Sequence: Synthetic peptide; note = XENP019019 vhCDR2
EIRLKKNNYATHYAEPVKG

SEQ ID NO: 15999 - protein, 11 aa, synthetic construct
  source 1..11: note = Description of Artificial Sequence: Synthetic peptide; note = XENP019019 vhCDR3
YYGNYGGYFDV

SEQ ID NO: 16000 - protein, 214 aa, synthetic construct; identical to SEQ ID NO: 11550
  source 1..214: note = Description of Artificial Sequence: Synthetic polypeptide; note = XENP019019 1G6_H1.274_L1_IgG1_PVA_/S267K Light Chain

SEQ ID NO: 16001 - protein, 107 aa, synthetic construct; identical to SEQ ID NO: 6247
  source 1..107: note = Description of Artificial Sequence: Synthetic polypeptide; note = VL of XENP019019

SEQ ID NO: 16002 - protein, 11 aa, synthetic construct
  source 1..11: note = Description of Artificial Sequence: Synthetic peptide; note = XENP019019 vlCDR1
RASQSVSNDVA

SEQ ID NO: 16003 - protein, 7 aa, synthetic construct
  source 1..7: note = Description of Artificial Sequence: Synthetic peptide; note = XENP019019 vlCDR2
YASHRYT

SEQ ID NO: 16004 - protein, 9 aa, synthetic construct
  source 1..9: note = Description of Artificial Sequence: Synthetic peptide; note = XENP019019 vlCDR3
QQDYSSPRT

SEQ ID NO: 16005 - protein, 451 aa, synthetic construct
  source 1..451: note = Description of Artificial Sequence: Synthetic polypeptide; note = XENP019020 1G6_H1.275_L1_IgG1_PVA_/S267K Heavy Chain
EVQLVESGGGLVKPGGSLRLSCAASGFTFSNFWMNWVRQAPGKGLEWVGEIRWYSNNYATHYAEPVKGRFTISRDDSKSTLYLQMNSLKTEDTAVYYCTRYYGNYGGYFDVWGAGTLVTVSSASTKGPSVFPLAPSSKSTSGGTAALGCLVKDYFPEPVTVSWNSGALTSGVHTFPAVLQSSGLYSLSSVVTVPSSSLGTQTYICNVNHKPSNTKVDKKVEPKSCDKTHTCPPCPAPPVAGPSVFLFPPKPKDTLMISRTPEVTCVVVDVKHEDPEVKFNWYVDGVEVHNAKTKPREEQYNSTYRVVSVLTVLHQDWLNGKEYKCKVSNKALPAPIEKTISKAKGQPREPQVYTLPPSREEMTKNQVSLTCLVKGFYPSDIAVEWESNGQPENNYKTTPPVLDSDGSFFLYSKLTVDKSRWQQGNVFSCSVMHEALHNHYTQKSLSLSPGK

SEQ ID NO: 16006 - protein, 122 aa, synthetic construct; identical to SEQ ID NO: 10329
  source 1..122: note = Description of Artificial Sequence: Synthetic polypeptide; note = VH of XENP019020

SEQ ID NO: 16007 - protein, 5 aa, synthetic construct
  source 1..5: note = Description of Artificial Sequence: Synthetic peptide; note = XENP019020 vhCDR1
NFWMN

SEQ ID NO: 16008 - protein, 19 aa, synthetic construct
  source 1..19: note = Description of Artificial Sequence: Synthetic peptide; note = XENP019020 vhCDR2
EIRWYSNNYATHYAEPVKG

SEQ ID NO: 16009 - protein, 11 aa, synthetic construct
  source 1..11: note = Description of Artificial Sequence: Synthetic peptide; note = XENP019020 vhCDR3
YYGNYGGYFDV

SEQ ID NO: 16010 - protein, 214 aa, synthetic construct; identical to SEQ ID NO: 11550
  source 1..214: note = Description of Artificial Sequence: Synthetic polypeptide; note = XENP019020 1G6_H1.275_L1_IgG1_PVA_/S267K Light Chain

SEQ ID NO: 16011 - protein, 107 aa, synthetic construct; identical to SEQ ID NO: 6247
  source 1..107: note = Description of Artificial Sequence: Synthetic polypeptide; note = VL of XENP019020

SEQ ID NO: 16012 - protein, 11 aa, synthetic construct
  source 1..11: note = Description of Artificial Sequence: Synthetic peptide; note = XENP019020 vlCDR1
RASQSVSNDVA

SEQ ID NO: 16013 - protein, 7 aa, synthetic construct
  source 1..7: note = Description of Artificial Sequence: Synthetic peptide; note = XENP019020 vlCDR2
YASHRYT

SEQ ID NO: 16014 - protein, 9 aa, synthetic construct
  source 1..9: note = Description of Artificial Sequence: Synthetic peptide; note = XENP019020 vlCDR3
QQDYSSPRT

SEQ ID NO: 16015 - protein, 451 aa, synthetic construct
  source 1..451: note = Description of Artificial Sequence: Synthetic polypeptide; note = XENP019021 1G6_H1.276_L1_IgG1_PVA_/S267K Heavy Chain
EVQLVESGGGLVQPGGSLKLSCAASGFTFSNYWMNWVRQAPGKGLEWVGEIRLKSNNYATHYAASVKGRFTISRDDSKSTLYLQMNSLKTEDTAVYYCTRYYGNYGGYFDVWGQGTLVTVSSASTKGPSVFPLAPSSKSTSGGTAALGCLVKDYFPEPVTVSWNSGALTSGVHTFPAVLQSSGLYSLSSVVTVPSSSLGTQTYICNVNHKPSNTKVDKKVEPKSCDKTHTCPPCPAPPVAGPSVFLFPPKPKDTLMISRTPEVTCVVVDVKHEDPEVKFNWYVDGVEVHNAKTKPREEQYNSTYRVVSVLTVLHQDWLNGKEYKCKVSNKALPAPIEKTISKAKGQPREPQVYTLPPSREEMTKNQVSLTCLVKGFYPSDIAVEWESNGQPENNYKTTPPVLDSDGSFFLYSKLTVDKSRWQQGNVFSCSVMHEALHNHYTQKSLSLSPGK

SEQ ID NO: 16016 - protein, 122 aa, synthetic construct; identical to SEQ ID NO: 10338
  source 1..122: note = Description of Artificial Sequence: Synthetic polypeptide; note = VH of XENP019021

SEQ ID NO: 16017 - protein, 5 aa, synthetic construct
  source 1..5: note = Description of Artificial Sequence: Synthetic peptide; note = XENP019021 vhCDR1
NYWMN

SEQ ID NO: 16018 - protein, 19 aa, synthetic construct
  source 1..19: note = Description of Artificial Sequence: Synthetic peptide; note = XENP019021 vhCDR2
EIRLKSNNYATHYAASVKG

SEQ ID NO: 16019 - protein, 11 aa, synthetic construct
  source 1..11: note = Description of Artificial Sequence: Synthetic peptide; note = XENP019021 vhCDR3
YYGNYGGYFDV

SEQ ID NO: 16020 - protein, 214 aa, synthetic construct; identical to SEQ ID NO: 11550
  source 1..214: note = Description of Artificial Sequence: Synthetic polypeptide; note = XENP019021 1G6_H1.276_L1_IgG1_PVA_/S267K Light Chain

SEQ ID NO: 16021 - protein, 107 aa, synthetic construct; identical to SEQ ID NO: 6247
  source 1..107: note = Description of Artificial Sequence: Synthetic polypeptide; note = VL of XENP019021

SEQ ID NO: 16022 - protein, 11 aa, synthetic construct
  source 1..11: note = Description of Artificial Sequence: Synthetic peptide; note = XENP019021 vlCDR1
RASQSVSNDVA

SEQ ID NO: 16023 - protein, 7 aa, synthetic construct
  source 1..7: note = Description of Artificial Sequence: Synthetic peptide; note = XENP019021 vlCDR2
YASHRYT

SEQ ID NO: 16024 - protein, 9 aa, synthetic construct
  source 1..9: note = Description of Artificial Sequence: Synthetic peptide; note = XENP019021 vlCDR3
QQDYSSPRT

SEQ ID NO: 16025 - protein, 451 aa, synthetic construct
  source 1..451: note = Description of Artificial Sequence: Synthetic polypeptide; note = XENP019022 1G6_H1.277_L1_IgG1_PVA_/S267K Heavy Chain
EVQLVESGGGLVKPGGSLKLSCAASGFTFSNYWMNWVRQAPGKGLEWVGEIRLKSNNYATHYADSVKGRFTISRDDSKSTLYLQMNSLKTEDTAVYYCTRYYGNYGGYFDVWGQGTLVTVSSASTKGPSVFPLAPSSKSTSGGTAALGCLVKDYFPEPVTVSWNSGALTSGVHTFPAVLQSSGLYSLSSVVTVPSSSLGTQTYICNVNHKPSNTKVDKKVEPKSCDKTHTCPPCPAPPVAGPSVFLFPPKPKDTLMISRTPEVTCVVVDVKHEDPEVKFNWYVDGVEVHNAKTKPREEQYNSTYRVVSVLTVLHQDWLNGKEYKCKVSNKALPAPIEKTISKAKGQPREPQVYTLPPSREEMTKNQVSLTCLVKGFYPSDIAVEWESNGQPENNYKTTPPVLDSDGSFFLYSKLTVDKSRWQQGNVFSCSVMHEALHNHYTQKSLSLSPGK

SEQ ID NO: 16026 - protein, 122 aa, synthetic construct; identical to SEQ ID NO: 10347
  source 1..122: note = Description of Artificial Sequence: Synthetic polypeptide; note = VH of XENP019022

SEQ ID NO: 16027 - protein, 5 aa, synthetic construct
  source 1..5: note = Description of Artificial Sequence: Synthetic peptide; note = XENP019022 vhCDR1
NYWMN

SEQ ID NO: 16028 - protein, 19 aa, synthetic construct
  source 1..19: note = Description of Artificial Sequence: Synthetic peptide; note = XENP019022 vhCDR2
EIRLKSNNYATHYADSVKG

SEQ ID NO: 16029 - protein, 11 aa, synthetic construct
  source 1..11: note = Description of Artificial Sequence: Synthetic peptide; note = XENP019022 vhCDR3
YYGNYGGYFDV

SEQ ID NO: 16030 - protein, 214 aa, synthetic construct; identical to SEQ ID NO: 11550
  source 1..214: note = Description of Artificial Sequence: Synthetic polypeptide; note = XENP019022 1G6_H1.277_L1_IgG1_PVA_/S267K Light Chain

SEQ ID NO: 16031 - protein, 107 aa, synthetic construct; identical to SEQ ID NO: 6247
  source 1..107: note = Description of Artificial Sequence: Synthetic polypeptide; note = VL of XENP019022

SEQ ID NO: 16032 - protein, 11 aa, synthetic construct
  source 1..11: note = Description of Artificial Sequence: Synthetic peptide; note = XENP019022 vlCDR1
RASQSVSNDVA

SEQ ID NO: 16033 - protein, 7 aa, synthetic construct
  source 1..7: note = Description of Artificial Sequence: Synthetic peptide; note = XENP019022 vlCDR2
YASHRYT

SEQ ID NO: 16034 - protein, 9 aa, synthetic construct
  source 1..9: note = Description of Artificial Sequence: Synthetic peptide; note = XENP019022 vlCDR3
QQDYSSPRT

SEQ ID NO: 16035 - protein, 451 aa, synthetic construct; identical to SEQ ID NO: 11545
  source 1..451: note = Description of Artificial Sequence: Synthetic polypeptide; note = XENP019023 1G6_H1_L1.146_IgG1_PVA_/S267K Heavy Chain

SEQ ID NO: 16036 - protein, 122 aa, synthetic construct; identical to SEQ ID NO: 6246
  source 1..122: note = Description of Artificial Sequence: Synthetic polypeptide; note = VH of XENP019023

SEQ ID NO: 16037 - protein, 5 aa, synthetic construct
  source 1..5: note = Description of Artificial Sequence: Synthetic peptide; note = XENP019023 vhCDR1
NYWMN

SEQ ID NO: 16038 - protein, 19 aa, synthetic construct
  source 1..19: note = Description of Artificial Sequence: Synthetic peptide; note = XENP019023 vhCDR2
EIRLKSNNYATHYAEPVKG

SEQ ID NO: 16039 - protein, 11 aa, synthetic construct
  source 1..11: note = Description of Artificial Sequence: Synthetic peptide; note = XENP019023 vhCDR3
YYGNYGGYFDV

SEQ ID NO: 16040 - protein, 214 aa, synthetic construct
  source 1..214: note = Description of Artificial Sequence: Synthetic polypeptide; note = XENP019023 1G6_H1_L1.146_IgG1_PVA_/S267K Light Chain
SIVMTQSPATLAVSPGERATLSCRASQSVSNDVAWYQQKPGQSPRLLINYASHRYTGVPDRFTGSGYGTEFTLTISSLQSEDFAVYFCQQDYSSPRTFGGGTKVEIKRTVAAPSVFIFPPSDEQLKSGTASVVCLLNNFYPREAKVQWKVDNALQSGNSQESVTEQDSKDSTYSLSSTLTLSKADYEKHKVYACEVTHQGLSSPVTKSFNRGEC

SEQ ID NO: 16041 - protein, 107 aa, synthetic construct; identical to SEQ ID NO: 10357
  source 1..107: note = Description of Artificial Sequence: Synthetic polypeptide; note = VL of XENP019023

SEQ ID NO: 16042 - protein, 11 aa, synthetic construct
  source 1..11: note = Description of Artificial Sequence: Synthetic peptide; note = XENP019023 vlCDR1
RASQSVSNDVA

SEQ ID NO: 16043 - protein, 7 aa, synthetic construct
  source 1..7: note = Description of Artificial Sequence: Synthetic peptide; note = XENP019023 vlCDR2
YASHRYT

SEQ ID NO: 16044 - protein, 9 aa, synthetic construct
  source 1..9: note = Description of Artificial Sequence: Synthetic peptide; note = XENP019023 vlCDR3
QQDYSSPRT

SEQ ID NO: 16045 - protein, 451 aa, synthetic construct; identical to SEQ ID NO: 11545
  source 1..451: note = Description of Artificial Sequence: Synthetic polypeptide; note = XENP019024 1G6_H1_L1.147_IgG1_PVA_/S267K Heavy Chain

SEQ ID NO: 16046 - protein, 122 aa, synthetic construct; identical to SEQ ID NO: 6246
  source 1..122: note = Description of Artificial Sequence: Synthetic polypeptide; note = VH of XENP019024

SEQ ID NO: 16047 - protein, 5 aa, synthetic construct
  source 1..5: note = Description of Artificial Sequence: Synthetic peptide; note = XENP019024 vhCDR1
NYWMN

SEQ ID NO: 16048 - protein, 19 aa, synthetic construct
  source 1..19: note = Description of Artificial Sequence: Synthetic peptide; note = XENP019024 vhCDR2
EIRLKSNNYATHYAEPVKG

SEQ ID NO: 16049 - protein, 11 aa, synthetic construct
  source 1..11: note = Description of Artificial Sequence: Synthetic peptide; note = XENP019024 vhCDR3
YYGNYGGYFDV

SEQ ID NO: 16050 - protein, 214 aa, synthetic construct
  source 1..214: note = Description of Artificial Sequence: Synthetic polypeptide; note = XENP019024 1G6_H1_L1.147_IgG1_PVA_/S267K Light Chain
SIVMTQSPATLPVSPGERATLSCRASQSVSNDVAWYQQKPGQSPRLLINYASHRYTGVPDRFTGSGYGTEFTLTISSLQSEDFAVYFCQQDYSSPRTFGGGTKVEIKRTVAAPSVFIFPPSDEQLKSGTASVVCLLNNFYPREAKVQWKVDNALQSGNSQESVTEQDSKDSTYSLSSTLTLSKADYEKHKVYACEVTHQGLSSPVTKSFNRGEC

SEQ ID NO: 16051 - protein, 107 aa, synthetic construct; identical to SEQ ID NO: 10366
  source 1..107: note = Description of Artificial Sequence: Synthetic polypeptide; note = VL of XENP019024

SEQ ID NO: 16052 - protein, 11 aa, synthetic construct
  source 1..11: note = Description of Artificial Sequence: Synthetic peptide; note = XENP019024 vlCDR1
RASQSVSNDVA

SEQ ID NO: 16053 - protein, 7 aa, synthetic construct
  source 1..7: note = Description of Artificial Sequence: Synthetic peptide; note = XENP019024 vlCDR2
YASHRYT

SEQ ID NO: 16054 - protein, 9 aa, synthetic construct
  source 1..9: note = Description of Artificial Sequence: Synthetic peptide; note = XENP019024 vlCDR3
QQDYSSPRT

SEQ ID NO: 16055 - protein, 451 aa, synthetic construct; identical to SEQ ID NO: 11545
  source 1..451: note = Description of Artificial Sequence: Synthetic polypeptide; note = XENP019025 1G6_H1_L1.148_IgG1_PVA_/S267K Heavy Chain

SEQ ID NO: 16056 - protein, 122 aa, synthetic construct; identical to SEQ ID NO: 6246
  source 1..122: note = Description of Artificial Sequence: Synthetic polypeptide; note = VH of XENP019025

SEQ ID NO: 16057 - protein, 5 aa, synthetic construct
  source 1..5: note = Description of Artificial Sequence: Synthetic peptide; note = XENP019025 vhCDR1
NYWMN

SEQ ID NO: 16058 - protein, 19 aa, synthetic construct
  source 1..19: note = Description of Artificial Sequence: Synthetic peptide; note = XENP019025 vhCDR2
EIRLKSNNYATHYAEPVKG

SEQ ID NO: 16059 - protein, 11 aa, synthetic construct
  source 1..11: note = Description of Artificial Sequence: Synthetic peptide; note = XENP019025 vhCDR3
YYGNYGGYFDV

SEQ ID NO: 16060 - protein, 214 aa, synthetic construct
  source 1..214: note = Description of Artificial Sequence: Synthetic polypeptide; note = XENP019025 1G6_H1_L1.148_IgG1_PVA_/S267K Light Chain
SIVMTQSPATLSASPGERATLSCRASQSVSNDVAWYQQKPGQSPRLLINYASHRYTGVPDRFTGSGYGTEFTLTISSLQSEDFAVYFCQQDYSSPRTFGGGTKVEIKRTVAAPSVFIFPPSDEQLKSGTASVVCLLNNFYPREAKVQWKVDNALQSGNSQESVTEQDSKDSTYSLSSTLTLSKADYEKHKVYACEVTHQGLSSPVTKSFNRGEC

SEQ ID NO: 16061 - protein, 107 aa, synthetic construct; identical to SEQ ID NO: 10375
  source 1..107: note = Description of Artificial Sequence: Synthetic polypeptide; note = VL of XENP019025

SEQ ID NO: 16062 - protein, 11 aa, synthetic construct
  source 1..11: note = Description of Artificial Sequence: Synthetic peptide; note = XENP019025 vlCDR1
RASQSVSNDVA

SEQ ID NO: 16063 - protein, 7 aa, synthetic construct
  source 1..7: note = Description of Artificial Sequence: Synthetic peptide; note = XENP019025 vlCDR2
YASHRYT

SEQ ID NO: 16064 - protein, 9 aa, synthetic construct
  source 1..9: note = Description of Artificial Sequence: Synthetic peptide; note = XENP019025 vlCDR3
QQDYSSPRT

SEQ ID NO: 16065 - protein, 451 aa, synthetic construct; identical to SEQ ID NO: 11545
  source 1..451: note = Description of Artificial Sequence: Synthetic polypeptide; note = XENP019026 1G6_H1_L1.149_IgG1_PVA_/S267K Heavy Chain

SEQ ID NO: 16066 - protein, 122 aa, synthetic construct; identical to SEQ ID NO: 6246
  source 1..122: note = Description of Artificial Sequence: Synthetic polypeptide; note = VH of XENP019026

SEQ ID NO: 16067 - protein, 5 aa, synthetic construct
  source 1..5: note = Description of Artificial Sequence: Synthetic peptide; note = XENP019026 vhCDR1
NYWMN

SEQ ID NO: 16068 - protein, 19 aa, synthetic construct
  source 1..19: note = Description of Artificial Sequence: Synthetic peptide; note = XENP019026 vhCDR2
EIRLKSNNYATHYAEPVKG

SEQ ID NO: 16069 - protein, 11 aa, synthetic construct
  source 1..11: note = Description of Artificial Sequence: Synthetic peptide; note = XENP019026 vhCDR3
YYGNYGGYFDV

SEQ ID NO: 16070 - protein, 214 aa, synthetic construct
  source 1..214: note = Description of Artificial Sequence: Synthetic polypeptide; note = XENP019026 1G6_H1_L1.149_IgG1_PVA_/S267K Light Chain
SIVMTQSPATLSVSPGERASLSCRASQSVSNDVAWYQQKPGQSPRLLINYASHRYTGVPDRFTGSGYGTEFTLTISSLQSEDFAVYFCQQDYSSPRTFGGGTKVEIKRTVAAPSVFIFPPSDEQLKSGTASVVCLLNNFYPREAKVQWKVDNALQSGNSQESVTEQDSKDSTYSLSSTLTLSKADYEKHKVYACEVTHQGLSSPVTKSFNRGEC

SEQ ID NO: 16071 - protein, 107 aa, synthetic construct; identical to SEQ ID NO: 10384
  source 1..107: note = Description of Artificial Sequence: Synthetic polypeptide; note = VL of XENP019026

SEQ ID NO: 16072 - protein, 11 aa, synthetic construct
  source 1..11: note = Description of Artificial Sequence: Synthetic peptide; note = XENP019026 vlCDR1
RASQSVSNDVA

SEQ ID NO: 16073 - protein, 7 aa, synthetic construct
  source 1..7: note = Description of Artificial Sequence: Synthetic peptide; note = XENP019026 vlCDR2
YASHRYT

SEQ ID NO: 16074 - protein, 9 aa, synthetic construct
  source 1..9: note = Description of Artificial Sequence: Synthetic peptide; note = XENP019026 vlCDR3
QQDYSSPRT

SEQ ID NO: 16075 - protein, 451 aa, synthetic construct; identical to SEQ ID NO: 11545
  source 1..451: note = Description of Artificial Sequence: Synthetic polypeptide; note = XENP019027 1G6_H1_L1.150_IgG1_PVA_/S267K Heavy Chain

SEQ ID NO: 16076 - protein, 122 aa, synthetic construct; identical to SEQ ID NO: 6246
  source 1..122: note = Description of Artificial Sequence: Synthetic polypeptide; note = VH of XENP019027

SEQ ID NO: 16077 - protein, 5 aa, synthetic construct
  source 1..5: note = Description of Artificial Sequence: Synthetic peptide; note = XENP019027 vhCDR1
NYWMN

SEQ ID NO: 16078 - protein, 19 aa, synthetic construct
  source 1..19: note = Description of Artificial Sequence: Synthetic peptide; note = XENP019027 vhCDR2
EIRLKSNNYATHYAEPVKG

SEQ ID NO: 16079 - protein, 11 aa, synthetic construct
  source 1..11: note = Description of Artificial Sequence: Synthetic peptide; note = XENP019027 vhCDR3
YYGNYGGYFDV

SEQ ID NO: 16080 - protein, 214 aa, synthetic construct
  source 1..214: note = Description of Artificial Sequence: Synthetic polypeptide; note = XENP019027 1G6_H1_L1.150_IgG1_PVA_/S267K Light Chain
SIVMTQSPATLSVSPGERATLKCRASQSVSNDVAWYQQKPGQSPRLLINYASHRYTGVPDRFTGSGYGTEFTLTISSLQSEDFAVYFCQQDYSSPRTFGGGTKVEIKRTVAAPSVFIFPPSDEQLKSGTASVVCLLNNFYPREAKVQWKVDNALQSGNSQESVTEQDSKDSTYSLSSTLTLSKADYEKHKVYACEVTHQGLSSPVTKSFNRGEC

SEQ ID NO: 16081 - protein, 107 aa, synthetic construct; identical to SEQ ID NO: 10393
  source 1..107: note = Description of Artificial Sequence: Synthetic polypeptide; note = VL of XENP019027

SEQ ID NO: 16082 - protein, 11 aa, synthetic construct
  source 1..11: note = Description of Artificial Sequence: Synthetic peptide; note = XENP019027 vlCDR1
RASQSVSNDVA

SEQ ID NO: 16083 - protein, 7 aa, synthetic construct
  source 1..7: note = Description of Artificial Sequence: Synthetic peptide; note = XENP019027 vlCDR2
YASHRYT

SEQ ID NO: 16084 - protein, 9 aa, synthetic construct
  source 1..9: note = Description of Artificial Sequence: Synthetic peptide; note = XENP019027 vlCDR3
QQDYSSPRT

SEQ ID NO: 16085 - protein, 451 aa, synthetic construct; identical to SEQ ID NO: 11545
  source 1..451: note = Description of Artificial Sequence: Synthetic polypeptide; note = XENP019028 1G6_H1_L1.151_IgG1_PVA_/S267K Heavy Chain

SEQ ID NO: 16086 - protein, 122 aa, synthetic construct; identical to SEQ ID NO: 6246
  source 1..122: note = Description of Artificial Sequence: Synthetic polypeptide; note = VH of XENP019028

SEQ ID NO: 16087 - protein, 5 aa, synthetic construct
  source 1..5: note = Description of Artificial Sequence: Synthetic peptide; note = XENP019028 vhCDR1
NYWMN

SEQ ID NO: 16088 - protein, 19 aa, synthetic construct
  source 1..19: note = Description of Artificial Sequence: Synthetic peptide; note = XENP019028 vhCDR2
EIRLKSNNYATHYAEPVKG

SEQ ID NO: 16089 - protein, 11 aa, synthetic construct
  source 1..11: note = Description of Artificial Sequence: Synthetic peptide; note = XENP019028 vhCDR3
YYGNYGGYFDV

SEQ ID NO: 16090 - protein, 214 aa, synthetic construct
  source 1..214: note = Description of Artificial Sequence: Synthetic polypeptide; note = XENP019028 1G6_H1_L1.151_IgG1_PVA_/S267K Light Chain
SIVMTQSPATLSVSPGERATLSCRASQSVSNDVAWYQQKPEQSPRLLINYASHRYTGVPDRFTGSGYGTEFTLTISSLQSEDFAVYFCQQDYSSPRTFGGGTKVEIKRTVAAPSVFIFPPSDEQLKSGTASVVCLLNNFYPREAKVQWKVDNALQSGNSQESVTEQDSKDSTYSLSSTLTLSKADYEKHKVYACEVTHQGLSSPVTKSFNRGEC

SEQ ID NO: 16091 - protein, 107 aa, synthetic construct; identical to SEQ ID NO: 10402
  source 1..107: note = Description of Artificial Sequence: Synthetic polypeptide; note = VL of XENP019028

SEQ ID NO: 16092 - protein, 11 aa, synthetic construct
  source 1..11: note = Description of Artificial Sequence: Synthetic peptide; note = XENP019028 vlCDR1
RASQSVSNDVA

SEQ ID NO: 16093 - protein, 7 aa, synthetic construct
  source 1..7: note = Description of Artificial Sequence: Synthetic peptide; note = XENP019028 vlCDR2
YASHRYT

SEQ ID NO: 16094 - protein, 9 aa, synthetic construct
  source 1..9: note = Description of Artificial Sequence: Synthetic peptide; note = XENP019028 vlCDR3
QQDYSSPRT

SEQ ID NO: 16095 - protein, 451 aa, synthetic construct; identical to SEQ ID NO: 11545
  source 1..451: note = Description of Artificial Sequence: Synthetic polypeptide; note = XENP019029 1G6_H1_L1.152_IgG1_PVA_/S267K Heavy Chain

SEQ ID NO: 16096 - protein, 122 aa, synthetic construct; identical to SEQ ID NO: 6246
  source 1..122: note = Description of Artificial Sequence: Synthetic polypeptide; note = VH of XENP019029

SEQ ID NO: 16097 - protein, 5 aa, synthetic construct
  source 1..5: note = Description of Artificial Sequence: Synthetic peptide; note = XENP019029 vhCDR1
NYWMN

SEQ ID NO: 16098 - protein, 19 aa, synthetic construct
  source 1..19: note = Description of Artificial Sequence: Synthetic peptide; note = XENP019029 vhCDR2
EIRLKSNNYATHYAEPVKG

SEQ ID NO: 16099 - protein, 11 aa, synthetic construct
  source 1..11: note = Description of Artificial Sequence: Synthetic peptide; note = XENP019029 vhCDR3
YYGNYGGYFDV

SEQ ID NO: 16100 - protein, 214 aa, synthetic construct
  source 1..214: note = Description of Artificial Sequence: Synthetic polypeptide; note = XENP019029 1G6_H1_L1.152_IgG1_PVA_/S267K Light Chain
SIVMTQSPATLSVSPGERATLSCRASQSVSNDVAWYQQKPGESPRLLINYASHRYTGVPDRFTGSGYGTEFTLTISSLQSEDFAVYFCQQDYSSPRTFGGGTKVEIKRTVAAPSVFIFPPSDEQLKSGTASVVCLLNNFYPREAKVQWKVDNALQSGNSQESVTEQDSKDSTYSLSSTLTLSKADYEKHKVYACEVTHQGLSSPVTKSFNRGEC

SEQ ID NO: 16101 - protein, 107 aa, synthetic construct; identical to SEQ ID NO: 10411
  source 1..107: note = Description of Artificial Sequence: Synthetic polypeptide; note = VL of XENP019029

SEQ ID NO: 16102 - protein, 11 aa, synthetic construct
  source 1..11: note = Description of Artificial Sequence: Synthetic peptide; note = XENP019029 vlCDR1
RASQSVSNDVA

SEQ ID NO: 16103 - protein, 7 aa, synthetic construct
  source 1..7: note = Description of Artificial Sequence: Synthetic peptide; note = XENP019029 vlCDR2
YASHRYT

SEQ ID NO: 16104 - protein, 9 aa, synthetic construct
  source 1..9: note = Description of Artificial Sequence: Synthetic peptide; note = XENP019029 vlCDR3
QQDYSSPRT

SEQ ID NO: 16105 - protein, 451 aa, synthetic construct; identical to SEQ ID NO: 11545
  source 1..451: note = Description of Artificial Sequence: Synthetic polypeptide; note = XENP019030 1G6_H1_L1.153_IgG1_PVA_/S267K Heavy Chain

SEQ ID NO: 16106 - protein, 122 aa, synthetic construct; identical to SEQ ID NO: 6246
  source 1..122: note = Description of Artificial Sequence: Synthetic polypeptide; note = VH of XENP019030

SEQ ID NO: 16107 - protein, 5 aa, synthetic construct
  source 1..5: note = Description of Artificial Sequence: Synthetic peptide; note = XENP019030 vhCDR1
NYWMN

SEQ ID NO: 16108 - protein, 19 aa, synthetic construct
  source 1..19: note = Description of Artificial Sequence: Synthetic peptide; note = XENP019030 vhCDR2
EIRLKSNNYATHYAEPVKG

SEQ ID NO: 16109 - protein, 11 aa, synthetic construct
  source 1..11: note = Description of Artificial Sequence: Synthetic peptide; note = XENP019030 vhCDR3
YYGNYGGYFDV

SEQ ID NO: 16110 - protein, 214 aa, synthetic construct
  source 1..214: note = Description of Artificial Sequence: Synthetic polypeptide; note = XENP019030 1G6_H1_L1.153_IgG1_PVA_/S267K Light Chain
SIVMTQSPATLSVSPGERATLSCRASQSVSNDVAWYQQKPGQSPRVLINYASHRYTGVPDRFTGSGYGTEFTLTISSLQSEDFAVYFCQQDYSSPRTFGGGTKVEIKRTVAAPSVFIFPPSDEQLKSGTASVVCLLNNFYPREAKVQWKVDNALQSGNSQESVTEQDSKDSTYSLSSTLTLSKADYEKHKVYACEVTHQGLSSPVTKSFNRGEC

SEQ ID NO: 16111 - protein, 107 aa, synthetic construct; identical to SEQ ID NO: 10420
  source 1..107: note = Description of Artificial Sequence: Synthetic polypeptide; note = VL of XENP019030

SEQ ID NO: 16112 - protein, 11 aa, synthetic construct
  source 1..11: note = Description of Artificial Sequence: Synthetic peptide; note = XENP019030 vlCDR1
RASQSVSNDVA

SEQ ID NO: 16113 - protein, 7 aa, synthetic construct
  source 1..7: note = Description of Artificial Sequence: Synthetic peptide; note = XENP019030 vlCDR2
YASHRYT

SEQ ID NO: 16114 - protein, 9 aa, synthetic construct
  source 1..9: note = Description of Artificial Sequence: Synthetic peptide; note = XENP019030 vlCDR3
QQDYSSPRT

SEQ ID NO: 16115 - protein, 451 aa, synthetic construct; identical to SEQ ID NO: 11545
  source 1..451: note = Description of Artificial Sequence: Synthetic polypeptide; note = XENP019031 1G6_H1_L1.154_IgG1_PVA_/S267K Heavy Chain

SEQ ID NO: 16116 - protein, 122 aa, synthetic construct; identical to SEQ ID NO: 6246
  source 1..122: note = Description of Artificial Sequence: Synthetic polypeptide; note = VH of XENP019031

SEQ ID NO: 16117 - protein, 5 aa, synthetic construct
  source 1..5: note = Description of Artificial Sequence: Synthetic peptide; note = XENP019031 vhCDR1
NYWMN

SEQ ID NO: 16118 - protein, 19 aa, synthetic construct
  source 1..19: note = Description of Artificial Sequence: Synthetic peptide; note = XENP019031 vhCDR2
EIRLKSNNYATHYAEPVKG

SEQ ID NO: 16119 - protein, 11 aa, synthetic construct
  source 1..11: note = Description of Artificial Sequence: Synthetic peptide; note = XENP019031 vhCDR3
YYGNYGGYFDV

SEQ ID NO: 16120 - protein, 214 aa, synthetic construct
  source 1..214: note = Description of Artificial Sequence: Synthetic polypeptide; note = XENP019031 1G6_H1_L1.154_IgG1_PVA_/S267K Light Chain
SIVMTQSPATLSVSPGERATLSCRASQSVSNDVAWYQQKPGQSPRLLVNYASHRYTGVPDRFTGSGYGTEFTLTISSLQSEDFAVYFCQQDYSSPRTFGGGTKVEIKRTVAAPSVFIFPPSDEQLKSGTASVVCLLNNFYPREAKVQWKVDNALQSGNSQESVTEQDSKDSTYSLSSTLTLSKADYEKHKVYACEVTHQGLSSPVTKSFNRGEC

SEQ ID NO: 16121 - protein, 107 aa, synthetic construct; identical to SEQ ID NO: 10429
  source 1..107: note = Description of Artificial Sequence: Synthetic polypeptide; note = VL of XENP019031

SEQ ID NO: 16122 - protein, 11 aa, synthetic construct
  source 1..11: note = Description of Artificial Sequence: Synthetic peptide; note = XENP019031 vlCDR1
RASQSVSNDVA

SEQ ID NO: 16123 - protein, 7 aa, synthetic construct
  source 1..7: note = Description of Artificial Sequence: Synthetic peptide; note = XENP019031 vlCDR2
YASHRYT

SEQ ID NO: 16124 - protein, 9 aa, synthetic construct
  source 1..9: note = Description of Artificial Sequence: Synthetic peptide; note = XENP019031 vlCDR3
QQDYSSPRT

SEQ ID NO: 16125 - protein, 451 aa, synthetic construct; identical to SEQ ID NO: 11545
  source 1..451: note = Description of Artificial Sequence: Synthetic polypeptide; note = XENP019032 1G6_H1_L1.155_IgG1_PVA_/S267K Heavy Chain

SEQ ID NO: 16126 - protein, 122 aa, synthetic construct; identical to SEQ ID NO: 6246
  source 1..122: note = Description of Artificial Sequence: Synthetic polypeptide; note = VH of XENP019032

SEQ ID NO: 16127 - protein, 5 aa, synthetic construct
  source 1..5: note = Description of Artificial Sequence: Synthetic peptide; note = XENP019032 vhCDR1
NYWMN

SEQ ID NO: 16128 - protein, 19 aa, synthetic construct
  source 1..19: note = Description of Artificial Sequence: Synthetic peptide; note = XENP019032 vhCDR2
EIRLKSNNYATHYAEPVKG

SEQ ID NO: 16129 - protein, 11 aa, synthetic construct
  source 1..11: note = Description of Artificial Sequence: Synthetic peptide; note = XENP019032 vhCDR3
YYGNYGGYFDV

SEQ ID NO: 16130 - protein, 214 aa, synthetic construct
  source 1..214: note = Description of Artificial Sequence: Synthetic polypeptide; note = XENP019032 1G6_H1_L1.155_IgG1_PVA_/S267K Light Chain
SIVMTQSPATLSVSPGERATLSCRASQSVSNDVAWYQQKPGQSPRLLINYANHRYTGVPDRFTGSGYGTEFTLTISSLQSEDFAVYFCQQDYSSPRTFGGGTKVEIKRTVAAPSVFIFPPSDEQLKSGTASVVCLLNNFYPREAKVQWKVDNALQSGNSQESVTEQDSKDSTYSLSSTLTLSKADYEKHKVYACEVTHQGLSSPVTKSFNRGEC

SEQ ID NO: 16131 - protein, 107 aa, synthetic construct; identical to SEQ ID NO: 10438
  source 1..107: note = Description of Artificial Sequence: Synthetic polypeptide; note = VL of XENP019032

SEQ ID NO: 16132 - protein, 11 aa, synthetic construct
  source 1..11: note = Description of Artificial Sequence: Synthetic peptide; note = XENP019032 vlCDR1
RASQSVSNDVA

SEQ ID NO: 16133 - protein, 7 aa, synthetic construct
  source 1..7: note = Description of Artificial Sequence: Synthetic peptide; note = XENP019032 vlCDR2
YANHRYT

SEQ ID NO: 16134 - protein, 9 aa, synthetic construct
  source 1..9: note = Description of Artificial Sequence: Synthetic peptide; note = XENP019032 vlCDR3
QQDYSSPRT

SEQ ID NO: 16135 - protein, 451 aa, synthetic construct; identical to SEQ ID NO: 11545
  source 1..451: note = Description of Artificial Sequence: Synthetic polypeptide; note = XENP019033 1G6_H1_L1.156_IgG1_PVA_/S267K Heavy Chain

SEQ ID NO: 16136 - protein, 122 aa, synthetic construct; identical to SEQ ID NO: 6246
  source 1..122: note = Description of Artificial Sequence: Synthetic polypeptide; note = VH of XENP019033

SEQ ID NO: 16137 - protein, 5 aa, synthetic construct
  source 1..5: note = Description of Artificial Sequence: Synthetic peptide; note = XENP019033 vhCDR1
NYWMN

SEQ ID NO: 16138 - protein, 19 aa, synthetic construct
  source 1..19: note = Description of Artificial Sequence: Synthetic peptide; note = XENP019033 vhCDR2
EIRLKSNNYATHYAEPVKG

SEQ ID NO: 16139 - protein, 11 aa, synthetic construct
  source 1..11: note = Description of Artificial Sequence: Synthetic peptide; note = XENP019033 vhCDR3
YYGNYGGYFDV

SEQ ID NO: 16140 - protein, 214 aa, synthetic construct
  source 1..214: note = Description of Artificial Sequence: Synthetic polypeptide; note = XENP019033 1G6_H1_L1.156_IgG1_PVA_/S267K Light Chain
SIVMTQSPATLSVSPGERATLSCRASQSVSNDVAWYQQKPGQSPRLLINYASHRYTGVPDRFTGSGYGTEFTLTISSLESEDFAVYFCQQDYSSPRTFGGGTKVEIKRTVAAPSVFIFPPSDEQLKSGTASVVCLLNNFYPREAKVQWKVDNALQSGNSQESVTEQDSKDSTYSLSSTLTLSKADYEKHKVYACEVTHQGLSSPVTKSFNRGEC

SEQ ID NO: 16141 - protein, 107 aa, synthetic construct; identical to SEQ ID NO: 10447
  source 1..107: note = Description of Artificial Sequence: Synthetic polypeptide; note = VL of XENP019033

SEQ ID NO: 16142 - protein, 11 aa, synthetic construct
  source 1..11: note = Description of Artificial Sequence: Synthetic peptide; note = XENP019033 vlCDR1
RASQSVSNDVA

SEQ ID NO: 16143 - protein, 7 aa, synthetic construct
  source 1..7: note = Description of Artificial Sequence: Synthetic peptide; note = XENP019033 vlCDR2
YASHRYT

SEQ ID NO: 16144 - protein, 9 aa, synthetic construct
  source 1..9: note = Description of Artificial Sequence: Synthetic peptide; note = XENP019033 vlCDR3
QQDYSSPRT

SEQ ID NO: 16145 - protein, 451 aa, synthetic construct; identical to SEQ ID NO: 11545
  source 1..451: note = Description of Artificial Sequence: Synthetic polypeptide; note = XENP019034 1G6_H1_L1.157_IgG1_PVA_/S267K Heavy Chain

SEQ ID NO: 16146 - protein, 122 aa, synthetic construct; identical to SEQ ID NO: 6246
  source 1..122: note = Description of Artificial Sequence: Synthetic polypeptide; note = VH of XENP019034

SEQ ID NO: 16147 - protein, 5 aa, synthetic construct
  source 1..5: note = Description of Artificial Sequence: Synthetic peptide; note = XENP019034 vhCDR1
NYWMN

SEQ ID NO: 16148 - protein, 19 aa, synthetic construct
  source 1..19: note = Description of Artificial Sequence: Synthetic peptide; note = XENP019034 vhCDR2
EIRLKSNNYATHYAEPVKG

SEQ ID NO: 16149 - protein, 11 aa, synthetic construct
  source 1..11: note = Description of Artificial Sequence: Synthetic peptide; note = XENP019034 vhCDR3
YYGNYGGYFDV

SEQ ID NO: 16150 - protein, 214 aa, synthetic construct
  source 1..214: note = Description of Artificial Sequence: Synthetic polypeptide; note = XENP019034 1G6_H1_L1.157_IgG1_PVA_/S267K Light Chain
SIVMTQSPATLSVSPGERATLSCRASQSVSNDVAWYQQKPGQSPRLLINYASHRYTGVPDRFTGSGYGTEFTLTISSLKSEDFAVYFCQQDYSSPRTFGGGTKVEIKRTVAAPSVFIFPPSDEQLKSGTASVVCLLNNFYPREAKVQWKVDNALQSGNSQESVTEQDSKDSTYSLSSTLTLSKADYEKHKVYACEVTHQGLSSPVTKSFNRGEC

SEQ ID NO: 16151 - protein, 107 aa, synthetic construct; identical to SEQ ID NO: 10456
  source 1..107: note = Description of Artificial Sequence: Synthetic polypeptide; note = VL of XENP019034

SEQ ID NO: 16152 - protein, 11 aa, synthetic construct
  source 1..11: note = Description of Artificial Sequence: Synthetic peptide; note = XENP019034 vlCDR1
RASQSVSNDVA

SEQ ID NO: 16153 - protein, 7 aa, synthetic construct
  source 1..7: note = Description of Artificial Sequence: Synthetic peptide; note = XENP019034 vlCDR2
YASHRYT

SEQ ID NO: 16154 - protein, 9 aa, synthetic construct
  source 1..9: note = Description of Artificial Sequence: Synthetic peptide; note = XENP019034 vlCDR3
QQDYSSPRT

SEQ ID NO: 16155 - protein, 451 aa, synthetic construct; identical to SEQ ID NO: 11545
  source 1..451: note = Description of Artificial Sequence: Synthetic polypeptide; note = XENP019035 1G6_H1_L1.158_IgG1_PVA_/S267K Heavy Chain

SEQ ID NO: 16156 - protein, 122 aa, synthetic construct; identical to SEQ ID NO: 6246
  source 1..122: note = Description of Artificial Sequence: Synthetic polypeptide; note = VH of XENP019035

SEQ ID NO: 16157 - protein, 5 aa, synthetic construct
  source 1..5: note = Description of Artificial Sequence: Synthetic peptide; note = XENP019035 vhCDR1
NYWMN

SEQ ID NO: 16158 - protein, 19 aa, synthetic construct
  source 1..19: note = Description of Artificial Sequence: Synthetic peptide; note = XENP019035 vhCDR2
EIRLKSNNYATHYAEPVKG

SEQ ID NO: 16159 - protein, 11 aa, synthetic construct
  source 1..11: note = Description of Artificial Sequence: Synthetic peptide; note = XENP019035 vhCDR3
YYGNYGGYFDV

SEQ ID NO: 16160 - protein, 214 aa, synthetic construct
  source 1..214: note = Description of Artificial Sequence: Synthetic polypeptide; note = XENP019035 1G6_H1_L1.158_IgG1_PVA_/S267K Light Chain
SIVMTQSPATLSVSPGERATLSCRASQSVSNDVAWYQQKPGQSPRLLINYASHRYTGVPDRFTGSGYGTEFTLTISSLQSEDFGVYFCQQDYSSPRTFGGGTKVEIKRTVAAPSVFIFPPSDEQLKSGTASVVCLLNNFYPREAKVQWKVDNALQSGNSQESVTEQDSKDSTYSLSSTLTLSKADYEKHKVYACEVTHQGLSSPVTKSFNRGEC

SEQ ID NO: 16161 - protein, 107 aa, synthetic construct; identical to SEQ ID NO: 10465
  source 1..107: note = Description of Artificial Sequence: Synthetic polypeptide; note = VL of XENP019035

SEQ ID NO: 16162 - protein, 11 aa, synthetic construct
  source 1..11: note = Description of Artificial Sequence: Synthetic peptide; note = XENP019035 vlCDR1
RASQSVSNDVA

SEQ ID NO: 16163 - protein, 7 aa, synthetic construct
  source 1..7: note = Description of Artificial Sequence: Synthetic peptide; note = XENP019035 vlCDR2
YASHRYT

SEQ ID NO: 16164 - protein, 9 aa, synthetic construct
  source 1..9: note = Description of Artificial Sequence: Synthetic peptide; note = XENP019035 vlCDR3
QQDYSSPRT

SEQ ID NO: 16165 - protein, 451 aa, synthetic construct; identical to SEQ ID NO: 11545
  source 1..451: note = Description of Artificial Sequence: Synthetic polypeptide; note = XENP019036 1G6_H1_L1.159_IgG1_PVA_/S267K Heavy Chain

SEQ ID NO: 16166 - protein, 122 aa, synthetic construct; identical to SEQ ID NO: 6246
  source 1..122: note = Description of Artificial Sequence: Synthetic polypeptide; note = VH of XENP019036

SEQ ID NO: 16167 - protein, 5 aa, synthetic construct
  source 1..5: note = Description of Artificial Sequence: Synthetic peptide; note = XENP019036 vhCDR1
NYWMN

SEQ ID NO: 16168 - protein, 19 aa, synthetic construct
  source 1..19: note = Description of Artificial Sequence: Synthetic peptide; note = XENP019036 vhCDR2
EIRLKSNNYATHYAEPVKG

SEQ ID NO: 16169 - protein, 11 aa, synthetic construct
  source 1..11: note = Description of Artificial Sequence: Synthetic peptide; note = XENP019036 vhCDR3
YYGNYGGYFDV

SEQ ID NO: 16170 - protein, 214 aa, synthetic construct
  source 1..214: note = Description of Artificial Sequence: Synthetic polypeptide; note = XENP019036 1G6_H1_L1.159_IgG1_PVA_/S267K Light Chain
SIVMTQSPATLSVSPGERATLSCRASQSVSNDVAWYQQKPGQSPRLLINYASHRYTGVPDRFTGSGYGTEFTLTISSLQSEDFAVYFCKQDYSSPRTFGGGTKVEIKRTVAAPSVFIFPPSDEQLKSGTASVVCLLNNFYPREAKVQWKVDNALQSGNSQESVTEQDSKDSTYSLSSTLTLSKADYEKHKVYACEVTHQGLSSPVTKSFNRGEC

SEQ ID NO: 16171 - protein, 107 aa, synthetic construct; identical to SEQ ID NO: 10474
  source 1..107: note = Description of Artificial Sequence: Synthetic polypeptide; note = VL of XENP019036

SEQ ID NO: 16172 - protein, 11 aa, synthetic construct
  source 1..11: note = Description of Artificial Sequence: Synthetic peptide; note = XENP019036 vlCDR1
RASQSVSNDVA

SEQ ID NO: 16173 - protein, 7 aa, synthetic construct
  source 1..7: note = Description of Artificial Sequence: Synthetic peptide; note = XENP019036 vlCDR2
YASHRYT

SEQ ID NO: 16174 - protein, 9 aa, synthetic construct
  source 1..9: note = Description of Artificial Sequence: Synthetic peptide; note = XENP019036 vlCDR3
KQDYSSPRT

SEQ ID NO: 16175 - protein, 451 aa, synthetic construct; identical to SEQ ID NO: 11545
  source 1..451: note = Description of Artificial Sequence: Synthetic polypeptide; note = XENP019037 1G6_H1_L1.160_IgG1_PVA_/S267K Heavy Chain

SEQ ID NO: 16176 - protein, 122 aa, synthetic construct; identical to SEQ ID NO: 6246
  source 1..122: note = Description of Artificial Sequence: Synthetic polypeptide; note = VH of XENP019037

SEQ ID NO: 16177 - protein, 5 aa, synthetic construct
  source 1..5: note = Description of Artificial Sequence: Synthetic peptide; note = XENP019037 vhCDR1
NYWMN

SEQ ID NO: 16178 - protein, 19 aa, synthetic construct
  source 1..19: note = Description of Artificial Sequence: Synthetic peptide; note = XENP019037 vhCDR2
EIRLKSNNYATHYAEPVKG

SEQ ID NO: 16179 - protein, 11 aa, synthetic construct
  source 1..11: note = Description of Artificial Sequence: Synthetic peptide; note = XENP019037 vhCDR3
YYGNYGGYFDV

SEQ ID NO: 16180 - protein, 214 aa, synthetic construct
  source 1..214: note = Description of Artificial Sequence: Synthetic polypeptide; note = XENP019037 1G6_H1_L1.160_IgG1_PVA_/S267K Light Chain
SIVMTQSPATLSVSPGERATLSCRASQSVSNDVAWYQQKPGQSPRLLINYASHRYTGVPDRFTGSGYGTEFTLTISSLQSEDFAVYFCQKDYSSPRTFGGGTKVEIKRTVAAPSVFIFPPSDEQLKSGTASVVCLLNNFYPREAKVQWKVDNALQSGNSQESVTEQDSKDSTYSLSSTLTLSKADYEKHKVYACEVTHQGLSSPVTKSFNRGEC

SEQ ID NO: 16181 - protein, 107 aa, synthetic construct; identical to SEQ ID NO: 10483
  source 1..107: note = Description of Artificial Sequence: Synthetic polypeptide; note = VL of XENP019037

SEQ ID NO: 16182 - protein, 11 aa, synthetic construct
  source 1..11: note = Description of Artificial Sequence: Synthetic peptide; note = XENP019037 vlCDR1
RASQSVSNDVA

SEQ ID NO: 16183 - protein, 7 aa, synthetic construct
  source 1..7: note = Description of Artificial Sequence: Synthetic peptide; note = XENP019037 vlCDR2
YASHRYT

SEQ ID NO: 16184 - protein, 9 aa, synthetic construct
  source 1..9: note = Description of Artificial Sequence: Synthetic peptide; note = XENP019037 vlCDR3
QKDYSSPRT

SEQ ID NO: 16185 - protein, 451 aa, synthetic construct; identical to SEQ ID NO: 11545
  source 1..451: note = Description of Artificial Sequence: Synthetic polypeptide; note = XENP019038 1G6_H1_L1.161_IgG1_PVA_/S267K Heavy Chain

SEQ ID NO: 16186 - protein, 122 aa, synthetic construct; identical to SEQ ID NO: 6246
  source 1..122: note = Description of Artificial Sequence: Synthetic polypeptide; note = VH of XENP019038

SEQ ID NO: 16187 - protein, 5 aa, synthetic construct
  source 1..5: note = Description of Artificial Sequence: Synthetic peptide; note = XENP019038 vhCDR1
NYWMN

SEQ ID NO: 16188 - protein, 19 aa, synthetic construct
  source 1..19: note = Description of Artificial Sequence: Synthetic peptide; note = XENP019038 vhCDR2
EIRLKSNNYATHYAEPVKG

SEQ ID NO: 16189 - protein, 11 aa, synthetic construct
  source 1..11: note = Description of Artificial Sequence: Synthetic peptide; note = XENP019038 vhCDR3
YYGNYGGYFDV

SEQ ID NO: 16190 - protein, 214 aa, synthetic construct
  source 1..214: note = Description of Artificial Sequence: Synthetic polypeptide; note = XENP019038 1G6_H1_L1.161_IgG1_PVA_/S267K Light Chain
SIVMTQSPATLSVSPGERATLSCRASQSVSNDVAWYQQKPGQSPRLLINYASHRYTGVPDRFTGSGYGTEFTLTISSLQSEDFAVYFCQNDYSSPRTFGGGTKVEIKRTVAAPSVFIFPPSDEQLKSGTASVVCLLNNFYPREAKVQWKVDNALQSGNSQESVTEQDSKDSTYSLSSTLTLSKADYEKHKVYACEVTHQGLSSPVTKSFNRGEC

SEQ ID NO: 16191 - protein, 107 aa, synthetic construct; identical to SEQ ID NO: 10492
  source 1..107: note = Description of Artificial Sequence: Synthetic polypeptide; note = VL of XENP019038

SEQ ID NO: 16192 - protein, 11 aa, synthetic construct
  source 1..11: note = Description of Artificial Sequence: Synthetic peptide; note = XENP019038 vlCDR1
RASQSVSNDVA

SEQ ID NO: 16193 - protein, 7 aa, synthetic construct
  source 1..7: note = Description of Artificial Sequence: Synthetic peptide; note = XENP019038 vlCDR2
YASHRYT

SEQ ID NO: 16194 - protein, 9 aa, synthetic construct
  source 1..9: note = Description of Artificial Sequence: Synthetic peptide; note = XENP019038 vlCDR3
QNDYSSPRT

SEQ ID NO: 16195 - protein, 451 aa, synthetic construct; identical to SEQ ID NO: 11545
  source 1..451: note = Description of Artificial Sequence: Synthetic polypeptide; note = XENP019039 1G6_H1_L1.162_IgG1_PVA_/S267K Heavy Chain

SEQ ID NO: 16196 - protein, 122 aa, synthetic construct; identical to SEQ ID NO: 6246
  source 1..122: note = Description of Artificial Sequence: Synthetic polypeptide; note = VH of XENP019039

SEQ ID NO: 16197 - protein, 5 aa, synthetic construct
  source 1..5: note = Description of Artificial Sequence: Synthetic peptide; note = XENP019039 vhCDR1
NYWMN

SEQ ID NO: 16198 - protein, 19 aa, synthetic construct
  source 1..19: note = Description of Artificial Sequence: Synthetic peptide; note = XENP019039 vhCDR2
EIRLKSNNYATHYAEPVKG

SEQ ID NO: 16199 - protein, 11 aa, synthetic construct
  source 1..11: note = Description of Artificial Sequence: Synthetic peptide; note = XENP019039 vhCDR3
YYGNYGGYFDV

SEQ ID NO: 16200 - protein, 214 aa, synthetic construct
  source 1..214: note = Description of Artificial Sequence: Synthetic polypeptide; note = XENP019039 1G6_H1_L1.162_IgG1_PVA_/S267K Light Chain
SIVMTQSPATLSVSPGERATLSCRASQSVSNDVAWYQQKPGQSPRLLINYASHRYTGVPDRFTGSGYGTEFTLTISSLQSEDFAVYFCQRDYSSPRTFGGGTKVEIKRTVAAPSVFIFPPSDEQLKSGTASVVCLLNNFYPREAKVQWKVDNALQSGNSQESVTEQDSKDSTYSLSSTLTLSKADYEKHKVYACEVTHQGLSSPVTKSFNRGEC

SEQ ID NO: 16201 - protein, 107 aa, synthetic construct; identical to SEQ ID NO: 10501
  source 1..107: note = Description of Artificial Sequence: Synthetic polypeptide; note = VL of XENP019039

SEQ ID NO: 16202 - protein, 11 aa, synthetic construct
  source 1..11: note = Description of Artificial Sequence: Synthetic peptide; note = XENP019039 vlCDR1
RASQSVSNDVA

SEQ ID NO: 16203 - protein, 7 aa, synthetic construct
  source 1..7: note = Description of Artificial Sequence: Synthetic peptide; note = XENP019039 vlCDR2
YASHRYT

SEQ ID NO: 16204 - protein, 9 aa, synthetic construct
  source 1..9: note = Description of Artificial Sequence: Synthetic peptide; note = XENP019039 vlCDR3
QRDYSSPRT

SEQ ID NO: 16205 - protein, 451 aa, synthetic construct; identical to SEQ ID NO: 11545
  source 1..451: note = Description of Artificial Sequence: Synthetic polypeptide; note = XENP019040 1G6_H1_L1.163_IgG1_PVA_/S267K Heavy Chain

SEQ ID NO: 16206 - protein, 122 aa, synthetic construct; identical to SEQ ID NO: 6246
  source 1..122: note = Description of Artificial Sequence: Synthetic polypeptide; note = VH of XENP019040

SEQ ID NO: 16207 - protein, 5 aa, synthetic construct
  source 1..5: note = Description of Artificial Sequence: Synthetic peptide; note = XENP019040 vhCDR1
NYWMN

SEQ ID NO: 16208 - protein, 19 aa, synthetic construct
  source 1..19: note = Description of Artificial Sequence: Synthetic peptide; note = XENP019040 vhCDR2
EIRLKSNNYATHYAEPVKG

SEQ ID NO: 16209 - protein, 11 aa, synthetic construct
  source 1..11: note = Description of Artificial Sequence: Synthetic peptide; note = XENP019040 vhCDR3
YYGNYGGYFDV

SEQ ID NO: 16210 - protein, 214 aa, synthetic construct
  source 1..214: note = Description of Artificial Sequence: Synthetic polypeptide; note = XENP019040 1G6_H1_L1.163_IgG1_PVA_/S267K Light Chain
SIVMTQSPATLSVSPGEPATLSCRASQSVSNDVAWYQQKPGQSPRLLINYASHRYTGVPDRFTGSGYGTEFTLTISRLQSEDFAVYFCQQDYSSPRTFGGGTKVEIKRTVAAPSVFIFPPSDEQLKSGTASVVCLLNNFYPREAKVQWKVDNALQSGNSQESVTEQDSKDSTYSLSSTLTLSKADYEKHKVYACEVTHQGLSSPVTKSFNRGEC

SEQ ID NO: 16211 - protein, 107 aa, synthetic construct; identical to SEQ ID NO: 10510
  source 1..107: note = Description of Artificial Sequence: Synthetic polypeptide; note = VL of XENP019040

SEQ ID NO: 16212 - protein, 11 aa, synthetic construct
  source 1..11: note = Description of Artificial Sequence: Synthetic peptide; note = XENP019040 vlCDR1
RASQSVSNDVA

SEQ ID NO: 16213 - protein, 7 aa, synthetic construct
  source 1..7: note = Description of Artificial Sequence: Synthetic peptide; note = XENP019040 vlCDR2
YASHRYT

SEQ ID NO: 16214 - protein, 9 aa, synthetic construct
  source 1..9: note = Description of Artificial Sequence: Synthetic peptide; note = XENP019040 vlCDR3
QQDYSSPRT

SEQ ID NO: 16215 - protein, 451 aa, synthetic construct; identical to SEQ ID NO: 11545
  source 1..451: note = Description of Artificial Sequence: Synthetic polypeptide; note = XENP019041 1G6_H1_L1.164_IgG1_PVA_/S267K Heavy Chain

SEQ ID NO: 16216 - protein, 122 aa, synthetic construct; identical to SEQ ID NO: 6246
  source 1..122: note = Description of Artificial Sequence: Synthetic polypeptide; note = VH of XENP019041

SEQ ID NO: 16217 - protein, 5 aa, synthetic construct
  source 1..5: note = Description of Artificial Sequence: Synthetic peptide; note = XENP019041 vhCDR1
NYWMN

SEQ ID NO: 16218 - protein, 19 aa, synthetic construct
  source 1..19: note = Description of Artificial Sequence: Synthetic peptide; note = XENP019041 vhCDR2
EIRLKSNNYATHYAEPVKG

SEQ ID NO: 16219 - protein, 11 aa, synthetic construct
  source 1..11: note = Description of Artificial Sequence: Synthetic peptide; note = XENP019041 vhCDR3
YYGNYGGYFDV

SEQ ID NO: 16220 - protein, 214 aa, synthetic construct
  source 1..214: note = Description of Artificial Sequence: Synthetic polypeptide; note = XENP019041 1G6_H1_L1.164_IgG1_PVA_/S267K Light Chain
SIVMTQSPATLSVSPGERATLSCRASESVSNDVAWYQQKPGQSPRLLINYASHRYTGVPDRFTGSGYGTEFTLTISSLQSEDFAVYFCQKDYSSPRTFGGGTKVEIKRTVAAPSVFIFPPSDEQLKSGTASVVCLLNNFYPREAKVQWKVDNALQSGNSQESVTEQDSKDSTYSLSSTLTLSKADYEKHKVYACEVTHQGLSSPVTKSFNRGEC

SEQ ID NO: 16221 - protein, 107 aa, synthetic construct; identical to SEQ ID NO: 10519
  source 1..107: note = Description of Artificial Sequence: Synthetic polypeptide; note = VL of XENP019041

SEQ ID NO: 16222 - protein, 11 aa, synthetic construct
  source 1..11: note = Description of Artificial Sequence: Synthetic peptide; note = XENP019041 vlCDR1
RASESVSNDVA

SEQ ID NO: 16223 - protein, 7 aa, synthetic construct
  source 1..7: note = Description of Artificial Sequence: Synthetic peptide; note = XENP019041 vlCDR2
YASHRYT

SEQ ID NO: 16224 - protein, 9 aa, synthetic construct
  source 1..9: note = Description of Artificial Sequence: Synthetic peptide; note = XENP019041 vlCDR3
QKDYSSPRT

SEQ ID NO: 16225 - protein, 451 aa, synthetic construct; identical to SEQ ID NO: 11545
  source 1..451: note = Description of Artificial Sequence: Synthetic polypeptide; note = XENP019042 1G6_H1_L1.165_IgG1_PVA_/S267K Heavy Chain

SEQ ID NO: 16226 - protein, 122 aa, synthetic construct; identical to SEQ ID NO: 6246
  source 1..122: note = Description of Artificial Sequence: Synthetic polypeptide; note = VH of XENP019042

SEQ ID NO: 16227 - protein, 5 aa, synthetic construct
  source 1..5: note = Description of Artificial Sequence: Synthetic peptide; note = XENP019042 vhCDR1
NYWMN

SEQ ID NO: 16228 - protein, 19 aa, synthetic construct
  source 1..19: note = Description of Artificial Sequence: Synthetic peptide; note = XENP019042 vhCDR2
EIRLKSNNYATHYAEPVKG

SEQ ID NO: 16229 - protein, 11 aa, synthetic construct
  source 1..11: note = Description of Artificial Sequence: Synthetic peptide; note = XENP019042 vhCDR3
YYGNYGGYFDV

SEQ ID NO: 16230 - protein, 214 aa, synthetic construct
  source 1..214: note = Description of Artificial Sequence: Synthetic polypeptide; note = XENP019042 1G6_H1_L1.165_IgG1_PVA_/S267K Light Chain
SIVMTQSPATLSVSPGERATLSCRASESVSNDVAWYQQKPGQSPRLLINYASHRYTGVPDRFTGSGYGTEFTLTISSLQSEDFAVYFCQQDYKSPRTFGGGTKVEIKRTVAAPSVFIFPPSDEQLKSGTASVVCLLNNFYPREAKVQWKVDNALQSGNSQESVTEQDSKDSTYSLSSTLTLSKADYEKHKVYACEVTHQGLSSPVTKSFNRGEC

SEQ ID NO: 16231 - protein, 107 aa, synthetic construct; identical to SEQ ID NO: 10528
  source 1..107: note = Description of Artificial Sequence: Synthetic polypeptide; note = VL of XENP019042

SEQ ID NO: 16232 - protein, 11 aa, synthetic construct
  source 1..11: note = Description of Artificial Sequence: Synthetic peptide; note = XENP019042 vlCDR1
RASESVSNDVA

SEQ ID NO: 16233 - protein, 7 aa, synthetic construct
  source 1..7: note = Description of Artificial Sequence: Synthetic peptide; note = XENP019042 vlCDR2
YASHRYT

SEQ ID NO: 16234 - protein, 9 aa, synthetic construct
  source 1..9: note = Description of Artificial Sequence: Synthetic peptide; note = XENP019042 vlCDR3
QQDYKSPRT

SEQ ID NO: 16235 - protein, 451 aa, synthetic construct; identical to SEQ ID NO: 11545
  source 1..451: note = Description of Artificial Sequence: Synthetic polypeptide; note = XENP019043 1G6_H1_L1.166_IgG1_PVA_/S267K Heavy Chain

SEQ ID NO: 16236 - protein, 122 aa, synthetic construct; identical to SEQ ID NO: 6246
  source 1..122: note = Description of Artificial Sequence: Synthetic polypeptide; note = VH of XENP019043

SEQ ID NO: 16237 - protein, 5 aa, synthetic construct
  source 1..5: note = Description of Artificial Sequence: Synthetic peptide; note = XENP019043 vhCDR1
NYWMN

SEQ ID NO: 16238 - protein, 19 aa, synthetic construct
  source 1..19: note = Description of Artificial Sequence: Synthetic peptide; note = XENP019043 vhCDR2
EIRLKSNNYATHYAEPVKG

SEQ ID NO: 16239 - protein, 11 aa, synthetic construct
  source 1..11: note = Description of Artificial Sequence: Synthetic peptide; note = XENP019043 vhCDR3
YYGNYGGYFDV

SEQ ID NO: 16240 - protein, 214 aa, synthetic construct
  source 1..214: note = Description of Artificial Sequence: Synthetic polypeptide; note = XENP019043 1G6_H1_L1.166_IgG1_PVA_/S267K Light Chain
SIVMTQSPATLSVSPGERATLSCRASQSVSNDVAWYRQKPEQSPRLLINYASHRYTGVPDRFTGSGYGTEFTLTISSLQSEDFAVYFCQQDYSSPRTFGGGTKVEIKRTVAAPSVFIFPPSDEQLKSGTASVVCLLNNFYPREAKVQWKVDNALQSGNSQESVTEQDSKDSTYSLSSTLTLSKADYEKHKVYACEVTHQGLSSPVTKSFNRGEC

SEQ ID NO: 16241 - protein, 107 aa, synthetic construct; identical to SEQ ID NO: 10537
  source 1..107: note = Description of Artificial Sequence: Synthetic polypeptide; note = VL of XENP019043

SEQ ID NO: 16242 - protein, 11 aa, synthetic construct
  source 1..11: note = Description of Artificial Sequence: Synthetic peptide; note = XENP019043 vlCDR1
RASQSVSNDVA

SEQ ID NO: 16243 - protein, 7 aa, synthetic construct
  source 1..7: note = Description of Artificial Sequence: Synthetic peptide; note = XENP019043 vlCDR2
YASHRYT

SEQ ID NO: 16244 - protein, 9 aa, synthetic construct
  source 1..9: note = Description of Artificial Sequence: Synthetic peptide; note = XENP019043 vlCDR3
QQDYSSPRT

SEQ ID NO: 16245 - protein, 451 aa, synthetic construct; identical to SEQ ID NO: 11545
  source 1..451: note = Description of Artificial Sequence: Synthetic polypeptide; note = XENP019044 1G6_H1_L1.167_IgG1_PVA_/S267K Heavy Chain

SEQ ID NO: 16246 - protein, 122 aa, synthetic construct; identical to SEQ ID NO: 6246
  source 1..122: note = Description of Artificial Sequence: Synthetic polypeptide; note = VH of XENP019044

SEQ ID NO: 16247 - protein, 5 aa, synthetic construct
  source 1..5: note = Description of Artificial Sequence: Synthetic peptide; note = XENP019044 vhCDR1
NYWMN

SEQ ID NO: 16248 - protein, 19 aa, synthetic construct
  source 1..19: note = Description of Artificial Sequence: Synthetic peptide; note = XENP019044 vhCDR2
EIRLKSNNYATHYAEPVKG

SEQ ID NO: 16249 - protein, 11 aa, synthetic construct
  source 1..11: note = Description of Artificial Sequence: Synthetic peptide; note = XENP019044 vhCDR3
YYGNYGGYFDV

SEQ ID NO: 16250 - protein, 214 aa, synthetic construct
  source 1..214: note = Description of Artificial Sequence: Synthetic polypeptide; note = XENP019044 1G6_H1_L1.167_IgG1_PVA_/S267K Light Chain
SIVMTQSPATLSVSPGERATLSCRASQSVSNDVAWYRQKPGESPRLLINYASHRYTGVPDRFTGSGYGTEFTLTISSLQSEDFAVYFCQQDYSSPRTFGGGTKVEIKRTVAAPSVFIFPPSDEQLKSGTASVVCLLNNFYPREAKVQWKVDNALQSGNSQESVTEQDSKDSTYSLSSTLTLSKADYEKHKVYACEVTHQGLSSPVTKSFNRGEC

SEQ ID NO: 16251 - protein, 107 aa, synthetic construct; identical to SEQ ID NO: 10546
  source 1..107: note = Description of Artificial Sequence: Synthetic polypeptide; note = VL of XENP019044

SEQ ID NO: 16252 - protein, 11 aa, synthetic construct
  source 1..11: note = Description of Artificial Sequence: Synthetic peptide; note = XENP019044 vlCDR1
RASQSVSNDVA

SEQ ID NO: 16253 - protein, 7 aa, synthetic construct
  source 1..7: note = Description of Artificial Sequence: Synthetic peptide; note = XENP019044 vlCDR2
YASHRYT

SEQ ID NO: 16254 - protein, 9 aa, synthetic construct
  source 1..9: note = Description of Artificial Sequence: Synthetic peptide; note = XENP019044 vlCDR3
QQDYSSPRT

SEQ ID NO: 16255 - protein, 451 aa, synthetic construct; identical to SEQ ID NO: 11545
  source 1..451: note = Description of Artificial Sequence: Synthetic polypeptide; note = XENP019045 1G6_H1_L1.168_IgG1_PVA_/S267K Heavy Chain

SEQ ID NO: 16256 - protein, 122 aa, synthetic construct; identical to SEQ ID NO: 6246
  source 1..122: note = Description of Artificial Sequence: Synthetic polypeptide; note = VH of XENP019045

SEQ ID NO: 16257 - protein, 5 aa, synthetic construct
  source 1..5: note = Description of Artificial Sequence: Synthetic peptide; note = XENP019045 vhCDR1
NYWMN

SEQ ID NO: 16258 - protein, 19 aa, synthetic construct
  source 1..19: note = Description of Artificial Sequence: Synthetic peptide; note = XENP019045 vhCDR2
EIRLKSNNYATHYAEPVKG

SEQ ID NO: 16259 - protein, 11 aa, synthetic construct
  source 1..11: note = Description of Artificial Sequence: Synthetic peptide; note = XENP019045 vhCDR3
YYGNYGGYFDV

SEQ ID NO: 16260 - protein, 214 aa, synthetic construct
  source 1..214: note = Description of Artificial Sequence: Synthetic polypeptide; note = XENP019045 1G6_H1_L1.168_IgG1_PVA_/S267K Light Chain
SIVMTQSPATLSVSPGERATLSCRASQSVSNDVAWYQQKPGQSPRLLINYASWRYTGVPDRFTGSGYGTEFTLTISSLQSEDFAVYFCQQDFSSPRTFGGGTKVEIKRTVAAPSVFIFPPSDEQLKSGTASVVCLLNNFYPREAKVQWKVDNALQSGNSQESVTEQDSKDSTYSLSSTLTLSKADYEKHKVYACEVTHQGLSSPVTKSFNRGEC

SEQ ID NO: 16261 - protein, 107 aa, synthetic construct; identical to SEQ ID NO: 10555
  source 1..107: note = Description of Artificial Sequence: Synthetic polypeptide; note = VL of XENP019045

SEQ ID NO: 16262 - protein, 11 aa, synthetic construct
  source 1..11: note = Description of Artificial Sequence: Synthetic peptide; note = XENP019045 vlCDR1
RASQSVSNDVA

SEQ ID NO: 16263 - protein, 7 aa, synthetic construct
  source 1..7: note = Description of Artificial Sequence: Synthetic peptide; note = XENP019045 vlCDR2
YASWRYT

SEQ ID NO: 16264 - protein, 9 aa, synthetic construct
  source 1..9: note = Description of Artificial Sequence: Synthetic peptide; note = XENP019045 vlCDR3
QQDFSSPRT

SEQ ID NO: 16265 - protein, 451 aa, synthetic construct; identical to SEQ ID NO: 11545
  source 1..451: note = Description of Artificial Sequence: Synthetic polypeptide; note = XENP019046 1G6_H1_L1.169_IgG1_PVA_/S267K Heavy Chain

SEQ ID NO: 16266 - protein, 122 aa, synthetic construct; identical to SEQ ID NO: 6246
  source 1..122: note = Description of Artificial Sequence: Synthetic polypeptide; note = VH of XENP019046

SEQ ID NO: 16267 - protein, 5 aa, synthetic construct
  source 1..5: note = Description of Artificial Sequence: Synthetic peptide; note = XENP019046 vhCDR1
NYWMN

SEQ ID NO: 16268 - protein, 19 aa, synthetic construct
  source 1..19: note = Description of Artificial Sequence: Synthetic peptide; note = XENP019046 vhCDR2
EIRLKSNNYATHYAEPVKG

SEQ ID NO: 16269 - protein, 11 aa, synthetic construct
  source 1..11: note = Description of Artificial Sequence: Synthetic peptide; note = XENP019046 vhCDR3
YYGNYGGYFDV

SEQ ID NO: 16270 - protein, 214 aa, synthetic construct
  source 1..214: note = Description of Artificial Sequence: Synthetic polypeptide; note = XENP019046 1G6_H1_L1.169_IgG1_PVA_/S267K Light Chain
SIVMTQSPATLSVSPGERATLSCRASQSVSNDVAWYQQKPGQSPRLLINYASWRYTGVPDRFTGSGYGTEFTLTISSLQSEDFAVYFCQQDWSSPRTFGGGTKVEIKRTVAAPSVFIFPPSDEQLKSGTASVVCLLNNFYPREAKVQWKVDNALQSGNSQESVTEQDSKDSTYSLSSTLTLSKADYEKHKVYACEVTHQGLSSPVTKSFNRGEC

SEQ ID NO: 16271 - protein, 107 aa, synthetic construct; identical to SEQ ID NO: 10564
  source 1..107: note = Description of Artificial Sequence: Synthetic polypeptide; note = VL of XENP019046

SEQ ID NO: 16272 - protein, 11 aa, synthetic construct
  source 1..11: note = Description of Artificial Sequence: Synthetic peptide; note = XENP019046 vlCDR1
RASQSVSNDVA

SEQ ID NO: 16273 - protein, 7 aa, synthetic construct
  source 1..7: note = Description of Artificial Sequence: Synthetic peptide; note = XENP019046 vlCDR2
YASWRYT

SEQ ID NO: 16274 - protein, 9 aa, synthetic construct
  source 1..9: note = Description of Artificial Sequence: Synthetic peptide; note = XENP019046 vlCDR3
QQDWSSPRT

SEQ ID NO: 16275 - protein, 451 aa, synthetic construct; identical to SEQ ID NO: 11545
  source 1..451: note = Description of Artificial Sequence: Synthetic polypeptide; note = XENP019047 1G6_H1_L1.170_IgG1_PVA_/S267K Heavy Chain

SEQ ID NO: 16276 - protein, 122 aa, synthetic construct; identical to SEQ ID NO: 6246
  source 1..122: note = Description of Artificial Sequence: Synthetic polypeptide; note = VH of XENP019047

SEQ ID NO: 16277 - protein, 5 aa, synthetic construct
  source 1..5: note = Description of Artificial Sequence: Synthetic peptide; note = XENP019047 vhCDR1
NYWMN

SEQ ID NO: 16278 - protein, 19 aa, synthetic construct
  source 1..19: note = Description of Artificial Sequence: Synthetic peptide; note = XENP019047 vhCDR2
EIRLKSNNYATHYAEPVKG

SEQ ID NO: 16279 - protein, 11 aa, synthetic construct
  source 1..11: note = Description of Artificial Sequence: Synthetic peptide; note = XENP019047 vhCDR3
YYGNYGGYFDV

SEQ ID NO: 16280 - protein, 214 aa, synthetic construct
  source 1..214: note = Description of Artificial Sequence: Synthetic polypeptide; note = XENP019047 1G6_H1_L1.170_IgG1_PVA_/S267K Light Chain
SIVMTQSPATLSVSPGERATLSCRASQSVSNDVAWYQQKPGQSPRLLINYASWRYTGVPDRFTGSGYGTEFTLTISSLQSEDFAVYFCQQDGSSPRTFGGGTKVEIKRTVAAPSVFIFPPSDEQLKSGTASVVCLLNNFYPREAKVQWKVDNALQSGNSQESVTEQDSKDSTYSLSSTLTLSKADYEKHKVYACEVTHQGLSSPVTKSFNRGEC

SEQ ID NO: 16281 - protein, 107 aa, synthetic construct; identical to SEQ ID NO: 10573
  source 1..107: note = Description of Artificial Sequence: Synthetic polypeptide; note = VL of XENP019047

SEQ ID NO: 16282 - protein, 11 aa, synthetic construct
  source 1..11: note = Description of Artificial Sequence: Synthetic peptide; note = XENP019047 vlCDR1
RASQSVSNDVA

SEQ ID NO: 16283 - protein, 7 aa, synthetic construct
  source 1..7: note = Description of Artificial Sequence: Synthetic peptide; note = XENP019047 vlCDR2
YASWRYT

SEQ ID NO: 16284 - protein, 9 aa, synthetic construct
  source 1..9: note = Description of Artificial Sequence: Synthetic peptide; note = XENP019047 vlCDR3
QQDGSSPRT

SEQ ID NO: 16285 - protein, 451 aa, synthetic construct; identical to SEQ ID NO: 11545
  source 1..451: note = Description of Artificial Sequence: Synthetic polypeptide; note = XENP019048 1G6_H1_L1.171_IgG1_PVA_/S267K Heavy Chain

SEQ ID NO: 16286 - protein, 122 aa, synthetic construct; identical to SEQ ID NO: 6246
  source 1..122: note = Description of Artificial Sequence: Synthetic polypeptide; note = VH of XENP019048

SEQ ID NO: 16287 - protein, 5 aa, synthetic construct
  source 1..5: note = Description of Artificial Sequence: Synthetic peptide; note = XENP019048 vhCDR1
NYWMN

SEQ ID NO: 16288 - protein, 19 aa, synthetic construct
  source 1..19: note = Description of Artificial Sequence: Synthetic peptide; note = XENP019048 vhCDR2
EIRLKSNNYATHYAEPVKG

SEQ ID NO: 16289 - protein, 11 aa, synthetic construct
  source 1..11: note = Description of Artificial Sequence: Synthetic peptide; note = XENP019048 vhCDR3
YYGNYGGYFDV

SEQ ID NO: 16290 - protein, 214 aa, synthetic construct
  source 1..214: note = Description of Artificial Sequence: Synthetic polypeptide; note = XENP019048 1G6_H1_L1.171_IgG1_PVA_/S267K Light Chain
SIVMTQSPATLSVSPGERATLSCRASQSVSNDVAWYQQKPGQSPRLLINYASHRYTSVPDRFTGSGYGTEFTLTISSLQSEDFAVYFCQQDWSSPRTFGGGTKVEIKRTVAAPSVFIFPPSDEQLKSGTASVVCLLNNFYPREAKVQWKVDNALQSGNSQESVTEQDSKDSTYSLSSTLTLSKADYEKHKVYACEVTHQGLSSPVTKSFNRGEC

SEQ ID NO: 16291 - protein, 107 aa, synthetic construct; identical to SEQ ID NO: 10582
  source 1..107: note = Description of Artificial Sequence: Synthetic polypeptide; note = VL of XENP019048

SEQ ID NO: 16292 - protein, 11 aa, synthetic construct
  source 1..11: note = Description of Artificial Sequence: Synthetic peptide; note = XENP019048 vlCDR1
RASQSVSNDVA

SEQ ID NO: 16293 - protein, 7 aa, synthetic construct
  source 1..7: note = Description of Artificial Sequence: Synthetic peptide; note = XENP019048 vlCDR2
YASHRYT

SEQ ID NO: 16294 - protein, 9 aa, synthetic construct
  source 1..9: note = Description of Artificial Sequence: Synthetic peptide; note = XENP019048 vlCDR3
QQDWSSPRT

SEQ ID NO: 16295 - protein, 451 aa, synthetic construct; identical to SEQ ID NO: 11545
  source 1..451: note = Description of Artificial Sequence: Synthetic polypeptide; note = XENP019049 1G6_H1_L1.172_IgG1_PVA_/S267K Heavy Chain

SEQ ID NO: 16296 - protein, 122 aa, synthetic construct; identical to SEQ ID NO: 6246
  source 1..122: note = Description of Artificial Sequence: Synthetic polypeptide; note = VH of XENP019049

SEQ ID NO: 16297 - protein, 5 aa, synthetic construct
  source 1..5: note = Description of Artificial Sequence: Synthetic peptide; note = XENP019049 vhCDR1
NYWMN

SEQ ID NO: 16298 - protein, 19 aa, synthetic construct
  source 1..19: note = Description of Artificial Sequence: Synthetic peptide; note = XENP019049 vhCDR2
EIRLKSNNYATHYAEPVKG

SEQ ID NO: 16299 - protein, 11 aa, synthetic construct
  source 1..11: note = Description of Artificial Sequence: Synthetic peptide; note = XENP019049 vhCDR3
YYGNYGGYFDV

SEQ ID NO: 16300 - protein, 214 aa, synthetic construct
  source 1..214: note = Description of Artificial Sequence: Synthetic polypeptide; note = XENP019049 1G6_H1_L1.172_IgG1_PVA_/S267K Light Chain
SIVMTQSPATLSVSPGERATLSCRASQSVSNDVAWYQQKPGQSPRLLINYASHRYTSVPDRFTGSGYGTEFTLTISSLQSEDFAVYFCQQDFSSPRTFGGGTKVEIKRTVAAPSVFIFPPSDEQLKSGTASVVCLLNNFYPREAKVQWKVDNALQSGNSQESVTEQDSKDSTYSLSSTLTLSKADYEKHKVYACEVTHQGLSSPVTKSFNRGEC

SEQ ID NO: 16301 - protein, 107 aa, synthetic construct; identical to SEQ ID NO: 10591
  source 1..107: note = Description of Artificial Sequence: Synthetic polypeptide; note = VL of XENP019049

SEQ ID NO: 16302 - protein, 11 aa, synthetic construct
  source 1..11: note = Description of Artificial Sequence: Synthetic peptide; note = XENP019049 vlCDR1
RASQSVSNDVA

SEQ ID NO: 16303 - protein, 7 aa, synthetic construct
  source 1..7: note = Description of Artificial Sequence: Synthetic peptide; note = XENP019049 vlCDR2
YASHRYT

SEQ ID NO: 16304 - protein, 9 aa, synthetic construct
  source 1..9: note = Description of Artificial Sequence: Synthetic peptide; note = XENP019049 vlCDR3
QQDFSSPRT

SEQ ID NO: 16305 - protein, 451 aa, synthetic construct; identical to SEQ ID NO: 11545
  source 1..451: note = Description of Artificial Sequence: Synthetic polypeptide; note = XENP019050 1G6_H1_L1.173_IgG1_PVA_/S267K Heavy Chain

SEQ ID NO: 16306 - protein, 122 aa, synthetic construct; identical to SEQ ID NO: 6246
  source 1..122: note = Description of Artificial Sequence: Synthetic polypeptide; note = VH of XENP019050

SEQ ID NO: 16307 - protein, 5 aa, synthetic construct
  source 1..5: note = Description of Artificial Sequence: Synthetic peptide; note = XENP019050 vhCDR1
NYWMN

SEQ ID NO: 16308 - protein, 19 aa, synthetic construct
  source 1..19: note = Description of Artificial Sequence: Synthetic peptide; note = XENP019050 vhCDR2
EIRLKSNNYATHYAEPVKG

SEQ ID NO: 16309 - protein, 11 aa, synthetic construct
  source 1..11: note = Description of Artificial Sequence: Synthetic peptide; note = XENP019050 vhCDR3
YYGNYGGYFDV

SEQ ID NO: 16310 - protein, 214 aa, synthetic construct
  source 1..214: note = Description of Artificial Sequence: Synthetic polypeptide; note = XENP019050 1G6_H1_L1.173_IgG1_PVA_/S267K Light Chain
SIVMTQSPATLSVSPGERATLSCRASQSVSNDVAWYQQKPGQSPRLLINYASHRYTGVPDRFTGSGYGTEFTLTISSLQSEDFAVYFCQQDFGSPRTFGGGTKVEIKRTVAAPSVFIFPPSDEQLKSGTASVVCLLNNFYPREAKVQWKVDNALQSGNSQESVTEQDSKDSTYSLSSTLTLSKADYEKHKVYACEVTHQGLSSPVTKSFNRGEC

SEQ ID NO: 16311 - protein, 107 aa, synthetic construct; identical to SEQ ID NO: 10600
  source 1..107: note = Description of Artificial Sequence: Synthetic polypeptide; note = VL of XENP019050

SEQ ID NO: 16312 - protein, 11 aa, synthetic construct
  source 1..11: note = Description of Artificial Sequence: Synthetic peptide; note = XENP019050 vlCDR1
RASQSVSNDVA

SEQ ID NO: 16313 - protein, 7 aa, synthetic construct
  source 1..7: note = Description of Artificial Sequence: Synthetic peptide; note = XENP019050 vlCDR2
YASHRYT

SEQ ID NO: 16314 - protein, 9 aa, synthetic construct
  source 1..9: note = Description of Artificial Sequence: Synthetic peptide; note = XENP019050 vlCDR3
QQDFGSPRT

SEQ ID NO: 16315 - protein, 451 aa, synthetic construct; identical to SEQ ID NO: 11545
  source 1..451: note = Description of Artificial Sequence: Synthetic polypeptide; note = XENP019051 1G6_H1_L1.174_IgG1_PVA_/S267K Heavy Chain

SEQ ID NO: 16316 - protein, 122 aa, synthetic construct; identical to SEQ ID NO: 6246
  source 1..122: note = Description of Artificial Sequence: Synthetic polypeptide; note = VH of XENP019051

SEQ ID NO: 16317 - protein, 5 aa, synthetic construct
  source 1..5: note = Description of Artificial Sequence: Synthetic peptide; note = XENP019051 vhCDR1
NYWMN

SEQ ID NO: 16318 - protein, 19 aa, synthetic construct
  source 1..19: note = Description of Artificial Sequence: Synthetic peptide; note = XENP019051 vhCDR2
EIRLKSNNYATHYAEPVKG

SEQ ID NO: 16319 - protein, 11 aa, synthetic construct
  source 1..11: note = Description of Artificial Sequence: Synthetic peptide; note = XENP019051 vhCDR3
YYGNYGGYFDV

SEQ ID NO: 16320 - protein, 214 aa, synthetic construct
  source 1..214: note = Description of Artificial Sequence: Synthetic polypeptide; note = XENP019051 1G6_H1_L1.174_IgG1_PVA_/S267K Light Chain
SIVMTQSPATLSVSPGERATLSCRASQSVSNDVAWYQQKPGQSPRLLINYASHRYTGVPDRFTGSGYGTEFTLTISSLQSEDFAVYFCQQDWGSPRTFGGGTKVEIKRTVAAPSVFIFPPSDEQLKSGTASVVCLLNNFYPREAKVQWKVDNALQSGNSQESVTEQDSKDSTYSLSSTLTLSKADYEKHKVYACEVTHQGLSSPVTKSFNRGEC

SEQ ID NO: 16321 - protein, 107 aa, synthetic construct; identical to SEQ ID NO: 10609
  source 1..107: note = Description of Artificial Sequence: Synthetic polypeptide; note = VL of XENP019051

SEQ ID NO: 16322 - protein, 11 aa, synthetic construct
  source 1..11: note = Description of Artificial Sequence: Synthetic peptide; note = XENP019051 vlCDR1
RASQSVSNDVA

SEQ ID NO: 16323 - protein, 7 aa, synthetic construct
  source 1..7: note = Description of Artificial Sequence: Synthetic peptide; note = XENP019051 vlCDR2
YASHRYT

SEQ ID NO: 16324 - protein, 9 aa, synthetic construct
  source 1..9: note = Description of Artificial Sequence: Synthetic peptide; note = XENP019051 vlCDR3
QQDWGSPRT

SEQ ID NO: 16325 - protein, 451 aa, synthetic construct; identical to SEQ ID NO: 11545
  source 1..451: note = Description of Artificial Sequence: Synthetic polypeptide; note = XENP019052 1G6_H1_L1.175_IgG1_PVA_/S267K Heavy Chain

SEQ ID NO: 16326 - protein, 122 aa, synthetic construct; identical to SEQ ID NO: 6246
  source 1..122: note = Description of Artificial Sequence: Synthetic polypeptide; note = VH of XENP019052

SEQ ID NO: 16327 - protein, 5 aa, synthetic construct
  source 1..5: note = Description of Artificial Sequence: Synthetic peptide; note = XENP019052 vhCDR1
NYWMN

SEQ ID NO: 16328 - protein, 19 aa, synthetic construct
  source 1..19: note = Description of Artificial Sequence: Synthetic peptide; note = XENP019052 vhCDR2
EIRLKSNNYATHYAEPVKG

SEQ ID NO: 16329 - protein, 11 aa, synthetic construct
  source 1..11: note = Description of Artificial Sequence: Synthetic peptide; note = XENP019052 vhCDR3
YYGNYGGYFDV

SEQ ID NO: 16330 - protein, 214 aa, synthetic construct
  source 1..214: note = Description of Artificial Sequence: Synthetic polypeptide; note = XENP019052 1G6_H1_L1.175_IgG1_PVA_/S267K Light Chain
SIVMTQSPATLSVSPGERATLSCRASQSVGNDVAWYQQKPGQSPRLLINYASHRYTSVPDRFTGSGYGTEFTLTISSLQSEDFAVYFCQQDWSSPRTFGGGTKVEIKRTVAAPSVFIFPPSDEQLKSGTASVVCLLNNFYPREAKVQWKVDNALQSGNSQESVTEQDSKDSTYSLSSTLTLSKADYEKHKVYACEVTHQGLSSPVTKSFNRGEC

SEQ ID NO: 16331 - protein, 107 aa, synthetic construct; identical to SEQ ID NO: 10618
  source 1..107: note = Description of Artificial Sequence: Synthetic polypeptide; note = VL of XENP019052

SEQ ID NO: 16332 - protein, 11 aa, synthetic construct
  source 1..11: note = Description of Artificial Sequence: Synthetic peptide; note = XENP019052 vlCDR1
RASQSVGNDVA

SEQ ID NO: 16333 - protein, 7 aa, synthetic construct
  source 1..7: note = Description of Artificial Sequence: Synthetic peptide; note = XENP019052 vlCDR2
YASHRYT

SEQ ID NO: 16334 - protein, 9 aa, synthetic construct
  source 1..9: note = Description of Artificial Sequence: Synthetic peptide; note = XENP019052 vlCDR3
QQDWSSPRT

SEQ ID NO: 16335 - protein, 451 aa, synthetic construct; identical to SEQ ID NO: 11545
  source 1..451: note = Description of Artificial Sequence: Synthetic polypeptide; note = XENP019053 1G6_H1_L1.176_IgG1_PVA_/S267K Heavy Chain

SEQ ID NO: 16336 - protein, 122 aa, synthetic construct; identical to SEQ ID NO: 6246
  source 1..122: note = Description of Artificial Sequence: Synthetic polypeptide; note = VH of XENP019053

SEQ ID NO: 16337 - protein, 5 aa, synthetic construct
  source 1..5: note = Description of Artificial Sequence: Synthetic peptide; note = XENP019053 vhCDR1
NYWMN

SEQ ID NO: 16338 - protein, 19 aa, synthetic construct
  source 1..19: note = Description of Artificial Sequence: Synthetic peptide; note = XENP019053 vhCDR2
EIRLKSNNYATHYAEPVKG

SEQ ID NO: 16339 - protein, 11 aa, synthetic construct
  source 1..11: note = Description of Artificial Sequence: Synthetic peptide; note = XENP019053 vhCDR3
YYGNYGGYFDV

SEQ ID NO: 16340 - protein, 214 aa, synthetic construct
  source 1..214: note = Description of Artificial Sequence: Synthetic polypeptide; note = XENP019053 1G6_H1_L1.176_IgG1_PVA_/S267K Light Chain
SIVMTQSPATLSVSPGERATLSCRASQSVGNDVAWYQQKPGQSPRLLINYASWRYTSVPDRFTGSGYGTEFTLTISSLQSEDFAVYFCQQDYSSPRTFGGGTKVEIKRTVAAPSVFIFPPSDEQLKSGTASVVCLLNNFYPREAKVQWKVDNALQSGNSQESVTEQDSKDSTYSLSSTLTLSKADYEKHKVYACEVTHQGLSSPVTKSFNRGEC

SEQ ID NO: 16341 - protein, 107 aa, synthetic construct; identical to SEQ ID NO: 10627
  source 1..107: note = Description of Artificial Sequence: Synthetic polypeptide; note = VL of XENP019053

SEQ ID NO: 16342 - protein, 11 aa, synthetic construct
  source 1..11: note = Description of Artificial Sequence: Synthetic peptide; note = XENP019053 vlCDR1
RASQSVGNDVA

SEQ ID NO: 16343 - protein, 7 aa, synthetic construct
  source 1..7: note = Description of Artificial Sequence: Synthetic peptide; note = XENP019053 vlCDR2
YASWRYT

SEQ ID NO: 16344 - protein, 9 aa, synthetic construct
  source 1..9: note = Description of Artificial Sequence: Synthetic peptide; note = XENP019053 vlCDR3
QQDYSSPRT

SEQ ID NO: 16345 - protein, 451 aa, synthetic construct; identical to SEQ ID NO: 11545
  source 1..451: note = Description of Artificial Sequence: Synthetic polypeptide; note = XENP019054 1G6_H1_L1.177_IgG1_PVA_/S267K Heavy Chain

SEQ ID NO: 16346 - protein, 122 aa, synthetic construct; identical to SEQ ID NO: 6246
  source 1..122: note = Description of Artificial Sequence: Synthetic polypeptide; note = VH of XENP019054

SEQ ID NO: 16347 - protein, 5 aa, synthetic construct
  source 1..5: note = Description of Artificial Sequence: Synthetic peptide; note = XENP019054 vhCDR1
NYWMN

SEQ ID NO: 16348 - protein, 19 aa, synthetic construct
  source 1..19: note = Description of Artificial Sequence: Synthetic peptide; note = XENP019054 vhCDR2
EIRLKSNNYATHYAEPVKG

SEQ ID NO: 16349 - protein, 11 aa, synthetic construct
  source 1..11: note = Description of Artificial Sequence: Synthetic peptide; note = XENP019054 vhCDR3
YYGNYGGYFDV

SEQ ID NO: 16350 - protein, 214 aa, synthetic construct
  source 1..214: note = Description of Artificial Sequence: Synthetic polypeptide; note = XENP019054 1G6_H1_L1.177_IgG1_PVA_/S267K Light Chain
SIVMTQSPATLSVSPGERATLSCRASQSVGNDVAWYQQKPGQSPRLLINYASHRYTSVPDRFTGSGYGTEFTLTISSLQSEDFAVYFCQQDFSSPRTFGGGTKVEIKRTVAAPSVFIFPPSDEQLKSGTASVVCLLNNFYPREAKVQWKVDNALQSGNSQESVTEQDSKDSTYSLSSTLTLSKADYEKHKVYACEVTHQGLSSPVTKSFNRGEC

SEQ ID NO: 16351 - protein, 107 aa, synthetic construct; identical to SEQ ID NO: 10636
  source 1..107: note = Description of Artificial Sequence: Synthetic polypeptide; note = VL of XENP019054

SEQ ID NO: 16352 - protein, 11 aa, synthetic construct
  source 1..11: note = Description of Artificial Sequence: Synthetic peptide; note = XENP019054 vlCDR1
RASQSVGNDVA

SEQ ID NO: 16353 - protein, 7 aa, synthetic construct
  source 1..7: note = Description of Artificial Sequence: Synthetic peptide; note = XENP019054 vlCDR2
YASHRYT

SEQ ID NO: 16354 - protein, 9 aa, synthetic construct
  source 1..9: note = Description of Artificial Sequence: Synthetic peptide; note = XENP019054 vlCDR3
QQDFSSPRT

SEQ ID NO: 16355 - protein, 451 aa, synthetic construct; identical to SEQ ID NO: 11545
  source 1..451: note = Description of Artificial Sequence: Synthetic polypeptide; note = XENP019055 1G6_H1_L1.178_IgG1_PVA_/S267K Heavy Chain

SEQ ID NO: 16356 - protein, 122 aa, synthetic construct; identical to SEQ ID NO: 6246
  source 1..122: note = Description of Artificial Sequence: Synthetic polypeptide; note = VH of XENP019055

SEQ ID NO: 16357 - protein, 5 aa, synthetic construct
  source 1..5: note = Description of Artificial Sequence: Synthetic peptide; note = XENP019055 vhCDR1
NYWMN

SEQ ID NO: 16358 - protein, 19 aa, synthetic construct
  source 1..19: note = Description of Artificial Sequence: Synthetic peptide; note = XENP019055 vhCDR2
EIRLKSNNYATHYAEPVKG

SEQ ID NO: 16359 - protein, 11 aa, synthetic construct
  source 1..11: note = Description of Artificial Sequence: Synthetic peptide; note = XENP019055 vhCDR3
YYGNYGGYFDV

SEQ ID NO: 16360 - protein, 214 aa, synthetic construct
  source 1..214: note = Description of Artificial Sequence: Synthetic polypeptide; note = XENP019055 1G6_H1_L1.178_IgG1_PVA_/S267K Light Chain
SIVMTQSPATLSVSPGERATLSCRASQSVGNDVAWYQQKPGQSPRLLINYASHRYTSVPDRFTGSGYGTEFTLTISSLQSEDFAVYFCQQDGSSPRTFGGGTKVEIKRTVAAPSVFIFPPSDEQLKSGTASVVCLLNNFYPREAKVQWKVDNALQSGNSQESVTEQDSKDSTYSLSSTLTLSKADYEKHKVYACEVTHQGLSSPVTKSFNRGEC

SEQ ID NO: 16361 - protein, 107 aa, synthetic construct; identical to SEQ ID NO: 10645
  source 1..107: note = Description of Artificial Sequence: Synthetic polypeptide; note = VL of XENP019055

SEQ ID NO: 16362 - protein, 11 aa, synthetic construct
  source 1..11: note = Description of Artificial Sequence: Synthetic peptide; note = XENP019055 vlCDR1
RASQSVGNDVA

SEQ ID NO: 16363 - protein, 7 aa, synthetic construct
  source 1..7: note = Description of Artificial Sequence: Synthetic peptide; note = XENP019055 vlCDR2
YASHRYT

SEQ ID NO: 16364 - protein, 9 aa, synthetic construct
  source 1..9: note = Description of Artificial Sequence: Synthetic peptide; note = XENP019055 vlCDR3
QQDGSSPRT

SEQ ID NO: 16365 - protein, 451 aa, synthetic construct; identical to SEQ ID NO: 11545
  source 1..451: note = Description of Artificial Sequence: Synthetic polypeptide; note = XENP019056 1G6_H1_L1.179_IgG1_PVA_/S267K Heavy Chain

SEQ ID NO: 16366 - protein, 122 aa, synthetic construct; identical to SEQ ID NO: 6246
  source 1..122: note = Description of Artificial Sequence: Synthetic polypeptide; note = VH of XENP019056

SEQ ID NO: 16367 - protein, 5 aa, synthetic construct
  source 1..5: note = Description of Artificial Sequence: Synthetic peptide; note = XENP019056 vhCDR1
NYWMN

SEQ ID NO: 16368 - protein, 19 aa, synthetic construct
  source 1..19: note = Description of Artificial Sequence: Synthetic peptide; note = XENP019056 vhCDR2
EIRLKSNNYATHYAEPVKG

SEQ ID NO: 16369 - protein, 11 aa, synthetic construct
  source 1..11: note = Description of Artificial Sequence: Synthetic peptide; note = XENP019056 vhCDR3
YYGNYGGYFDV

SEQ ID NO: 16370 - protein, 214 aa, synthetic construct
  source 1..214: note = Description of Artificial Sequence: Synthetic polypeptide; note = XENP019056 1G6_H1_L1.179_IgG1_PVA_/S267K Light Chain
SIVMTQSPATLSVSPGERATLSCRASQSVSNDVAWYQQKPGQSPRLLINYASWRYTSVPDRFTGSGYGTEFTLTISSLQSEDFAVYFCQQDFSSPRTFGGGTKVEIKRTVAAPSVFIFPPSDEQLKSGTASVVCLLNNFYPREAKVQWKVDNALQSGNSQESVTEQDSKDSTYSLSSTLTLSKADYEKHKVYACEVTHQGLSSPVTKSFNRGEC

SEQ ID NO: 16371 - protein, 107 aa, synthetic construct; identical to SEQ ID NO: 10654
  source 1..107: note = Description of Artificial Sequence: Synthetic polypeptide; note = VL of XENP019056

SEQ ID NO: 16372 - protein, 11 aa, synthetic construct
  source 1..11: note = Description of Artificial Sequence: Synthetic peptide; note = XENP019056 vlCDR1
RASQSVSNDVA

SEQ ID NO: 16373 - protein, 7 aa, synthetic construct
  source 1..7: note = Description of Artificial Sequence: Synthetic peptide; note = XENP019056 vlCDR2
YASWRYT

SEQ ID NO: 16374 - protein, 9 aa, synthetic construct
  source 1..9: note = Description of Artificial Sequence: Synthetic peptide; note = XENP019056 vlCDR3
QQDFSSPRT

SEQ ID NO: 16375 - protein, 451 aa, synthetic construct; identical to SEQ ID NO: 11545
  source 1..451: note = Description of Artificial Sequence: Synthetic polypeptide; note = XENP019057 1G6_H1_L1.180_IgG1_PVA_/S267K Heavy Chain

SEQ ID NO: 16376 - protein, 122 aa, synthetic construct; identical to SEQ ID NO: 6246
  source 1..122: note = Description of Artificial Sequence: Synthetic polypeptide; note = VH of XENP019057

SEQ ID NO: 16377 - protein, 5 aa, synthetic construct
  source 1..5: note = Description of Artificial Sequence: Synthetic peptide; note = XENP019057 vhCDR1
NYWMN

SEQ ID NO: 16378 - protein, 19 aa, synthetic construct
  source 1..19: note = Description of Artificial Sequence: Synthetic peptide; note = XENP019057 vhCDR2
EIRLKSNNYATHYAEPVKG

SEQ ID NO: 16379 - protein, 11 aa, synthetic construct
  source 1..11: note = Description of Artificial Sequence: Synthetic peptide; note = XENP019057 vhCDR3
YYGNYGGYFDV

SEQ ID NO: 16380 - protein, 214 aa, synthetic construct
  source 1..214: note = Description of Artificial Sequence: Synthetic polypeptide; note = XENP019057 1G6_H1_L1.180_IgG1_PVA_/S267K Light Chain
SIVMTQSPATLSVSPGERATLSCRASQSVSNDVAWYQQKPGQSPRLLINYASWRYTSVPDRFTGSGYGTEFTLTISSLQSEDFAVYFCQQDWSSPRTFGGGTKVEIKRTVAAPSVFIFPPSDEQLKSGTASVVCLLNNFYPREAKVQWKVDNALQSGNSQESVTEQDSKDSTYSLSSTLTLSKADYEKHKVYACEVTHQGLSSPVTKSFNRGEC

SEQ ID NO: 16381 - protein, 107 aa, synthetic construct; identical to SEQ ID NO: 10663
  source 1..107: note = Description of Artificial Sequence: Synthetic polypeptide; note = VL of XENP019057

SEQ ID NO: 16382 - protein, 11 aa, synthetic construct
  source 1..11: note = Description of Artificial Sequence: Synthetic peptide; note = XENP019057 vlCDR1
RASQSVSNDVA

SEQ ID NO: 16383 - protein, 7 aa, synthetic construct
  source 1..7: note = Description of Artificial Sequence: Synthetic peptide; note = XENP019057 vlCDR2
YASWRYT

SEQ ID NO: 16384 - protein, 9 aa, synthetic construct
  source 1..9: note = Description of Artificial Sequence: Synthetic peptide; note = XENP019057 vlCDR3
QQDWSSPRT

SEQ ID NO: 16385 - protein, 451 aa, synthetic construct; identical to SEQ ID NO: 11545
  source 1..451: note = Description of Artificial Sequence: Synthetic polypeptide; note = XENP019058 1G6_H1_L1.181_IgG1_PVA_/S267K Heavy Chain

SEQ ID NO: 16386 - protein, 122 aa, synthetic construct; identical to SEQ ID NO: 6246
  source 1..122: note = Description of Artificial Sequence: Synthetic polypeptide; note = VH of XENP019058

SEQ ID NO: 16387 - protein, 5 aa, synthetic construct
  source 1..5: note = Description of Artificial Sequence: Synthetic peptide; note = XENP019058 vhCDR1
NYWMN

SEQ ID NO: 16388 - protein, 19 aa, synthetic construct
  source 1..19: note = Description of Artificial Sequence: Synthetic peptide; note = XENP019058 vhCDR2
EIRLKSNNYATHYAEPVKG

SEQ ID NO: 16389 - protein, 11 aa, synthetic construct
  source 1..11: note = Description of Artificial Sequence: Synthetic peptide; note = XENP019058 vhCDR3
YYGNYGGYFDV

SEQ ID NO: 16390 - protein, 214 aa, synthetic construct
  source 1..214: note = Description of Artificial Sequence: Synthetic polypeptide; note = XENP019058 1G6_H1_L1.181_IgG1_PVA_/S267K Light Chain
SIVMTQSPATLSVSPGERATLSCRASQSVSNDVAWYQQKPGQSPRLLINYASWRYTSVPDRFTGSGYGTEFTLTISSLQSEDFAVYFCQQDGSSPRTFGGGTKVEIKRTVAAPSVFIFPPSDEQLKSGTASVVCLLNNFYPREAKVQWKVDNALQSGNSQESVTEQDSKDSTYSLSSTLTLSKADYEKHKVYACEVTHQGLSSPVTKSFNRGEC

SEQ ID NO: 16391 - protein, 107 aa, synthetic construct; identical to SEQ ID NO: 10672
  source 1..107: note = Description of Artificial Sequence: Synthetic polypeptide; note = VL of XENP019058

SEQ ID NO: 16392 - protein, 11 aa, synthetic construct
  source 1..11: note = Description of Artificial Sequence: Synthetic peptide; note = XENP019058 vlCDR1
RASQSVSNDVA

SEQ ID NO: 16393 - protein, 7 aa, synthetic construct
  source 1..7: note = Description of Artificial Sequence: Synthetic peptide; note = XENP019058 vlCDR2
YASWRYT

SEQ ID NO: 16394 - protein, 9 aa, synthetic construct
  source 1..9: note = Description of Artificial Sequence: Synthetic peptide; note = XENP019058 vlCDR3
QQDGSSPRT

SEQ ID NO: 16395 - protein, 451 aa, synthetic construct; identical to SEQ ID NO: 11545
  source 1..451: note = Description of Artificial Sequence: Synthetic polypeptide; note = XENP019059 1G6_H1_L1.182_IgG1_PVA_/S267K Heavy Chain

SEQ ID NO: 16396 - protein, 122 aa, synthetic construct; identical to SEQ ID NO: 6246
  source 1..122: note = Description of Artificial Sequence: Synthetic polypeptide; note = VH of XENP019059

SEQ ID NO: 16397 - protein, 5 aa, synthetic construct
  source 1..5: note = Description of Artificial Sequence: Synthetic peptide; note = XENP019059 vhCDR1
NYWMN

SEQ ID NO: 16398 - protein, 19 aa, synthetic construct
  source 1..19: note = Description of Artificial Sequence: Synthetic peptide; note = XENP019059 vhCDR2
EIRLKSNNYATHYAEPVKG

SEQ ID NO: 16399 - protein, 11 aa, synthetic construct
  source 1..11: note = Description of Artificial Sequence: Synthetic peptide; note = XENP019059 vhCDR3
YYGNYGGYFDV

SEQ ID NO: 16400 - protein, 214 aa, synthetic construct
  source 1..214: note = Description of Artificial Sequence: Synthetic polypeptide; note = XENP019059 1G6_H1_L1.182_IgG1_PVA_/S267K Light Chain
SIVMTQSPATLSVSPGERATLSCRASQSVGNDVAWYQQKPGQSPRLLINYASWRYTSVPDRFTGSGYGTEFTLTISSLQSEDFAVYFCQQDWSSPRTFGGGTKVEIKRTVAAPSVFIFPPSDEQLKSGTASVVCLLNNFYPREAKVQWKVDNALQSGNSQESVTEQDSKDSTYSLSSTLTLSKADYEKHKVYACEVTHQGLSSPVTKSFNRGEC

SEQ ID NO: 16401 - protein, 107 aa, synthetic construct; identical to SEQ ID NO: 10681
  source 1..107: note = Description of Artificial Sequence: Synthetic polypeptide; note = VL of XENP019059

SEQ ID NO: 16402 - protein, 11 aa, synthetic construct
  source 1..11: note = Description of Artificial Sequence: Synthetic peptide; note = XENP019059 vlCDR1
RASQSVGNDVA

SEQ ID NO: 16403 - protein, 7 aa, synthetic construct
  source 1..7: note = Description of Artificial Sequence: Synthetic peptide; note = XENP019059 vlCDR2
YASWRYT

SEQ ID NO: 16404 - protein, 9 aa, synthetic construct
  source 1..9: note = Description of Artificial Sequence: Synthetic peptide; note = XENP019059 vlCDR3
QQDWSSPRT

SEQ ID NO: 16405 - protein, 451 aa, synthetic construct; identical to SEQ ID NO: 11545
  source 1..451: note = Description of Artificial Sequence: Synthetic polypeptide; note = XENP019060 1G6_H1_L1.183_IgG1_PVA_/S267K Heavy Chain

SEQ ID NO: 16406 - protein, 122 aa, synthetic construct; identical to SEQ ID NO: 6246
  source 1..122: note = Description of Artificial Sequence: Synthetic polypeptide; note = VH of XENP019060

SEQ ID NO: 16407 - protein, 5 aa, synthetic construct
  source 1..5: note = Description of Artificial Sequence: Synthetic peptide; note = XENP019060 vhCDR1
NYWMN

SEQ ID NO: 16408 - protein, 19 aa, synthetic construct
  source 1..19: note = Description of Artificial Sequence: Synthetic peptide; note = XENP019060 vhCDR2
EIRLKSNNYATHYAEPVKG

SEQ ID NO: 16409 - protein, 11 aa, synthetic construct
  source 1..11: note = Description of Artificial Sequence: Synthetic peptide; note = XENP019060 vhCDR3
YYGNYGGYFDV

SEQ ID NO: 16410 - protein, 214 aa, synthetic construct
  source 1..214: note = Description of Artificial Sequence: Synthetic polypeptide; note = XENP019060 1G6_H1_L1.183_IgG1_PVA_/S267K Light Chain
SIVMTQSPATLSVSPGERATLSCRASQSVGNDVAWYQQKPGQSPRLLINYASWRYTSVPDRFTGSGYGTEFTLTISSLQSEDFAVYFCQQDFSSPRTFGGGTKVEIKRTVAAPSVFIFPPSDEQLKSGTASVVCLLNNFYPREAKVQWKVDNALQSGNSQESVTEQDSKDSTYSLSSTLTLSKADYEKHKVYACEVTHQGLSSPVTKSFNRGEC

SEQ ID NO: 16411 - protein, 107 aa, synthetic construct; identical to SEQ ID NO: 10690
  source 1..107: note = Description of Artificial Sequence: Synthetic polypeptide; note = VL of XENP019060

SEQ ID NO: 16412 - protein, 11 aa, synthetic construct
  source 1..11: note = Description of Artificial Sequence: Synthetic peptide; note = XENP019060 vlCDR1
RASQSVGNDVA

SEQ ID NO: 16413 - protein, 7 aa, synthetic construct
  source 1..7: note = Description of Artificial Sequence: Synthetic peptide; note = XENP019060 vlCDR2
YASWRYT

SEQ ID NO: 16414 - protein, 9 aa, synthetic construct
  source 1..9: note = Description of Artificial Sequence: Synthetic peptide; note = XENP019060 vlCDR3
QQDFSSPRT

SEQ ID NO: 16415 - protein, 451 aa, synthetic construct; identical to SEQ ID NO: 11545
  source 1..451: note = Description of Artificial Sequence: Synthetic polypeptide; note = XENP019061 1G6_H1_L1.184_IgG1_PVA_/S267K Heavy Chain

SEQ ID NO: 16416 - protein, 122 aa, synthetic construct; identical to SEQ ID NO: 6246
  source 1..122: note = Description of Artificial Sequence: Synthetic polypeptide; note = VH of XENP019061

SEQ ID NO: 16417 - protein, 5 aa, synthetic construct
  source 1..5: note = Description of Artificial Sequence: Synthetic peptide; note = XENP019061 vhCDR1
NYWMN

SEQ ID NO: 16418 - protein, 19 aa, synthetic construct
  source 1..19: note = Description of Artificial Sequence: Synthetic peptide; note = XENP019061 vhCDR2
EIRLKSNNYATHYAEPVKG

SEQ ID NO: 16419 - protein, 11 aa, synthetic construct
  source 1..11: note = Description of Artificial Sequence: Synthetic peptide; note = XENP019061 vhCDR3
YYGNYGGYFDV

SEQ ID NO: 16420 - protein, 214 aa, synthetic construct
  source 1..214: note = Description of Artificial Sequence: Synthetic polypeptide; note = XENP019061 1G6_H1_L1.184_IgG1_PVA_/S267K Light Chain
SIVMTQSPATLSVSPGERATLSCRASQSVGNDVAWYQQKPGQSPRLLINYASWRYTSVPDRFTGSGYGTEFTLTISSLQSEDFAVYFCQQDGSSPRTFGGGTKVEIKRTVAAPSVFIFPPSDEQLKSGTASVVCLLNNFYPREAKVQWKVDNALQSGNSQESVTEQDSKDSTYSLSSTLTLSKADYEKHKVYACEVTHQGLSSPVTKSFNRGEC

SEQ ID NO: 16421 - protein, 107 aa, synthetic construct; identical to SEQ ID NO: 10699
  source 1..107: note = Description of Artificial Sequence: Synthetic polypeptide; note = VL of XENP019061

SEQ ID NO: 16422 - protein, 11 aa, synthetic construct
  source 1..11: note = Description of Artificial Sequence: Synthetic peptide; note = XENP019061 vlCDR1
RASQSVGNDVA

SEQ ID NO: 16423 - protein, 7 aa, synthetic construct
  source 1..7: note = Description of Artificial Sequence: Synthetic peptide; note = XENP019061 vlCDR2
YASWRYT

SEQ ID NO: 16424 - protein, 9 aa, synthetic construct
  source 1..9: note = Description of Artificial Sequence: Synthetic peptide; note = XENP019061 vlCDR3
QQDGSSPRT

SEQ ID NO: 16425 - protein, 451 aa, synthetic construct; identical to SEQ ID NO: 11545
  source 1..451: note = Description of Artificial Sequence: Synthetic polypeptide; note = XENP019062 1G6_H1_L1.185_IgG1_PVA_/S267K Heavy Chain

SEQ ID NO: 16426 - protein, 122 aa, synthetic construct; identical to SEQ ID NO: 6246
  source 1..122: note = Description of Artificial Sequence: Synthetic polypeptide; note = VH of XENP019062

SEQ ID NO: 16427 - protein, 5 aa, synthetic construct
  source 1..5: note = Description of Artificial Sequence: Synthetic peptide; note = XENP019062 vhCDR1
NYWMN

SEQ ID NO: 16428 - protein, 19 aa, synthetic construct
  source 1..19: note = Description of Artificial Sequence: Synthetic peptide; note = XENP019062 vhCDR2
EIRLKSNNYATHYAEPVKG

SEQ ID NO: 16429 - protein, 11 aa, synthetic construct
  source 1..11: note = Description of Artificial Sequence: Synthetic peptide; note = XENP019062 vhCDR3
YYGNYGGYFDV

SEQ ID NO: 16430 - protein, 214 aa, synthetic construct
  source 1..214: note = Description of Artificial Sequence: Synthetic polypeptide; note = XENP019062 1G6_H1_L1.185_IgG1_PVA_/S267K Light Chain
EIVMTQSPATLSVSPGERATLSCRASQSVSNDLAWYQQKPGQSPRLLINYASHRYTGVPARFSGSGYGTEFTLTISSLQSEDFAVYYCQQDYSSPRTFGGGTKVEIKRTVAAPSVFIFPPSDEQLKSGTASVVCLLNNFYPREAKVQWKVDNALQSGNSQESVTEQDSKDSTYSLSSTLTLSKADYEKHKVYACEVTHQGLSSPVTKSFNRGEC

SEQ ID NO: 16431 - protein, 107 aa, synthetic construct; identical to SEQ ID NO: 10708
  source 1..107: note = Description of Artificial Sequence: Synthetic polypeptide; note = VL of XENP019062

SEQ ID NO: 16432 - protein, 11 aa, synthetic construct
  source 1..11: note = Description of Artificial Sequence: Synthetic peptide; note = XENP019062 vlCDR1
RASQSVSNDLA

SEQ ID NO: 16433 - protein, 7 aa, synthetic construct
  source 1..7: note = Description of Artificial Sequence: Synthetic peptide; note = XENP019062 vlCDR2
YASHRYT

SEQ ID NO: 16434 - protein, 9 aa, synthetic construct
  source 1..9: note = Description of Artificial Sequence: Synthetic peptide; note = XENP019062 vlCDR3
QQDYSSPRT

SEQ ID NO: 16435 - protein, 451 aa, synthetic construct; identical to SEQ ID NO: 11545
  source 1..451: note = Description of Artificial Sequence: Synthetic polypeptide; note = XENP019063 1G6_H1_L1.186_IgG1_PVA_/S267K Heavy Chain

SEQ ID NO: 16436 - protein, 122 aa, synthetic construct; identical to SEQ ID NO: 6246
  source 1..122: note = Description of Artificial Sequence: Synthetic polypeptide; note = VH of XENP019063

SEQ ID NO: 16437 - protein, 5 aa, synthetic construct
  source 1..5: note = Description of Artificial Sequence: Synthetic peptide; note = XENP019063 vhCDR1
NYWMN

SEQ ID NO: 16438 - protein, 19 aa, synthetic construct
  source 1..19: note = Description of Artificial Sequence: Synthetic peptide; note = XENP019063 vhCDR2
EIRLKSNNYATHYAEPVKG

SEQ ID NO: 16439 - protein, 11 aa, synthetic construct
  source 1..11: note = Description of Artificial Sequence: Synthetic peptide; note = XENP019063 vhCDR3
YYGNYGGYFDV

SEQ ID NO: 16440 - protein, 214 aa, synthetic construct
  source 1..214: note = Description of Artificial Sequence: Synthetic polypeptide; note = XENP019063 1G6_H1_L1.186_IgG1_PVA_/S267K Light Chain
DIVMTQSPATLSVSPGERATLSCRASQSVSNDLAWYQQKPGQSPRLLINYASHRYTGVPDRFSGSGYGTEFTLTISSLQSEDFAVYYCQQDYSSPRTFGGGTKVEIKRTVAAPSVFIFPPSDEQLKSGTASVVCLLNNFYPREAKVQWKVDNALQSGNSQESVTEQDSKDSTYSLSSTLTLSKADYEKHKVYACEVTHQGLSSPVTKSFNRGEC

SEQ ID NO: 16441 - protein, 107 aa, synthetic construct; identical to SEQ ID NO: 10717
  source 1..107: note = Description of Artificial Sequence: Synthetic polypeptide; note = VL of XENP019063

SEQ ID NO: 16442 - protein, 11 aa, synthetic construct
  source 1..11: note = Description of Artificial Sequence: Synthetic peptide; note = XENP019063 vlCDR1
RASQSVSNDLA

SEQ ID NO: 16443 - protein, 7 aa, synthetic construct
  source 1..7: note = Description of Artificial Sequence: Synthetic peptide; note = XENP019063 vlCDR2
YASHRYT

SEQ ID NO: 16444 - protein, 9 aa, synthetic construct
  source 1..9: note = Description of Artificial Sequence: Synthetic peptide; note = XENP019063 vlCDR3
QQDYSSPRT

SEQ ID NO: 16445 - protein, 451 aa, synthetic construct; identical to SEQ ID NO: 15945
  source 1..451: note = Description of Artificial Sequence: Synthetic polypeptide; note = XENP019160 1G6_H1.269_L1.116_IgG1_PVA_/S267K Heavy Chain

SEQ ID NO: 16446 - protein, 122 aa, synthetic construct; identical to SEQ ID NO: 10275
  source 1..122: note = Description of Artificial Sequence: Synthetic polypeptide; note = VH of XENP019160

SEQ ID NO: 16447 - protein, 5 aa, synthetic construct
  source 1..5: note = Description of Artificial Sequence: Synthetic peptide; note = XENP019160 vhCDR1
NFWMN

SEQ ID NO: 16448 - protein, 19 aa, synthetic construct
  source 1..19: note = Description of Artificial Sequence: Synthetic peptide; note = XENP019160 vhCDR2
EIRLYSNNYATHYAEPVKG

SEQ ID NO: 16449 - protein, 11 aa, synthetic construct
  source 1..11: note = Description of Artificial Sequence: Synthetic peptide; note = XENP019160 vhCDR3
YYGNYGGYFDV

SEQ ID NO: 16450 - protein, 214 aa, synthetic construct; identical to SEQ ID NO: 15260
  source 1..214: note = Description of Artificial Sequence: Synthetic polypeptide; note = XENP019160 1G6_H1.269_L1.116_IgG1_PVA_/S267K Light Chain

SEQ ID NO: 16451 - protein, 107 aa, synthetic construct; identical to SEQ ID NO: 9538
  source 1..107: note = Description of Artificial Sequence: Synthetic polypeptide; note = VL of XENP019160

SEQ ID NO: 16452 - protein, 11 aa, synthetic construct
  source 1..11: note = Description of Artificial Sequence: Synthetic peptide; note = XENP019160 vlCDR1
RASQSVSNDVA

SEQ ID NO: 16453 - protein, 7 aa, synthetic construct
  source 1..7: note = Description of Artificial Sequence: Synthetic peptide; note = XENP019160 vlCDR2
YASHRYT

SEQ ID NO: 16454 - protein, 9 aa, synthetic construct
  source 1..9: note = Description of Artificial Sequence: Synthetic peptide; note = XENP019160 vlCDR3
QQDFSSPRT

SEQ ID NO: 16455 - protein, 451 aa, synthetic construct; identical to SEQ ID NO: 15965
  source 1..451: note = Description of Artificial Sequence: Synthetic polypeptide; note = XENP019161 1G6_H1.271_L1.116_IgG1_PVA_/S267K Heavy Chain

SEQ ID NO: 16456 - protein, 122 aa, synthetic construct; identical to SEQ ID NO: 10293
  source 1..122: note = Description of Artificial Sequence: Synthetic polypeptide; note = VH of XENP019161

SEQ ID NO: 16457 - protein, 5 aa, synthetic construct
  source 1..5: note = Description of Artificial Sequence: Synthetic peptide; note = XENP019161 vhCDR1
NYWMN

SEQ ID NO: 16458 - protein, 19 aa, synthetic construct
  source 1..19: note = Description of Artificial Sequence: Synthetic peptide; note = XENP019161 vhCDR2
EIRLYSNNYATHYAEPVKG

SEQ ID NO: 16459 - protein, 11 aa, synthetic construct
  source 1..11: note = Description of Artificial Sequence: Synthetic peptide; note = XENP019161 vhCDR3
YYGNYGGYFDV

SEQ ID NO: 16460 - protein, 214 aa, synthetic construct; identical to SEQ ID NO: 15260
  source 1..214: note = Description of Artificial Sequence: Synthetic polypeptide; note = XENP019161 1G6_H1.271_L1.116_IgG1_PVA_/S267K Light Chain

SEQ ID NO: 16461 - protein, 107 aa, synthetic construct; identical to SEQ ID NO: 9538
  source 1..107: note = Description of Artificial Sequence: Synthetic polypeptide; note = VL of XENP019161

SEQ ID NO: 16462 - protein, 11 aa, synthetic construct
  source 1..11: note = Description of Artificial Sequence: Synthetic peptide; note = XENP019161 vlCDR1
RASQSVSNDVA

SEQ ID NO: 16463 - protein, 7 aa, synthetic construct
  source 1..7: note = Description of Artificial Sequence: Synthetic peptide; note = XENP019161 vlCDR2
YASHRYT

SEQ ID NO: 16464 - protein, 9 aa, synthetic construct
  source 1..9: note = Description of Artificial Sequence: Synthetic peptide; note = XENP019161 vlCDR3
QQDFSSPRT

SEQ ID NO: 16465 - protein, 451 aa, synthetic construct; identical to SEQ ID NO: 15975
  source 1..451: note = Description of Artificial Sequence: Synthetic polypeptide; note = XENP019162 1G6_H1.272_L1.116_IgG1_PVA_/S267K Heavy Chain

SEQ ID NO: 16466 - protein, 122 aa, synthetic construct; identical to SEQ ID NO: 10302
  source 1..122: note = Description of Artificial Sequence: Synthetic polypeptide; note = VH of XENP019162

SEQ ID NO: 16467 - protein, 5 aa, synthetic construct
  source 1..5: note = Description of Artificial Sequence: Synthetic peptide; note = XENP019162 vhCDR1
NFWMN

SEQ ID NO: 16468 - protein, 19 aa, synthetic construct
  source 1..19: note = Description of Artificial Sequence: Synthetic peptide; note = XENP019162 vhCDR2
EIRLYSNNYATHYAEPVKG

SEQ ID NO: 16469 - protein, 11 aa, synthetic construct
  source 1..11: note = Description of Artificial Sequence: Synthetic peptide; note = XENP019162 vhCDR3
YYGNYGGYFDV

SEQ ID NO: 16470 - protein, 214 aa, synthetic construct; identical to SEQ ID NO: 15260
  source 1..214: note = Description of Artificial Sequence: Synthetic polypeptide; note = XENP019162 1G6_H1.272_L1.116_IgG1_PVA_/S267K Light Chain

SEQ ID NO: 16471 - protein, 107 aa, synthetic construct; identical to SEQ ID NO: 9538
  source 1..107: note = Description of Artificial Sequence: Synthetic polypeptide; note = VL of XENP019162

SEQ ID NO: 16472 - protein, 11 aa, synthetic construct
  source 1..11: note = Description of Artificial Sequence: Synthetic peptide; note = XENP019162 vlCDR1
RASQSVSNDVA

SEQ ID NO: 16473 - protein, 7 aa, synthetic construct
  source 1..7: note = Description of Artificial Sequence: Synthetic peptide; note = XENP019162 vlCDR2
YASHRYT

SEQ ID NO: 16474 - protein, 9 aa, synthetic construct
  source 1..9: note = Description of Artificial Sequence: Synthetic peptide; note = XENP019162 vlCDR3
QQDFSSPRT

SEQ ID NO: 16475 - protein, 451 aa, synthetic construct; identical to SEQ ID NO: 12615
  source 1..451: note = Description of Artificial Sequence: Synthetic polypeptide; note = XENP019163 1G6_H1.90_L1.177_IgG1_PVA_/S267K Heavy Chain

SEQ ID NO: 16476 - protein, 122 aa, synthetic construct; identical to SEQ ID NO: 7161
  source 1..122: note = Description of Artificial Sequence: Synthetic polypeptide; note = VH of XENP019163

SEQ ID NO: 16477 - protein, 5 aa, synthetic construct
  source 1..5: note = Description of Artificial Sequence: Synthetic peptide; note = XENP019163 vhCDR1
NYWMN

SEQ ID NO: 16478 - protein, 19 aa, synthetic construct
  source 1..19: note = Description of Artificial Sequence: Synthetic peptide; note = XENP019163 vhCDR2
EIRLYSNNYATHYAEPVKG

SEQ ID NO: 16479 - protein, 11 aa, synthetic construct
  source 1..11: note = Description of Artificial Sequence: Synthetic peptide; note = XENP019163 vhCDR3
YYGNYGGYFDV

SEQ ID NO: 16480 - protein, 214 aa, synthetic construct; identical to SEQ ID NO: 16350
  source 1..214: note = Description of Artificial Sequence: Synthetic polypeptide; note = XENP019163 1G6_H1.90_L1.177_IgG1_PVA_/S267K Light Chain

SEQ ID NO: 16481 - protein, 107 aa, synthetic construct; identical to SEQ ID NO: 10636
  source 1..107: note = Description of Artificial Sequence: Synthetic polypeptide; note = VL of XENP019163

SEQ ID NO: 16482 - protein, 11 aa, synthetic construct
  source 1..11: note = Description of Artificial Sequence: Synthetic peptide; note = XENP019163 vlCDR1
RASQSVGNDVA

SEQ ID NO: 16483 - protein, 7 aa, synthetic construct
  source 1..7: note = Description of Artificial Sequence: Synthetic peptide; note = XENP019163 vlCDR2
YASHRYT

SEQ ID NO: 16484 - protein, 9 aa, synthetic construct
  source 1..9: note = Description of Artificial Sequence: Synthetic peptide; note = XENP019163 vlCDR3
QQDFSSPRT

SEQ ID NO: 16485 - protein, 451 aa, synthetic construct; identical to SEQ ID NO: 15945
  source 1..451: note = Description of Artificial Sequence: Synthetic polypeptide; note = XENP019164 1G6_H1.269_L1.177_IgG1_PVA_/S267K Heavy Chain

SEQ ID NO: 16486 - protein, 122 aa, synthetic construct; identical to SEQ ID NO: 10275
  source 1..122: note = Description of Artificial Sequence: Synthetic polypeptide; note = VH of XENP019164

SEQ ID NO: 16487 - protein, 5 aa, synthetic construct
  source 1..5: note = Description of Artificial Sequence: Synthetic peptide; note = XENP019164 vhCDR1
NFWMN

SEQ ID NO: 16488 - protein, 19 aa, synthetic construct
  source 1..19: note = Description of Artificial Sequence: Synthetic peptide; note = XENP019164 vhCDR2
EIRLYSNNYATHYAEPVKG

SEQ ID NO: 16489 - protein, 11 aa, synthetic construct
  source 1..11: note = Description of Artificial Sequence: Synthetic peptide; note = XENP019164 vhCDR3
YYGNYGGYFDV

SEQ ID NO: 16490 - protein, 214 aa, synthetic construct; identical to SEQ ID NO: 16350
  source 1..214: note = Description of Artificial Sequence: Synthetic polypeptide; note = XENP019164 1G6_H1.269_L1.177_IgG1_PVA_/S267K Light Chain

SEQ ID NO: 16491 - protein, 107 aa, synthetic construct; identical to SEQ ID NO: 10636
  source 1..107: note = Description of Artificial Sequence: Synthetic polypeptide; note = VL of XENP019164

SEQ ID NO: 16492 - protein, 11 aa, synthetic construct
  source 1..11: note = Description of Artificial Sequence: Synthetic peptide; note = XENP019164 vlCDR1
RASQSVGNDVA

SEQ ID NO: 16493 - protein, 7 aa, synthetic construct
  source 1..7: note = Description of Artificial Sequence: Synthetic peptide; note = XENP019164 vlCDR2
YASHRYT

SEQ ID NO: 16494 - protein, 9 aa, synthetic construct
  source 1..9: note = Description of Artificial Sequence: Synthetic peptide; note = XENP019164 vlCDR3
QQDFSSPRT

SEQ ID NO: 16495 - protein, 451 aa, synthetic construct; identical to SEQ ID NO: 15965
  source 1..451: note = Description of Artificial Sequence: Synthetic polypeptide; note = XENP019165 1G6_H1.271_L1.177_IgG1_PVA_/S267K Heavy Chain

SEQ ID NO: 16496 - protein, 122 aa, synthetic construct; identical to SEQ ID NO: 10293
  source 1..122: note = Description of Artificial Sequence: Synthetic polypeptide; note = VH of XENP019165

SEQ ID NO: 16497 - protein, 5 aa, synthetic construct
  source 1..5: note = Description of Artificial Sequence: Synthetic peptide; note = XENP019165 vhCDR1
NYWMN

SEQ ID NO: 16498 - protein, 19 aa, synthetic construct
  source 1..19: note = Description of Artificial Sequence: Synthetic peptide; note = XENP019165 vhCDR2
EIRLYSNNYATHYAEPVKG

SEQ ID NO: 16499 - protein, 11 aa, synthetic construct
  source 1..11: note = Description of Artificial Sequence: Synthetic peptide; note = XENP019165 vhCDR3
YYGNYGGYFDV

SEQ ID NO: 16500 - protein, 214 aa, synthetic construct; identical to SEQ ID NO: 16350
  source 1..214: note = Description of Artificial Sequence: Synthetic polypeptide; note = XENP019165 1G6_H1.271_L1.177_IgG1_PVA_/S267K Light Chain

SEQ ID NO: 16501 - protein, 107 aa, synthetic construct; identical to SEQ ID NO: 10636
  source 1..107: note = Description of Artificial Sequence: Synthetic polypeptide; note = VL of XENP019165

SEQ ID NO: 16502 - protein, 11 aa, synthetic construct
  source 1..11: note = Description of Artificial Sequence: Synthetic peptide; note = XENP019165 vlCDR1
RASQSVGNDVA

SEQ ID NO: 16503 - protein, 7 aa, synthetic construct
  source 1..7: note = Description of Artificial Sequence: Synthetic peptide; note = XENP019165 vlCDR2
YASHRYT

SEQ ID NO: 16504 - protein, 9 aa, synthetic construct
  source 1..9: note = Description of Artificial Sequence: Synthetic peptide; note = XENP019165 vlCDR3
QQDFSSPRT

SEQ ID NO: 16505 - protein, 451 aa, synthetic construct; identical to SEQ ID NO: 15975
  source 1..451: note = Description of Artificial Sequence: Synthetic polypeptide; note = XENP019166 1G6_H1.272_L1.177_IgG1_PVA_/S267K Heavy Chain

SEQ ID NO: 16506 - protein, 122 aa, synthetic construct; identical to SEQ ID NO: 10302
  source 1..122: note = Description of Artificial Sequence: Synthetic polypeptide; note = VH of XENP019166

SEQ ID NO: 16507 - protein, 5 aa, synthetic construct
  source 1..5: note = Description of Artificial Sequence: Synthetic peptide; note = XENP019166 vhCDR1
NFWMN

SEQ ID NO: 16508 - protein, 19 aa, synthetic construct
  source 1..19: note = Description of Artificial Sequence: Synthetic peptide; note = XENP019166 vhCDR2
EIRLYSNNYATHYAEPVKG

SEQ ID NO: 16509 - protein, 11 aa, synthetic construct
  source 1..11: note = Description of Artificial Sequence: Synthetic peptide; note = XENP019166 vhCDR3
YYGNYGGYFDV

SEQ ID NO: 16510 - protein, 214 aa, synthetic construct; identical to SEQ ID NO: 16350
  source 1..214: note = Description of Artificial Sequence: Synthetic polypeptide; note = XENP019166 1G6_H1.272_L1.177_IgG1_PVA_/S267K Light Chain

SEQ ID NO: 16511 - protein, 107 aa, synthetic construct; identical to SEQ ID NO: 10636
  source 1..107: note = Description of Artificial Sequence: Synthetic polypeptide; note = VL of XENP019166

SEQ ID NO: 16512 - protein, 11 aa, synthetic construct
  source 1..11: note = Description of Artificial Sequence: Synthetic peptide; note = XENP019166 vlCDR1
RASQSVGNDVA

SEQ ID NO: 16513 - protein, 7 aa, synthetic construct
  source 1..7: note = Description of Artificial Sequence: Synthetic peptide; note = XENP019166 vlCDR2
YASHRYT

SEQ ID NO: 16514 - protein, 9 aa, synthetic construct
  source 1..9: note = Description of Artificial Sequence: Synthetic peptide; note = XENP019166 vlCDR3
QQDFSSPRT

SEQ ID NO: 16515 - protein, 451 aa, synthetic construct; identical to SEQ ID NO: 12615
  source 1..451: note = Description of Artificial Sequence: Synthetic polypeptide; note = XENP019167 1G6_H1.90_L1.175_IgG1_PVA_/S267K Heavy Chain

SEQ ID NO: 16516 - protein, 122 aa, synthetic construct; identical to SEQ ID NO: 7161
  source 1..122: note = Description of Artificial Sequence: Synthetic polypeptide; note = VH of XENP019167

SEQ ID NO: 16517 - protein, 5 aa, synthetic construct
  source 1..5: note = Description of Artificial Sequence: Synthetic peptide; note = XENP019167 vhCDR1
NYWMN

SEQ ID NO: 16518 - protein, 19 aa, synthetic construct
  source 1..19: note = Description of Artificial Sequence: Synthetic peptide; note = XENP019167 vhCDR2
EIRLYSNNYATHYAEPVKG

SEQ ID NO: 16519 - protein, 11 aa, synthetic construct
  source 1..11: note = Description of Artificial Sequence: Synthetic peptide; note = XENP019167 vhCDR3
YYGNYGGYFDV

SEQ ID NO: 16520 - protein, 214 aa, synthetic construct; identical to SEQ ID NO: 16330
  source 1..214: note = Description of Artificial Sequence: Synthetic polypeptide; note = XENP019167 1G6_H1.90_L1.175_IgG1_PVA_/S267K Light Chain

SEQ ID NO: 16521 - protein, 107 aa, synthetic construct; identical to SEQ ID NO: 10618
  source 1..107: note = Description of Artificial Sequence: Synthetic polypeptide; note = VL of XENP019167

SEQ ID NO: 16522 - protein, 11 aa, synthetic construct
  source 1..11: note = Description of Artificial Sequence: Synthetic peptide; note = XENP019167 vlCDR1
RASQSVGNDVA

SEQ ID NO: 16523 - protein, 7 aa, synthetic construct
  source 1..7: note = Description of Artificial Sequence: Synthetic peptide; note = XENP019167 vlCDR2
YASHRYT

SEQ ID NO: 16524 - protein, 9 aa, synthetic construct
  source 1..9: note = Description of Artificial Sequence: Synthetic peptide; note = XENP019167 vlCDR3
QQDWSSPRT

SEQ ID NO: 16525 - protein, 451 aa, synthetic construct; identical to SEQ ID NO: 15945
  source 1..451: note = Description of Artificial Sequence: Synthetic polypeptide; note = XENP019168 1G6_H1.269_L1.175_IgG1_PVA_/S267K Heavy Chain

SEQ ID NO: 16526 - protein, 122 aa, synthetic construct; identical to SEQ ID NO: 10275
  source 1..122: note = Description of Artificial Sequence: Synthetic polypeptide; note = VH of XENP019168

SEQ ID NO: 16527 - protein, 5 aa, synthetic construct
  source 1..5: note = Description of Artificial Sequence: Synthetic peptide; note = XENP019168 vhCDR1
NFWMN

SEQ ID NO: 16528 - protein, 19 aa, synthetic construct
  source 1..19: note = Description of Artificial Sequence: Synthetic peptide; note = XENP019168 vhCDR2
EIRLYSNNYATHYAEPVKG

SEQ ID NO: 16529 - protein, 11 aa, synthetic construct
  source 1..11: note = Description of Artificial Sequence: Synthetic peptide; note = XENP019168 vhCDR3
YYGNYGGYFDV

SEQ ID NO: 16530 - protein, 214 aa, synthetic construct; identical to SEQ ID NO: 16330
  source 1..214: note = Description of Artificial Sequence: Synthetic polypeptide; note = XENP019168 1G6_H1.269_L1.175_IgG1_PVA_/S267K Light Chain

SEQ ID NO: 16531 - protein, 107 aa, synthetic construct; identical to SEQ ID NO: 10618
  source 1..107: note = Description of Artificial Sequence: Synthetic polypeptide; note = VL of XENP019168

SEQ ID NO: 16532 - protein, 11 aa, synthetic construct
  source 1..11: note = Description of Artificial Sequence: Synthetic peptide; note = XENP019168 vlCDR1
RASQSVGNDVA

SEQ ID NO: 16533 - protein, 7 aa, synthetic construct
  source 1..7: note = Description of Artificial Sequence: Synthetic peptide; note = XENP019168 vlCDR2
YASHRYT

SEQ ID NO: 16534 - protein, 9 aa, synthetic construct
  source 1..9: note = Description of Artificial Sequence: Synthetic peptide; note = XENP019168 vlCDR3
QQDWSSPRT

SEQ ID NO: 16535 - protein, 451 aa, synthetic construct; identical to SEQ ID NO: 15965
  source 1..451: note = Description of Artificial Sequence: Synthetic polypeptide; note = XENP019169 1G6_H1.271_L1.175_IgG1_PVA_/S267K Heavy Chain

SEQ ID NO: 16536 - protein, 122 aa, synthetic construct; identical to SEQ ID NO: 10293
  source 1..122: note = Description of Artificial Sequence: Synthetic polypeptide; note = VH of XENP019169

SEQ ID NO: 16537 - protein, 5 aa, synthetic construct
  source 1..5: note = Description of Artificial Sequence: Synthetic peptide; note = XENP019169 vhCDR1
NYWMN

SEQ ID NO: 16538 - protein, 19 aa, synthetic construct
  source 1..19: note = Description of Artificial Sequence: Synthetic peptide; note = XENP019169 vhCDR2
EIRLYSNNYATHYAEPVKG

SEQ ID NO: 16539 - protein, 11 aa, synthetic construct
  source 1..11: note = Description of Artificial Sequence: Synthetic peptide; note = XENP019169 vhCDR3
YYGNYGGYFDV

SEQ ID NO: 16540 - protein, 214 aa, synthetic construct; identical to SEQ ID NO: 16330
  source 1..214: note = Description of Artificial Sequence: Synthetic polypeptide; note = XENP019169 1G6_H1.271_L1.175_IgG1_PVA_/S267K Light Chain

SEQ ID NO: 16541 - protein, 107 aa, synthetic construct; identical to SEQ ID NO: 10618
  source 1..107: note = Description of Artificial Sequence: Synthetic polypeptide; note = VL of XENP019169

SEQ ID NO: 16542 - protein, 11 aa, synthetic construct
  source 1..11: note = Description of Artificial Sequence: Synthetic peptide; note = XENP019169 vlCDR1
RASQSVGNDVA

SEQ ID NO: 16543 - protein, 7 aa, synthetic construct
  source 1..7: note = Description of Artificial Sequence: Synthetic peptide; note = XENP019169 vlCDR2
YASHRYT

SEQ ID NO: 16544 - protein, 9 aa, synthetic construct
  source 1..9: note = Description of Artificial Sequence: Synthetic peptide; note = XENP019169 vlCDR3
QQDWSSPRT

SEQ ID NO: 16545 - protein, 451 aa, synthetic construct; identical to SEQ ID NO: 15975
  source 1..451: note = Description of Artificial Sequence: Synthetic polypeptide; note = XENP019170 1G6_H1.272_L1.175_IgG1_PVA_/S267K Heavy Chain

SEQ ID NO: 16546 - protein, 122 aa, synthetic construct; identical to SEQ ID NO: 10302
  source 1..122: note = Description of Artificial Sequence: Synthetic polypeptide; note = VH of XENP019170

SEQ ID NO: 16547 - protein, 5 aa, synthetic construct
  source 1..5: note = Description of Artificial Sequence: Synthetic peptide; note = XENP019170 vhCDR1
NFWMN

SEQ ID NO: 16548 - protein, 19 aa, synthetic construct
  source 1..19: note = Description of Artificial Sequence: Synthetic peptide; note = XENP019170 vhCDR2
EIRLYSNNYATHYAEPVKG

SEQ ID NO: 16549 - protein, 11 aa, synthetic construct
  source 1..11: note = Description of Artificial Sequence: Synthetic peptide; note = XENP019170 vhCDR3
YYGNYGGYFDV

SEQ ID NO: 16550 - protein, 214 aa, synthetic construct; identical to SEQ ID NO: 16330
  source 1..214: note = Description of Artificial Sequence: Synthetic polypeptide; note = XENP019170 1G6_H1.272_L1.175_IgG1_PVA_/S267K Light Chain

SEQ ID NO: 16551 - protein, 107 aa, synthetic construct; identical to SEQ ID NO: 10618
  source 1..107: note = Description of Artificial Sequence: Synthetic polypeptide; note = VL of XENP019170

SEQ ID NO: 16552 - protein, 11 aa, synthetic construct
  source 1..11: note = Description of Artificial Sequence: Synthetic peptide; note = XENP019170 vlCDR1
RASQSVGNDVA

SEQ ID NO: 16553 - protein, 7 aa, synthetic construct
  source 1..7: note = Description of Artificial Sequence: Synthetic peptide; note = XENP019170 vlCDR2
YASHRYT

SEQ ID NO: 16554 - protein, 9 aa, synthetic construct
  source 1..9: note = Description of Artificial Sequence: Synthetic peptide; note = XENP019170 vlCDR3
QQDWSSPRT

SEQ ID NO: 16555 - protein, 451 aa, synthetic construct; identical to SEQ ID NO: 11545
  source 1..451: note = Description of Artificial Sequence: Synthetic polypeptide; note = XENP019172 1G6_H1_L1.190_IgG1_PVA_/S267K Heavy Chain

SEQ ID NO: 16556 - protein, 122 aa, synthetic construct; identical to SEQ ID NO: 6246
  source 1..122: note = Description of Artificial Sequence: Synthetic polypeptide; note = VH of XENP019172

SEQ ID NO: 16557 - protein, 5 aa, synthetic construct
  source 1..5: note = Description of Artificial Sequence: Synthetic peptide; note = XENP019172 vhCDR1
NYWMN

SEQ ID NO: 16558 - protein, 19 aa, synthetic construct
  source 1..19: note = Description of Artificial Sequence: Synthetic peptide; note = XENP019172 vhCDR2
EIRLKSNNYATHYAEPVKG

SEQ ID NO: 16559 - protein, 11 aa, synthetic construct
  source 1..11: note = Description of Artificial Sequence: Synthetic peptide; note = XENP019172 vhCDR3
YYGNYGGYFDV

SEQ ID NO: 16560 - protein, 214 aa, synthetic construct
  source 1..214: note = Description of Artificial Sequence: Synthetic polypeptide; note = XENP019172 1G6_H1_L1.190_IgG1_PVA_/S267K Light Chain
SIVMTQSPATLSVSPGERATLSCRASQSVGNDVAWYQQKPGQSPRLLINYASHRYTGVPDRFTGSGYGTEFTLTISSLQSEDFAVYFCQQDFSSPRTFGGGTKVEIKRTVAAPSVFIFPPSDEQLKSGTASVVCLLNNFYPREAKVQWKVDNALQSGNSQESVTEQDSKDSTYSLSSTLTLSKADYEKHKVYACEVTHQGLSSPVTKSFNRGEC

SEQ ID NO: 16561 - protein, 107 aa, synthetic construct; identical to SEQ ID NO: 10828
  source 1..107: note = Description of Artificial Sequence: Synthetic polypeptide; note = VL of XENP019172

SEQ ID NO: 16562 - protein, 11 aa, synthetic construct
  source 1..11: note = Description of Artificial Sequence: Synthetic peptide; note = XENP019172 vlCDR1
RASQSVGNDVA

SEQ ID NO: 16563 - protein, 7 aa, synthetic construct
  source 1..7: note = Description of Artificial Sequence: Synthetic peptide; note = XENP019172 vlCDR2
YASHRYT

SEQ ID NO: 16564 - protein, 9 aa, synthetic construct
  source 1..9: note = Description of Artificial Sequence: Synthetic peptide; note = XENP019172 vlCDR3
QQDFSSPRT

SEQ ID NO: 16565 - protein, 451 aa, synthetic construct; identical to SEQ ID NO: 11545
  source 1..451: note = Description of Artificial Sequence: Synthetic polypeptide; note = XENP019173 1G6_H1_L1.191_IgG1_PVA_/S267K Heavy Chain

SEQ ID NO: 16566 - protein, 122 aa, synthetic construct; identical to SEQ ID NO: 6246
  source 1..122: note = Description of Artificial Sequence: Synthetic polypeptide; note = VH of XENP019173

SEQ ID NO: 16567 - protein, 5 aa, synthetic construct
  source 1..5: note = Description of Artificial Sequence: Synthetic peptide; note = XENP019173 vhCDR1
NYWMN

SEQ ID NO: 16568 - protein, 19 aa, synthetic construct
  source 1..19: note = Description of Artificial Sequence: Synthetic peptide; note = XENP019173 vhCDR2
EIRLKSNNYATHYAEPVKG

SEQ ID NO: 16569 - protein, 11 aa, synthetic construct
  source 1..11: note = Description of Artificial Sequence: Synthetic peptide; note = XENP019173 vhCDR3
YYGNYGGYFDV

SEQ ID NO: 16570 - protein, 214 aa, synthetic construct
  source 1..214: note = Description of Artificial Sequence: Synthetic polypeptide; note = XENP019173 1G6_H1_L1.191_IgG1_PVA_/S267K Light Chain
SIVMTQSPATLSVSPGERATLSCRASQSVGNDVAWYQQKPGQSPRLLINYASHRYTGVPDRFTGSGYGTEFTLTISSLQSEDFAVYFCQQDWSSPRTFGGGTKVEIKRTVAAPSVFIFPPSDEQLKSGTASVVCLLNNFYPREAKVQWKVDNALQSGNSQESVTEQDSKDSTYSLSSTLTLSKADYEKHKVYACEVTHQGLSSPVTKSFNRGEC

SEQ ID NO: 16571 - protein, 107 aa, synthetic construct; identical to SEQ ID NO: 10837
  source 1..107: note = Description of Artificial Sequence: Synthetic polypeptide; note = VL of XENP019173

SEQ ID NO: 16572 - protein, 11 aa, synthetic construct
  source 1..11: note = Description of Artificial Sequence: Synthetic peptide; note = XENP019173 vlCDR1
RASQSVGNDVA

SEQ ID NO: 16573 - protein, 7 aa, synthetic construct
  source 1..7: note = Description of Artificial Sequence: Synthetic peptide; note = XENP019173 vlCDR2
YASHRYT

SEQ ID NO: 16574 - protein, 9 aa, synthetic construct
  source 1..9: note = Description of Artificial Sequence: Synthetic peptide; note = XENP019173 vlCDR3
QQDWSSPRT

SEQ ID NO: 16575 - protein, 451 aa, synthetic construct; identical to SEQ ID NO: 12615
  source 1..451: note = Description of Artificial Sequence: Synthetic polypeptide; note = XENP019174 1G6_H1.90_L1.190_IgG1_PVA_/S267K Heavy Chain

SEQ ID NO: 16576 - protein, 122 aa, synthetic construct; identical to SEQ ID NO: 7161
  source 1..122: note = Description of Artificial Sequence: Synthetic polypeptide; note = VH of XENP019174

SEQ ID NO: 16577 - protein, 5 aa, synthetic construct
  source 1..5: note = Description of Artificial Sequence: Synthetic peptide; note = XENP019174 vhCDR1
NYWMN

SEQ ID NO: 16578 - protein, 19 aa, synthetic construct
  source 1..19: note = Description of Artificial Sequence: Synthetic peptide; note = XENP019174 vhCDR2
EIRLYSNNYATHYAEPVKG

SEQ ID NO: 16579 - protein, 11 aa, synthetic construct
  source 1..11: note = Description of Artificial Sequence: Synthetic peptide; note = XENP019174 vhCDR3
YYGNYGGYFDV

SEQ ID NO: 16580 - protein, 214 aa, synthetic construct; identical to SEQ ID NO: 16560
  source 1..214: note = Description of Artificial Sequence: Synthetic polypeptide; note = XENP019174 1G6_H1.90_L1.190_IgG1_PVA_/S267K Light Chain

SEQ ID NO: 16581 - protein, 107 aa, synthetic construct; identical to SEQ ID NO: 10828
  source 1..107: note = Description of Artificial Sequence: Synthetic polypeptide; note = VL of XENP019174

SEQ ID NO: 16582 - protein, 11 aa, synthetic construct
  source 1..11: note = Description of Artificial Sequence: Synthetic peptide; note = XENP019174 vlCDR1
RASQSVGNDVA

SEQ ID NO: 16583 - protein, 7 aa, synthetic construct
  source 1..7: note = Description of Artificial Sequence: Synthetic peptide; note = XENP019174 vlCDR2
YASHRYT

SEQ ID NO: 16584 - protein, 9 aa, synthetic construct
  source 1..9: note = Description of Artificial Sequence: Synthetic peptide; note = XENP019174 vlCDR3
QQDFSSPRT

SEQ ID NO: 16585 - protein, 451 aa, synthetic construct; identical to SEQ ID NO: 12615
  source 1..451: note = Description of Artificial Sequence: Synthetic polypeptide; note = XENP019175 1G6_H1.90_L1.191_IgG1_PVA_/S267K Heavy Chain

SEQ ID NO: 16586 - protein, 122 aa, synthetic construct; identical to SEQ ID NO: 7161
  source 1..122: note = Description of Artificial Sequence: Synthetic polypeptide; note = VH of XENP019175

SEQ ID NO: 16587 - protein, 5 aa, synthetic construct
  source 1..5: note = Description of Artificial Sequence: Synthetic peptide; note = XENP019175 vhCDR1
NYWMN

SEQ ID NO: 16588 - protein, 19 aa, synthetic construct
  source 1..19: note = Description of Artificial Sequence: Synthetic peptide; note = XENP019175 vhCDR2
EIRLYSNNYATHYAEPVKG

SEQ ID NO: 16589 - protein, 11 aa, synthetic construct
  source 1..11: note = Description of Artificial Sequence: Synthetic peptide; note = XENP019175 vhCDR3
YYGNYGGYFDV

SEQ ID NO: 16590 - protein, 214 aa, synthetic construct; identical to SEQ ID NO: 16570
  source 1..214: note = Description of Artificial Sequence: Synthetic polypeptide; note = XENP019175 1G6_H1.90_L1.191_IgG1_PVA_/S267K Light Chain

SEQ ID NO: 16591 - protein, 107 aa, synthetic construct; identical to SEQ ID NO: 10837
  source 1..107: note = Description of Artificial Sequence: Synthetic polypeptide; note = VL of XENP019175

SEQ ID NO: 16592 - protein, 11 aa, synthetic construct
  source 1..11: note = Description of Artificial Sequence: Synthetic peptide; note = XENP019175 vlCDR1
RASQSVGNDVA

SEQ ID NO: 16593 - protein, 7 aa, synthetic construct
  source 1..7: note = Description of Artificial Sequence: Synthetic peptide; note = XENP019175 vlCDR2
YASHRYT

SEQ ID NO: 16594 - protein, 9 aa, synthetic construct
  source 1..9: note = Description of Artificial Sequence: Synthetic peptide; note = XENP019175 vlCDR3
QQDWSSPRT

SEQ ID NO: 16595 - protein, 451 aa, synthetic construct; identical to SEQ ID NO: 15945
  source 1..451: note = Description of Artificial Sequence: Synthetic polypeptide; note = XENP019176 1G6_H1.269_L1.190_IgG1_PVA_/S267K Heavy Chain

SEQ ID NO: 16596 - protein, 122 aa, synthetic construct; identical to SEQ ID NO: 10275
  source 1..122: note = Description of Artificial Sequence: Synthetic polypeptide; note = VH of XENP019176

SEQ ID NO: 16597 - protein, 5 aa, synthetic construct
  source 1..5: note = Description of Artificial Sequence: Synthetic peptide; note = XENP019176 vhCDR1
NFWMN

SEQ ID NO: 16598 - protein, 19 aa, synthetic construct
  source 1..19: note = Description of Artificial Sequence: Synthetic peptide; note = XENP019176 vhCDR2
EIRLYSNNYATHYAEPVKG

SEQ ID NO: 16599 - protein, 11 aa, synthetic construct
  source 1..11: note = Description of Artificial Sequence: Synthetic peptide; note = XENP019176 vhCDR3
YYGNYGGYFDV

SEQ ID NO: 16600 - protein, 214 aa, synthetic construct; identical to SEQ ID NO: 16560
  source 1..214: note = Description of Artificial Sequence: Synthetic polypeptide; note = XENP019176 1G6_H1.269_L1.190_IgG1_PVA_/S267K Light Chain

SEQ ID NO: 16601 - protein, 107 aa, synthetic construct; identical to SEQ ID NO: 10828
  source 1..107: note = Description of Artificial Sequence: Synthetic polypeptide; note = VL of XENP019176

SEQ ID NO: 16602 - protein, 11 aa, synthetic construct
  source 1..11: note = Description of Artificial Sequence: Synthetic peptide; note = XENP019176 vlCDR1
RASQSVGNDVA

SEQ ID NO: 16603 - protein, 7 aa, synthetic construct
  source 1..7: note = Description of Artificial Sequence: Synthetic peptide; note = XENP019176 vlCDR2
YASHRYT

SEQ ID NO: 16604 - protein, 9 aa, synthetic construct
  source 1..9: note = Description of Artificial Sequence: Synthetic peptide; note = XENP019176 vlCDR3
QQDFSSPRT

SEQ ID NO: 16605 - protein, 451 aa, synthetic construct; identical to SEQ ID NO: 15965
  source 1..451: note = Description of Artificial Sequence: Synthetic polypeptide; note = XENP019177 1G6_H1.271_L1.190_IgG1_PVA_/S267K Heavy Chain

SEQ ID NO: 16606 - protein, 122 aa, synthetic construct; identical to SEQ ID NO: 10293
  source 1..122: note = Description of Artificial Sequence: Synthetic polypeptide; note = VH of XENP019177

SEQ ID NO: 16607 - protein, 5 aa, synthetic construct
  source 1..5: note = Description of Artificial Sequence: Synthetic peptide; note = XENP019177 vhCDR1
NYWMN

SEQ ID NO: 16608 - protein, 19 aa, synthetic construct
  source 1..19: note = Description of Artificial Sequence: Synthetic peptide; note = XENP019177 vhCDR2
EIRLYSNNYATHYAEPVKG

SEQ ID NO: 16609 - protein, 11 aa, synthetic construct
  source 1..11: note = Description of Artificial Sequence: Synthetic peptide; note = XENP019177 vhCDR3
YYGNYGGYFDV

SEQ ID NO: 16610 - protein, 214 aa, synthetic construct; identical to SEQ ID NO: 16560
  source 1..214: note = Description of Artificial Sequence: Synthetic polypeptide; note = XENP019177 1G6_H1.271_L1.190_IgG1_PVA_/S267K Light Chain

SEQ ID NO: 16611 - protein, 107 aa, synthetic construct; identical to SEQ ID NO: 10828
  source 1..107: note = Description of Artificial Sequence: Synthetic polypeptide; note = VL of XENP019177

SEQ ID NO: 16612 - protein, 11 aa, synthetic construct
  source 1..11: note = Description of Artificial Sequence: Synthetic peptide; note = XENP019177 vlCDR1
RASQSVGNDVA

SEQ ID NO: 16613 - protein, 7 aa, synthetic construct
  source 1..7: note = Description of Artificial Sequence: Synthetic peptide; note = XENP019177 vlCDR2
YASHRYT

SEQ ID NO: 16614 - protein, 9 aa, synthetic construct
  source 1..9: note = Description of Artificial Sequence: Synthetic peptide; note = XENP019177 vlCDR3
QQDFSSPRT

SEQ ID NO: 16615 - protein, 451 aa, synthetic construct; identical to SEQ ID NO: 15975
  source 1..451: note = Description of Artificial Sequence: Synthetic polypeptide; note = XENP019178 1G6_H1.272_L1.190_IgG1_PVA_/S267K Heavy Chain

SEQ ID NO: 16616 - protein, 122 aa, synthetic construct; identical to SEQ ID NO: 10302
  source 1..122: note = Description of Artificial Sequence: Synthetic polypeptide; note = VH of XENP019178

SEQ ID NO: 16617 - protein, 5 aa, synthetic construct
  source 1..5: note = Description of Artificial Sequence: Synthetic peptide; note = XENP019178 vhCDR1
NFWMN

SEQ ID NO: 16618 - protein, 19 aa, synthetic construct
  source 1..19: note = Description of Artificial Sequence: Synthetic peptide; note = XENP019178 vhCDR2
EIRLYSNNYATHYAEPVKG

SEQ ID NO: 16619 - protein, 11 aa, synthetic construct
  source 1..11: note = Description of Artificial Sequence: Synthetic peptide; note = XENP019178 vhCDR3
YYGNYGGYFDV

SEQ ID NO: 16620 - protein, 214 aa, synthetic construct; identical to SEQ ID NO: 16560
  source 1..214: note = Description of Artificial Sequence: Synthetic polypeptide; note = XENP019178 1G6_H1.272_L1.190_IgG1_PVA_/S267K Light Chain

SEQ ID NO: 16621 - protein, 107 aa, synthetic construct; identical to SEQ ID NO: 10828
  source 1..107: note = Description of Artificial Sequence: Synthetic polypeptide; note = VL of XENP019178

SEQ ID NO: 16622 - protein, 11 aa, synthetic construct
  source 1..11: note = Description of Artificial Sequence: Synthetic peptide; note = XENP019178 vlCDR1
RASQSVGNDVA

SEQ ID NO: 16623 - protein, 7 aa, synthetic construct
  source 1..7: note = Description of Artificial Sequence: Synthetic peptide; note = XENP019178 vlCDR2
YASHRYT

SEQ ID NO: 16624 - protein, 9 aa, synthetic construct
  source 1..9: note = Description of Artificial Sequence: Synthetic peptide; note = XENP019178 vlCDR3
QQDFSSPRT

SEQ ID NO: 16625 - protein, 451 aa, synthetic construct; identical to SEQ ID NO: 15945
  source 1..451: note = Description of Artificial Sequence: Synthetic polypeptide; note = XENP019179 1G6_H1.269_L1.191_IgG1_PVA_/S267K Heavy Chain

SEQ ID NO: 16626 - protein, 122 aa, synthetic construct; identical to SEQ ID NO: 10275
  source 1..122: note = Description of Artificial Sequence: Synthetic polypeptide; note = VH of XENP019179

SEQ ID NO: 16627 - protein, 5 aa, synthetic construct
  source 1..5: note = Description of Artificial Sequence: Synthetic peptide; note = XENP019179 vhCDR1
NFWMN

SEQ ID NO: 16628 - protein, 19 aa, synthetic construct
  source 1..19: note = Description of Artificial Sequence: Synthetic peptide; note = XENP019179 vhCDR2
EIRLYSNNYATHYAEPVKG

SEQ ID NO: 16629 - protein, 11 aa, synthetic construct
  source 1..11: note = Description of Artificial Sequence: Synthetic peptide; note = XENP019179 vhCDR3
YYGNYGGYFDV

SEQ ID NO: 16630 - protein, 214 aa, synthetic construct; identical to SEQ ID NO: 16570
  source 1..214: note = Description of Artificial Sequence: Synthetic polypeptide; note = XENP019179 1G6_H1.269_L1.191_IgG1_PVA_/S267K Light Chain

SEQ ID NO: 16631 - protein, 107 aa, synthetic construct; identical to SEQ ID NO: 10837
  source 1..107: note = Description of Artificial Sequence: Synthetic polypeptide; note = VL of XENP019179

SEQ ID NO: 16632 - protein, 11 aa, synthetic construct
  source 1..11: note = Description of Artificial Sequence: Synthetic peptide; note = XENP019179 vlCDR1
RASQSVGNDVA

SEQ ID NO: 16633 - protein, 7 aa, synthetic construct
  source 1..7: note = Description of Artificial Sequence: Synthetic peptide; note = XENP019179 vlCDR2
YASHRYT

SEQ ID NO: 16634 - protein, 9 aa, synthetic construct
  source 1..9: note = Description of Artificial Sequence: Synthetic peptide; note = XENP019179 vlCDR3
QQDWSSPRT

SEQ ID NO: 16635 - protein, 451 aa, synthetic construct; identical to SEQ ID NO: 15965
  source 1..451: note = Description of Artificial Sequence: Synthetic polypeptide; note = XENP019180 1G6_H1.271_L1.191_IgG1_PVA_/S267K Heavy Chain

SEQ ID NO: 16636 - protein, 122 aa, synthetic construct; identical to SEQ ID NO: 10293
  source 1..122: note = Description of Artificial Sequence: Synthetic polypeptide; note = VH of XENP019180

SEQ ID NO: 16637 - protein, 5 aa, synthetic construct
  source 1..5: note = Description of Artificial Sequence: Synthetic peptide; note = XENP019180 vhCDR1
NYWMN

SEQ ID NO: 16638 - protein, 19 aa, synthetic construct
  source 1..19: note = Description of Artificial Sequence: Synthetic peptide; note = XENP019180 vhCDR2
EIRLYSNNYATHYAEPVKG

SEQ ID NO: 16639 - protein, 11 aa, synthetic construct
  source 1..11: note = Description of Artificial Sequence: Synthetic peptide; note = XENP019180 vhCDR3
YYGNYGGYFDV

SEQ ID NO: 16640 - protein, 214 aa, synthetic construct; identical to SEQ ID NO: 16570
  source 1..214: note = Description of Artificial Sequence: Synthetic polypeptide; note = XENP019180 1G6_H1.271_L1.191_IgG1_PVA_/S267K Light Chain

SEQ ID NO: 16641 - protein, 107 aa, synthetic construct; identical to SEQ ID NO: 10837
  source 1..107: note = Description of Artificial Sequence: Synthetic polypeptide; note = VL of XENP019180

SEQ ID NO: 16642 - protein, 11 aa, synthetic construct
  source 1..11: note = Description of Artificial Sequence: Synthetic peptide; note = XENP019180 vlCDR1
RASQSVGNDVA

SEQ ID NO: 16643 - protein, 7 aa, synthetic construct
  source 1..7: note = Description of Artificial Sequence: Synthetic peptide; note = XENP019180 vlCDR2
YASHRYT

SEQ ID NO: 16644 - protein, 9 aa, synthetic construct
  source 1..9: note = Description of Artificial Sequence: Synthetic peptide; note = XENP019180 vlCDR3
QQDWSSPRT

SEQ ID NO: 16645 - protein, 451 aa, synthetic construct; identical to SEQ ID NO: 15975
  source 1..451: note = Description of Artificial Sequence: Synthetic polypeptide; note = XENP019181 1G6_H1.272_L1.191_IgG1_PVA_/S267K Heavy Chain

SEQ ID NO: 16646 - protein, 122 aa, synthetic construct; identical to SEQ ID NO: 10302
  source 1..122: note = Description of Artificial Sequence: Synthetic polypeptide; note = VH of XENP019181

SEQ ID NO: 16647 - protein, 5 aa, synthetic construct
  source 1..5: note = Description of Artificial Sequence: Synthetic peptide; note = XENP019181 vhCDR1
NFWMN

SEQ ID NO: 16648 - protein, 19 aa, synthetic construct
  source 1..19: note = Description of Artificial Sequence: Synthetic peptide; note = XENP019181 vhCDR2
EIRLYSNNYATHYAEPVKG

SEQ ID NO: 16649 - protein, 11 aa, synthetic construct
  source 1..11: note = Description of Artificial Sequence: Synthetic peptide; note = XENP019181 vhCDR3
YYGNYGGYFDV

SEQ ID NO: 16650 - protein, 214 aa, synthetic construct; identical to SEQ ID NO: 16570
  source 1..214: note = Description of Artificial Sequence: Synthetic polypeptide; note = XENP019181 1G6_H1.272_L1.191_IgG1_PVA_/S267K Light Chain

SEQ ID NO: 16651 - protein, 107 aa, synthetic construct; identical to SEQ ID NO: 10837
  source 1..107: note = Description of Artificial Sequence: Synthetic polypeptide; note = VL of XENP019181

SEQ ID NO: 16652 - protein, 11 aa, synthetic construct
  source 1..11: note = Description of Artificial Sequence: Synthetic peptide; note = XENP019181 vlCDR1
RASQSVGNDVA

SEQ ID NO: 16653 - protein, 7 aa, synthetic construct
  source 1..7: note = Description of Artificial Sequence: Synthetic peptide; note = XENP019181 vlCDR2
YASHRYT

SEQ ID NO: 16654 - protein, 9 aa, synthetic construct
  source 1..9: note = Description of Artificial Sequence: Synthetic peptide; note = XENP019181 vlCDR3
QQDWSSPRT

SEQ ID NO: 16655 - protein, 451 aa, synthetic construct; identical to SEQ ID NO: 11545
  source 1..451: note = Description of Artificial Sequence: Synthetic polypeptide; note = XENP019193 1G6_H1_L1.188_IgG1_PVA_/S267K Heavy Chain

SEQ ID NO: 16656 - protein, 122 aa, synthetic construct; identical to SEQ ID NO: 6246
  source 1..122: note = Description of Artificial Sequence: Synthetic polypeptide; note = VH of XENP019193

SEQ ID NO: 16657 - protein, 5 aa, synthetic construct
  source 1..5: note = Description of Artificial Sequence: Synthetic peptide; note = XENP019193 vhCDR1
NYWMN

SEQ ID NO: 16658 - protein, 19 aa, synthetic construct
  source 1..19: note = Description of Artificial Sequence: Synthetic peptide; note = XENP019193 vhCDR2
EIRLKSNNYATHYAEPVKG

SEQ ID NO: 16659 - protein, 11 aa, synthetic construct
  source 1..11: note = Description of Artificial Sequence: Synthetic peptide; note = XENP019193 vhCDR3
YYGNYGGYFDV

SEQ ID NO: 16660 - protein, 214 aa, synthetic construct
  source 1..214: note = Description of Artificial Sequence: Synthetic polypeptide; note = XENP019193 1G6_H1_L1.188_IgG1_PVA_/S267K Light Chain
EIVMTQSPATLSVSPGERVTLTCRASQSVGNDVAWYQQKPGQSPRLLINYASHRYTGVPDRFTGSGYGTEFTLTISSVQSEDFAVYFCQQDFSSPRTFGGGTKVEIKRTVAAPSVFIFPPSDEQLKSGTASVVCLLNNFYPREAKVQWKVDNALQSGNSQESVTEQDSKDSTYSLSSTLTLSKADYEKHKVYACEVTHQGLSSPVTKSFNRGEC

SEQ ID NO: 16661 - protein, 107 aa, synthetic construct; identical to SEQ ID NO: 10855
  source 1..107: note = Description of Artificial Sequence: Synthetic polypeptide; note = VL of XENP019193

SEQ ID NO: 16662 - protein, 11 aa, synthetic construct
  source 1..11: note = Description of Artificial Sequence: Synthetic peptide; note = XENP019193 vlCDR1
RASQSVGNDVA

SEQ ID NO: 16663 - protein, 7 aa, synthetic construct
  source 1..7: note = Description of Artificial Sequence: Synthetic peptide; note = XENP019193 vlCDR2
YASHRYT

SEQ ID NO: 16664 - protein, 9 aa, synthetic construct
  source 1..9: note = Description of Artificial Sequence: Synthetic peptide; note = XENP019193 vlCDR3
QQDFSSPRT

SEQ ID NO: 16665 - protein, 451 aa, synthetic construct; identical to SEQ ID NO: 11545
  source 1..451: note = Description of Artificial Sequence: Synthetic polypeptide; note = XENP019194 1G6_H1_L1.189_IgG1_PVA_/S267K Heavy Chain

SEQ ID NO: 16666 - protein, 122 aa, synthetic construct; identical to SEQ ID NO: 6246
  source 1..122: note = Description of Artificial Sequence: Synthetic polypeptide; note = VH of XENP019194

SEQ ID NO: 16667 - protein, 5 aa, synthetic construct
  source 1..5: note = Description of Artificial Sequence: Synthetic peptide; note = XENP019194 vhCDR1
NYWMN

SEQ ID NO: 16668 - protein, 19 aa, synthetic construct
  source 1..19: note = Description of Artificial Sequence: Synthetic peptide; note = XENP019194 vhCDR2
EIRLKSNNYATHYAEPVKG

SEQ ID NO: 16669 - protein, 11 aa, synthetic construct
  source 1..11: note = Description of Artificial Sequence: Synthetic peptide; note = XENP019194 vhCDR3
YYGNYGGYFDV

SEQ ID NO: 16670 - protein, 214 aa, synthetic construct
  source 1..214: note = Description of Artificial Sequence: Synthetic polypeptide; note = XENP019194 1G6_H1_L1.189_IgG1_PVA_/S267K Light Chain
EIVLTQSPATLSVSPGERVTLTCRASQSVGNDVAWYQQKPGQAPRLLINYASHRYTGVPDRFTGSGYGTEFTLTISSVQSEDFAVYYCQQDFSSPRTFGGGTKVEIKRTVAAPSVFIFPPSDEQLKSGTASVVCLLNNFYPREAKVQWKVDNALQSGNSQESVTEQDSKDSTYSLSSTLTLSKADYEKHKVYACEVTHQGLSSPVTKSFNRGEC

SEQ ID NO: 16671 - protein, 107 aa, synthetic construct; identical to SEQ ID NO: 10864
  source 1..107: note = Description of Artificial Sequence: Synthetic polypeptide; note = VL of XENP019194

SEQ ID NO: 16672 - protein, 11 aa, synthetic construct
  source 1..11: note = Description of Artificial Sequence: Synthetic peptide; note = XENP019194 vlCDR1
RASQSVGNDVA

SEQ ID NO: 16673 - protein, 7 aa, synthetic construct
  source 1..7: note = Description of Artificial Sequence: Synthetic peptide; note = XENP019194 vlCDR2
YASHRYT

SEQ ID NO: 16674 - protein, 9 aa, synthetic construct
  source 1..9: note = Description of Artificial Sequence: Synthetic peptide; note = XENP019194 vlCDR3
QQDFSSPRT

SEQ ID NO: 16675 - protein, 451 aa, synthetic construct
  source 1..451: note = Description of Artificial Sequence: Synthetic polypeptide; note = XENP019195 1G6_H1.278_L1.188_IgG1_PVA_/S267K Heavy Chain
EVQLVESGGGLVKPGGSLRLSCVASGFTFSNYWMNWVRQAPGKGLEWVAEIRLYSNNYATHYAESVKGRFTISRDDSKSTLYLQMNNLKTEDTGVYYCTRYYGNYGGYFDVWGQGTLVTVSSASTKGPSVFPLAPSSKSTSGGTAALGCLVKDYFPEPVTVSWNSGALTSGVHTFPAVLQSSGLYSLSSVVTVPSSSLGTQTYICNVNHKPSNTKVDKKVEPKSCDKTHTCPPCPAPPVAGPSVFLFPPKPKDTLMISRTPEVTCVVVDVKHEDPEVKFNWYVDGVEVHNAKTKPREEQYNSTYRVVSVLTVLHQDWLNGKEYKCKVSNKALPAPIEKTISKAKGQPREPQVYTLPPSREEMTKNQVSLTCLVKGFYPSDIAVEWESNGQPENNYKTTPPVLDSDGSFFLYSKLTVDKSRWQQGNVFSCSVMHEALHNHYTQKSLSLSPGK

SEQ ID NO: 16676 - protein, 122 aa, synthetic construct; identical to SEQ ID NO: 10845
  source 1..122: note = Description of Artificial Sequence: Synthetic polypeptide; note = VH of XENP019195

SEQ ID NO: 16677 - protein, 5 aa, synthetic construct
  source 1..5: note = Description of Artificial Sequence: Synthetic peptide; note = XENP019195 vhCDR1
NYWMN

SEQ ID NO: 16678 - protein, 19 aa, synthetic construct
  source 1..19: note = Description of Artificial Sequence: Synthetic peptide; note = XENP019195 vhCDR2
EIRLYSNNYATHYAESVKG

SEQ ID NO: 16679 - protein, 11 aa, synthetic construct
  source 1..11: note = Description of Artificial Sequence: Synthetic peptide; note = XENP019195 vhCDR3
YYGNYGGYFDV

SEQ ID NO: 16680 - protein, 214 aa, synthetic construct; identical to SEQ ID NO: 16660
  source 1..214: note = Description of Artificial Sequence: Synthetic polypeptide; note = XENP019195 1G6_H1.278_L1.188_IgG1_PVA_/S267K Light Chain

SEQ ID NO: 16681 - protein, 107 aa, synthetic construct; identical to SEQ ID NO: 10855
  source 1..107: note = Description of Artificial Sequence: Synthetic polypeptide; note = VL of XENP019195

SEQ ID NO: 16682 - protein, 11 aa, synthetic construct
  source 1..11: note = Description of Artificial Sequence: Synthetic peptide; note = XENP019195 vlCDR1
RASQSVGNDVA

SEQ ID NO: 16683 - protein, 7 aa, synthetic construct
  source 1..7: note = Description of Artificial Sequence: Synthetic peptide; note = XENP019195 vlCDR2
YASHRYT

SEQ ID NO: 16684 - protein, 9 aa, synthetic construct
  source 1..9: note = Description of Artificial Sequence: Synthetic peptide; note = XENP019195 vlCDR3
QQDFSSPRT

SEQ ID NO: 16685 - protein, 451 aa, synthetic construct; identical to SEQ ID NO: 16675
  source 1..451: note = Description of Artificial Sequence: Synthetic polypeptide; note = XENP019196 1G6_H1.278_L1.189_IgG1_PVA_/S267K Heavy Chain

SEQ ID NO: 16686 - protein, 122 aa, synthetic construct; identical to SEQ ID NO: 10845
  source 1..122: note = Description of Artificial Sequence: Synthetic polypeptide; note = VH of XENP019196

SEQ ID NO: 16687 - protein, 5 aa, synthetic construct
  source 1..5: note = Description of Artificial Sequence: Synthetic peptide; note = XENP019196 vhCDR1
NYWMN

SEQ ID NO: 16688 - protein, 19 aa, synthetic construct
  source 1..19: note = Description of Artificial Sequence: Synthetic peptide; note = XENP019196 vhCDR2
EIRLYSNNYATHYAESVKG

SEQ ID NO: 16689 - protein, 11 aa, synthetic construct
  source 1..11: note = Description of Artificial Sequence: Synthetic peptide; note = XENP019196 vhCDR3
YYGNYGGYFDV

SEQ ID NO: 16690 - protein, 214 aa, synthetic construct; identical to SEQ ID NO: 16670
  source 1..214: note = Description of Artificial Sequence: Synthetic polypeptide; note = XENP019196 1G6_H1.278_L1.189_IgG1_PVA_/S267K Light Chain

SEQ ID NO: 16691 - protein, 107 aa, synthetic construct; identical to SEQ ID NO: 10864
  source 1..107: note = Description of Artificial Sequence: Synthetic polypeptide; note = VL of XENP019196

SEQ ID NO: 16692 - protein, 11 aa, synthetic construct
  source 1..11: note = Description of Artificial Sequence: Synthetic peptide; note = XENP019196 vlCDR1
RASQSVGNDVA

SEQ ID NO: 16693 - protein, 7 aa, synthetic construct
  source 1..7: note = Description of Artificial Sequence: Synthetic peptide; note = XENP019196 vlCDR2
YASHRYT

SEQ ID NO: 16694 - protein, 9 aa, synthetic construct
  source 1..9: note = Description of Artificial Sequence: Synthetic peptide; note = XENP019196 vlCDR3
QQDFSSPRT

SEQ ID NO: 16695 - protein, 451 aa, synthetic construct; identical to SEQ ID NO: 16675
  source 1..451: note = Description of Artificial Sequence: Synthetic polypeptide; note = XENP019201 1G6_H1.278_L1_IgG1_PVA_/S267K Heavy Chain

SEQ ID NO: 16696 - protein, 122 aa, synthetic construct; identical to SEQ ID NO: 10845
  source 1..122: note = Description of Artificial Sequence: Synthetic polypeptide; note = VH of XENP019201

SEQ ID NO: 16697 - protein, 5 aa, synthetic construct
  source 1..5: note = Description of Artificial Sequence: Synthetic peptide; note = XENP019201 vhCDR1
NYWMN

SEQ ID NO: 16698 - protein, 19 aa, synthetic construct
  source 1..19: note = Description of Artificial Sequence: Synthetic peptide; note = XENP019201 vhCDR2
EIRLYSNNYATHYAESVKG

SEQ ID NO: 16699 - protein, 11 aa, synthetic construct
  source 1..11: note = Description of Artificial Sequence: Synthetic peptide; note = XENP019201 vhCDR3
YYGNYGGYFDV

SEQ ID NO: 16700 - protein, 214 aa, synthetic construct; identical to SEQ ID NO: 11550
  source 1..214: note = Description of Artificial Sequence: Synthetic polypeptide; note = XENP019201 1G6_H1.278_L1_IgG1_PVA_/S267K Light Chain

SEQ ID NO: 16701 - protein, 107 aa, synthetic construct; identical to SEQ ID NO: 6247
  source 1..107: note = Description of Artificial Sequence: Synthetic polypeptide; note = VL of XENP019201

SEQ ID NO: 16702 - protein, 11 aa, synthetic construct
  source 1..11: note = Description of Artificial Sequence: Synthetic peptide; note = XENP019201 vlCDR1
RASQSVSNDVA

SEQ ID NO: 16703 - protein, 7 aa, synthetic construct
  source 1..7: note = Description of Artificial Sequence: Synthetic peptide; note = XENP019201 vlCDR2
YASHRYT

SEQ ID NO: 16704 - protein, 9 aa, synthetic construct
  source 1..9: note = Description of Artificial Sequence: Synthetic peptide; note = XENP019201 vlCDR3
QQDYSSPRT

SEQ ID NO: 16705 - protein, 451 aa, synthetic construct
  source 1..451: note = Description of Artificial Sequence: Synthetic polypeptide; note = XENP019589 1G6_H1.279_L1.189_IgG1_PVA_/S267K Heavy Chain
EVQLVESGGGLVKPGGSLRLSCVASGFTFSNYWMNWVRQAPGKGLEWVAEIRLYSNNYATHYAESVKGRFTISRDDSKSTLYLQMNNLKTEDTGVYYCTRYYGNYGGYFDVWGRGTLVTVSSASTKGPSVFPLAPSSKSTSGGTAALGCLVKDYFPEPVTVSWNSGALTSGVHTFPAVLQSSGLYSLSSVVTVPSSSLGTQTYICNVNHKPSNTKVDKKVEPKSCDKTHTCPPCPAPPVAGPSVFLFPPKPKDTLMISRTPEVTCVVVDVKHEDPEVKFNWYVDGVEVHNAKTKPREEQYNSTYRVVSVLTVLHQDWLNGKEYKCKVSNKALPAPIEKTISKAKGQPREPQVYTLPPSREEMTKNQVSLTCLVKGFYPSDIAVEWESNGQPENNYKTTPPVLDSDGSFFLYSKLTVDKSRWQQGNVFSCSVMHEALHNHYTQKSLSLSPGK

SEQ ID NO: 16706 - protein, 122 aa, synthetic construct; identical to SEQ ID NO: 10908
  source 1..122: note = Description of Artificial Sequence: Synthetic polypeptide; note = VH of XENP019589

SEQ ID NO: 16707 - protein, 5 aa, synthetic construct
  source 1..5: note = Description of Artificial Sequence: Synthetic peptide; note = XENP019589 vhCDR1
NYWMN

SEQ ID NO: 16708 - protein, 19 aa, synthetic construct
  source 1..19: note = Description of Artificial Sequence: Synthetic peptide; note = XENP019589 vhCDR2
EIRLYSNNYATHYAESVKG

SEQ ID NO: 16709 - protein, 11 aa, synthetic construct
  source 1..11: note = Description of Artificial Sequence: Synthetic peptide; note = XENP019589 vhCDR3
YYGNYGGYFDV

SEQ ID NO: 16710 - protein, 214 aa, synthetic construct; identical to SEQ ID NO: 16670
  source 1..214: note = Description of Artificial Sequence: Synthetic polypeptide; note = XENP019589 1G6_H1.279_L1.189_IgG1_PVA_/S267K Light Chain

SEQ ID NO: 16711 - protein, 107 aa, synthetic construct; identical to SEQ ID NO: 10864
  source 1..107: note = Description of Artificial Sequence: Synthetic polypeptide; note = VL of XENP019589

SEQ ID NO: 16712 - protein, 11 aa, synthetic construct
  source 1..11: note = Description of Artificial Sequence: Synthetic peptide; note = XENP019589 vlCDR1
RASQSVGNDVA

SEQ ID NO: 16713 - protein, 7 aa, synthetic construct
  source 1..7: note = Description of Artificial Sequence: Synthetic peptide; note = XENP019589 vlCDR2
YASHRYT

SEQ ID NO: 16714 - protein, 9 aa, synthetic construct
  source 1..9: note = Description of Artificial Sequence: Synthetic peptide; note = XENP019589 vlCDR3
QQDFSSPRT

SEQ ID NO: 16715 - protein, 451 aa, synthetic construct
  source 1..451: note = Description of Artificial Sequence: Synthetic polypeptide; note = XENP019590 1G6_H1.280_L1.189_IgG1_PVA_/S267K Heavy Chain
EVQLVESGGGLVKPGGSLRLTCVASGFTFSNYWMNWVRQAPGKGLEWVAEIRLYSNNYATHYAESVKGRFTISRDDSKSTLYLQMNNLKTEDTGVYYCTRYYGNYGGYFDVWGRGTLVTVSSASTKGPSVFPLAPSSKSTSGGTAALGCLVKDYFPEPVTVSWNSGALTSGVHTFPAVLQSSGLYSLSSVVTVPSSSLGTQTYICNVNHKPSNTKVDKKVEPKSCDKTHTCPPCPAPPVAGPSVFLFPPKPKDTLMISRTPEVTCVVVDVKHEDPEVKFNWYVDGVEVHNAKTKPREEQYNSTYRVVSVLTVLHQDWLNGKEYKCKVSNKALPAPIEKTISKAKGQPREPQVYTLPPSREEMTKNQVSLTCLVKGFYPSDIAVEWESNGQPENNYKTTPPVLDSDGSFFLYSKLTVDKSRWQQGNVFSCSVMHEALHNHYTQKSLSLSPGK

SEQ ID NO: 16716 - protein, 122 aa, synthetic construct; identical to SEQ ID NO: 10917
  source 1..122: note = Description of Artificial Sequence: Synthetic polypeptide; note = VH of XENP019590

SEQ ID NO: 16717 - protein, 5 aa, synthetic construct
  source 1..5: note = Description of Artificial Sequence: Synthetic peptide; note = XENP019590 vhCDR1
NYWMN

SEQ ID NO: 16718 - protein, 19 aa, synthetic construct
  source 1..19: note = Description of Artificial Sequence: Synthetic peptide; note = XENP019590 vhCDR2
EIRLYSNNYATHYAESVKG

SEQ ID NO: 16719 - protein, 11 aa, synthetic construct
  source 1..11: note = Description of Artificial Sequence: Synthetic peptide; note = XENP019590 vhCDR3
YYGNYGGYFDV

SEQ ID NO: 16720 - protein, 214 aa, synthetic construct; identical to SEQ ID NO: 16670
  source 1..214: note = Description of Artificial Sequence: Synthetic polypeptide; note = XENP019590 1G6_H1.280_L1.189_IgG1_PVA_/S267K Light Chain

SEQ ID NO: 16721 - protein, 107 aa, synthetic construct; identical to SEQ ID NO: 10864
  source 1..107: note = Description of Artificial Sequence: Synthetic polypeptide; note = VL of XENP019590

SEQ ID NO: 16722 - protein, 11 aa, synthetic construct
  source 1..11: note = Description of Artificial Sequence: Synthetic peptide; note = XENP019590 vlCDR1
RASQSVGNDVA

SEQ ID NO: 16723 - protein, 7 aa, synthetic construct
  source 1..7: note = Description of Artificial Sequence: Synthetic peptide; note = XENP019590 vlCDR2
YASHRYT

SEQ ID NO: 16724 - protein, 9 aa, synthetic construct
  source 1..9: note = Description of Artificial Sequence: Synthetic peptide; note = XENP019590 vlCDR3
QQDFSSPRT

SEQ ID NO: 16725 - protein, 451 aa, synthetic construct
  source 1..451: note = Description of Artificial Sequence: Synthetic polypeptide; note = XENP019591 1G6_H1.281_L1.189_IgG1_PVA_/S267K Heavy Chain
EVQLVESGGGLVKPGGSLRLSCVASGFTFSNYWMNWVRQAPGKGLEWVAEIRLYSNNYATHYAESVKGRFTISRDDSKSMLYLQMNNLKTEDTGVYYCTRYYGNYGGYFDVWGRGTLVTVSSASTKGPSVFPLAPSSKSTSGGTAALGCLVKDYFPEPVTVSWNSGALTSGVHTFPAVLQSSGLYSLSSVVTVPSSSLGTQTYICNVNHKPSNTKVDKKVEPKSCDKTHTCPPCPAPPVAGPSVFLFPPKPKDTLMISRTPEVTCVVVDVKHEDPEVKFNWYVDGVEVHNAKTKPREEQYNSTYRVVSVLTVLHQDWLNGKEYKCKVSNKALPAPIEKTISKAKGQPREPQVYTLPPSREEMTKNQVSLTCLVKGFYPSDIAVEWESNGQPENNYKTTPPVLDSDGSFFLYSKLTVDKSRWQQGNVFSCSVMHEALHNHYTQKSLSLSPGK

SEQ ID NO: 16726 - protein, 122 aa, synthetic construct; identical to SEQ ID NO: 10926
  source 1..122: note = Description of Artificial Sequence: Synthetic polypeptide; note = VH of XENP019591

SEQ ID NO: 16727 - protein, 5 aa, synthetic construct
  source 1..5: note = Description of Artificial Sequence: Synthetic peptide; note = XENP019591 vhCDR1
NYWMN

SEQ ID NO: 16728 - protein, 19 aa, synthetic construct
  source 1..19: note = Description of Artificial Sequence: Synthetic peptide; note = XENP019591 vhCDR2
EIRLYSNNYATHYAESVKG

SEQ ID NO: 16729 - protein, 11 aa, synthetic construct
  source 1..11: note = Description of Artificial Sequence: Synthetic peptide; note = XENP019591 vhCDR3
YYGNYGGYFDV

SEQ ID NO: 16730 - protein, 214 aa, synthetic construct; identical to SEQ ID NO: 16670
  source 1..214: note = Description of Artificial Sequence: Synthetic polypeptide; note = XENP019591 1G6_H1.281_L1.189_IgG1_PVA_/S267K Light Chain

SEQ ID NO: 16731 - protein, 107 aa, synthetic construct; identical to SEQ ID NO: 10864
  source 1..107: note = Description of Artificial Sequence: Synthetic polypeptide; note = VL of XENP019591

SEQ ID NO: 16732 - protein, 11 aa, synthetic construct
  source 1..11: note = Description of Artificial Sequence: Synthetic peptide; note = XENP019591 vlCDR1
RASQSVGNDVA

SEQ ID NO: 16733 - protein, 7 aa, synthetic construct
  source 1..7: note = Description of Artificial Sequence: Synthetic peptide; note = XENP019591 vlCDR2
YASHRYT

SEQ ID NO: 16734 - protein, 9 aa, synthetic construct
  source 1..9: note = Description of Artificial Sequence: Synthetic peptide; note = XENP019591 vlCDR3
QQDFSSPRT

SEQ ID NO: 16735 - protein, 451 aa, synthetic construct
  source 1..451: note = Description of Artificial Sequence: Synthetic polypeptide; note = XENP019592 1G6_H1.282_L1.189_IgG1_PVA_/S267K Heavy Chain
EVQLVESGGGLVKPGGSLRLTCVASGFTFSNYWMNWVRQAPGKGLEWVAEIRLYSNNYATHYAESVKGRFTISRDDSKSMLYLQMNNLKTEDTGVYYCTRYYGNYGGYFDVWGRGTLVTVSSASTKGPSVFPLAPSSKSTSGGTAALGCLVKDYFPEPVTVSWNSGALTSGVHTFPAVLQSSGLYSLSSVVTVPSSSLGTQTYICNVNHKPSNTKVDKKVEPKSCDKTHTCPPCPAPPVAGPSVFLFPPKPKDTLMISRTPEVTCVVVDVKHEDPEVKFNWYVDGVEVHNAKTKPREEQYNSTYRVVSVLTVLHQDWLNGKEYKCKVSNKALPAPIEKTISKAKGQPREPQVYTLPPSREEMTKNQVSLTCLVKGFYPSDIAVEWESNGQPENNYKTTPPVLDSDGSFFLYSKLTVDKSRWQQGNVFSCSVMHEALHNHYTQKSLSLSPGK

SEQ ID NO: 16736 - protein, 122 aa, synthetic construct; identical to SEQ ID NO: 10935
  source 1..122: note = Description of Artificial Sequence: Synthetic polypeptide; note = VH of XENP019592

SEQ ID NO: 16737 - protein, 5 aa, synthetic construct
  source 1..5: note = Description of Artificial Sequence: Synthetic peptide; note = XENP019592 vhCDR1
NYWMN

SEQ ID NO: 16738 - protein, 19 aa, synthetic construct
  source 1..19: note = Description of Artificial Sequence: Synthetic peptide; note = XENP019592 vhCDR2
EIRLYSNNYATHYAESVKG

SEQ ID NO: 16739 - protein, 11 aa, synthetic construct
  source 1..11: note = Description of Artificial Sequence: Synthetic peptide; note = XENP019592 vhCDR3
YYGNYGGYFDV

SEQ ID NO: 16740 - protein, 214 aa, synthetic construct; identical to SEQ ID NO: 16670
  source 1..214: note = Description of Artificial Sequence: Synthetic polypeptide; note = XENP019592 1G6_H1.282_L1.189_IgG1_PVA_/S267K Light Chain

SEQ ID NO: 16741 - protein, 107 aa, synthetic construct; identical to SEQ ID NO: 10864
  source 1..107: note = Description of Artificial Sequence: Synthetic polypeptide; note = VL of XENP019592

SEQ ID NO: 16742 - protein, 11 aa, synthetic construct
  source 1..11: note = Description of Artificial Sequence: Synthetic peptide; note = XENP019592 vlCDR1
RASQSVGNDVA

SEQ ID NO: 16743 - protein, 7 aa, synthetic construct
  source 1..7: note = Description of Artificial Sequence: Synthetic peptide; note = XENP019592 vlCDR2
YASHRYT

SEQ ID NO: 16744 - protein, 9 aa, synthetic construct
  source 1..9: note = Description of Artificial Sequence: Synthetic peptide; note = XENP019592 vlCDR3
QQDFSSPRT

SEQ ID NO: 16745 - protein, 451 aa, synthetic construct
  source 1..451: note = Description of Artificial Sequence: Synthetic polypeptide; note = XENP019593 1G6_H1.283_L1.189_IgG1_PVA_/S267K Heavy Chain
EVQLVESGGGLVKPGGSLRLSCVASGFTFSNYWMNWVRQAPGKGLEWVCEIRLYSNNYATHYAESVKGRFTCSRDDSKSTLYLQMNNLKTEDTGVYYCTRYYGNYGGYFDVWGQGTLVTVSSASTKGPSVFPLAPSSKSTSGGTAALGCLVKDYFPEPVTVSWNSGALTSGVHTFPAVLQSSGLYSLSSVVTVPSSSLGTQTYICNVNHKPSNTKVDKKVEPKSCDKTHTCPPCPAPPVAGPSVFLFPPKPKDTLMISRTPEVTCVVVDVKHEDPEVKFNWYVDGVEVHNAKTKPREEQYNSTYRVVSVLTVLHQDWLNGKEYKCKVSNKALPAPIEKTISKAKGQPREPQVYTLPPSREEMTKNQVSLTCLVKGFYPSDIAVEWESNGQPENNYKTTPPVLDSDGSFFLYSKLTVDKSRWQQGNVFSCSVMHEALHNHYTQKSLSLSPGK

SEQ ID NO: 16746 - protein, 122 aa, synthetic construct; identical to SEQ ID NO: 10944
  source 1..122: note = Description of Artificial Sequence: Synthetic polypeptide; note = VH of XENP019593

SEQ ID NO: 16747 - protein, 5 aa, synthetic construct
  source 1..5: note = Description of Artificial Sequence: Synthetic peptide; note = XENP019593 vhCDR1
NYWMN

SEQ ID NO: 16748 - protein, 19 aa, synthetic construct
  source 1..19: note = Description of Artificial Sequence: Synthetic peptide; note = XENP019593 vhCDR2
EIRLYSNNYATHYAESVKG

SEQ ID NO: 16749 - protein, 11 aa, synthetic construct
  source 1..11: note = Description of Artificial Sequence: Synthetic peptide; note = XENP019593 vhCDR3
YYGNYGGYFDV

SEQ ID NO: 16750 - protein, 214 aa, synthetic construct; identical to SEQ ID NO: 16670
  source 1..214: note = Description of Artificial Sequence: Synthetic polypeptide; note = XENP019593 1G6_H1.283_L1.189_IgG1_PVA_/S267K Light Chain

SEQ ID NO: 16751 - protein, 107 aa, synthetic construct; identical to SEQ ID NO: 10864
  source 1..107: note = Description of Artificial Sequence: Synthetic polypeptide; note = VL of XENP019593

SEQ ID NO: 16752 - protein, 11 aa, synthetic construct
  source 1..11: note = Description of Artificial Sequence: Synthetic peptide; note = XENP019593 vlCDR1
RASQSVGNDVA

SEQ ID NO: 16753 - protein, 7 aa, synthetic construct
  source 1..7: note = Description of Artificial Sequence: Synthetic peptide; note = XENP019593 vlCDR2
YASHRYT

SEQ ID NO: 16754 - protein, 9 aa, synthetic construct
  source 1..9: note = Description of Artificial Sequence: Synthetic peptide; note = XENP019593 vlCDR3
QQDFSSPRT

SEQ ID NO: 16755 - protein, 451 aa, synthetic construct
  source 1..451: note = Description of Artificial Sequence: Synthetic polypeptide; note = XENP019594 1G6_H1.284_L1.189_IgG1_PVA_/S267K Heavy Chain
EVQLVESGGGLVKPGGSLRLSCVASGFTFSNYWMNWVRQAPGKGLEWVCEIRLYSNNYATHYAESVKGRFTCSRDDSKSTLYLQMNNLKTEDTGVYYCTRYYGNYGGYFDVWGRGTLVTVSSASTKGPSVFPLAPSSKSTSGGTAALGCLVKDYFPEPVTVSWNSGALTSGVHTFPAVLQSSGLYSLSSVVTVPSSSLGTQTYICNVNHKPSNTKVDKKVEPKSCDKTHTCPPCPAPPVAGPSVFLFPPKPKDTLMISRTPEVTCVVVDVKHEDPEVKFNWYVDGVEVHNAKTKPREEQYNSTYRVVSVLTVLHQDWLNGKEYKCKVSNKALPAPIEKTISKAKGQPREPQVYTLPPSREEMTKNQVSLTCLVKGFYPSDIAVEWESNGQPENNYKTTPPVLDSDGSFFLYSKLTVDKSRWQQGNVFSCSVMHEALHNHYTQKSLSLSPGK

SEQ ID NO: 16756 - protein, 122 aa, synthetic construct; identical to SEQ ID NO: 10953
  source 1..122: note = Description of Artificial Sequence: Synthetic polypeptide; note = VH of XENP019594

SEQ ID NO: 16757 - protein, 5 aa, synthetic construct
  source 1..5: note = Description of Artificial Sequence: Synthetic peptide; note = XENP019594 vhCDR1
NYWMN

SEQ ID NO: 16758 - protein, 19 aa, synthetic construct
  source 1..19: note = Description of Artificial Sequence: Synthetic peptide; note = XENP019594 vhCDR2
EIRLYSNNYATHYAESVKG

SEQ ID NO: 16759 - protein, 11 aa, synthetic construct
  source 1..11: note = Description of Artificial Sequence: Synthetic peptide; note = XENP019594 vhCDR3
YYGNYGGYFDV

SEQ ID NO: 16760 - protein, 214 aa, synthetic construct; identical to SEQ ID NO: 16670
  source 1..214: note = Description of Artificial Sequence: Synthetic polypeptide; note = XENP019594 1G6_H1.284_L1.189_IgG1_PVA_/S267K Light Chain

SEQ ID NO: 16761 - protein, 107 aa, synthetic construct; identical to SEQ ID NO: 10864
  source 1..107: note = Description of Artificial Sequence: Synthetic polypeptide; note = VL of XENP019594

SEQ ID NO: 16762 - protein, 11 aa, synthetic construct
  source 1..11: note = Description of Artificial Sequence: Synthetic peptide; note = XENP019594 vlCDR1
RASQSVGNDVA

SEQ ID NO: 16763 - protein, 7 aa, synthetic construct
  source 1..7: note = Description of Artificial Sequence: Synthetic peptide; note = XENP019594 vlCDR2
YASHRYT

SEQ ID NO: 16764 - protein, 9 aa, synthetic construct
  source 1..9: note = Description of Artificial Sequence: Synthetic peptide; note = XENP019594 vlCDR3
QQDFSSPRT

SEQ ID NO: 16765 - protein, 451 aa, synthetic construct
  source 1..451: note = Description of Artificial Sequence: Synthetic polypeptide; note = XENP019595 1G6_H1.285_L1.189_IgG1_PVA_/S267K Heavy Chain
EVQLVESGGGLVKPGGSLRLTCVASGFTFSNYWMNWVRQAPGKGLEWVCEIRLYSNNYATHYAESVKGRFTCSRDDSKSMLYLQMNNLKTEDTGVYYCTRYYGNYGGYFDVWGRGTLVTVSSASTKGPSVFPLAPSSKSTSGGTAALGCLVKDYFPEPVTVSWNSGALTSGVHTFPAVLQSSGLYSLSSVVTVPSSSLGTQTYICNVNHKPSNTKVDKKVEPKSCDKTHTCPPCPAPPVAGPSVFLFPPKPKDTLMISRTPEVTCVVVDVKHEDPEVKFNWYVDGVEVHNAKTKPREEQYNSTYRVVSVLTVLHQDWLNGKEYKCKVSNKALPAPIEKTISKAKGQPREPQVYTLPPSREEMTKNQVSLTCLVKGFYPSDIAVEWESNGQPENNYKTTPPVLDSDGSFFLYSKLTVDKSRWQQGNVFSCSVMHEALHNHYTQKSLSLSPGK

SEQ ID NO: 16766 - protein, 122 aa, synthetic construct; identical to SEQ ID NO: 10962
  source 1..122: note = Description of Artificial Sequence: Synthetic polypeptide; note = VH of XENP019595

SEQ ID NO: 16767 - protein, 5 aa, synthetic construct
  source 1..5: note = Description of Artificial Sequence: Synthetic peptide; note = XENP019595 vhCDR1
NYWMN

SEQ ID NO: 16768 - protein, 19 aa, synthetic construct
  source 1..19: note = Description of Artificial Sequence: Synthetic peptide; note = XENP019595 vhCDR2
EIRLYSNNYATHYAESVKG

SEQ ID NO: 16769 - protein, 11 aa, synthetic construct
  source 1..11: note = Description of Artificial Sequence: Synthetic peptide; note = XENP019595 vhCDR3
YYGNYGGYFDV

SEQ ID NO: 16770 - protein, 214 aa, synthetic construct; identical to SEQ ID NO: 16670
  source 1..214: note = Description of Artificial Sequence: Synthetic polypeptide; note = XENP019595 1G6_H1.285_L1.189_IgG1_PVA_/S267K Light Chain

SEQ ID NO: 16771 - protein, 107 aa, synthetic construct; identical to SEQ ID NO: 10864
  source 1..107: note = Description of Artificial Sequence: Synthetic polypeptide; note = VL of XENP019595

SEQ ID NO: 16772 - protein, 11 aa, synthetic construct
  source 1..11: note = Description of Artificial Sequence: Synthetic peptide; note = XENP019595 vlCDR1
RASQSVGNDVA

SEQ ID NO: 16773 - protein, 7 aa, synthetic construct
  source 1..7: note = Description of Artificial Sequence: Synthetic peptide; note = XENP019595 vlCDR2
YASHRYT

SEQ ID NO: 16774 - protein, 9 aa, synthetic construct
  source 1..9: note = Description of Artificial Sequence: Synthetic peptide; note = XENP019595 vlCDR3
QQDFSSPRT

SEQ ID NO: 16775 - protein, 451 aa, synthetic construct
  source 1..451: note = Description of Artificial Sequence: Synthetic polypeptide; note = XENP019596 1G6_H1.286_L1.189_IgG1_PVA_/S267K Heavy Chain
EVQLVESGGGLVKPGGSLRLSCVASGFTFSNYWMNWVRQAPGKGLEWVAEIRLYSDNYATHYAESVKGRFTISRDDSKSTLYLQMNNLKTEDTGVYYCTRYYGNYGGYFDVWGQGTLVTVSSASTKGPSVFPLAPSSKSTSGGTAALGCLVKDYFPEPVTVSWNSGALTSGVHTFPAVLQSSGLYSLSSVVTVPSSSLGTQTYICNVNHKPSNTKVDKKVEPKSCDKTHTCPPCPAPPVAGPSVFLFPPKPKDTLMISRTPEVTCVVVDVKHEDPEVKFNWYVDGVEVHNAKTKPREEQYNSTYRVVSVLTVLHQDWLNGKEYKCKVSNKALPAPIEKTISKAKGQPREPQVYTLPPSREEMTKNQVSLTCLVKGFYPSDIAVEWESNGQPENNYKTTPPVLDSDGSFFLYSKLTVDKSRWQQGNVFSCSVMHEALHNHYTQKSLSLSPGK

SEQ ID NO: 16776 - protein, 122 aa, synthetic construct; identical to SEQ ID NO: 10971
  source 1..122: note = Description of Artificial Sequence: Synthetic polypeptide; note = VH of XENP019596

SEQ ID NO: 16777 - protein, 5 aa, synthetic construct
  source 1..5: note = Description of Artificial Sequence: Synthetic peptide; note = XENP019596 vhCDR1
NYWMN

SEQ ID NO: 16778 - protein, 19 aa, synthetic construct
  source 1..19: note = Description of Artificial Sequence: Synthetic peptide; note = XENP019596 vhCDR2
EIRLYSDNYATHYAESVKG

SEQ ID NO: 16779 - protein, 11 aa, synthetic construct
  source 1..11: note = Description of Artificial Sequence: Synthetic peptide; note = XENP019596 vhCDR3
YYGNYGGYFDV

SEQ ID NO: 16780 - protein, 214 aa, synthetic construct; identical to SEQ ID NO: 16670
  source 1..214: note = Description of Artificial Sequence: Synthetic polypeptide; note = XENP019596 1G6_H1.286_L1.189_IgG1_PVA_/S267K Light Chain

SEQ ID NO: 16781 - protein, 107 aa, synthetic construct; identical to SEQ ID NO: 10864
  source 1..107: note = Description of Artificial Sequence: Synthetic polypeptide; note = VL of XENP019596

SEQ ID NO: 16782 - protein, 11 aa, synthetic construct
  source 1..11: note = Description of Artificial Sequence: Synthetic peptide; note = XENP019596 vlCDR1
RASQSVGNDVA

SEQ ID NO: 16783 - protein, 7 aa, synthetic construct
  source 1..7: note = Description of Artificial Sequence: Synthetic peptide; note = XENP019596 vlCDR2
YASHRYT

SEQ ID NO: 16784 - protein, 9 aa, synthetic construct
  source 1..9: note = Description of Artificial Sequence: Synthetic peptide; note = XENP019596 vlCDR3
QQDFSSPRT

SEQ ID NO: 16785 - protein, 451 aa, synthetic construct; identical to SEQ ID NO: 16675
  source 1..451: note = Description of Artificial Sequence: Synthetic polypeptide; note = XENP019601 1G6_H1.278_L1.192_IgG1_PVA_/S267K Heavy Chain

SEQ ID NO: 16786 - protein, 122 aa, synthetic construct; identical to SEQ ID NO: 10845
  source 1..122: note = Description of Artificial Sequence: Synthetic polypeptide; note = VH of XENP019601

SEQ ID NO: 16787 - protein, 5 aa, synthetic construct
  source 1..5: note = Description of Artificial Sequence: Synthetic peptide; note = XENP019601 vhCDR1
NYWMN

SEQ ID NO: 16788 - protein, 19 aa, synthetic construct
  source 1..19: note = Description of Artificial Sequence: Synthetic peptide; note = XENP019601 vhCDR2
EIRLYSNNYATHYAESVKG

SEQ ID NO: 16789 - protein, 11 aa, synthetic construct
  source 1..11: note = Description of Artificial Sequence: Synthetic peptide; note = XENP019601 vhCDR3
YYGNYGGYFDV

SEQ ID NO: 16790 - protein, 214 aa, synthetic construct
  source 1..214: note = Description of Artificial Sequence: Synthetic polypeptide; note = XENP019601 1G6_H1.278_L1.192_IgG1_PVA_/S267K Light Chain
EIVLTQSPATLSASPGERVTLTCRASQSVGNDVAWYQQKPGQAPRLLINYASHRYTGVPDRFTGSGYGTEFTLTISSVQSEDFAVYYCQQDFSSPRTFGGGTKVEIKRTVAAPSVFIFPPSDEQLKSGTASVVCLLNNFYPREAKVQWKVDNALQSGNSQESVTEQDSKDSTYSLSSTLTLSKADYEKHKVYACEVTHQGLSSPVTKSFNRGEC

SEQ ID NO: 16791 - protein, 107 aa, synthetic construct; identical to SEQ ID NO: 10981
  source 1..107: note = Description of Artificial Sequence: Synthetic polypeptide; note = VL of XENP019601

SEQ ID NO: 16792 - protein, 11 aa, synthetic construct
  source 1..11: note = Description of Artificial Sequence: Synthetic peptide; note = XENP019601 vlCDR1
RASQSVGNDVA

SEQ ID NO: 16793 - protein, 7 aa, synthetic construct
  source 1..7: note = Description of Artificial Sequence: Synthetic peptide; note = XENP019601 vlCDR2
YASHRYT

SEQ ID NO: 16794 - protein, 9 aa, synthetic construct
  source 1..9: note = Description of Artificial Sequence: Synthetic peptide; note = XENP019601 vlCDR3
QQDFSSPRT

SEQ ID NO: 16795 - protein, 451 aa, synthetic construct; identical to SEQ ID NO: 16675
  source 1..451: note = Description of Artificial Sequence: Synthetic polypeptide; note = XENP019602 1G6_H1.278_L1.193_IgG1_PVA_/S267K Heavy Chain

SEQ ID NO: 16796 - protein, 122 aa, synthetic construct; identical to SEQ ID NO: 10845
  source 1..122: note = Description of Artificial Sequence: Synthetic polypeptide; note = VH of XENP019602

SEQ ID NO: 16797 - protein, 5 aa, synthetic construct
  source 1..5: note = Description of Artificial Sequence: Synthetic peptide; note = XENP019602 vhCDR1
NYWMN

SEQ ID NO: 16798 - protein, 19 aa, synthetic construct
  source 1..19: note = Description of Artificial Sequence: Synthetic peptide; note = XENP019602 vhCDR2
EIRLYSNNYATHYAESVKG

SEQ ID NO: 16799 - protein, 11 aa, synthetic construct
  source 1..11: note = Description of Artificial Sequence: Synthetic peptide; note = XENP019602 vhCDR3
YYGNYGGYFDV

SEQ ID NO: 16800 - protein, 214 aa, synthetic construct
  source 1..214: note = Description of Artificial Sequence: Synthetic polypeptide; note = XENP019602 1G6_H1.278_L1.193_IgG1_PVA_/S267K Light Chain
EIVLTQSPATLSVSPGERVTLTCRASQSVGNDVAWYQQKPGQAPRLLINYASHRYTGVPDRFTGSGYGTEFTLTISSVQSEDFGVYYCQQDFSSPRTFGGGTKVEIKRTVAAPSVFIFPPSDEQLKSGTASVVCLLNNFYPREAKVQWKVDNALQSGNSQESVTEQDSKDSTYSLSSTLTLSKADYEKHKVYACEVTHQGLSSPVTKSFNRGEC

SEQ ID NO: 16801 - protein, 107 aa, synthetic construct; identical to SEQ ID NO: 10990
  source 1..107: note = Description of Artificial Sequence: Synthetic polypeptide; note = VL of XENP019602

SEQ ID NO: 16802 - protein, 11 aa, synthetic construct
  source 1..11: note = Description of Artificial Sequence: Synthetic peptide; note = XENP019602 vlCDR1
RASQSVGNDVA

SEQ ID NO: 16803 - protein, 7 aa, synthetic construct
  source 1..7: note = Description of Artificial Sequence: Synthetic peptide; note = XENP019602 vlCDR2
YASHRYT

SEQ ID NO: 16804 - protein, 9 aa, synthetic construct
  source 1..9: note = Description of Artificial Sequence: Synthetic peptide; note = XENP019602 vlCDR3
QQDFSSPRT

SEQ ID NO: 16805 - protein, 451 aa, synthetic construct; identical to SEQ ID NO: 16675
  source 1..451: note = Description of Artificial Sequence: Synthetic polypeptide; note = XENP019603 1G6_H1.278_L1.194_IgG1_PVA_/S267K Heavy Chain

SEQ ID NO: 16806 - protein, 122 aa, synthetic construct; identical to SEQ ID NO: 10845
  source 1..122: note = Description of Artificial Sequence: Synthetic polypeptide; note = VH of XENP019603

SEQ ID NO: 16807 - protein, 5 aa, synthetic construct
  source 1..5: note = Description of Artificial Sequence: Synthetic peptide; note = XENP019603 vhCDR1
NYWMN

SEQ ID NO: 16808 - protein, 19 aa, synthetic construct
  source 1..19: note = Description of Artificial Sequence: Synthetic peptide; note = XENP019603 vhCDR2
EIRLYSNNYATHYAESVKG

SEQ ID NO: 16809 - protein, 11 aa, synthetic construct
  source 1..11: note = Description of Artificial Sequence: Synthetic peptide; note = XENP019603 vhCDR3
YYGNYGGYFDV

SEQ ID NO: 16810 - protein, 214 aa, synthetic construct
  source 1..214: note = Description of Artificial Sequence: Synthetic polypeptide; note = XENP019603 1G6_H1.278_L1.194_IgG1_PVA_/S267K Light Chain
EIVLTQSPATLSASPGERVTLTCRASQSVGNDVAWYQQKPGQAPRLLINYASHRYTGVPDRFTGSGYGTEFTLTISSVQSEDFGVYYCQQDFSSPRTFGGGTKVEIKRTVAAPSVFIFPPSDEQLKSGTASVVCLLNNFYPREAKVQWKVDNALQSGNSQESVTEQDSKDSTYSLSSTLTLSKADYEKHKVYACEVTHQGLSSPVTKSFNRGEC

SEQ ID NO: 16811 - protein, 107 aa, synthetic construct; identical to SEQ ID NO: 10999
  source 1..107: note = Description of Artificial Sequence: Synthetic polypeptide; note = VL of XENP019603

SEQ ID NO: 16812 - protein, 11 aa, synthetic construct
  source 1..11: note = Description of Artificial Sequence: Synthetic peptide; note = XENP019603 vlCDR1
RASQSVGNDVA

SEQ ID NO: 16813 - protein, 7 aa, synthetic construct
  source 1..7: note = Description of Artificial Sequence: Synthetic peptide; note = XENP019603 vlCDR2
YASHRYT

SEQ ID NO: 16814 - protein, 9 aa, synthetic construct
  source 1..9: note = Description of Artificial Sequence: Synthetic peptide; note = XENP019603 vlCDR3
QQDFSSPRT

SEQ ID NO: 16815 - protein, 451 aa, synthetic construct; identical to SEQ ID NO: 16675
  source 1..451: note = Description of Artificial Sequence: Synthetic polypeptide; note = XENP019604 1G6_H1.278_L1.195_IgG1_PVA_/S267K Heavy Chain

SEQ ID NO: 16816 - protein, 122 aa, synthetic construct; identical to SEQ ID NO: 10845
  source 1..122: note = Description of Artificial Sequence: Synthetic polypeptide; note = VH of XENP019604

SEQ ID NO: 16817 - protein, 5 aa, synthetic construct
  source 1..5: note = Description of Artificial Sequence: Synthetic peptide; note = XENP019604 vhCDR1
NYWMN

SEQ ID NO: 16818 - protein, 19 aa, synthetic construct
  source 1..19: note = Description of Artificial Sequence: Synthetic peptide; note = XENP019604 vhCDR2
EIRLYSNNYATHYAESVKG

SEQ ID NO: 16819 - protein, 11 aa, synthetic construct
  source 1..11: note = Description of Artificial Sequence: Synthetic peptide; note = XENP019604 vhCDR3
YYGNYGGYFDV

SEQ ID NO: 16820 - protein, 214 aa, synthetic construct
  source 1..214: note = Description of Artificial Sequence: Synthetic polypeptide; note = XENP019604 1G6_H1.278_L1.195_IgG1_PVA_/S267K Light Chain
EIVLTQSPATLSVSPGERVTLTCRASQSVGNDVAWYQQKPGQAPRLLCNYASHRYTGVPDRFTCSGYGTEFTLTISSVQSEDFAVYYCQQDFSSPRTFGGGTKVEIKRTVAAPSVFIFPPSDEQLKSGTASVVCLLNNFYPREAKVQWKVDNALQSGNSQESVTEQDSKDSTYSLSSTLTLSKADYEKHKVYACEVTHQGLSSPVTKSFNRGEC

SEQ ID NO: 16821 - protein, 107 aa, synthetic construct; identical to SEQ ID NO: 11008
  source 1..107: note = Description of Artificial Sequence: Synthetic polypeptide; note = VL of XENP019604

SEQ ID NO: 16822 - protein, 11 aa, synthetic construct
  source 1..11: note = Description of Artificial Sequence: Synthetic peptide; note = XENP019604 vlCDR1
RASQSVGNDVA

SEQ ID NO: 16823 - protein, 7 aa, synthetic construct
  source 1..7: note = Description of Artificial Sequence: Synthetic peptide; note = XENP019604 vlCDR2
YASHRYT

SEQ ID NO: 16824 - protein, 9 aa, synthetic construct
  source 1..9: note = Description of Artificial Sequence: Synthetic peptide; note = XENP019604 vlCDR3
QQDFSSPRT

SEQ ID NO: 16825 - protein, 451 aa, synthetic construct; identical to SEQ ID NO: 16675
  source 1..451: note = Description of Artificial Sequence: Synthetic polypeptide; note = XENP019605 1G6_H1.278_L1.196_IgG1_PVA_/S267K Heavy Chain

SEQ ID NO: 16826 - protein, 122 aa, synthetic construct; identical to SEQ ID NO: 10845
  source 1..122: note = Description of Artificial Sequence: Synthetic polypeptide; note = VH of XENP019605

SEQ ID NO: 16827 - protein, 5 aa, synthetic construct
  source 1..5: note = Description of Artificial Sequence: Synthetic peptide; note = XENP019605 vhCDR1
NYWMN

SEQ ID NO: 16828 - protein, 19 aa, synthetic construct
  source 1..19: note = Description of Artificial Sequence: Synthetic peptide; note = XENP019605 vhCDR2
EIRLYSNNYATHYAESVKG

SEQ ID NO: 16829 - protein, 11 aa, synthetic construct
  source 1..11: note = Description of Artificial Sequence: Synthetic peptide; note = XENP019605 vhCDR3
YYGNYGGYFDV

SEQ ID NO: 16830 - protein, 214 aa, synthetic construct
  source 1..214: note = Description of Artificial Sequence: Synthetic polypeptide; note = XENP019605 1G6_H1.278_L1.196_IgG1_PVA_/S267K Light Chain
EIVLTQSPATLSASPGERVTLTCRASQSVGNDVAWYQQKPGQAPRLLCNYASHRYTGVPDRFTCSGYGTEFTLTISSVQSEDFGVYYCQQDFSSPRTFGGGTKVEIKRTVAAPSVFIFPPSDEQLKSGTASVVCLLNNFYPREAKVQWKVDNALQSGNSQESVTEQDSKDSTYSLSSTLTLSKADYEKHKVYACEVTHQGLSSPVTKSFNRGEC

SEQ ID NO: 16831 - protein, 107 aa, synthetic construct; identical to SEQ ID NO: 11017
  source 1..107: note = Description of Artificial Sequence: Synthetic polypeptide; note = VL of XENP019605

SEQ ID NO: 16832 - protein, 11 aa, synthetic construct
  source 1..11: note = Description of Artificial Sequence: Synthetic peptide; note = XENP019605 vlCDR1
RASQSVGNDVA

SEQ ID NO: 16833 - protein, 7 aa, synthetic construct
  source 1..7: note = Description of Artificial Sequence: Synthetic peptide; note = XENP019605 vlCDR2
YASHRYT

SEQ ID NO: 16834 - protein, 9 aa, synthetic construct
  source 1..9: note = Description of Artificial Sequence: Synthetic peptide; note = XENP019605 vlCDR3
QQDFSSPRT

SEQ ID NO: 16835 - protein, 451 aa, synthetic construct; identical to SEQ ID NO: 16675
  source 1..451: note = Description of Artificial Sequence: Synthetic polypeptide; note = XENP019606 1G6_H1.278_L1.197_IgG1_PVA_/S267K Heavy Chain

SEQ ID NO: 16836 - protein, 122 aa, synthetic construct; identical to SEQ ID NO: 10845
  source 1..122: note = Description of Artificial Sequence: Synthetic polypeptide; note = VH of XENP019606

SEQ ID NO: 16837 - protein, 5 aa, synthetic construct
  source 1..5: note = Description of Artificial Sequence: Synthetic peptide; note = XENP019606 vhCDR1
NYWMN

SEQ ID NO: 16838 - protein, 19 aa, synthetic construct
  source 1..19: note = Description of Artificial Sequence: Synthetic peptide; note = XENP019606 vhCDR2
EIRLYSNNYATHYAESVKG

SEQ ID NO: 16839 - protein, 11 aa, synthetic construct
  source 1..11: note = Description of Artificial Sequence: Synthetic peptide; note = XENP019606 vhCDR3
YYGNYGGYFDV

SEQ ID NO: 16840 - protein, 214 aa, synthetic construct
  source 1..214: note = Description of Artificial Sequence: Synthetic polypeptide; note = XENP019606 1G6_H1.278_L1.197_IgG1_PVA_/S267K Light Chain
EIVLTQSPATLSASPGERVTLTCRASQSVGNDVAWYQQKPGQAPRLLCNYASHRYTSVPDRFTCSGYGTEFTLTISSVQSEDFGVYYCQQDFSSPRTFGGGTKVEIKRTVAAPSVFIFPPSDEQLKSGTASVVCLLNNFYPREAKVQWKVDNALQSGNSQESVTEQDSKDSTYSLSSTLTLSKADYEKHKVYACEVTHQGLSSPVTKSFNRGEC

SEQ ID NO: 16841 - protein, 107 aa, synthetic construct; identical to SEQ ID NO: 11026
  source 1..107: note = Description of Artificial Sequence: Synthetic polypeptide; note = VL of XENP019606

SEQ ID NO: 16842 - protein, 11 aa, synthetic construct
  source 1..11: note = Description of Artificial Sequence: Synthetic peptide; note = XENP019606 vlCDR1
RASQSVGNDVA

SEQ ID NO: 16843 - protein, 7 aa, synthetic construct
  source 1..7: note = Description of Artificial Sequence: Synthetic peptide; note = XENP019606 vlCDR2
YASHRYT

SEQ ID NO: 16844 - protein, 9 aa, synthetic construct
  source 1..9: note = Description of Artificial Sequence: Synthetic peptide; note = XENP019606 vlCDR3
QQDFSSPRT

SEQ ID NO: 16845 - protein, 451 aa, synthetic construct; identical to SEQ ID NO: 16675
  source 1..451: note = Description of Artificial Sequence: Synthetic polypeptide; note = XENP019607 1G6_H1.278_L1.198_IgG1_PVA_/S267K Heavy Chain

SEQ ID NO: 16846 - protein, 122 aa, synthetic construct; identical to SEQ ID NO: 10845
  source 1..122: note = Description of Artificial Sequence: Synthetic polypeptide; note = VH of XENP019607

SEQ ID NO: 16847 - protein, 5 aa, synthetic construct
  source 1..5: note = Description of Artificial Sequence: Synthetic peptide; note = XENP019607 vhCDR1
NYWMN

SEQ ID NO: 16848 - protein, 19 aa, synthetic construct
  source 1..19: note = Description of Artificial Sequence: Synthetic peptide; note = XENP019607 vhCDR2
EIRLYSNNYATHYAESVKG

SEQ ID NO: 16849 - protein, 11 aa, synthetic construct
  source 1..11: note = Description of Artificial Sequence: Synthetic peptide; note = XENP019607 vhCDR3
YYGNYGGYFDV

SEQ ID NO: 16850 - protein, 214 aa, synthetic construct
  source 1..214: note = Description of Artificial Sequence: Synthetic polypeptide; note = XENP019607 1G6_H1.278_L1.198_IgG1_PVA_/S267K Light Chain
EIVLTQSPSTLSVSPGERVTLTCRASQSVGNDVAWYQQKPGQAPRLLINYASHRYTGVPDRFTGSGYGTEFTLTISSVQSEDFAVYYCQQDFSSPRTFGGGTKVEIKRTVAAPSVFIFPPSDEQLKSGTASVVCLLNNFYPREAKVQWKVDNALQSGNSQESVTEQDSKDSTYSLSSTLTLSKADYEKHKVYACEVTHQGLSSPVTKSFNRGEC

SEQ ID NO: 16851 - protein, 107 aa, synthetic construct; identical to SEQ ID NO: 11035
  source 1..107: note = Description of Artificial Sequence: Synthetic polypeptide; note = VL of XENP019607

SEQ ID NO: 16852 - protein, 11 aa, synthetic construct
  source 1..11: note = Description of Artificial Sequence: Synthetic peptide; note = XENP019607 vlCDR1
RASQSVGNDVA

SEQ ID NO: 16853 - protein, 7 aa, synthetic construct
  source 1..7: note = Description of Artificial Sequence: Synthetic peptide; note = XENP019607 vlCDR2
YASHRYT

SEQ ID NO: 16854 - protein, 9 aa, synthetic construct
  source 1..9: note = Description of Artificial Sequence: Synthetic peptide; note = XENP019607 vlCDR3
QQDFSSPRT

SEQ ID NO: 16855 - protein, 451 aa, synthetic construct; identical to SEQ ID NO: 16675
  source 1..451: note = Description of Artificial Sequence: Synthetic polypeptide; note = XENP019608 1G6_H1.278_L1.199_IgG1_PVA_/S267K Heavy Chain

SEQ ID NO: 16856 - protein, 122 aa, synthetic construct; identical to SEQ ID NO: 10845
  source 1..122: note = Description of Artificial Sequence: Synthetic polypeptide; note = VH of XENP019608

SEQ ID NO: 16857 - protein, 5 aa, synthetic construct
  source 1..5: note = Description of Artificial Sequence: Synthetic peptide; note = XENP019608 vhCDR1
NYWMN

SEQ ID NO: 16858 - protein, 19 aa, synthetic construct
  source 1..19: note = Description of Artificial Sequence: Synthetic peptide; note = XENP019608 vhCDR2
EIRLYSNNYATHYAESVKG

SEQ ID NO: 16859 - protein, 11 aa, synthetic construct
  source 1..11: note = Description of Artificial Sequence: Synthetic peptide; note = XENP019608 vhCDR3
YYGNYGGYFDV

SEQ ID NO: 16860 - protein, 214 aa, synthetic construct
  source 1..214: note = Description of Artificial Sequence: Synthetic polypeptide; note = XENP019608 1G6_H1.278_L1.199_IgG1_PVA_/S267K Light Chain
EIVLTQSPDTLSVSPGERVTLTCRASQSVGNDVAWYQQKPGQAPRLLINYASHRYTGVPDRFTGSGYGTEFTLTISSVQSEDFAVYYCQQDFSSPRTFGGGTKVEIKRTVAAPSVFIFPPSDEQLKSGTASVVCLLNNFYPREAKVQWKVDNALQSGNSQESVTEQDSKDSTYSLSSTLTLSKADYEKHKVYACEVTHQGLSSPVTKSFNRGEC

SEQ ID NO: 16861 - protein, 107 aa, synthetic construct; identical to SEQ ID NO: 11044
  source 1..107: note = Description of Artificial Sequence: Synthetic polypeptide; note = VL of XENP019608

SEQ ID NO: 16862 - protein, 11 aa, synthetic construct
  source 1..11: note = Description of Artificial Sequence: Synthetic peptide; note = XENP019608 vlCDR1
RASQSVGNDVA

SEQ ID NO: 16863 - protein, 7 aa, synthetic construct
  source 1..7: note = Description of Artificial Sequence: Synthetic peptide; note = XENP019608 vlCDR2
YASHRYT

SEQ ID NO: 16864 - protein, 9 aa, synthetic construct
  source 1..9: note = Description of Artificial Sequence: Synthetic peptide; note = XENP019608 vlCDR3
QQDFSSPRT

SEQ ID NO: 16865 - protein, 451 aa, synthetic construct; identical to SEQ ID NO: 16675
  source 1..451: note = Description of Artificial Sequence: Synthetic polypeptide; note = XENP019609 1G6_H1.278_L1.200_IgG1_PVA_/S267K Heavy Chain

SEQ ID NO: 16866 - protein, 122 aa, synthetic construct; identical to SEQ ID NO: 10845
  source 1..122: note = Description of Artificial Sequence: Synthetic polypeptide; note = VH of XENP019609

SEQ ID NO: 16867 - protein, 5 aa, synthetic construct
  source 1..5: note = Description of Artificial Sequence: Synthetic peptide; note = XENP019609 vhCDR1
NYWMN

SEQ ID NO: 16868 - protein, 19 aa, synthetic construct
  source 1..19: note = Description of Artificial Sequence: Synthetic peptide; note = XENP019609 vhCDR2
EIRLYSNNYATHYAESVKG

SEQ ID NO: 16869 - protein, 11 aa, synthetic construct
  source 1..11: note = Description of Artificial Sequence: Synthetic peptide; note = XENP019609 vhCDR3
YYGNYGGYFDV

SEQ ID NO: 16870 - protein, 214 aa, synthetic construct
  source 1..214: note = Description of Artificial Sequence: Synthetic polypeptide; note = XENP019609 1G6_H1.278_L1.200_IgG1_PVA_/S267K Light Chain
EIVLTQSPATLAVSPGERVTLTCRASQSVGNDVAWYQQKPGQAPRLLINYASHRYTGVPDRFTGSGYGTEFTLTISSVQSEDFAVYYCQQDFSSPRTFGGGTKVEIKRTVAAPSVFIFPPSDEQLKSGTASVVCLLNNFYPREAKVQWKVDNALQSGNSQESVTEQDSKDSTYSLSSTLTLSKADYEKHKVYACEVTHQGLSSPVTKSFNRGEC

SEQ ID NO: 16871 - protein, 107 aa, synthetic construct; identical to SEQ ID NO: 11053
  source 1..107: note = Description of Artificial Sequence: Synthetic polypeptide; note = VL of XENP019609

SEQ ID NO: 16872 - protein, 11 aa, synthetic construct
  source 1..11: note = Description of Artificial Sequence: Synthetic peptide; note = XENP019609 vlCDR1
RASQSVGNDVA

SEQ ID NO: 16873 - protein, 7 aa, synthetic construct
  source 1..7: note = Description of Artificial Sequence: Synthetic peptide; note = XENP019609 vlCDR2
YASHRYT

SEQ ID NO: 16874 - protein, 9 aa, synthetic construct
  source 1..9: note = Description of Artificial Sequence: Synthetic peptide; note = XENP019609 vlCDR3
QQDFSSPRT

SEQ ID NO: 16875 - protein, 451 aa, synthetic construct; identical to SEQ ID NO: 16675
  source 1..451: note = Description of Artificial Sequence: Synthetic polypeptide; note = XENP019610 1G6_H1.278_L1.201_IgG1_PVA_/S267K Heavy Chain

SEQ ID NO: 16876 - protein, 122 aa, synthetic construct; identical to SEQ ID NO: 10845
  source 1..122: note = Description of Artificial Sequence: Synthetic polypeptide; note = VH of XENP019610

SEQ ID NO: 16877 - protein, 5 aa, synthetic construct
  source 1..5: note = Description of Artificial Sequence: Synthetic peptide; note = XENP019610 vhCDR1
NYWMN

SEQ ID NO: 16878 - protein, 19 aa, synthetic construct
  source 1..19: note = Description of Artificial Sequence: Synthetic peptide; note = XENP019610 vhCDR2
EIRLYSNNYATHYAESVKG

SEQ ID NO: 16879 - protein, 11 aa, synthetic construct
  source 1..11: note = Description of Artificial Sequence: Synthetic peptide; note = XENP019610 vhCDR3
YYGNYGGYFDV

SEQ ID NO: 16880 - protein, 214 aa, synthetic construct; identical to SEQ ID NO: 16790
  source 1..214: note = Description of Artificial Sequence: Synthetic polypeptide; note = XENP019610 1G6_H1.278_L1.201_IgG1_PVA_/S267K Light Chain

SEQ ID NO: 16881 - protein, 107 aa, synthetic construct; identical to SEQ ID NO: 10981
  source 1..107: note = Description of Artificial Sequence: Synthetic polypeptide; note = VL of XENP019610

SEQ ID NO: 16882 - protein, 11 aa, synthetic construct
  source 1..11: note = Description of Artificial Sequence: Synthetic peptide; note = XENP019610 vlCDR1
RASQSVGNDVA

SEQ ID NO: 16883 - protein, 7 aa, synthetic construct
  source 1..7: note = Description of Artificial Sequence: Synthetic peptide; note = XENP019610 vlCDR2
YASHRYT

SEQ ID NO: 16884 - protein, 9 aa, synthetic construct
  source 1..9: note = Description of Artificial Sequence: Synthetic peptide; note = XENP019610 vlCDR3
QQDFSSPRT

SEQ ID NO: 16885 - protein, 451 aa, synthetic construct; identical to SEQ ID NO: 16675
  source 1..451: note = Description of Artificial Sequence: Synthetic polypeptide; note = XENP019611 1G6_H1.278_L1.202_IgG1_PVA_/S267K Heavy Chain

SEQ ID NO: 16886 - protein, 122 aa, synthetic construct; identical to SEQ ID NO: 10845
  source 1..122: note = Description of Artificial Sequence: Synthetic polypeptide; note = VH of XENP019611

SEQ ID NO: 16887 - protein, 5 aa, synthetic construct
  source 1..5: note = Description of Artificial Sequence: Synthetic peptide; note = XENP019611 vhCDR1
NYWMN

SEQ ID NO: 16888 - protein, 19 aa, synthetic construct
  source 1..19: note = Description of Artificial Sequence: Synthetic peptide; note = XENP019611 vhCDR2
EIRLYSNNYATHYAESVKG

SEQ ID NO: 16889 - protein, 11 aa, synthetic construct
  source 1..11: note = Description of Artificial Sequence: Synthetic peptide; note = XENP019611 vhCDR3
YYGNYGGYFDV

SEQ ID NO: 16890 - protein, 214 aa, synthetic construct
  source 1..214: note = Description of Artificial Sequence: Synthetic polypeptide; note = XENP019611 1G6_H1.278_L1.202_IgG1_PVA_/S267K Light Chain
EIVLTQSPATLSVSVGERVTLTCRASQSVGNDVAWYQQKPGQAPRLLINYASHRYTGVPDRFTGSGYGTEFTLTISSVQSEDFAVYYCQQDFSSPRTFGGGTKVEIKRTVAAPSVFIFPPSDEQLKSGTASVVCLLNNFYPREAKVQWKVDNALQSGNSQESVTEQDSKDSTYSLSSTLTLSKADYEKHKVYACEVTHQGLSSPVTKSFNRGEC

SEQ ID NO: 16891 - protein, 107 aa, synthetic construct; identical to SEQ ID NO: 11071
  source 1..107: note = Description of Artificial Sequence: Synthetic polypeptide; note = VL of XENP019611

SEQ ID NO: 16892 - protein, 11 aa, synthetic construct
  source 1..11: note = Description of Artificial Sequence: Synthetic peptide; note = XENP019611 vlCDR1
RASQSVGNDVA

SEQ ID NO: 16893 - protein, 7 aa, synthetic construct
  source 1..7: note = Description of Artificial Sequence: Synthetic peptide; note = XENP019611 vlCDR2
YASHRYT

SEQ ID NO: 16894 - protein, 9 aa, synthetic construct
  source 1..9: note = Description of Artificial Sequence: Synthetic peptide; note = XENP019611 vlCDR3
QQDFSSPRT

SEQ ID NO: 16895 - protein, 451 aa, synthetic construct; identical to SEQ ID NO: 16675
  source 1..451: note = Description of Artificial Sequence: Synthetic polypeptide; note = XENP019612 1G6_H1.278_L1.203_IgG1_PVA_/S267K Heavy Chain

SEQ ID NO: 16896 - protein, 122 aa, synthetic construct; identical to SEQ ID NO: 10845
  source 1..122: note = Description of Artificial Sequence: Synthetic polypeptide; note = VH of XENP019612

SEQ ID NO: 16897 - protein, 5 aa, synthetic construct
  source 1..5: note = Description of Artificial Sequence: Synthetic peptide; note = XENP019612 vhCDR1
NYWMN

SEQ ID NO: 16898 - protein, 19 aa, synthetic construct
  source 1..19: note = Description of Artificial Sequence: Synthetic peptide; note = XENP019612 vhCDR2
EIRLYSNNYATHYAESVKG

SEQ ID NO: 16899 - protein, 11 aa, synthetic construct
  source 1..11: note = Description of Artificial Sequence: Synthetic peptide; note = XENP019612 vhCDR3
YYGNYGGYFDV

SEQ ID NO: 16900 - protein, 214 aa, synthetic construct
  source 1..214: note = Description of Artificial Sequence: Synthetic polypeptide; note = XENP019612 1G6_H1.278_L1.203_IgG1_PVA_/S267K Light Chain
EIVLTQSPATLSVSLGERVTLTCRASQSVGNDVAWYQQKPGQAPRLLINYASHRYTGVPDRFTGSGYGTEFTLTISSVQSEDFAVYYCQQDFSSPRTFGGGTKVEIKRTVAAPSVFIFPPSDEQLKSGTASVVCLLNNFYPREAKVQWKVDNALQSGNSQESVTEQDSKDSTYSLSSTLTLSKADYEKHKVYACEVTHQGLSSPVTKSFNRGEC

SEQ ID NO: 16901 - protein, 107 aa, synthetic construct; identical to SEQ ID NO: 11080
  source 1..107: note = Description of Artificial Sequence: Synthetic polypeptide; note = VL of XENP019612

SEQ ID NO: 16902 - protein, 11 aa, synthetic construct
  source 1..11: note = Description of Artificial Sequence: Synthetic peptide; note = XENP019612 vlCDR1
RASQSVGNDVA

SEQ ID NO: 16903 - protein, 7 aa, synthetic construct
  source 1..7: note = Description of Artificial Sequence: Synthetic peptide; note = XENP019612 vlCDR2
YASHRYT

SEQ ID NO: 16904 - protein, 9 aa, synthetic construct
  source 1..9: note = Description of Artificial Sequence: Synthetic peptide; note = XENP019612 vlCDR3
QQDFSSPRT

SEQ ID NO: 16905 - protein, 451 aa, synthetic construct; identical to SEQ ID NO: 16675
  source 1..451: note = Description of Artificial Sequence: Synthetic polypeptide; note = XENP019613 1G6_H1.278_L1.204_IgG1_PVA_/S267K Heavy Chain

SEQ ID NO: 16906 - protein, 122 aa, synthetic construct; identical to SEQ ID NO: 10845
  source 1..122: note = Description of Artificial Sequence: Synthetic polypeptide; note = VH of XENP019613

SEQ ID NO: 16907 - protein, 5 aa, synthetic construct
  source 1..5: note = Description of Artificial Sequence: Synthetic peptide; note = XENP019613 vhCDR1
NYWMN

SEQ ID NO: 16908 - protein, 19 aa, synthetic construct
  source 1..19: note = Description of Artificial Sequence: Synthetic peptide; note = XENP019613 vhCDR2
EIRLYSNNYATHYAESVKG

SEQ ID NO: 16909 - protein, 11 aa, synthetic construct
  source 1..11: note = Description of Artificial Sequence: Synthetic peptide; note = XENP019613 vhCDR3
YYGNYGGYFDV

SEQ ID NO: 16910 - protein, 214 aa, synthetic construct
  source 1..214: note = Description of Artificial Sequence: Synthetic polypeptide; note = XENP019613 1G6_H1.278_L1.204_IgG1_PVA_/S267K Light Chain
EIVLTQSPATLSVSPGERVTLNCRASQSVGNDVAWYQQKPGQAPRLLINYASHRYTGVPDRFTGSGYGTEFTLTISSVQSEDFAVYYCQQDFSSPRTFGGGTKVEIKRTVAAPSVFIFPPSDEQLKSGTASVVCLLNNFYPREAKVQWKVDNALQSGNSQESVTEQDSKDSTYSLSSTLTLSKADYEKHKVYACEVTHQGLSSPVTKSFNRGEC

SEQ ID NO: 16911 - protein, 107 aa, synthetic construct; identical to SEQ ID NO: 11089
  source 1..107: note = Description of Artificial Sequence: Synthetic polypeptide; note = VL of XENP019613

SEQ ID NO: 16912 - protein, 11 aa, synthetic construct
  source 1..11: note = Description of Artificial Sequence: Synthetic peptide; note = XENP019613 vlCDR1
RASQSVGNDVA

SEQ ID NO: 16913 - protein, 7 aa, synthetic construct
  source 1..7: note = Description of Artificial Sequence: Synthetic peptide; note = XENP019613 vlCDR2
YASHRYT

SEQ ID NO: 16914 - protein, 9 aa, synthetic construct
  source 1..9: note = Description of Artificial Sequence: Synthetic peptide; note = XENP019613 vlCDR3
QQDFSSPRT

SEQ ID NO: 16915 - protein, 451 aa, synthetic construct; identical to SEQ ID NO: 16675
  source 1..451: note = Description of Artificial Sequence: Synthetic polypeptide; note = XENP019614 1G6_H1.278_L1.205_IgG1_PVA_/S267K Heavy Chain

SEQ ID NO: 16916 - protein, 122 aa, synthetic construct; identical to SEQ ID NO: 10845
  source 1..122: note = Description of Artificial Sequence: Synthetic polypeptide; note = VH of XENP019614

SEQ ID NO: 16917 - protein, 5 aa, synthetic construct
  source 1..5: note = Description of Artificial Sequence: Synthetic peptide; note = XENP019614 vhCDR1
NYWMN

SEQ ID NO: 16918 - protein, 19 aa, synthetic construct
  source 1..19: note = Description of Artificial Sequence: Synthetic peptide; note = XENP019614 vhCDR2
EIRLYSNNYATHYAESVKG

SEQ ID NO: 16919 - protein, 11 aa, synthetic construct
  source 1..11: note = Description of Artificial Sequence: Synthetic peptide; note = XENP019614 vhCDR3
YYGNYGGYFDV

SEQ ID NO: 16920 - protein, 214 aa, synthetic construct
  source 1..214: note = Description of Artificial Sequence: Synthetic polypeptide; note = XENP019614 1G6_H1.278_L1.205_IgG1_PVA_/S267K Light Chain
EIVLTQSPATLSVSPGERVTLTCRASQSVGNDVAWYQQKPGKAPRLLINYASHRYTGVPDRFTGSGYGTEFTLTISSVQSEDFAVYYCQQDFSSPRTFGGGTKVEIKRTVAAPSVFIFPPSDEQLKSGTASVVCLLNNFYPREAKVQWKVDNALQSGNSQESVTEQDSKDSTYSLSSTLTLSKADYEKHKVYACEVTHQGLSSPVTKSFNRGEC

SEQ ID NO: 16921 - protein, 107 aa, synthetic construct; identical to SEQ ID NO: 11098
  source 1..107: note = Description of Artificial Sequence: Synthetic polypeptide; note = VL of XENP019614

SEQ ID NO: 16922 - protein, 11 aa, synthetic construct
  source 1..11: note = Description of Artificial Sequence: Synthetic peptide; note = XENP019614 vlCDR1
RASQSVGNDVA

SEQ ID NO: 16923 - protein, 7 aa, synthetic construct
  source 1..7: note = Description of Artificial Sequence: Synthetic peptide; note = XENP019614 vlCDR2
YASHRYT

SEQ ID NO: 16924 - protein, 9 aa, synthetic construct
  source 1..9: note = Description of Artificial Sequence: Synthetic peptide; note = XENP019614 vlCDR3
QQDFSSPRT

SEQ ID NO: 16925 - protein, 451 aa, synthetic construct; identical to SEQ ID NO: 16675
  source 1..451: note = Description of Artificial Sequence: Synthetic polypeptide; note = XENP019615 1G6_H1.278_L1.206_IgG1_PVA_/S267K Heavy Chain

SEQ ID NO: 16926 - protein, 122 aa, synthetic construct; identical to SEQ ID NO: 10845
  source 1..122: note = Description of Artificial Sequence: Synthetic polypeptide; note = VH of XENP019615

SEQ ID NO: 16927 - protein, 5 aa, synthetic construct
  source 1..5: note = Description of Artificial Sequence: Synthetic peptide; note = XENP019615 vhCDR1
NYWMN

SEQ ID NO: 16928 - protein, 19 aa, synthetic construct
  source 1..19: note = Description of Artificial Sequence: Synthetic peptide; note = XENP019615 vhCDR2
EIRLYSNNYATHYAESVKG

SEQ ID NO: 16929 - protein, 11 aa, synthetic construct
  source 1..11: note = Description of Artificial Sequence: Synthetic peptide; note = XENP019615 vhCDR3
YYGNYGGYFDV

SEQ ID NO: 16930 - protein, 214 aa, synthetic construct
  source 1..214: note = Description of Artificial Sequence: Synthetic polypeptide; note = XENP019615 1G6_H1.278_L1.206_IgG1_PVA_/S267K Light Chain
EIVLTQSPATLSVSPGERVTLTCRASQSVGNDVAWYQQKPGQAPRLLINYASHRYTGVPDRFTGSGYGTEFTLTISSVQPEDFAVYYCQQDFSSPRTFGGGTKVEIKRTVAAPSVFIFPPSDEQLKSGTASVVCLLNNFYPREAKVQWKVDNALQSGNSQESVTEQDSKDSTYSLSSTLTLSKADYEKHKVYACEVTHQGLSSPVTKSFNRGEC

SEQ ID NO: 16931 - protein, 107 aa, synthetic construct; identical to SEQ ID NO: 11107
  source 1..107: note = Description of Artificial Sequence: Synthetic polypeptide; note = VL of XENP019615

SEQ ID NO: 16932 - protein, 11 aa, synthetic construct
  source 1..11: note = Description of Artificial Sequence: Synthetic peptide; note = XENP019615 vlCDR1
RASQSVGNDVA

SEQ ID NO: 16933 - protein, 7 aa, synthetic construct
  source 1..7: note = Description of Artificial Sequence: Synthetic peptide; note = XENP019615 vlCDR2
YASHRYT

SEQ ID NO: 16934 - protein, 9 aa, synthetic construct
  source 1..9: note = Description of Artificial Sequence: Synthetic peptide; note = XENP019615 vlCDR3
QQDFSSPRT

SEQ ID NO: 16935 - protein, 451 aa, synthetic construct; identical to SEQ ID NO: 16675
  source 1..451: note = Description of Artificial Sequence: Synthetic polypeptide; note = XENP019616 1G6_H1.278_L1.207_IgG1_PVA_/S267K Heavy Chain

SEQ ID NO: 16936 - protein, 122 aa, synthetic construct; identical to SEQ ID NO: 10845
  source 1..122: note = Description of Artificial Sequence: Synthetic polypeptide; note = VH of XENP019616

SEQ ID NO: 16937 - protein, 5 aa, synthetic construct
  source 1..5: note = Description of Artificial Sequence: Synthetic peptide; note = XENP019616 vhCDR1
NYWMN

SEQ ID NO: 16938 - protein, 19 aa, synthetic construct
  source 1..19: note = Description of Artificial Sequence: Synthetic peptide; note = XENP019616 vhCDR2
EIRLYSNNYATHYAESVKG

SEQ ID NO: 16939 - protein, 11 aa, synthetic construct
  source 1..11: note = Description of Artificial Sequence: Synthetic peptide; note = XENP019616 vhCDR3
YYGNYGGYFDV

SEQ ID NO: 16940 - protein, 214 aa, synthetic construct
  source 1..214: note = Description of Artificial Sequence: Synthetic polypeptide; note = XENP019616 1G6_H1.278_L1.207_IgG1_PVA_/S267K Light Chain
EIVLTQSPATLSVSPGERVTLTCRASQSVGNDVAWYQQKPGQAPRLLINYASHRYTGVPDRFTGSGYGTEFTLTISSVQSEDVAVYYCQQDFSSPRTFGGGTKVEIKRTVAAPSVFIFPPSDEQLKSGTASVVCLLNNFYPREAKVQWKVDNALQSGNSQESVTEQDSKDSTYSLSSTLTLSKADYEKHKVYACEVTHQGLSSPVTKSFNRGEC

SEQ ID NO: 16941 - protein, 107 aa, synthetic construct; identical to SEQ ID NO: 11116
  source 1..107: note = Description of Artificial Sequence: Synthetic polypeptide; note = VL of XENP019616

SEQ ID NO: 16942 - protein, 11 aa, synthetic construct
  source 1..11: note = Description of Artificial Sequence: Synthetic peptide; note = XENP019616 vlCDR1
RASQSVGNDVA

SEQ ID NO: 16943 - protein, 7 aa, synthetic construct
  source 1..7: note = Description of Artificial Sequence: Synthetic peptide; note = XENP019616 vlCDR2
YASHRYT

SEQ ID NO: 16944 - protein, 9 aa, synthetic construct
  source 1..9: note = Description of Artificial Sequence: Synthetic peptide; note = XENP019616 vlCDR3
QQDFSSPRT

SEQ ID NO: 16945 - protein, 451 aa, synthetic construct; identical to SEQ ID NO: 16675
  source 1..451: note = Description of Artificial Sequence: Synthetic polypeptide; note = XENP019617 1G6_H1.278_L1.208_IgG1_PVA_/S267K Heavy Chain

SEQ ID NO: 16946 - protein, 122 aa, synthetic construct; identical to SEQ ID NO: 10845
  source 1..122: note = Description of Artificial Sequence: Synthetic polypeptide; note = VH of XENP019617

SEQ ID NO: 16947 - protein, 5 aa, synthetic construct
  source 1..5: note = Description of Artificial Sequence: Synthetic peptide; note = XENP019617 vhCDR1
NYWMN

SEQ ID NO: 16948 - protein, 19 aa, synthetic construct
  source 1..19: note = Description of Artificial Sequence: Synthetic peptide; note = XENP019617 vhCDR2
EIRLYSNNYATHYAESVKG

SEQ ID NO: 16949 - protein, 11 aa, synthetic construct
  source 1..11: note = Description of Artificial Sequence: Synthetic peptide; note = XENP019617 vhCDR3
YYGNYGGYFDV

SEQ ID NO: 16950 - protein, 214 aa, synthetic construct
  source 1..214: note = Description of Artificial Sequence: Synthetic polypeptide; note = XENP019617 1G6_H1.278_L1.208_IgG1_PVA_/S267K Light Chain
EIVLTQSPATLSVSPGERVTLTCRASQSVGNDVAWYQQKPGQAPRLLINYASHRYTGVPDRFTGSGYGTEFTLTISSVQSEDFATYYCQQDFSSPRTFGGGTKVEIKRTVAAPSVFIFPPSDEQLKSGTASVVCLLNNFYPREAKVQWKVDNALQSGNSQESVTEQDSKDSTYSLSSTLTLSKADYEKHKVYACEVTHQGLSSPVTKSFNRGEC

SEQ ID NO: 16951 - protein, 107 aa, synthetic construct; identical to SEQ ID NO: 11125
  source 1..107: note = Description of Artificial Sequence: Synthetic polypeptide; note = VL of XENP019617

SEQ ID NO: 16952 - protein, 11 aa, synthetic construct
  source 1..11: note = Description of Artificial Sequence: Synthetic peptide; note = XENP019617 vlCDR1
RASQSVGNDVA

SEQ ID NO: 16953 - protein, 7 aa, synthetic construct
  source 1..7: note = Description of Artificial Sequence: Synthetic peptide; note = XENP019617 vlCDR2
YASHRYT

SEQ ID NO: 16954 - protein, 9 aa, synthetic construct
  source 1..9: note = Description of Artificial Sequence: Synthetic peptide; note = XENP019617 vlCDR3
QQDFSSPRT

SEQ ID NO: 16955 - protein, 451 aa, synthetic construct; identical to SEQ ID NO: 16705
  source 1..451: note = Description of Artificial Sequence: Synthetic polypeptide; note = XENP019678 1G6_H1.279_L1.192_IgG1_PVA_/S267K Heavy Chain

SEQ ID NO: 16956 - protein, 122 aa, synthetic construct; identical to SEQ ID NO: 10908
  source 1..122: note = Description of Artificial Sequence: Synthetic polypeptide; note = VH of XENP019678

SEQ ID NO: 16957 - protein, 5 aa, synthetic construct
  source 1..5: note = Description of Artificial Sequence: Synthetic peptide; note = XENP019678 vhCDR1
NYWMN

SEQ ID NO: 16958 - protein, 19 aa, synthetic construct
  source 1..19: note = Description of Artificial Sequence: Synthetic peptide; note = XENP019678 vhCDR2
EIRLYSNNYATHYAESVKG

SEQ ID NO: 16959 - protein, 11 aa, synthetic construct
  source 1..11: note = Description of Artificial Sequence: Synthetic peptide; note = XENP019678 vhCDR3
YYGNYGGYFDV

SEQ ID NO: 16960 - protein, 214 aa, synthetic construct; identical to SEQ ID NO: 16790
  source 1..214: note = Description of Artificial Sequence: Synthetic polypeptide; note = XENP019678 1G6_H1.279_L1.192_IgG1_PVA_/S267K Light Chain

SEQ ID NO: 16961 - protein, 107 aa, synthetic construct; identical to SEQ ID NO: 10981
  source 1..107: note = Description of Artificial Sequence: Synthetic polypeptide; note = VL of XENP019678

SEQ ID NO: 16962 - protein, 11 aa, synthetic construct
  source 1..11: note = Description of Artificial Sequence: Synthetic peptide; note = XENP019678 vlCDR1
RASQSVGNDVA

SEQ ID NO: 16963 - protein, 7 aa, synthetic construct
  source 1..7: note = Description of Artificial Sequence: Synthetic peptide; note = XENP019678 vlCDR2
YASHRYT

SEQ ID NO: 16964 - protein, 9 aa, synthetic construct
  source 1..9: note = Description of Artificial Sequence: Synthetic peptide; note = XENP019678 vlCDR3
QQDFSSPRT

SEQ ID NO: 16965 - protein, 451 aa, synthetic construct; identical to SEQ ID NO: 16715
  source 1..451: note = Description of Artificial Sequence: Synthetic polypeptide; note = XENP019679 1G6_H1.280_L1.192_IgG1_PVA_/S267K Heavy Chain

SEQ ID NO: 16966 - protein, 122 aa, synthetic construct; identical to SEQ ID NO: 10917
  source 1..122: note = Description of Artificial Sequence: Synthetic polypeptide; note = VH of XENP019679

SEQ ID NO: 16967 - protein, 5 aa, synthetic construct
  source 1..5: note = Description of Artificial Sequence: Synthetic peptide; note = XENP019679 vhCDR1
NYWMN

SEQ ID NO: 16968 - protein, 19 aa, synthetic construct
  source 1..19: note = Description of Artificial Sequence: Synthetic peptide; note = XENP019679 vhCDR2
EIRLYSNNYATHYAESVKG

SEQ ID NO: 16969 - protein, 11 aa, synthetic construct
  source 1..11: note = Description of Artificial Sequence: Synthetic peptide; note = XENP019679 vhCDR3
YYGNYGGYFDV

SEQ ID NO: 16970 - protein, 214 aa, synthetic construct; identical to SEQ ID NO: 16790
  source 1..214: note = Description of Artificial Sequence: Synthetic polypeptide; note = XENP019679 1G6_H1.280_L1.192_IgG1_PVA_/S267K Light Chain

SEQ ID NO: 16971 - protein, 107 aa, synthetic construct; identical to SEQ ID NO: 10981
  source 1..107: note = Description of Artificial Sequence: Synthetic polypeptide; note = VL of XENP019679

SEQ ID NO: 16972 - protein, 11 aa, synthetic construct
  source 1..11: note = Description of Artificial Sequence: Synthetic peptide; note = XENP019679 vlCDR1
RASQSVGNDVA

SEQ ID NO: 16973 - protein, 7 aa, synthetic construct
  source 1..7: note = Description of Artificial Sequence: Synthetic peptide; note = XENP019679 vlCDR2
YASHRYT

SEQ ID NO: 16974 - protein, 9 aa, synthetic construct
  source 1..9: note = Description of Artificial Sequence: Synthetic peptide; note = XENP019679 vlCDR3
QQDFSSPRT

SEQ ID NO: 16975 - protein, 451 aa, synthetic construct; identical to SEQ ID NO: 16725
  source 1..451: note = Description of Artificial Sequence: Synthetic polypeptide; note = XENP019680 1G6_H1.281_L1.192_IgG1_PVA_/S267K Heavy Chain

SEQ ID NO: 16976 - protein, 122 aa, synthetic construct; identical to SEQ ID NO: 10926
  source 1..122: note = Description of Artificial Sequence: Synthetic polypeptide; note = VH of XENP019680

SEQ ID NO: 16977 - protein, 5 aa, synthetic construct
  source 1..5: note = Description of Artificial Sequence: Synthetic peptide; note = XENP019680 vhCDR1
NYWMN

SEQ ID NO: 16978 - protein, 19 aa, synthetic construct
  source 1..19: note = Description of Artificial Sequence: Synthetic peptide; note = XENP019680 vhCDR2
EIRLYSNNYATHYAESVKG

SEQ ID NO: 16979 - protein, 11 aa, synthetic construct
  source 1..11: note = Description of Artificial Sequence: Synthetic peptide; note = XENP019680 vhCDR3
YYGNYGGYFDV

SEQ ID NO: 16980 - protein, 214 aa, synthetic construct; identical to SEQ ID NO: 16790
  source 1..214: note = Description of Artificial Sequence: Synthetic polypeptide; note = XENP019680 1G6_H1.281_L1.192_IgG1_PVA_/S267K Light Chain

SEQ ID NO: 16981 - protein, 107 aa, synthetic construct; identical to SEQ ID NO: 10981
  source 1..107: note = Description of Artificial Sequence: Synthetic polypeptide; note = VL of XENP019680

SEQ ID NO: 16982 - protein, 11 aa, synthetic construct
  source 1..11: note = Description of Artificial Sequence: Synthetic peptide; note = XENP019680 vlCDR1
RASQSVGNDVA

SEQ ID NO: 16983 - protein, 7 aa, synthetic construct
  source 1..7: note = Description of Artificial Sequence: Synthetic peptide; note = XENP019680 vlCDR2
YASHRYT

SEQ ID NO: 16984 - protein, 9 aa, synthetic construct
  source 1..9: note = Description of Artificial Sequence: Synthetic peptide; note = XENP019680 vlCDR3
QQDFSSPRT

SEQ ID NO: 16985 - protein, 451 aa, synthetic construct; identical to SEQ ID NO: 16735
  source 1..451: note = Description of Artificial Sequence: Synthetic polypeptide; note = XENP019681 1G6_H1.282_L1.192_IgG1_PVA_/S267K Heavy Chain

SEQ ID NO: 16986 - protein, 122 aa, synthetic construct; identical to SEQ ID NO: 10935
  source 1..122: note = Description of Artificial Sequence: Synthetic polypeptide; note = VH of XENP019681

SEQ ID NO: 16987 - protein, 5 aa, synthetic construct
  source 1..5: note = Description of Artificial Sequence: Synthetic peptide; note = XENP019681 vhCDR1
NYWMN

SEQ ID NO: 16988 - protein, 19 aa, synthetic construct
  source 1..19: note = Description of Artificial Sequence: Synthetic peptide; note = XENP019681 vhCDR2
EIRLYSNNYATHYAESVKG

SEQ ID NO: 16989 - protein, 11 aa, synthetic construct
  source 1..11: note = Description of Artificial Sequence: Synthetic peptide; note = XENP019681 vhCDR3
YYGNYGGYFDV

SEQ ID NO: 16990 - protein, 214 aa, synthetic construct; identical to SEQ ID NO: 16790
  source 1..214: note = Description of Artificial Sequence: Synthetic polypeptide; note = XENP019681 1G6_H1.282_L1.192_IgG1_PVA_/S267K Light Chain

SEQ ID NO: 16991 - protein, 107 aa, synthetic construct; identical to SEQ ID NO: 10981
  source 1..107: note = Description of Artificial Sequence: Synthetic polypeptide; note = VL of XENP019681

SEQ ID NO: 16992 - protein, 11 aa, synthetic construct
  source 1..11: note = Description of Artificial Sequence: Synthetic peptide; note = XENP019681 vlCDR1
RASQSVGNDVA

SEQ ID NO: 16993 - protein, 7 aa, synthetic construct
  source 1..7: note = Description of Artificial Sequence: Synthetic peptide; note = XENP019681 vlCDR2
YASHRYT

SEQ ID NO: 16994 - protein, 9 aa, synthetic construct
  source 1..9: note = Description of Artificial Sequence: Synthetic peptide; note = XENP019681 vlCDR3
QQDFSSPRT

SEQ ID NO: 16995 - protein, 451 aa, synthetic construct; identical to SEQ ID NO: 16705
  source 1..451: note = Description of Artificial Sequence: Synthetic polypeptide; note = XENP019682 1G6_H1.279_L1.193_IgG1_PVA_/S267K Heavy Chain

SEQ ID NO: 16996 - protein, 122 aa, synthetic construct; identical to SEQ ID NO: 10908
  source 1..122: note = Description of Artificial Sequence: Synthetic polypeptide; note = VH of XENP019682

SEQ ID NO: 16997 - protein, 5 aa, synthetic construct
  source 1..5: note = Description of Artificial Sequence: Synthetic peptide; note = XENP019682 vhCDR1
NYWMN

SEQ ID NO: 16998 - protein, 19 aa, synthetic construct
  source 1..19: note = Description of Artificial Sequence: Synthetic peptide; note = XENP019682 vhCDR2
EIRLYSNNYATHYAESVKG

SEQ ID NO: 16999 - protein, 11 aa, synthetic construct
  source 1..11: note = Description of Artificial Sequence: Synthetic peptide; note = XENP019682 vhCDR3
YYGNYGGYFDV

SEQ ID NO: 17000 - protein, 214 aa, synthetic construct; identical to SEQ ID NO: 16800
  source 1..214: note = Description of Artificial Sequence: Synthetic polypeptide; note = XENP019682 1G6_H1.279_L1.193_IgG1_PVA_/S267K Light Chain

SEQ ID NO: 17001 - protein, 107 aa, synthetic construct; identical to SEQ ID NO: 10990
  source 1..107: note = Description of Artificial Sequence: Synthetic polypeptide; note = VL of XENP019682

SEQ ID NO: 17002 - protein, 11 aa, synthetic construct
  source 1..11: note = Description of Artificial Sequence: Synthetic peptide; note = XENP019682 vlCDR1
RASQSVGNDVA

SEQ ID NO: 17003 - protein, 7 aa, synthetic construct
  source 1..7: note = Description of Artificial Sequence: Synthetic peptide; note = XENP019682 vlCDR2
YASHRYT

SEQ ID NO: 17004 - protein, 9 aa, synthetic construct
  source 1..9: note = Description of Artificial Sequence: Synthetic peptide; note = XENP019682 vlCDR3
QQDFSSPRT

SEQ ID NO: 17005 - protein, 451 aa, synthetic construct; identical to SEQ ID NO: 16715
  source 1..451: note = Description of Artificial Sequence: Synthetic polypeptide; note = XENP019683 1G6_H1.280_L1.193_IgG1_PVA_/S267K Heavy Chain

SEQ ID NO: 17006 - protein, 122 aa, synthetic construct; identical to SEQ ID NO: 10917
  source 1..122: note = Description of Artificial Sequence: Synthetic polypeptide; note = VH of XENP019683

SEQ ID NO: 17007 - protein, 5 aa, synthetic construct
  source 1..5: note = Description of Artificial Sequence: Synthetic peptide; note = XENP019683 vhCDR1
NYWMN

SEQ ID NO: 17008 - protein, 19 aa, synthetic construct
  source 1..19: note = Description of Artificial Sequence: Synthetic peptide; note = XENP019683 vhCDR2
EIRLYSNNYATHYAESVKG

SEQ ID NO: 17009 - protein, 11 aa, synthetic construct
  source 1..11: note = Description of Artificial Sequence: Synthetic peptide; note = XENP019683 vhCDR3
YYGNYGGYFDV

SEQ ID NO: 17010 - protein, 214 aa, synthetic construct; identical to SEQ ID NO: 16800
  source 1..214: note = Description of Artificial Sequence: Synthetic polypeptide; note = XENP019683 1G6_H1.280_L1.193_IgG1_PVA_/S267K Light Chain

SEQ ID NO: 17011 - protein, 107 aa, synthetic construct; identical to SEQ ID NO: 10990
  source 1..107: note = Description of Artificial Sequence: Synthetic polypeptide; note = VL of XENP019683

SEQ ID NO: 17012 - protein, 11 aa, synthetic construct
  source 1..11: note = Description of Artificial Sequence: Synthetic peptide; note = XENP019683 vlCDR1
RASQSVGNDVA

SEQ ID NO: 17013 - protein, 7 aa, synthetic construct
  source 1..7: note = Description of Artificial Sequence: Synthetic peptide; note = XENP019683 vlCDR2
YASHRYT

SEQ ID NO: 17014 - protein, 9 aa, synthetic construct
  source 1..9: note = Description of Artificial Sequence: Synthetic peptide; note = XENP019683 vlCDR3
QQDFSSPRT

SEQ ID NO: 17015 - protein, 451 aa, synthetic construct; identical to SEQ ID NO: 16725
  source 1..451: note = Description of Artificial Sequence: Synthetic polypeptide; note = XENP019684 1G6_H1.281_L1.193_IgG1_PVA_/S267K Heavy Chain

SEQ ID NO: 17016 - protein, 122 aa, synthetic construct; identical to SEQ ID NO: 10926
  source 1..122: note = Description of Artificial Sequence: Synthetic polypeptide; note = VH of XENP019684

SEQ ID NO: 17017 - protein, 5 aa, synthetic construct
  source 1..5: note = Description of Artificial Sequence: Synthetic peptide; note = XENP019684 vhCDR1
NYWMN

SEQ ID NO: 17018 - protein, 19 aa, synthetic construct
  source 1..19: note = Description of Artificial Sequence: Synthetic peptide; note = XENP019684 vhCDR2
EIRLYSNNYATHYAESVKG

SEQ ID NO: 17019 - protein, 11 aa, synthetic construct
  source 1..11: note = Description of Artificial Sequence: Synthetic peptide; note = XENP019684 vhCDR3
YYGNYGGYFDV

SEQ ID NO: 17020 - protein, 214 aa, synthetic construct; identical to SEQ ID NO: 16800
  source 1..214: note = Description of Artificial Sequence: Synthetic polypeptide; note = XENP019684 1G6_H1.281_L1.193_IgG1_PVA_/S267K Light Chain

SEQ ID NO: 17021 - protein, 107 aa, synthetic construct; identical to SEQ ID NO: 10990
  source 1..107: note = Description of Artificial Sequence: Synthetic polypeptide; note = VL of XENP019684

SEQ ID NO: 17022 - protein, 11 aa, synthetic construct
  source 1..11: note = Description of Artificial Sequence: Synthetic peptide; note = XENP019684 vlCDR1
RASQSVGNDVA

SEQ ID NO: 17023 - protein, 7 aa, synthetic construct
  source 1..7: note = Description of Artificial Sequence: Synthetic peptide; note = XENP019684 vlCDR2
YASHRYT

SEQ ID NO: 17024 - protein, 9 aa, synthetic construct
  source 1..9: note = Description of Artificial Sequence: Synthetic peptide; note = XENP019684 vlCDR3
QQDFSSPRT

SEQ ID NO: 17025 - protein, 451 aa, synthetic construct; identical to SEQ ID NO: 16735
  source 1..451: note = Description of Artificial Sequence: Synthetic polypeptide; note = XENP019685 1G6_H1.282_L1.193_IgG1_PVA_/S267K Heavy Chain

SEQ ID NO: 17026 - protein, 122 aa, synthetic construct; identical to SEQ ID NO: 10935
  source 1..122: note = Description of Artificial Sequence: Synthetic polypeptide; note = VH of XENP019685

SEQ ID NO: 17027 - protein, 5 aa, synthetic construct
  source 1..5: note = Description of Artificial Sequence: Synthetic peptide; note = XENP019685 vhCDR1
NYWMN

SEQ ID NO: 17028 - protein, 19 aa, synthetic construct
  source 1..19: note = Description of Artificial Sequence: Synthetic peptide; note = XENP019685 vhCDR2
EIRLYSNNYATHYAESVKG

SEQ ID NO: 17029 - protein, 11 aa, synthetic construct
  source 1..11: note = Description of Artificial Sequence: Synthetic peptide; note = XENP019685 vhCDR3
YYGNYGGYFDV

SEQ ID NO: 17030 - protein, 214 aa, synthetic construct; identical to SEQ ID NO: 16800
  source 1..214: note = Description of Artificial Sequence: Synthetic polypeptide; note = XENP019685 1G6_H1.282_L1.193_IgG1_PVA_/S267K Light Chain

SEQ ID NO: 17031 - protein, 107 aa, synthetic construct; identical to SEQ ID NO: 10990
  source 1..107: note = Description of Artificial Sequence: Synthetic polypeptide; note = VL of XENP019685

SEQ ID NO: 17032 - protein, 11 aa, synthetic construct
  source 1..11: note = Description of Artificial Sequence: Synthetic peptide; note = XENP019685 vlCDR1
RASQSVGNDVA

SEQ ID NO: 17033 - protein, 7 aa, synthetic construct
  source 1..7: note = Description of Artificial Sequence: Synthetic peptide; note = XENP019685 vlCDR2
YASHRYT

SEQ ID NO: 17034 - protein, 9 aa, synthetic construct
  source 1..9: note = Description of Artificial Sequence: Synthetic peptide; note = XENP019685 vlCDR3
QQDFSSPRT

SEQ ID NO: 17035 - protein, 451 aa, synthetic construct; identical to SEQ ID NO: 16705
  source 1..451: note = Description of Artificial Sequence: Synthetic polypeptide; note = XENP019686 1G6_H1.279_L1.194_IgG1_PVA_/S267K Heavy Chain

SEQ ID NO: 17036 - protein, 122 aa, synthetic construct; identical to SEQ ID NO: 10908
  source 1..122: note = Description of Artificial Sequence: Synthetic polypeptide; note = VH of XENP019686

SEQ ID NO: 17037 - protein, 5 aa, synthetic construct
  source 1..5: note = Description of Artificial Sequence: Synthetic peptide; note = XENP019686 vhCDR1
NYWMN

SEQ ID NO: 17038 - protein, 19 aa, synthetic construct
  source 1..19: note = Description of Artificial Sequence: Synthetic peptide; note = XENP019686 vhCDR2
EIRLYSNNYATHYAESVKG

SEQ ID NO: 17039 - protein, 11 aa, synthetic construct
  source 1..11: note = Description of Artificial Sequence: Synthetic peptide; note = XENP019686 vhCDR3
YYGNYGGYFDV

SEQ ID NO: 17040 - protein, 214 aa, synthetic construct; identical to SEQ ID NO: 16810
  source 1..214: note = Description of Artificial Sequence: Synthetic polypeptide; note = XENP019686 1G6_H1.279_L1.194_IgG1_PVA_/S267K Light Chain

SEQ ID NO: 17041 - protein, 107 aa, synthetic construct; identical to SEQ ID NO: 10999
  source 1..107: note = Description of Artificial Sequence: Synthetic polypeptide; note = VL of XENP019686

SEQ ID NO: 17042 - protein, 11 aa, synthetic construct
  source 1..11: note = Description of Artificial Sequence: Synthetic peptide; note = XENP019686 vlCDR1
RASQSVGNDVA

SEQ ID NO: 17043 - protein, 7 aa, synthetic construct
  source 1..7: note = Description of Artificial Sequence: Synthetic peptide; note = XENP019686 vlCDR2
YASHRYT

SEQ ID NO: 17044 - protein, 9 aa, synthetic construct
  source 1..9: note = Description of Artificial Sequence: Synthetic peptide; note = XENP019686 vlCDR3
QQDFSSPRT

SEQ ID NO: 17045 - protein, 451 aa, synthetic construct; identical to SEQ ID NO: 16715
  source 1..451: note = Description of Artificial Sequence: Synthetic polypeptide; note = XENP019687 1G6_H1.280_L1.194_IgG1_PVA_/S267K Heavy Chain

SEQ ID NO: 17046 - protein, 122 aa, synthetic construct; identical to SEQ ID NO: 10917
  source 1..122: note = Description of Artificial Sequence: Synthetic polypeptide; note = VH of XENP019687

SEQ ID NO: 17047 - protein, 5 aa, synthetic construct
  source 1..5: note = Description of Artificial Sequence: Synthetic peptide; note = XENP019687 vhCDR1
NYWMN

SEQ ID NO: 17048 - protein, 19 aa, synthetic construct
  source 1..19: note = Description of Artificial Sequence: Synthetic peptide; note = XENP019687 vhCDR2
EIRLYSNNYATHYAESVKG

SEQ ID NO: 17049 - protein, 11 aa, synthetic construct
  source 1..11: note = Description of Artificial Sequence: Synthetic peptide; note = XENP019687 vhCDR3
YYGNYGGYFDV

SEQ ID NO: 17050 - protein, 214 aa, synthetic construct; identical to SEQ ID NO: 16810
  source 1..214: note = Description of Artificial Sequence: Synthetic polypeptide; note = XENP019687 1G6_H1.280_L1.194_IgG1_PVA_/S267K Light Chain

SEQ ID NO: 17051 - protein, 107 aa, synthetic construct; identical to SEQ ID NO: 10999
  source 1..107: note = Description of Artificial Sequence: Synthetic polypeptide; note = VL of XENP019687

SEQ ID NO: 17052 - protein, 11 aa, synthetic construct
  source 1..11: note = Description of Artificial Sequence: Synthetic peptide; note = XENP019687 vlCDR1
RASQSVGNDVA

SEQ ID NO: 17053 - protein, 7 aa, synthetic construct
  source 1..7: note = Description of Artificial Sequence: Synthetic peptide; note = XENP019687 vlCDR2
YASHRYT

SEQ ID NO: 17054 - protein, 9 aa, synthetic construct
  source 1..9: note = Description of Artificial Sequence: Synthetic peptide; note = XENP019687 vlCDR3
QQDFSSPRT

SEQ ID NO: 17055 - protein, 451 aa, synthetic construct; identical to SEQ ID NO: 16725
  source 1..451: note = Description of Artificial Sequence: Synthetic polypeptide; note = XENP019688 1G6_H1.281_L1.194_IgG1_PVA_/S267K Heavy Chain

SEQ ID NO: 17056 - protein, 122 aa, synthetic construct; identical to SEQ ID NO: 10926
  source 1..122: note = Description of Artificial Sequence: Synthetic polypeptide; note = VH of XENP019688

SEQ ID NO: 17057 - protein, 5 aa, synthetic construct
  source 1..5: note = Description of Artificial Sequence: Synthetic peptide; note = XENP019688 vhCDR1
NYWMN

SEQ ID NO: 17058 - protein, 19 aa, synthetic construct
  source 1..19: note = Description of Artificial Sequence: Synthetic peptide; note = XENP019688 vhCDR2
EIRLYSNNYATHYAESVKG

SEQ ID NO: 17059 - protein, 11 aa, synthetic construct
  source 1..11: note = Description of Artificial Sequence: Synthetic peptide; note = XENP019688 vhCDR3
YYGNYGGYFDV

SEQ ID NO: 17060 - protein, 214 aa, synthetic construct; identical to SEQ ID NO: 16810
  source 1..214: note = Description of Artificial Sequence: Synthetic polypeptide; note = XENP019688 1G6_H1.281_L1.194_IgG1_PVA_/S267K Light Chain

SEQ ID NO: 17061 - protein, 107 aa, synthetic construct; identical to SEQ ID NO: 10999
  source 1..107: note = Description of Artificial Sequence: Synthetic polypeptide; note = VL of XENP019688

SEQ ID NO: 17062 - protein, 11 aa, synthetic construct
  source 1..11: note = Description of Artificial Sequence: Synthetic peptide; note = XENP019688 vlCDR1
RASQSVGNDVA

SEQ ID NO: 17063 - protein, 7 aa, synthetic construct
  source 1..7: note = Description of Artificial Sequence: Synthetic peptide; note = XENP019688 vlCDR2
YASHRYT

SEQ ID NO: 17064 - protein, 9 aa, synthetic construct
  source 1..9: note = Description of Artificial Sequence: Synthetic peptide; note = XENP019688 vlCDR3
QQDFSSPRT

SEQ ID NO: 17065 - protein, 451 aa, synthetic construct; identical to SEQ ID NO: 16735
  source 1..451: note = Description of Artificial Sequence: Synthetic polypeptide; note = XENP019689 1G6_H1.282_L1.194_IgG1_PVA_/S267K Heavy Chain

SEQ ID NO: 17066 - protein, 122 aa, synthetic construct; identical to SEQ ID NO: 10935
  source 1..122: note = Description of Artificial Sequence: Synthetic polypeptide; note = VH of XENP019689

SEQ ID NO: 17067 - protein, 5 aa, synthetic construct
  source 1..5: note = Description of Artificial Sequence: Synthetic peptide; note = XENP019689 vhCDR1
NYWMN

SEQ ID NO: 17068 - protein, 19 aa, synthetic construct
  source 1..19: note = Description of Artificial Sequence: Synthetic peptide; note = XENP019689 vhCDR2
EIRLYSNNYATHYAESVKG

SEQ ID NO: 17069 - protein, 11 aa, synthetic construct
  source 1..11: note = Description of Artificial Sequence: Synthetic peptide; note = XENP019689 vhCDR3
YYGNYGGYFDV

SEQ ID NO: 17070 - protein, 214 aa, synthetic construct; identical to SEQ ID NO: 16810
  source 1..214: note = Description of Artificial Sequence: Synthetic polypeptide; note = XENP019689 1G6_H1.282_L1.194_IgG1_PVA_/S267K Light Chain

SEQ ID NO: 17071 - protein, 107 aa, synthetic construct; identical to SEQ ID NO: 10999
  source 1..107: note = Description of Artificial Sequence: Synthetic polypeptide; note = VL of XENP019689

SEQ ID NO: 17072 - protein, 11 aa, synthetic construct
  source 1..11: note = Description of Artificial Sequence: Synthetic peptide; note = XENP019689 vlCDR1
RASQSVGNDVA

SEQ ID NO: 17073 - protein, 7 aa, synthetic construct
  source 1..7: note = Description of Artificial Sequence: Synthetic peptide; note = XENP019689 vlCDR2
YASHRYT

SEQ ID NO: 17074 - protein, 9 aa, synthetic construct
  source 1..9: note = Description of Artificial Sequence: Synthetic peptide; note = XENP019689 vlCDR3
QQDFSSPRT

SEQ ID NO: 17075 - protein, 449 aa, synthetic construct
  source 1..449: note = Description of Artificial Sequence: Synthetic polypeptide; note = XENP020156 2E9_H1L1_IgG1_PVA_/S267K Heavy Chain
QVQLVQSGAEVKKPGASVKVSCKASGYAFTNYWLGWVRQAPGQGLEWMGNFYPGSSNTYYNEKFQGRVTMTADKSISTAYMELSRLRSDDTAVYFCARHYGTNYRYFDVWGAGTLVTVSSASTKGPSVFPLAPSSKSTSGGTAALGCLVKDYFPEPVTVSWNSGALTSGVHTFPAVLQSSGLYSLSSVVTVPSSSLGTQTYICNVNHKPSNTKVDKKVEPKSCDKTHTCPPCPAPPVAGPSVFLFPPKPKDTLMISRTPEVTCVVVDVKHEDPEVKFNWYVDGVEVHNAKTKPREEQYNSTYRVVSVLTVLHQDWLNGKEYKCKVSNKALPAPIEKTISKAKGQPREPQVYTLPPSREEMTKNQVSLTCLVKGFYPSDIAVEWESNGQPENNYKTTPPVLDSDGSFFLYSKLTVDKSRWQQGNVFSCSVMHEALHNHYTQKSLSLSPGK

SEQ ID NO: 17076 - protein, 120 aa, synthetic construct; identical to SEQ ID NO: 11412
  source 1..120: note = Description of Artificial Sequence: Synthetic polypeptide; note = VH of XENP020156

SEQ ID NO: 17077 - protein, 5 aa, synthetic construct
  source 1..5: note = Description of Artificial Sequence: Synthetic peptide; note = XENP020156 vhCDR1
NYWLG

SEQ ID NO: 17078 - protein, 17 aa, synthetic construct
  source 1..17: note = Description of Artificial Sequence: Synthetic peptide; note = XENP020156 vhCDR2
NFYPGSSNTYYNEKFQG

SEQ ID NO: 17079 - protein, 11 aa, synthetic construct
  source 1..11: note = Description of Artificial Sequence: Synthetic peptide; note = XENP020156 vhCDR3
HYGTNYRYFDV

SEQ ID NO: 17080 - protein, 214 aa, synthetic construct
  source 1..214: note = Description of Artificial Sequence: Synthetic polypeptide; note = XENP020156 2E9_H1L1_IgG1_PVA_/S267K Light Chain
DIVLTQSPGTLSLSPGERATLSCRASQSVSNDVAWYQQKPGQSPRLLIYYASNRYTGVPDRFTGSGYGTDFTLTISRLEPEDFAVYFCQQDYSSPYTFGGGTKVEIKRTVAAPSVFIFPPSDEQLKSGTASVVCLLNNFYPREAKVQWKVDNALQSGNSQESVTEQDSKDSTYSLSSTLTLSKADYEKHKVYACEVTHQGLSSPVTKSFNRGEC

SEQ ID NO: 17081 - protein, 107 aa, synthetic construct; identical to SEQ ID NO: 11413
  source 1..107: note = Description of Artificial Sequence: Synthetic polypeptide; note = VL of XENP020156

SEQ ID NO: 17082 - protein, 11 aa, synthetic construct
  source 1..11: note = Description of Artificial Sequence: Synthetic peptide; note = XENP020156 vlCDR1
RASQSVSNDVA

SEQ ID NO: 17083 - protein, 7 aa, synthetic construct
  source 1..7: note = Description of Artificial Sequence: Synthetic peptide; note = XENP020156 vlCDR2
YASNRYT

SEQ ID NO: 17084 - protein, 9 aa, synthetic construct
  source 1..9: note = Description of Artificial Sequence: Synthetic peptide; note = XENP020156 vlCDR3
QQDYSSPYT

SEQ ID NO: 17085 - protein, 449 aa, synthetic construct
  source 1..449: note = Description of Artificial Sequence: Synthetic polypeptide; note = XENP020157 2E9_H2L1_IgG1_PVA_/S267K Heavy Chain
EVQLVQSGAEVKKPGESLKISCKASGYAFTNYWLGWVRQMPGKGLEWMGNFYPGSSNTYYNPSFQGQVTISADKSISTAYLQWSSLKASDTAMYFCARHYGTNYRYFDVWGAGTLVTVSSASTKGPSVFPLAPSSKSTSGGTAALGCLVKDYFPEPVTVSWNSGALTSGVHTFPAVLQSSGLYSLSSVVTVPSSSLGTQTYICNVNHKPSNTKVDKKVEPKSCDKTHTCPPCPAPPVAGPSVFLFPPKPKDTLMISRTPEVTCVVVDVKHEDPEVKFNWYVDGVEVHNAKTKPREEQYNSTYRVVSVLTVLHQDWLNGKEYKCKVSNKALPAPIEKTISKAKGQPREPQVYTLPPSREEMTKNQVSLTCLVKGFYPSDIAVEWESNGQPENNYKTTPPVLDSDGSFFLYSKLTVDKSRWQQGNVFSCSVMHEALHNHYTQKSLSLSPGK

SEQ ID NO: 17086 - protein, 120 aa, synthetic construct; identical to SEQ ID NO: 11421
  source 1..120: note = Description of Artificial Sequence: Synthetic polypeptide; note = VH of XENP020157

SEQ ID NO: 17087 - protein, 5 aa, synthetic construct
  source 1..5: note = Description of Artificial Sequence: Synthetic peptide; note = XENP020157 vhCDR1
NYWLG

SEQ ID NO: 17088 - protein, 17 aa, synthetic construct
  source 1..17: note = Description of Artificial Sequence: Synthetic peptide; note = XENP020157 vhCDR2
NFYPGSSNTYYNPSFQG

SEQ ID NO: 17089 - protein, 11 aa, synthetic construct
  source 1..11: note = Description of Artificial Sequence: Synthetic peptide; note = XENP020157 vhCDR3
HYGTNYRYFDV

SEQ ID NO: 17090 - protein, 214 aa, synthetic construct; identical to SEQ ID NO: 17080
  source 1..214: note = Description of Artificial Sequence: Synthetic polypeptide; note = XENP020157 2E9_H2L1_IgG1_PVA_/S267K Light Chain

SEQ ID NO: 17091 - protein, 107 aa, synthetic construct; identical to SEQ ID NO: 11413
  source 1..107: note = Description of Artificial Sequence: Synthetic polypeptide; note = VL of XENP020157

SEQ ID NO: 17092 - protein, 11 aa, synthetic construct
  source 1..11: note = Description of Artificial Sequence: Synthetic peptide; note = XENP020157 vlCDR1
RASQSVSNDVA

SEQ ID NO: 17093 - protein, 7 aa, synthetic construct
  source 1..7: note = Description of Artificial Sequence: Synthetic peptide; note = XENP020157 vlCDR2
YASNRYT

SEQ ID NO: 17094 - protein, 9 aa, synthetic construct
  source 1..9: note = Description of Artificial Sequence: Synthetic peptide; note = XENP020157 vlCDR3
QQDYSSPYT

SEQ ID NO: 17095 - protein, 444 aa, synthetic construct
  source 1..444: note = Description of Artificial Sequence: Synthetic polypeptide; note = XENP020158 3C11(PD-1)_H1L1_IgG1_PVA_/S267K Heavy Chain
QVQLVQSGAEVKKPGASVKVSCKASGYTFTSYWMHWVRQAPGQGLEWMGAIYPGNIATSYNQKFQGRVTMTADTSTSTAYMELSSLRSEDTAVYYCTTSYVMDYWGQGTLVTVSSASTKGPSVFPLAPSSKSTSGGTAALGCLVKDYFPEPVTVSWNSGALTSGVHTFPAVLQSSGLYSLSSVVTVPSSSLGTQTYICNVNHKPSNTKVDKKVEPKSCDKTHTCPPCPAPPVAGPSVFLFPPKPKDTLMISRTPEVTCVVVDVKHEDPEVKFNWYVDGVEVHNAKTKPREEQYNSTYRVVSVLTVLHQDWLNGKEYKCKVSNKALPAPIEKTISKAKGQPREPQVYTLPPSREEMTKNQVSLTCLVKGFYPSDIAVEWESNGQPENNYKTTPPVLDSDGSFFLYSKLTVDKSRWQQGNVFSCSVMHEALHNHYTQKSLSLSPGK

SEQ ID NO: 17096 - protein, 115 aa, synthetic construct; identical to SEQ ID NO: 11430
  source 1..115: note = Description of Artificial Sequence: Synthetic polypeptide; note = VH of XENP020158

SEQ ID NO: 17097 - protein, 5 aa, synthetic construct
  source 1..5: note = Description of Artificial Sequence: Synthetic peptide; note = XENP020158 vhCDR1
SYWMH

SEQ ID NO: 17098 - protein, 17 aa, synthetic construct
  source 1..17: note = Description of Artificial Sequence: Synthetic peptide; note = XENP020158 vhCDR2
AIYPGNIATSYNQKFQG

SEQ ID NO: 17099 - protein, 6 aa, synthetic construct
  source 1..6: note = Description of Artificial Sequence: Synthetic peptide; note = XENP020158 vhCDR3
SYVMDY

SEQ ID NO: 17100 - protein, 214 aa, synthetic construct
  source 1..214: note = Description of Artificial Sequence: Synthetic polypeptide; note = XENP020158 3C11(PD-1)_H1L1_IgG1_PVA_/S267K Light Chain
DIVMTQSPSSLSASVGDRVTITCQASQDINSYLSWFQQKPGKSPKTLIYRANRLVDGVPSRFSGSGSGQDYTFTISSLQPEDIATYYCLQYDEFPYTFGGGTKVEIKRTVAAPSVFIFPPSDEQLKSGTASVVCLLNNFYPREAKVQWKVDNALQSGNSQESVTEQDSKDSTYSLSSTLTLSKADYEKHKVYACEVTHQGLSSPVTKSFNRGEC

SEQ ID NO: 17101 - protein, 107 aa, synthetic construct; identical to SEQ ID NO: 11431
  source 1..107: note = Description of Artificial Sequence: Synthetic polypeptide; note = VL of XENP020158

SEQ ID NO: 17102 - protein, 11 aa, synthetic construct
  source 1..11: note = Description of Artificial Sequence: Synthetic peptide; note = XENP020158 vlCDR1
QASQDINSYLS

SEQ ID NO: 17103 - protein, 7 aa, synthetic construct
  source 1..7: note = Description of Artificial Sequence: Synthetic peptide; note = XENP020158 vlCDR2
RANRLVD

SEQ ID NO: 17104 - protein, 9 aa, synthetic construct
  source 1..9: note = Description of Artificial Sequence: Synthetic peptide; note = XENP020158 vlCDR3
LQYDEFPYT

SEQ ID NO: 17105 - protein, 441 aa, synthetic construct
  source 1..441: note = Description of Artificial Sequence: Synthetic polypeptide; note = XENP020159 3G12_H1L1_IgG1_PVA_/S267K Heavy Chain
QVQLVQSGAEVKKPGASVKVSCKASGYTFTSYWMHWVRQAPGQGLEWMGVIDPSDSYTSYNQKFQGRVTMTVDTSTSTAYMELSSLRSEDTAVYYCTGAYYWGQGTLVTVSSASTKGPSVFPLAPSSKSTSGGTAALGCLVKDYFPEPVTVSWNSGALTSGVHTFPAVLQSSGLYSLSSVVTVPSSSLGTQTYICNVNHKPSNTKVDKKVEPKSCDKTHTCPPCPAPPVAGPSVFLFPPKPKDTLMISRTPEVTCVVVDVKHEDPEVKFNWYVDGVEVHNAKTKPREEQYNSTYRVVSVLTVLHQDWLNGKEYKCKVSNKALPAPIEKTISKAKGQPREPQVYTLPPSREEMTKNQVSLTCLVKGFYPSDIAVEWESNGQPENNYKTTPPVLDSDGSFFLYSKLTVDKSRWQQGNVFSCSVMHEALHNHYTQKSLSLSPGK

SEQ ID NO: 17106 - protein, 112 aa, synthetic construct; identical to SEQ ID NO: 11439
  source 1..112: note = Description of Artificial Sequence: Synthetic polypeptide; note = VH of XENP020159

SEQ ID NO: 17107 - protein, 5 aa, synthetic construct
  source 1..5: note = Description of Artificial Sequence: Synthetic peptide; note = XENP020159 vhCDR1
SYWMH

SEQ ID NO: 17108 - protein, 17 aa, synthetic construct
  source 1..17: note = Description of Artificial Sequence: Synthetic peptide; note = XENP020159 vhCDR2
VIDPSDSYTSYNQKFQG

SEQ ID NO: 17109 - skipped

SEQ ID NO: 17110 - protein, 214 aa, synthetic construct
  source 1..214: note = Description of Artificial Sequence: Synthetic polypeptide; note = XENP020159 3G12_H1L1_IgG1_PVA_/S267K Light Chain
DIVLTQSPSSLSASVGDRVTITCRASQGISSNIGWLQQKPGKSFKGLIYHGTNLEDGVPSRFTGSGSGADYTLTISSLQPEDFATYYCVQYAQSPWTFGGGTKVEIKRTVAAPSVFIFPPSDEQLKSGTASVVCLLNNFYPREAKVQWKVDNALQSGNSQESVTEQDSKDSTYSLSSTLTLSKADYEKHKVYACEVTHQGLSSPVTKSFNRGEC

SEQ ID NO: 17111 - protein, 107 aa, synthetic construct; identical to SEQ ID NO: 11440
  source 1..107: note = Description of Artificial Sequence: Synthetic polypeptide; note = VL of XENP020159

SEQ ID NO: 17112 - protein, 11 aa, synthetic construct
  source 1..11: note = Description of Artificial Sequence: Synthetic peptide; note = XENP020159 vlCDR1
RASQGISSNIG

SEQ ID NO: 17113 - protein, 7 aa, synthetic construct
  source 1..7: note = Description of Artificial Sequence: Synthetic peptide; note = XENP020159 vlCDR2
HGTNLED

SEQ ID NO: 17114 - protein, 9 aa, synthetic construct
  source 1..9: note = Description of Artificial Sequence: Synthetic peptide; note = XENP020159 vlCDR3
VQYAQSPWT

SEQ ID NO: 17115 - protein, 441 aa, synthetic construct
  source 1..441: note = Description of Artificial Sequence: Synthetic polypeptide; note = XENP020160 5C4_H1L1_IgG1_PVA_/S267K Heavy Chain
QVQLVQSGAEVKKPGASVKVSCKASGYTFTDYWMHWLRQAPGQGLEWMGAIDTSDSYPTYNQKFQGRVTMTVDDSTSTAYMELSSLRSEDTAVYYCTRFDYWGQGTLVTVSSASTKGPSVFPLAPSSKSTSGGTAALGCLVKDYFPEPVTVSWNSGALTSGVHTFPAVLQSSGLYSLSSVVTVPSSSLGTQTYICNVNHKPSNTKVDKKVEPKSCDKTHTCPPCPAPPVAGPSVFLFPPKPKDTLMISRTPEVTCVVVDVKHEDPEVKFNWYVDGVEVHNAKTKPREEQYNSTYRVVSVLTVLHQDWLNGKEYKCKVSNKALPAPIEKTISKAKGQPREPQVYTLPPSREEMTKNQVSLTCLVKGFYPSDIAVEWESNGQPENNYKTTPPVLDSDGSFFLYSKLTVDKSRWQQGNVFSCSVMHEALHNHYTQKSLSLSPGK

SEQ ID NO: 17116 - protein, 112 aa, synthetic construct; identical to SEQ ID NO: 11448
  source 1..112: note = Description of Artificial Sequence: Synthetic polypeptide; note = VH of XENP020160

SEQ ID NO: 17117 - protein, 5 aa, synthetic construct
  source 1..5: note = Description of Artificial Sequence: Synthetic peptide; note = XENP020160 vhCDR1
DYWMH

SEQ ID NO: 17118 - protein, 17 aa, synthetic construct
  source 1..17: note = Description of Artificial Sequence: Synthetic peptide; note = XENP020160 vhCDR2
AIDTSDSYPTYNQKFQG

SEQ ID NO: 17119 - skipped

SEQ ID NO: 17120 - protein, 214 aa, synthetic construct
  source 1..214: note = Description of Artificial Sequence: Synthetic polypeptide; note = XENP020160 5C4_H1L1_IgG1_PVA_/S267K Light Chain
DIVMTQSPDSLAVSLGERATINCKASQSVSNDVAWYQQKPGQSPKLLIYYASNRYTGVPDRFTGSGYGTDFTLTISSLQAEDVAVYFCQQDYSSPYTFGGGTKVEIKRTVAAPSVFIFPPSDEQLKSGTASVVCLLNNFYPREAKVQWKVDNALQSGNSQESVTEQDSKDSTYSLSSTLTLSKADYEKHKVYACEVTHQGLSSPVTKSFNRGEC

SEQ ID NO: 17121 - protein, 107 aa, synthetic construct; identical to SEQ ID NO: 11449
  source 1..107: note = Description of Artificial Sequence: Synthetic polypeptide; note = VL of XENP020160

SEQ ID NO: 17122 - protein, 11 aa, synthetic construct
  source 1..11: note = Description of Artificial Sequence: Synthetic peptide; note = XENP020160 vlCDR1
KASQSVSNDVA

SEQ ID NO: 17123 - protein, 7 aa, synthetic construct
  source 1..7: note = Description of Artificial Sequence: Synthetic peptide; note = XENP020160 vlCDR2
YASNRYT

SEQ ID NO: 17124 - protein, 9 aa, synthetic construct
  source 1..9: note = Description of Artificial Sequence: Synthetic peptide; note = XENP020160 vlCDR3
QQDYSSPYT

SEQ ID NO: 17125 - protein, 441 aa, synthetic construct
  source 1..441: note = Description of Artificial Sequence: Synthetic polypeptide; note = XENP020161 5C4_H2L1_IgG1_PVA_/S267K Heavy Chain
QVQLVQSGSELKKPGASVKVSCKASGYTFTDYWMHWLRQAPGQGLEWMGAIDTSDSYPTYNQGFTGRFVFSVDDSVSTAYLQISSLKAEDTAVYYCTRFDYWGQGTLVTVSSASTKGPSVFPLAPSSKSTSGGTAALGCLVKDYFPEPVTVSWNSGALTSGVHTFPAVLQSSGLYSLSSVVTVPSSSLGTQTYICNVNHKPSNTKVDKKVEPKSCDKTHTCPPCPAPPVAGPSVFLFPPKPKDTLMISRTPEVTCVVVDVKHEDPEVKFNWYVDGVEVHNAKTKPREEQYNSTYRVVSVLTVLHQDWLNGKEYKCKVSNKALPAPIEKTISKAKGQPREPQVYTLPPSREEMTKNQVSLTCLVKGFYPSDIAVEWESNGQPENNYKTTPPVLDSDGSFFLYSKLTVDKSRWQQGNVFSCSVMHEALHNHYTQKSLSLSPGK

SEQ ID NO: 17126 - protein, 112 aa, synthetic construct; identical to SEQ ID NO: 11457
  source 1..112: note = Description of Artificial Sequence: Synthetic polypeptide; note = VH of XENP020161

SEQ ID NO: 17127 - protein, 5 aa, synthetic construct
  source 1..5: note = Description of Artificial Sequence: Synthetic peptide; note = XENP020161 vhCDR1
DYWMH

SEQ ID NO: 17128 - protein, 17 aa, synthetic construct
  source 1..17: note = Description of Artificial Sequence: Synthetic peptide; note = XENP020161 vhCDR2
AIDTSDSYPTYNQGFTG

SEQ ID NO: 17129 - skipped

SEQ ID NO: 17130 - protein, 214 aa, synthetic construct; identical to SEQ ID NO: 17120
  source 1..214: note = Description of Artificial Sequence: Synthetic polypeptide; note = XENP020161 5C4_H2L1_IgG1_PVA_/S267K Light Chain

SEQ ID NO: 17131 - protein, 107 aa, synthetic construct; identical to SEQ ID NO: 11449
  source 1..107: note = Description of Artificial Sequence: Synthetic polypeptide; note = VL of XENP020161

SEQ ID NO: 17132 - protein, 11 aa, synthetic construct
  source 1..11: note = Description of Artificial Sequence: Synthetic peptide; note = XENP020161 vlCDR1
KASQSVSNDVA

SEQ ID NO: 17133 - protein, 7 aa, synthetic construct
  source 1..7: note = Description of Artificial Sequence: Synthetic peptide; note = XENP020161 vlCDR2
YASNRYT

SEQ ID NO: 17134 - protein, 9 aa, synthetic construct
  source 1..9: note = Description of Artificial Sequence: Synthetic peptide; note = XENP020161 vlCDR3
QQDYSSPYT

SEQ ID NO: 17135 - protein, 449 aa, synthetic construct
  source 1..449: note = Description of Artificial Sequence: Synthetic polypeptide; note = XENP016436 25F7_H0L0_IgG1_PVA_/S267K Heavy Chain
QVQLQQWGAGLLKPSETLSLTCAVYGGSFSDYYWNWIRQPPGKGLEWIGEINHNGNTNSNPSLKSRVTLSLDTSKNQFSLKLRSVTAADTAVYYCAFGYSDYEYNWFDPWGQGTLVTVSSASTKGPSVFPLAPSSKSTSGGTAALGCLVKDYFPEPVTVSWNSGALTSGVHTFPAVLQSSGLYSLSSVVTVPSSSLGTQTYICNVNHKPSNTKVDKKVEPKSCDKTHTCPPCPAPPVAGPSVFLFPPKPKDTLMISRTPEVTCVVVDVKHEDPEVKFNWYVDGVEVHNAKTKPREEQYNSTYRVVSVLTVLHQDWLNGKEYKCKVSNKALPAPIEKTISKAKGQPREPQVYTLPPSREEMTKNQVSLTCLVKGFYPSDIAVEWESNGQPENNYKTTPPVLDSDGSFFLYSKLTVDKSRWQQGNVFSCSVMHEALHNHYTQKSLSLSPGK

SEQ ID NO: 17136 - protein, 120 aa, synthetic construct
  source 1..120: note = Description of Artificial Sequence: Synthetic polypeptide; note = VH of XENP016436
QVQLQQWGAGLLKPSETLSLTCAVYGGSFSDYYWNWIRQPPGKGLEWIGEINHNGNTNSNPSLKSRVTLSLDTSKNQFSLKLRSVTAADTAVYYCAFGYSDYEYNWFDPWGQGTLVTVSS

SEQ ID NO: 17137 - protein, 5 aa, synthetic construct
  source 1..5: note = Description of Artificial Sequence: Synthetic peptide; note = XENP016436 vhCDR1
DYYWN

SEQ ID NO: 17138 - protein, 16 aa, synthetic construct
  source 1..16: note = Description of Artificial Sequence: Synthetic peptide; note = XENP016436 vhCDR2
EINHNGNTNSNPSLKS

SEQ ID NO: 17139 - protein, 12 aa, synthetic construct
  source 1..12: note = Description of Artificial Sequence: Synthetic peptide; note = XENP016436 vhCDR3
GYSDYEYNWFDP

SEQ ID NO: 17140 - protein, 214 aa, synthetic construct
  source 1..214: note = Description of Artificial Sequence: Synthetic polypeptide; note = XENP016436 25F7_H0L0_IgG1_PVA_/S267K Light Chain
EIVLTQSPATLSLSPGERATLSCRASQSISSYLAWYQQKPGQAPRLLIYDASNRATGIPARFSGSGSGTDFTLTISSLEPEDFAVYYCQQRSNWPLTFGQGTNLEIKRTVAAPSVFIFPPSDEQLKSGTASVVCLLNNFYPREAKVQWKVDNALQSGNSQESVTEQDSKDSTYSLSSTLTLSKADYEKHKVYACEVTHQGLSSPVTKSFNRGEC

SEQ ID NO: 17141 - protein, 107 aa, synthetic construct
  source 1..107: note = Description of Artificial Sequence: Synthetic polypeptide; note = VL of XENP016436
EIVLTQSPATLSLSPGERATLSCRASQSISSYLAWYQQKPGQAPRLLIYDASNRATGIPARFSGSGSGTDFTLTISSLEPEDFAVYYCQQRSNWPLTFGQGTNLEIK

SEQ ID NO: 17142 - protein, 11 aa, synthetic construct
  source 1..11: note = Description of Artificial Sequence: Synthetic peptide; note = XENP016436 vlCDR1
RASQSISSYLA

SEQ ID NO: 17143 - protein, 7 aa, synthetic construct
  source 1..7: note = Description of Artificial Sequence: Synthetic peptide; note = XENP016436 vlCDR2
DASNRAT

SEQ ID NO: 17144 - protein, 9 aa, synthetic construct
  source 1..9: note = Description of Artificial Sequence: Synthetic peptide; note = XENP016436 vlCDR3
QQRSNWPLT

SEQ ID NO: 17145 - protein, 447 aa, synthetic construct
  source 1..447: note = Description of Artificial Sequence: Synthetic polypeptide; note = XENP019353 1H11_H0L0_IgG1_PVA_/S267K Heavy Chain
QIQLVQSGPELKKPGETVKISCKASGYTFTNYGMNWVKQAPGKGLKWMGWINTYTGEPTYADDFKGRFAFSLETSASTAYLQINNLKNEDTATYFCARGRGMGYFDYWGQGTTLTVSSASTKGPSVFPLAPSSKSTSGGTAALGCLVKDYFPEPVTVSWNSGALTSGVHTFPAVLQSSGLYSLSSVVTVPSSSLGTQTYICNVNHKPSDTKVDKKVEPKSCDKTHTCPPCPAPPVAGPSVFLFPPKPKDTLMISRTPEVTCVVVDVKHEDPEVKFNWYVDGVEVHNAKTKPREEEYNSTYRVVSVLTVLHQDWLNGKEYKCKVSNKALPAPIEKTISKAKGQPREPQVYTLPPSREEMTKNQVSLTCDVSGFYPSDIAVEWESDGQPENNYKTTPPVLDSDGSFFLYSKLTVDKSRWEQGDVFSCSVMHEALHNHYTQKSLSLSPGK

SEQ ID NO: 17146 - protein, 118 aa, synthetic construct
  source 1..118: note = Description of Artificial Sequence: Synthetic polypeptide; note = VH of XENP019353
QIQLVQSGPELKKPGETVKISCKASGYTFTNYGMNWVKQAPGKGLKWMGWINTYTGEPTYADDFKGRFAFSLETSASTAYLQINNLKNEDTATYFCARGRGMGYFDYWGQGTTLTVSS

SEQ ID NO: 17147 - protein, 5 aa, synthetic construct
  source 1..5: note = Description of Artificial Sequence: Synthetic peptide; note = XENP019353 vhCDR1
NYGMN

SEQ ID NO: 17148 - protein, 17 aa, synthetic construct
  source 1..17: note = Description of Artificial Sequence: Synthetic peptide; note = XENP019353 vhCDR2
WINTYTGEPTYADDFKG

SEQ ID NO: 17149 - protein, 9 aa, synthetic construct
  source 1..9: note = Description of Artificial Sequence: Synthetic peptide; note = XENP019353 vhCDR3
GRGMGYFDY

SEQ ID NO: 17150 - protein, 214 aa, synthetic construct
  source 1..214: note = Description of Artificial Sequence: Synthetic polypeptide; note = XENP019353 1H11_H0L0_IgG1_PVA_/S267K Light Chain
DIQMTQSPASLSVSVGETVTITCRASENIYSNLAWYQQKQGKSPQLLVYAATNLADGVPSRFSGSGSGTQYSLKINSLQSGDFGNYYCQHFWTTPRTFGGGTKLEIKRTVAAPSVFIFPPSDEQLKSGTASVVCLLNNFYPREAKVQWKVDNALQSGNSQESVTEQDSKDSTYSLSSTLTLSKADYEKHKVYACEVTHQGLSSPVTKSFNRGEC

SEQ ID NO: 17151 - protein, 107 aa, synthetic construct
  source 1..107: note = Description of Artificial Sequence: Synthetic polypeptide; note = VL of XENP019353
DIQMTQSPASLSVSVGETVTITCRASENIYSNLAWYQQKQGKSPQLLVYAATNLADGVPSRFSGSGSGTQYSLKINSLQSGDFGNYYCQHFWTTPRTFGGGTKLEIK

SEQ ID NO: 17152 - protein, 11 aa, synthetic construct
  source 1..11: note = Description of Artificial Sequence: Synthetic peptide; note = XENP019353 vlCDR1
RASENIYSNLA

SEQ ID NO: 17153 - protein, 7 aa, synthetic construct
  source 1..7: note = Description of Artificial Sequence: Synthetic peptide; note = XENP019353 vlCDR2
AATNLAD

SEQ ID NO: 17154 - protein, 9 aa, synthetic construct
  source 1..9: note = Description of Artificial Sequence: Synthetic peptide; note = XENP019353 vlCDR3
QHFWTTPRT

SEQ ID NO: 17155 - protein, 447 aa, synthetic construct
  source 1..447: note = Description of Artificial Sequence: Synthetic polypeptide; note = XENP019354 1H11_H1L1_IgG1_PVA_/S267K Heavy Chain
QIQLVQSGAEVKKPGASVKVSCKASGYTFTNYGMNWVRQAPGQGLEWMGWINTYTGEPTYADKFQGRVTMTLDTSTSTAYMELSSLRSEDTAVYFCARGRGMGYFDYWGQGTLVTVSSASTKGPSVFPLAPSSKSTSGGTAALGCLVKDYFPEPVTVSWNSGALTSGVHTFPAVLQSSGLYSLSSVVTVPSSSLGTQTYICNVNHKPSDTKVDKKVEPKSCDKTHTCPPCPAPPVAGPSVFLFPPKPKDTLMISRTPEVTCVVVDVKHEDPEVKFNWYVDGVEVHNAKTKPREEEYNSTYRVVSVLTVLHQDWLNGKEYKCKVSNKALPAPIEKTISKAKGQPREPQVYTLPPSREEMTKNQVSLTCDVSGFYPSDIAVEWESDGQPENNYKTTPPVLDSDGSFFLYSKLTVDKSRWEQGDVFSCSVMHEALHNHYTQKSLSLSPGK

SEQ ID NO: 17156 - protein, 118 aa, synthetic construct
  source 1..118: note = Description of Artificial Sequence: Synthetic polypeptide; note = VH of XENP019354
QIQLVQSGAEVKKPGASVKVSCKASGYTFTNYGMNWVRQAPGQGLEWMGWINTYTGEPTYADKFQGRVTMTLDTSTSTAYMELSSLRSEDTAVYFCARGRGMGYFDYWGQGTLVTVSS

SEQ ID NO: 17157 - protein, 5 aa, synthetic construct
  source 1..5: note = Description of Artificial Sequence: Synthetic peptide; note = XENP019354 vhCDR1
NYGMN

SEQ ID NO: 17158 - protein, 17 aa, synthetic construct
  source 1..17: note = Description of Artificial Sequence: Synthetic peptide; note = XENP019354 vhCDR2
WINTYTGEPTYADKFQG

SEQ ID NO: 17159 - protein, 9 aa, synthetic construct
  source 1..9: note = Description of Artificial Sequence: Synthetic peptide; note = XENP019354 vhCDR3
GRGMGYFDY

SEQ ID NO: 17160 - protein, 214 aa, synthetic construct
  source 1..214: note = Description of Artificial Sequence: Synthetic polypeptide; note = XENP019354 1H11_H1L1_IgG1_PVA_/S267K Light Chain
DIQMTQSPSSLSASVGDRVTITCRASENIYSNLAWYQQKPGKSPKLLVYAATNLADGVPSRFSGSGSGTDYTLTISSLQPEDFATYYCQHFWTTPRTFGGGTKVEIKRTVAAPSVFIFPPSDEQLKSGTASVVCLLNNFYPREAKVQWKVDNALQSGNSQESVTEQDSKDSTYSLSSTLTLSKADYEKHKVYACEVTHQGLSSPVTKSFNRGEC

SEQ ID NO: 17161 - protein, 107 aa, synthetic construct
  source 1..107: note = Description of Artificial Sequence: Synthetic polypeptide; note = VL of XENP019354
DIQMTQSPSSLSASVGDRVTITCRASENIYSNLAWYQQKPGKSPKLLVYAATNLADGVPSRFSGSGSGTDYTLTISSLQPEDFATYYCQHFWTTPRTFGGGTKVEIK

SEQ ID NO: 17162 - protein, 11 aa, synthetic construct
  source 1..11: note = Description of Artificial Sequence: Synthetic peptide; note = XENP019354 vlCDR1
RASENIYSNLA

SEQ ID NO: 17163 - protein, 7 aa, synthetic construct
  source 1..7: note = Description of Artificial Sequence: Synthetic peptide; note = XENP019354 vlCDR2
AATNLAD

SEQ ID NO: 17164 - protein, 9 aa, synthetic construct
  source 1..9: note = Description of Artificial Sequence: Synthetic peptide; note = XENP019354 vlCDR3
QHFWTTPRT

SEQ ID NO: 17165 - protein, 447 aa, synthetic construct; identical to SEQ ID NO: 17155
  source 1..447: note = Description of Artificial Sequence: Synthetic polypeptide; note = XENP019355 1H11_H1L2_IgG1_PVA_/S267K Heavy Chain

SEQ ID NO: 17166 - protein, 118 aa, synthetic construct; identical to SEQ ID NO: 17156
  source 1..118: note = Description of Artificial Sequence: Synthetic polypeptide; note = VH of XENP019355

SEQ ID NO: 17167 - protein, 5 aa, synthetic construct
  source 1..5: note = Description of Artificial Sequence: Synthetic peptide; note = XENP019355 vhCDR1
NYGMN

SEQ ID NO: 17168 - protein, 17 aa, synthetic construct
  source 1..17: note = Description of Artificial Sequence: Synthetic peptide; note = XENP019355 vhCDR2
WINTYTGEPTYADKFQG

SEQ ID NO: 17169 - protein, 9 aa, synthetic construct
  source 1..9: note = Description of Artificial Sequence: Synthetic peptide; note = XENP019355 vhCDR3
GRGMGYFDY

SEQ ID NO: 17170 - protein, 214 aa, synthetic construct
  source 1..214: note = Description of Artificial Sequence: Synthetic polypeptide; note = XENP019355 1H11_H1L2_IgG1_PVA_/S267K Light Chain
DIQMTQSPATLSVSPGERATLSCRASENIYSNLAWYQQKPGQSPRLLVYAATNLADGVPSRFSGSGSGTEYTLTISSLQSEDFAVYYCQHFWTTPRTFGGGTKVEIKRTVAAPSVFIFPPSDEQLKSGTASVVCLLNNFYPREAKVQWKVDNALQSGNSQESVTEQDSKDSTYSLSSTLTLSKADYEKHKVYACEVTHQGLSSPVTKSFNRGEC

SEQ ID NO: 17171 - protein, 107 aa, synthetic construct
  source 1..107: note = Description of Artificial Sequence: Synthetic polypeptide; note = VL of XENP019355
DIQMTQSPATLSVSPGERATLSCRASENIYSNLAWYQQKPGQSPRLLVYAATNLADGVPSRFSGSGSGTEYTLTISSLQSEDFAVYYCQHFWTTPRTFGGGTKVEIK

SEQ ID NO: 17172 - protein, 11 aa, synthetic construct
  source 1..11: note = Description of Artificial Sequence: Synthetic peptide; note = XENP019355 vlCDR1
RASENIYSNLA

SEQ ID NO: 17173 - protein, 7 aa, synthetic construct
  source 1..7: note = Description of Artificial Sequence: Synthetic peptide; note = XENP019355 vlCDR2
AATNLAD

SEQ ID NO: 17174 - protein, 9 aa, synthetic construct
  source 1..9: note = Description of Artificial Sequence: Synthetic peptide; note = XENP019355 vlCDR3
QHFWTTPRT

SEQ ID NO: 17175 - protein, 447 aa, synthetic construct
  source 1..447: note = Description of Artificial Sequence: Synthetic polypeptide; note = XENP019356 1H11_H2L1_IgG1_PVA_/S267K Heavy Chain
QIQLVQSGSELKKPGASVKVSCKASGYTFTNYGMNWVRQAPGQGLEWMGWINTYTGEPTYADGFTGRFVFSLDTSVSTAYLQISSLKAEDTAVYFCARGRGMGYFDYWGQGTLVTVSSASTKGPSVFPLAPSSKSTSGGTAALGCLVKDYFPEPVTVSWNSGALTSGVHTFPAVLQSSGLYSLSSVVTVPSSSLGTQTYICNVNHKPSDTKVDKKVEPKSCDKTHTCPPCPAPPVAGPSVFLFPPKPKDTLMISRTPEVTCVVVDVKHEDPEVKFNWYVDGVEVHNAKTKPREEEYNSTYRVVSVLTVLHQDWLNGKEYKCKVSNKALPAPIEKTISKAKGQPREPQVYTLPPSREEMTKNQVSLTCDVSGFYPSDIAVEWESDGQPENNYKTTPPVLDSDGSFFLYSKLTVDKSRWEQGDVFSCSVMHEALHNHYTQKSLSLSPGK

SEQ ID NO: 17176 - protein, 118 aa, synthetic construct
  source 1..118: note = Description of Artificial Sequence: Synthetic polypeptide; note = VH of XENP019356
QIQLVQSGSELKKPGASVKVSCKASGYTFTNYGMNWVRQAPGQGLEWMGWINTYTGEPTYADGFTGRFVFSLDTSVSTAYLQISSLKAEDTAVYFCARGRGMGYFDYWGQGTLVTVSS

SEQ ID NO: 17177 - protein, 5 aa, synthetic construct
  source 1..5: note = Description of Artificial Sequence: Synthetic peptide; note = XENP019356 vhCDR1
NYGMN

SEQ ID NO: 17178 - protein, 17 aa, synthetic construct
  source 1..17: note = Description of Artificial Sequence: Synthetic peptide; note = XENP019356 vhCDR2
WINTYTGEPTYADGFTG

SEQ ID NO: 17179 - protein, 9 aa, synthetic construct
  source 1..9: note = Description of Artificial Sequence: Synthetic peptide; note = XENP019356 vhCDR3
GRGMGYFDY

SEQ ID NO: 17180 - protein, 214 aa, synthetic construct; identical to SEQ ID NO: 17160
  source 1..214: note = Description of Artificial Sequence: Synthetic polypeptide; note = XENP019356 1H11_H2L1_IgG1_PVA_/S267K Light Chain

SEQ ID NO: 17181 - protein, 107 aa, synthetic construct; identical to SEQ ID NO: 17161
  source 1..107: note = Description of Artificial Sequence: Synthetic polypeptide; note = VL of XENP019356

SEQ ID NO: 17182 - protein, 11 aa, synthetic construct
  source 1..11: note = Description of Artificial Sequence: Synthetic peptide; note = XENP019356 vlCDR1
RASENIYSNLA

SEQ ID NO: 17183 - protein, 7 aa, synthetic construct
  source 1..7: note = Description of Artificial Sequence: Synthetic peptide; note = XENP019356 vlCDR2
AATNLAD

SEQ ID NO: 17184 - protein, 9 aa, synthetic construct
  source 1..9: note = Description of Artificial Sequence: Synthetic peptide; note = XENP019356 vlCDR3
QHFWTTPRT

SEQ ID NO: 17185 - protein, 447 aa, synthetic construct; identical to SEQ ID NO: 17175
  source 1..447: note = Description of Artificial Sequence: Synthetic polypeptide; note = XENP019357 1H11_H2L2_IgG1_PVA_/S267K Heavy Chain

SEQ ID NO: 17186 - protein, 118 aa, synthetic construct; identical to SEQ ID NO: 17176
  source 1..118: note = Description of Artificial Sequence: Synthetic polypeptide; note = VH of XENP019357

SEQ ID NO: 17187 - protein, 5 aa, synthetic construct
  source 1..5: note = Description of Artificial Sequence: Synthetic peptide; note = XENP019357 vhCDR1
NYGMN

SEQ ID NO: 17188 - protein, 17 aa, synthetic construct
  source 1..17: note = Description of Artificial Sequence: Synthetic peptide; note = XENP019357 vhCDR2
WINTYTGEPTYADGFTG

SEQ ID NO: 17189 - protein, 9 aa, synthetic construct
  source 1..9: note = Description of Artificial Sequence: Synthetic peptide; note = XENP019357 vhCDR3
GRGMGYFDY

SEQ ID NO: 17190 - protein, 214 aa, synthetic construct; identical to SEQ ID NO: 17170
  source 1..214: note = Description of Artificial Sequence: Synthetic polypeptide; note = XENP019357 1H11_H2L2_IgG1_PVA_/S267K Light Chain

SEQ ID NO: 17191 - protein, 107 aa, synthetic construct; identical to SEQ ID NO: 17171
  source 1..107: note = Description of Artificial Sequence: Synthetic polypeptide; note = VL of XENP019357

SEQ ID NO: 17192 - protein, 11 aa, synthetic construct
  source 1..11: note = Description of Artificial Sequence: Synthetic peptide; note = XENP019357 vlCDR1
RASENIYSNLA

SEQ ID NO: 17193 - protein, 7 aa, synthetic construct
  source 1..7: note = Description of Artificial Sequence: Synthetic peptide; note = XENP019357 vlCDR2
AATNLAD

SEQ ID NO: 17194 - protein, 9 aa, synthetic construct
  source 1..9: note = Description of Artificial Sequence: Synthetic peptide; note = XENP019357 vlCDR3
QHFWTTPRT

SEQ ID NO: 17195 - protein, 450 aa, synthetic construct
  source 1..450: note = Description of Artificial Sequence: Synthetic polypeptide; note = XENP019358 3C11_H1L1_IgG1_PVA_/S267K Heavy Chain
QVQLQESGPGLVKPSETLSLTCTVSGYSITSDYAWNWIRQPPGKKLEWIGYISYSSTSYNPSLKSRVTISRDTSKNQFSLKLSSVTAADTAVYFCARNNLLWSYYYAMDYWGQGTLVTVSSASTKGPSVFPLAPSSKSTSGGTAALGCLVKDYFPEPVTVSWNSGALTSGVHTFPAVLQSSGLYSLSSVVTVPSSSLGTQTYICNVNHKPSDTKVDKKVEPKSCDKTHTCPPCPAPPVAGPSVFLFPPKPKDTLMISRTPEVTCVVVDVKHEDPEVKFNWYVDGVEVHNAKTKPREEEYNSTYRVVSVLTVLHQDWLNGKEYKCKVSNKALPAPIEKTISKAKGQPREPQVYTLPPSREEMTKNQVSLTCDVSGFYPSDIAVEWESDGQPENNYKTTPPVLDSDGSFFLYSKLTVDKSRWEQGDVFSCSVMHEALHNHYTQKSLSLSPGK

SEQ ID NO: 17196 - protein, 121 aa, synthetic construct
  source 1..121: note = Description of Artificial Sequence: Synthetic polypeptide; note = VH of XENP019358
QVQLQESGPGLVKPSETLSLTCTVSGYSITSDYAWNWIRQPPGKKLEWIGYISYSSTSYNPSLKSRVTISRDTSKNQFSLKLSSVTAADTAVYFCARNNLLWSYYYAMDYWGQGTLVTVSS

SEQ ID NO: 17197 - protein, 6 aa, synthetic construct
  source 1..6: note = Description of Artificial Sequence: Synthetic peptide; note = XENP019358 vhCDR1
SDYAWN

SEQ ID NO: 17198 - protein, 15 aa, synthetic construct
  source 1..15: note = Description of Artificial Sequence: Synthetic peptide; note = XENP019358 vhCDR2
YISYSSTSYNPSLKS

SEQ ID NO: 17199 - protein, 13 aa, synthetic construct
  source 1..13: note = Description of Artificial Sequence: Synthetic peptide; note = XENP019358 vhCDR3
NNLLWSYYYAMDY

SEQ ID NO: 17200 - protein, 218 aa, synthetic construct
  source 1..218: note = Description of Artificial Sequence: Synthetic polypeptide; note = XENP019358 3C11_H1L1_IgG1_PVA_/S267K Light Chain
DIVLTQSPATLSLSPGERATLSCRASESVDSYGNSFMHWYQQKPGQPPRLLIYRASNLESGIPARFSGSGSGTDFTLTISSLEPEDFAVYYCQQSNEDPYTFGGGTKVEIKRTVAAPSVFIFPPSDEQLKSGTASVVCLLNNFYPREAKVQWKVDNALQSGNSQESVTEQDSKDSTYSLSSTLTLSKADYEKHKVYACEVTHQGLSSPVTKSFNRGEC

SEQ ID NO: 17201 - protein, 111 aa, synthetic construct
  source 1..111: note = Description of Artificial Sequence: Synthetic polypeptide; note = VL of XENP019358
DIVLTQSPATLSLSPGERATLSCRASESVDSYGNSFMHWYQQKPGQPPRLLIYRASNLESGIPARFSGSGSGTDFTLTISSLEPEDFAVYYCQQSNEDPYTFGGGTKVEIK

SEQ ID NO: 17202 - protein, 15 aa, synthetic construct
  source 1..15: note = Description of Artificial Sequence: Synthetic peptide; note = XENP019358 vlCDR1
RASESVDSYGNSFMH

SEQ ID NO: 17203 - protein, 7 aa, synthetic construct
  source 1..7: note = Description of Artificial Sequence: Synthetic peptide; note = XENP019358 vlCDR2
RASNLES

SEQ ID NO: 17204 - protein, 9 aa, synthetic construct
  source 1..9: note = Description of Artificial Sequence: Synthetic peptide; note = XENP019358 vlCDR3
QQSNEDPYT

SEQ ID NO: 17205 - protein, 447 aa, synthetic construct; identical to SEQ ID NO: 17155
  source 1..447: note = Description of Artificial Sequence: Synthetic polypeptide; note = XENP019359 1H11_H1_5D8_L1_IgG1_PVA_/S267K Heavy Chain

SEQ ID NO: 17206 - protein, 118 aa, synthetic construct; identical to SEQ ID NO: 17156
  source 1..118: note = Description of Artificial Sequence: Synthetic polypeptide; note = VH of XENP019359

SEQ ID NO: 17207 - protein, 5 aa, synthetic construct
  source 1..5: note = Description of Artificial Sequence: Synthetic peptide; note = XENP019359 vhCDR1
NYGMN

SEQ ID NO: 17208 - protein, 17 aa, synthetic construct
  source 1..17: note = Description of Artificial Sequence: Synthetic peptide; note = XENP019359 vhCDR2
WINTYTGEPTYADKFQG

SEQ ID NO: 17209 - protein, 9 aa, synthetic construct
  source 1..9: note = Description of Artificial Sequence: Synthetic peptide; note = XENP019359 vhCDR3
GRGMGYFDY

SEQ ID NO: 17210 - protein, 214 aa, synthetic construct
  source 1..214: note = Description of Artificial Sequence: Synthetic polypeptide; note = XENP019359 1H11_H1_5D8_L1_IgG1_PVA_/S267K Light Chain
DIQMTQSPSSLSASVGDRVTITCRASENIYSNLAWYQQKPGKSPKLLVYAATNLGDGVPSRFSGSGSGTDYTLTISSLQPEDFATYYCQHFWATPRTFGGGTKVEIKRTVAAPSVFIFPPSDEQLKSGTASVVCLLNNFYPREAKVQWKVDNALQSGNSQESVTEQDSKDSTYSLSSTLTLSKADYEKHKVYACEVTHQGLSSPVTKSFNRGEC

SEQ ID NO: 17211 - protein, 107 aa, synthetic construct
  source 1..107: note = Description of Artificial Sequence: Synthetic polypeptide; note = VL of XENP019359
DIQMTQSPSSLSASVGDRVTITCRASENIYSNLAWYQQKPGKSPKLLVYAATNLGDGVPSRFSGSGSGTDYTLTISSLQPEDFATYYCQHFWATPRTFGGGTKVEIK

SEQ ID NO: 17212 - protein, 11 aa, synthetic construct
  source 1..11: note = Description of Artificial Sequence: Synthetic peptide; note = XENP019359 vlCDR1
RASENIYSNLA

SEQ ID NO: 17213 - protein, 7 aa, synthetic construct
  source 1..7: note = Description of Artificial Sequence: Synthetic peptide; note = XENP019359 vlCDR2
AATNLGD

SEQ ID NO: 17214 - protein, 9 aa, synthetic construct
  source 1..9: note = Description of Artificial Sequence: Synthetic peptide; note = XENP019359 vlCDR3
QHFWATPRT

SEQ ID NO: 17215 - protein, 444 aa, synthetic construct
  source 1..444: note = Description of Artificial Sequence: Synthetic polypeptide; note = XENP019360 8D7_H1L1_IgG1_PVA_/S267K Heavy Chain
QVTLKESGPVLVKPTETLTLTCTVSGFSLSSYGVHWVRQPPGKGLEWLAVIWSGSTDYNPSLKSRLTISKDNSKSQVVLTMTNMDPVDTATYYCARTYYYAMDYWGQGTLVTVSSASTKGPSVFPLAPSSKSTSGGTAALGCLVKDYFPEPVTVSWNSGALTSGVHTFPAVLQSSGLYSLSSVVTVPSSSLGTQTYICNVNHKPSDTKVDKKVEPKSCDKTHTCPPCPAPPVAGPSVFLFPPKPKDTLMISRTPEVTCVVVDVKHEDPEVKFNWYVDGVEVHNAKTKPREEEYNSTYRVVSVLTVLHQDWLNGKEYKCKVSNKALPAPIEKTISKAKGQPREPQVYTLPPSREEMTKNQVSLTCDVSGFYPSDIAVEWESDGQPENNYKTTPPVLDSDGSFFLYSKLTVDKSRWEQGDVFSCSVMHEALHNHYTQKSLSLSPGK

SEQ ID NO: 17216 - protein, 115 aa, synthetic construct
  source 1..115: note = Description of Artificial Sequence: Synthetic polypeptide; note = VH of XENP019360
QVTLKESGPVLVKPTETLTLTCTVSGFSLSSYGVHWVRQPPGKGLEWLAVIWSGSTDYNPSLKSRLTISKDNSKSQVVLTMTNMDPVDTATYYCARTYYYAMDYWGQGTLVTVSS

SEQ ID NO: 17217 - protein, 5 aa, synthetic construct
  source 1..5: note = Description of Artificial Sequence: Synthetic peptide; note = XENP019360 vhCDR1
SYGVH

SEQ ID NO: 17218 - protein, 15 aa, synthetic construct
  source 1..15: note = Description of Artificial Sequence: Synthetic peptide; note = XENP019360 vhCDR2
VIWSGSTDYNPSLKS

SEQ ID NO: 17219 - protein, 8 aa, synthetic construct
  source 1..8: note = Description of Artificial Sequence: Synthetic peptide; note = XENP019360 vhCDR3
TYYYAMDY

SEQ ID NO: 17220 - protein, 214 aa, synthetic construct
  source 1..214: note = Description of Artificial Sequence: Synthetic polypeptide; note = XENP019360 8D7_H1L1_IgG1_PVA_/S267K Light Chain
DIQMTQSPSSLSASVGDRVTITCRASENIYSNLAWYQQKPGKSPKFLIYAATNLADGVPSRFSGSGSGTDYTLTISSLQPEDFATYYCQHFWGTPWTFGGGTKVEIKRTVAAPSVFIFPPSDEQLKSGTASVVCLLNNFYPREAKVQWKVDNALQSGNSQESVTEQDSKDSTYSLSSTLTLSKADYEKHKVYACEVTHQGLSSPVTKSFNRGEC

SEQ ID NO: 17221 - protein, 107 aa, synthetic construct
  source 1..107: note = Description of Artificial Sequence: Synthetic polypeptide; note = VL of XENP019360
DIQMTQSPSSLSASVGDRVTITCRASENIYSNLAWYQQKPGKSPKFLIYAATNLADGVPSRFSGSGSGTDYTLTISSLQPEDFATYYCQHFWGTPWTFGGGTKVEIK

SEQ ID NO: 17222 - protein, 11 aa, synthetic construct
  source 1..11: note = Description of Artificial Sequence: Synthetic peptide; note = XENP019360 vlCDR1
RASENIYSNLA

SEQ ID NO: 17223 - protein, 7 aa, synthetic construct
  source 1..7: note = Description of Artificial Sequence: Synthetic peptide; note = XENP019360 vlCDR2
AATNLAD

SEQ ID NO: 17224 - protein, 9 aa, synthetic construct
  source 1..9: note = Description of Artificial Sequence: Synthetic peptide; note = XENP019360 vlCDR3
QHFWGTPWT

SEQ ID NO: 17225 - protein, 447 aa, synthetic construct
  source 1..447: note = Description of Artificial Sequence: Synthetic polypeptide; note = XENP019361 2A11_H0L0_IgG1_PVA_/S267K Heavy Chain
EVQLQQSGAELVRSGASVKLSCTASGFNIKDYYMHWVKQRPEQGLEWIGWIDPENGDTEYAPKFQGKATMTADTSSNTAYLQLSSLTSEDTAVYYCYARGVRQALDYWGQGTSVTVSSASTKGPSVFPLAPSSKSTSGGTAALGCLVKDYFPEPVTVSWNSGALTSGVHTFPAVLQSSGLYSLSSVVTVPSSSLGTQTYICNVNHKPSDTKVDKKVEPKSCDKTHTCPPCPAPPVAGPSVFLFPPKPKDTLMISRTPEVTCVVVDVKHEDPEVKFNWYVDGVEVHNAKTKPREEEYNSTYRVVSVLTVLHQDWLNGKEYKCKVSNKALPAPIEKTISKAKGQPREPQVYTLPPSREEMTKNQVSLTCDVSGFYPSDIAVEWESDGQPENNYKTTPPVLDSDGSFFLYSKLTVDKSRWEQGDVFSCSVMHEALHNHYTQKSLSLSPGK

SEQ ID NO: 17226 - protein, 118 aa, synthetic construct
  source 1..118: note = Description of Artificial Sequence: Synthetic polypeptide; note = VH of XENP019361
EVQLQQSGAELVRSGASVKLSCTASGFNIKDYYMHWVKQRPEQGLEWIGWIDPENGDTEYAPKFQGKATMTADTSSNTAYLQLSSLTSEDTAVYYCYARGVRQALDYWGQGTSVTVSS

SEQ ID NO: 17227 - protein, 5 aa, synthetic construct
  source 1..5: note = Description of Artificial Sequence: Synthetic peptide; note = XENP019361 vhCDR1
DYYMH

SEQ ID NO: 17228 - protein, 17 aa, synthetic construct
  source 1..17: note = Description of Artificial Sequence: Synthetic peptide; note = XENP019361 vhCDR2
WIDPENGDTEYAPKFQG

SEQ ID NO: 17229 - protein, 9 aa, synthetic construct
  source 1..9: note = Description of Artificial Sequence: Synthetic peptide; note = XENP019361 vhCDR3
RGVRQALDY

SEQ ID NO: 17230 - protein, 214 aa, synthetic construct
  source 1..214: note = Description of Artificial Sequence: Synthetic polypeptide; note = XENP019361 2A11_H0L0_IgG1_PVA_/S267K Light Chain
DIQMTQTTSSLSASLGDRVTISCRASQDIGNYLNWFQQKPDGTVKLLIYYTSRLHSGVPSRFSGSGSGTDYSLTISNLEQEDIATYFCQQGNTLPYTFGGGTKLEIKRTVAAPSVFIFPPSDEQLKSGTASVVCLLNNFYPREAKVQWKVDNALQSGNSQESVTEQDSKDSTYSLSSTLTLSKADYEKHKVYACEVTHQGLSSPVTKSFNRGEC

SEQ ID NO: 17231 - protein, 107 aa, synthetic construct
  source 1..107: note = Description of Artificial Sequence: Synthetic polypeptide; note = VL of XENP019361
DIQMTQTTSSLSASLGDRVTISCRASQDIGNYLNWFQQKPDGTVKLLIYYTSRLHSGVPSRFSGSGSGTDYSLTISNLEQEDIATYFCQQGNTLPYTFGGGTKLEIK

SEQ ID NO: 17232 - protein, 11 aa, synthetic construct
  source 1..11: note = Description of Artificial Sequence: Synthetic peptide; note = XENP019361 vlCDR1
RASQDIGNYLN

SEQ ID NO: 17233 - protein, 7 aa, synthetic construct
  source 1..7: note = Description of Artificial Sequence: Synthetic peptide; note = XENP019361 vlCDR2
YTSRLHS

SEQ ID NO: 17234 - protein, 9 aa, synthetic construct
  source 1..9: note = Description of Artificial Sequence: Synthetic peptide; note = XENP019361 vlCDR3
QQGNTLPYT

SEQ ID NO: 17235 - protein, 447 aa, synthetic construct
  source 1..447: note = Description of Artificial Sequence: Synthetic polypeptide; note = XENP019362 2A11_H1L1_IgG1_PVA_/S267K Heavy Chain
EVQLVQSGAEVKKPGATVKISCKASGFNIKDYYMHWVQQAPGKGLEWMGWIDPENGDTEYAPKFQGRVTITADTSTNTAYMELSSLRSEDTAVYYCYARGVRQALDYWGQGTLVTVSSASTKGPSVFPLAPSSKSTSGGTAALGCLVKDYFPEPVTVSWNSGALTSGVHTFPAVLQSSGLYSLSSVVTVPSSSLGTQTYICNVNHKPSDTKVDKKVEPKSCDKTHTCPPCPAPPVAGPSVFLFPPKPKDTLMISRTPEVTCVVVDVKHEDPEVKFNWYVDGVEVHNAKTKPREEEYNSTYRVVSVLTVLHQDWLNGKEYKCKVSNKALPAPIEKTISKAKGQPREPQVYTLPPSREEMTKNQVSLTCDVSGFYPSDIAVEWESDGQPENNYKTTPPVLDSDGSFFLYSKLTVDKSRWEQGDVFSCSVMHEALHNHYTQKSLSLSPGK

SEQ ID NO: 17236 - protein, 118 aa, synthetic construct
  source 1..118: note = Description of Artificial Sequence: Synthetic polypeptide; note = VH of XENP019362
EVQLVQSGAEVKKPGATVKISCKASGFNIKDYYMHWVQQAPGKGLEWMGWIDPENGDTEYAPKFQGRVTITADTSTNTAYMELSSLRSEDTAVYYCYARGVRQALDYWGQGTLVTVSS

SEQ ID NO: 17237 - protein, 5 aa, synthetic construct
  source 1..5: note = Description of Artificial Sequence: Synthetic peptide; note = XENP019362 vhCDR1
DYYMH

SEQ ID NO: 17238 - protein, 17 aa, synthetic construct
  source 1..17: note = Description of Artificial Sequence: Synthetic peptide; note = XENP019362 vhCDR2
WIDPENGDTEYAPKFQG

SEQ ID NO: 17239 - protein, 9 aa, synthetic construct
  source 1..9: note = Description of Artificial Sequence: Synthetic peptide; note = XENP019362 vhCDR3
RGVRQALDY

SEQ ID NO: 17240 - protein, 214 aa, synthetic construct
  source 1..214: note = Description of Artificial Sequence: Synthetic polypeptide; note = XENP019362 2A11_H1L1_IgG1_PVA_/S267K Light Chain
DIQMTQSPSSLSASVGDRVTITCRASQDIGNYLNWFQQKPGKTVKLLIYYTSRLHSGVPSRFSGSGSGTDYTLTISSLQPEDFATYFCQQGNTLPYTFGGGTKVEIKRTVAAPSVFIFPPSDEQLKSGTASVVCLLNNFYPREAKVQWKVDNALQSGNSQESVTEQDSKDSTYSLSSTLTLSKADYEKHKVYACEVTHQGLSSPVTKSFNRGEC

SEQ ID NO: 17241 - protein, 107 aa, synthetic construct
  source 1..107: note = Description of Artificial Sequence: Synthetic polypeptide; note = VL of XENP019362
DIQMTQSPSSLSASVGDRVTITCRASQDIGNYLNWFQQKPGKTVKLLIYYTSRLHSGVPSRFSGSGSGTDYTLTISSLQPEDFATYFCQQGNTLPYTFGGGTKVEIK

SEQ ID NO: 17242 - protein, 11 aa, synthetic construct
  source 1..11: note = Description of Artificial Sequence: Synthetic peptide; note = XENP019362 vlCDR1
RASQDIGNYLN

SEQ ID NO: 17243 - protein, 7 aa, synthetic construct
  source 1..7: note = Description of Artificial Sequence: Synthetic peptide; note = XENP019362 vlCDR2
YTSRLHS

SEQ ID NO: 17244 - protein, 9 aa, synthetic construct
  source 1..9: note = Description of Artificial Sequence: Synthetic peptide; note = XENP019362 vlCDR3
QQGNTLPYT

SEQ ID NO: 17245 - protein, 447 aa, synthetic construct; identical to SEQ ID NO: 17235
  source 1..447: note = Description of Artificial Sequence: Synthetic polypeptide; note = XENP019363 2A11_H1L2_IgG1_PVA_/S267K Heavy Chain

SEQ ID NO: 17246 - protein, 118 aa, synthetic construct; identical to SEQ ID NO: 17236
  source 1..118: note = Description of Artificial Sequence: Synthetic polypeptide; note = VH of XENP019363

SEQ ID NO: 17247 - protein, 5 aa, synthetic construct
  source 1..5: note = Description of Artificial Sequence: Synthetic peptide; note = XENP019363 vhCDR1
DYYMH

SEQ ID NO: 17248 - protein, 17 aa, synthetic construct
  source 1..17: note = Description of Artificial Sequence: Synthetic peptide; note = XENP019363 vhCDR2
WIDPENGDTEYAPKFQG

SEQ ID NO: 17249 - protein, 9 aa, synthetic construct
  source 1..9: note = Description of Artificial Sequence: Synthetic peptide; note = XENP019363 vhCDR3
RGVRQALDY

SEQ ID NO: 17250 - protein, 214 aa, synthetic construct
  source 1..214: note = Description of Artificial Sequence: Synthetic polypeptide; note = XENP019363 2A11_H1L2_IgG1_PVA_/S267K Light Chain
DIQMTQSPAFLSVTPGEKVTITCQASQDIGNYLNWFQQKPDQTVKLLIYYTSRLHSGVPSRFSGSGSGTDYTFTISSLEAEDAATYFCQQGNTLPYTFGGGTKVEIKRTVAAPSVFIFPPSDEQLKSGTASVVCLLNNFYPREAKVQWKVDNALQSGNSQESVTEQDSKDSTYSLSSTLTLSKADYEKHKVYACEVTHQGLSSPVTKSFNRGEC

SEQ ID NO: 17251 - protein, 107 aa, synthetic construct
  source 1..107: note = Description of Artificial Sequence: Synthetic polypeptide; note = VL of XENP019363
DIQMTQSPAFLSVTPGEKVTITCQASQDIGNYLNWFQQKPDQTVKLLIYYTSRLHSGVPSRFSGSGSGTDYTFTISSLEAEDAATYFCQQGNTLPYTFGGGTKVEIK

SEQ ID NO: 17252 - protein, 11 aa, synthetic construct
  source 1..11: note = Description of Artificial Sequence: Synthetic peptide; note = XENP019363 vlCDR1
QASQDIGNYLN

SEQ ID NO: 17253 - protein, 7 aa, synthetic construct
  source 1..7: note = Description of Artificial Sequence: Synthetic peptide; note = XENP019363 vlCDR2
YTSRLHS

SEQ ID NO: 17254 - protein, 9 aa, synthetic construct
  source 1..9: note = Description of Artificial Sequence: Synthetic peptide; note = XENP019363 vlCDR3
QQGNTLPYT

SEQ ID NO: 17255 - protein, 446 aa, synthetic construct
  source 1..446: note = Description of Artificial Sequence: Synthetic polypeptide; note = XENP019364 2A11_H2L1_IgG1_PVA_/S267K Heavy Chain
EVQLVQSGAEVKKPGATVKISCKASGFNIKDYYMHWVQQAPGKGLEWMGWIDPENGDTEYAPKFQGRVTITADTSTNTAYMELSSLRSEDTAVYYCARGVRQALDYWGQGTLVTVSSASTKGPSVFPLAPSSKSTSGGTAALGCLVKDYFPEPVTVSWNSGALTSGVHTFPAVLQSSGLYSLSSVVTVPSSSLGTQTYICNVNHKPSDTKVDKKVEPKSCDKTHTCPPCPAPPVAGPSVFLFPPKPKDTLMISRTPEVTCVVVDVKHEDPEVKFNWYVDGVEVHNAKTKPREEEYNSTYRVVSVLTVLHQDWLNGKEYKCKVSNKALPAPIEKTISKAKGQPREPQVYTLPPSREEMTKNQVSLTCDVSGFYPSDIAVEWESDGQPENNYKTTPPVLDSDGSFFLYSKLTVDKSRWEQGDVFSCSVMHEALHNHYTQKSLSLSPGK

SEQ ID NO: 17256 - protein, 117 aa, synthetic construct
  source 1..117: note = Description of Artificial Sequence: Synthetic polypeptide; note = VH of XENP019364
EVQLVQSGAEVKKPGATVKISCKASGFNIKDYYMHWVQQAPGKGLEWMGWIDPENGDTEYAPKFQGRVTITADTSTNTAYMELSSLRSEDTAVYYCARGVRQALDYWGQGTLVTVSS

SEQ ID NO: 17257 - protein, 5 aa, synthetic construct
  source 1..5: note = Description of Artificial Sequence: Synthetic peptide; note = XENP019364 vhCDR1
DYYMH

SEQ ID NO: 17258 - protein, 17 aa, synthetic construct
  source 1..17: note = Description of Artificial Sequence: Synthetic peptide; note = XENP019364 vhCDR2
WIDPENGDTEYAPKFQG

SEQ ID NO: 17259 - protein, 8 aa, synthetic construct
  source 1..8: note = Description of Artificial Sequence: Synthetic peptide; note = XENP019364 vhCDR3
GVRQALDY

SEQ ID NO: 17260 - protein, 214 aa, synthetic construct; identical to SEQ ID NO: 17240
  source 1..214: note = Description of Artificial Sequence: Synthetic polypeptide; note = XENP019364 2A11_H2L1_IgG1_PVA_/S267K Light Chain

SEQ ID NO: 17261 - protein, 107 aa, synthetic construct; identical to SEQ ID NO: 17241
  source 1..107: note = Description of Artificial Sequence: Synthetic polypeptide; note = VL of XENP019364

SEQ ID NO: 17262 - protein, 11 aa, synthetic construct
  source 1..11: note = Description of Artificial Sequence: Synthetic peptide; note = XENP019364 vlCDR1
RASQDIGNYLN

SEQ ID NO: 17263 - protein, 7 aa, synthetic construct
  source 1..7: note = Description of Artificial Sequence: Synthetic peptide; note = XENP019364 vlCDR2
YTSRLHS

SEQ ID NO: 17264 - protein, 9 aa, synthetic construct
  source 1..9: note = Description of Artificial Sequence: Synthetic peptide; note = XENP019364 vlCDR3
QQGNTLPYT

SEQ ID NO: 17265 - protein, 446 aa, synthetic construct; identical to SEQ ID NO: 17255
  source 1..446: note = Description of Artificial Sequence: Synthetic polypeptide; note = XENP019365 2A11_H2L2_IgG1_PVA_/S267K Heavy Chain

SEQ ID NO: 17266 - protein, 117 aa, synthetic construct; identical to SEQ ID NO: 17256
  source 1..117: note = Description of Artificial Sequence: Synthetic polypeptide; note = VH of XENP019365

SEQ ID NO: 17267 - protein, 5 aa, synthetic construct
  source 1..5: note = Description of Artificial Sequence: Synthetic peptide; note = XENP019365 vhCDR1
DYYMH

SEQ ID NO: 17268 - protein, 17 aa, synthetic construct
  source 1..17: note = Description of Artificial Sequence: Synthetic peptide; note = XENP019365 vhCDR2
WIDPENGDTEYAPKFQG

SEQ ID NO: 17269 - protein, 8 aa, synthetic construct
  source 1..8: note = Description of Artificial Sequence: Synthetic peptide; note = XENP019365 vhCDR3
GVRQALDY

SEQ ID NO: 17270 - protein, 214 aa, synthetic construct; identical to SEQ ID NO: 17250
  source 1..214: note = Description of Artificial Sequence: Synthetic polypeptide; note = XENP019365 2A11_H2L2_IgG1_PVA_/S267K Light Chain

SEQ ID NO: 17271 - protein, 107 aa, synthetic construct; identical to SEQ ID NO: 17251
  source 1..107: note = Description of Artificial Sequence: Synthetic polypeptide; note = VL of XENP019365

SEQ ID NO: 17272 - protein, 11 aa, synthetic construct
  source 1..11: note = Description of Artificial Sequence: Synthetic peptide; note = XENP019365 vlCDR1
QASQDIGNYLN

SEQ ID NO: 17273 - protein, 7 aa, synthetic construct
  source 1..7: note = Description of Artificial Sequence: Synthetic peptide; note = XENP019365 vlCDR2
YTSRLHS

SEQ ID NO: 17274 - protein, 9 aa, synthetic construct
  source 1..9: note = Description of Artificial Sequence: Synthetic peptide; note = XENP019365 vlCDR3
QQGNTLPYT

SEQ ID NO: 17275 - protein, 447 aa, synthetic construct
  source 1..447: note = Description of Artificial Sequence: Synthetic polypeptide; note = XENP019366 2A11_H3L1_IgG1_PVA_/S267K Heavy Chain
EVQLVESGGGVVQPGGSLRLSCAASGFNIKDYYMHWVRQAPGKGLEWVSWIDPENGDTEYAPSVKGRFTISADTSKNSAYLQMNSLRTEDTALYYCYARGVRQALDYWGQGTLVTVSSASTKGPSVFPLAPSSKSTSGGTAALGCLVKDYFPEPVTVSWNSGALTSGVHTFPAVLQSSGLYSLSSVVTVPSSSLGTQTYICNVNHKPSDTKVDKKVEPKSCDKTHTCPPCPAPPVAGPSVFLFPPKPKDTLMISRTPEVTCVVVDVKHEDPEVKFNWYVDGVEVHNAKTKPREEEYNSTYRVVSVLTVLHQDWLNGKEYKCKVSNKALPAPIEKTISKAKGQPREPQVYTLPPSREEMTKNQVSLTCDVSGFYPSDIAVEWESDGQPENNYKTTPPVLDSDGSFFLYSKLTVDKSRWEQGDVFSCSVMHEALHNHYTQKSLSLSPGK

SEQ ID NO: 17276 - protein, 118 aa, synthetic construct
  source 1..118: note = Description of Artificial Sequence: Synthetic polypeptide; note = VH of XENP019366
EVQLVESGGGVVQPGGSLRLSCAASGFNIKDYYMHWVRQAPGKGLEWVSWIDPENGDTEYAPSVKGRFTISADTSKNSAYLQMNSLRTEDTALYYCYARGVRQALDYWGQGTLVTVSS

SEQ ID NO: 17277 - protein, 5 aa, synthetic construct
  source 1..5: note = Description of Artificial Sequence: Synthetic peptide; note = XENP019366 vhCDR1
DYYMH

SEQ ID NO: 17278 - protein, 17 aa, synthetic construct
  source 1..17: note = Description of Artificial Sequence: Synthetic peptide; note = XENP019366 vhCDR2
WIDPENGDTEYAPSVKG

SEQ ID NO: 17279 - protein, 9 aa, synthetic construct
  source 1..9: note = Description of Artificial Sequence: Synthetic peptide; note = XENP019366 vhCDR3
RGVRQALDY

SEQ ID NO: 17280 - protein, 214 aa, synthetic construct; identical to SEQ ID NO: 17240
  source 1..214: note = Description of Artificial Sequence: Synthetic polypeptide; note = XENP019366 2A11_H3L1_IgG1_PVA_/S267K Light Chain

SEQ ID NO: 17281 - protein, 107 aa, synthetic construct; identical to SEQ ID NO: 17241
  source 1..107: note = Description of Artificial Sequence: Synthetic polypeptide; note = VL of XENP019366

SEQ ID NO: 17282 - protein, 11 aa, synthetic construct
  source 1..11: note = Description of Artificial Sequence: Synthetic peptide; note = XENP019366 vlCDR1
RASQDIGNYLN

SEQ ID NO: 17283 - protein, 7 aa, synthetic construct
  source 1..7: note = Description of Artificial Sequence: Synthetic peptide; note = XENP019366 vlCDR2
YTSRLHS

SEQ ID NO: 17284 - protein, 9 aa, synthetic construct
  source 1..9: note = Description of Artificial Sequence: Synthetic peptide; note = XENP019366 vlCDR3
QQGNTLPYT

SEQ ID NO: 17285 - protein, 447 aa, synthetic construct; identical to SEQ ID NO: 17275
  source 1..447: note = Description of Artificial Sequence: Synthetic polypeptide; note = XENP019367 2A11_H3L2_IgG1_PVA_/S267K Heavy Chain

SEQ ID NO: 17286 - protein, 118 aa, synthetic construct; identical to SEQ ID NO: 17276
  source 1..118: note = Description of Artificial Sequence: Synthetic polypeptide; note = VH of XENP019367

SEQ ID NO: 17287 - protein, 5 aa, synthetic construct
  source 1..5: note = Description of Artificial Sequence: Synthetic peptide; note = XENP019367 vhCDR1
DYYMH

SEQ ID NO: 17288 - protein, 17 aa, synthetic construct
  source 1..17: note = Description of Artificial Sequence: Synthetic peptide; note = XENP019367 vhCDR2
WIDPENGDTEYAPSVKG

SEQ ID NO: 17289 - protein, 9 aa, synthetic construct
  source 1..9: note = Description of Artificial Sequence: Synthetic peptide; note = XENP019367 vhCDR3
RGVRQALDY

SEQ ID NO: 17290 - protein, 214 aa, synthetic construct; identical to SEQ ID NO: 17250
  source 1..214: note = Description of Artificial Sequence: Synthetic polypeptide; note = XENP019367 2A11_H3L2_IgG1_PVA_/S267K Light Chain

SEQ ID NO: 17291 - protein, 107 aa, synthetic construct; identical to SEQ ID NO: 17251
  source 1..107: note = Description of Artificial Sequence: Synthetic polypeptide; note = VL of XENP019367

SEQ ID NO: 17292 - protein, 11 aa, synthetic construct
  source 1..11: note = Description of Artificial Sequence: Synthetic peptide; note = XENP019367 vlCDR1
QASQDIGNYLN

SEQ ID NO: 17293 - protein, 7 aa, synthetic construct
  source 1..7: note = Description of Artificial Sequence: Synthetic peptide; note = XENP019367 vlCDR2
YTSRLHS

SEQ ID NO: 17294 - protein, 9 aa, synthetic construct
  source 1..9: note = Description of Artificial Sequence: Synthetic peptide; note = XENP019367 vlCDR3
QQGNTLPYT

SEQ ID NO: 17295 - protein, 446 aa, synthetic construct
  source 1..446: note = Description of Artificial Sequence: Synthetic polypeptide; note = XENP019368 2A11_H4L1_IgG1_PVA_/S267K Heavy Chain
EVQLVESGGGVVQPGGSLRLSCAASGFNIKDYYMHWVRQAPGKGLEWVSWIDPENGDTEYAPSVKGRFTISADTSKNSAYLQMNSLRTEDTALYYCARGVRQALDYWGQGTLVTVSSASTKGPSVFPLAPSSKSTSGGTAALGCLVKDYFPEPVTVSWNSGALTSGVHTFPAVLQSSGLYSLSSVVTVPSSSLGTQTYICNVNHKPSDTKVDKKVEPKSCDKTHTCPPCPAPPVAGPSVFLFPPKPKDTLMISRTPEVTCVVVDVKHEDPEVKFNWYVDGVEVHNAKTKPREEEYNSTYRVVSVLTVLHQDWLNGKEYKCKVSNKALPAPIEKTISKAKGQPREPQVYTLPPSREEMTKNQVSLTCDVSGFYPSDIAVEWESDGQPENNYKTTPPVLDSDGSFFLYSKLTVDKSRWEQGDVFSCSVMHEALHNHYTQKSLSLSPGK

SEQ ID NO: 17296 - protein, 117 aa, synthetic construct
  source 1..117: note = Description of Artificial Sequence: Synthetic polypeptide; note = VH of XENP019368
EVQLVESGGGVVQPGGSLRLSCAASGFNIKDYYMHWVRQAPGKGLEWVSWIDPENGDTEYAPSVKGRFTISADTSKNSAYLQMNSLRTEDTALYYCARGVRQALDYWGQGTLVTVSS

SEQ ID NO: 17297 - protein, 5 aa, synthetic construct
  source 1..5: note = Description of Artificial Sequence: Synthetic peptide; note = XENP019368 vhCDR1
DYYMH

SEQ ID NO: 17298 - protein, 17 aa, synthetic construct
  source 1..17: note = Description of Artificial Sequence: Synthetic peptide; note = XENP019368 vhCDR2
WIDPENGDTEYAPSVKG

SEQ ID NO: 17299 - protein, 8 aa, synthetic construct
  source 1..8: note = Description of Artificial Sequence: Synthetic peptide; note = XENP019368 vhCDR3
GVRQALDY

SEQ ID NO: 17300 - protein, 214 aa, synthetic construct; identical to SEQ ID NO: 17240
  source 1..214: note = Description of Artificial Sequence: Synthetic polypeptide; note = XENP019368 2A11_H4L1_IgG1_PVA_/S267K Light Chain

SEQ ID NO: 17301 - protein, 107 aa, synthetic construct; identical to SEQ ID NO: 17241
  source 1..107: note = Description of Artificial Sequence: Synthetic polypeptide; note = VL of XENP019368

SEQ ID NO: 17302 - protein, 11 aa, synthetic construct
  source 1..11: note = Description of Artificial Sequence: Synthetic peptide; note = XENP019368 vlCDR1
RASQDIGNYLN

SEQ ID NO: 17303 - protein, 7 aa, synthetic construct
  source 1..7: note = Description of Artificial Sequence: Synthetic peptide; note = XENP019368 vlCDR2
YTSRLHS

SEQ ID NO: 17304 - protein, 9 aa, synthetic construct
  source 1..9: note = Description of Artificial Sequence: Synthetic peptide; note = XENP019368 vlCDR3
QQGNTLPYT

SEQ ID NO: 17305 - protein, 446 aa, synthetic construct; identical to SEQ ID NO: 17295
  source 1..446: note = Description of Artificial Sequence: Synthetic polypeptide; note = XENP019369 2A11_H4L2_IgG1_PVA_/S267K Heavy Chain

SEQ ID NO: 17306 - protein, 117 aa, synthetic construct; identical to SEQ ID NO: 17296
  source 1..117: note = Description of Artificial Sequence: Synthetic polypeptide; note = VH of XENP019369

SEQ ID NO: 17307 - protein, 5 aa, synthetic construct
  source 1..5: note = Description of Artificial Sequence: Synthetic peptide; note = XENP019369 vhCDR1
DYYMH

SEQ ID NO: 17308 - protein, 17 aa, synthetic construct
  source 1..17: note = Description of Artificial Sequence: Synthetic peptide; note = XENP019369 vhCDR2
WIDPENGDTEYAPSVKG

SEQ ID NO: 17309 - protein, 8 aa, synthetic construct
  source 1..8: note = Description of Artificial Sequence: Synthetic peptide; note = XENP019369 vhCDR3
GVRQALDY

SEQ ID NO: 17310 - protein, 214 aa, synthetic construct; identical to SEQ ID NO: 17250
  source 1..214: note = Description of Artificial Sequence: Synthetic polypeptide; note = XENP019369 2A11_H4L2_IgG1_PVA_/S267K Light Chain

SEQ ID NO: 17311 - protein, 107 aa, synthetic construct; identical to SEQ ID NO: 17251
  source 1..107: note = Description of Artificial Sequence: Synthetic polypeptide; note = VL of XENP019369

SEQ ID NO: 17312 - protein, 11 aa, synthetic construct
  source 1..11: note = Description of Artificial Sequence: Synthetic peptide; note = XENP019369 vlCDR1
QASQDIGNYLN

SEQ ID NO: 17313 - protein, 7 aa, synthetic construct
  source 1..7: note = Description of Artificial Sequence: Synthetic peptide; note = XENP019369 vlCDR2
YTSRLHS

SEQ ID NO: 17314 - protein, 9 aa, synthetic construct
  source 1..9: note = Description of Artificial Sequence: Synthetic peptide; note = XENP019369 vlCDR3
QQGNTLPYT

SEQ ID NO: 17315 - protein, 445 aa, synthetic construct
  source 1..445: note = Description of Artificial Sequence: Synthetic polypeptide; note = XENP019370 3F9_H1_7A6_L2_IgG1_PVA_/S267K Heavy Chain
QVQLQESGPGLVKPSQTLSLTCTVSDFSITSAYYWNWIRQPPGKKLEWIGYISYDSNYYNPSLKSRVTISRDTSKNQFSLKLSSVTAADTAVYYCARGGITTFDYWGQGTLVTVSSASTKGPSVFPLAPSSKSTSGGTAALGCLVKDYFPEPVTVSWNSGALTSGVHTFPAVLQSSGLYSLSSVVTVPSSSLGTQTYICNVNHKPSDTKVDKKVEPKSCDKTHTCPPCPAPPVAGPSVFLFPPKPKDTLMISRTPEVTCVVVDVKHEDPEVKFNWYVDGVEVHNAKTKPREEEYNSTYRVVSVLTVLHQDWLNGKEYKCKVSNKALPAPIEKTISKAKGQPREPQVYTLPPSREEMTKNQVSLTCDVSGFYPSDIAVEWESDGQPENNYKTTPPVLDSDGSFFLYSKLTVDKSRWEQGDVFSCSVMHEALHNHYTQKSLSLSPGK

SEQ ID NO: 17316 - protein, 116 aa, synthetic construct
  source 1..116: note = Description of Artificial Sequence: Synthetic polypeptide; note = VH of XENP019370
QVQLQESGPGLVKPSQTLSLTCTVSDFSITSAYYWNWIRQPPGKKLEWIGYISYDSNYYNPSLKSRVTISRDTSKNQFSLKLSSVTAADTAVYYCARGGITTFDYWGQGTLVTVSS

SEQ ID NO: 17317 - protein, 6 aa, synthetic construct
  source 1..6: note = Description of Artificial Sequence: Synthetic peptide; note = XENP019370 vhCDR1
SAYYWN

SEQ ID NO: 17318 - protein, 15 aa, synthetic construct
  source 1..15: note = Description of Artificial Sequence: Synthetic peptide; note = XENP019370 vhCDR2
YISYDSNYYNPSLKS

SEQ ID NO: 17319 - protein, 8 aa, synthetic construct
  source 1..8: note = Description of Artificial Sequence: Synthetic peptide; note = XENP019370 vhCDR3
GGITTFDY

SEQ ID NO: 17320 - protein, 218 aa, synthetic construct
  source 1..218: note = Description of Artificial Sequence: Synthetic polypeptide; note = XENP019370 3F9_H1_7A6_L2_IgG1_PVA_/S267K Light Chain
DIVLTQSPATLSLSPGERATLSCRASQSVDYDGDSYMNWYQQKPGQPPRLLIYAASNLESGIPARFSGSGSGTDFTLTISSLEPEDFAVYYCQQSNEDPRTFGGGTKVEIKRTVAAPSVFIFPPSDEQLKSGTASVVCLLNNFYPREAKVQWKVDNALQSGNSQESVTEQDSKDSTYSLSSTLTLSKADYEKHKVYACEVTHQGLSSPVTKSFNRGEC

SEQ ID NO: 17321 - protein, 111 aa, synthetic construct
  source 1..111: note = Description of Artificial Sequence: Synthetic polypeptide; note = VL of XENP019370
DIVLTQSPATLSLSPGERATLSCRASQSVDYDGDSYMNWYQQKPGQPPRLLIYAASNLESGIPARFSGSGSGTDFTLTISSLEPEDFAVYYCQQSNEDPRTFGGGTKVEIK

SEQ ID NO: 17322 - protein, 15 aa, synthetic construct
  source 1..15: note = Description of Artificial Sequence: Synthetic peptide; note = XENP019370 vlCDR1
RASQSVDYDGDSYMN

SEQ ID NO: 17323 - protein, 7 aa, synthetic construct
  source 1..7: note = Description of Artificial Sequence: Synthetic peptide; note = XENP019370 vlCDR2
AASNLES

SEQ ID NO: 17324 - protein, 9 aa, synthetic construct
  source 1..9: note = Description of Artificial Sequence: Synthetic peptide; note = XENP019370 vlCDR3
QQSNEDPRT

SEQ ID NO: 17325 - protein, 444 aa, synthetic construct
  source 1..444: note = Description of Artificial Sequence: Synthetic polypeptide; note = XENP019371 6A6_H1L1_IgG1_PVA_/S267K Heavy Chain
EVQLVQSGAEVKKPGATVKISCKASGFNIKDYYMHWVQQAPGKGLEWMGWIDPENGDTEYAPKFQGRVTITADTSTNTAYMELSSLRSEDTAVYYCARAAAMDYWGQGTLVTVSSASTKGPSVFPLAPSSKSTSGGTAALGCLVKDYFPEPVTVSWNSGALTSGVHTFPAVLQSSGLYSLSSVVTVPSSSLGTQTYICNVNHKPSDTKVDKKVEPKSCDKTHTCPPCPAPPVAGPSVFLFPPKPKDTLMISRTPEVTCVVVDVKHEDPEVKFNWYVDGVEVHNAKTKPREEEYNSTYRVVSVLTVLHQDWLNGKEYKCKVSNKALPAPIEKTISKAKGQPREPQVYTLPPSREEMTKNQVSLTCDVSGFYPSDIAVEWESDGQPENNYKTTPPVLDSDGSFFLYSKLTVDKSRWEQGDVFSCSVMHEALHNHYTQKSLSLSPGK

SEQ ID NO: 17326 - protein, 115 aa, synthetic construct
  source 1..115: note = Description of Artificial Sequence: Synthetic polypeptide; note = VH of XENP019371
EVQLVQSGAEVKKPGATVKISCKASGFNIKDYYMHWVQQAPGKGLEWMGWIDPENGDTEYAPKFQGRVTITADTSTNTAYMELSSLRSEDTAVYYCARAAAMDYWGQGTLVTVSS

SEQ ID NO: 17327 - protein, 5 aa, synthetic construct
  source 1..5: note = Description of Artificial Sequence: Synthetic peptide; note = XENP019371 vhCDR1
DYYMH

SEQ ID NO: 17328 - protein, 17 aa, synthetic construct
  source 1..17: note = Description of Artificial Sequence: Synthetic peptide; note = XENP019371 vhCDR2
WIDPENGDTEYAPKFQG

SEQ ID NO: 17329 - protein, 6 aa, synthetic construct
  source 1..6: note = Description of Artificial Sequence: Synthetic peptide; note = XENP019371 vhCDR3
AAAMDY

SEQ ID NO: 17330 - protein, 214 aa, synthetic construct
  source 1..214: note = Description of Artificial Sequence: Synthetic polypeptide; note = XENP019371 6A6_H1L1_IgG1_PVA_/S267K Light Chain
DIQMTQSPSSLSASVGDRVTITCRASQDISNYLNWFQQKPGKTFKLLIYYTSRLHSGVPSRFSGSGSGTDYTLTISSLQPEDFATYFCQQGNTLPYTFGGGTKVEIKRTVAAPSVFIFPPSDEQLKSGTASVVCLLNNFYPREAKVQWKVDNALQSGNSQESVTEQDSKDSTYSLSSTLTLSKADYEKHKVYACEVTHQGLSSPVTKSFNRGEC

SEQ ID NO: 17331 - protein, 107 aa, synthetic construct
  source 1..107: note = Description of Artificial Sequence: Synthetic polypeptide; note = VL of XENP019371
DIQMTQSPSSLSASVGDRVTITCRASQDISNYLNWFQQKPGKTFKLLIYYTSRLHSGVPSRFSGSGSGTDYTLTISSLQPEDFATYFCQQGNTLPYTFGGGTKVEIK

SEQ ID NO: 17332 - protein, 11 aa, synthetic construct
  source 1..11: note = Description of Artificial Sequence: Synthetic peptide; note = XENP019371 vlCDR1
RASQDISNYLN

SEQ ID NO: 17333 - protein, 7 aa, synthetic construct
  source 1..7: note = Description of Artificial Sequence: Synthetic peptide; note = XENP019371 vlCDR2
YTSRLHS

SEQ ID NO: 17334 - protein, 9 aa, synthetic construct
  source 1..9: note = Description of Artificial Sequence: Synthetic peptide; note = XENP019371 vlCDR3
QQGNTLPYT

SEQ ID NO: 17335 - protein, 444 aa, synthetic construct
  source 1..444: note = Description of Artificial Sequence: Synthetic polypeptide; note = XENP019372 9E7_H0L0_IgG1_PVA_/S267K Heavy Chain
QVQLKQSGPGLVQPSQSLSITCTVSGFSLTRYGIHWVRQSPGKGLEWLGVIWSGVTDYNAAFISRLSISKDNSKSQVFFKLNSLQANDTAIYYCARPYYYAMDYWGQGTSVTVSSASTKGPSVFPLAPSSKSTSGGTAALGCLVKDYFPEPVTVSWNSGALTSGVHTFPAVLQSSGLYSLSSVVTVPSSSLGTQTYICNVNHKPSDTKVDKKVEPKSCDKTHTCPPCPAPPVAGPSVFLFPPKPKDTLMISRTPEVTCVVVDVKHEDPEVKFNWYVDGVEVHNAKTKPREEEYNSTYRVVSVLTVLHQDWLNGKEYKCKVSNKALPAPIEKTISKAKGQPREPQVYTLPPSREEMTKNQVSLTCDVSGFYPSDIAVEWESDGQPENNYKTTPPVLDSDGSFFLYSKLTVDKSRWEQGDVFSCSVMHEALHNHYTQKSLSLSPGK

SEQ ID NO: 17336 - protein, 115 aa, synthetic construct
  source 1..115: note = Description of Artificial Sequence: Synthetic polypeptide; note = VH of XENP019372
QVQLKQSGPGLVQPSQSLSITCTVSGFSLTRYGIHWVRQSPGKGLEWLGVIWSGVTDYNAAFISRLSISKDNSKSQVFFKLNSLQANDTAIYYCARPYYYAMDYWGQGTSVTVSS

SEQ ID NO: 17337 - protein, 5 aa, synthetic construct
  source 1..5: note = Description of Artificial Sequence: Synthetic peptide; note = XENP019372 vhCDR1
RYGIH

SEQ ID NO: 17338 - protein, 15 aa, synthetic construct
  source 1..15: note = Description of Artificial Sequence: Synthetic peptide; note = XENP019372 vhCDR2
VIWSGVTDYNAAFIS

SEQ ID NO: 17339 - protein, 8 aa, synthetic construct
  source 1..8: note = Description of Artificial Sequence: Synthetic peptide; note = XENP019372 vhCDR3
PYYYAMDY

SEQ ID NO: 17340 - protein, 214 aa, synthetic construct
  source 1..214: note = Description of Artificial Sequence: Synthetic polypeptide; note = XENP019372 9E7_H0L0_IgG1_PVA_/S267K Light Chain
DIQMTQSPASLSVSVGETVTITCRASENIYSNLAWYQQKQGKSPQLLVYAATTLADGVPSRFSGSGSGTQYSLKINSLQSEDFGSYYCQHFWGTPWTFGGGTKLEIKRTVAAPSVFIFPPSDEQLKSGTASVVCLLNNFYPREAKVQWKVDNALQSGNSQESVTEQDSKDSTYSLSSTLTLSKADYEKHKVYACEVTHQGLSSPVTKSFNRGEC

SEQ ID NO: 17341 - protein, 107 aa, synthetic construct
  source 1..107: note = Description of Artificial Sequence: Synthetic polypeptide; note = VL of XENP019372
DIQMTQSPASLSVSVGETVTITCRASENIYSNLAWYQQKQGKSPQLLVYAATTLADGVPSRFSGSGSGTQYSLKINSLQSEDFGSYYCQHFWGTPWTFGGGTKLEIK

SEQ ID NO: 17342 - protein, 11 aa, synthetic construct
  source 1..11: note = Description of Artificial Sequence: Synthetic peptide; note = XENP019372 vlCDR1
RASENIYSNLA

SEQ ID NO: 17343 - protein, 7 aa, synthetic construct
  source 1..7: note = Description of Artificial Sequence: Synthetic peptide; note = XENP019372 vlCDR2
AATTLAD

SEQ ID NO: 17344 - protein, 9 aa, synthetic construct
  source 1..9: note = Description of Artificial Sequence: Synthetic peptide; note = XENP019372 vlCDR3
QHFWGTPWT

SEQ ID NO: 17345 - protein, 444 aa, synthetic construct
  source 1..444: note = Description of Artificial Sequence: Synthetic polypeptide; note = XENP019373 9E7_H1L1_IgG1_PVA_/S267K Heavy Chain
QVQLVQSGAEVKKPGASVKVSCKVSGFSLTRYGIHWVRQAPGQGLEWMGVIWSGVTDYNAKFQGRVTMTKDNSKSTVYMELSSLRSEDTAVYYCARPYYYAMDYWGQGTLVTVSSASTKGPSVFPLAPSSKSTSGGTAALGCLVKDYFPEPVTVSWNSGALTSGVHTFPAVLQSSGLYSLSSVVTVPSSSLGTQTYICNVNHKPSDTKVDKKVEPKSCDKTHTCPPCPAPPVAGPSVFLFPPKPKDTLMISRTPEVTCVVVDVKHEDPEVKFNWYVDGVEVHNAKTKPREEEYNSTYRVVSVLTVLHQDWLNGKEYKCKVSNKALPAPIEKTISKAKGQPREPQVYTLPPSREEMTKNQVSLTCDVSGFYPSDIAVEWESDGQPENNYKTTPPVLDSDGSFFLYSKLTVDKSRWEQGDVFSCSVMHEALHNHYTQKSLSLSPGK

SEQ ID NO: 17346 - protein, 115 aa, synthetic construct
  source 1..115: note = Description of Artificial Sequence: Synthetic polypeptide; note = VH of XENP019373
QVQLVQSGAEVKKPGASVKVSCKVSGFSLTRYGIHWVRQAPGQGLEWMGVIWSGVTDYNAKFQGRVTMTKDNSKSTVYMELSSLRSEDTAVYYCARPYYYAMDYWGQGTLVTVSS

SEQ ID NO: 17347 - protein, 5 aa, synthetic construct
  source 1..5: note = Description of Artificial Sequence: Synthetic peptide; note = XENP019373 vhCDR1
RYGIH

SEQ ID NO: 17348 - protein, 15 aa, synthetic construct
  source 1..15: note = Description of Artificial Sequence: Synthetic peptide; note = XENP019373 vhCDR2
VIWSGVTDYNAKFQG

SEQ ID NO: 17349 - protein, 8 aa, synthetic construct
  source 1..8: note = Description of Artificial Sequence: Synthetic peptide; note = XENP019373 vhCDR3
PYYYAMDY

SEQ ID NO: 17350 - protein, 214 aa, synthetic construct
  source 1..214: note = Description of Artificial Sequence: Synthetic polypeptide; note = XENP019373 9E7_H1L1_IgG1_PVA_/S267K Light Chain
DIQMTQSPSSLSASVGDRVTITCRASENIYSNLAWYQQKPGKSPKLLVYAATTLADGVPSRFSGSGSGTDYTLTISSLQPEDFATYYCQHFWGTPWTFGGGTKVEIKRTVAAPSVFIFPPSDEQLKSGTASVVCLLNNFYPREAKVQWKVDNALQSGNSQESVTEQDSKDSTYSLSSTLTLSKADYEKHKVYACEVTHQGLSSPVTKSFNRGEC

SEQ ID NO: 17351 - protein, 107 aa, synthetic construct
  source 1..107: note = Description of Artificial Sequence: Synthetic polypeptide; note = VL of XENP019373
DIQMTQSPSSLSASVGDRVTITCRASENIYSNLAWYQQKPGKSPKLLVYAATTLADGVPSRFSGSGSGTDYTLTISSLQPEDFATYYCQHFWGTPWTFGGGTKVEIK

SEQ ID NO: 17352 - protein, 11 aa, synthetic construct
  source 1..11: note = Description of Artificial Sequence: Synthetic peptide; note = XENP019373 vlCDR1
RASENIYSNLA

SEQ ID NO: 17353 - protein, 7 aa, synthetic construct
  source 1..7: note = Description of Artificial Sequence: Synthetic peptide; note = XENP019373 vlCDR2
AATTLAD

SEQ ID NO: 17354 - protein, 9 aa, synthetic construct
  source 1..9: note = Description of Artificial Sequence: Synthetic peptide; note = XENP019373 vlCDR3
QHFWGTPWT

SEQ ID NO: 17355 - protein, 444 aa, synthetic construct; identical to SEQ ID NO: 17345
  source 1..444: note = Description of Artificial Sequence: Synthetic polypeptide; note = XENP019374 9E7_H1L2_IgG1_PVA_/S267K Heavy Chain

SEQ ID NO: 17356 - protein, 115 aa, synthetic construct; identical to SEQ ID NO: 17346
  source 1..115: note = Description of Artificial Sequence: Synthetic polypeptide; note = VH of XENP019374

SEQ ID NO: 17357 - protein, 5 aa, synthetic construct
  source 1..5: note = Description of Artificial Sequence: Synthetic peptide; note = XENP019374 vhCDR1
RYGIH

SEQ ID NO: 17358 - protein, 15 aa, synthetic construct
  source 1..15: note = Description of Artificial Sequence: Synthetic peptide; note = XENP019374 vhCDR2
VIWSGVTDYNAKFQG

SEQ ID NO: 17359 - protein, 8 aa, synthetic construct
  source 1..8: note = Description of Artificial Sequence: Synthetic peptide; note = XENP019374 vhCDR3
PYYYAMDY

SEQ ID NO: 17360 - protein, 214 aa, synthetic construct
  source 1..214: note = Description of Artificial Sequence: Synthetic polypeptide; note = XENP019374 9E7_H1L2_IgG1_PVA_/S267K Light Chain
DIQMTQSPATLSVSPGERATLSCRASENIYSNLAWYQQKPGQSPRLLVYAATTLADGVPSRFSGSGSGTEYTLTISSLQSEDFAVYYCQHFWGTPWTFGGGTKVEIKRTVAAPSVFIFPPSDEQLKSGTASVVCLLNNFYPREAKVQWKVDNALQSGNSQESVTEQDSKDSTYSLSSTLTLSKADYEKHKVYACEVTHQGLSSPVTKSFNRGEC

SEQ ID NO: 17361 - protein, 107 aa, synthetic construct
  source 1..107: note = Description of Artificial Sequence: Synthetic polypeptide; note = VL of XENP019374
DIQMTQSPATLSVSPGERATLSCRASENIYSNLAWYQQKPGQSPRLLVYAATTLADGVPSRFSGSGSGTEYTLTISSLQSEDFAVYYCQHFWGTPWTFGGGTKVEIK

SEQ ID NO: 17362 - protein, 11 aa, synthetic construct
  source 1..11: note = Description of Artificial Sequence: Synthetic peptide; note = XENP019374 vlCDR1
RASENIYSNLA

SEQ ID NO: 17363 - protein, 7 aa, synthetic construct
  source 1..7: note = Description of Artificial Sequence: Synthetic peptide; note = XENP019374 vlCDR2
AATTLAD

SEQ ID NO: 17364 - protein, 9 aa, synthetic construct
  source 1..9: note = Description of Artificial Sequence: Synthetic peptide; note = XENP019374 vlCDR3
QHFWGTPWT

SEQ ID NO: 17365 - protein, 444 aa, synthetic construct
  source 1..444: note = Description of Artificial Sequence: Synthetic polypeptide; note = XENP019375 9E7_H2L1_IgG1_PVA_/S267K Heavy Chain
QVTLKESGPVLVKPTETLTLTCTVSGFSLTRYGIHWVRQPPGKGLEWLAVIWSGVTDYNPSLKSRLTISKDNSKSQVVLTMTNMDPVDTATYYCARPYYYAMDYWGQGTLVTVSSASTKGPSVFPLAPSSKSTSGGTAALGCLVKDYFPEPVTVSWNSGALTSGVHTFPAVLQSSGLYSLSSVVTVPSSSLGTQTYICNVNHKPSDTKVDKKVEPKSCDKTHTCPPCPAPPVAGPSVFLFPPKPKDTLMISRTPEVTCVVVDVKHEDPEVKFNWYVDGVEVHNAKTKPREEEYNSTYRVVSVLTVLHQDWLNGKEYKCKVSNKALPAPIEKTISKAKGQPREPQVYTLPPSREEMTKNQVSLTCDVSGFYPSDIAVEWESDGQPENNYKTTPPVLDSDGSFFLYSKLTVDKSRWEQGDVFSCSVMHEALHNHYTQKSLSLSPGK

SEQ ID NO: 17366 - protein, 115 aa, synthetic construct
  source 1..115: note = Description of Artificial Sequence: Synthetic polypeptide; note = VH of XENP019375
QVTLKESGPVLVKPTETLTLTCTVSGFSLTRYGIHWVRQPPGKGLEWLAVIWSGVTDYNPSLKSRLTISKDNSKSQVVLTMTNMDPVDTATYYCARPYYYAMDYWGQGTLVTVSS

SEQ ID NO: 17367 - protein, 5 aa, synthetic construct
  source 1..5: note = Description of Artificial Sequence: Synthetic peptide; note = XENP019375 vhCDR1
RYGIH

SEQ ID NO: 17368 - protein, 15 aa, synthetic construct
  source 1..15: note = Description of Artificial Sequence: Synthetic peptide; note = XENP019375 vhCDR2
VIWSGVTDYNPSLKS

SEQ ID NO: 17369 - protein, 8 aa, synthetic construct
  source 1..8: note = Description of Artificial Sequence: Synthetic peptide; note = XENP019375 vhCDR3
PYYYAMDY

SEQ ID NO: 17370 - protein, 214 aa, synthetic construct; identical to SEQ ID NO: 17350
  source 1..214: note = Description of Artificial Sequence: Synthetic polypeptide; note = XENP019375 9E7_H2L1_IgG1_PVA_/S267K Light Chain

SEQ ID NO: 17371 - protein, 107 aa, synthetic construct; identical to SEQ ID NO: 17351
  source 1..107: note = Description of Artificial Sequence: Synthetic polypeptide; note = VL of XENP019375

SEQ ID NO: 17372 - protein, 11 aa, synthetic construct
  source 1..11: note = Description of Artificial Sequence: Synthetic peptide; note = XENP019375 vlCDR1
RASENIYSNLA

SEQ ID NO: 17373 - protein, 7 aa, synthetic construct
  source 1..7: note = Description of Artificial Sequence: Synthetic peptide; note = XENP019375 vlCDR2
AATTLAD

SEQ ID NO: 17374 - protein, 9 aa, synthetic construct
  source 1..9: note = Description of Artificial Sequence: Synthetic peptide; note = XENP019375 vlCDR3
QHFWGTPWT

SEQ ID NO: 17375 - protein, 444 aa, synthetic construct; identical to SEQ ID NO: 17365
  source 1..444: note = Description of Artificial Sequence: Synthetic polypeptide; note = XENP019376 9E7_H2L2_IgG1_PVA_/S267K Heavy Chain

SEQ ID NO: 17376 - protein, 115 aa, synthetic construct; identical to SEQ ID NO: 17366
  source 1..115: note = Description of Artificial Sequence: Synthetic polypeptide; note = VH of XENP019376

SEQ ID NO: 17377 - protein, 5 aa, synthetic construct
  source 1..5: note = Description of Artificial Sequence: Synthetic peptide; note = XENP019376 vhCDR1
RYGIH

SEQ ID NO: 17378 - protein, 15 aa, synthetic construct
  source 1..15: note = Description of Artificial Sequence: Synthetic peptide; note = XENP019376 vhCDR2
VIWSGVTDYNPSLKS

SEQ ID NO: 17379 - protein, 8 aa, synthetic construct
  source 1..8: note = Description of Artificial Sequence: Synthetic peptide; note = XENP019376 vhCDR3
PYYYAMDY

SEQ ID NO: 17380 - protein, 214 aa, synthetic construct; identical to SEQ ID NO: 17360
  source 1..214: note = Description of Artificial Sequence: Synthetic polypeptide; note = XENP019376 9E7_H2L2_IgG1_PVA_/S267K Light Chain

SEQ ID NO: 17381 - protein, 107 aa, synthetic construct; identical to SEQ ID NO: 17361
  source 1..107: note = Description of Artificial Sequence: Synthetic polypeptide; note = VL of XENP019376

SEQ ID NO: 17382 - protein, 11 aa, synthetic construct
  source 1..11: note = Description of Artificial Sequence: Synthetic peptide; note = XENP019376 vlCDR1
RASENIYSNLA

SEQ ID NO: 17383 - protein, 7 aa, synthetic construct
  source 1..7: note = Description of Artificial Sequence: Synthetic peptide; note = XENP019376 vlCDR2
AATTLAD

SEQ ID NO: 17384 - protein, 9 aa, synthetic construct
  source 1..9: note = Description of Artificial Sequence: Synthetic peptide; note = XENP019376 vlCDR3
QHFWGTPWT

SEQ ID NO: 17385 - protein, 444 aa, synthetic construct
  source 1..444: note = Description of Artificial Sequence: Synthetic polypeptide; note = XENP019377 9E7_H3L1_IgG1_PVA_/S267K Heavy Chain
EVQLVESGGGLVQPGGSLRLSCAVSGFSLTRYGIHWVRQAPGKGLEWVSVIWSGVTDYNPSVKGRFTISKDNSKSTVYLQMNSLRAEDTAVYYCARPYYYAMDYWGQGTLVTVSSASTKGPSVFPLAPSSKSTSGGTAALGCLVKDYFPEPVTVSWNSGALTSGVHTFPAVLQSSGLYSLSSVVTVPSSSLGTQTYICNVNHKPSDTKVDKKVEPKSCDKTHTCPPCPAPPVAGPSVFLFPPKPKDTLMISRTPEVTCVVVDVKHEDPEVKFNWYVDGVEVHNAKTKPREEEYNSTYRVVSVLTVLHQDWLNGKEYKCKVSNKALPAPIEKTISKAKGQPREPQVYTLPPSREEMTKNQVSLTCDVSGFYPSDIAVEWESDGQPENNYKTTPPVLDSDGSFFLYSKLTVDKSRWEQGDVFSCSVMHEALHNHYTQKSLSLSPGK

SEQ ID NO: 17386 - protein, 115 aa, synthetic construct
  source 1..115: note = Description of Artificial Sequence: Synthetic polypeptide; note = VH of XENP019377
EVQLVESGGGLVQPGGSLRLSCAVSGFSLTRYGIHWVRQAPGKGLEWVSVIWSGVTDYNPSVKGRFTISKDNSKSTVYLQMNSLRAEDTAVYYCARPYYYAMDYWGQGTLVTVSS

SEQ ID NO: 17387 - protein, 5 aa, synthetic construct
  source 1..5: note = Description of Artificial Sequence: Synthetic peptide; note = XENP019377 vhCDR1
RYGIH

SEQ ID NO: 17388 - protein, 15 aa, synthetic construct
  source 1..15: note = Description of Artificial Sequence: Synthetic peptide; note = XENP019377 vhCDR2
VIWSGVTDYNPSVKG

SEQ ID NO: 17389 - protein, 8 aa, synthetic construct
  source 1..8: note = Description of Artificial Sequence: Synthetic peptide; note = XENP019377 vhCDR3
PYYYAMDY

SEQ ID NO: 17390 - protein, 214 aa, synthetic construct; identical to SEQ ID NO: 17350
  source 1..214: note = Description of Artificial Sequence: Synthetic polypeptide; note = XENP019377 9E7_H3L1_IgG1_PVA_/S267K Light Chain

SEQ ID NO: 17391 - protein, 107 aa, synthetic construct; identical to SEQ ID NO: 17351
  source 1..107: note = Description of Artificial Sequence: Synthetic polypeptide; note = VL of XENP019377

SEQ ID NO: 17392 - protein, 11 aa, synthetic construct
  source 1..11: note = Description of Artificial Sequence: Synthetic peptide; note = XENP019377 vlCDR1
RASENIYSNLA

SEQ ID NO: 17393 - protein, 7 aa, synthetic construct
  source 1..7: note = Description of Artificial Sequence: Synthetic peptide; note = XENP019377 vlCDR2
AATTLAD

SEQ ID NO: 17394 - protein, 9 aa, synthetic construct
  source 1..9: note = Description of Artificial Sequence: Synthetic peptide; note = XENP019377 vlCDR3
QHFWGTPWT

SEQ ID NO: 17395 - protein, 444 aa, synthetic construct; identical to SEQ ID NO: 17385
  source 1..444: note = Description of Artificial Sequence: Synthetic polypeptide; note = XENP019378 9E7_H3L2_IgG1_PVA_/S267K Heavy Chain

SEQ ID NO: 17396 - protein, 115 aa, synthetic construct; identical to SEQ ID NO: 17386
  source 1..115: note = Description of Artificial Sequence: Synthetic polypeptide; note = VH of XENP019378

SEQ ID NO: 17397 - protein, 5 aa, synthetic construct
  source 1..5: note = Description of Artificial Sequence: Synthetic peptide; note = XENP019378 vhCDR1
RYGIH

SEQ ID NO: 17398 - protein, 15 aa, synthetic construct
  source 1..15: note = Description of Artificial Sequence: Synthetic peptide; note = XENP019378 vhCDR2
VIWSGVTDYNPSVKG

SEQ ID NO: 17399 - protein, 8 aa, synthetic construct
  source 1..8: note = Description of Artificial Sequence: Synthetic peptide; note = XENP019378 vhCDR3
PYYYAMDY

SEQ ID NO: 17400 - protein, 214 aa, synthetic construct; identical to SEQ ID NO: 17360
  source 1..214: note = Description of Artificial Sequence: Synthetic polypeptide; note = XENP019378 9E7_H3L2_IgG1_PVA_/S267K Light Chain

SEQ ID NO: 17401 - protein, 107 aa, synthetic construct; identical to SEQ ID NO: 17361
  source 1..107: note = Description of Artificial Sequence: Synthetic polypeptide; note = VL of XENP019378

SEQ ID NO: 17402 - protein, 11 aa, synthetic construct
  source 1..11: note = Description of Artificial Sequence: Synthetic peptide; note = XENP019378 vlCDR1
RASENIYSNLA

SEQ ID NO: 17403 - protein, 7 aa, synthetic construct
  source 1..7: note = Description of Artificial Sequence: Synthetic peptide; note = XENP019378 vlCDR2
AATTLAD

SEQ ID NO: 17404 - protein, 9 aa, synthetic construct
  source 1..9: note = Description of Artificial Sequence: Synthetic peptide; note = XENP019378 vlCDR3
QHFWGTPWT

SEQ ID NO: 17405 - protein, 444 aa, synthetic construct
  source 1..444: note = Description of Artificial Sequence: Synthetic polypeptide; note = XENP019379 9E7_H4L1_IgG1_PVA_/S267K Heavy Chain
EVQLVQSGAEVKKPGESLKISCKVSGFSLTRYGIHWVRQMPGKGLEWMGVIWSGVTDYNPSFQGQVTISKDNSISTVYLQWSSLKASDTAMYYCARPYYYAMDYWGQGTLVTVSSASTKGPSVFPLAPSSKSTSGGTAALGCLVKDYFPEPVTVSWNSGALTSGVHTFPAVLQSSGLYSLSSVVTVPSSSLGTQTYICNVNHKPSDTKVDKKVEPKSCDKTHTCPPCPAPPVAGPSVFLFPPKPKDTLMISRTPEVTCVVVDVKHEDPEVKFNWYVDGVEVHNAKTKPREEEYNSTYRVVSVLTVLHQDWLNGKEYKCKVSNKALPAPIEKTISKAKGQPREPQVYTLPPSREEMTKNQVSLTCDVSGFYPSDIAVEWESDGQPENNYKTTPPVLDSDGSFFLYSKLTVDKSRWEQGDVFSCSVMHEALHNHYTQKSLSLSPGK

SEQ ID NO: 17406 - protein, 115 aa, synthetic construct
  source 1..115: note = Description of Artificial Sequence: Synthetic polypeptide; note = VH of XENP019379
EVQLVQSGAEVKKPGESLKISCKVSGFSLTRYGIHWVRQMPGKGLEWMGVIWSGVTDYNPSFQGQVTISKDNSISTVYLQWSSLKASDTAMYYCARPYYYAMDYWGQGTLVTVSS

SEQ ID NO: 17407 - protein, 5 aa, synthetic construct
  source 1..5: note = Description of Artificial Sequence: Synthetic peptide; note = XENP019379 vhCDR1
RYGIH

SEQ ID NO: 17408 - protein, 15 aa, synthetic construct
  source 1..15: note = Description of Artificial Sequence: Synthetic peptide; note = XENP019379 vhCDR2
VIWSGVTDYNPSFQG

SEQ ID NO: 17409 - protein, 8 aa, synthetic construct
  source 1..8: note = Description of Artificial Sequence: Synthetic peptide; note = XENP019379 vhCDR3
PYYYAMDY

SEQ ID NO: 17410 - protein, 214 aa, synthetic construct; identical to SEQ ID NO: 17350
  source 1..214: note = Description of Artificial Sequence: Synthetic polypeptide; note = XENP019379 9E7_H4L1_IgG1_PVA_/S267K Light Chain

SEQ ID NO: 17411 - protein, 107 aa, synthetic construct; identical to SEQ ID NO: 17351
  source 1..107: note = Description of Artificial Sequence: Synthetic polypeptide; note = VL of XENP019379

SEQ ID NO: 17412 - protein, 11 aa, synthetic construct
  source 1..11: note = Description of Artificial Sequence: Synthetic peptide; note = XENP019379 vlCDR1
RASENIYSNLA

SEQ ID NO: 17413 - protein, 7 aa, synthetic construct
  source 1..7: note = Description of Artificial Sequence: Synthetic peptide; note = XENP019379 vlCDR2
AATTLAD

SEQ ID NO: 17414 - protein, 9 aa, synthetic construct
  source 1..9: note = Description of Artificial Sequence: Synthetic peptide; note = XENP019379 vlCDR3
QHFWGTPWT

SEQ ID NO: 17415 - protein, 444 aa, synthetic construct; identical to SEQ ID NO: 17405
  source 1..444: note = Description of Artificial Sequence: Synthetic polypeptide; note = XENP019380 9E7_H4L2_IgG1_PVA_/S267K Heavy Chain

SEQ ID NO: 17416 - protein, 115 aa, synthetic construct; identical to SEQ ID NO: 17406
  source 1..115: note = Description of Artificial Sequence: Synthetic polypeptide; note = VH of XENP019380

SEQ ID NO: 17417 - protein, 5 aa, synthetic construct
  source 1..5: note = Description of Artificial Sequence: Synthetic peptide; note = XENP019380 vhCDR1
RYGIH

SEQ ID NO: 17418 - protein, 15 aa, synthetic construct
  source 1..15: note = Description of Artificial Sequence: Synthetic peptide; note = XENP019380 vhCDR2
VIWSGVTDYNPSFQG

SEQ ID NO: 17419 - protein, 8 aa, synthetic construct
  source 1..8: note = Description of Artificial Sequence: Synthetic peptide; note = XENP019380 vhCDR3
PYYYAMDY

SEQ ID NO: 17420 - protein, 214 aa, synthetic construct; identical to SEQ ID NO: 17360
  source 1..214: note = Description of Artificial Sequence: Synthetic polypeptide; note = XENP019380 9E7_H4L2_IgG1_PVA_/S267K Light Chain

SEQ ID NO: 17421 - protein, 107 aa, synthetic construct; identical to SEQ ID NO: 17361
  source 1..107: note = Description of Artificial Sequence: Synthetic polypeptide; note = VL of XENP019380

SEQ ID NO: 17422 - protein, 11 aa, synthetic construct
  source 1..11: note = Description of Artificial Sequence: Synthetic peptide; note = XENP019380 vlCDR1
RASENIYSNLA

SEQ ID NO: 17423 - protein, 7 aa, synthetic construct
  source 1..7: note = Description of Artificial Sequence: Synthetic peptide; note = XENP019380 vlCDR2
AATTLAD

SEQ ID NO: 17424 - protein, 9 aa, synthetic construct
  source 1..9: note = Description of Artificial Sequence: Synthetic peptide; note = XENP019380 vlCDR3
QHFWGTPWT

SEQ ID NO: 17425 - protein, 447 aa, synthetic construct
  source 1..447: note = Description of Artificial Sequence: Synthetic polypeptide; note = XENP019381 2A12_H1L1_IgG1_PVA_/S267K Heavy Chain
QIQLVQSGSELKKPGASVKVSCKASGYTFTNYGMNWVRQAPGQGLEWMGWINTYTGEPTYADGFTGRFVFSLDTSVSTAYLQISSLKAEDTAVYFCARLEAIYGSDYWGQGTLVTVSSASTKGPSVFPLAPSSKSTSGGTAALGCLVKDYFPEPVTVSWNSGALTSGVHTFPAVLQSSGLYSLSSVVTVPSSSLGTQTYICNVNHKPSDTKVDKKVEPKSCDKTHTCPPCPAPPVAGPSVFLFPPKPKDTLMISRTPEVTCVVVDVKHEDPEVKFNWYVDGVEVHNAKTKPREEEYNSTYRVVSVLTVLHQDWLNGKEYKCKVSNKALPAPIEKTISKAKGQPREPQVYTLPPSREEMTKNQVSLTCDVSGFYPSDIAVEWESDGQPENNYKTTPPVLDSDGSFFLYSKLTVDKSRWEQGDVFSCSVMHEALHNHYTQKSLSLSPGK

SEQ ID NO: 17426 - protein, 118 aa, synthetic construct
  source 1..118: note = Description of Artificial Sequence: Synthetic polypeptide; note = VH of XENP019381
QIQLVQSGSELKKPGASVKVSCKASGYTFTNYGMNWVRQAPGQGLEWMGWINTYTGEPTYADGFTGRFVFSLDTSVSTAYLQISSLKAEDTAVYFCARLEAIYGSDYWGQGTLVTVSS

SEQ ID NO: 17427 - protein, 5 aa, synthetic construct
  source 1..5: note = Description of Artificial Sequence: Synthetic peptide; note = XENP019381 vhCDR1
NYGMN

SEQ ID NO: 17428 - protein, 17 aa, synthetic construct
  source 1..17: note = Description of Artificial Sequence: Synthetic peptide; note = XENP019381 vhCDR2
WINTYTGEPTYADGFTG

SEQ ID NO: 17429 - protein, 9 aa, synthetic construct
  source 1..9: note = Description of Artificial Sequence: Synthetic peptide; note = XENP019381 vhCDR3
LEAIYGSDY

SEQ ID NO: 17430 - protein, 214 aa, synthetic construct
  source 1..214: note = Description of Artificial Sequence: Synthetic polypeptide; note = XENP019381 2A12_H1L1_IgG1_PVA_/S267K Light Chain
DIQMTQSPSSLSASVGDRVTITCRASQEISGYLSWLQQKPGKTIKRLIYAASTLDSGVPKRFSDSRSGSDYTLTISSLQPEDFATYYCLQYTSYPFTFGSGTKLEIKRTVAAPSVFIFPPSDEQLKSGTASVVCLLNNFYPREAKVQWKVDNALQSGNSQESVTEQDSKDSTYSLSSTLTLSKADYEKHKVYACEVTHQGLSSPVTKSFNRGEC

SEQ ID NO: 17431 - protein, 107 aa, synthetic construct
  source 1..107: note = Description of Artificial Sequence: Synthetic polypeptide; note = VL of XENP019381
DIQMTQSPSSLSASVGDRVTITCRASQEISGYLSWLQQKPGKTIKRLIYAASTLDSGVPKRFSDSRSGSDYTLTISSLQPEDFATYYCLQYTSYPFTFGSGTKLEIK

SEQ ID NO: 17432 - protein, 11 aa, synthetic construct
  source 1..11: note = Description of Artificial Sequence: Synthetic peptide; note = XENP019381 vlCDR1
RASQEISGYLS

SEQ ID NO: 17433 - protein, 7 aa, synthetic construct
  source 1..7: note = Description of Artificial Sequence: Synthetic peptide; note = XENP019381 vlCDR2
AASTLDS

SEQ ID NO: 17434 - protein, 9 aa, synthetic construct
  source 1..9: note = Description of Artificial Sequence: Synthetic peptide; note = XENP019381 vlCDR3
LQYTSYPFT

SEQ ID NO: 17435 - protein, 449 aa, synthetic construct
  source 1..449: note = Description of Artificial Sequence: Synthetic polypeptide; note = XENP019382 4C8_H1L1_IgG1_PVA_/S267K Heavy Chain
QVQLVQSGAEVKKPGASVKVSCKASGYTFTDYNMHWVRQAPGQSLEWMGYIYPYTGGTGYNQKFQGRVTMTVDNSISTAYMELSRLRSDDTAVYYCARSDDGYSYAMDYWGQGTLVTVSSASTKGPSVFPLAPSSKSTSGGTAALGCLVKDYFPEPVTVSWNSGALTSGVHTFPAVLQSSGLYSLSSVVTVPSSSLGTQTYICNVNHKPSDTKVDKKVEPKSCDKTHTCPPCPAPPVAGPSVFLFPPKPKDTLMISRTPEVTCVVVDVKHEDPEVKFNWYVDGVEVHNAKTKPREEEYNSTYRVVSVLTVLHQDWLNGKEYKCKVSNKALPAPIEKTISKAKGQPREPQVYTLPPSREEMTKNQVSLTCDVSGFYPSDIAVEWESDGQPENNYKTTPPVLDSDGSFFLYSKLTVDKSRWEQGDVFSCSVMHEALHNHYTQKSLSLSPGK

SEQ ID NO: 17436 - protein, 120 aa, synthetic construct
  source 1..120: note = Description of Artificial Sequence: Synthetic polypeptide; note = VH of XENP019382
QVQLVQSGAEVKKPGASVKVSCKASGYTFTDYNMHWVRQAPGQSLEWMGYIYPYTGGTGYNQKFQGRVTMTVDNSISTAYMELSRLRSDDTAVYYCARSDDGYSYAMDYWGQGTLVTVSS

SEQ ID NO: 17437 - protein, 5 aa, synthetic construct
  source 1..5: note = Description of Artificial Sequence: Synthetic peptide; note = XENP019382 vhCDR1
DYNMH

SEQ ID NO: 17438 - protein, 17 aa, synthetic construct
  source 1..17: note = Description of Artificial Sequence: Synthetic peptide; note = XENP019382 vhCDR2
YIYPYTGGTGYNQKFQG

SEQ ID NO: 17439 - protein, 11 aa, synthetic construct
  source 1..11: note = Description of Artificial Sequence: Synthetic peptide; note = XENP019382 vhCDR3
SDDGYSYAMDY

SEQ ID NO: 17440 - protein, 213 aa, synthetic construct
  source 1..213: note = Description of Artificial Sequence: Synthetic polypeptide; note = XENP019382 4C8_H1L1_IgG1_PVA_/S267K Light Chain
DIQMTQSPSSLSASVGDRVTITCQASQDISNYLNWYQQKPGKTVKLLIYYTSRLHSGVPSRFSGSGSGTDYTFTISSLQPEDIATYFCQQGNTLWTFGGGTKVEIKRTVAAPSVFIFPPSDEQLKSGTASVVCLLNNFYPREAKVQWKVDNALQSGNSQESVTEQDSKDSTYSLSSTLTLSKADYEKHKVYACEVTHQGLSSPVTKSFNRGEC

SEQ ID NO: 17441 - protein, 106 aa, synthetic construct
  source 1..106: note = Description of Artificial Sequence: Synthetic polypeptide; note = VL of XENP019382
DIQMTQSPSSLSASVGDRVTITCQASQDISNYLNWYQQKPGKTVKLLIYYTSRLHSGVPSRFSGSGSGTDYTFTISSLQPEDIATYFCQQGNTLWTFGGGTKVEIK

SEQ ID NO: 17442 - protein, 11 aa, synthetic construct
  source 1..11: note = Description of Artificial Sequence: Synthetic peptide; note = XENP019382 vlCDR1
QASQDISNYLN

SEQ ID NO: 17443 - protein, 7 aa, synthetic construct
  source 1..7: note = Description of Artificial Sequence: Synthetic peptide; note = XENP019382 vlCDR2
YTSRLHS

SEQ ID NO: 17444 - protein, 8 aa, synthetic construct
  source 1..8: note = Description of Artificial Sequence: Synthetic peptide; note = XENP019382 vlCDR3
QQGNTLWT

SEQ ID NO: 17445 - protein, 445 aa, synthetic construct
  source 1..445: note = Description of Artificial Sequence: Synthetic polypeptide; note = XENP019383 7A6_H0L0_IgG1_PVA_/S267K Heavy Chain
DVQLQESGPGLVKPSQSLSLTCSVTGYSITSGYFWNWIRQFPGNKLEWMGYISYDSNYYNPSLKNRISITRDTSKNQFFLKLNSVTTEDTATYYCARGGITTFDYWGQGTTLTVSSASTKGPSVFPLAPSSKSTSGGTAALGCLVKDYFPEPVTVSWNSGALTSGVHTFPAVLQSSGLYSLSSVVTVPSSSLGTQTYICNVNHKPSDTKVDKKVEPKSCDKTHTCPPCPAPPVAGPSVFLFPPKPKDTLMISRTPEVTCVVVDVKHEDPEVKFNWYVDGVEVHNAKTKPREEEYNSTYRVVSVLTVLHQDWLNGKEYKCKVSNKALPAPIEKTISKAKGQPREPQVYTLPPSREEMTKNQVSLTCDVSGFYPSDIAVEWESDGQPENNYKTTPPVLDSDGSFFLYSKLTVDKSRWEQGDVFSCSVMHEALHNHYTQKSLSLSPGK

SEQ ID NO: 17446 - protein, 116 aa, synthetic construct
  source 1..116: note = Description of Artificial Sequence: Synthetic polypeptide; note = VH of XENP019383
DVQLQESGPGLVKPSQSLSLTCSVTGYSITSGYFWNWIRQFPGNKLEWMGYISYDSNYYNPSLKNRISITRDTSKNQFFLKLNSVTTEDTATYYCARGGITTFDYWGQGTTLTVSS

SEQ ID NO: 17447 - protein, 6 aa, synthetic construct
  source 1..6: note = Description of Artificial Sequence: Synthetic peptide; note = XENP019383 vhCDR1
SGYFWN

SEQ ID NO: 17448 - protein, 15 aa, synthetic construct
  source 1..15: note = Description of Artificial Sequence: Synthetic peptide; note = XENP019383 vhCDR2
YISYDSNYYNPSLKN

SEQ ID NO: 17449 - protein, 8 aa, synthetic construct
  source 1..8: note = Description of Artificial Sequence: Synthetic peptide; note = XENP019383 vhCDR3
GGITTFDY

SEQ ID NO: 17450 - protein, 218 aa, synthetic construct
  source 1..218: note = Description of Artificial Sequence: Synthetic polypeptide; note = XENP019383 7A6_H0L0_IgG1_PVA_/S267K Light Chain
DIVLTQSPASLAVSLGQRATISCKASQSVDYDGDSYMNWYQQKPGQPPKLLIYAASNLESGIPARFSGSGSGTDFTLNIHPVEEEDAATYYCQQSNEDPRTFGGGTKLEIKRTVAAPSVFIFPPSDEQLKSGTASVVCLLNNFYPREAKVQWKVDNALQSGNSQESVTEQDSKDSTYSLSSTLTLSKADYEKHKVYACEVTHQGLSSPVTKSFNRGEC

SEQ ID NO: 17451 - protein, 111 aa, synthetic construct
  source 1..111: note = Description of Artificial Sequence: Synthetic polypeptide; note = VL of XENP019383
DIVLTQSPASLAVSLGQRATISCKASQSVDYDGDSYMNWYQQKPGQPPKLLIYAASNLESGIPARFSGSGSGTDFTLNIHPVEEEDAATYYCQQSNEDPRTFGGGTKLEIK

SEQ ID NO: 17452 - protein, 15 aa, synthetic construct
  source 1..15: note = Description of Artificial Sequence: Synthetic peptide; note = XENP019383 vlCDR1
KASQSVDYDGDSYMN

SEQ ID NO: 17453 - protein, 7 aa, synthetic construct
  source 1..7: note = Description of Artificial Sequence: Synthetic peptide; note = XENP019383 vlCDR2
AASNLES

SEQ ID NO: 17454 - protein, 9 aa, synthetic construct
  source 1..9: note = Description of Artificial Sequence: Synthetic peptide; note = XENP019383 vlCDR3
QQSNEDPRT

SEQ ID NO: 17455 - protein, 445 aa, synthetic construct
  source 1..445: note = Description of Artificial Sequence: Synthetic polypeptide; note = XENP019384 7A6_H1L1_IgG1_PVA_/S267K Heavy Chain
QVQLVESGGGVVQPGRSLRLSCAVSGYSITSGYFWNWIRQAPGKKLEWVAYISYDSNYYNPSVKGRFTISRDTSKNTFYLQMNSLRAEDTAVYYCARGGITTFDYWGQGTLVTVSSASTKGPSVFPLAPSSKSTSGGTAALGCLVKDYFPEPVTVSWNSGALTSGVHTFPAVLQSSGLYSLSSVVTVPSSSLGTQTYICNVNHKPSDTKVDKKVEPKSCDKTHTCPPCPAPPVAGPSVFLFPPKPKDTLMISRTPEVTCVVVDVKHEDPEVKFNWYVDGVEVHNAKTKPREEEYNSTYRVVSVLTVLHQDWLNGKEYKCKVSNKALPAPIEKTISKAKGQPREPQVYTLPPSREEMTKNQVSLTCDVSGFYPSDIAVEWESDGQPENNYKTTPPVLDSDGSFFLYSKLTVDKSRWEQGDVFSCSVMHEALHNHYTQKSLSLSPGK

SEQ ID NO: 17456 - protein, 116 aa, synthetic construct
  source 1..116: note = Description of Artificial Sequence: Synthetic polypeptide; note = VH of XENP019384
QVQLVESGGGVVQPGRSLRLSCAVSGYSITSGYFWNWIRQAPGKKLEWVAYISYDSNYYNPSVKGRFTISRDTSKNTFYLQMNSLRAEDTAVYYCARGGITTFDYWGQGTLVTVSS

SEQ ID NO: 17457 - protein, 6 aa, synthetic construct
  source 1..6: note = Description of Artificial Sequence: Synthetic peptide; note = XENP019384 vhCDR1
SGYFWN

SEQ ID NO: 17458 - protein, 15 aa, synthetic construct
  source 1..15: note = Description of Artificial Sequence: Synthetic peptide; note = XENP019384 vhCDR2
YISYDSNYYNPSVKG

SEQ ID NO: 17459 - protein, 8 aa, synthetic construct
  source 1..8: note = Description of Artificial Sequence: Synthetic peptide; note = XENP019384 vhCDR3
GGITTFDY

SEQ ID NO: 17460 - protein, 218 aa, synthetic construct
  source 1..218: note = Description of Artificial Sequence: Synthetic polypeptide; note = XENP019384 7A6_H1L1_IgG1_PVA_/S267K Light Chain
DIVLTQSPSSLSASVGDRVTITCRASQSVDYDGDSYMNWYQQKPGKPPKLLIYAASNLESGIPARFSGSGSGTDFTLTISSLQPEDFATYYCQQSNEDPRTFGGGTKVEIKRTVAAPSVFIFPPSDEQLKSGTASVVCLLNNFYPREAKVQWKVDNALQSGNSQESVTEQDSKDSTYSLSSTLTLSKADYEKHKVYACEVTHQGLSSPVTKSFNRGEC

SEQ ID NO: 17461 - protein, 111 aa, synthetic construct
  source 1..111: note = Description of Artificial Sequence: Synthetic polypeptide; note = VL of XENP019384
DIVLTQSPSSLSASVGDRVTITCRASQSVDYDGDSYMNWYQQKPGKPPKLLIYAASNLESGIPARFSGSGSGTDFTLTISSLQPEDFATYYCQQSNEDPRTFGGGTKVEIK

SEQ ID NO: 17462 - protein, 15 aa, synthetic construct
  source 1..15: note = Description of Artificial Sequence: Synthetic peptide; note = XENP019384 vlCDR1
RASQSVDYDGDSYMN

SEQ ID NO: 17463 - protein, 7 aa, synthetic construct
  source 1..7: note = Description of Artificial Sequence: Synthetic peptide; note = XENP019384 vlCDR2
AASNLES

SEQ ID NO: 17464 - protein, 9 aa, synthetic construct
  source 1..9: note = Description of Artificial Sequence: Synthetic peptide; note = XENP019384 vlCDR3
QQSNEDPRT

SEQ ID NO: 17465 - protein, 445 aa, synthetic construct; identical to SEQ ID NO: 17455
  source 1..445: note = Description of Artificial Sequence: Synthetic polypeptide; note = XENP019385 7A6_H1L2_IgG1_PVA_/S267K Heavy Chain

SEQ ID NO: 17466 - protein, 116 aa, synthetic construct; identical to SEQ ID NO: 17456
  source 1..116: note = Description of Artificial Sequence: Synthetic polypeptide; note = VH of XENP019385

SEQ ID NO: 17467 - protein, 6 aa, synthetic construct
  source 1..6: note = Description of Artificial Sequence: Synthetic peptide; note = XENP019385 vhCDR1
SGYFWN

SEQ ID NO: 17468 - protein, 15 aa, synthetic construct
  source 1..15: note = Description of Artificial Sequence: Synthetic peptide; note = XENP019385 vhCDR2
YISYDSNYYNPSVKG

SEQ ID NO: 17469 - protein, 8 aa, synthetic construct
  source 1..8: note = Description of Artificial Sequence: Synthetic peptide; note = XENP019385 vhCDR3
GGITTFDY

SEQ ID NO: 17470 - protein, 218 aa, synthetic construct; identical to SEQ ID NO: 17320
  source 1..218: note = Description of Artificial Sequence: Synthetic polypeptide; note = XENP019385 7A6_H1L2_IgG1_PVA_/S267K Light Chain

SEQ ID NO: 17471 - protein, 111 aa, synthetic construct; identical to SEQ ID NO: 17321
  source 1..111: note = Description of Artificial Sequence: Synthetic polypeptide; note = VL of XENP019385

SEQ ID NO: 17472 - protein, 15 aa, synthetic construct
  source 1..15: note = Description of Artificial Sequence: Synthetic peptide; note = XENP019385 vlCDR1
RASQSVDYDGDSYMN

SEQ ID NO: 17473 - protein, 7 aa, synthetic construct
  source 1..7: note = Description of Artificial Sequence: Synthetic peptide; note = XENP019385 vlCDR2
AASNLES

SEQ ID NO: 17474 - protein, 9 aa, synthetic construct
  source 1..9: note = Description of Artificial Sequence: Synthetic peptide; note = XENP019385 vlCDR3
QQSNEDPRT

SEQ ID NO: 17475 - protein, 445 aa, synthetic construct; identical to SEQ ID NO: 17455
  source 1..445: note = Description of Artificial Sequence: Synthetic polypeptide; note = XENP019386 7A6_H1L3_IgG1_PVA_/S267K Heavy Chain

SEQ ID NO: 17476 - protein, 116 aa, synthetic construct; identical to SEQ ID NO: 17456
  source 1..116: note = Description of Artificial Sequence: Synthetic polypeptide; note = VH of XENP019386

SEQ ID NO: 17477 - protein, 6 aa, synthetic construct
  source 1..6: note = Description of Artificial Sequence: Synthetic peptide; note = XENP019386 vhCDR1
SGYFWN

SEQ ID NO: 17478 - protein, 15 aa, synthetic construct
  source 1..15: note = Description of Artificial Sequence: Synthetic peptide; note = XENP019386 vhCDR2
YISYDSNYYNPSVKG

SEQ ID NO: 17479 - protein, 8 aa, synthetic construct
  source 1..8: note = Description of Artificial Sequence: Synthetic peptide; note = XENP019386 vhCDR3
GGITTFDY

SEQ ID NO: 17480 - protein, 218 aa, synthetic construct
  source 1..218: note = Description of Artificial Sequence: Synthetic polypeptide; note = XENP019386 7A6_H1L3_IgG1_PVA_/S267K Light Chain
DIVLTQSPDSLAVSLGERATINCKASQSVDYDGDSYMNWYQQKPGQPPKLLIYAASNLESGIPARFSGSGSGTDFTLTISSLQAEDVAVYYCQQSNEDPRTFGGGTKVEIKRTVAAPSVFIFPPSDEQLKSGTASVVCLLNNFYPREAKVQWKVDNALQSGNSQESVTEQDSKDSTYSLSSTLTLSKADYEKHKVYACEVTHQGLSSPVTKSFNRGEC

SEQ ID NO: 17481 - protein, 111 aa, synthetic construct
  source 1..111: note = Description of Artificial Sequence: Synthetic polypeptide; note = VL of XENP019386
DIVLTQSPDSLAVSLGERATINCKASQSVDYDGDSYMNWYQQKPGQPPKLLIYAASNLESGIPARFSGSGSGTDFTLTISSLQAEDVAVYYCQQSNEDPRTFGGGTKVEIK

SEQ ID NO: 17482 - protein, 15 aa, synthetic construct
  source 1..15: note = Description of Artificial Sequence: Synthetic peptide; note = XENP019386 vlCDR1
KASQSVDYDGDSYMN

SEQ ID NO: 17483 - protein, 7 aa, synthetic construct
  source 1..7: note = Description of Artificial Sequence: Synthetic peptide; note = XENP019386 vlCDR2
AASNLES

SEQ ID NO: 17484 - protein, 9 aa, synthetic construct
  source 1..9: note = Description of Artificial Sequence: Synthetic peptide; note = XENP019386 vlCDR3
QQSNEDPRT

SEQ ID NO: 17485 - protein, 445 aa, synthetic construct
  source 1..445: note = Description of Artificial Sequence: Synthetic polypeptide; note = XENP019387 7A6_H2L1_IgG1_PVA_/S267K Heavy Chain
QVQLQESGPGLVKPSQTLSLTCTVSGYSITSGYFWNWIRQHPGKKLEWIGYISYDSNYYNPSLKSLVTISRDTSKNQFSLKLSSVTAADTAVYYCARGGITTFDYWGQGTLVTVSSASTKGPSVFPLAPSSKSTSGGTAALGCLVKDYFPEPVTVSWNSGALTSGVHTFPAVLQSSGLYSLSSVVTVPSSSLGTQTYICNVNHKPSDTKVDKKVEPKSCDKTHTCPPCPAPPVAGPSVFLFPPKPKDTLMISRTPEVTCVVVDVKHEDPEVKFNWYVDGVEVHNAKTKPREEEYNSTYRVVSVLTVLHQDWLNGKEYKCKVSNKALPAPIEKTISKAKGQPREPQVYTLPPSREEMTKNQVSLTCDVSGFYPSDIAVEWESDGQPENNYKTTPPVLDSDGSFFLYSKLTVDKSRWEQGDVFSCSVMHEALHNHYTQKSLSLSPGK

SEQ ID NO: 17486 - protein, 116 aa, synthetic construct
  source 1..116: note = Description of Artificial Sequence: Synthetic polypeptide; note = VH of XENP019387
QVQLQESGPGLVKPSQTLSLTCTVSGYSITSGYFWNWIRQHPGKKLEWIGYISYDSNYYNPSLKSLVTISRDTSKNQFSLKLSSVTAADTAVYYCARGGITTFDYWGQGTLVTVSS

SEQ ID NO: 17487 - protein, 6 aa, synthetic construct
  source 1..6: note = Description of Artificial Sequence: Synthetic peptide; note = XENP019387 vhCDR1
SGYFWN

SEQ ID NO: 17488 - protein, 15 aa, synthetic construct
  source 1..15: note = Description of Artificial Sequence: Synthetic peptide; note = XENP019387 vhCDR2
YISYDSNYYNPSLKS

SEQ ID NO: 17489 - protein, 8 aa, synthetic construct
  source 1..8: note = Description of Artificial Sequence: Synthetic peptide; note = XENP019387 vhCDR3
GGITTFDY

SEQ ID NO: 17490 - protein, 218 aa, synthetic construct; identical to SEQ ID NO: 17460
  source 1..218: note = Description of Artificial Sequence: Synthetic polypeptide; note = XENP019387 7A6_H2L1_IgG1_PVA_/S267K Light Chain

SEQ ID NO: 17491 - protein, 111 aa, synthetic construct; identical to SEQ ID NO: 17461
  source 1..111: note = Description of Artificial Sequence: Synthetic polypeptide; note = VL of XENP019387

SEQ ID NO: 17492 - protein, 15 aa, synthetic construct
  source 1..15: note = Description of Artificial Sequence: Synthetic peptide; note = XENP019387 vlCDR1
RASQSVDYDGDSYMN

SEQ ID NO: 17493 - protein, 7 aa, synthetic construct
  source 1..7: note = Description of Artificial Sequence: Synthetic peptide; note = XENP019387 vlCDR2
AASNLES

SEQ ID NO: 17494 - protein, 9 aa, synthetic construct
  source 1..9: note = Description of Artificial Sequence: Synthetic peptide; note = XENP019387 vlCDR3
QQSNEDPRT

SEQ ID NO: 17495 - protein, 445 aa, synthetic construct; identical to SEQ ID NO: 17485
  source 1..445: note = Description of Artificial Sequence: Synthetic polypeptide; note = XENP019388 7A6_H2L2_IgG1_PVA_/S267K Heavy Chain

SEQ ID NO: 17496 - protein, 116 aa, synthetic construct; identical to SEQ ID NO: 17486
  source 1..116: note = Description of Artificial Sequence: Synthetic polypeptide; note = VH of XENP019388

SEQ ID NO: 17497 - protein, 6 aa, synthetic construct
  source 1..6: note = Description of Artificial Sequence: Synthetic peptide; note = XENP019388 vhCDR1
SGYFWN

SEQ ID NO: 17498 - protein, 15 aa, synthetic construct
  source 1..15: note = Description of Artificial Sequence: Synthetic peptide; note = XENP019388 vhCDR2
YISYDSNYYNPSLKS

SEQ ID NO: 17499 - protein, 8 aa, synthetic construct
  source 1..8: note = Description of Artificial Sequence: Synthetic peptide; note = XENP019388 vhCDR3
GGITTFDY

SEQ ID NO: 17500 - protein, 218 aa, synthetic construct; identical to SEQ ID NO: 17320
  source 1..218: note = Description of Artificial Sequence: Synthetic polypeptide; note = XENP019388 7A6_H2L2_IgG1_PVA_/S267K Light Chain

SEQ ID NO: 17501 - protein, 111 aa, synthetic construct; identical to SEQ ID NO: 17321
  source 1..111: note = Description of Artificial Sequence: Synthetic polypeptide; note = VL of XENP019388

SEQ ID NO: 17502 - protein, 15 aa, synthetic construct
  source 1..15: note = Description of Artificial Sequence: Synthetic peptide; note = XENP019388 vlCDR1
RASQSVDYDGDSYMN

SEQ ID NO: 17503 - protein, 7 aa, synthetic construct
  source 1..7: note = Description of Artificial Sequence: Synthetic peptide; note = XENP019388 vlCDR2
AASNLES

SEQ ID NO: 17504 - protein, 9 aa, synthetic construct
  source 1..9: note = Description of Artificial Sequence: Synthetic peptide; note = XENP019388 vlCDR3
QQSNEDPRT

SEQ ID NO: 17505 - protein, 445 aa, synthetic construct; identical to SEQ ID NO: 17485
  source 1..445: note = Description of Artificial Sequence: Synthetic polypeptide; note = XENP019389 7A6_H2L3_IgG1_PVA_/S267K Heavy Chain

SEQ ID NO: 17506 - protein, 116 aa, synthetic construct; identical to SEQ ID NO: 17486
  source 1..116: note = Description of Artificial Sequence: Synthetic polypeptide; note = VH of XENP019389

SEQ ID NO: 17507 - protein, 6 aa, synthetic construct
  source 1..6: note = Description of Artificial Sequence: Synthetic peptide; note = XENP019389 vhCDR1
SGYFWN

SEQ ID NO: 17508 - protein, 15 aa, synthetic construct
  source 1..15: note = Description of Artificial Sequence: Synthetic peptide; note = XENP019389 vhCDR2
YISYDSNYYNPSLKS

SEQ ID NO: 17509 - protein, 8 aa, synthetic construct
  source 1..8: note = Description of Artificial Sequence: Synthetic peptide; note = XENP019389 vhCDR3
GGITTFDY

SEQ ID NO: 17510 - protein, 218 aa, synthetic construct; identical to SEQ ID NO: 17480
  source 1..218: note = Description of Artificial Sequence: Synthetic polypeptide; note = XENP019389 7A6_H2L3_IgG1_PVA_/S267K Light Chain

SEQ ID NO: 17511 - protein, 111 aa, synthetic construct; identical to SEQ ID NO: 17481
  source 1..111: note = Description of Artificial Sequence: Synthetic polypeptide; note = VL of XENP019389

SEQ ID NO: 17512 - protein, 15 aa, synthetic construct
  source 1..15: note = Description of Artificial Sequence: Synthetic peptide; note = XENP019389 vlCDR1
KASQSVDYDGDSYMN

SEQ ID NO: 17513 - protein, 7 aa, synthetic construct
  source 1..7: note = Description of Artificial Sequence: Synthetic peptide; note = XENP019389 vlCDR2
AASNLES

SEQ ID NO: 17514 - protein, 9 aa, synthetic construct
  source 1..9: note = Description of Artificial Sequence: Synthetic peptide; note = XENP019389 vlCDR3
QQSNEDPRT

SEQ ID NO: 17515 - protein, 445 aa, synthetic construct
  source 1..445: note = Description of Artificial Sequence: Synthetic polypeptide; note = XENP019390 7A6_H3L1_IgG1_PVA_/S267K Heavy Chain
QVQLQQSGPGLVKPSQTLSLTCAVSGYSITSGYFWNWIRQSPSRKLEWLGYISYDSNYYNPSVKSRITINRDTSKNQFSLQLNSVTPEDTAVYYCARGGITTFDYWGQGTLVTVSSASTKGPSVFPLAPSSKSTSGGTAALGCLVKDYFPEPVTVSWNSGALTSGVHTFPAVLQSSGLYSLSSVVTVPSSSLGTQTYICNVNHKPSDTKVDKKVEPKSCDKTHTCPPCPAPPVAGPSVFLFPPKPKDTLMISRTPEVTCVVVDVKHEDPEVKFNWYVDGVEVHNAKTKPREEEYNSTYRVVSVLTVLHQDWLNGKEYKCKVSNKALPAPIEKTISKAKGQPREPQVYTLPPSREEMTKNQVSLTCDVSGFYPSDIAVEWESDGQPENNYKTTPPVLDSDGSFFLYSKLTVDKSRWEQGDVFSCSVMHEALHNHYTQKSLSLSPGK

SEQ ID NO: 17516 - protein, 116 aa, synthetic construct
  source 1..116: note = Description of Artificial Sequence: Synthetic polypeptide; note = VH of XENP019390
QVQLQQSGPGLVKPSQTLSLTCAVSGYSITSGYFWNWIRQSPSRKLEWLGYISYDSNYYNPSVKSRITINRDTSKNQFSLQLNSVTPEDTAVYYCARGGITTFDYWGQGTLVTVSS

SEQ ID NO: 17517 - protein, 6 aa, synthetic construct
  source 1..6: note = Description of Artificial Sequence: Synthetic peptide; note = XENP019390 vhCDR1
SGYFWN

SEQ ID NO: 17518 - protein, 15 aa, synthetic construct
  source 1..15: note = Description of Artificial Sequence: Synthetic peptide; note = XENP019390 vhCDR2
YISYDSNYYNPSVKS

SEQ ID NO: 17519 - protein, 8 aa, synthetic construct
  source 1..8: note = Description of Artificial Sequence: Synthetic peptide; note = XENP019390 vhCDR3
GGITTFDY

SEQ ID NO: 17520 - protein, 218 aa, synthetic construct; identical to SEQ ID NO: 17460
  source 1..218: note = Description of Artificial Sequence: Synthetic polypeptide; note = XENP019390 7A6_H3L1_IgG1_PVA_/S267K Light Chain

SEQ ID NO: 17521 - protein, 111 aa, synthetic construct; identical to SEQ ID NO: 17461
  source 1..111: note = Description of Artificial Sequence: Synthetic polypeptide; note = VL of XENP019390

SEQ ID NO: 17522 - protein, 15 aa, synthetic construct
  source 1..15: note = Description of Artificial Sequence: Synthetic peptide; note = XENP019390 vlCDR1
RASQSVDYDGDSYMN

SEQ ID NO: 17523 - protein, 7 aa, synthetic construct
  source 1..7: note = Description of Artificial Sequence: Synthetic peptide; note = XENP019390 vlCDR2
AASNLES

SEQ ID NO: 17524 - protein, 9 aa, synthetic construct
  source 1..9: note = Description of Artificial Sequence: Synthetic peptide; note = XENP019390 vlCDR3
QQSNEDPRT

SEQ ID NO: 17525 - protein, 445 aa, synthetic construct; identical to SEQ ID NO: 17515
  source 1..445: note = Description of Artificial Sequence: Synthetic polypeptide; note = XENP019391 7A6_H3L2_IgG1_PVA_/S267K Heavy Chain

SEQ ID NO: 17526 - protein, 116 aa, synthetic construct; identical to SEQ ID NO: 17516
  source 1..116: note = Description of Artificial Sequence: Synthetic polypeptide; note = VH of XENP019391

SEQ ID NO: 17527 - protein, 6 aa, synthetic construct
  source 1..6: note = Description of Artificial Sequence: Synthetic peptide; note = XENP019391 vhCDR1
SGYFWN

SEQ ID NO: 17528 - protein, 15 aa, synthetic construct
  source 1..15: note = Description of Artificial Sequence: Synthetic peptide; note = XENP019391 vhCDR2
YISYDSNYYNPSVKS

SEQ ID NO: 17529 - protein, 8 aa, synthetic construct
  source 1..8: note = Description of Artificial Sequence: Synthetic peptide; note = XENP019391 vhCDR3
GGITTFDY

SEQ ID NO: 17530 - protein, 218 aa, synthetic construct; identical to SEQ ID NO: 17320
  source 1..218: note = Description of Artificial Sequence: Synthetic polypeptide; note = XENP019391 7A6_H3L2_IgG1_PVA_/S267K Light Chain

SEQ ID NO: 17531 - protein, 111 aa, synthetic construct; identical to SEQ ID NO: 17321
  source 1..111: note = Description of Artificial Sequence: Synthetic polypeptide; note = VL of XENP019391

SEQ ID NO: 17532 - protein, 15 aa, synthetic construct
  source 1..15: note = Description of Artificial Sequence: Synthetic peptide; note = XENP019391 vlCDR1
RASQSVDYDGDSYMN

SEQ ID NO: 17533 - protein, 7 aa, synthetic construct
  source 1..7: note = Description of Artificial Sequence: Synthetic peptide; note = XENP019391 vlCDR2
AASNLES

SEQ ID NO: 17534 - protein, 9 aa, synthetic construct
  source 1..9: note = Description of Artificial Sequence: Synthetic peptide; note = XENP019391 vlCDR3
QQSNEDPRT

SEQ ID NO: 17535 - protein, 445 aa, synthetic construct; identical to SEQ ID NO: 17515
  source 1..445: note = Description of Artificial Sequence: Synthetic polypeptide; note = XENP019392 7A6_H3L3_IgG1_PVA_/S267K Heavy Chain

SEQ ID NO: 17536 - protein, 116 aa, synthetic construct; identical to SEQ ID NO: 17516
  source 1..116: note = Description of Artificial Sequence: Synthetic polypeptide; note = VH of XENP019392

SEQ ID NO: 17537 - protein, 6 aa, synthetic construct
  source 1..6: note = Description of Artificial Sequence: Synthetic peptide; note = XENP019392 vhCDR1
SGYFWN

SEQ ID NO: 17538 - protein, 15 aa, synthetic construct
  source 1..15: note = Description of Artificial Sequence: Synthetic peptide; note = XENP019392 vhCDR2
YISYDSNYYNPSVKS

SEQ ID NO: 17539 - protein, 8 aa, synthetic construct
  source 1..8: note = Description of Artificial Sequence: Synthetic peptide; note = XENP019392 vhCDR3
GGITTFDY

SEQ ID NO: 17540 - protein, 218 aa, synthetic construct; identical to SEQ ID NO: 17480
  source 1..218: note = Description of Artificial Sequence: Synthetic polypeptide; note = XENP019392 7A6_H3L3_IgG1_PVA_/S267K Light Chain

SEQ ID NO: 17541 - protein, 111 aa, synthetic construct; identical to SEQ ID NO: 17481
  source 1..111: note = Description of Artificial Sequence: Synthetic polypeptide; note = VL of XENP019392

SEQ ID NO: 17542 - protein, 15 aa, synthetic construct
  source 1..15: note = Description of Artificial Sequence: Synthetic peptide; note = XENP019392 vlCDR1
KASQSVDYDGDSYMN

SEQ ID NO: 17543 - protein, 7 aa, synthetic construct
  source 1..7: note = Description of Artificial Sequence: Synthetic peptide; note = XENP019392 vlCDR2
AASNLES

SEQ ID NO: 17544 - protein, 9 aa, synthetic construct
  source 1..9: note = Description of Artificial Sequence: Synthetic peptide; note = XENP019392 vlCDR3
QQSNEDPRT

SEQ ID NO: 17545 - protein, 447 aa, synthetic construct
  source 1..447: note = Description of Artificial Sequence: Synthetic polypeptide; note = XENP019393 11B2_H1_1H11_L1_IgG1_PVA_/S267K Heavy Chain
QIQLVQSGSELKKPGASVKVSCKTSGYTFTNYGMNWVRQAPGQGLEWMGWINTYTGEPTYADGFTGRFVFSLDTSVSTAYLQISSLKAEDTAVYFCARGRGMGYFDYWGQGTLVTVSSASTKGPSVFPLAPSSKSTSGGTAALGCLVKDYFPEPVTVSWNSGALTSGVHTFPAVLQSSGLYSLSSVVTVPSSSLGTQTYICNVNHKPSDTKVDKKVEPKSCDKTHTCPPCPAPPVAGPSVFLFPPKPKDTLMISRTPEVTCVVVDVKHEDPEVKFNWYVDGVEVHNAKTKPREEEYNSTYRVVSVLTVLHQDWLNGKEYKCKVSNKALPAPIEKTISKAKGQPREPQVYTLPPSREEMTKNQVSLTCDVSGFYPSDIAVEWESDGQPENNYKTTPPVLDSDGSFFLYSKLTVDKSRWEQGDVFSCSVMHEALHNHYTQKSLSLSPGK

SEQ ID NO: 17546 - protein, 118 aa, synthetic construct
  source 1..118: note = Description of Artificial Sequence: Synthetic polypeptide; note = VH of XENP019393
QIQLVQSGSELKKPGASVKVSCKTSGYTFTNYGMNWVRQAPGQGLEWMGWINTYTGEPTYADGFTGRFVFSLDTSVSTAYLQISSLKAEDTAVYFCARGRGMGYFDYWGQGTLVTVSS

SEQ ID NO: 17547 - protein, 5 aa, synthetic construct
  source 1..5: note = Description of Artificial Sequence: Synthetic peptide; note = XENP019393 vhCDR1
NYGMN

SEQ ID NO: 17548 - protein, 17 aa, synthetic construct
  source 1..17: note = Description of Artificial Sequence: Synthetic peptide; note = XENP019393 vhCDR2
WINTYTGEPTYADGFTG

SEQ ID NO: 17549 - protein, 9 aa, synthetic construct
  source 1..9: note = Description of Artificial Sequence: Synthetic peptide; note = XENP019393 vhCDR3
GRGMGYFDY

SEQ ID NO: 17550 - protein, 214 aa, synthetic construct; identical to SEQ ID NO: 17160
  source 1..214: note = Description of Artificial Sequence: Synthetic polypeptide; note = XENP019393 11B2_H1_1H11_L1_IgG1_PVA_/S267K Light Chain

SEQ ID NO: 17551 - protein, 107 aa, synthetic construct; identical to SEQ ID NO: 17161
  source 1..107: note = Description of Artificial Sequence: Synthetic polypeptide; note = VL of XENP019393

SEQ ID NO: 17552 - protein, 11 aa, synthetic construct
  source 1..11: note = Description of Artificial Sequence: Synthetic peptide; note = XENP019393 vlCDR1
RASENIYSNLA

SEQ ID NO: 17553 - protein, 7 aa, synthetic construct
  source 1..7: note = Description of Artificial Sequence: Synthetic peptide; note = XENP019393 vlCDR2
AATNLAD

SEQ ID NO: 17554 - protein, 9 aa, synthetic construct
  source 1..9: note = Description of Artificial Sequence: Synthetic peptide; note = XENP019393 vlCDR3
QHFWTTPRT

SEQ ID NO: 17555 - protein, 447 aa, synthetic construct
  source 1..447: note = Description of Artificial Sequence: Synthetic polypeptide; note = XENP019394 2D4_H1L1_IgG1_PVA_/S267K Heavy Chain
QIQLVQSGSELKKPGASVKVSCKASGYTFTNYGMNWVRQAPGQGLEWMGWINTYTGEPTYADGFTGRFVFSLDTSVSTAYLQISSLKAEDTAVYFCARGRGTGYFDNWGQGTLVTVSSASTKGPSVFPLAPSSKSTSGGTAALGCLVKDYFPEPVTVSWNSGALTSGVHTFPAVLQSSGLYSLSSVVTVPSSSLGTQTYICNVNHKPSDTKVDKKVEPKSCDKTHTCPPCPAPPVAGPSVFLFPPKPKDTLMISRTPEVTCVVVDVKHEDPEVKFNWYVDGVEVHNAKTKPREEEYNSTYRVVSVLTVLHQDWLNGKEYKCKVSNKALPAPIEKTISKAKGQPREPQVYTLPPSREEMTKNQVSLTCDVSGFYPSDIAVEWESDGQPENNYKTTPPVLDSDGSFFLYSKLTVDKSRWEQGDVFSCSVMHEALHNHYTQKSLSLSPGK

SEQ ID NO: 17556 - protein, 118 aa, synthetic construct
  source 1..118: note = Description of Artificial Sequence: Synthetic polypeptide; note = VH of XENP019394
QIQLVQSGSELKKPGASVKVSCKASGYTFTNYGMNWVRQAPGQGLEWMGWINTYTGEPTYADGFTGRFVFSLDTSVSTAYLQISSLKAEDTAVYFCARGRGTGYFDNWGQGTLVTVSS

SEQ ID NO: 17557 - protein, 5 aa, synthetic construct
  source 1..5: note = Description of Artificial Sequence: Synthetic peptide; note = XENP019394 vhCDR1
NYGMN

SEQ ID NO: 17558 - protein, 17 aa, synthetic construct
  source 1..17: note = Description of Artificial Sequence: Synthetic peptide; note = XENP019394 vhCDR2
WINTYTGEPTYADGFTG

SEQ ID NO: 17559 - protein, 9 aa, synthetic construct
  source 1..9: note = Description of Artificial Sequence: Synthetic peptide; note = XENP019394 vhCDR3
GRGTGYFDN

SEQ ID NO: 17560 - protein, 214 aa, synthetic construct
  source 1..214: note = Description of Artificial Sequence: Synthetic polypeptide; note = XENP019394 2D4_H1L1_IgG1_PVA_/S267K Light Chain
DIQMTQSPSSLSASVGDRVTITCRASENIYSNLAWYQQKPGKSPKLLVYAATNLADGVPSRFSGSGSGTDYTLTISSLQPEDFATYYCQHFWVTPRTFGGGTKVEIKRTVAAPSVFIFPPSDEQLKSGTASVVCLLNNFYPREAKVQWKVDNALQSGNSQESVTEQDSKDSTYSLSSTLTLSKADYEKHKVYACEVTHQGLSSPVTKSFNRGEC

SEQ ID NO: 17561 - protein, 107 aa, synthetic construct
  source 1..107: note = Description of Artificial Sequence: Synthetic polypeptide; note = VL of XENP019394
DIQMTQSPSSLSASVGDRVTITCRASENIYSNLAWYQQKPGKSPKLLVYAATNLADGVPSRFSGSGSGTDYTLTISSLQPEDFATYYCQHFWVTPRTFGGGTKVEIK

SEQ ID NO: 17562 - protein, 11 aa, synthetic construct
  source 1..11: note = Description of Artificial Sequence: Synthetic peptide; note = XENP019394 vlCDR1
RASENIYSNLA

SEQ ID NO: 17563 - protein, 7 aa, synthetic construct
  source 1..7: note = Description of Artificial Sequence: Synthetic peptide; note = XENP019394 vlCDR2
AATNLAD

SEQ ID NO: 17564 - protein, 9 aa, synthetic construct
  source 1..9: note = Description of Artificial Sequence: Synthetic peptide; note = XENP019394 vlCDR3
QHFWVTPRT

SEQ ID NO: 17565 - protein, 447 aa, synthetic construct
  source 1..447: note = Description of Artificial Sequence: Synthetic polypeptide; note = XENP019395 4H9_H1L1_IgG1_PVA_/S267K Heavy Chain
QIQLVQSGSELKKPGASVKVSCKASEYAFINYGMNWVRQAPGQGLEWMGWINTYTGEPTYADGFTGRFVFSLDTSVSTAYLQISSLKAEDTAVYFCARGRGTGYFDYWGQGTLVTVSSASTKGPSVFPLAPSSKSTSGGTAALGCLVKDYFPEPVTVSWNSGALTSGVHTFPAVLQSSGLYSLSSVVTVPSSSLGTQTYICNVNHKPSDTKVDKKVEPKSCDKTHTCPPCPAPPVAGPSVFLFPPKPKDTLMISRTPEVTCVVVDVKHEDPEVKFNWYVDGVEVHNAKTKPREEEYNSTYRVVSVLTVLHQDWLNGKEYKCKVSNKALPAPIEKTISKAKGQPREPQVYTLPPSREEMTKNQVSLTCDVSGFYPSDIAVEWESDGQPENNYKTTPPVLDSDGSFFLYSKLTVDKSRWEQGDVFSCSVMHEALHNHYTQKSLSLSPGK

SEQ ID NO: 17566 - protein, 118 aa, synthetic construct
  source 1..118: note = Description of Artificial Sequence: Synthetic polypeptide; note = VH of XENP019395
QIQLVQSGSELKKPGASVKVSCKASEYAFINYGMNWVRQAPGQGLEWMGWINTYTGEPTYADGFTGRFVFSLDTSVSTAYLQISSLKAEDTAVYFCARGRGTGYFDYWGQGTLVTVSS

SEQ ID NO: 17567 - protein, 5 aa, synthetic construct
  source 1..5: note = Description of Artificial Sequence: Synthetic peptide; note = XENP019395 vhCDR1
NYGMN

SEQ ID NO: 17568 - protein, 17 aa, synthetic construct
  source 1..17: note = Description of Artificial Sequence: Synthetic peptide; note = XENP019395 vhCDR2
WINTYTGEPTYADGFTG

SEQ ID NO: 17569 - protein, 9 aa, synthetic construct
  source 1..9: note = Description of Artificial Sequence: Synthetic peptide; note = XENP019395 vhCDR3
GRGTGYFDY

SEQ ID NO: 17570 - protein, 214 aa, synthetic construct
  source 1..214: note = Description of Artificial Sequence: Synthetic polypeptide; note = XENP019395 4H9_H1L1_IgG1_PVA_/S267K Light Chain
DIVMTQSPSSLSASVGDRVTITCRASQDVSTAVAWYQQKPGKSPKLLIYSASYRYTGVPDRFSGSGSGTDFTLTISSLQPEDFATYSCQQHYSTSRTFGGGTKVEIKRTVAAPSVFIFPPSDEQLKSGTASVVCLLNNFYPREAKVQWKVDNALQSGNSQESVTEQDSKDSTYSLSSTLTLSKADYEKHKVYACEVTHQGLSSPVTKSFNRGEC

SEQ ID NO: 17571 - protein, 107 aa, synthetic construct
  source 1..107: note = Description of Artificial Sequence: Synthetic polypeptide; note = VL of XENP019395
DIVMTQSPSSLSASVGDRVTITCRASQDVSTAVAWYQQKPGKSPKLLIYSASYRYTGVPDRFSGSGSGTDFTLTISSLQPEDFATYSCQQHYSTSRTFGGGTKVEIK

SEQ ID NO: 17572 - protein, 11 aa, synthetic construct
  source 1..11: note = Description of Artificial Sequence: Synthetic peptide; note = XENP019395 vlCDR1
RASQDVSTAVA

SEQ ID NO: 17573 - protein, 7 aa, synthetic construct
  source 1..7: note = Description of Artificial Sequence: Synthetic peptide; note = XENP019395 vlCDR2
SASYRYT

SEQ ID NO: 17574 - protein, 9 aa, synthetic construct
  source 1..9: note = Description of Artificial Sequence: Synthetic peptide; note = XENP019395 vlCDR3
QQHYSTSRT

SEQ ID NO: 17575 - protein, 447 aa, synthetic construct; identical to SEQ ID NO: 17565
  source 1..447: note = Description of Artificial Sequence: Synthetic polypeptide; note = XENP019396 4H9_H1L2_IgG1_PVA_/S267K Heavy Chain

SEQ ID NO: 17576 - protein, 118 aa, synthetic construct; identical to SEQ ID NO: 17566
  source 1..118: note = Description of Artificial Sequence: Synthetic polypeptide; note = VH of XENP019396

SEQ ID NO: 17577 - protein, 5 aa, synthetic construct
  source 1..5: note = Description of Artificial Sequence: Synthetic peptide; note = XENP019396 vhCDR1
NYGMN

SEQ ID NO: 17578 - protein, 17 aa, synthetic construct
  source 1..17: note = Description of Artificial Sequence: Synthetic peptide; note = XENP019396 vhCDR2
WINTYTGEPTYADGFTG

SEQ ID NO: 17579 - protein, 9 aa, synthetic construct
  source 1..9: note = Description of Artificial Sequence: Synthetic peptide; note = XENP019396 vhCDR3
GRGTGYFDY

SEQ ID NO: 17580 - protein, 214 aa, synthetic construct
  source 1..214: note = Description of Artificial Sequence: Synthetic polypeptide; note = XENP019396 4H9_H1L2_IgG1_PVA_/S267K Light Chain
DIVMTQSPDSLAVSLGERATINCKASQDVSTAVAWYQQKPGQSPKLLIYSASYRYTGVPDRFSGSGSGTDFTLTISSLQAEDVAVYSCQQHYSTSRTFGGGTKVEIKRTVAAPSVFIFPPSDEQLKSGTASVVCLLNNFYPREAKVQWKVDNALQSGNSQESVTEQDSKDSTYSLSSTLTLSKADYEKHKVYACEVTHQGLSSPVTKSFNRGEC

SEQ ID NO: 17581 - protein, 107 aa, synthetic construct
  source 1..107: note = Description of Artificial Sequence: Synthetic polypeptide; note = VL of XENP019396
DIVMTQSPDSLAVSLGERATINCKASQDVSTAVAWYQQKPGQSPKLLIYSASYRYTGVPDRFSGSGSGTDFTLTISSLQAEDVAVYSCQQHYSTSRTFGGGTKVEIK

SEQ ID NO: 17582 - protein, 11 aa, synthetic construct
  source 1..11: note = Description of Artificial Sequence: Synthetic peptide; note = XENP019396 vlCDR1
KASQDVSTAVA

SEQ ID NO: 17583 - protein, 7 aa, synthetic construct
  source 1..7: note = Description of Artificial Sequence: Synthetic peptide; note = XENP019396 vlCDR2
SASYRYT

SEQ ID NO: 17584 - protein, 9 aa, synthetic construct
  source 1..9: note = Description of Artificial Sequence: Synthetic peptide; note = XENP019396 vlCDR3
QQHYSTSRT

SEQ ID NO: 17585 - protein, 450 aa, synthetic construct
  source 1..450: note = Description of Artificial Sequence: Synthetic polypeptide; note = XENP019401 7G8_H0L0_IgG1_PVA_/S267K Heavy Chain
EVKLEESGGGLVQPGGSMKLSCAASGFTFSDAWMDWVRQSPEKGLEWVAEIRTKANNHATYYAESVKGRFTISRDDSKSSVYLQMNSLRAEDTGIYYCTRLANWDWYFDVWGAGTTVTVSSASTKGPSVFPLAPSSKSTSGGTAALGCLVKDYFPEPVTVSWNSGALTSGVHTFPAVLQSSGLYSLSSVVTVPSSSLGTQTYICNVNHKPSDTKVDKKVEPKSCDKTHTCPPCPAPPVAGPSVFLFPPKPKDTLMISRTPEVTCVVVDVKHEDPEVKFNWYVDGVEVHNAKTKPREEEYNSTYRVVSVLTVLHQDWLNGKEYKCKVSNKALPAPIEKTISKAKGQPREPQVYTLPPSREEMTKNQVSLTCDVSGFYPSDIAVEWESDGQPENNYKTTPPVLDSDGSFFLYSKLTVDKSRWEQGDVFSCSVMHEALHNHYTQKSLSLSPGK

SEQ ID NO: 17586 - protein, 121 aa, synthetic construct
  source 1..121: note = Description of Artificial Sequence: Synthetic polypeptide; note = VH of XENP019401
EVKLEESGGGLVQPGGSMKLSCAASGFTFSDAWMDWVRQSPEKGLEWVAEIRTKANNHATYYAESVKGRFTISRDDSKSSVYLQMNSLRAEDTGIYYCTRLANWDWYFDVWGAGTTVTVSS

SEQ ID NO: 17587 - protein, 5 aa, synthetic construct
  source 1..5: note = Description of Artificial Sequence: Synthetic peptide; note = XENP019401 vhCDR1
DAWMD

SEQ ID NO: 17588 - protein, 19 aa, synthetic construct
  source 1..19: note = Description of Artificial Sequence: Synthetic peptide; note = XENP019401 vhCDR2
EIRTKANNHATYYAESVKG

SEQ ID NO: 17589 - protein, 10 aa, synthetic construct
  source 1..10: note = Description of Artificial Sequence: Synthetic peptide; note = XENP019401 vhCDR3
LANWDWYFDV

SEQ ID NO: 17590 - protein, 218 aa, synthetic construct
  source 1..218: note = Description of Artificial Sequence: Synthetic polypeptide; note = XENP019401 7G8_H0L0_IgG1_PVA_/S267K Light Chain
DTVLTQSPASLAVSLGQRATISCKASQSVDYDGDSYMNWYQQKPGQPPKLLIYAASNLESGIPARLSGSGSGTDFTLNIHPVEEEDAATYYCQQSNEDPFTFGSGTKLEVKRTVAAPSVFIFPPSDEQLKSGTASVVCLLNNFYPREAKVQWKVDNALQSGNSQESVTEQDSKDSTYSLSSTLTLSKADYEKHKVYACEVTHQGLSSPVTKSFNRGEC

SEQ ID NO: 17591 - protein, 111 aa, synthetic construct
  source 1..111: note = Description of Artificial Sequence: Synthetic polypeptide; note = VL of XENP019401
DTVLTQSPASLAVSLGQRATISCKASQSVDYDGDSYMNWYQQKPGQPPKLLIYAASNLESGIPARLSGSGSGTDFTLNIHPVEEEDAATYYCQQSNEDPFTFGSGTKLEVK

SEQ ID NO: 17592 - protein, 15 aa, synthetic construct
  source 1..15: note = Description of Artificial Sequence: Synthetic peptide; note = XENP019401 vlCDR1
KASQSVDYDGDSYMN

SEQ ID NO: 17593 - protein, 7 aa, synthetic construct
  source 1..7: note = Description of Artificial Sequence: Synthetic peptide; note = XENP019401 vlCDR2
AASNLES

SEQ ID NO: 17594 - protein, 9 aa, synthetic construct
  source 1..9: note = Description of Artificial Sequence: Synthetic peptide; note = XENP019401 vlCDR3
QQSNEDPFT

SEQ ID NO: 17595 - protein, 450 aa, synthetic construct
  source 1..450: note = Description of Artificial Sequence: Synthetic polypeptide; note = XENP019402 7G8_H1L1_IgG1_PVA_/S267K Heavy Chain
QVQLVQSGAEVKKPGASVKVSCKASGFTFSDAWMDWVRQAPGQGLEWMGEIRTKANNHATYYAEKFQGRVTMTRDDSTSTVYMELSSLRSEDTAVYYCTRLANWDWYFDVWGAGTTVTVSSASTKGPSVFPLAPSSKSTSGGTAALGCLVKDYFPEPVTVSWNSGALTSGVHTFPAVLQSSGLYSLSSVVTVPSSSLGTQTYICNVNHKPSDTKVDKKVEPKSCDKTHTCPPCPAPPVAGPSVFLFPPKPKDTLMISRTPEVTCVVVDVKHEDPEVKFNWYVDGVEVHNAKTKPREEEYNSTYRVVSVLTVLHQDWLNGKEYKCKVSNKALPAPIEKTISKAKGQPREPQVYTLPPSREEMTKNQVSLTCDVSGFYPSDIAVEWESDGQPENNYKTTPPVLDSDGSFFLYSKLTVDKSRWEQGDVFSCSVMHEALHNHYTQKSLSLSPGK

SEQ ID NO: 17596 - protein, 121 aa, synthetic construct
  source 1..121: note = Description of Artificial Sequence: Synthetic polypeptide; note = VH of XENP019402
QVQLVQSGAEVKKPGASVKVSCKASGFTFSDAWMDWVRQAPGQGLEWMGEIRTKANNHATYYAEKFQGRVTMTRDDSTSTVYMELSSLRSEDTAVYYCTRLANWDWYFDVWGAGTTVTVSS

SEQ ID NO: 17597 - protein, 5 aa, synthetic construct
  source 1..5: note = Description of Artificial Sequence: Synthetic peptide; note = XENP019402 vhCDR1
DAWMD

SEQ ID NO: 17598 - protein, 19 aa, synthetic construct
  source 1..19: note = Description of Artificial Sequence: Synthetic peptide; note = XENP019402 vhCDR2
EIRTKANNHATYYAEKFQG

SEQ ID NO: 17599 - protein, 10 aa, synthetic construct
  source 1..10: note = Description of Artificial Sequence: Synthetic peptide; note = XENP019402 vhCDR3
LANWDWYFDV

SEQ ID NO: 17600 - protein, 218 aa, synthetic construct
  source 1..218: note = Description of Artificial Sequence: Synthetic polypeptide; note = XENP019402 7G8_H1L1_IgG1_PVA_/S267K Light Chain
DTVLTQSPSSLSASVGDRVTITCRASQSVDYDGDSYMNWYQQKPGKPPKLLIYAASNLESGIPARLSGSGSGTDFTLTISSLQPEDFATYYCQQSNEDPFTFGSGTKLEIKRTVAAPSVFIFPPSDEQLKSGTASVVCLLNNFYPREAKVQWKVDNALQSGNSQESVTEQDSKDSTYSLSSTLTLSKADYEKHKVYACEVTHQGLSSPVTKSFNRGEC

SEQ ID NO: 17601 - protein, 111 aa, synthetic construct
  source 1..111: note = Description of Artificial Sequence: Synthetic polypeptide; note = VL of XENP019402
DTVLTQSPSSLSASVGDRVTITCRASQSVDYDGDSYMNWYQQKPGKPPKLLIYAASNLESGIPARLSGSGSGTDFTLTISSLQPEDFATYYCQQSNEDPFTFGSGTKLEIK

SEQ ID NO: 17602 - protein, 15 aa, synthetic construct
  source 1..15: note = Description of Artificial Sequence: Synthetic peptide; note = XENP019402 vlCDR1
RASQSVDYDGDSYMN

SEQ ID NO: 17603 - protein, 7 aa, synthetic construct
  source 1..7: note = Description of Artificial Sequence: Synthetic peptide; note = XENP019402 vlCDR2
AASNLES

SEQ ID NO: 17604 - protein, 9 aa, synthetic construct
  source 1..9: note = Description of Artificial Sequence: Synthetic peptide; note = XENP019402 vlCDR3
QQSNEDPFT

SEQ ID NO: 17605 - protein, 450 aa, synthetic construct; identical to SEQ ID NO: 17595
  source 1..450: note = Description of Artificial Sequence: Synthetic polypeptide; note = XENP019403 7G8_H1L2_IgG1_PVA_/S267K Heavy Chain

SEQ ID NO: 17606 - protein, 121 aa, synthetic construct; identical to SEQ ID NO: 17596
  source 1..121: note = Description of Artificial Sequence: Synthetic polypeptide; note = VH of XENP019403

SEQ ID NO: 17607 - protein, 5 aa, synthetic construct
  source 1..5: note = Description of Artificial Sequence: Synthetic peptide; note = XENP019403 vhCDR1
DAWMD

SEQ ID NO: 17608 - protein, 19 aa, synthetic construct
  source 1..19: note = Description of Artificial Sequence: Synthetic peptide; note = XENP019403 vhCDR2
EIRTKANNHATYYAEKFQG

SEQ ID NO: 17609 - protein, 10 aa, synthetic construct
  source 1..10: note = Description of Artificial Sequence: Synthetic peptide; note = XENP019403 vhCDR3
LANWDWYFDV

SEQ ID NO: 17610 - protein, 218 aa, synthetic construct
  source 1..218: note = Description of Artificial Sequence: Synthetic polypeptide; note = XENP019403 7G8_H1L2_IgG1_PVA_/S267K Light Chain
DTVLTQSPATLSLSPGERATLSCRASQSVDYDGDSYMNWYQQKPGQPPRLLIYAASNLESGIPARLSGSGSGTDFTLTISSLEPEDFAVYYCQQSNEDPFTFGSGTKLEIKRTVAAPSVFIFPPSDEQLKSGTASVVCLLNNFYPREAKVQWKVDNALQSGNSQESVTEQDSKDSTYSLSSTLTLSKADYEKHKVYACEVTHQGLSSPVTKSFNRGEC

SEQ ID NO: 17611 - protein, 111 aa, synthetic construct
  source 1..111: note = Description of Artificial Sequence: Synthetic polypeptide; note = VL of XENP019403
DTVLTQSPATLSLSPGERATLSCRASQSVDYDGDSYMNWYQQKPGQPPRLLIYAASNLESGIPARLSGSGSGTDFTLTISSLEPEDFAVYYCQQSNEDPFTFGSGTKLEIK

SEQ ID NO: 17612 - protein, 15 aa, synthetic construct
  source 1..15: note = Description of Artificial Sequence: Synthetic peptide; note = XENP019403 vlCDR1
RASQSVDYDGDSYMN

SEQ ID NO: 17613 - protein, 7 aa, synthetic construct
  source 1..7: note = Description of Artificial Sequence: Synthetic peptide; note = XENP019403 vlCDR2
AASNLES

SEQ ID NO: 17614 - protein, 9 aa, synthetic construct
  source 1..9: note = Description of Artificial Sequence: Synthetic peptide; note = XENP019403 vlCDR3
QQSNEDPFT

SEQ ID NO: 17615 - protein, 450 aa, synthetic construct; identical to SEQ ID NO: 17595
  source 1..450: note = Description of Artificial Sequence: Synthetic polypeptide; note = XENP019404 7G8_H1L3_IgG1_PVA_/S267K Heavy Chain

SEQ ID NO: 17616 - protein, 121 aa, synthetic construct; identical to SEQ ID NO: 17596
  source 1..121: note = Description of Artificial Sequence: Synthetic polypeptide; note = VH of XENP019404

SEQ ID NO: 17617 - protein, 5 aa, synthetic construct
  source 1..5: note = Description of Artificial Sequence: Synthetic peptide; note = XENP019404 vhCDR1
DAWMD

SEQ ID NO: 17618 - protein, 19 aa, synthetic construct
  source 1..19: note = Description of Artificial Sequence: Synthetic peptide; note = XENP019404 vhCDR2
EIRTKANNHATYYAEKFQG

SEQ ID NO: 17619 - protein, 10 aa, synthetic construct
  source 1..10: note = Description of Artificial Sequence: Synthetic peptide; note = XENP019404 vhCDR3
LANWDWYFDV

SEQ ID NO: 17620 - protein, 218 aa, synthetic construct
  source 1..218: note = Description of Artificial Sequence: Synthetic polypeptide; note = XENP019404 7G8_H1L3_IgG1_PVA_/S267K Light Chain
DTVLTQSPDSLAVSLGERATINCKASQSVDYDGDSYMNWYQQKPGQPPKLLIYAASNLESGIPARLSGSGSGTDFTLTISSLQAEDVAVYYCQQSNEDPFTFGSGTKLEIKRTVAAPSVFIFPPSDEQLKSGTASVVCLLNNFYPREAKVQWKVDNALQSGNSQESVTEQDSKDSTYSLSSTLTLSKADYEKHKVYACEVTHQGLSSPVTKSFNRGEC

SEQ ID NO: 17621 - protein, 111 aa, synthetic construct
  source 1..111: note = Description of Artificial Sequence: Synthetic polypeptide; note = VL of XENP019404
DTVLTQSPDSLAVSLGERATINCKASQSVDYDGDSYMNWYQQKPGQPPKLLIYAASNLESGIPARLSGSGSGTDFTLTISSLQAEDVAVYYCQQSNEDPFTFGSGTKLEIK

SEQ ID NO: 17622 - protein, 15 aa, synthetic construct
  source 1..15: note = Description of Artificial Sequence: Synthetic peptide; note = XENP019404 vlCDR1
KASQSVDYDGDSYMN

SEQ ID NO: 17623 - protein, 7 aa, synthetic construct
  source 1..7: note = Description of Artificial Sequence: Synthetic peptide; note = XENP019404 vlCDR2
AASNLES

SEQ ID NO: 17624 - protein, 9 aa, synthetic construct
  source 1..9: note = Description of Artificial Sequence: Synthetic peptide; note = XENP019404 vlCDR3
QQSNEDPFT

SEQ ID NO: 17625 - protein, 450 aa, synthetic construct
  source 1..450: note = Description of Artificial Sequence: Synthetic polypeptide; note = XENP019405 7G8_H2L1_IgG1_PVA_/S267K Heavy Chain
EVQLVESGGGLVQPGGSLRLSCAASGFTFSDAWMDWVRQAPGKGLEWVGEIRTKANNHATYYAESVKGRFTISRDDSKSSVYLQMNSLKTEDTAVYYCTRLANWDWYFDVWGAGTTVTVSSASTKGPSVFPLAPSSKSTSGGTAALGCLVKDYFPEPVTVSWNSGALTSGVHTFPAVLQSSGLYSLSSVVTVPSSSLGTQTYICNVNHKPSDTKVDKKVEPKSCDKTHTCPPCPAPPVAGPSVFLFPPKPKDTLMISRTPEVTCVVVDVKHEDPEVKFNWYVDGVEVHNAKTKPREEEYNSTYRVVSVLTVLHQDWLNGKEYKCKVSNKALPAPIEKTISKAKGQPREPQVYTLPPSREEMTKNQVSLTCDVSGFYPSDIAVEWESDGQPENNYKTTPPVLDSDGSFFLYSKLTVDKSRWEQGDVFSCSVMHEALHNHYTQKSLSLSPGK

SEQ ID NO: 17626 - protein, 121 aa, synthetic construct
  source 1..121: note = Description of Artificial Sequence: Synthetic polypeptide; note = VH of XENP019405
EVQLVESGGGLVQPGGSLRLSCAASGFTFSDAWMDWVRQAPGKGLEWVGEIRTKANNHATYYAESVKGRFTISRDDSKSSVYLQMNSLKTEDTAVYYCTRLANWDWYFDVWGAGTTVTVSS

SEQ ID NO: 17627 - protein, 5 aa, synthetic construct
  source 1..5: note = Description of Artificial Sequence: Synthetic peptide; note = XENP019405 vhCDR1
DAWMD

SEQ ID NO: 17628 - protein, 19 aa, synthetic construct
  source 1..19: note = Description of Artificial Sequence: Synthetic peptide; note = XENP019405 vhCDR2
EIRTKANNHATYYAESVKG

SEQ ID NO: 17629 - protein, 10 aa, synthetic construct
  source 1..10: note = Description of Artificial Sequence: Synthetic peptide; note = XENP019405 vhCDR3
LANWDWYFDV

SEQ ID NO: 17630 - protein, 218 aa, synthetic construct; identical to SEQ ID NO: 17600
  source 1..218: note = Description of Artificial Sequence: Synthetic polypeptide; note = XENP019405 7G8_H2L1_IgG1_PVA_/S267K Light Chain

SEQ ID NO: 17631 - protein, 111 aa, synthetic construct; identical to SEQ ID NO: 17601
  source 1..111: note = Description of Artificial Sequence: Synthetic polypeptide; note = VL of XENP019405

SEQ ID NO: 17632 - protein, 15 aa, synthetic construct
  source 1..15: note = Description of Artificial Sequence: Synthetic peptide; note = XENP019405 vlCDR1
RASQSVDYDGDSYMN

SEQ ID NO: 17633 - protein, 7 aa, synthetic construct
  source 1..7: note = Description of Artificial Sequence: Synthetic peptide; note = XENP019405 vlCDR2
AASNLES

SEQ ID NO: 17634 - protein, 9 aa, synthetic construct
  source 1..9: note = Description of Artificial Sequence: Synthetic peptide; note = XENP019405 vlCDR3
QQSNEDPFT

SEQ ID NO: 17635 - protein, 450 aa, synthetic construct; identical to SEQ ID NO: 17625
  source 1..450: note = Description of Artificial Sequence: Synthetic polypeptide; note = XENP019406 7G8_H2L2_IgG1_PVA_/S267K Heavy Chain

SEQ ID NO: 17636 - protein, 121 aa, synthetic construct; identical to SEQ ID NO: 17626
  source 1..121: note = Description of Artificial Sequence: Synthetic polypeptide; note = VH of XENP019406

SEQ ID NO: 17637 - protein, 5 aa, synthetic construct
  source 1..5: note = Description of Artificial Sequence: Synthetic peptide; note = XENP019406 vhCDR1
DAWMD

SEQ ID NO: 17638 - protein, 19 aa, synthetic construct
  source 1..19: note = Description of Artificial Sequence: Synthetic peptide; note = XENP019406 vhCDR2
EIRTKANNHATYYAESVKG

SEQ ID NO: 17639 - protein, 10 aa, synthetic construct
  source 1..10: note = Description of Artificial Sequence: Synthetic peptide; note = XENP019406 vhCDR3
LANWDWYFDV

SEQ ID NO: 17640 - protein, 218 aa, synthetic construct; identical to SEQ ID NO: 17610
  source 1..218: note = Description of Artificial Sequence: Synthetic polypeptide; note = XENP019406 7G8_H2L2_IgG1_PVA_/S267K Light Chain

SEQ ID NO: 17641 - protein, 111 aa, synthetic construct; identical to SEQ ID NO: 17611
  source 1..111: note = Description of Artificial Sequence: Synthetic polypeptide; note = VL of XENP019406

SEQ ID NO: 17642 - protein, 15 aa, synthetic construct
  source 1..15: note = Description of Artificial Sequence: Synthetic peptide; note = XENP019406 vlCDR1
RASQSVDYDGDSYMN

SEQ ID NO: 17643 - protein, 7 aa, synthetic construct
  source 1..7: note = Description of Artificial Sequence: Synthetic peptide; note = XENP019406 vlCDR2
AASNLES

SEQ ID NO: 17644 - protein, 9 aa, synthetic construct
  source 1..9: note = Description of Artificial Sequence: Synthetic peptide; note = XENP019406 vlCDR3
QQSNEDPFT

SEQ ID NO: 17645 - protein, 450 aa, synthetic construct; identical to SEQ ID NO: 17625
  source 1..450: note = Description of Artificial Sequence: Synthetic polypeptide; note = XENP019407 7G8_H2L3_IgG1_PVA_/S267K Heavy Chain

SEQ ID NO: 17646 - protein, 121 aa, synthetic construct; identical to SEQ ID NO: 17626
  source 1..121: note = Description of Artificial Sequence: Synthetic polypeptide; note = VH of XENP019407

SEQ ID NO: 17647 - protein, 5 aa, synthetic construct
  source 1..5: note = Description of Artificial Sequence: Synthetic peptide; note = XENP019407 vhCDR1
DAWMD

SEQ ID NO: 17648 - protein, 19 aa, synthetic construct
  source 1..19: note = Description of Artificial Sequence: Synthetic peptide; note = XENP019407 vhCDR2
EIRTKANNHATYYAESVKG

SEQ ID NO: 17649 - protein, 10 aa, synthetic construct
  source 1..10: note = Description of Artificial Sequence: Synthetic peptide; note = XENP019407 vhCDR3
LANWDWYFDV

SEQ ID NO: 17650 - protein, 218 aa, synthetic construct; identical to SEQ ID NO: 17620
  source 1..218: note = Description of Artificial Sequence: Synthetic polypeptide; note = XENP019407 7G8_H2L3_IgG1_PVA_/S267K Light Chain

SEQ ID NO: 17651 - protein, 111 aa, synthetic construct; identical to SEQ ID NO: 17621
  source 1..111: note = Description of Artificial Sequence: Synthetic polypeptide; note = VL of XENP019407

SEQ ID NO: 17652 - protein, 15 aa, synthetic construct
  source 1..15: note = Description of Artificial Sequence: Synthetic peptide; note = XENP019407 vlCDR1
KASQSVDYDGDSYMN

SEQ ID NO: 17653 - protein, 7 aa, synthetic construct
  source 1..7: note = Description of Artificial Sequence: Synthetic peptide; note = XENP019407 vlCDR2
AASNLES

SEQ ID NO: 17654 - protein, 9 aa, synthetic construct
  source 1..9: note = Description of Artificial Sequence: Synthetic peptide; note = XENP019407 vlCDR3
QQSNEDPFT

SEQ ID NO: 17655 - protein, 446 aa, synthetic construct
  source 1..446: note = Description of Artificial Sequence: Synthetic polypeptide; note = XENP019408 11C12_H1L1_IgG1_PVA_/S267K Heavy Chain
EVQLVESGGGLVQPGGSLRLSCAASGFTFSSFGMHWVRQAPGKGLEWVSYISSDSSTFSYADSVKGRFTISRDNAKNSLYLQMNSLRAEDTAVYYCARYYYGYVDFWGQGTTVTVSSASTKGPSVFPLAPSSKSTSGGTAALGCLVKDYFPEPVTVSWNSGALTSGVHTFPAVLQSSGLYSLSSVVTVPSSSLGTQTYICNVNHKPSDTKVDKKVEPKSCDKTHTCPPCPAPPVAGPSVFLFPPKPKDTLMISRTPEVTCVVVDVKHEDPEVKFNWYVDGVEVHNAKTKPREEEYNSTYRVVSVLTVLHQDWLNGKEYKCKVSNKALPAPIEKTISKAKGQPREPQVYTLPPSREEMTKNQVSLTCDVSGFYPSDIAVEWESDGQPENNYKTTPPVLDSDGSFFLYSKLTVDKSRWEQGDVFSCSVMHEALHNHYTQKSLSLSPGK

SEQ ID NO: 17656 - protein, 117 aa, synthetic construct
  source 1..117: note = Description of Artificial Sequence: Synthetic polypeptide; note = VH of XENP019408
EVQLVESGGGLVQPGGSLRLSCAASGFTFSSFGMHWVRQAPGKGLEWVSYISSDSSTFSYADSVKGRFTISRDNAKNSLYLQMNSLRAEDTAVYYCARYYYGYVDFWGQGTTVTVSS

SEQ ID NO: 17657 - protein, 5 aa, synthetic construct
  source 1..5: note = Description of Artificial Sequence: Synthetic peptide; note = XENP019408 vhCDR1
SFGMH

SEQ ID NO: 17658 - protein, 17 aa, synthetic construct
  source 1..17: note = Description of Artificial Sequence: Synthetic peptide; note = XENP019408 vhCDR2
YISSDSSTFSYADSVKG

SEQ ID NO: 17659 - protein, 8 aa, synthetic construct
  source 1..8: note = Description of Artificial Sequence: Synthetic peptide; note = XENP019408 vhCDR3
YYYGYVDF

SEQ ID NO: 17660 - protein, 214 aa, synthetic construct
  source 1..214: note = Description of Artificial Sequence: Synthetic polypeptide; note = XENP019408 11C12_H1L1_IgG1_PVA_/S267K Light Chain
DIQMTQSPSSLSASVGDRVTITCRASEDIYNRLAWYQQKPGKAPKLLISGATSFETGVPSRFSGSGSGKDYTLTISSLQPEDFATYYCQQYWSTPWTFGGGTKVEIKRTVAAPSVFIFPPSDEQLKSGTASVVCLLNNFYPREAKVQWKVDNALQSGNSQESVTEQDSKDSTYSLSSTLTLSKADYEKHKVYACEVTHQGLSSPVTKSFNRGEC

SEQ ID NO: 17661 - protein, 107 aa, synthetic construct
  source 1..107: note = Description of Artificial Sequence: Synthetic polypeptide; note = VL of XENP019408
DIQMTQSPSSLSASVGDRVTITCRASEDIYNRLAWYQQKPGKAPKLLISGATSFETGVPSRFSGSGSGKDYTLTISSLQPEDFATYYCQQYWSTPWTFGGGTKVEIK

SEQ ID NO: 17662 - protein, 11 aa, synthetic construct
  source 1..11: note = Description of Artificial Sequence: Synthetic peptide; note = XENP019408 vlCDR1
RASEDIYNRLA

SEQ ID NO: 17663 - protein, 7 aa, synthetic construct
  source 1..7: note = Description of Artificial Sequence: Synthetic peptide; note = XENP019408 vlCDR2
GATSFET

SEQ ID NO: 17664 - protein, 9 aa, synthetic construct
  source 1..9: note = Description of Artificial Sequence: Synthetic peptide; note = XENP019408 vlCDR3
QQYWSTPWT

SEQ ID NO: 17665 - protein, 447 aa, synthetic construct; identical to SEQ ID NO: 17235
  source 1..447: note = Description of Artificial Sequence: Synthetic polypeptide; note = XENP020023 2A11_H1L0_IgG1_PVA_/S267K Heavy Chain

SEQ ID NO: 17666 - protein, 118 aa, synthetic construct; identical to SEQ ID NO: 17236
  source 1..118: note = Description of Artificial Sequence: Synthetic polypeptide; note = VH of XENP020023

SEQ ID NO: 17667 - protein, 5 aa, synthetic construct
  source 1..5: note = Description of Artificial Sequence: Synthetic peptide; note = XENP020023 vhCDR1
DYYMH

SEQ ID NO: 17668 - protein, 17 aa, synthetic construct
  source 1..17: note = Description of Artificial Sequence: Synthetic peptide; note = XENP020023 vhCDR2
WIDPENGDTEYAPKFQG

SEQ ID NO: 17669 - protein, 9 aa, synthetic construct
  source 1..9: note = Description of Artificial Sequence: Synthetic peptide; note = XENP020023 vhCDR3
RGVRQALDY

SEQ ID NO: 17670 - protein, 214 aa, synthetic construct; identical to SEQ ID NO: 17230
  source 1..214: note = Description of Artificial Sequence: Synthetic polypeptide; note = XENP020023 2A11_H1L0_IgG1_PVA_/S267K Light Chain

SEQ ID NO: 17671 - protein, 107 aa, synthetic construct; identical to SEQ ID NO: 17231
  source 1..107: note = Description of Artificial Sequence: Synthetic polypeptide; note = VL of XENP020023

SEQ ID NO: 17672 - protein, 11 aa, synthetic construct
  source 1..11: note = Description of Artificial Sequence: Synthetic peptide; note = XENP020023 vlCDR1
RASQDIGNYLN

SEQ ID NO: 17673 - protein, 7 aa, synthetic construct
  source 1..7: note = Description of Artificial Sequence: Synthetic peptide; note = XENP020023 vlCDR2
YTSRLHS

SEQ ID NO: 17674 - protein, 9 aa, synthetic construct
  source 1..9: note = Description of Artificial Sequence: Synthetic peptide; note = XENP020023 vlCDR3
QQGNTLPYT

SEQ ID NO: 17675 - protein, 447 aa, synthetic construct; identical to SEQ ID NO: 17225
  source 1..447: note = Description of Artificial Sequence: Synthetic polypeptide; note = XENP020024 2A11_H0L1_IgG1_PVA_/S267K Heavy Chain

SEQ ID NO: 17676 - protein, 118 aa, synthetic construct; identical to SEQ ID NO: 17226
  source 1..118: note = Description of Artificial Sequence: Synthetic polypeptide; note = VH of XENP020024

SEQ ID NO: 17677 - protein, 5 aa, synthetic construct
  source 1..5: note = Description of Artificial Sequence: Synthetic peptide; note = XENP020024 vhCDR1
DYYMH

SEQ ID NO: 17678 - protein, 17 aa, synthetic construct
  source 1..17: note = Description of Artificial Sequence: Synthetic peptide; note = XENP020024 vhCDR2
WIDPENGDTEYAPKFQG

SEQ ID NO: 17679 - protein, 9 aa, synthetic construct
  source 1..9: note = Description of Artificial Sequence: Synthetic peptide; note = XENP020024 vhCDR3
RGVRQALDY

SEQ ID NO: 17680 - protein, 214 aa, synthetic construct; identical to SEQ ID NO: 17240
  source 1..214: note = Description of Artificial Sequence: Synthetic polypeptide; note = XENP020024 2A11_H0L1_IgG1_PVA_/S267K Light Chain

SEQ ID NO: 17681 - protein, 107 aa, synthetic construct; identical to SEQ ID NO: 17241
  source 1..107: note = Description of Artificial Sequence: Synthetic polypeptide; note = VL of XENP020024

SEQ ID NO: 17682 - protein, 11 aa, synthetic construct
  source 1..11: note = Description of Artificial Sequence: Synthetic peptide; note = XENP020024 vlCDR1
RASQDIGNYLN

SEQ ID NO: 17683 - protein, 7 aa, synthetic construct
  source 1..7: note = Description of Artificial Sequence: Synthetic peptide; note = XENP020024 vlCDR2
YTSRLHS

SEQ ID NO: 17684 - protein, 9 aa, synthetic construct
  source 1..9: note = Description of Artificial Sequence: Synthetic peptide; note = XENP020024 vlCDR3
QQGNTLPYT

SEQ ID NO: 17685 - protein, 445 aa, synthetic construct; identical to SEQ ID NO: 17455
  source 1..445: note = Description of Artificial Sequence: Synthetic polypeptide; note = XENP020025 7A6_H1L0_IgG1_PVA_/S267K Heavy Chain

SEQ ID NO: 17686 - protein, 116 aa, synthetic construct; identical to SEQ ID NO: 17456
  source 1..116: note = Description of Artificial Sequence: Synthetic polypeptide; note = VH of XENP020025

SEQ ID NO: 17687 - protein, 6 aa, synthetic construct
  source 1..6: note = Description of Artificial Sequence: Synthetic peptide; note = XENP020025 vhCDR1
SGYFWN

SEQ ID NO: 17688 - protein, 15 aa, synthetic construct
  source 1..15: note = Description of Artificial Sequence: Synthetic peptide; note = XENP020025 vhCDR2
YISYDSNYYNPSVKG

SEQ ID NO: 17689 - protein, 8 aa, synthetic construct
  source 1..8: note = Description of Artificial Sequence: Synthetic peptide; note = XENP020025 vhCDR3
GGITTFDY

SEQ ID NO: 17690 - protein, 218 aa, synthetic construct; identical to SEQ ID NO: 17450
  source 1..218: note = Description of Artificial Sequence: Synthetic polypeptide; note = XENP020025 7A6_H1L0_IgG1_PVA_/S267K Light Chain

SEQ ID NO: 17691 - protein, 111 aa, synthetic construct; identical to SEQ ID NO: 17451
  source 1..111: note = Description of Artificial Sequence: Synthetic polypeptide; note = VL of XENP020025

SEQ ID NO: 17692 - protein, 15 aa, synthetic construct
  source 1..15: note = Description of Artificial Sequence: Synthetic peptide; note = XENP020025 vlCDR1
KASQSVDYDGDSYMN

SEQ ID NO: 17693 - protein, 7 aa, synthetic construct
  source 1..7: note = Description of Artificial Sequence: Synthetic peptide; note = XENP020025 vlCDR2
AASNLES

SEQ ID NO: 17694 - protein, 9 aa, synthetic construct
  source 1..9: note = Description of Artificial Sequence: Synthetic peptide; note = XENP020025 vlCDR3
QQSNEDPRT

SEQ ID NO: 17695 - protein, 445 aa, synthetic construct; identical to SEQ ID NO: 17445
  source 1..445: note = Description of Artificial Sequence: Synthetic polypeptide; note = XENP020026 7A6_H0L1_IgG1_PVA_/S267K Heavy Chain

SEQ ID NO: 17696 - protein, 116 aa, synthetic construct; identical to SEQ ID NO: 17446
  source 1..116: note = Description of Artificial Sequence: Synthetic polypeptide; note = VH of XENP020026

SEQ ID NO: 17697 - protein, 6 aa, synthetic construct
  source 1..6: note = Description of Artificial Sequence: Synthetic peptide; note = XENP020026 vhCDR1
SGYFWN

SEQ ID NO: 17698 - protein, 15 aa, synthetic construct
  source 1..15: note = Description of Artificial Sequence: Synthetic peptide; note = XENP020026 vhCDR2
YISYDSNYYNPSLKN

SEQ ID NO: 17699 - protein, 8 aa, synthetic construct
  source 1..8: note = Description of Artificial Sequence: Synthetic peptide; note = XENP020026 vhCDR3
GGITTFDY

SEQ ID NO: 17700 - protein, 218 aa, synthetic construct; identical to SEQ ID NO: 17460
  source 1..218: note = Description of Artificial Sequence: Synthetic polypeptide; note = XENP020026 7A6_H0L1_IgG1_PVA_/S267K Light Chain

SEQ ID NO: 17701 - protein, 111 aa, synthetic construct; identical to SEQ ID NO: 17461
  source 1..111: note = Description of Artificial Sequence: Synthetic polypeptide; note = VL of XENP020026

SEQ ID NO: 17702 - protein, 15 aa, synthetic construct
  source 1..15: note = Description of Artificial Sequence: Synthetic peptide; note = XENP020026 vlCDR1
RASQSVDYDGDSYMN

SEQ ID NO: 17703 - protein, 7 aa, synthetic construct
  source 1..7: note = Description of Artificial Sequence: Synthetic peptide; note = XENP020026 vlCDR2
AASNLES

SEQ ID NO: 17704 - protein, 9 aa, synthetic construct
  source 1..9: note = Description of Artificial Sequence: Synthetic peptide; note = XENP020026 vlCDR3
QQSNEDPRT

SEQ ID NO: 17705 - protein, 445 aa, synthetic construct; identical to SEQ ID NO: 17445
  source 1..445: note = Description of Artificial Sequence: Synthetic polypeptide; note = XENP020027 7A6_H0L3_IgG1_PVA_/S267K Heavy Chain

SEQ ID NO: 17706 - protein, 116 aa, synthetic construct; identical to SEQ ID NO: 17446
  source 1..116: note = Description of Artificial Sequence: Synthetic polypeptide; note = VH of XENP020027

SEQ ID NO: 17707 - protein, 6 aa, synthetic construct
  source 1..6: note = Description of Artificial Sequence: Synthetic peptide; note = XENP020027 vhCDR1
SGYFWN

SEQ ID NO: 17708 - protein, 15 aa, synthetic construct
  source 1..15: note = Description of Artificial Sequence: Synthetic peptide; note = XENP020027 vhCDR2
YISYDSNYYNPSLKN

SEQ ID NO: 17709 - protein, 8 aa, synthetic construct
  source 1..8: note = Description of Artificial Sequence: Synthetic peptide; note = XENP020027 vhCDR3
GGITTFDY

SEQ ID NO: 17710 - protein, 218 aa, synthetic construct; identical to SEQ ID NO: 17480
  source 1..218: note = Description of Artificial Sequence: Synthetic polypeptide; note = XENP020027 7A6_H0L3_IgG1_PVA_/S267K Light Chain

SEQ ID NO: 17711 - protein, 111 aa, synthetic construct; identical to SEQ ID NO: 17481
  source 1..111: note = Description of Artificial Sequence: Synthetic polypeptide; note = VL of XENP020027

SEQ ID NO: 17712 - protein, 15 aa, synthetic construct
  source 1..15: note = Description of Artificial Sequence: Synthetic peptide; note = XENP020027 vlCDR1
KASQSVDYDGDSYMN

SEQ ID NO: 17713 - protein, 7 aa, synthetic construct
  source 1..7: note = Description of Artificial Sequence: Synthetic peptide; note = XENP020027 vlCDR2
AASNLES

SEQ ID NO: 17714 - protein, 9 aa, synthetic construct
  source 1..9: note = Description of Artificial Sequence: Synthetic peptide; note = XENP020027 vlCDR3
QQSNEDPRT

SEQ ID NO: 17715 - protein, 450 aa, synthetic construct; identical to SEQ ID NO: 17595
  source 1..450: note = Description of Artificial Sequence: Synthetic polypeptide; note = XENP020028 7G8_H1L0_IgG1_PVA_/S267K Heavy Chain

SEQ ID NO: 17716 - protein, 121 aa, synthetic construct; identical to SEQ ID NO: 17596
  source 1..121: note = Description of Artificial Sequence: Synthetic polypeptide; note = VH of XENP020028

SEQ ID NO: 17717 - protein, 5 aa, synthetic construct
  source 1..5: note = Description of Artificial Sequence: Synthetic peptide; note = XENP020028 vhCDR1
DAWMD

SEQ ID NO: 17718 - protein, 19 aa, synthetic construct
  source 1..19: note = Description of Artificial Sequence: Synthetic peptide; note = XENP020028 vhCDR2
EIRTKANNHATYYAEKFQG

SEQ ID NO: 17719 - protein, 10 aa, synthetic construct
  source 1..10: note = Description of Artificial Sequence: Synthetic peptide; note = XENP020028 vhCDR3
LANWDWYFDV

SEQ ID NO: 17720 - protein, 218 aa, synthetic construct; identical to SEQ ID NO: 17590
  source 1..218: note = Description of Artificial Sequence: Synthetic polypeptide; note = XENP020028 7G8_H1L0_IgG1_PVA_/S267K Light Chain

SEQ ID NO: 17721 - protein, 111 aa, synthetic construct; identical to SEQ ID NO: 17591
  source 1..111: note = Description of Artificial Sequence: Synthetic polypeptide; note = VL of XENP020028

SEQ ID NO: 17722 - protein, 15 aa, synthetic construct
  source 1..15: note = Description of Artificial Sequence: Synthetic peptide; note = XENP020028 vlCDR1
KASQSVDYDGDSYMN

SEQ ID NO: 17723 - protein, 7 aa, synthetic construct
  source 1..7: note = Description of Artificial Sequence: Synthetic peptide; note = XENP020028 vlCDR2
AASNLES

SEQ ID NO: 17724 - protein, 9 aa, synthetic construct
  source 1..9: note = Description of Artificial Sequence: Synthetic peptide; note = XENP020028 vlCDR3
QQSNEDPFT

SEQ ID NO: 17725 - protein, 450 aa, synthetic construct; identical to SEQ ID NO: 17585
  source 1..450: note = Description of Artificial Sequence: Synthetic polypeptide; note = XENP020029 7G8_H0L1_IgG1_PVA_/S267K Heavy Chain

SEQ ID NO: 17726 - protein, 121 aa, synthetic construct; identical to SEQ ID NO: 17586
  source 1..121: note = Description of Artificial Sequence: Synthetic polypeptide; note = VH of XENP020029

SEQ ID NO: 17727 - protein, 5 aa, synthetic construct
  source 1..5: note = Description of Artificial Sequence: Synthetic peptide; note = XENP020029 vhCDR1
DAWMD

SEQ ID NO: 17728 - protein, 19 aa, synthetic construct
  source 1..19: note = Description of Artificial Sequence: Synthetic peptide; note = XENP020029 vhCDR2
EIRTKANNHATYYAESVKG

SEQ ID NO: 17729 - protein, 10 aa, synthetic construct
  source 1..10: note = Description of Artificial Sequence: Synthetic peptide; note = XENP020029 vhCDR3
LANWDWYFDV

SEQ ID NO: 17730 - protein, 218 aa, synthetic construct; identical to SEQ ID NO: 17600
  source 1..218: note = Description of Artificial Sequence: Synthetic polypeptide; note = XENP020029 7G8_H0L1_IgG1_PVA_/S267K Light Chain

SEQ ID NO: 17731 - protein, 111 aa, synthetic construct; identical to SEQ ID NO: 17601
  source 1..111: note = Description of Artificial Sequence: Synthetic polypeptide; note = VL of XENP020029

SEQ ID NO: 17732 - protein, 15 aa, synthetic construct
  source 1..15: note = Description of Artificial Sequence: Synthetic peptide; note = XENP020029 vlCDR1
RASQSVDYDGDSYMN

SEQ ID NO: 17733 - protein, 7 aa, synthetic construct
  source 1..7: note = Description of Artificial Sequence: Synthetic peptide; note = XENP020029 vlCDR2
AASNLES

SEQ ID NO: 17734 - protein, 9 aa, synthetic construct
  source 1..9: note = Description of Artificial Sequence: Synthetic peptide; note = XENP020029 vlCDR3
QQSNEDPFT

SEQ ID NO: 17735 - protein, 450 aa, synthetic construct; identical to SEQ ID NO: 17625
  source 1..450: note = Description of Artificial Sequence: Synthetic polypeptide; note = XENP020262 7G8_H2L0_IgG1_PVA_/S267K Heavy Chain

SEQ ID NO: 17736 - protein, 121 aa, synthetic construct; identical to SEQ ID NO: 17626
  source 1..121: note = Description of Artificial Sequence: Synthetic polypeptide; note = VH of XENP020262

SEQ ID NO: 17737 - protein, 5 aa, synthetic construct
  source 1..5: note = Description of Artificial Sequence: Synthetic peptide; note = XENP020262 vhCDR1
DAWMD

SEQ ID NO: 17738 - protein, 19 aa, synthetic construct
  source 1..19: note = Description of Artificial Sequence: Synthetic peptide; note = XENP020262 vhCDR2
EIRTKANNHATYYAESVKG

SEQ ID NO: 17739 - protein, 10 aa, synthetic construct
  source 1..10: note = Description of Artificial Sequence: Synthetic peptide; note = XENP020262 vhCDR3
LANWDWYFDV

SEQ ID NO: 17740 - protein, 218 aa, synthetic construct; identical to SEQ ID NO: 17590
  source 1..218: note = Description of Artificial Sequence: Synthetic polypeptide; note = XENP020262 7G8_H2L0_IgG1_PVA_/S267K Light Chain

SEQ ID NO: 17741 - protein, 111 aa, synthetic construct; identical to SEQ ID NO: 17591
  source 1..111: note = Description of Artificial Sequence: Synthetic polypeptide; note = VL of XENP020262

SEQ ID NO: 17742 - protein, 15 aa, synthetic construct
  source 1..15: note = Description of Artificial Sequence: Synthetic peptide; note = XENP020262 vlCDR1
KASQSVDYDGDSYMN

SEQ ID NO: 17743 - protein, 7 aa, synthetic construct
  source 1..7: note = Description of Artificial Sequence: Synthetic peptide; note = XENP020262 vlCDR2
AASNLES

SEQ ID NO: 17744 - protein, 9 aa, synthetic construct
  source 1..9: note = Description of Artificial Sequence: Synthetic peptide; note = XENP020262 vlCDR3
QQSNEDPFT

SEQ ID NO: 17745 - protein, 450 aa, synthetic construct; identical to SEQ ID NO: 17585
  source 1..450: note = Description of Artificial Sequence: Synthetic polypeptide; note = XENP020263 7G8_H0L2_IgG1_PVA_/S267K Heavy Chain

SEQ ID NO: 17746 - protein, 121 aa, synthetic construct; identical to SEQ ID NO: 17586
  source 1..121: note = Description of Artificial Sequence: Synthetic polypeptide; note = VH of XENP020263

SEQ ID NO: 17747 - protein, 5 aa, synthetic construct
  source 1..5: note = Description of Artificial Sequence: Synthetic peptide; note = XENP020263 vhCDR1
DAWMD

SEQ ID NO: 17748 - protein, 19 aa, synthetic construct
  source 1..19: note = Description of Artificial Sequence: Synthetic peptide; note = XENP020263 vhCDR2
EIRTKANNHATYYAESVKG

SEQ ID NO: 17749 - protein, 10 aa, synthetic construct
  source 1..10: note = Description of Artificial Sequence: Synthetic peptide; note = XENP020263 vhCDR3
LANWDWYFDV

SEQ ID NO: 17750 - protein, 218 aa, synthetic construct; identical to SEQ ID NO: 17610
  source 1..218: note = Description of Artificial Sequence: Synthetic polypeptide; note = XENP020263 7G8_H0L2_IgG1_PVA_/S267K Light Chain

SEQ ID NO: 17751 - protein, 111 aa, synthetic construct; identical to SEQ ID NO: 17611
  source 1..111: note = Description of Artificial Sequence: Synthetic polypeptide; note = VL of XENP020263

SEQ ID NO: 17752 - protein, 15 aa, synthetic construct
  source 1..15: note = Description of Artificial Sequence: Synthetic peptide; note = XENP020263 vlCDR1
RASQSVDYDGDSYMN

SEQ ID NO: 17753 - protein, 7 aa, synthetic construct
  source 1..7: note = Description of Artificial Sequence: Synthetic peptide; note = XENP020263 vlCDR2
AASNLES

SEQ ID NO: 17754 - protein, 9 aa, synthetic construct
  source 1..9: note = Description of Artificial Sequence: Synthetic peptide; note = XENP020263 vlCDR3
QQSNEDPFT

SEQ ID NO: 17755 - protein, 444 aa, synthetic construct
  source 1..444: note = Description of Artificial Sequence: Synthetic polypeptide; note = XENP020412 8D7_H0L0_IgG1_PVA_/S267K Heavy Chain
QVQLKQSGPGLVQPSQSLSITCTVSGFSLSSYGVHWVRQSPGKGLEWLGVIWSGSTDYNAAFISRLSISKDNSKSQVFFKMNSLQPNDTAIYYCARTYYYAMDYWGQGTSVTVSSASTKGPSVFPLAPSSKSTSGGTAALGCLVKDYFPEPVTVSWNSGALTSGVHTFPAVLQSSGLYSLSSVVTVPSSSLGTQTYICNVNHKPSNTKVDKKVEPKSCDKTHTCPPCPAPPVAGPSVFLFPPKPKDTLMISRTPEVTCVVVDVKHEDPEVKFNWYVDGVEVHNAKTKPREEQYNSTYRVVSVLTVLHQDWLNGKEYKCKVSNKALPAPIEKTISKAKGQPREPQVYTLPPSREEMTKNQVSLTCLVKGFYPSDIAVEWESNGQPENNYKTTPPVLDSDGSFFLYSKLTVDKSRWQQGNVFSCSVMHEALHNHYTQKSLSLSPGK

SEQ ID NO: 17756 - protein, 115 aa, synthetic construct
  source 1..115: note = Description of Artificial Sequence: Synthetic polypeptide; note = VH of XENP020412
QVQLKQSGPGLVQPSQSLSITCTVSGFSLSSYGVHWVRQSPGKGLEWLGVIWSGSTDYNAAFISRLSISKDNSKSQVFFKMNSLQPNDTAIYYCARTYYYAMDYWGQGTSVTVSS

SEQ ID NO: 17757 - protein, 5 aa, synthetic construct
  source 1..5: note = Description of Artificial Sequence: Synthetic peptide; note = XENP020412 vhCDR1
SYGVH

SEQ ID NO: 17758 - protein, 15 aa, synthetic construct
  source 1..15: note = Description of Artificial Sequence: Synthetic peptide; note = XENP020412 vhCDR2
VIWSGSTDYNAAFIS

SEQ ID NO: 17759 - protein, 8 aa, synthetic construct
  source 1..8: note = Description of Artificial Sequence: Synthetic peptide; note = XENP020412 vhCDR3
TYYYAMDY

SEQ ID NO: 17760 - protein, 214 aa, synthetic construct
  source 1..214: note = Description of Artificial Sequence: Synthetic polypeptide; note = XENP020412 8D7_H0L0_IgG1_PVA_/S267K Light Chain
DIQMTQSPASLSVSVGETVTITCRASENIYSNLAWYQQKQGKSPQFLIYAATNLADGVPSRFSGSGSGTQYSLKINSLQSEDFGSYYCQHFWGTPWTFGGGTKLEIKRTVAAPSVFIFPPSDEQLKSGTASVVCLLNNFYPREAKVQWKVDNALQSGNSQESVTEQDSKDSTYSLSSTLTLSKADYEKHKVYACEVTHQGLSSPVTKSFNRGEC

SEQ ID NO: 17761 - protein, 107 aa, synthetic construct
  source 1..107: note = Description of Artificial Sequence: Synthetic polypeptide; note = VL of XENP020412
DIQMTQSPASLSVSVGETVTITCRASENIYSNLAWYQQKQGKSPQFLIYAATNLADGVPSRFSGSGSGTQYSLKINSLQSEDFGSYYCQHFWGTPWTFGGGTKLEIK

SEQ ID NO: 17762 - protein, 11 aa, synthetic construct
  source 1..11: note = Description of Artificial Sequence: Synthetic peptide; note = XENP020412 vlCDR1
RASENIYSNLA

SEQ ID NO: 17763 - protein, 7 aa, synthetic construct
  source 1..7: note = Description of Artificial Sequence: Synthetic peptide; note = XENP020412 vlCDR2
AATNLAD

SEQ ID NO: 17764 - protein, 9 aa, synthetic construct
  source 1..9: note = Description of Artificial Sequence: Synthetic peptide; note = XENP020412 vlCDR3
QHFWGTPWT

SEQ ID NO: 17765 - protein, 444 aa, synthetic construct
  source 1..444: note = Description of Artificial Sequence: Synthetic polypeptide; note = XENP020413 8D7_H2L1_IgG1_PVA_/S267K Heavy Chain
QVQLVQSGAEVKKPGASVKVSCKVSGFSLSSYGVHWVRQAPGQGLEWLGVIWSGSTDYNAKFQGRVTITKDNSKSTVYFELSSLRSEDTAVYYCARTYYYAMDYWGQGTLVTVSSASTKGPSVFPLAPSSKSTSGGTAALGCLVKDYFPEPVTVSWNSGALTSGVHTFPAVLQSSGLYSLSSVVTVPSSSLGTQTYICNVNHKPSNTKVDKKVEPKSCDKTHTCPPCPAPPVAGPSVFLFPPKPKDTLMISRTPEVTCVVVDVKHEDPEVKFNWYVDGVEVHNAKTKPREEQYNSTYRVVSVLTVLHQDWLNGKEYKCKVSNKALPAPIEKTISKAKGQPREPQVYTLPPSREEMTKNQVSLTCLVKGFYPSDIAVEWESNGQPENNYKTTPPVLDSDGSFFLYSKLTVDKSRWQQGNVFSCSVMHEALHNHYTQKSLSLSPGK

SEQ ID NO: 17766 - protein, 115 aa, synthetic construct
  source 1..115: note = Description of Artificial Sequence: Synthetic polypeptide; note = VH of XENP020413
QVQLVQSGAEVKKPGASVKVSCKVSGFSLSSYGVHWVRQAPGQGLEWLGVIWSGSTDYNAKFQGRVTITKDNSKSTVYFELSSLRSEDTAVYYCARTYYYAMDYWGQGTLVTVSS

SEQ ID NO: 17767 - protein, 5 aa, synthetic construct
  source 1..5: note = Description of Artificial Sequence: Synthetic peptide; note = XENP020413 vhCDR1
SYGVH

SEQ ID NO: 17768 - protein, 15 aa, synthetic construct
  source 1..15: note = Description of Artificial Sequence: Synthetic peptide; note = XENP020413 vhCDR2
VIWSGSTDYNAKFQG

SEQ ID NO: 17769 - protein, 8 aa, synthetic construct
  source 1..8: note = Description of Artificial Sequence: Synthetic peptide; note = XENP020413 vhCDR3
TYYYAMDY

SEQ ID NO: 17770 - protein, 214 aa, synthetic construct; identical to SEQ ID NO: 17220
  source 1..214: note = Description of Artificial Sequence: Synthetic polypeptide; note = XENP020413 8D7_H2L1_IgG1_PVA_/S267K Light Chain

SEQ ID NO: 17771 - protein, 107 aa, synthetic construct; identical to SEQ ID NO: 17221
  source 1..107: note = Description of Artificial Sequence: Synthetic polypeptide; note = VL of XENP020413

SEQ ID NO: 17772 - protein, 11 aa, synthetic construct
  source 1..11: note = Description of Artificial Sequence: Synthetic peptide; note = XENP020413 vlCDR1
RASENIYSNLA

SEQ ID NO: 17773 - protein, 7 aa, synthetic construct
  source 1..7: note = Description of Artificial Sequence: Synthetic peptide; note = XENP020413 vlCDR2
AATNLAD

SEQ ID NO: 17774 - protein, 9 aa, synthetic construct
  source 1..9: note = Description of Artificial Sequence: Synthetic peptide; note = XENP020413 vlCDR3
QHFWGTPWT

SEQ ID NO: 17775 - protein, 444 aa, synthetic construct
  source 1..444: note = Description of Artificial Sequence: Synthetic polypeptide; note = XENP020414 8D7_H3L1_IgG1_PVA_/S267K Heavy Chain
QVQLVESGGGVVQPGRSLRLSCAVSGFSLSSYGVHWVRQAPGKGLEWVAVIWSGSTDYNAAVKGRFTISKDNSKSTVYLQMNSLRAEDTAVYYCARTYYYAMDYWGQGTLVTVSSASTKGPSVFPLAPSSKSTSGGTAALGCLVKDYFPEPVTVSWNSGALTSGVHTFPAVLQSSGLYSLSSVVTVPSSSLGTQTYICNVNHKPSNTKVDKKVEPKSCDKTHTCPPCPAPPVAGPSVFLFPPKPKDTLMISRTPEVTCVVVDVKHEDPEVKFNWYVDGVEVHNAKTKPREEQYNSTYRVVSVLTVLHQDWLNGKEYKCKVSNKALPAPIEKTISKAKGQPREPQVYTLPPSREEMTKNQVSLTCLVKGFYPSDIAVEWESNGQPENNYKTTPPVLDSDGSFFLYSKLTVDKSRWQQGNVFSCSVMHEALHNHYTQKSLSLSPGK

SEQ ID NO: 17776 - protein, 115 aa, synthetic construct
  source 1..115: note = Description of Artificial Sequence: Synthetic polypeptide; note = VH of XENP020414
QVQLVESGGGVVQPGRSLRLSCAVSGFSLSSYGVHWVRQAPGKGLEWVAVIWSGSTDYNAAVKGRFTISKDNSKSTVYLQMNSLRAEDTAVYYCARTYYYAMDYWGQGTLVTVSS

SEQ ID NO: 17777 - protein, 5 aa, synthetic construct
  source 1..5: note = Description of Artificial Sequence: Synthetic peptide; note = XENP020414 vhCDR1
SYGVH

SEQ ID NO: 17778 - protein, 15 aa, synthetic construct
  source 1..15: note = Description of Artificial Sequence: Synthetic peptide; note = XENP020414 vhCDR2
VIWSGSTDYNAAVKG

SEQ ID NO: 17779 - protein, 8 aa, synthetic construct
  source 1..8: note = Description of Artificial Sequence: Synthetic peptide; note = XENP020414 vhCDR3
TYYYAMDY

SEQ ID NO: 17780 - protein, 214 aa, synthetic construct; identical to SEQ ID NO: 17220
  source 1..214: note = Description of Artificial Sequence: Synthetic polypeptide; note = XENP020414 8D7_H3L1_IgG1_PVA_/S267K Light Chain

SEQ ID NO: 17781 - protein, 107 aa, synthetic construct; identical to SEQ ID NO: 17221
  source 1..107: note = Description of Artificial Sequence: Synthetic polypeptide; note = VL of XENP020414

SEQ ID NO: 17782 - protein, 11 aa, synthetic construct
  source 1..11: note = Description of Artificial Sequence: Synthetic peptide; note = XENP020414 vlCDR1
RASENIYSNLA

SEQ ID NO: 17783 - protein, 7 aa, synthetic construct
  source 1..7: note = Description of Artificial Sequence: Synthetic peptide; note = XENP020414 vlCDR2
AATNLAD

SEQ ID NO: 17784 - protein, 9 aa, synthetic construct
  source 1..9: note = Description of Artificial Sequence: Synthetic peptide; note = XENP020414 vlCDR3
QHFWGTPWT

SEQ ID NO: 17785 - protein, 449 aa, synthetic construct
  source 1..449: note = Description of Artificial Sequence: Synthetic polypeptide; note = XENP020415 4C8_H0L0_IgG1_PVA_/S267K Heavy Chain
EVQLQQSGPELVKPGASVKISCKASGYTFTDYNVHWVKQSHGKSLEWIGYIYPYTGGTGYNQKFKSKATLTVDNSSSTAYMELRSLTSEDSAVYYCARSDDGYSYAMDYWGQGTSVTVSSASTKGPSVFPLAPSSKSTSGGTAALGCLVKDYFPEPVTVSWNSGALTSGVHTFPAVLQSSGLYSLSSVVTVPSSSLGTQTYICNVNHKPSNTKVDKKVEPKSCDKTHTCPPCPAPPVAGPSVFLFPPKPKDTLMISRTPEVTCVVVDVKHEDPEVKFNWYVDGVEVHNAKTKPREEQYNSTYRVVSVLTVLHQDWLNGKEYKCKVSNKALPAPIEKTISKAKGQPREPQVYTLPPSREEMTKNQVSLTCLVKGFYPSDIAVEWESNGQPENNYKTTPPVLDSDGSFFLYSKLTVDKSRWQQGNVFSCSVMHEALHNHYTQKSLSLSPGK

SEQ ID NO: 17786 - protein, 120 aa, synthetic construct
  source 1..120: note = Description of Artificial Sequence: Synthetic polypeptide; note = VH of XENP020415
EVQLQQSGPELVKPGASVKISCKASGYTFTDYNVHWVKQSHGKSLEWIGYIYPYTGGTGYNQKFKSKATLTVDNSSSTAYMELRSLTSEDSAVYYCARSDDGYSYAMDYWGQGTSVTVSS

SEQ ID NO: 17787 - protein, 5 aa, synthetic construct
  source 1..5: note = Description of Artificial Sequence: Synthetic peptide; note = XENP020415 vhCDR1
DYNVH

SEQ ID NO: 17788 - protein, 17 aa, synthetic construct
  source 1..17: note = Description of Artificial Sequence: Synthetic peptide; note = XENP020415 vhCDR2
YIYPYTGGTGYNQKFKS

SEQ ID NO: 17789 - protein, 11 aa, synthetic construct
  source 1..11: note = Description of Artificial Sequence: Synthetic peptide; note = XENP020415 vhCDR3
SDDGYSYAMDY

SEQ ID NO: 17790 - protein, 213 aa, synthetic construct
  source 1..213: note = Description of Artificial Sequence: Synthetic polypeptide; note = XENP020415 4C8_H0L0_IgG1_PVA_/S267K Light Chain
DIQMTQTTSSLSASLGDRVTISCRASQDISNYLNWYQQKPDGTVKLLIYYTSRLHSGVPSRFSGSGSGTDYSLTISNLEQEDIATYFCQQGNTLWTFGGGTKLEIKRTVAAPSVFIFPPSDEQLKSGTASVVCLLNNFYPREAKVQWKVDNALQSGNSQESVTEQDSKDSTYSLSSTLTLSKADYEKHKVYACEVTHQGLSSPVTKSFNRGEC

SEQ ID NO: 17791 - protein, 106 aa, synthetic construct
  source 1..106: note = Description of Artificial Sequence: Synthetic polypeptide; note = VL of XENP020415
DIQMTQTTSSLSASLGDRVTISCRASQDISNYLNWYQQKPDGTVKLLIYYTSRLHSGVPSRFSGSGSGTDYSLTISNLEQEDIATYFCQQGNTLWTFGGGTKLEIK

SEQ ID NO: 17792 - protein, 11 aa, synthetic construct
  source 1..11: note = Description of Artificial Sequence: Synthetic peptide; note = XENP020415 vlCDR1
RASQDISNYLN

SEQ ID NO: 17793 - protein, 7 aa, synthetic construct
  source 1..7: note = Description of Artificial Sequence: Synthetic peptide; note = XENP020415 vlCDR2
YTSRLHS

SEQ ID NO: 17794 - protein, 8 aa, synthetic construct
  source 1..8: note = Description of Artificial Sequence: Synthetic peptide; note = XENP020415 vlCDR3
QQGNTLWT

SEQ ID NO: 17795 - protein, 449 aa, synthetic construct
  source 1..449: note = Description of Artificial Sequence: Synthetic polypeptide; note = XENP020416 4C8_H2L1_IgG1_PVA_/S267K Heavy Chain
QVQLVQSGAEVKKPGASVKVSCKASGYTFTDYNVHWVRQAPGQGLEWIGYIYPYTGGTGYNQKFQGRVTLTVDNSISTAYMELSSLRSEDTAVYYCARSDDGYSYAMDYWGQGTLVTVSSASTKGPSVFPLAPSSKSTSGGTAALGCLVKDYFPEPVTVSWNSGALTSGVHTFPAVLQSSGLYSLSSVVTVPSSSLGTQTYICNVNHKPSNTKVDKKVEPKSCDKTHTCPPCPAPPVAGPSVFLFPPKPKDTLMISRTPEVTCVVVDVKHEDPEVKFNWYVDGVEVHNAKTKPREEQYNSTYRVVSVLTVLHQDWLNGKEYKCKVSNKALPAPIEKTISKAKGQPREPQVYTLPPSREEMTKNQVSLTCLVKGFYPSDIAVEWESNGQPENNYKTTPPVLDSDGSFFLYSKLTVDKSRWQQGNVFSCSVMHEALHNHYTQKSLSLSPGK

SEQ ID NO: 17796 - protein, 120 aa, synthetic construct
  source 1..120: note = Description of Artificial Sequence: Synthetic polypeptide; note = VH of XENP020416
QVQLVQSGAEVKKPGASVKVSCKASGYTFTDYNVHWVRQAPGQGLEWIGYIYPYTGGTGYNQKFQGRVTLTVDNSISTAYMELSSLRSEDTAVYYCARSDDGYSYAMDYWGQGTLVTVSS

SEQ ID NO: 17797 - protein, 5 aa, synthetic construct
  source 1..5: note = Description of Artificial Sequence: Synthetic peptide; note = XENP020416 vhCDR1
DYNVH

SEQ ID NO: 17798 - protein, 17 aa, synthetic construct
  source 1..17: note = Description of Artificial Sequence: Synthetic peptide; note = XENP020416 vhCDR2
YIYPYTGGTGYNQKFQG

SEQ ID NO: 17799 - protein, 11 aa, synthetic construct
  source 1..11: note = Description of Artificial Sequence: Synthetic peptide; note = XENP020416 vhCDR3
SDDGYSYAMDY

SEQ ID NO: 17800 - protein, 213 aa, synthetic construct; identical to SEQ ID NO: 17440
  source 1..213: note = Description of Artificial Sequence: Synthetic polypeptide; note = XENP020416 4C8_H2L1_IgG1_PVA_/S267K Light Chain

SEQ ID NO: 17801 - protein, 106 aa, synthetic construct; identical to SEQ ID NO: 17441
  source 1..106: note = Description of Artificial Sequence: Synthetic polypeptide; note = VL of XENP020416

SEQ ID NO: 17802 - protein, 11 aa, synthetic construct
  source 1..11: note = Description of Artificial Sequence: Synthetic peptide; note = XENP020416 vlCDR1
QASQDISNYLN

SEQ ID NO: 17803 - protein, 7 aa, synthetic construct
  source 1..7: note = Description of Artificial Sequence: Synthetic peptide; note = XENP020416 vlCDR2
YTSRLHS

SEQ ID NO: 17804 - protein, 8 aa, synthetic construct
  source 1..8: note = Description of Artificial Sequence: Synthetic peptide; note = XENP020416 vlCDR3
QQGNTLWT

SEQ ID NO: 17805 - protein, 450 aa, synthetic construct
  source 1..450: note = Description of Artificial Sequence: Synthetic polypeptide; note = XENP020417 7G8_H3L1_IgG1_PVA_/S267K Heavy Chain
EVQLVESGGGLVQPGGSLRLSCAASGFTFSDAWMDWVRQAPGKGLEWVAEIRTKANNHATYYAESVKGRFTISRDDSKSSVYLQMNSLRAEDTAVYYCTRLANWDWYFDVWGQGTTVTVSSASTKGPSVFPLAPSSKSTSGGTAALGCLVKDYFPEPVTVSWNSGALTSGVHTFPAVLQSSGLYSLSSVVTVPSSSLGTQTYICNVNHKPSNTKVDKKVEPKSCDKTHTCPPCPAPPVAGPSVFLFPPKPKDTLMISRTPEVTCVVVDVKHEDPEVKFNWYVDGVEVHNAKTKPREEQYNSTYRVVSVLTVLHQDWLNGKEYKCKVSNKALPAPIEKTISKAKGQPREPQVYTLPPSREEMTKNQVSLTCLVKGFYPSDIAVEWESNGQPENNYKTTPPVLDSDGSFFLYSKLTVDKSRWQQGNVFSCSVMHEALHNHYTQKSLSLSPGK

SEQ ID NO: 17806 - protein, 121 aa, synthetic construct
  source 1..121: note = Description of Artificial Sequence: Synthetic polypeptide; note = VH of XENP020417
EVQLVESGGGLVQPGGSLRLSCAASGFTFSDAWMDWVRQAPGKGLEWVAEIRTKANNHATYYAESVKGRFTISRDDSKSSVYLQMNSLRAEDTAVYYCTRLANWDWYFDVWGQGTTVTVSS

SEQ ID NO: 17807 - protein, 5 aa, synthetic construct
  source 1..5: note = Description of Artificial Sequence: Synthetic peptide; note = XENP020417 vhCDR1
DAWMD

SEQ ID NO: 17808 - protein, 19 aa, synthetic construct
  source 1..19: note = Description of Artificial Sequence: Synthetic peptide; note = XENP020417 vhCDR2
EIRTKANNHATYYAESVKG

SEQ ID NO: 17809 - protein, 10 aa, synthetic construct
  source 1..10: note = Description of Artificial Sequence: Synthetic peptide; note = XENP020417 vhCDR3
LANWDWYFDV

SEQ ID NO: 17810 - protein, 218 aa, synthetic construct; identical to SEQ ID NO: 17600
  source 1..218: note = Description of Artificial Sequence: Synthetic polypeptide; note = XENP020417 7G8_H3L1_IgG1_PVA_/S267K Light Chain

SEQ ID NO: 17811 - protein, 111 aa, synthetic construct; identical to SEQ ID NO: 17601
  source 1..111: note = Description of Artificial Sequence: Synthetic polypeptide; note = VL of XENP020417

SEQ ID NO: 17812 - protein, 15 aa, synthetic construct
  source 1..15: note = Description of Artificial Sequence: Synthetic peptide; note = XENP020417 vlCDR1
RASQSVDYDGDSYMN

SEQ ID NO: 17813 - protein, 7 aa, synthetic construct
  source 1..7: note = Description of Artificial Sequence: Synthetic peptide; note = XENP020417 vlCDR2
AASNLES

SEQ ID NO: 17814 - protein, 9 aa, synthetic construct
  source 1..9: note = Description of Artificial Sequence: Synthetic peptide; note = XENP020417 vlCDR3
QQSNEDPFT

SEQ ID NO: 17815 - protein, 450 aa, synthetic construct; identical to SEQ ID NO: 17805
  source 1..450: note = Description of Artificial Sequence: Synthetic polypeptide; note = XENP020418 7G8_H3L2_IgG1_PVA_/S267K Heavy Chain

SEQ ID NO: 17816 - protein, 121 aa, synthetic construct; identical to SEQ ID NO: 17806
  source 1..121: note = Description of Artificial Sequence: Synthetic polypeptide; note = VH of XENP020418

SEQ ID NO: 17817 - protein, 5 aa, synthetic construct
  source 1..5: note = Description of Artificial Sequence: Synthetic peptide; note = XENP020418 vhCDR1
DAWMD

SEQ ID NO: 17818 - protein, 19 aa, synthetic construct
  source 1..19: note = Description of Artificial Sequence: Synthetic peptide; note = XENP020418 vhCDR2
EIRTKANNHATYYAESVKG

SEQ ID NO: 17819 - protein, 10 aa, synthetic construct
  source 1..10: note = Description of Artificial Sequence: Synthetic peptide; note = XENP020418 vhCDR3
LANWDWYFDV

SEQ ID NO: 17820 - protein, 218 aa, synthetic construct; identical to SEQ ID NO: 17610
  source 1..218: note = Description of Artificial Sequence: Synthetic polypeptide; note = XENP020418 7G8_H3L2_IgG1_PVA_/S267K Light Chain

SEQ ID NO: 17821 - protein, 111 aa, synthetic construct; identical to SEQ ID NO: 17611
  source 1..111: note = Description of Artificial Sequence: Synthetic polypeptide; note = VL of XENP020418

SEQ ID NO: 17822 - protein, 15 aa, synthetic construct
  source 1..15: note = Description of Artificial Sequence: Synthetic peptide; note = XENP020418 vlCDR1
RASQSVDYDGDSYMN

SEQ ID NO: 17823 - protein, 7 aa, synthetic construct
  source 1..7: note = Description of Artificial Sequence: Synthetic peptide; note = XENP020418 vlCDR2
AASNLES

SEQ ID NO: 17824 - protein, 9 aa, synthetic construct
  source 1..9: note = Description of Artificial Sequence: Synthetic peptide; note = XENP020418 vlCDR3
QQSNEDPFT

SEQ ID NO: 17825 - protein, 450 aa, synthetic construct; identical to SEQ ID NO: 17805
  source 1..450: note = Description of Artificial Sequence: Synthetic polypeptide; note = XENP020419 7G8_H3L3_IgG1_PVA_/S267K Heavy Chain

SEQ ID NO: 17826 - protein, 121 aa, synthetic construct; identical to SEQ ID NO: 17806
  source 1..121: note = Description of Artificial Sequence: Synthetic polypeptide; note = VH of XENP020419

SEQ ID NO: 17827 - protein, 5 aa, synthetic construct
  source 1..5: note = Description of Artificial Sequence: Synthetic peptide; note = XENP020419 vhCDR1
DAWMD

SEQ ID NO: 17828 - protein, 19 aa, synthetic construct
  source 1..19: note = Description of Artificial Sequence: Synthetic peptide; note = XENP020419 vhCDR2
EIRTKANNHATYYAESVKG

SEQ ID NO: 17829 - protein, 10 aa, synthetic construct
  source 1..10: note = Description of Artificial Sequence: Synthetic peptide; note = XENP020419 vhCDR3
LANWDWYFDV

SEQ ID NO: 17830 - protein, 218 aa, synthetic construct; identical to SEQ ID NO: 17620
  source 1..218: note = Description of Artificial Sequence: Synthetic polypeptide; note = XENP020419 7G8_H3L3_IgG1_PVA_/S267K Light Chain

SEQ ID NO: 17831 - protein, 111 aa, synthetic construct; identical to SEQ ID NO: 17621
  source 1..111: note = Description of Artificial Sequence: Synthetic polypeptide; note = VL of XENP020419

SEQ ID NO: 17832 - protein, 15 aa, synthetic construct
  source 1..15: note = Description of Artificial Sequence: Synthetic peptide; note = XENP020419 vlCDR1
KASQSVDYDGDSYMN

SEQ ID NO: 17833 - protein, 7 aa, synthetic construct
  source 1..7: note = Description of Artificial Sequence: Synthetic peptide; note = XENP020419 vlCDR2
AASNLES

SEQ ID NO: 17834 - protein, 9 aa, synthetic construct
  source 1..9: note = Description of Artificial Sequence: Synthetic peptide; note = XENP020419 vlCDR3
QQSNEDPFT

SEQ ID NO: 17835 - protein, 444 aa, synthetic construct; identical to SEQ ID NO: 17755
  source 1..444: note = Description of Artificial Sequence: Synthetic polypeptide; note = XENP020412 8D7_H0L0_IgG1_PVA_/S267K Heavy Chain

SEQ ID NO: 17836 - protein, 115 aa, synthetic construct; identical to SEQ ID NO: 17756
  source 1..115: note = Description of Artificial Sequence: Synthetic polypeptide; note = VH of XENP020412

SEQ ID NO: 17837 - protein, 5 aa, synthetic construct
  source 1..5: note = Description of Artificial Sequence: Synthetic peptide; note = XENP020412 vhCDR1
SYGVH

SEQ ID NO: 17838 - protein, 15 aa, synthetic construct
  source 1..15: note = Description of Artificial Sequence: Synthetic peptide; note = XENP020412 vhCDR2
VIWSGSTDYNAAFIS

SEQ ID NO: 17839 - protein, 8 aa, synthetic construct
  source 1..8: note = Description of Artificial Sequence: Synthetic peptide; note = XENP020412 vhCDR3
TYYYAMDY

SEQ ID NO: 17840 - protein, 214 aa, synthetic construct; identical to SEQ ID NO: 17760
  source 1..214: note = Description of Artificial Sequence: Synthetic polypeptide; note = XENP020412 8D7_H0L0_IgG1_PVA_/S267K Light Chain

SEQ ID NO: 17841 - protein, 107 aa, synthetic construct; identical to SEQ ID NO: 17761
  source 1..107: note = Description of Artificial Sequence: Synthetic polypeptide; note = VL of XENP020412

SEQ ID NO: 17842 - protein, 11 aa, synthetic construct
  source 1..11: note = Description of Artificial Sequence: Synthetic peptide; note = XENP020412 vlCDR1
RASENIYSNLA

SEQ ID NO: 17843 - protein, 7 aa, synthetic construct
  source 1..7: note = Description of Artificial Sequence: Synthetic peptide; note = XENP020412 vlCDR2
AATNLAD

SEQ ID NO: 17844 - protein, 9 aa, synthetic construct
  source 1..9: note = Description of Artificial Sequence: Synthetic peptide; note = XENP020412 vlCDR3
QHFWGTPWT

SEQ ID NO: 17845 - protein, 444 aa, synthetic construct; identical to SEQ ID NO: 17765
  source 1..444: note = Description of Artificial Sequence: Synthetic polypeptide; note = XENP020413 8D7_H2L1_IgG1_PVA_/S267K Heavy Chain

SEQ ID NO: 17846 - protein, 115 aa, synthetic construct; identical to SEQ ID NO: 17766
  source 1..115: note = Description of Artificial Sequence: Synthetic polypeptide; note = VH of XENP020413

SEQ ID NO: 17847 - protein, 5 aa, synthetic construct
  source 1..5: note = Description of Artificial Sequence: Synthetic peptide; note = XENP020413 vhCDR1
SYGVH

SEQ ID NO: 17848 - protein, 15 aa, synthetic construct
  source 1..15: note = Description of Artificial Sequence: Synthetic peptide; note = XENP020413 vhCDR2
VIWSGSTDYNAKFQG

SEQ ID NO: 17849 - protein, 8 aa, synthetic construct
  source 1..8: note = Description of Artificial Sequence: Synthetic peptide; note = XENP020413 vhCDR3
TYYYAMDY

SEQ ID NO: 17850 - protein, 214 aa, synthetic construct; identical to SEQ ID NO: 17220
  source 1..214: note = Description of Artificial Sequence: Synthetic polypeptide; note = XENP020413 8D7_H2L1_IgG1_PVA_/S267K Light Chain

SEQ ID NO: 17851 - protein, 107 aa, synthetic construct; identical to SEQ ID NO: 17221
  source 1..107: note = Description of Artificial Sequence: Synthetic polypeptide; note = VL of XENP020413

SEQ ID NO: 17852 - protein, 11 aa, synthetic construct
  source 1..11: note = Description of Artificial Sequence: Synthetic peptide; note = XENP020413 vlCDR1
RASENIYSNLA

SEQ ID NO: 17853 - protein, 7 aa, synthetic construct
  source 1..7: note = Description of Artificial Sequence: Synthetic peptide; note = XENP020413 vlCDR2
AATNLAD

SEQ ID NO: 17854 - protein, 9 aa, synthetic construct
  source 1..9: note = Description of Artificial Sequence: Synthetic peptide; note = XENP020413 vlCDR3
QHFWGTPWT

SEQ ID NO: 17855 - protein, 444 aa, synthetic construct; identical to SEQ ID NO: 17775
  source 1..444: note = Description of Artificial Sequence: Synthetic polypeptide; note = XENP020414 8D7_H3L1_IgG1_PVA_/S267K Heavy Chain

SEQ ID NO: 17856 - protein, 115 aa, synthetic construct; identical to SEQ ID NO: 17776
  source 1..115: note = Description of Artificial Sequence: Synthetic polypeptide; note = VH of XENP020414

SEQ ID NO: 17857 - protein, 5 aa, synthetic construct
  source 1..5: note = Description of Artificial Sequence: Synthetic peptide; note = XENP020414 vhCDR1
SYGVH

SEQ ID NO: 17858 - protein, 15 aa, synthetic construct
  source 1..15: note = Description of Artificial Sequence: Synthetic peptide; note = XENP020414 vhCDR2
VIWSGSTDYNAAVKG

SEQ ID NO: 17859 - protein, 8 aa, synthetic construct
  source 1..8: note = Description of Artificial Sequence: Synthetic peptide; note = XENP020414 vhCDR3
TYYYAMDY

SEQ ID NO: 17860 - protein, 214 aa, synthetic construct; identical to SEQ ID NO: 17220
  source 1..214: note = Description of Artificial Sequence: Synthetic polypeptide; note = XENP020414 8D7_H3L1_IgG1_PVA_/S267K Light Chain

SEQ ID NO: 17861 - protein, 107 aa, synthetic construct; identical to SEQ ID NO: 17221
  source 1..107: note = Description of Artificial Sequence: Synthetic polypeptide; note = VL of XENP020414

SEQ ID NO: 17862 - protein, 11 aa, synthetic construct
  source 1..11: note = Description of Artificial Sequence: Synthetic peptide; note = XENP020414 vlCDR1
RASENIYSNLA

SEQ ID NO: 17863 - protein, 7 aa, synthetic construct
  source 1..7: note = Description of Artificial Sequence: Synthetic peptide; note = XENP020414 vlCDR2
AATNLAD

SEQ ID NO: 17864 - protein, 9 aa, synthetic construct
  source 1..9: note = Description of Artificial Sequence: Synthetic peptide; note = XENP020414 vlCDR3
QHFWGTPWT

SEQ ID NO: 17865 - protein, 449 aa, synthetic construct; identical to SEQ ID NO: 17785
  source 1..449: note = Description of Artificial Sequence: Synthetic polypeptide; note = XENP020415 4C8_H0L0_IgG1_PVA_/S267K Heavy Chain

SEQ ID NO: 17866 - protein, 120 aa, synthetic construct; identical to SEQ ID NO: 17786
  source 1..120: note = Description of Artificial Sequence: Synthetic polypeptide; note = VH of XENP020415

SEQ ID NO: 17867 - protein, 5 aa, synthetic construct
  source 1..5: note = Description of Artificial Sequence: Synthetic peptide; note = XENP020415 vhCDR1
DYNVH

SEQ ID NO: 17868 - protein, 17 aa, synthetic construct
  source 1..17: note = Description of Artificial Sequence: Synthetic peptide; note = XENP020415 vhCDR2
YIYPYTGGTGYNQKFKS

SEQ ID NO: 17869 - protein, 11 aa, synthetic construct
  source 1..11: note = Description of Artificial Sequence: Synthetic peptide; note = XENP020415 vhCDR3
SDDGYSYAMDY

SEQ ID NO: 17870 - protein, 213 aa, synthetic construct; identical to SEQ ID NO: 17790
  source 1..213: note = Description of Artificial Sequence: Synthetic polypeptide; note = XENP020415 4C8_H0L0_IgG1_PVA_/S267K Light Chain

SEQ ID NO: 17871 - protein, 106 aa, synthetic construct; identical to SEQ ID NO: 17791
  source 1..106: note = Description of Artificial Sequence: Synthetic polypeptide; note = VL of XENP020415

SEQ ID NO: 17872 - protein, 11 aa, synthetic construct
  source 1..11: note = Description of Artificial Sequence: Synthetic peptide; note = XENP020415 vlCDR1
RASQDISNYLN

SEQ ID NO: 17873 - protein, 7 aa, synthetic construct
  source 1..7: note = Description of Artificial Sequence: Synthetic peptide; note = XENP020415 vlCDR2
YTSRLHS

SEQ ID NO: 17874 - protein, 8 aa, synthetic construct
  source 1..8: note = Description of Artificial Sequence: Synthetic peptide; note = XENP020415 vlCDR3
QQGNTLWT

SEQ ID NO: 17875 - protein, 449 aa, synthetic construct; identical to SEQ ID NO: 17795
  source 1..449: note = Description of Artificial Sequence: Synthetic polypeptide; note = XENP020416 4C8_H2L1_IgG1_PVA_/S267K Heavy Chain

SEQ ID NO: 17876 - protein, 120 aa, synthetic construct; identical to SEQ ID NO: 17796
  source 1..120: note = Description of Artificial Sequence: Synthetic polypeptide; note = VH of XENP020416

SEQ ID NO: 17877 - protein, 5 aa, synthetic construct
  source 1..5: note = Description of Artificial Sequence: Synthetic peptide; note = XENP020416 vhCDR1
DYNVH

SEQ ID NO: 17878 - protein, 17 aa, synthetic construct
  source 1..17: note = Description of Artificial Sequence: Synthetic peptide; note = XENP020416 vhCDR2
YIYPYTGGTGYNQKFQG

SEQ ID NO: 17879 - protein, 11 aa, synthetic construct
  source 1..11: note = Description of Artificial Sequence: Synthetic peptide; note = XENP020416 vhCDR3
SDDGYSYAMDY

SEQ ID NO: 17880 - protein, 213 aa, synthetic construct; identical to SEQ ID NO: 17440
  source 1..213: note = Description of Artificial Sequence: Synthetic polypeptide; note = XENP020416 4C8_H2L1_IgG1_PVA_/S267K Light Chain

SEQ ID NO: 17881 - protein, 106 aa, synthetic construct; identical to SEQ ID NO: 17441
  source 1..106: note = Description of Artificial Sequence: Synthetic polypeptide; note = VL of XENP020416

SEQ ID NO: 17882 - protein, 11 aa, synthetic construct
  source 1..11: note = Description of Artificial Sequence: Synthetic peptide; note = XENP020416 vlCDR1
QASQDISNYLN

SEQ ID NO: 17883 - protein, 7 aa, synthetic construct
  source 1..7: note = Description of Artificial Sequence: Synthetic peptide; note = XENP020416 vlCDR2
YTSRLHS

SEQ ID NO: 17884 - protein, 8 aa, synthetic construct
  source 1..8: note = Description of Artificial Sequence: Synthetic peptide; note = XENP020416 vlCDR3
QQGNTLWT

SEQ ID NO: 17885 - protein, 450 aa, synthetic construct; identical to SEQ ID NO: 17805
  source 1..450: note = Description of Artificial Sequence: Synthetic polypeptide; note = XENP020417 7G8_H3L1_IgG1_PVA_/S267K Heavy Chain

SEQ ID NO: 17886 - protein, 121 aa, synthetic construct; identical to SEQ ID NO: 17806
  source 1..121: note = Description of Artificial Sequence: Synthetic polypeptide; note = VH of XENP020417

SEQ ID NO: 17887 - protein, 5 aa, synthetic construct
  source 1..5: note = Description of Artificial Sequence: Synthetic peptide; note = XENP020417 vhCDR1
DAWMD

SEQ ID NO: 17888 - protein, 19 aa, synthetic construct
  source 1..19: note = Description of Artificial Sequence: Synthetic peptide; note = XENP020417 vhCDR2
EIRTKANNHATYYAESVKG

SEQ ID NO: 17889 - protein, 10 aa, synthetic construct
  source 1..10: note = Description of Artificial Sequence: Synthetic peptide; note = XENP020417 vhCDR3
LANWDWYFDV

SEQ ID NO: 17890 - protein, 218 aa, synthetic construct; identical to SEQ ID NO: 17600
  source 1..218: note = Description of Artificial Sequence: Synthetic polypeptide; note = XENP020417 7G8_H3L1_IgG1_PVA_/S267K Light Chain

SEQ ID NO: 17891 - protein, 111 aa, synthetic construct; identical to SEQ ID NO: 17601
  source 1..111: note = Description of Artificial Sequence: Synthetic polypeptide; note = VL of XENP020417

SEQ ID NO: 17892 - protein, 15 aa, synthetic construct
  source 1..15: note = Description of Artificial Sequence: Synthetic peptide; note = XENP020417 vlCDR1
RASQSVDYDGDSYMN

SEQ ID NO: 17893 - protein, 7 aa, synthetic construct
  source 1..7: note = Description of Artificial Sequence: Synthetic peptide; note = XENP020417 vlCDR2
AASNLES

SEQ ID NO: 17894 - protein, 9 aa, synthetic construct
  source 1..9: note = Description of Artificial Sequence: Synthetic peptide; note = XENP020417 vlCDR3
QQSNEDPFT

SEQ ID NO: 17895 - protein, 450 aa, synthetic construct; identical to SEQ ID NO: 17805
  source 1..450: note = Description of Artificial Sequence: Synthetic polypeptide; note = XENP020418 7G8_H3L2_IgG1_PVA_/S267K Heavy Chain

SEQ ID NO: 17896 - protein, 121 aa, synthetic construct; identical to SEQ ID NO: 17806
  source 1..121: note = Description of Artificial Sequence: Synthetic polypeptide; note = VH of XENP020418

SEQ ID NO: 17897 - protein, 5 aa, synthetic construct
  source 1..5: note = Description of Artificial Sequence: Synthetic peptide; note = XENP020418 vhCDR1
DAWMD

SEQ ID NO: 17898 - protein, 19 aa, synthetic construct
  source 1..19: note = Description of Artificial Sequence: Synthetic peptide; note = XENP020418 vhCDR2
EIRTKANNHATYYAESVKG

SEQ ID NO: 17899 - protein, 10 aa, synthetic construct
  source 1..10: note = Description of Artificial Sequence: Synthetic peptide; note = XENP020418 vhCDR3
LANWDWYFDV

SEQ ID NO: 17900 - protein, 218 aa, synthetic construct; identical to SEQ ID NO: 17610
  source 1..218: note = Description of Artificial Sequence: Synthetic polypeptide; note = XENP020418 7G8_H3L2_IgG1_PVA_/S267K Light Chain

SEQ ID NO: 17901 - protein, 111 aa, synthetic construct; identical to SEQ ID NO: 17611
  source 1..111: note = Description of Artificial Sequence: Synthetic polypeptide; note = VL of XENP020418

SEQ ID NO: 17902 - protein, 15 aa, synthetic construct
  source 1..15: note = Description of Artificial Sequence: Synthetic peptide; note = XENP020418 vlCDR1
RASQSVDYDGDSYMN

SEQ ID NO: 17903 - protein, 7 aa, synthetic construct
  source 1..7: note = Description of Artificial Sequence: Synthetic peptide; note = XENP020418 vlCDR2
AASNLES

SEQ ID NO: 17904 - protein, 9 aa, synthetic construct
  source 1..9: note = Description of Artificial Sequence: Synthetic peptide; note = XENP020418 vlCDR3
QQSNEDPFT

SEQ ID NO: 17905 - protein, 450 aa, synthetic construct; identical to SEQ ID NO: 17805
  source 1..450: note = Description of Artificial Sequence: Synthetic polypeptide; note = XENP020419 7G8_H3L3_IgG1_PVA_/S267K Heavy Chain

SEQ ID NO: 17906 - protein, 121 aa, synthetic construct; identical to SEQ ID NO: 17806
  source 1..121: note = Description of Artificial Sequence: Synthetic polypeptide; note = VH of XENP020419

SEQ ID NO: 17907 - protein, 5 aa, synthetic construct
  source 1..5: note = Description of Artificial Sequence: Synthetic peptide; note = XENP020419 vhCDR1
DAWMD

SEQ ID NO: 17908 - protein, 19 aa, synthetic construct
  source 1..19: note = Description of Artificial Sequence: Synthetic peptide; note = XENP020419 vhCDR2
EIRTKANNHATYYAESVKG

SEQ ID NO: 17909 - protein, 10 aa, synthetic construct
  source 1..10: note = Description of Artificial Sequence: Synthetic peptide; note = XENP020419 vhCDR3
LANWDWYFDV

SEQ ID NO: 17910 - protein, 218 aa, synthetic construct; identical to SEQ ID NO: 17620
  source 1..218: note = Description of Artificial Sequence: Synthetic polypeptide; note = XENP020419 7G8_H3L3_IgG1_PVA_/S267K Light Chain

SEQ ID NO: 17911 - protein, 111 aa, synthetic construct; identical to SEQ ID NO: 17621
  source 1..111: note = Description of Artificial Sequence: Synthetic polypeptide; note = VL of XENP020419

SEQ ID NO: 17912 - protein, 15 aa, synthetic construct
  source 1..15: note = Description of Artificial Sequence: Synthetic peptide; note = XENP020419 vlCDR1
KASQSVDYDGDSYMN

SEQ ID NO: 17913 - protein, 7 aa, synthetic construct
  source 1..7: note = Description of Artificial Sequence: Synthetic peptide; note = XENP020419 vlCDR2
AASNLES

SEQ ID NO: 17914 - protein, 9 aa, synthetic construct
  source 1..9: note = Description of Artificial Sequence: Synthetic peptide; note = XENP020419 vlCDR3
QQSNEDPFT

SEQ ID NO: 17915 - protein, 449 aa, synthetic construct; identical to SEQ ID NO: 17435
  source 1..449: note = Description of Artificial Sequence: Synthetic polypeptide; note = XENP020420 4C8_H1L2_IgG1_PVA_/S267K Heavy Chain

SEQ ID NO: 17916 - protein, 120 aa, synthetic construct; identical to SEQ ID NO: 17436
  source 1..120: note = Description of Artificial Sequence: Synthetic polypeptide; note = VH of XENP020420

SEQ ID NO: 17917 - protein, 5 aa, synthetic construct
  source 1..5: note = Description of Artificial Sequence: Synthetic peptide; note = XENP020420 vhCDR1
DYNMH

SEQ ID NO: 17918 - protein, 17 aa, synthetic construct
  source 1..17: note = Description of Artificial Sequence: Synthetic peptide; note = XENP020420 vhCDR2
YIYPYTGGTGYNQKFQG

SEQ ID NO: 17919 - protein, 11 aa, synthetic construct
  source 1..11: note = Description of Artificial Sequence: Synthetic peptide; note = XENP020420 vhCDR3
SDDGYSYAMDY

SEQ ID NO: 17920 - protein, 213 aa, synthetic construct
  source 1..213: note = Description of Artificial Sequence: Synthetic polypeptide; note = XENP020420 4C8_H1L2_IgG1_PVA_/S267K Light Chain
DIQMTQSPSSLSASVGDRVTITCRASQDISNYLNWYQQKPGKAPKLLIYYTSRLHSGVPSRFSGSGSGTDYTLTISSLQPEDFATYFCQQGNTLWTFGGGTKVEIKRTVAAPSVFIFPPSDEQLKSGTASVVCLLNNFYPREAKVQWKVDNALQSGNSQESVTEQDSKDSTYSLSSTLTLSKADYEKHKVYACEVTHQGLSSPVTKSFNRGEC

SEQ ID NO: 17921 - protein, 106 aa, synthetic construct
  source 1..106: note = Description of Artificial Sequence: Synthetic polypeptide; note = VL of XENP020420
DIQMTQSPSSLSASVGDRVTITCRASQDISNYLNWYQQKPGKAPKLLIYYTSRLHSGVPSRFSGSGSGTDYTLTISSLQPEDFATYFCQQGNTLWTFGGGTKVEIK

SEQ ID NO: 17922 - protein, 11 aa, synthetic construct
  source 1..11: note = Description of Artificial Sequence: Synthetic peptide; note = XENP020420 vlCDR1
RASQDISNYLN

SEQ ID NO: 17923 - protein, 7 aa, synthetic construct
  source 1..7: note = Description of Artificial Sequence: Synthetic peptide; note = XENP020420 vlCDR2
YTSRLHS

SEQ ID NO: 17924 - protein, 8 aa, synthetic construct
  source 1..8: note = Description of Artificial Sequence: Synthetic peptide; note = XENP020420 vlCDR3
QQGNTLWT

SEQ ID NO: 17925 - protein, 449 aa, synthetic construct; identical to SEQ ID NO: 17795
  source 1..449: note = Description of Artificial Sequence: Synthetic polypeptide; note = XENP020421 4C8_H2L2_IgG1_PVA_/S267K Heavy Chain

SEQ ID NO: 17926 - protein, 120 aa, synthetic construct; identical to SEQ ID NO: 17796
  source 1..120: note = Description of Artificial Sequence: Synthetic polypeptide; note = VH of XENP020421

SEQ ID NO: 17927 - protein, 5 aa, synthetic construct
  source 1..5: note = Description of Artificial Sequence: Synthetic peptide; note = XENP020421 vhCDR1
DYNVH

SEQ ID NO: 17928 - protein, 17 aa, synthetic construct
  source 1..17: note = Description of Artificial Sequence: Synthetic peptide; note = XENP020421 vhCDR2
YIYPYTGGTGYNQKFQG

SEQ ID NO: 17929 - protein, 11 aa, synthetic construct
  source 1..11: note = Description of Artificial Sequence: Synthetic peptide; note = XENP020421 vhCDR3
SDDGYSYAMDY

SEQ ID NO: 17930 - protein, 213 aa, synthetic construct; identical to SEQ ID NO: 17920
  source 1..213: note = Description of Artificial Sequence: Synthetic polypeptide; note = XENP020421 4C8_H2L2_IgG1_PVA_/S267K Light Chain

SEQ ID NO: 17931 - protein, 106 aa, synthetic construct; identical to SEQ ID NO: 17921
  source 1..106: note = Description of Artificial Sequence: Synthetic polypeptide; note = VL of XENP020421

SEQ ID NO: 17932 - protein, 11 aa, synthetic construct
  source 1..11: note = Description of Artificial Sequence: Synthetic peptide; note = XENP020421 vlCDR1
RASQDISNYLN

SEQ ID NO: 17933 - protein, 7 aa, synthetic construct
  source 1..7: note = Description of Artificial Sequence: Synthetic peptide; note = XENP020421 vlCDR2
YTSRLHS

SEQ ID NO: 17934 - protein, 8 aa, synthetic construct
  source 1..8: note = Description of Artificial Sequence: Synthetic peptide; note = XENP020421 vlCDR3
QQGNTLWT

SEQ ID NO: 17935 - protein, 447 aa, synthetic construct; identical to SEQ ID NO: 17225
  source 1..447: note = Description of Artificial Sequence: Synthetic polypeptide; note = XENP019361 2A11_H0L0_IgG1_PVA_/S267K Heavy Chain

SEQ ID NO: 17936 - protein, 118 aa, synthetic construct; identical to SEQ ID NO: 17226
  source 1..118: note = Description of Artificial Sequence: Synthetic polypeptide; note = VH of XENP019361

SEQ ID NO: 17937 - protein, 5 aa, synthetic construct
  source 1..5: note = Description of Artificial Sequence: Synthetic peptide; note = XENP019361 vhCDR1
DYYMH

SEQ ID NO: 17938 - protein, 17 aa, synthetic construct
  source 1..17: note = Description of Artificial Sequence: Synthetic peptide; note = XENP019361 vhCDR2
WIDPENGDTEYAPKFQG

SEQ ID NO: 17939 - protein, 9 aa, synthetic construct
  source 1..9: note = Description of Artificial Sequence: Synthetic peptide; note = XENP019361 vhCDR3
RGVRQALDY

SEQ ID NO: 17940 - protein, 214 aa, synthetic construct; identical to SEQ ID NO: 17230
  source 1..214: note = Description of Artificial Sequence: Synthetic polypeptide; note = XENP019361 2A11_H0L0_IgG1_PVA_/S267K Light Chain

SEQ ID NO: 17941 - protein, 107 aa, synthetic construct; identical to SEQ ID NO: 17231
  source 1..107: note = Description of Artificial Sequence: Synthetic polypeptide; note = VL of XENP019361

SEQ ID NO: 17942 - protein, 11 aa, synthetic construct
  source 1..11: note = Description of Artificial Sequence: Synthetic peptide; note = XENP019361 vlCDR1
RASQDIGNYLN

SEQ ID NO: 17943 - protein, 7 aa, synthetic construct
  source 1..7: note = Description of Artificial Sequence: Synthetic peptide; note = XENP019361 vlCDR2
YTSRLHS

SEQ ID NO: 17944 - protein, 9 aa, synthetic construct
  source 1..9: note = Description of Artificial Sequence: Synthetic peptide; note = XENP019361 vlCDR3
QQGNTLPYT

SEQ ID NO: 17945 - protein, 447 aa, synthetic construct; identical to SEQ ID NO: 17235
  source 1..447: note = Description of Artificial Sequence: Synthetic polypeptide; note = XENP019362 2A11_H1L1_IgG1_PVA_/S267K Heavy Chain

SEQ ID NO: 17946 - protein, 118 aa, synthetic construct; identical to SEQ ID NO: 17236
  source 1..118: note = Description of Artificial Sequence: Synthetic polypeptide; note = VH of XENP019362

SEQ ID NO: 17947 - protein, 5 aa, synthetic construct
  source 1..5: note = Description of Artificial Sequence: Synthetic peptide; note = XENP019362 vhCDR1
DYYMH

SEQ ID NO: 17948 - protein, 17 aa, synthetic construct
  source 1..17: note = Description of Artificial Sequence: Synthetic peptide; note = XENP019362 vhCDR2
WIDPENGDTEYAPKFQG

SEQ ID NO: 17949 - protein, 9 aa, synthetic construct
  source 1..9: note = Description of Artificial Sequence: Synthetic peptide; note = XENP019362 vhCDR3
RGVRQALDY

SEQ ID NO: 17950 - protein, 214 aa, synthetic construct; identical to SEQ ID NO: 17240
  source 1..214: note = Description of Artificial Sequence: Synthetic polypeptide; note = XENP019362 2A11_H1L1_IgG1_PVA_/S267K Light Chain

SEQ ID NO: 17951 - protein, 107 aa, synthetic construct; identical to SEQ ID NO: 17241
  source 1..107: note = Description of Artificial Sequence: Synthetic polypeptide; note = VL of XENP019362

SEQ ID NO: 17952 - protein, 11 aa, synthetic construct
  source 1..11: note = Description of Artificial Sequence: Synthetic peptide; note = XENP019362 vlCDR1
RASQDIGNYLN

SEQ ID NO: 17953 - protein, 7 aa, synthetic construct
  source 1..7: note = Description of Artificial Sequence: Synthetic peptide; note = XENP019362 vlCDR2
YTSRLHS

SEQ ID NO: 17954 - protein, 9 aa, synthetic construct
  source 1..9: note = Description of Artificial Sequence: Synthetic peptide; note = XENP019362 vlCDR3
QQGNTLPYT

SEQ ID NO: 17955 - protein, 447 aa, synthetic construct; identical to SEQ ID NO: 17235
  source 1..447: note = Description of Artificial Sequence: Synthetic polypeptide; note = XENP019363 2A11_H1L2_IgG1_PVA_/S267K Heavy Chain

SEQ ID NO: 17956 - protein, 118 aa, synthetic construct; identical to SEQ ID NO: 17236
  source 1..118: note = Description of Artificial Sequence: Synthetic polypeptide; note = VH of XENP019363

SEQ ID NO: 17957 - protein, 5 aa, synthetic construct
  source 1..5: note = Description of Artificial Sequence: Synthetic peptide; note = XENP019363 vhCDR1
DYYMH

SEQ ID NO: 17958 - protein, 17 aa, synthetic construct
  source 1..17: note = Description of Artificial Sequence: Synthetic peptide; note = XENP019363 vhCDR2
WIDPENGDTEYAPKFQG

SEQ ID NO: 17959 - protein, 9 aa, synthetic construct
  source 1..9: note = Description of Artificial Sequence: Synthetic peptide; note = XENP019363 vhCDR3
RGVRQALDY

SEQ ID NO: 17960 - protein, 214 aa, synthetic construct; identical to SEQ ID NO: 17250
  source 1..214: note = Description of Artificial Sequence: Synthetic polypeptide; note = XENP019363 2A11_H1L2_IgG1_PVA_/S267K Light Chain

SEQ ID NO: 17961 - protein, 107 aa, synthetic construct; identical to SEQ ID NO: 17251
  source 1..107: note = Description of Artificial Sequence: Synthetic polypeptide; note = VL of XENP019363

SEQ ID NO: 17962 - protein, 11 aa, synthetic construct
  source 1..11: note = Description of Artificial Sequence: Synthetic peptide; note = XENP019363 vlCDR1
QASQDIGNYLN

SEQ ID NO: 17963 - protein, 7 aa, synthetic construct
  source 1..7: note = Description of Artificial Sequence: Synthetic peptide; note = XENP019363 vlCDR2
YTSRLHS

SEQ ID NO: 17964 - protein, 9 aa, synthetic construct
  source 1..9: note = Description of Artificial Sequence: Synthetic peptide; note = XENP019363 vlCDR3
QQGNTLPYT

SEQ ID NO: 17965 - protein, 446 aa, synthetic construct; identical to SEQ ID NO: 17255
  source 1..446: note = Description of Artificial Sequence: Synthetic polypeptide; note = XENP019364 2A11_H2L1_IgG1_PVA_/S267K Heavy Chain

SEQ ID NO: 17966 - protein, 117 aa, synthetic construct; identical to SEQ ID NO: 17256
  source 1..117: note = Description of Artificial Sequence: Synthetic polypeptide; note = VH of XENP019364

SEQ ID NO: 17967 - protein, 5 aa, synthetic construct
  source 1..5: note = Description of Artificial Sequence: Synthetic peptide; note = XENP019364 vhCDR1
DYYMH

SEQ ID NO: 17968 - protein, 17 aa, synthetic construct
  source 1..17: note = Description of Artificial Sequence: Synthetic peptide; note = XENP019364 vhCDR2
WIDPENGDTEYAPKFQG

SEQ ID NO: 17969 - protein, 8 aa, synthetic construct
  source 1..8: note = Description of Artificial Sequence: Synthetic peptide; note = XENP019364 vhCDR3
GVRQALDY

SEQ ID NO: 17970 - protein, 214 aa, synthetic construct; identical to SEQ ID NO: 17240
  source 1..214: note = Description of Artificial Sequence: Synthetic polypeptide; note = XENP019364 2A11_H2L1_IgG1_PVA_/S267K Light Chain

SEQ ID NO: 17971 - protein, 107 aa, synthetic construct; identical to SEQ ID NO: 17241
  source 1..107: note = Description of Artificial Sequence: Synthetic polypeptide; note = VL of XENP019364

SEQ ID NO: 17972 - protein, 11 aa, synthetic construct
  source 1..11: note = Description of Artificial Sequence: Synthetic peptide; note = XENP019364 vlCDR1
RASQDIGNYLN

SEQ ID NO: 17973 - protein, 7 aa, synthetic construct
  source 1..7: note = Description of Artificial Sequence: Synthetic peptide; note = XENP019364 vlCDR2
YTSRLHS

SEQ ID NO: 17974 - protein, 9 aa, synthetic construct
  source 1..9: note = Description of Artificial Sequence: Synthetic peptide; note = XENP019364 vlCDR3
QQGNTLPYT

SEQ ID NO: 17975 - protein, 446 aa, synthetic construct; identical to SEQ ID NO: 17255
  source 1..446: note = Description of Artificial Sequence: Synthetic polypeptide; note = XENP019365 2A11_H2L2_IgG1_PVA_/S267K Heavy Chain

SEQ ID NO: 17976 - protein, 117 aa, synthetic construct; identical to SEQ ID NO: 17256
  source 1..117: note = Description of Artificial Sequence: Synthetic polypeptide; note = VH of XENP019365

SEQ ID NO: 17977 - protein, 5 aa, synthetic construct
  source 1..5: note = Description of Artificial Sequence: Synthetic peptide; note = XENP019365 vhCDR1
DYYMH

SEQ ID NO: 17978 - protein, 17 aa, synthetic construct
  source 1..17: note = Description of Artificial Sequence: Synthetic peptide; note = XENP019365 vhCDR2
WIDPENGDTEYAPKFQG

SEQ ID NO: 17979 - protein, 8 aa, synthetic construct
  source 1..8: note = Description of Artificial Sequence: Synthetic peptide; note = XENP019365 vhCDR3
GVRQALDY

SEQ ID NO: 17980 - protein, 214 aa, synthetic construct; identical to SEQ ID NO: 17250
  source 1..214: note = Description of Artificial Sequence: Synthetic polypeptide; note = XENP019365 2A11_H2L2_IgG1_PVA_/S267K Light Chain

SEQ ID NO: 17981 - protein, 107 aa, synthetic construct; identical to SEQ ID NO: 17251
  source 1..107: note = Description of Artificial Sequence: Synthetic polypeptide; note = VL of XENP019365

SEQ ID NO: 17982 - protein, 11 aa, synthetic construct
  source 1..11: note = Description of Artificial Sequence: Synthetic peptide; note = XENP019365 vlCDR1
QASQDIGNYLN

SEQ ID NO: 17983 - protein, 7 aa, synthetic construct
  source 1..7: note = Description of Artificial Sequence: Synthetic peptide; note = XENP019365 vlCDR2
YTSRLHS

SEQ ID NO: 17984 - protein, 9 aa, synthetic construct
  source 1..9: note = Description of Artificial Sequence: Synthetic peptide; note = XENP019365 vlCDR3
QQGNTLPYT

SEQ ID NO: 17985 - protein, 447 aa, synthetic construct; identical to SEQ ID NO: 17275
  source 1..447: note = Description of Artificial Sequence: Synthetic polypeptide; note = XENP019366 2A11_H3L1_IgG1_PVA_/S267K Heavy Chain

SEQ ID NO: 17986 - protein, 118 aa, synthetic construct; identical to SEQ ID NO: 17276
  source 1..118: note = Description of Artificial Sequence: Synthetic polypeptide; note = VH of XENP019366

SEQ ID NO: 17987 - protein, 5 aa, synthetic construct
  source 1..5: note = Description of Artificial Sequence: Synthetic peptide; note = XENP019366 vhCDR1
DYYMH

SEQ ID NO: 17988 - protein, 17 aa, synthetic construct
  source 1..17: note = Description of Artificial Sequence: Synthetic peptide; note = XENP019366 vhCDR2
WIDPENGDTEYAPSVKG

SEQ ID NO: 17989 - protein, 9 aa, synthetic construct
  source 1..9: note = Description of Artificial Sequence: Synthetic peptide; note = XENP019366 vhCDR3
RGVRQALDY

SEQ ID NO: 17990 - protein, 214 aa, synthetic construct; identical to SEQ ID NO: 17240
  source 1..214: note = Description of Artificial Sequence: Synthetic polypeptide; note = XENP019366 2A11_H3L1_IgG1_PVA_/S267K Light Chain

SEQ ID NO: 17991 - protein, 107 aa, synthetic construct; identical to SEQ ID NO: 17241
  source 1..107: note = Description of Artificial Sequence: Synthetic polypeptide; note = VL of XENP019366

SEQ ID NO: 17992 - protein, 11 aa, synthetic construct
  source 1..11: note = Description of Artificial Sequence: Synthetic peptide; note = XENP019366 vlCDR1
RASQDIGNYLN

SEQ ID NO: 17993 - protein, 7 aa, synthetic construct
  source 1..7: note = Description of Artificial Sequence: Synthetic peptide; note = XENP019366 vlCDR2
YTSRLHS

SEQ ID NO: 17994 - protein, 9 aa, synthetic construct
  source 1..9: note = Description of Artificial Sequence: Synthetic peptide; note = XENP019366 vlCDR3
QQGNTLPYT

SEQ ID NO: 17995 - protein, 447 aa, synthetic construct; identical to SEQ ID NO: 17275
  source 1..447: note = Description of Artificial Sequence: Synthetic polypeptide; note = XENP019367 2A11_H3L2_IgG1_PVA_/S267K Heavy Chain

SEQ ID NO: 17996 - protein, 118 aa, synthetic construct; identical to SEQ ID NO: 17276
  source 1..118: note = Description of Artificial Sequence: Synthetic polypeptide; note = VH of XENP019367

SEQ ID NO: 17997 - protein, 5 aa, synthetic construct
  source 1..5: note = Description of Artificial Sequence: Synthetic peptide; note = XENP019367 vhCDR1
DYYMH

SEQ ID NO: 17998 - protein, 17 aa, synthetic construct
  source 1..17: note = Description of Artificial Sequence: Synthetic peptide; note = XENP019367 vhCDR2
WIDPENGDTEYAPSVKG

SEQ ID NO: 17999 - protein, 9 aa, synthetic construct
  source 1..9: note = Description of Artificial Sequence: Synthetic peptide; note = XENP019367 vhCDR3
RGVRQALDY

SEQ ID NO: 18000 - protein, 214 aa, synthetic construct; identical to SEQ ID NO: 17250
  source 1..214: note = Description of Artificial Sequence: Synthetic polypeptide; note = XENP019367 2A11_H3L2_IgG1_PVA_/S267K Light Chain

SEQ ID NO: 18001 - protein, 107 aa, synthetic construct; identical to SEQ ID NO: 17251
  source 1..107: note = Description of Artificial Sequence: Synthetic polypeptide; note = VL of XENP019367

SEQ ID NO: 18002 - protein, 11 aa, synthetic construct
  source 1..11: note = Description of Artificial Sequence: Synthetic peptide; note = XENP019367 vlCDR1
QASQDIGNYLN

SEQ ID NO: 18003 - protein, 7 aa, synthetic construct
  source 1..7: note = Description of Artificial Sequence: Synthetic peptide; note = XENP019367 vlCDR2
YTSRLHS

SEQ ID NO: 18004 - protein, 9 aa, synthetic construct
  source 1..9: note = Description of Artificial Sequence: Synthetic peptide; note = XENP019367 vlCDR3
QQGNTLPYT

SEQ ID NO: 18005 - protein, 446 aa, synthetic construct; identical to SEQ ID NO: 17295
  source 1..446: note = Description of Artificial Sequence: Synthetic polypeptide; note = XENP019368 2A11_H4L1_IgG1_PVA_/S267K Heavy Chain

SEQ ID NO: 18006 - protein, 117 aa, synthetic construct; identical to SEQ ID NO: 17296
  source 1..117: note = Description of Artificial Sequence: Synthetic polypeptide; note = VH of XENP019368

SEQ ID NO: 18007 - protein, 5 aa, synthetic construct
  source 1..5: note = Description of Artificial Sequence: Synthetic peptide; note = XENP019368 vhCDR1
DYYMH

SEQ ID NO: 18008 - protein, 17 aa, synthetic construct
  source 1..17: note = Description of Artificial Sequence: Synthetic peptide; note = XENP019368 vhCDR2
WIDPENGDTEYAPSVKG

SEQ ID NO: 18009 - protein, 8 aa, synthetic construct
  source 1..8: note = Description of Artificial Sequence: Synthetic peptide; note = XENP019368 vhCDR3
GVRQALDY

SEQ ID NO: 18010 - protein, 214 aa, synthetic construct; identical to SEQ ID NO: 17240
  source 1..214: note = Description of Artificial Sequence: Synthetic polypeptide; note = XENP019368 2A11_H4L1_IgG1_PVA_/S267K Light Chain

SEQ ID NO: 18011 - protein, 107 aa, synthetic construct; identical to SEQ ID NO: 17241
  source 1..107: note = Description of Artificial Sequence: Synthetic polypeptide; note = VL of XENP019368

SEQ ID NO: 18012 - protein, 11 aa, synthetic construct
  source 1..11: note = Description of Artificial Sequence: Synthetic peptide; note = XENP019368 vlCDR1
RASQDIGNYLN

SEQ ID NO: 18013 - protein, 7 aa, synthetic construct
  source 1..7: note = Description of Artificial Sequence: Synthetic peptide; note = XENP019368 vlCDR2
YTSRLHS

SEQ ID NO: 18014 - protein, 9 aa, synthetic construct
  source 1..9: note = Description of Artificial Sequence: Synthetic peptide; note = XENP019368 vlCDR3
QQGNTLPYT

SEQ ID NO: 18015 - protein, 446 aa, synthetic construct; identical to SEQ ID NO: 17295
  source 1..446: note = Description of Artificial Sequence: Synthetic polypeptide; note = XENP019369 2A11_H4L2_IgG1_PVA_/S267K Heavy Chain

SEQ ID NO: 18016 - protein, 117 aa, synthetic construct; identical to SEQ ID NO: 17296
  source 1..117: note = Description of Artificial Sequence: Synthetic polypeptide; note = VH of XENP019369

SEQ ID NO: 18017 - protein, 5 aa, synthetic construct
  source 1..5: note = Description of Artificial Sequence: Synthetic peptide; note = XENP019369 vhCDR1
DYYMH

SEQ ID NO: 18018 - protein, 17 aa, synthetic construct
  source 1..17: note = Description of Artificial Sequence: Synthetic peptide; note = XENP019369 vhCDR2
WIDPENGDTEYAPSVKG

SEQ ID NO: 18019 - protein, 8 aa, synthetic construct
  source 1..8: note = Description of Artificial Sequence: Synthetic peptide; note = XENP019369 vhCDR3
GVRQALDY

SEQ ID NO: 18020 - protein, 214 aa, synthetic construct; identical to SEQ ID NO: 17250
  source 1..214: note = Description of Artificial Sequence: Synthetic polypeptide; note = XENP019369 2A11_H4L2_IgG1_PVA_/S267K Light Chain

SEQ ID NO: 18021 - protein, 107 aa, synthetic construct; identical to SEQ ID NO: 17251
  source 1..107: note = Description of Artificial Sequence: Synthetic polypeptide; note = VL of XENP019369

SEQ ID NO: 18022 - protein, 11 aa, synthetic construct
  source 1..11: note = Description of Artificial Sequence: Synthetic peptide; note = XENP019369 vlCDR1
QASQDIGNYLN

SEQ ID NO: 18023 - protein, 7 aa, synthetic construct
  source 1..7: note = Description of Artificial Sequence: Synthetic peptide; note = XENP019369 vlCDR2
YTSRLHS

SEQ ID NO: 18024 - protein, 9 aa, synthetic construct
  source 1..9: note = Description of Artificial Sequence: Synthetic peptide; note = XENP019369 vlCDR3
QQGNTLPYT

SEQ ID NO: 18025 - protein, 447 aa, synthetic construct; identical to SEQ ID NO: 17235
  source 1..447: note = Description of Artificial Sequence: Synthetic polypeptide; note = XENP020023 2A11_H1L0_IgG1_PVA_/S267K Heavy Chain

SEQ ID NO: 18026 - protein, 118 aa, synthetic construct; identical to SEQ ID NO: 17236
  source 1..118: note = Description of Artificial Sequence: Synthetic polypeptide; note = VH of XENP020023

SEQ ID NO: 18027 - protein, 5 aa, synthetic construct
  source 1..5: note = Description of Artificial Sequence: Synthetic peptide; note = XENP020023 vhCDR1
DYYMH

SEQ ID NO: 18028 - protein, 17 aa, synthetic construct
  source 1..17: note = Description of Artificial Sequence: Synthetic peptide; note = XENP020023 vhCDR2
WIDPENGDTEYAPKFQG

SEQ ID NO: 18029 - protein, 9 aa, synthetic construct
  source 1..9: note = Description of Artificial Sequence: Synthetic peptide; note = XENP020023 vhCDR3
RGVRQALDY

SEQ ID NO: 18030 - protein, 214 aa, synthetic construct; identical to SEQ ID NO: 17230
  source 1..214: note = Description of Artificial Sequence: Synthetic polypeptide; note = XENP020023 2A11_H1L0_IgG1_PVA_/S267K Light Chain

SEQ ID NO: 18031 - protein, 107 aa, synthetic construct; identical to SEQ ID NO: 17231
  source 1..107: note = Description of Artificial Sequence: Synthetic polypeptide; note = VL of XENP020023

SEQ ID NO: 18032 - protein, 11 aa, synthetic construct
  source 1..11: note = Description of Artificial Sequence: Synthetic peptide; note = XENP020023 vlCDR1
RASQDIGNYLN

SEQ ID NO: 18033 - protein, 7 aa, synthetic construct
  source 1..7: note = Description of Artificial Sequence: Synthetic peptide; note = XENP020023 vlCDR2
YTSRLHS

SEQ ID NO: 18034 - protein, 9 aa, synthetic construct
  source 1..9: note = Description of Artificial Sequence: Synthetic peptide; note = XENP020023 vlCDR3
QQGNTLPYT

SEQ ID NO: 18035 - protein, 447 aa, synthetic construct; identical to SEQ ID NO: 17225
  source 1..447: note = Description of Artificial Sequence: Synthetic polypeptide; note = XENP020024 2A11_H0L1_IgG1_PVA_/S267K Heavy Chain

SEQ ID NO: 18036 - protein, 118 aa, synthetic construct; identical to SEQ ID NO: 17226
  source 1..118: note = Description of Artificial Sequence: Synthetic polypeptide; note = VH of XENP020024

SEQ ID NO: 18037 - protein, 5 aa, synthetic construct
  source 1..5: note = Description of Artificial Sequence: Synthetic peptide; note = XENP020024 vhCDR1
DYYMH

SEQ ID NO: 18038 - protein, 17 aa, synthetic construct
  source 1..17: note = Description of Artificial Sequence: Synthetic peptide; note = XENP020024 vhCDR2
WIDPENGDTEYAPKFQG

SEQ ID NO: 18039 - protein, 9 aa, synthetic construct
  source 1..9: note = Description of Artificial Sequence: Synthetic peptide; note = XENP020024 vhCDR3
RGVRQALDY

SEQ ID NO: 18040 - protein, 214 aa, synthetic construct; identical to SEQ ID NO: 17240
  source 1..214: note = Description of Artificial Sequence: Synthetic polypeptide; note = XENP020024 2A11_H0L1_IgG1_PVA_/S267K Light Chain

SEQ ID NO: 18041 - protein, 107 aa, synthetic construct; identical to SEQ ID NO: 17241
  source 1..107: note = Description of Artificial Sequence: Synthetic polypeptide; note = VL of XENP020024

SEQ ID NO: 18042 - protein, 11 aa, synthetic construct
  source 1..11: note = Description of Artificial Sequence: Synthetic peptide; note = XENP020024 vlCDR1
RASQDIGNYLN

SEQ ID NO: 18043 - protein, 7 aa, synthetic construct
  source 1..7: note = Description of Artificial Sequence: Synthetic peptide; note = XENP020024 vlCDR2
YTSRLHS

SEQ ID NO: 18044 - protein, 9 aa, synthetic construct
  source 1..9: note = Description of Artificial Sequence: Synthetic peptide; note = XENP020024 vlCDR3
QQGNTLPYT

SEQ ID NO: 18045 - protein, 450 aa, synthetic construct; identical to SEQ ID NO: 17585
  source 1..450: note = Description of Artificial Sequence: Synthetic polypeptide; note = XENP019401 7G8_H0L0_IgG1_PVA_/S267K Heavy Chain

SEQ ID NO: 18046 - protein, 121 aa, synthetic construct; identical to SEQ ID NO: 17586
  source 1..121: note = Description of Artificial Sequence: Synthetic polypeptide; note = VH of XENP019401

SEQ ID NO: 18047 - protein, 5 aa, synthetic construct
  source 1..5: note = Description of Artificial Sequence: Synthetic peptide; note = XENP019401 vhCDR1
DAWMD

SEQ ID NO: 18048 - protein, 19 aa, synthetic construct
  source 1..19: note = Description of Artificial Sequence: Synthetic peptide; note = XENP019401 vhCDR2
EIRTKANNHATYYAESVKG

SEQ ID NO: 18049 - protein, 10 aa, synthetic construct
  source 1..10: note = Description of Artificial Sequence: Synthetic peptide; note = XENP019401 vhCDR3
LANWDWYFDV

SEQ ID NO: 18050 - protein, 218 aa, synthetic construct; identical to SEQ ID NO: 17590
  source 1..218: note = Description of Artificial Sequence: Synthetic polypeptide; note = XENP019401 7G8_H0L0_IgG1_PVA_/S267K Light Chain

SEQ ID NO: 18051 - protein, 111 aa, synthetic construct; identical to SEQ ID NO: 17591
  source 1..111: note = Description of Artificial Sequence: Synthetic polypeptide; note = VL of XENP019401

SEQ ID NO: 18052 - protein, 15 aa, synthetic construct
  source 1..15: note = Description of Artificial Sequence: Synthetic peptide; note = XENP019401 vlCDR1
KASQSVDYDGDSYMN

SEQ ID NO: 18053 - protein, 7 aa, synthetic construct
  source 1..7: note = Description of Artificial Sequence: Synthetic peptide; note = XENP019401 vlCDR2
AASNLES

SEQ ID NO: 18054 - protein, 9 aa, synthetic construct
  source 1..9: note = Description of Artificial Sequence: Synthetic peptide; note = XENP019401 vlCDR3
QQSNEDPFT

SEQ ID NO: 18055 - protein, 450 aa, synthetic construct; identical to SEQ ID NO: 17595
  source 1..450: note = Description of Artificial Sequence: Synthetic polypeptide; note = XENP019402 7G8_H1L1_IgG1_PVA_/S267K Heavy Chain

SEQ ID NO: 18056 - protein, 121 aa, synthetic construct; identical to SEQ ID NO: 17596
  source 1..121: note = Description of Artificial Sequence: Synthetic polypeptide; note = VH of XENP019402

SEQ ID NO: 18057 - protein, 5 aa, synthetic construct
  source 1..5: note = Description of Artificial Sequence: Synthetic peptide; note = XENP019402 vhCDR1
DAWMD

SEQ ID NO: 18058 - protein, 19 aa, synthetic construct
  source 1..19: note = Description of Artificial Sequence: Synthetic peptide; note = XENP019402 vhCDR2
EIRTKANNHATYYAEKFQG

SEQ ID NO: 18059 - protein, 10 aa, synthetic construct
  source 1..10: note = Description of Artificial Sequence: Synthetic peptide; note = XENP019402 vhCDR3
LANWDWYFDV

SEQ ID NO: 18060 - protein, 218 aa, synthetic construct; identical to SEQ ID NO: 17600
  source 1..218: note = Description of Artificial Sequence: Synthetic polypeptide; note = XENP019402 7G8_H1L1_IgG1_PVA_/S267K Light Chain

SEQ ID NO: 18061 - protein, 111 aa, synthetic construct; identical to SEQ ID NO: 17601
  source 1..111: note = Description of Artificial Sequence: Synthetic polypeptide; note = VL of XENP019402

SEQ ID NO: 18062 - protein, 15 aa, synthetic construct
  source 1..15: note = Description of Artificial Sequence: Synthetic peptide; note = XENP019402 vlCDR1
RASQSVDYDGDSYMN

SEQ ID NO: 18063 - protein, 7 aa, synthetic construct
  source 1..7: note = Description of Artificial Sequence: Synthetic peptide; note = XENP019402 vlCDR2
AASNLES

SEQ ID NO: 18064 - protein, 9 aa, synthetic construct
  source 1..9: note = Description of Artificial Sequence: Synthetic peptide; note = XENP019402 vlCDR3
QQSNEDPFT

SEQ ID NO: 18065 - protein, 450 aa, synthetic construct; identical to SEQ ID NO: 17595
  source 1..450: note = Description of Artificial Sequence: Synthetic polypeptide; note = XENP019403 7G8_H1L2_IgG1_PVA_/S267K Heavy Chain

SEQ ID NO: 18066 - protein, 121 aa, synthetic construct; identical to SEQ ID NO: 17596
  source 1..121: note = Description of Artificial Sequence: Synthetic polypeptide; note = VH of XENP019403

SEQ ID NO: 18067 - protein, 5 aa, synthetic construct
  source 1..5: note = Description of Artificial Sequence: Synthetic peptide; note = XENP019403 vhCDR1
DAWMD

SEQ ID NO: 18068 - protein, 19 aa, synthetic construct
  source 1..19: note = Description of Artificial Sequence: Synthetic peptide; note = XENP019403 vhCDR2
EIRTKANNHATYYAEKFQG

SEQ ID NO: 18069 - protein, 10 aa, synthetic construct
  source 1..10: note = Description of Artificial Sequence: Synthetic peptide; note = XENP019403 vhCDR3
LANWDWYFDV

SEQ ID NO: 18070 - protein, 218 aa, synthetic construct; identical to SEQ ID NO: 17610
  source 1..218: note = Description of Artificial Sequence: Synthetic polypeptide; note = XENP019403 7G8_H1L2_IgG1_PVA_/S267K Light Chain

SEQ ID NO: 18071 - protein, 111 aa, synthetic construct; identical to SEQ ID NO: 17611
  source 1..111: note = Description of Artificial Sequence: Synthetic polypeptide; note = VL of XENP019403

SEQ ID NO: 18072 - protein, 15 aa, synthetic construct
  source 1..15: note = Description of Artificial Sequence: Synthetic peptide; note = XENP019403 vlCDR1
RASQSVDYDGDSYMN

SEQ ID NO: 18073 - protein, 7 aa, synthetic construct
  source 1..7: note = Description of Artificial Sequence: Synthetic peptide; note = XENP019403 vlCDR2
AASNLES

SEQ ID NO: 18074 - protein, 9 aa, synthetic construct
  source 1..9: note = Description of Artificial Sequence: Synthetic peptide; note = XENP019403 vlCDR3
QQSNEDPFT

SEQ ID NO: 18075 - protein, 450 aa, synthetic construct; identical to SEQ ID NO: 17595
  source 1..450: note = Description of Artificial Sequence: Synthetic polypeptide; note = XENP019404 7G8_H1L3_IgG1_PVA_/S267K Heavy Chain

SEQ ID NO: 18076 - protein, 121 aa, synthetic construct; identical to SEQ ID NO: 17596
  source 1..121: note = Description of Artificial Sequence: Synthetic polypeptide; note = VH of XENP019404

SEQ ID NO: 18077 - protein, 5 aa, synthetic construct
  source 1..5: note = Description of Artificial Sequence: Synthetic peptide; note = XENP019404 vhCDR1
DAWMD

SEQ ID NO: 18078 - protein, 19 aa, synthetic construct
  source 1..19: note = Description of Artificial Sequence: Synthetic peptide; note = XENP019404 vhCDR2
EIRTKANNHATYYAEKFQG

SEQ ID NO: 18079 - protein, 10 aa, synthetic construct
  source 1..10: note = Description of Artificial Sequence: Synthetic peptide; note = XENP019404 vhCDR3
LANWDWYFDV

SEQ ID NO: 18080 - protein, 218 aa, synthetic construct; identical to SEQ ID NO: 17620
  source 1..218: note = Description of Artificial Sequence: Synthetic polypeptide; note = XENP019404 7G8_H1L3_IgG1_PVA_/S267K Light Chain

SEQ ID NO: 18081 - protein, 111 aa, synthetic construct; identical to SEQ ID NO: 17621
  source 1..111: note = Description of Artificial Sequence: Synthetic polypeptide; note = VL of XENP019404

SEQ ID NO: 18082 - protein, 15 aa, synthetic construct
  source 1..15: note = Description of Artificial Sequence: Synthetic peptide; note = XENP019404 vlCDR1
KASQSVDYDGDSYMN

SEQ ID NO: 18083 - protein, 7 aa, synthetic construct
  source 1..7: note = Description of Artificial Sequence: Synthetic peptide; note = XENP019404 vlCDR2
AASNLES

SEQ ID NO: 18084 - protein, 9 aa, synthetic construct
  source 1..9: note = Description of Artificial Sequence: Synthetic peptide; note = XENP019404 vlCDR3
QQSNEDPFT

SEQ ID NO: 18085 - protein, 450 aa, synthetic construct; identical to SEQ ID NO: 17625
  source 1..450: note = Description of Artificial Sequence: Synthetic polypeptide; note = XENP019405 7G8_H2L1_IgG1_PVA_/S267K Heavy Chain

SEQ ID NO: 18086 - protein, 121 aa, synthetic construct; identical to SEQ ID NO: 17626
  source 1..121: note = Description of Artificial Sequence: Synthetic polypeptide; note = VH of XENP019405

SEQ ID NO: 18087 - protein, 5 aa, synthetic construct
  source 1..5: note = Description of Artificial Sequence: Synthetic peptide; note = XENP019405 vhCDR1
DAWMD

SEQ ID NO: 18088 - protein, 19 aa, synthetic construct
  source 1..19: note = Description of Artificial Sequence: Synthetic peptide; note = XENP019405 vhCDR2
EIRTKANNHATYYAESVKG

SEQ ID NO: 18089 - protein, 10 aa, synthetic construct
  source 1..10: note = Description of Artificial Sequence: Synthetic peptide; note = XENP019405 vhCDR3
LANWDWYFDV

SEQ ID NO: 18090 - protein, 218 aa, synthetic construct; identical to SEQ ID NO: 17600
  source 1..218: note = Description of Artificial Sequence: Synthetic polypeptide; note = XENP019405 7G8_H2L1_IgG1_PVA_/S267K Light Chain

SEQ ID NO: 18091 - protein, 111 aa, synthetic construct; identical to SEQ ID NO: 17601
  source 1..111: note = Description of Artificial Sequence: Synthetic polypeptide; note = VL of XENP019405

SEQ ID NO: 18092 - protein, 15 aa, synthetic construct
  source 1..15: note = Description of Artificial Sequence: Synthetic peptide; note = XENP019405 vlCDR1
RASQSVDYDGDSYMN

SEQ ID NO: 18093 - protein, 7 aa, synthetic construct
  source 1..7: note = Description of Artificial Sequence: Synthetic peptide; note = XENP019405 vlCDR2
AASNLES

SEQ ID NO: 18094 - protein, 9 aa, synthetic construct
  source 1..9: note = Description of Artificial Sequence: Synthetic peptide; note = XENP019405 vlCDR3
QQSNEDPFT

SEQ ID NO: 18095 - protein, 450 aa, synthetic construct; identical to SEQ ID NO: 17625
  source 1..450: note = Description of Artificial Sequence: Synthetic polypeptide; note = XENP019406 7G8_H2L2_IgG1_PVA_/S267K Heavy Chain

SEQ ID NO: 18096 - protein, 121 aa, synthetic construct; identical to SEQ ID NO: 17626
  source 1..121: note = Description of Artificial Sequence: Synthetic polypeptide; note = VH of XENP019406

SEQ ID NO: 18097 - protein, 5 aa, synthetic construct
  source 1..5: note = Description of Artificial Sequence: Synthetic peptide; note = XENP019406 vhCDR1
DAWMD

SEQ ID NO: 18098 - protein, 19 aa, synthetic construct
  source 1..19: note = Description of Artificial Sequence: Synthetic peptide; note = XENP019406 vhCDR2
EIRTKANNHATYYAESVKG

SEQ ID NO: 18099 - protein, 10 aa, synthetic construct
  source 1..10: note = Description of Artificial Sequence: Synthetic peptide; note = XENP019406 vhCDR3
LANWDWYFDV

SEQ ID NO: 18100 - protein, 218 aa, synthetic construct; identical to SEQ ID NO: 17610
  source 1..218: note = Description of Artificial Sequence: Synthetic polypeptide; note = XENP019406 7G8_H2L2_IgG1_PVA_/S267K Light Chain

SEQ ID NO: 18101 - protein, 111 aa, synthetic construct; identical to SEQ ID NO: 17611
  source 1..111: note = Description of Artificial Sequence: Synthetic polypeptide; note = VL of XENP019406

SEQ ID NO: 18102 - protein, 15 aa, synthetic construct
  source 1..15: note = Description of Artificial Sequence: Synthetic peptide; note = XENP019406 vlCDR1
RASQSVDYDGDSYMN

SEQ ID NO: 18103 - protein, 7 aa, synthetic construct
  source 1..7: note = Description of Artificial Sequence: Synthetic peptide; note = XENP019406 vlCDR2
AASNLES

SEQ ID NO: 18104 - protein, 9 aa, synthetic construct
  source 1..9: note = Description of Artificial Sequence: Synthetic peptide; note = XENP019406 vlCDR3
QQSNEDPFT

SEQ ID NO: 18105 - protein, 450 aa, synthetic construct; identical to SEQ ID NO: 17625
  source 1..450: note = Description of Artificial Sequence: Synthetic polypeptide; note = XENP019407 7G8_H2L3_IgG1_PVA_/S267K Heavy Chain

SEQ ID NO: 18106 - protein, 121 aa, synthetic construct; identical to SEQ ID NO: 17626
  source 1..121: note = Description of Artificial Sequence: Synthetic polypeptide; note = VH of XENP019407

SEQ ID NO: 18107 - protein, 5 aa, synthetic construct
  source 1..5: note = Description of Artificial Sequence: Synthetic peptide; note = XENP019407 vhCDR1
DAWMD

SEQ ID NO: 18108 - protein, 19 aa, synthetic construct
  source 1..19: note = Description of Artificial Sequence: Synthetic peptide; note = XENP019407 vhCDR2
EIRTKANNHATYYAESVKG

SEQ ID NO: 18109 - protein, 10 aa, synthetic construct
  source 1..10: note = Description of Artificial Sequence: Synthetic peptide; note = XENP019407 vhCDR3
LANWDWYFDV

SEQ ID NO: 18110 - protein, 218 aa, synthetic construct; identical to SEQ ID NO: 17620
  source 1..218: note = Description of Artificial Sequence: Synthetic polypeptide; note = XENP019407 7G8_H2L3_IgG1_PVA_/S267K Light Chain

SEQ ID NO: 18111 - protein, 111 aa, synthetic construct; identical to SEQ ID NO: 17621
  source 1..111: note = Description of Artificial Sequence: Synthetic polypeptide; note = VL of XENP019407

SEQ ID NO: 18112 - protein, 15 aa, synthetic construct
  source 1..15: note = Description of Artificial Sequence: Synthetic peptide; note = XENP019407 vlCDR1
KASQSVDYDGDSYMN

SEQ ID NO: 18113 - protein, 7 aa, synthetic construct
  source 1..7: note = Description of Artificial Sequence: Synthetic peptide; note = XENP019407 vlCDR2
AASNLES

SEQ ID NO: 18114 - protein, 9 aa, synthetic construct
  source 1..9: note = Description of Artificial Sequence: Synthetic peptide; note = XENP019407 vlCDR3
QQSNEDPFT

SEQ ID NO: 18115 - protein, 450 aa, synthetic construct; identical to SEQ ID NO: 17595
  source 1..450: note = Description of Artificial Sequence: Synthetic polypeptide; note = XENP020028 7G8_H1L0_IgG1_PVA_/S267K Heavy Chain

SEQ ID NO: 18116 - protein, 121 aa, synthetic construct; identical to SEQ ID NO: 17596
  source 1..121: note = Description of Artificial Sequence: Synthetic polypeptide; note = VH of XENP020028

SEQ ID NO: 18117 - protein, 5 aa, synthetic construct
  source 1..5: note = Description of Artificial Sequence: Synthetic peptide; note = XENP020028 vhCDR1
DAWMD

SEQ ID NO: 18118 - protein, 19 aa, synthetic construct
  source 1..19: note = Description of Artificial Sequence: Synthetic peptide; note = XENP020028 vhCDR2
EIRTKANNHATYYAEKFQG

SEQ ID NO: 18119 - protein, 10 aa, synthetic construct
  source 1..10: note = Description of Artificial Sequence: Synthetic peptide; note = XENP020028 vhCDR3
LANWDWYFDV

SEQ ID NO: 18120 - protein, 218 aa, synthetic construct; identical to SEQ ID NO: 17590
  source 1..218: note = Description of Artificial Sequence: Synthetic polypeptide; note = XENP020028 7G8_H1L0_IgG1_PVA_/S267K Light Chain

SEQ ID NO: 18121 - protein, 111 aa, synthetic construct; identical to SEQ ID NO: 17591
  source 1..111: note = Description of Artificial Sequence: Synthetic polypeptide; note = VL of XENP020028

SEQ ID NO: 18122 - protein, 15 aa, synthetic construct
  source 1..15: note = Description of Artificial Sequence: Synthetic peptide; note = XENP020028 vlCDR1
KASQSVDYDGDSYMN

SEQ ID NO: 18123 - protein, 7 aa, synthetic construct
  source 1..7: note = Description of Artificial Sequence: Synthetic peptide; note = XENP020028 vlCDR2
AASNLES

SEQ ID NO: 18124 - protein, 9 aa, synthetic construct
  source 1..9: note = Description of Artificial Sequence: Synthetic peptide; note = XENP020028 vlCDR3
QQSNEDPFT

SEQ ID NO: 18125 - protein, 450 aa, synthetic construct; identical to SEQ ID NO: 17585
  source 1..450: note = Description of Artificial Sequence: Synthetic polypeptide; note = XENP020029 7G8_H0L1_IgG1_PVA_/S267K Heavy Chain

SEQ ID NO: 18126 - protein, 121 aa, synthetic construct; identical to SEQ ID NO: 17586
  source 1..121: note = Description of Artificial Sequence: Synthetic polypeptide; note = VH of XENP020029

SEQ ID NO: 18127 - protein, 5 aa, synthetic construct
  source 1..5: note = Description of Artificial Sequence: Synthetic peptide; note = XENP020029 vhCDR1
DAWMD

SEQ ID NO: 18128 - protein, 19 aa, synthetic construct
  source 1..19: note = Description of Artificial Sequence: Synthetic peptide; note = XENP020029 vhCDR2
EIRTKANNHATYYAESVKG

SEQ ID NO: 18129 - protein, 10 aa, synthetic construct
  source 1..10: note = Description of Artificial Sequence: Synthetic peptide; note = XENP020029 vhCDR3
LANWDWYFDV

SEQ ID NO: 18130 - protein, 218 aa, synthetic construct; identical to SEQ ID NO: 17600
  source 1..218: note = Description of Artificial Sequence: Synthetic polypeptide; note = XENP020029 7G8_H0L1_IgG1_PVA_/S267K Light Chain

SEQ ID NO: 18131 - protein, 111 aa, synthetic construct; identical to SEQ ID NO: 17601
  source 1..111: note = Description of Artificial Sequence: Synthetic polypeptide; note = VL of XENP020029

SEQ ID NO: 18132 - protein, 15 aa, synthetic construct
  source 1..15: note = Description of Artificial Sequence: Synthetic peptide; note = XENP020029 vlCDR1
RASQSVDYDGDSYMN

SEQ ID NO: 18133 - protein, 7 aa, synthetic construct
  source 1..7: note = Description of Artificial Sequence: Synthetic peptide; note = XENP020029 vlCDR2
AASNLES

SEQ ID NO: 18134 - protein, 9 aa, synthetic construct
  source 1..9: note = Description of Artificial Sequence: Synthetic peptide; note = XENP020029 vlCDR3
QQSNEDPFT

SEQ ID NO: 18135 - protein, 450 aa, synthetic construct; identical to SEQ ID NO: 17625
  source 1..450: note = Description of Artificial Sequence: Synthetic polypeptide; note = XENP020262 7G8_H2L0_IgG1_PVA_/S267K Heavy Chain

SEQ ID NO: 18136 - protein, 121 aa, synthetic construct; identical to SEQ ID NO: 17626
  source 1..121: note = Description of Artificial Sequence: Synthetic polypeptide; note = VH of XENP020262

SEQ ID NO: 18137 - protein, 5 aa, synthetic construct
  source 1..5: note = Description of Artificial Sequence: Synthetic peptide; note = XENP020262 vhCDR1
DAWMD

SEQ ID NO: 18138 - protein, 19 aa, synthetic construct
  source 1..19: note = Description of Artificial Sequence: Synthetic peptide; note = XENP020262 vhCDR2
EIRTKANNHATYYAESVKG

SEQ ID NO: 18139 - protein, 10 aa, synthetic construct
  source 1..10: note = Description of Artificial Sequence: Synthetic peptide; note = XENP020262 vhCDR3
LANWDWYFDV

SEQ ID NO: 18140 - protein, 218 aa, synthetic construct; identical to SEQ ID NO: 17590
  source 1..218: note = Description of Artificial Sequence: Synthetic polypeptide; note = XENP020262 7G8_H2L0_IgG1_PVA_/S267K Light Chain

SEQ ID NO: 18141 - protein, 111 aa, synthetic construct; identical to SEQ ID NO: 17591
  source 1..111: note = Description of Artificial Sequence: Synthetic polypeptide; note = VL of XENP020262

SEQ ID NO: 18142 - protein, 15 aa, synthetic construct
  source 1..15: note = Description of Artificial Sequence: Synthetic peptide; note = XENP020262 vlCDR1
KASQSVDYDGDSYMN

SEQ ID NO: 18143 - protein, 7 aa, synthetic construct
  source 1..7: note = Description of Artificial Sequence: Synthetic peptide; note = XENP020262 vlCDR2
AASNLES

SEQ ID NO: 18144 - protein, 9 aa, synthetic construct
  source 1..9: note = Description of Artificial Sequence: Synthetic peptide; note = XENP020262 vlCDR3
QQSNEDPFT

SEQ ID NO: 18145 - protein, 450 aa, synthetic construct; identical to SEQ ID NO: 17585
  source 1..450: note = Description of Artificial Sequence: Synthetic polypeptide; note = XENP020263 7G8_H0L2_IgG1_PVA_/S267K Heavy Chain

SEQ ID NO: 18146 - protein, 121 aa, synthetic construct; identical to SEQ ID NO: 17586
  source 1..121: note = Description of Artificial Sequence: Synthetic polypeptide; note = VH of XENP020263

SEQ ID NO: 18147 - protein, 5 aa, synthetic construct
  source 1..5: note = Description of Artificial Sequence: Synthetic peptide; note = XENP020263 vhCDR1
DAWMD

SEQ ID NO: 18148 - protein, 19 aa, synthetic construct
  source 1..19: note = Description of Artificial Sequence: Synthetic peptide; note = XENP020263 vhCDR2
EIRTKANNHATYYAESVKG

SEQ ID NO: 18149 - protein, 10 aa, synthetic construct
  source 1..10: note = Description of Artificial Sequence: Synthetic peptide; note = XENP020263 vhCDR3
LANWDWYFDV

SEQ ID NO: 18150 - protein, 218 aa, synthetic construct; identical to SEQ ID NO: 17610
  source 1..218: note = Description of Artificial Sequence: Synthetic polypeptide; note = XENP020263 7G8_H0L2_IgG1_PVA_/S267K Light Chain

SEQ ID NO: 18151 - protein, 111 aa, synthetic construct; identical to SEQ ID NO: 17611
  source 1..111: note = Description of Artificial Sequence: Synthetic polypeptide; note = VL of XENP020263

SEQ ID NO: 18152 - protein, 15 aa, synthetic construct
  source 1..15: note = Description of Artificial Sequence: Synthetic peptide; note = XENP020263 vlCDR1
RASQSVDYDGDSYMN

SEQ ID NO: 18153 - protein, 7 aa, synthetic construct
  source 1..7: note = Description of Artificial Sequence: Synthetic peptide; note = XENP020263 vlCDR2
AASNLES

SEQ ID NO: 18154 - protein, 9 aa, synthetic construct
  source 1..9: note = Description of Artificial Sequence: Synthetic peptide; note = XENP020263 vlCDR3
QQSNEDPFT

SEQ ID NO: 18155 - protein, 450 aa, synthetic construct; identical to SEQ ID NO: 17805
  source 1..450: note = Description of Artificial Sequence: Synthetic polypeptide; note = XENP020417 7G8_H3L1_IgG1_PVA_/S267K Heavy Chain

SEQ ID NO: 18156 - protein, 121 aa, synthetic construct; identical to SEQ ID NO: 17806
  source 1..121: note = Description of Artificial Sequence: Synthetic polypeptide; note = VH of XENP020417

SEQ ID NO: 18157 - protein, 5 aa, synthetic construct
  source 1..5: note = Description of Artificial Sequence: Synthetic peptide; note = XENP020417 vhCDR1
DAWMD

SEQ ID NO: 18158 - protein, 19 aa, synthetic construct
  source 1..19: note = Description of Artificial Sequence: Synthetic peptide; note = XENP020417 vhCDR2
EIRTKANNHATYYAESVKG

SEQ ID NO: 18159 - protein, 10 aa, synthetic construct
  source 1..10: note = Description of Artificial Sequence: Synthetic peptide; note = XENP020417 vhCDR3
LANWDWYFDV

SEQ ID NO: 18160 - protein, 218 aa, synthetic construct; identical to SEQ ID NO: 17600
  source 1..218: note = Description of Artificial Sequence: Synthetic polypeptide; note = XENP020417 7G8_H3L1_IgG1_PVA_/S267K Light Chain

SEQ ID NO: 18161 - protein, 111 aa, synthetic construct; identical to SEQ ID NO: 17601
  source 1..111: note = Description of Artificial Sequence: Synthetic polypeptide; note = VL of XENP020417

SEQ ID NO: 18162 - protein, 15 aa, synthetic construct
  source 1..15: note = Description of Artificial Sequence: Synthetic peptide; note = XENP020417 vlCDR1
RASQSVDYDGDSYMN

SEQ ID NO: 18163 - protein, 7 aa, synthetic construct
  source 1..7: note = Description of Artificial Sequence: Synthetic peptide; note = XENP020417 vlCDR2
AASNLES

SEQ ID NO: 18164 - protein, 9 aa, synthetic construct
  source 1..9: note = Description of Artificial Sequence: Synthetic peptide; note = XENP020417 vlCDR3
QQSNEDPFT

SEQ ID NO: 18165 - protein, 450 aa, synthetic construct; identical to SEQ ID NO: 17805
  source 1..450: note = Description of Artificial Sequence: Synthetic polypeptide; note = XENP020418 7G8_H3L2_IgG1_PVA_/S267K Heavy Chain

SEQ ID NO: 18166 - protein, 121 aa, synthetic construct; identical to SEQ ID NO: 17806
  source 1..121: note = Description of Artificial Sequence: Synthetic polypeptide; note = VH of XENP020418

SEQ ID NO: 18167 - protein, 5 aa, synthetic construct
  source 1..5: note = Description of Artificial Sequence: Synthetic peptide; note = XENP020418 vhCDR1
DAWMD

SEQ ID NO: 18168 - protein, 19 aa, synthetic construct
  source 1..19: note = Description of Artificial Sequence: Synthetic peptide; note = XENP020418 vhCDR2
EIRTKANNHATYYAESVKG

SEQ ID NO: 18169 - protein, 10 aa, synthetic construct
  source 1..10: note = Description of Artificial Sequence: Synthetic peptide; note = XENP020418 vhCDR3
LANWDWYFDV

SEQ ID NO: 18170 - protein, 218 aa, synthetic construct; identical to SEQ ID NO: 17610
  source 1..218: note = Description of Artificial Sequence: Synthetic polypeptide; note = XENP020418 7G8_H3L2_IgG1_PVA_/S267K Light Chain

SEQ ID NO: 18171 - protein, 111 aa, synthetic construct; identical to SEQ ID NO: 17611
  source 1..111: note = Description of Artificial Sequence: Synthetic polypeptide; note = VL of XENP020418

SEQ ID NO: 18172 - protein, 15 aa, synthetic construct
  source 1..15: note = Description of Artificial Sequence: Synthetic peptide; note = XENP020418 vlCDR1
RASQSVDYDGDSYMN

SEQ ID NO: 18173 - protein, 7 aa, synthetic construct
  source 1..7: note = Description of Artificial Sequence: Synthetic peptide; note = XENP020418 vlCDR2
AASNLES

SEQ ID NO: 18174 - protein, 9 aa, synthetic construct
  source 1..9: note = Description of Artificial Sequence: Synthetic peptide; note = XENP020418 vlCDR3
QQSNEDPFT

SEQ ID NO: 18175 - protein, 450 aa, synthetic construct; identical to SEQ ID NO: 17805
  source 1..450: note = Description of Artificial Sequence: Synthetic polypeptide; note = XENP020419 7G8_H3L3_IgG1_PVA_/S267K Heavy Chain

SEQ ID NO: 18176 - protein, 121 aa, synthetic construct; identical to SEQ ID NO: 17806
  source 1..121: note = Description of Artificial Sequence: Synthetic polypeptide; note = VH of XENP020419

SEQ ID NO: 18177 - protein, 5 aa, synthetic construct
  source 1..5: note = Description of Artificial Sequence: Synthetic peptide; note = XENP020419 vhCDR1
DAWMD

SEQ ID NO: 18178 - protein, 19 aa, synthetic construct
  source 1..19: note = Description of Artificial Sequence: Synthetic peptide; note = XENP020419 vhCDR2
EIRTKANNHATYYAESVKG

SEQ ID NO: 18179 - protein, 10 aa, synthetic construct
  source 1..10: note = Description of Artificial Sequence: Synthetic peptide; note = XENP020419 vhCDR3
LANWDWYFDV

SEQ ID NO: 18180 - protein, 218 aa, synthetic construct; identical to SEQ ID NO: 17620
  source 1..218: note = Description of Artificial Sequence: Synthetic polypeptide; note = XENP020419 7G8_H3L3_IgG1_PVA_/S267K Light Chain

SEQ ID NO: 18181 - protein, 111 aa, synthetic construct; identical to SEQ ID NO: 17621
  source 1..111: note = Description of Artificial Sequence: Synthetic polypeptide; note = VL of XENP020419

SEQ ID NO: 18182 - protein, 15 aa, synthetic construct
  source 1..15: note = Description of Artificial Sequence: Synthetic peptide; note = XENP020419 vlCDR1
KASQSVDYDGDSYMN

SEQ ID NO: 18183 - protein, 7 aa, synthetic construct
  source 1..7: note = Description of Artificial Sequence: Synthetic peptide; note = XENP020419 vlCDR2
AASNLES

SEQ ID NO: 18184 - protein, 9 aa, synthetic construct
  source 1..9: note = Description of Artificial Sequence: Synthetic peptide; note = XENP020419 vlCDR3
QQSNEDPFT

SEQ ID NO: 18185 - protein, 450 aa, synthetic construct; identical to SEQ ID NO: 17805
  source 1..450: note = Description of Artificial Sequence: Synthetic polypeptide; note = XENP020417 7G8_H3L1_IgG1_PVA_/S267K Heavy Chain

SEQ ID NO: 18186 - protein, 121 aa, synthetic construct; identical to SEQ ID NO: 17806
  source 1..121: note = Description of Artificial Sequence: Synthetic polypeptide; note = VH of XENP020417

SEQ ID NO: 18187 - protein, 5 aa, synthetic construct
  source 1..5: note = Description of Artificial Sequence: Synthetic peptide; note = XENP020417 vhCDR1
DAWMD

SEQ ID NO: 18188 - protein, 19 aa, synthetic construct
  source 1..19: note = Description of Artificial Sequence: Synthetic peptide; note = XENP020417 vhCDR2
EIRTKANNHATYYAESVKG

SEQ ID NO: 18189 - protein, 10 aa, synthetic construct
  source 1..10: note = Description of Artificial Sequence: Synthetic peptide; note = XENP020417 vhCDR3
LANWDWYFDV

SEQ ID NO: 18190 - protein, 218 aa, synthetic construct; identical to SEQ ID NO: 17600
  source 1..218: note = Description of Artificial Sequence: Synthetic polypeptide; note = XENP020417 7G8_H3L1_IgG1_PVA_/S267K Light Chain

SEQ ID NO: 18191 - protein, 111 aa, synthetic construct; identical to SEQ ID NO: 17601
  source 1..111: note = Description of Artificial Sequence: Synthetic polypeptide; note = VL of XENP020417

SEQ ID NO: 18192 - protein, 15 aa, synthetic construct
  source 1..15: note = Description of Artificial Sequence: Synthetic peptide; note = XENP020417 vlCDR1
RASQSVDYDGDSYMN

SEQ ID NO: 18193 - protein, 7 aa, synthetic construct
  source 1..7: note = Description of Artificial Sequence: Synthetic peptide; note = XENP020417 vlCDR2
AASNLES

SEQ ID NO: 18194 - protein, 9 aa, synthetic construct
  source 1..9: note = Description of Artificial Sequence: Synthetic peptide; note = XENP020417 vlCDR3
QQSNEDPFT

SEQ ID NO: 18195 - protein, 450 aa, synthetic construct; identical to SEQ ID NO: 17805
  source 1..450: note = Description of Artificial Sequence: Synthetic polypeptide; note = XENP020418 7G8_H3L2_IgG1_PVA_/S267K Heavy Chain

SEQ ID NO: 18196 - protein, 121 aa, synthetic construct; identical to SEQ ID NO: 17806
  source 1..121: note = Description of Artificial Sequence: Synthetic polypeptide; note = VH of XENP020418

SEQ ID NO: 18197 - protein, 5 aa, synthetic construct
  source 1..5: note = Description of Artificial Sequence: Synthetic peptide; note = XENP020418 vhCDR1
DAWMD

SEQ ID NO: 18198 - protein, 19 aa, synthetic construct
  source 1..19: note = Description of Artificial Sequence: Synthetic peptide; note = XENP020418 vhCDR2
EIRTKANNHATYYAESVKG

SEQ ID NO: 18199 - protein, 10 aa, synthetic construct
  source 1..10: note = Description of Artificial Sequence: Synthetic peptide; note = XENP020418 vhCDR3
LANWDWYFDV

SEQ ID NO: 18200 - protein, 218 aa, synthetic construct; identical to SEQ ID NO: 17610
  source 1..218: note = Description of Artificial Sequence: Synthetic polypeptide; note = XENP020418 7G8_H3L2_IgG1_PVA_/S267K Light Chain

SEQ ID NO: 18201 - protein, 111 aa, synthetic construct; identical to SEQ ID NO: 17611
  source 1..111: note = Description of Artificial Sequence: Synthetic polypeptide; note = VL of XENP020418

SEQ ID NO: 18202 - protein, 15 aa, synthetic construct
  source 1..15: note = Description of Artificial Sequence: Synthetic peptide; note = XENP020418 vlCDR1
RASQSVDYDGDSYMN

SEQ ID NO: 18203 - protein, 7 aa, synthetic construct
  source 1..7: note = Description of Artificial Sequence: Synthetic peptide; note = XENP020418 vlCDR2
AASNLES

SEQ ID NO: 18204 - protein, 9 aa, synthetic construct
  source 1..9: note = Description of Artificial Sequence: Synthetic peptide; note = XENP020418 vlCDR3
QQSNEDPFT

SEQ ID NO: 18205 - protein, 450 aa, synthetic construct; identical to SEQ ID NO: 17805
  source 1..450: note = Description of Artificial Sequence: Synthetic polypeptide; note = XENP020419 7G8_H3L3_IgG1_PVA_/S267K Heavy Chain

SEQ ID NO: 18206 - protein, 121 aa, synthetic construct; identical to SEQ ID NO: 17806
  source 1..121: note = Description of Artificial Sequence: Synthetic polypeptide; note = VH of XENP020419

SEQ ID NO: 18207 - protein, 5 aa, synthetic construct
  source 1..5: note = Description of Artificial Sequence: Synthetic peptide; note = XENP020419 vhCDR1
DAWMD

SEQ ID NO: 18208 - protein, 19 aa, synthetic construct
  source 1..19: note = Description of Artificial Sequence: Synthetic peptide; note = XENP020419 vhCDR2
EIRTKANNHATYYAESVKG

SEQ ID NO: 18209 - protein, 10 aa, synthetic construct
  source 1..10: note = Description of Artificial Sequence: Synthetic peptide; note = XENP020419 vhCDR3
LANWDWYFDV

SEQ ID NO: 18210 - protein, 218 aa, synthetic construct; identical to SEQ ID NO: 17620
  source 1..218: note = Description of Artificial Sequence: Synthetic polypeptide; note = XENP020419 7G8_H3L3_IgG1_PVA_/S267K Light Chain

SEQ ID NO: 18211 - protein, 111 aa, synthetic construct; identical to SEQ ID NO: 17621
  source 1..111: note = Description of Artificial Sequence: Synthetic polypeptide; note = VL of XENP020419

SEQ ID NO: 18212 - protein, 15 aa, synthetic construct
  source 1..15: note = Description of Artificial Sequence: Synthetic peptide; note = XENP020419 vlCDR1
KASQSVDYDGDSYMN

SEQ ID NO: 18213 - protein, 7 aa, synthetic construct
  source 1..7: note = Description of Artificial Sequence: Synthetic peptide; note = XENP020419 vlCDR2
AASNLES

SEQ ID NO: 18214 - protein, 9 aa, synthetic construct
  source 1..9: note = Description of Artificial Sequence: Synthetic peptide; note = XENP020419 vlCDR3
QQSNEDPFT

SEQ ID NO: 18215 - protein, 450 aa, synthetic construct
  source 1..450: note = Description of Artificial Sequence: Synthetic polypeptide; note = XENP020449 7G8_H0.1_L0_IgG1_PVA_/S267K Heavy Chain
EVKLEESGGGLVQPGGSMKLSCAASGYTFSDAWMDWVRQSPEKGLEWVAEIRTKANNHATYYAESVKGRFTISRDDSKSSVYLQMNSLRAEDTGIYYCTRLANWDWYFDVWGAGTTVTVSSASTKGPSVFPLAPSSKSTSGGTAALGCLVKDYFPEPVTVSWNSGALTSGVHTFPAVLQSSGLYSLSSVVTVPSSSLGTQTYICNVNHKPSDTKVDKKVEPKSCDKTHTCPPCPAPPVAGPSVFLFPPKPKDTLMISRTPEVTCVVVDVKHEDPEVKFNWYVDGVEVHNAKTKPREEEYNSTYRVVSVLTVLHQDWLNGKEYKCKVSNKALPAPIEKTISKAKGQPREPQVYTLPPSREEMTKNQVSLTCDVSGFYPSDIAVEWESDGQPENNYKTTPPVLDSDGSFFLYSKLTVDKSRWEQGDVFSCSVMHEALHNHYTQKSLSLSPGK

SEQ ID NO: 18216 - protein, 121 aa, synthetic construct
  source 1..121: note = Description of Artificial Sequence: Synthetic polypeptide; note = VH of XENP020449
EVKLEESGGGLVQPGGSMKLSCAASGYTFSDAWMDWVRQSPEKGLEWVAEIRTKANNHATYYAESVKGRFTISRDDSKSSVYLQMNSLRAEDTGIYYCTRLANWDWYFDVWGAGTTVTVSS

SEQ ID NO: 18217 - protein, 5 aa, synthetic construct
  source 1..5: note = Description of Artificial Sequence: Synthetic peptide; note = XENP020449 vhCDR1
DAWMD

SEQ ID NO: 18218 - protein, 19 aa, synthetic construct
  source 1..19: note = Description of Artificial Sequence: Synthetic peptide; note = XENP020449 vhCDR2
EIRTKANNHATYYAESVKG

SEQ ID NO: 18219 - protein, 10 aa, synthetic construct
  source 1..10: note = Description of Artificial Sequence: Synthetic peptide; note = XENP020449 vhCDR3
LANWDWYFDV

SEQ ID NO: 18220 - protein, 218 aa, synthetic construct; identical to SEQ ID NO: 17590
  source 1..218: note = Description of Artificial Sequence: Synthetic polypeptide; note = XENP020449 7G8_H0.1_L0_IgG1_PVA_/S267K Light Chain

SEQ ID NO: 18221 - protein, 111 aa, synthetic construct; identical to SEQ ID NO: 17591
  source 1..111: note = Description of Artificial Sequence: Synthetic polypeptide; note = VL of XENP020449

SEQ ID NO: 18222 - protein, 15 aa, synthetic construct
  source 1..15: note = Description of Artificial Sequence: Synthetic peptide; note = XENP020449 vlCDR1
KASQSVDYDGDSYMN

SEQ ID NO: 18223 - protein, 7 aa, synthetic construct
  source 1..7: note = Description of Artificial Sequence: Synthetic peptide; note = XENP020449 vlCDR2
AASNLES

SEQ ID NO: 18224 - protein, 9 aa, synthetic construct
  source 1..9: note = Description of Artificial Sequence: Synthetic peptide; note = XENP020449 vlCDR3
QQSNEDPFT

SEQ ID NO: 18225 - protein, 450 aa, synthetic construct
  source 1..450: note = Description of Artificial Sequence: Synthetic polypeptide; note = XENP020450 7G8_H0.2_L0_IgG1_PVA_/S267K Heavy Chain
EVKLEESGGGLVQPGGSMKLSCAASGGTFSDAWMDWVRQSPEKGLEWVAEIRTKANNHATYYAESVKGRFTISRDDSKSSVYLQMNSLRAEDTGIYYCTRLANWDWYFDVWGAGTTVTVSSASTKGPSVFPLAPSSKSTSGGTAALGCLVKDYFPEPVTVSWNSGALTSGVHTFPAVLQSSGLYSLSSVVTVPSSSLGTQTYICNVNHKPSDTKVDKKVEPKSCDKTHTCPPCPAPPVAGPSVFLFPPKPKDTLMISRTPEVTCVVVDVKHEDPEVKFNWYVDGVEVHNAKTKPREEEYNSTYRVVSVLTVLHQDWLNGKEYKCKVSNKALPAPIEKTISKAKGQPREPQVYTLPPSREEMTKNQVSLTCDVSGFYPSDIAVEWESDGQPENNYKTTPPVLDSDGSFFLYSKLTVDKSRWEQGDVFSCSVMHEALHNHYTQKSLSLSPGK

SEQ ID NO: 18226 - protein, 121 aa, synthetic construct
  source 1..121: note = Description of Artificial Sequence: Synthetic polypeptide; note = VH of XENP020450
EVKLEESGGGLVQPGGSMKLSCAASGGTFSDAWMDWVRQSPEKGLEWVAEIRTKANNHATYYAESVKGRFTISRDDSKSSVYLQMNSLRAEDTGIYYCTRLANWDWYFDVWGAGTTVTVSS

SEQ ID NO: 18227 - protein, 5 aa, synthetic construct
  source 1..5: note = Description of Artificial Sequence: Synthetic peptide; note = XENP020450 vhCDR1
DAWMD

SEQ ID NO: 18228 - protein, 19 aa, synthetic construct
  source 1..19: note = Description of Artificial Sequence: Synthetic peptide; note = XENP020450 vhCDR2
EIRTKANNHATYYAESVKG

SEQ ID NO: 18229 - protein, 10 aa, synthetic construct
  source 1..10: note = Description of Artificial Sequence: Synthetic peptide; note = XENP020450 vhCDR3
LANWDWYFDV

SEQ ID NO: 18230 - protein, 218 aa, synthetic construct; identical to SEQ ID NO: 17590
  source 1..218: note = Description of Artificial Sequence: Synthetic polypeptide; note = XENP020450 7G8_H0.2_L0_IgG1_PVA_/S267K Light Chain

SEQ ID NO: 18231 - protein, 111 aa, synthetic construct; identical to SEQ ID NO: 17591
  source 1..111: note = Description of Artificial Sequence: Synthetic polypeptide; note = VL of XENP020450

SEQ ID NO: 18232 - protein, 15 aa, synthetic construct
  source 1..15: note = Description of Artificial Sequence: Synthetic peptide; note = XENP020450 vlCDR1
KASQSVDYDGDSYMN

SEQ ID NO: 18233 - protein, 7 aa, synthetic construct
  source 1..7: note = Description of Artificial Sequence: Synthetic peptide; note = XENP020450 vlCDR2
AASNLES

SEQ ID NO: 18234 - protein, 9 aa, synthetic construct
  source 1..9: note = Description of Artificial Sequence: Synthetic peptide; note = XENP020450 vlCDR3
QQSNEDPFT

SEQ ID NO: 18235 - protein, 450 aa, synthetic construct
  source 1..450: note = Description of Artificial Sequence: Synthetic polypeptide; note = XENP020451 7G8_H0.3_L0_IgG1_PVA_/S267K Heavy Chain
EVKLEESGGGLVQPGGSMKLSCAASGDTFSDAWMDWVRQSPEKGLEWVAEIRTKANNHATYYAESVKGRFTISRDDSKSSVYLQMNSLRAEDTGIYYCTRLANWDWYFDVWGAGTTVTVSSASTKGPSVFPLAPSSKSTSGGTAALGCLVKDYFPEPVTVSWNSGALTSGVHTFPAVLQSSGLYSLSSVVTVPSSSLGTQTYICNVNHKPSDTKVDKKVEPKSCDKTHTCPPCPAPPVAGPSVFLFPPKPKDTLMISRTPEVTCVVVDVKHEDPEVKFNWYVDGVEVHNAKTKPREEEYNSTYRVVSVLTVLHQDWLNGKEYKCKVSNKALPAPIEKTISKAKGQPREPQVYTLPPSREEMTKNQVSLTCDVSGFYPSDIAVEWESDGQPENNYKTTPPVLDSDGSFFLYSKLTVDKSRWEQGDVFSCSVMHEALHNHYTQKSLSLSPGK

SEQ ID NO: 18236 - protein, 121 aa, synthetic construct
  source 1..121: note = Description of Artificial Sequence: Synthetic polypeptide; note = VH of XENP020451
EVKLEESGGGLVQPGGSMKLSCAASGDTFSDAWMDWVRQSPEKGLEWVAEIRTKANNHATYYAESVKGRFTISRDDSKSSVYLQMNSLRAEDTGIYYCTRLANWDWYFDVWGAGTTVTVSS

SEQ ID NO: 18237 - protein, 5 aa, synthetic construct
  source 1..5: note = Description of Artificial Sequence: Synthetic peptide; note = XENP020451 vhCDR1
DAWMD

SEQ ID NO: 18238 - protein, 19 aa, synthetic construct
  source 1..19: note = Description of Artificial Sequence: Synthetic peptide; note = XENP020451 vhCDR2
EIRTKANNHATYYAESVKG

SEQ ID NO: 18239 - protein, 10 aa, synthetic construct
  source 1..10: note = Description of Artificial Sequence: Synthetic peptide; note = XENP020451 vhCDR3
LANWDWYFDV

SEQ ID NO: 18240 - protein, 218 aa, synthetic construct; identical to SEQ ID NO: 17590
  source 1..218: note = Description of Artificial Sequence: Synthetic polypeptide; note = XENP020451 7G8_H0.3_L0_IgG1_PVA_/S267K Light Chain

SEQ ID NO: 18241 - protein, 111 aa, synthetic construct; identical to SEQ ID NO: 17591
  source 1..111: note = Description of Artificial Sequence: Synthetic polypeptide; note = VL of XENP020451

SEQ ID NO: 18242 - protein, 15 aa, synthetic construct
  source 1..15: note = Description of Artificial Sequence: Synthetic peptide; note = XENP020451 vlCDR1
KASQSVDYDGDSYMN

SEQ ID NO: 18243 - protein, 7 aa, synthetic construct
  source 1..7: note = Description of Artificial Sequence: Synthetic peptide; note = XENP020451 vlCDR2
AASNLES

SEQ ID NO: 18244 - protein, 9 aa, synthetic construct
  source 1..9: note = Description of Artificial Sequence: Synthetic peptide; note = XENP020451 vlCDR3
QQSNEDPFT

SEQ ID NO: 18245 - protein, 450 aa, synthetic construct
  source 1..450: note = Description of Artificial Sequence: Synthetic polypeptide; note = XENP020452 7G8_H0.4_L0_IgG1_PVA_/S267K Heavy Chain
EVKLEESGGGLVQPGGSMKLSCAASGFSFSDAWMDWVRQSPEKGLEWVAEIRTKANNHATYYAESVKGRFTISRDDSKSSVYLQMNSLRAEDTGIYYCTRLANWDWYFDVWGAGTTVTVSSASTKGPSVFPLAPSSKSTSGGTAALGCLVKDYFPEPVTVSWNSGALTSGVHTFPAVLQSSGLYSLSSVVTVPSSSLGTQTYICNVNHKPSDTKVDKKVEPKSCDKTHTCPPCPAPPVAGPSVFLFPPKPKDTLMISRTPEVTCVVVDVKHEDPEVKFNWYVDGVEVHNAKTKPREEEYNSTYRVVSVLTVLHQDWLNGKEYKCKVSNKALPAPIEKTISKAKGQPREPQVYTLPPSREEMTKNQVSLTCDVSGFYPSDIAVEWESDGQPENNYKTTPPVLDSDGSFFLYSKLTVDKSRWEQGDVFSCSVMHEALHNHYTQKSLSLSPGK

SEQ ID NO: 18246 - protein, 121 aa, synthetic construct
  source 1..121: note = Description of Artificial Sequence: Synthetic polypeptide; note = VH of XENP020452
EVKLEESGGGLVQPGGSMKLSCAASGFSFSDAWMDWVRQSPEKGLEWVAEIRTKANNHATYYAESVKGRFTISRDDSKSSVYLQMNSLRAEDTGIYYCTRLANWDWYFDVWGAGTTVTVSS

SEQ ID NO: 18247 - protein, 5 aa, synthetic construct
  source 1..5: note = Description of Artificial Sequence: Synthetic peptide; note = XENP020452 vhCDR1
DAWMD

SEQ ID NO: 18248 - protein, 19 aa, synthetic construct
  source 1..19: note = Description of Artificial Sequence: Synthetic peptide; note = XENP020452 vhCDR2
EIRTKANNHATYYAESVKG

SEQ ID NO: 18249 - protein, 10 aa, synthetic construct
  source 1..10: note = Description of Artificial Sequence: Synthetic peptide; note = XENP020452 vhCDR3
LANWDWYFDV

SEQ ID NO: 18250 - protein, 218 aa, synthetic construct; identical to SEQ ID NO: 17590
  source 1..218: note = Description of Artificial Sequence: Synthetic polypeptide; note = XENP020452 7G8_H0.4_L0_IgG1_PVA_/S267K Light Chain

SEQ ID NO: 18251 - protein, 111 aa, synthetic construct; identical to SEQ ID NO: 17591
  source 1..111: note = Description of Artificial Sequence: Synthetic polypeptide; note = VL of XENP020452

SEQ ID NO: 18252 - protein, 15 aa, synthetic construct
  source 1..15: note = Description of Artificial Sequence: Synthetic peptide; note = XENP020452 vlCDR1
KASQSVDYDGDSYMN

SEQ ID NO: 18253 - protein, 7 aa, synthetic construct
  source 1..7: note = Description of Artificial Sequence: Synthetic peptide; note = XENP020452 vlCDR2
AASNLES

SEQ ID NO: 18254 - protein, 9 aa, synthetic construct
  source 1..9: note = Description of Artificial Sequence: Synthetic peptide; note = XENP020452 vlCDR3
QQSNEDPFT

SEQ ID NO: 18255 - protein, 450 aa, synthetic construct
  source 1..450: note = Description of Artificial Sequence: Synthetic polypeptide; note = XENP020453 7G8_H0.5_L0_IgG1_PVA_/S267K Heavy Chain
EVKLEESGGGLVQPGGSMKLSCAASGFTFTDAWMDWVRQSPEKGLEWVAEIRTKANNHATYYAESVKGRFTISRDDSKSSVYLQMNSLRAEDTGIYYCTRLANWDWYFDVWGAGTTVTVSSASTKGPSVFPLAPSSKSTSGGTAALGCLVKDYFPEPVTVSWNSGALTSGVHTFPAVLQSSGLYSLSSVVTVPSSSLGTQTYICNVNHKPSDTKVDKKVEPKSCDKTHTCPPCPAPPVAGPSVFLFPPKPKDTLMISRTPEVTCVVVDVKHEDPEVKFNWYVDGVEVHNAKTKPREEEYNSTYRVVSVLTVLHQDWLNGKEYKCKVSNKALPAPIEKTISKAKGQPREPQVYTLPPSREEMTKNQVSLTCDVSGFYPSDIAVEWESDGQPENNYKTTPPVLDSDGSFFLYSKLTVDKSRWEQGDVFSCSVMHEALHNHYTQKSLSLSPGK

SEQ ID NO: 18256 - protein, 121 aa, synthetic construct
  source 1..121: note = Description of Artificial Sequence: Synthetic polypeptide; note = VH of XENP020453
EVKLEESGGGLVQPGGSMKLSCAASGFTFTDAWMDWVRQSPEKGLEWVAEIRTKANNHATYYAESVKGRFTISRDDSKSSVYLQMNSLRAEDTGIYYCTRLANWDWYFDVWGAGTTVTVSS

SEQ ID NO: 18257 - protein, 5 aa, synthetic construct
  source 1..5: note = Description of Artificial Sequence: Synthetic peptide; note = XENP020453 vhCDR1
DAWMD

SEQ ID NO: 18258 - protein, 19 aa, synthetic construct
  source 1..19: note = Description of Artificial Sequence: Synthetic peptide; note = XENP020453 vhCDR2
EIRTKANNHATYYAESVKG

SEQ ID NO: 18259 - protein, 10 aa, synthetic construct
  source 1..10: note = Description of Artificial Sequence: Synthetic peptide; note = XENP020453 vhCDR3
LANWDWYFDV

SEQ ID NO: 18260 - protein, 218 aa, synthetic construct; identical to SEQ ID NO: 17590
  source 1..218: note = Description of Artificial Sequence: Synthetic polypeptide; note = XENP020453 7G8_H0.5_L0_IgG1_PVA_/S267K Light Chain

SEQ ID NO: 18261 - protein, 111 aa, synthetic construct; identical to SEQ ID NO: 17591
  source 1..111: note = Description of Artificial Sequence: Synthetic polypeptide; note = VL of XENP020453

SEQ ID NO: 18262 - protein, 15 aa, synthetic construct
  source 1..15: note = Description of Artificial Sequence: Synthetic peptide; note = XENP020453 vlCDR1
KASQSVDYDGDSYMN

SEQ ID NO: 18263 - protein, 7 aa, synthetic construct
  source 1..7: note = Description of Artificial Sequence: Synthetic peptide; note = XENP020453 vlCDR2
AASNLES

SEQ ID NO: 18264 - protein, 9 aa, synthetic construct
  source 1..9: note = Description of Artificial Sequence: Synthetic peptide; note = XENP020453 vlCDR3
QQSNEDPFT

SEQ ID NO: 18265 - protein, 450 aa, synthetic construct
  source 1..450: note = Description of Artificial Sequence: Synthetic polypeptide; note = XENP020454 7G8_H0.6_L0_IgG1_PVA_/S267K Heavy Chain
EVKLEESGGGLVQPGGSMKLSCAASGFTFDDAWMDWVRQSPEKGLEWVAEIRTKANNHATYYAESVKGRFTISRDDSKSSVYLQMNSLRAEDTGIYYCTRLANWDWYFDVWGAGTTVTVSSASTKGPSVFPLAPSSKSTSGGTAALGCLVKDYFPEPVTVSWNSGALTSGVHTFPAVLQSSGLYSLSSVVTVPSSSLGTQTYICNVNHKPSDTKVDKKVEPKSCDKTHTCPPCPAPPVAGPSVFLFPPKPKDTLMISRTPEVTCVVVDVKHEDPEVKFNWYVDGVEVHNAKTKPREEEYNSTYRVVSVLTVLHQDWLNGKEYKCKVSNKALPAPIEKTISKAKGQPREPQVYTLPPSREEMTKNQVSLTCDVSGFYPSDIAVEWESDGQPENNYKTTPPVLDSDGSFFLYSKLTVDKSRWEQGDVFSCSVMHEALHNHYTQKSLSLSPGK

SEQ ID NO: 18266 - protein, 121 aa, synthetic construct
  source 1..121: note = Description of Artificial Sequence: Synthetic polypeptide; note = VH of XENP020454
EVKLEESGGGLVQPGGSMKLSCAASGFTFDDAWMDWVRQSPEKGLEWVAEIRTKANNHATYYAESVKGRFTISRDDSKSSVYLQMNSLRAEDTGIYYCTRLANWDWYFDVWGAGTTVTVSS

SEQ ID NO: 18267 - protein, 5 aa, synthetic construct
  source 1..5: note = Description of Artificial Sequence: Synthetic peptide; note = XENP020454 vhCDR1
DAWMD

SEQ ID NO: 18268 - protein, 19 aa, synthetic construct
  source 1..19: note = Description of Artificial Sequence: Synthetic peptide; note = XENP020454 vhCDR2
EIRTKANNHATYYAESVKG

SEQ ID NO: 18269 - protein, 10 aa, synthetic construct
  source 1..10: note = Description of Artificial Sequence: Synthetic peptide; note = XENP020454 vhCDR3
LANWDWYFDV

SEQ ID NO: 18270 - protein, 218 aa, synthetic construct; identical to SEQ ID NO: 17590
  source 1..218: note = Description of Artificial Sequence: Synthetic polypeptide; note = XENP020454 7G8_H0.6_L0_IgG1_PVA_/S267K Light Chain

SEQ ID NO: 18271 - protein, 111 aa, synthetic construct; identical to SEQ ID NO: 17591
  source 1..111: note = Description of Artificial Sequence: Synthetic polypeptide; note = VL of XENP020454

SEQ ID NO: 18272 - protein, 15 aa, synthetic construct
  source 1..15: note = Description of Artificial Sequence: Synthetic peptide; note = XENP020454 vlCDR1
KASQSVDYDGDSYMN

SEQ ID NO: 18273 - protein, 7 aa, synthetic construct
  source 1..7: note = Description of Artificial Sequence: Synthetic peptide; note = XENP020454 vlCDR2
AASNLES

SEQ ID NO: 18274 - protein, 9 aa, synthetic construct
  source 1..9: note = Description of Artificial Sequence: Synthetic peptide; note = XENP020454 vlCDR3
QQSNEDPFT

SEQ ID NO: 18275 - protein, 450 aa, synthetic construct
  source 1..450: note = Description of Artificial Sequence: Synthetic polypeptide; note = XENP020455 7G8_H0.7_L0_IgG1_PVA_/S267K Heavy Chain
EVKLEESGGGLVQPGGSMKLSCAASGFTFGDAWMDWVRQSPEKGLEWVAEIRTKANNHATYYAESVKGRFTISRDDSKSSVYLQMNSLRAEDTGIYYCTRLANWDWYFDVWGAGTTVTVSSASTKGPSVFPLAPSSKSTSGGTAALGCLVKDYFPEPVTVSWNSGALTSGVHTFPAVLQSSGLYSLSSVVTVPSSSLGTQTYICNVNHKPSDTKVDKKVEPKSCDKTHTCPPCPAPPVAGPSVFLFPPKPKDTLMISRTPEVTCVVVDVKHEDPEVKFNWYVDGVEVHNAKTKPREEEYNSTYRVVSVLTVLHQDWLNGKEYKCKVSNKALPAPIEKTISKAKGQPREPQVYTLPPSREEMTKNQVSLTCDVSGFYPSDIAVEWESDGQPENNYKTTPPVLDSDGSFFLYSKLTVDKSRWEQGDVFSCSVMHEALHNHYTQKSLSLSPGK

SEQ ID NO: 18276 - protein, 121 aa, synthetic construct
  source 1..121: note = Description of Artificial Sequence: Synthetic polypeptide; note = VH of XENP020455
EVKLEESGGGLVQPGGSMKLSCAASGFTFGDAWMDWVRQSPEKGLEWVAEIRTKANNHATYYAESVKGRFTISRDDSKSSVYLQMNSLRAEDTGIYYCTRLANWDWYFDVWGAGTTVTVSS

SEQ ID NO: 18277 - protein, 5 aa, synthetic construct
  source 1..5: note = Description of Artificial Sequence: Synthetic peptide; note = XENP020455 vhCDR1
DAWMD

SEQ ID NO: 18278 - protein, 19 aa, synthetic construct
  source 1..19: note = Description of Artificial Sequence: Synthetic peptide; note = XENP020455 vhCDR2
EIRTKANNHATYYAESVKG

SEQ ID NO: 18279 - protein, 10 aa, synthetic construct
  source 1..10: note = Description of Artificial Sequence: Synthetic peptide; note = XENP020455 vhCDR3
LANWDWYFDV

SEQ ID NO: 18280 - protein, 218 aa, synthetic construct; identical to SEQ ID NO: 17590
  source 1..218: note = Description of Artificial Sequence: Synthetic polypeptide; note = XENP020455 7G8_H0.7_L0_IgG1_PVA_/S267K Light Chain

SEQ ID NO: 18281 - protein, 111 aa, synthetic construct; identical to SEQ ID NO: 17591
  source 1..111: note = Description of Artificial Sequence: Synthetic polypeptide; note = VL of XENP020455

SEQ ID NO: 18282 - protein, 15 aa, synthetic construct
  source 1..15: note = Description of Artificial Sequence: Synthetic peptide; note = XENP020455 vlCDR1
KASQSVDYDGDSYMN

SEQ ID NO: 18283 - protein, 7 aa, synthetic construct
  source 1..7: note = Description of Artificial Sequence: Synthetic peptide; note = XENP020455 vlCDR2
AASNLES

SEQ ID NO: 18284 - protein, 9 aa, synthetic construct
  source 1..9: note = Description of Artificial Sequence: Synthetic peptide; note = XENP020455 vlCDR3
QQSNEDPFT

SEQ ID NO: 18285 - protein, 450 aa, synthetic construct
  source 1..450: note = Description of Artificial Sequence: Synthetic polypeptide; note = XENP020456 7G8_H0.8_L0_IgG1_PVA_/S267K Heavy Chain
EVKLEESGGGLVQPGGSMKLSCAASGFTFSNAWMDWVRQSPEKGLEWVAEIRTKANNHATYYAESVKGRFTISRDDSKSSVYLQMNSLRAEDTGIYYCTRLANWDWYFDVWGAGTTVTVSSASTKGPSVFPLAPSSKSTSGGTAALGCLVKDYFPEPVTVSWNSGALTSGVHTFPAVLQSSGLYSLSSVVTVPSSSLGTQTYICNVNHKPSDTKVDKKVEPKSCDKTHTCPPCPAPPVAGPSVFLFPPKPKDTLMISRTPEVTCVVVDVKHEDPEVKFNWYVDGVEVHNAKTKPREEEYNSTYRVVSVLTVLHQDWLNGKEYKCKVSNKALPAPIEKTISKAKGQPREPQVYTLPPSREEMTKNQVSLTCDVSGFYPSDIAVEWESDGQPENNYKTTPPVLDSDGSFFLYSKLTVDKSRWEQGDVFSCSVMHEALHNHYTQKSLSLSPGK

SEQ ID NO: 18286 - protein, 121 aa, synthetic construct
  source 1..121: note = Description of Artificial Sequence: Synthetic polypeptide; note = VH of XENP020456
EVKLEESGGGLVQPGGSMKLSCAASGFTFSNAWMDWVRQSPEKGLEWVAEIRTKANNHATYYAESVKGRFTISRDDSKSSVYLQMNSLRAEDTGIYYCTRLANWDWYFDVWGAGTTVTVSS

SEQ ID NO: 18287 - protein, 5 aa, synthetic construct
  source 1..5: note = Description of Artificial Sequence: Synthetic peptide; note = XENP020456 vhCDR1
NAWMD

SEQ ID NO: 18288 - protein, 19 aa, synthetic construct
  source 1..19: note = Description of Artificial Sequence: Synthetic peptide; note = XENP020456 vhCDR2
EIRTKANNHATYYAESVKG

SEQ ID NO: 18289 - protein, 10 aa, synthetic construct
  source 1..10: note = Description of Artificial Sequence: Synthetic peptide; note = XENP020456 vhCDR3
LANWDWYFDV

SEQ ID NO: 18290 - protein, 218 aa, synthetic construct; identical to SEQ ID NO: 17590
  source 1..218: note = Description of Artificial Sequence: Synthetic polypeptide; note = XENP020456 7G8_H0.8_L0_IgG1_PVA_/S267K Light Chain

SEQ ID NO: 18291 - protein, 111 aa, synthetic construct; identical to SEQ ID NO: 17591
  source 1..111: note = Description of Artificial Sequence: Synthetic polypeptide; note = VL of XENP020456

SEQ ID NO: 18292 - protein, 15 aa, synthetic construct
  source 1..15: note = Description of Artificial Sequence: Synthetic peptide; note = XENP020456 vlCDR1
KASQSVDYDGDSYMN

SEQ ID NO: 18293 - protein, 7 aa, synthetic construct
  source 1..7: note = Description of Artificial Sequence: Synthetic peptide; note = XENP020456 vlCDR2
AASNLES

SEQ ID NO: 18294 - protein, 9 aa, synthetic construct
  source 1..9: note = Description of Artificial Sequence: Synthetic peptide; note = XENP020456 vlCDR3
QQSNEDPFT

SEQ ID NO: 18295 - protein, 450 aa, synthetic construct
  source 1..450: note = Description of Artificial Sequence: Synthetic polypeptide; note = XENP020457 7G8_H0.9_L0_IgG1_PVA_/S267K Heavy Chain
EVKLEESGGGLVQPGGSMKLSCAASGFTFSEAWMDWVRQSPEKGLEWVAEIRTKANNHATYYAESVKGRFTISRDDSKSSVYLQMNSLRAEDTGIYYCTRLANWDWYFDVWGAGTTVTVSSASTKGPSVFPLAPSSKSTSGGTAALGCLVKDYFPEPVTVSWNSGALTSGVHTFPAVLQSSGLYSLSSVVTVPSSSLGTQTYICNVNHKPSDTKVDKKVEPKSCDKTHTCPPCPAPPVAGPSVFLFPPKPKDTLMISRTPEVTCVVVDVKHEDPEVKFNWYVDGVEVHNAKTKPREEEYNSTYRVVSVLTVLHQDWLNGKEYKCKVSNKALPAPIEKTISKAKGQPREPQVYTLPPSREEMTKNQVSLTCDVSGFYPSDIAVEWESDGQPENNYKTTPPVLDSDGSFFLYSKLTVDKSRWEQGDVFSCSVMHEALHNHYTQKSLSLSPGK

SEQ ID NO: 18296 - protein, 121 aa, synthetic construct
  source 1..121: note = Description of Artificial Sequence: Synthetic polypeptide; note = VH of XENP020457
EVKLEESGGGLVQPGGSMKLSCAASGFTFSEAWMDWVRQSPEKGLEWVAEIRTKANNHATYYAESVKGRFTISRDDSKSSVYLQMNSLRAEDTGIYYCTRLANWDWYFDVWGAGTTVTVSS

SEQ ID NO: 18297 - protein, 5 aa, synthetic construct
  source 1..5: note = Description of Artificial Sequence: Synthetic peptide; note = XENP020457 vhCDR1
EAWMD

SEQ ID NO: 18298 - protein, 19 aa, synthetic construct
  source 1..19: note = Description of Artificial Sequence: Synthetic peptide; note = XENP020457 vhCDR2
EIRTKANNHATYYAESVKG

SEQ ID NO: 18299 - protein, 10 aa, synthetic construct
  source 1..10: note = Description of Artificial Sequence: Synthetic peptide; note = XENP020457 vhCDR3
LANWDWYFDV

SEQ ID NO: 18300 - protein, 218 aa, synthetic construct; identical to SEQ ID NO: 17590
  source 1..218: note = Description of Artificial Sequence: Synthetic polypeptide; note = XENP020457 7G8_H0.9_L0_IgG1_PVA_/S267K Light Chain

SEQ ID NO: 18301 - protein, 111 aa, synthetic construct; identical to SEQ ID NO: 17591
  source 1..111: note = Description of Artificial Sequence: Synthetic polypeptide; note = VL of XENP020457

SEQ ID NO: 18302 - protein, 15 aa, synthetic construct
  source 1..15: note = Description of Artificial Sequence: Synthetic peptide; note = XENP020457 vlCDR1
KASQSVDYDGDSYMN

SEQ ID NO: 18303 - protein, 7 aa, synthetic construct
  source 1..7: note = Description of Artificial Sequence: Synthetic peptide; note = XENP020457 vlCDR2
AASNLES

SEQ ID NO: 18304 - protein, 9 aa, synthetic construct
  source 1..9: note = Description of Artificial Sequence: Synthetic peptide; note = XENP020457 vlCDR3
QQSNEDPFT

SEQ ID NO: 18305 - protein, 450 aa, synthetic construct
  source 1..450: note = Description of Artificial Sequence: Synthetic polypeptide; note = XENP020458 7G8_H0.10_L0_IgG1_PVA_/S267K Heavy Chain
EVKLEESGGGLVQPGGSMKLSCAASGFTFSHAWMDWVRQSPEKGLEWVAEIRTKANNHATYYAESVKGRFTISRDDSKSSVYLQMNSLRAEDTGIYYCTRLANWDWYFDVWGAGTTVTVSSASTKGPSVFPLAPSSKSTSGGTAALGCLVKDYFPEPVTVSWNSGALTSGVHTFPAVLQSSGLYSLSSVVTVPSSSLGTQTYICNVNHKPSDTKVDKKVEPKSCDKTHTCPPCPAPPVAGPSVFLFPPKPKDTLMISRTPEVTCVVVDVKHEDPEVKFNWYVDGVEVHNAKTKPREEEYNSTYRVVSVLTVLHQDWLNGKEYKCKVSNKALPAPIEKTISKAKGQPREPQVYTLPPSREEMTKNQVSLTCDVSGFYPSDIAVEWESDGQPENNYKTTPPVLDSDGSFFLYSKLTVDKSRWEQGDVFSCSVMHEALHNHYTQKSLSLSPGK

SEQ ID NO: 18306 - protein, 121 aa, synthetic construct
  source 1..121: note = Description of Artificial Sequence: Synthetic polypeptide; note = VH of XENP020458
EVKLEESGGGLVQPGGSMKLSCAASGFTFSHAWMDWVRQSPEKGLEWVAEIRTKANNHATYYAESVKGRFTISRDDSKSSVYLQMNSLRAEDTGIYYCTRLANWDWYFDVWGAGTTVTVSS

SEQ ID NO: 18307 - protein, 5 aa, synthetic construct
  source 1..5: note = Description of Artificial Sequence: Synthetic peptide; note = XENP020458 vhCDR1
HAWMD

SEQ ID NO: 18308 - protein, 19 aa, synthetic construct
  source 1..19: note = Description of Artificial Sequence: Synthetic peptide; note = XENP020458 vhCDR2
EIRTKANNHATYYAESVKG

SEQ ID NO: 18309 - protein, 10 aa, synthetic construct
  source 1..10: note = Description of Artificial Sequence: Synthetic peptide; note = XENP020458 vhCDR3
LANWDWYFDV

SEQ ID NO: 18310 - protein, 218 aa, synthetic construct; identical to SEQ ID NO: 17590
  source 1..218: note = Description of Artificial Sequence: Synthetic polypeptide; note = XENP020458 7G8_H0.10_L0_IgG1_PVA_/S267K Light Chain

SEQ ID NO: 18311 - protein, 111 aa, synthetic construct; identical to SEQ ID NO: 17591
  source 1..111: note = Description of Artificial Sequence: Synthetic polypeptide; note = VL of XENP020458

SEQ ID NO: 18312 - protein, 15 aa, synthetic construct
  source 1..15: note = Description of Artificial Sequence: Synthetic peptide; note = XENP020458 vlCDR1
KASQSVDYDGDSYMN

SEQ ID NO: 18313 - protein, 7 aa, synthetic construct
  source 1..7: note = Description of Artificial Sequence: Synthetic peptide; note = XENP020458 vlCDR2
AASNLES

SEQ ID NO: 18314 - protein, 9 aa, synthetic construct
  source 1..9: note = Description of Artificial Sequence: Synthetic peptide; note = XENP020458 vlCDR3
QQSNEDPFT

SEQ ID NO: 18315 - protein, 450 aa, synthetic construct
  source 1..450: note = Description of Artificial Sequence: Synthetic polypeptide; note = XENP020459 7G8_H0.11_L0_IgG1_PVA_/S267K Heavy Chain
EVKLEESGGGLVQPGGSMKLSCAASGFTFSSAWMDWVRQSPEKGLEWVAEIRTKANNHATYYAESVKGRFTISRDDSKSSVYLQMNSLRAEDTGIYYCTRLANWDWYFDVWGAGTTVTVSSASTKGPSVFPLAPSSKSTSGGTAALGCLVKDYFPEPVTVSWNSGALTSGVHTFPAVLQSSGLYSLSSVVTVPSSSLGTQTYICNVNHKPSDTKVDKKVEPKSCDKTHTCPPCPAPPVAGPSVFLFPPKPKDTLMISRTPEVTCVVVDVKHEDPEVKFNWYVDGVEVHNAKTKPREEEYNSTYRVVSVLTVLHQDWLNGKEYKCKVSNKALPAPIEKTISKAKGQPREPQVYTLPPSREEMTKNQVSLTCDVSGFYPSDIAVEWESDGQPENNYKTTPPVLDSDGSFFLYSKLTVDKSRWEQGDVFSCSVMHEALHNHYTQKSLSLSPGK

SEQ ID NO: 18316 - protein, 121 aa, synthetic construct
  source 1..121: note = Description of Artificial Sequence: Synthetic polypeptide; note = VH of XENP020459
EVKLEESGGGLVQPGGSMKLSCAASGFTFSSAWMDWVRQSPEKGLEWVAEIRTKANNHATYYAESVKGRFTISRDDSKSSVYLQMNSLRAEDTGIYYCTRLANWDWYFDVWGAGTTVTVSS

SEQ ID NO: 18317 - protein, 5 aa, synthetic construct
  source 1..5: note = Description of Artificial Sequence: Synthetic peptide; note = XENP020459 vhCDR1
SAWMD

SEQ ID NO: 18318 - protein, 19 aa, synthetic construct
  source 1..19: note = Description of Artificial Sequence: Synthetic peptide; note = XENP020459 vhCDR2
EIRTKANNHATYYAESVKG

SEQ ID NO: 18319 - protein, 10 aa, synthetic construct
  source 1..10: note = Description of Artificial Sequence: Synthetic peptide; note = XENP020459 vhCDR3
LANWDWYFDV

SEQ ID NO: 18320 - protein, 218 aa, synthetic construct; identical to SEQ ID NO: 17590
  source 1..218: note = Description of Artificial Sequence: Synthetic polypeptide; note = XENP020459 7G8_H0.11_L0_IgG1_PVA_/S267K Light Chain

SEQ ID NO: 18321 - protein, 111 aa, synthetic construct; identical to SEQ ID NO: 17591
  source 1..111: note = Description of Artificial Sequence: Synthetic polypeptide; note = VL of XENP020459

SEQ ID NO: 18322 - protein, 15 aa, synthetic construct
  source 1..15: note = Description of Artificial Sequence: Synthetic peptide; note = XENP020459 vlCDR1
KASQSVDYDGDSYMN

SEQ ID NO: 18323 - protein, 7 aa, synthetic construct
  source 1..7: note = Description of Artificial Sequence: Synthetic peptide; note = XENP020459 vlCDR2
AASNLES

SEQ ID NO: 18324 - protein, 9 aa, synthetic construct
  source 1..9: note = Description of Artificial Sequence: Synthetic peptide; note = XENP020459 vlCDR3
QQSNEDPFT

SEQ ID NO: 18325 - protein, 450 aa, synthetic construct
  source 1..450: note = Description of Artificial Sequence: Synthetic polypeptide; note = XENP020460 7G8_H0.12_L0_IgG1_PVA_/S267K Heavy Chain
EVKLEESGGGLVQPGGSMKLSCAASGFTFSRAWMDWVRQSPEKGLEWVAEIRTKANNHATYYAESVKGRFTISRDDSKSSVYLQMNSLRAEDTGIYYCTRLANWDWYFDVWGAGTTVTVSSASTKGPSVFPLAPSSKSTSGGTAALGCLVKDYFPEPVTVSWNSGALTSGVHTFPAVLQSSGLYSLSSVVTVPSSSLGTQTYICNVNHKPSDTKVDKKVEPKSCDKTHTCPPCPAPPVAGPSVFLFPPKPKDTLMISRTPEVTCVVVDVKHEDPEVKFNWYVDGVEVHNAKTKPREEEYNSTYRVVSVLTVLHQDWLNGKEYKCKVSNKALPAPIEKTISKAKGQPREPQVYTLPPSREEMTKNQVSLTCDVSGFYPSDIAVEWESDGQPENNYKTTPPVLDSDGSFFLYSKLTVDKSRWEQGDVFSCSVMHEALHNHYTQKSLSLSPGK

SEQ ID NO: 18326 - protein, 121 aa, synthetic construct
  source 1..121: note = Description of Artificial Sequence: Synthetic polypeptide; note = VH of XENP020460
EVKLEESGGGLVQPGGSMKLSCAASGFTFSRAWMDWVRQSPEKGLEWVAEIRTKANNHATYYAESVKGRFTISRDDSKSSVYLQMNSLRAEDTGIYYCTRLANWDWYFDVWGAGTTVTVSS

SEQ ID NO: 18327 - protein, 5 aa, synthetic construct
  source 1..5: note = Description of Artificial Sequence: Synthetic peptide; note = XENP020460 vhCDR1
RAWMD

SEQ ID NO: 18328 - protein, 19 aa, synthetic construct
  source 1..19: note = Description of Artificial Sequence: Synthetic peptide; note = XENP020460 vhCDR2
EIRTKANNHATYYAESVKG

SEQ ID NO: 18329 - protein, 10 aa, synthetic construct
  source 1..10: note = Description of Artificial Sequence: Synthetic peptide; note = XENP020460 vhCDR3
LANWDWYFDV

SEQ ID NO: 18330 - protein, 218 aa, synthetic construct; identical to SEQ ID NO: 17590
  source 1..218: note = Description of Artificial Sequence: Synthetic polypeptide; note = XENP020460 7G8_H0.12_L0_IgG1_PVA_/S267K Light Chain

SEQ ID NO: 18331 - protein, 111 aa, synthetic construct; identical to SEQ ID NO: 17591
  source 1..111: note = Description of Artificial Sequence: Synthetic polypeptide; note = VL of XENP020460

SEQ ID NO: 18332 - protein, 15 aa, synthetic construct
  source 1..15: note = Description of Artificial Sequence: Synthetic peptide; note = XENP020460 vlCDR1
KASQSVDYDGDSYMN

SEQ ID NO: 18333 - protein, 7 aa, synthetic construct
  source 1..7: note = Description of Artificial Sequence: Synthetic peptide; note = XENP020460 vlCDR2
AASNLES

SEQ ID NO: 18334 - protein, 9 aa, synthetic construct
  source 1..9: note = Description of Artificial Sequence: Synthetic peptide; note = XENP020460 vlCDR3
QQSNEDPFT

SEQ ID NO: 18335 - protein, 450 aa, synthetic construct
  source 1..450: note = Description of Artificial Sequence: Synthetic polypeptide; note = XENP020461 7G8_H0.13_L0_IgG1_PVA_/S267K Heavy Chain
EVKLEESGGGLVQPGGSMKLSCAASGFTFSLAWMDWVRQSPEKGLEWVAEIRTKANNHATYYAESVKGRFTISRDDSKSSVYLQMNSLRAEDTGIYYCTRLANWDWYFDVWGAGTTVTVSSASTKGPSVFPLAPSSKSTSGGTAALGCLVKDYFPEPVTVSWNSGALTSGVHTFPAVLQSSGLYSLSSVVTVPSSSLGTQTYICNVNHKPSDTKVDKKVEPKSCDKTHTCPPCPAPPVAGPSVFLFPPKPKDTLMISRTPEVTCVVVDVKHEDPEVKFNWYVDGVEVHNAKTKPREEEYNSTYRVVSVLTVLHQDWLNGKEYKCKVSNKALPAPIEKTISKAKGQPREPQVYTLPPSREEMTKNQVSLTCDVSGFYPSDIAVEWESDGQPENNYKTTPPVLDSDGSFFLYSKLTVDKSRWEQGDVFSCSVMHEALHNHYTQKSLSLSPGK

SEQ ID NO: 18336 - protein, 121 aa, synthetic construct
  source 1..121: note = Description of Artificial Sequence: Synthetic polypeptide; note = VH of XENP020461
EVKLEESGGGLVQPGGSMKLSCAASGFTFSLAWMDWVRQSPEKGLEWVAEIRTKANNHATYYAESVKGRFTISRDDSKSSVYLQMNSLRAEDTGIYYCTRLANWDWYFDVWGAGTTVTVSS

SEQ ID NO: 18337 - protein, 5 aa, synthetic construct
  source 1..5: note = Description of Artificial Sequence: Synthetic peptide; note = XENP020461 vhCDR1
LAWMD

SEQ ID NO: 18338 - protein, 19 aa, synthetic construct
  source 1..19: note = Description of Artificial Sequence: Synthetic peptide; note = XENP020461 vhCDR2
EIRTKANNHATYYAESVKG

SEQ ID NO: 18339 - protein, 10 aa, synthetic construct
  source 1..10: note = Description of Artificial Sequence: Synthetic peptide; note = XENP020461 vhCDR3
LANWDWYFDV

SEQ ID NO: 18340 - protein, 218 aa, synthetic construct; identical to SEQ ID NO: 17590
  source 1..218: note = Description of Artificial Sequence: Synthetic polypeptide; note = XENP020461 7G8_H0.13_L0_IgG1_PVA_/S267K Light Chain

SEQ ID NO: 18341 - protein, 111 aa, synthetic construct; identical to SEQ ID NO: 17591
  source 1..111: note = Description of Artificial Sequence: Synthetic polypeptide; note = VL of XENP020461

SEQ ID NO: 18342 - protein, 15 aa, synthetic construct
  source 1..15: note = Description of Artificial Sequence: Synthetic peptide; note = XENP020461 vlCDR1
KASQSVDYDGDSYMN

SEQ ID NO: 18343 - protein, 7 aa, synthetic construct
  source 1..7: note = Description of Artificial Sequence: Synthetic peptide; note = XENP020461 vlCDR2
AASNLES

SEQ ID NO: 18344 - protein, 9 aa, synthetic construct
  source 1..9: note = Description of Artificial Sequence: Synthetic peptide; note = XENP020461 vlCDR3
QQSNEDPFT

SEQ ID NO: 18345 - protein, 450 aa, synthetic construct
  source 1..450: note = Description of Artificial Sequence: Synthetic polypeptide; note = XENP020462 7G8_H0.14_L0_IgG1_PVA_/S267K Heavy Chain
EVKLEESGGGLVQPGGSMKLSCAASGFTFSTAWMDWVRQSPEKGLEWVAEIRTKANNHATYYAESVKGRFTISRDDSKSSVYLQMNSLRAEDTGIYYCTRLANWDWYFDVWGAGTTVTVSSASTKGPSVFPLAPSSKSTSGGTAALGCLVKDYFPEPVTVSWNSGALTSGVHTFPAVLQSSGLYSLSSVVTVPSSSLGTQTYICNVNHKPSDTKVDKKVEPKSCDKTHTCPPCPAPPVAGPSVFLFPPKPKDTLMISRTPEVTCVVVDVKHEDPEVKFNWYVDGVEVHNAKTKPREEEYNSTYRVVSVLTVLHQDWLNGKEYKCKVSNKALPAPIEKTISKAKGQPREPQVYTLPPSREEMTKNQVSLTCDVSGFYPSDIAVEWESDGQPENNYKTTPPVLDSDGSFFLYSKLTVDKSRWEQGDVFSCSVMHEALHNHYTQKSLSLSPGK

SEQ ID NO: 18346 - protein, 121 aa, synthetic construct
  source 1..121: note = Description of Artificial Sequence: Synthetic polypeptide; note = VH of XENP020462
EVKLEESGGGLVQPGGSMKLSCAASGFTFSTAWMDWVRQSPEKGLEWVAEIRTKANNHATYYAESVKGRFTISRDDSKSSVYLQMNSLRAEDTGIYYCTRLANWDWYFDVWGAGTTVTVSS

SEQ ID NO: 18347 - protein, 5 aa, synthetic construct
  source 1..5: note = Description of Artificial Sequence: Synthetic peptide; note = XENP020462 vhCDR1
TAWMD

SEQ ID NO: 18348 - protein, 19 aa, synthetic construct
  source 1..19: note = Description of Artificial Sequence: Synthetic peptide; note = XENP020462 vhCDR2
EIRTKANNHATYYAESVKG

SEQ ID NO: 18349 - protein, 10 aa, synthetic construct
  source 1..10: note = Description of Artificial Sequence: Synthetic peptide; note = XENP020462 vhCDR3
LANWDWYFDV

SEQ ID NO: 18350 - protein, 218 aa, synthetic construct; identical to SEQ ID NO: 17590
  source 1..218: note = Description of Artificial Sequence: Synthetic polypeptide; note = XENP020462 7G8_H0.14_L0_IgG1_PVA_/S267K Light Chain

SEQ ID NO: 18351 - protein, 111 aa, synthetic construct; identical to SEQ ID NO: 17591
  source 1..111: note = Description of Artificial Sequence: Synthetic polypeptide; note = VL of XENP020462

SEQ ID NO: 18352 - protein, 15 aa, synthetic construct
  source 1..15: note = Description of Artificial Sequence: Synthetic peptide; note = XENP020462 vlCDR1
KASQSVDYDGDSYMN

SEQ ID NO: 18353 - protein, 7 aa, synthetic construct
  source 1..7: note = Description of Artificial Sequence: Synthetic peptide; note = XENP020462 vlCDR2
AASNLES

SEQ ID NO: 18354 - protein, 9 aa, synthetic construct
  source 1..9: note = Description of Artificial Sequence: Synthetic peptide; note = XENP020462 vlCDR3
QQSNEDPFT

SEQ ID NO: 18355 - protein, 450 aa, synthetic construct
  source 1..450: note = Description of Artificial Sequence: Synthetic polypeptide; note = XENP020463 7G8_H0.15_L0_IgG1_PVA_/S267K Heavy Chain
EVKLEESGGGLVQPGGSMKLSCAASGFTFSGAWMDWVRQSPEKGLEWVAEIRTKANNHATYYAESVKGRFTISRDDSKSSVYLQMNSLRAEDTGIYYCTRLANWDWYFDVWGAGTTVTVSSASTKGPSVFPLAPSSKSTSGGTAALGCLVKDYFPEPVTVSWNSGALTSGVHTFPAVLQSSGLYSLSSVVTVPSSSLGTQTYICNVNHKPSDTKVDKKVEPKSCDKTHTCPPCPAPPVAGPSVFLFPPKPKDTLMISRTPEVTCVVVDVKHEDPEVKFNWYVDGVEVHNAKTKPREEEYNSTYRVVSVLTVLHQDWLNGKEYKCKVSNKALPAPIEKTISKAKGQPREPQVYTLPPSREEMTKNQVSLTCDVSGFYPSDIAVEWESDGQPENNYKTTPPVLDSDGSFFLYSKLTVDKSRWEQGDVFSCSVMHEALHNHYTQKSLSLSPGK

SEQ ID NO: 18356 - protein, 121 aa, synthetic construct
  source 1..121: note = Description of Artificial Sequence: Synthetic polypeptide; note = VH of XENP020463
EVKLEESGGGLVQPGGSMKLSCAASGFTFSGAWMDWVRQSPEKGLEWVAEIRTKANNHATYYAESVKGRFTISRDDSKSSVYLQMNSLRAEDTGIYYCTRLANWDWYFDVWGAGTTVTVSS

SEQ ID NO: 18357 - protein, 5 aa, synthetic construct
  source 1..5: note = Description of Artificial Sequence: Synthetic peptide; note = XENP020463 vhCDR1
GAWMD

SEQ ID NO: 18358 - protein, 19 aa, synthetic construct
  source 1..19: note = Description of Artificial Sequence: Synthetic peptide; note = XENP020463 vhCDR2
EIRTKANNHATYYAESVKG

SEQ ID NO: 18359 - protein, 10 aa, synthetic construct
  source 1..10: note = Description of Artificial Sequence: Synthetic peptide; note = XENP020463 vhCDR3
LANWDWYFDV

SEQ ID NO: 18360 - protein, 218 aa, synthetic construct; identical to SEQ ID NO: 17590
  source 1..218: note = Description of Artificial Sequence: Synthetic polypeptide; note = XENP020463 7G8_H0.15_L0_IgG1_PVA_/S267K Light Chain

SEQ ID NO: 18361 - protein, 111 aa, synthetic construct; identical to SEQ ID NO: 17591
  source 1..111: note = Description of Artificial Sequence: Synthetic polypeptide; note = VL of XENP020463

SEQ ID NO: 18362 - protein, 15 aa, synthetic construct
  source 1..15: note = Description of Artificial Sequence: Synthetic peptide; note = XENP020463 vlCDR1
KASQSVDYDGDSYMN

SEQ ID NO: 18363 - protein, 7 aa, synthetic construct
  source 1..7: note = Description of Artificial Sequence: Synthetic peptide; note = XENP020463 vlCDR2
AASNLES

SEQ ID NO: 18364 - protein, 9 aa, synthetic construct
  source 1..9: note = Description of Artificial Sequence: Synthetic peptide; note = XENP020463 vlCDR3
QQSNEDPFT

SEQ ID NO: 18365 - protein, 450 aa, synthetic construct
  source 1..450: note = Description of Artificial Sequence: Synthetic polypeptide; note = XENP020464 7G8_H0.16_L0_IgG1_PVA_/S267K Heavy Chain
EVKLEESGGGLVQPGGSMKLSCAASGFTFSYAWMDWVRQSPEKGLEWVAEIRTKANNHATYYAESVKGRFTISRDDSKSSVYLQMNSLRAEDTGIYYCTRLANWDWYFDVWGAGTTVTVSSASTKGPSVFPLAPSSKSTSGGTAALGCLVKDYFPEPVTVSWNSGALTSGVHTFPAVLQSSGLYSLSSVVTVPSSSLGTQTYICNVNHKPSDTKVDKKVEPKSCDKTHTCPPCPAPPVAGPSVFLFPPKPKDTLMISRTPEVTCVVVDVKHEDPEVKFNWYVDGVEVHNAKTKPREEEYNSTYRVVSVLTVLHQDWLNGKEYKCKVSNKALPAPIEKTISKAKGQPREPQVYTLPPSREEMTKNQVSLTCDVSGFYPSDIAVEWESDGQPENNYKTTPPVLDSDGSFFLYSKLTVDKSRWEQGDVFSCSVMHEALHNHYTQKSLSLSPGK

SEQ ID NO: 18366 - protein, 121 aa, synthetic construct
  source 1..121: note = Description of Artificial Sequence: Synthetic polypeptide; note = VH of XENP020464
EVKLEESGGGLVQPGGSMKLSCAASGFTFSYAWMDWVRQSPEKGLEWVAEIRTKANNHATYYAESVKGRFTISRDDSKSSVYLQMNSLRAEDTGIYYCTRLANWDWYFDVWGAGTTVTVSS

SEQ ID NO: 18367 - protein, 5 aa, synthetic construct
  source 1..5: note = Description of Artificial Sequence: Synthetic peptide; note = XENP020464 vhCDR1
YAWMD

SEQ ID NO: 18368 - protein, 19 aa, synthetic construct
  source 1..19: note = Description of Artificial Sequence: Synthetic peptide; note = XENP020464 vhCDR2
EIRTKANNHATYYAESVKG

SEQ ID NO: 18369 - protein, 10 aa, synthetic construct
  source 1..10: note = Description of Artificial Sequence: Synthetic peptide; note = XENP020464 vhCDR3
LANWDWYFDV

SEQ ID NO: 18370 - protein, 218 aa, synthetic construct; identical to SEQ ID NO: 17590
  source 1..218: note = Description of Artificial Sequence: Synthetic polypeptide; note = XENP020464 7G8_H0.16_L0_IgG1_PVA_/S267K Light Chain

SEQ ID NO: 18371 - protein, 111 aa, synthetic construct; identical to SEQ ID NO: 17591
  source 1..111: note = Description of Artificial Sequence: Synthetic polypeptide; note = VL of XENP020464

SEQ ID NO: 18372 - protein, 15 aa, synthetic construct
  source 1..15: note = Description of Artificial Sequence: Synthetic peptide; note = XENP020464 vlCDR1
KASQSVDYDGDSYMN

SEQ ID NO: 18373 - protein, 7 aa, synthetic construct
  source 1..7: note = Description of Artificial Sequence: Synthetic peptide; note = XENP020464 vlCDR2
AASNLES

SEQ ID NO: 18374 - protein, 9 aa, synthetic construct
  source 1..9: note = Description of Artificial Sequence: Synthetic peptide; note = XENP020464 vlCDR3
QQSNEDPFT

SEQ ID NO: 18375 - protein, 450 aa, synthetic construct
  source 1..450: note = Description of Artificial Sequence: Synthetic polypeptide; note = XENP020465 7G8_H0.17_L0_IgG1_PVA_/S267K Heavy Chain
EVKLEESGGGLVQPGGSMKLSCAASGFTFSDSWMDWVRQSPEKGLEWVAEIRTKANNHATYYAESVKGRFTISRDDSKSSVYLQMNSLRAEDTGIYYCTRLANWDWYFDVWGAGTTVTVSSASTKGPSVFPLAPSSKSTSGGTAALGCLVKDYFPEPVTVSWNSGALTSGVHTFPAVLQSSGLYSLSSVVTVPSSSLGTQTYICNVNHKPSDTKVDKKVEPKSCDKTHTCPPCPAPPVAGPSVFLFPPKPKDTLMISRTPEVTCVVVDVKHEDPEVKFNWYVDGVEVHNAKTKPREEEYNSTYRVVSVLTVLHQDWLNGKEYKCKVSNKALPAPIEKTISKAKGQPREPQVYTLPPSREEMTKNQVSLTCDVSGFYPSDIAVEWESDGQPENNYKTTPPVLDSDGSFFLYSKLTVDKSRWEQGDVFSCSVMHEALHNHYTQKSLSLSPGK

SEQ ID NO: 18376 - protein, 121 aa, synthetic construct
  source 1..121: note = Description of Artificial Sequence: Synthetic polypeptide; note = VH of XENP020465
EVKLEESGGGLVQPGGSMKLSCAASGFTFSDSWMDWVRQSPEKGLEWVAEIRTKANNHATYYAESVKGRFTISRDDSKSSVYLQMNSLRAEDTGIYYCTRLANWDWYFDVWGAGTTVTVSS

SEQ ID NO: 18377 - protein, 5 aa, synthetic construct
  source 1..5: note = Description of Artificial Sequence: Synthetic peptide; note = XENP020465 vhCDR1
DSWMD

SEQ ID NO: 18378 - protein, 19 aa, synthetic construct
  source 1..19: note = Description of Artificial Sequence: Synthetic peptide; note = XENP020465 vhCDR2
EIRTKANNHATYYAESVKG

SEQ ID NO: 18379 - protein, 10 aa, synthetic construct
  source 1..10: note = Description of Artificial Sequence: Synthetic peptide; note = XENP020465 vhCDR3
LANWDWYFDV

SEQ ID NO: 18380 - protein, 218 aa, synthetic construct; identical to SEQ ID NO: 17590
  source 1..218: note = Description of Artificial Sequence: Synthetic polypeptide; note = XENP020465 7G8_H0.17_L0_IgG1_PVA_/S267K Light Chain

SEQ ID NO: 18381 - protein, 111 aa, synthetic construct; identical to SEQ ID NO: 17591
  source 1..111: note = Description of Artificial Sequence: Synthetic polypeptide; note = VL of XENP020465

SEQ ID NO: 18382 - protein, 15 aa, synthetic construct
  source 1..15: note = Description of Artificial Sequence: Synthetic peptide; note = XENP020465 vlCDR1
KASQSVDYDGDSYMN

SEQ ID NO: 18383 - protein, 7 aa, synthetic construct
  source 1..7: note = Description of Artificial Sequence: Synthetic peptide; note = XENP020465 vlCDR2
AASNLES

SEQ ID NO: 18384 - protein, 9 aa, synthetic construct
  source 1..9: note = Description of Artificial Sequence: Synthetic peptide; note = XENP020465 vlCDR3
QQSNEDPFT

SEQ ID NO: 18385 - protein, 450 aa, synthetic construct
  source 1..450: note = Description of Artificial Sequence: Synthetic polypeptide; note = XENP020466 7G8_H0.18_L0_IgG1_PVA_/S267K Heavy Chain
EVKLEESGGGLVQPGGSMKLSCAASGFTFSDTWMDWVRQSPEKGLEWVAEIRTKANNHATYYAESVKGRFTISRDDSKSSVYLQMNSLRAEDTGIYYCTRLANWDWYFDVWGAGTTVTVSSASTKGPSVFPLAPSSKSTSGGTAALGCLVKDYFPEPVTVSWNSGALTSGVHTFPAVLQSSGLYSLSSVVTVPSSSLGTQTYICNVNHKPSDTKVDKKVEPKSCDKTHTCPPCPAPPVAGPSVFLFPPKPKDTLMISRTPEVTCVVVDVKHEDPEVKFNWYVDGVEVHNAKTKPREEEYNSTYRVVSVLTVLHQDWLNGKEYKCKVSNKALPAPIEKTISKAKGQPREPQVYTLPPSREEMTKNQVSLTCDVSGFYPSDIAVEWESDGQPENNYKTTPPVLDSDGSFFLYSKLTVDKSRWEQGDVFSCSVMHEALHNHYTQKSLSLSPGK

SEQ ID NO: 18386 - protein, 121 aa, synthetic construct
  source 1..121: note = Description of Artificial Sequence: Synthetic polypeptide; note = VH of XENP020466
EVKLEESGGGLVQPGGSMKLSCAASGFTFSDTWMDWVRQSPEKGLEWVAEIRTKANNHATYYAESVKGRFTISRDDSKSSVYLQMNSLRAEDTGIYYCTRLANWDWYFDVWGAGTTVTVSS

SEQ ID NO: 18387 - protein, 5 aa, synthetic construct
  source 1..5: note = Description of Artificial Sequence: Synthetic peptide; note = XENP020466 vhCDR1
DTWMD

SEQ ID NO: 18388 - protein, 19 aa, synthetic construct
  source 1..19: note = Description of Artificial Sequence: Synthetic peptide; note = XENP020466 vhCDR2
EIRTKANNHATYYAESVKG

SEQ ID NO: 18389 - protein, 10 aa, synthetic construct
  source 1..10: note = Description of Artificial Sequence: Synthetic peptide; note = XENP020466 vhCDR3
LANWDWYFDV

SEQ ID NO: 18390 - protein, 218 aa, synthetic construct; identical to SEQ ID NO: 17590
  source 1..218: note = Description of Artificial Sequence: Synthetic polypeptide; note = XENP020466 7G8_H0.18_L0_IgG1_PVA_/S267K Light Chain

SEQ ID NO: 18391 - protein, 111 aa, synthetic construct; identical to SEQ ID NO: 17591
  source 1..111: note = Description of Artificial Sequence: Synthetic polypeptide; note = VL of XENP020466

SEQ ID NO: 18392 - protein, 15 aa, synthetic construct
  source 1..15: note = Description of Artificial Sequence: Synthetic peptide; note = XENP020466 vlCDR1
KASQSVDYDGDSYMN

SEQ ID NO: 18393 - protein, 7 aa, synthetic construct
  source 1..7: note = Description of Artificial Sequence: Synthetic peptide; note = XENP020466 vlCDR2
AASNLES

SEQ ID NO: 18394 - protein, 9 aa, synthetic construct
  source 1..9: note = Description of Artificial Sequence: Synthetic peptide; note = XENP020466 vlCDR3
QQSNEDPFT

SEQ ID NO: 18395 - protein, 450 aa, synthetic construct
  source 1..450: note = Description of Artificial Sequence: Synthetic polypeptide; note = XENP020467 7G8_H0.19_L0_IgG1_PVA_/S267K Heavy Chain
EVKLEESGGGLVQPGGSMKLSCAASGFTFSDGWMDWVRQSPEKGLEWVAEIRTKANNHATYYAESVKGRFTISRDDSKSSVYLQMNSLRAEDTGIYYCTRLANWDWYFDVWGAGTTVTVSSASTKGPSVFPLAPSSKSTSGGTAALGCLVKDYFPEPVTVSWNSGALTSGVHTFPAVLQSSGLYSLSSVVTVPSSSLGTQTYICNVNHKPSDTKVDKKVEPKSCDKTHTCPPCPAPPVAGPSVFLFPPKPKDTLMISRTPEVTCVVVDVKHEDPEVKFNWYVDGVEVHNAKTKPREEEYNSTYRVVSVLTVLHQDWLNGKEYKCKVSNKALPAPIEKTISKAKGQPREPQVYTLPPSREEMTKNQVSLTCDVSGFYPSDIAVEWESDGQPENNYKTTPPVLDSDGSFFLYSKLTVDKSRWEQGDVFSCSVMHEALHNHYTQKSLSLSPGK

SEQ ID NO: 18396 - protein, 121 aa, synthetic construct
  source 1..121: note = Description of Artificial Sequence: Synthetic polypeptide; note = VH of XENP020467
EVKLEESGGGLVQPGGSMKLSCAASGFTFSDGWMDWVRQSPEKGLEWVAEIRTKANNHATYYAESVKGRFTISRDDSKSSVYLQMNSLRAEDTGIYYCTRLANWDWYFDVWGAGTTVTVSS

SEQ ID NO: 18397 - protein, 5 aa, synthetic construct
  source 1..5: note = Description of Artificial Sequence: Synthetic peptide; note = XENP020467 vhCDR1
DGWMD

SEQ ID NO: 18398 - protein, 19 aa, synthetic construct
  source 1..19: note = Description of Artificial Sequence: Synthetic peptide; note = XENP020467 vhCDR2
EIRTKANNHATYYAESVKG

SEQ ID NO: 18399 - protein, 10 aa, synthetic construct
  source 1..10: note = Description of Artificial Sequence: Synthetic peptide; note = XENP020467 vhCDR3
LANWDWYFDV

SEQ ID NO: 18400 - protein, 218 aa, synthetic construct; identical to SEQ ID NO: 17590
  source 1..218: note = Description of Artificial Sequence: Synthetic polypeptide; note = XENP020467 7G8_H0.19_L0_IgG1_PVA_/S267K Light Chain

SEQ ID NO: 18401 - protein, 111 aa, synthetic construct; identical to SEQ ID NO: 17591
  source 1..111: note = Description of Artificial Sequence: Synthetic polypeptide; note = VL of XENP020467

SEQ ID NO: 18402 - protein, 15 aa, synthetic construct
  source 1..15: note = Description of Artificial Sequence: Synthetic peptide; note = XENP020467 vlCDR1
KASQSVDYDGDSYMN

SEQ ID NO: 18403 - protein, 7 aa, synthetic construct
  source 1..7: note = Description of Artificial Sequence: Synthetic peptide; note = XENP020467 vlCDR2
AASNLES

SEQ ID NO: 18404 - protein, 9 aa, synthetic construct
  source 1..9: note = Description of Artificial Sequence: Synthetic peptide; note = XENP020467 vlCDR3
QQSNEDPFT

SEQ ID NO: 18405 - protein, 450 aa, synthetic construct
  source 1..450: note = Description of Artificial Sequence: Synthetic polypeptide; note = XENP020468 7G8_H0.20_L0_IgG1_PVA_/S267K Heavy Chain
EVKLEESGGGLVQPGGSMKLSCAASGFTFSDHWMDWVRQSPEKGLEWVAEIRTKANNHATYYAESVKGRFTISRDDSKSSVYLQMNSLRAEDTGIYYCTRLANWDWYFDVWGAGTTVTVSSASTKGPSVFPLAPSSKSTSGGTAALGCLVKDYFPEPVTVSWNSGALTSGVHTFPAVLQSSGLYSLSSVVTVPSSSLGTQTYICNVNHKPSDTKVDKKVEPKSCDKTHTCPPCPAPPVAGPSVFLFPPKPKDTLMISRTPEVTCVVVDVKHEDPEVKFNWYVDGVEVHNAKTKPREEEYNSTYRVVSVLTVLHQDWLNGKEYKCKVSNKALPAPIEKTISKAKGQPREPQVYTLPPSREEMTKNQVSLTCDVSGFYPSDIAVEWESDGQPENNYKTTPPVLDSDGSFFLYSKLTVDKSRWEQGDVFSCSVMHEALHNHYTQKSLSLSPGK

SEQ ID NO: 18406 - protein, 121 aa, synthetic construct
  source 1..121: note = Description of Artificial Sequence: Synthetic polypeptide; note = VH of XENP020468
EVKLEESGGGLVQPGGSMKLSCAASGFTFSDHWMDWVRQSPEKGLEWVAEIRTKANNHATYYAESVKGRFTISRDDSKSSVYLQMNSLRAEDTGIYYCTRLANWDWYFDVWGAGTTVTVSS

SEQ ID NO: 18407 - protein, 5 aa, synthetic construct
  source 1..5: note = Description of Artificial Sequence: Synthetic peptide; note = XENP020468 vhCDR1
DHWMD

SEQ ID NO: 18408 - protein, 19 aa, synthetic construct
  source 1..19: note = Description of Artificial Sequence: Synthetic peptide; note = XENP020468 vhCDR2
EIRTKANNHATYYAESVKG

SEQ ID NO: 18409 - protein, 10 aa, synthetic construct
  source 1..10: note = Description of Artificial Sequence: Synthetic peptide; note = XENP020468 vhCDR3
LANWDWYFDV

SEQ ID NO: 18410 - protein, 218 aa, synthetic construct; identical to SEQ ID NO: 17590
  source 1..218: note = Description of Artificial Sequence: Synthetic polypeptide; note = XENP020468 7G8_H0.20_L0_IgG1_PVA_/S267K Light Chain

SEQ ID NO: 18411 - protein, 111 aa, synthetic construct; identical to SEQ ID NO: 17591
  source 1..111: note = Description of Artificial Sequence: Synthetic polypeptide; note = VL of XENP020468

SEQ ID NO: 18412 - protein, 15 aa, synthetic construct
  source 1..15: note = Description of Artificial Sequence: Synthetic peptide; note = XENP020468 vlCDR1
KASQSVDYDGDSYMN

SEQ ID NO: 18413 - protein, 7 aa, synthetic construct
  source 1..7: note = Description of Artificial Sequence: Synthetic peptide; note = XENP020468 vlCDR2
AASNLES

SEQ ID NO: 18414 - protein, 9 aa, synthetic construct
  source 1..9: note = Description of Artificial Sequence: Synthetic peptide; note = XENP020468 vlCDR3
QQSNEDPFT

SEQ ID NO: 18415 - protein, 450 aa, synthetic construct
  source 1..450: note = Description of Artificial Sequence: Synthetic polypeptide; note = XENP020469 7G8_H0.21_L0_IgG1_PVA_/S267K Heavy Chain
EVKLEESGGGLVQPGGSMKLSCAASGFTFSDDWMDWVRQSPEKGLEWVAEIRTKANNHATYYAESVKGRFTISRDDSKSSVYLQMNSLRAEDTGIYYCTRLANWDWYFDVWGAGTTVTVSSASTKGPSVFPLAPSSKSTSGGTAALGCLVKDYFPEPVTVSWNSGALTSGVHTFPAVLQSSGLYSLSSVVTVPSSSLGTQTYICNVNHKPSDTKVDKKVEPKSCDKTHTCPPCPAPPVAGPSVFLFPPKPKDTLMISRTPEVTCVVVDVKHEDPEVKFNWYVDGVEVHNAKTKPREEEYNSTYRVVSVLTVLHQDWLNGKEYKCKVSNKALPAPIEKTISKAKGQPREPQVYTLPPSREEMTKNQVSLTCDVSGFYPSDIAVEWESDGQPENNYKTTPPVLDSDGSFFLYSKLTVDKSRWEQGDVFSCSVMHEALHNHYTQKSLSLSPGK

SEQ ID NO: 18416 - protein, 121 aa, synthetic construct
  source 1..121: note = Description of Artificial Sequence: Synthetic polypeptide; note = VH of XENP020469
EVKLEESGGGLVQPGGSMKLSCAASGFTFSDDWMDWVRQSPEKGLEWVAEIRTKANNHATYYAESVKGRFTISRDDSKSSVYLQMNSLRAEDTGIYYCTRLANWDWYFDVWGAGTTVTVSS

SEQ ID NO: 18417 - protein, 5 aa, synthetic construct
  source 1..5: note = Description of Artificial Sequence: Synthetic peptide; note = XENP020469 vhCDR1
DDWMD

SEQ ID NO: 18418 - protein, 19 aa, synthetic construct
  source 1..19: note = Description of Artificial Sequence: Synthetic peptide; note = XENP020469 vhCDR2
EIRTKANNHATYYAESVKG

SEQ ID NO: 18419 - protein, 10 aa, synthetic construct
  source 1..10: note = Description of Artificial Sequence: Synthetic peptide; note = XENP020469 vhCDR3
LANWDWYFDV

SEQ ID NO: 18420 - protein, 218 aa, synthetic construct; identical to SEQ ID NO: 17590
  source 1..218: note = Description of Artificial Sequence: Synthetic polypeptide; note = XENP020469 7G8_H0.21_L0_IgG1_PVA_/S267K Light Chain

SEQ ID NO: 18421 - protein, 111 aa, synthetic construct; identical to SEQ ID NO: 17591
  source 1..111: note = Description of Artificial Sequence: Synthetic polypeptide; note = VL of XENP020469

SEQ ID NO: 18422 - protein, 15 aa, synthetic construct
  source 1..15: note = Description of Artificial Sequence: Synthetic peptide; note = XENP020469 vlCDR1
KASQSVDYDGDSYMN

SEQ ID NO: 18423 - protein, 7 aa, synthetic construct
  source 1..7: note = Description of Artificial Sequence: Synthetic peptide; note = XENP020469 vlCDR2
AASNLES

SEQ ID NO: 18424 - protein, 9 aa, synthetic construct
  source 1..9: note = Description of Artificial Sequence: Synthetic peptide; note = XENP020469 vlCDR3
QQSNEDPFT

SEQ ID NO: 18425 - protein, 450 aa, synthetic construct
  source 1..450: note = Description of Artificial Sequence: Synthetic polypeptide; note = XENP020470 7G8_H0.22_L0_IgG1_PVA_/S267K Heavy Chain
EVKLEESGGGLVQPGGSMKLSCAASGFTFSDLWMDWVRQSPEKGLEWVAEIRTKANNHATYYAESVKGRFTISRDDSKSSVYLQMNSLRAEDTGIYYCTRLANWDWYFDVWGAGTTVTVSSASTKGPSVFPLAPSSKSTSGGTAALGCLVKDYFPEPVTVSWNSGALTSGVHTFPAVLQSSGLYSLSSVVTVPSSSLGTQTYICNVNHKPSDTKVDKKVEPKSCDKTHTCPPCPAPPVAGPSVFLFPPKPKDTLMISRTPEVTCVVVDVKHEDPEVKFNWYVDGVEVHNAKTKPREEEYNSTYRVVSVLTVLHQDWLNGKEYKCKVSNKALPAPIEKTISKAKGQPREPQVYTLPPSREEMTKNQVSLTCDVSGFYPSDIAVEWESDGQPENNYKTTPPVLDSDGSFFLYSKLTVDKSRWEQGDVFSCSVMHEALHNHYTQKSLSLSPGK

SEQ ID NO: 18426 - protein, 121 aa, synthetic construct
  source 1..121: note = Description of Artificial Sequence: Synthetic polypeptide; note = VH of XENP020470
EVKLEESGGGLVQPGGSMKLSCAASGFTFSDLWMDWVRQSPEKGLEWVAEIRTKANNHATYYAESVKGRFTISRDDSKSSVYLQMNSLRAEDTGIYYCTRLANWDWYFDVWGAGTTVTVSS

SEQ ID NO: 18427 - protein, 5 aa, synthetic construct
  source 1..5: note = Description of Artificial Sequence: Synthetic peptide; note = XENP020470 vhCDR1
DLWMD

SEQ ID NO: 18428 - protein, 19 aa, synthetic construct
  source 1..19: note = Description of Artificial Sequence: Synthetic peptide; note = XENP020470 vhCDR2
EIRTKANNHATYYAESVKG

SEQ ID NO: 18429 - protein, 10 aa, synthetic construct
  source 1..10: note = Description of Artificial Sequence: Synthetic peptide; note = XENP020470 vhCDR3
LANWDWYFDV

SEQ ID NO: 18430 - protein, 218 aa, synthetic construct; identical to SEQ ID NO: 17590
  source 1..218: note = Description of Artificial Sequence: Synthetic polypeptide; note = XENP020470 7G8_H0.22_L0_IgG1_PVA_/S267K Light Chain

SEQ ID NO: 18431 - protein, 111 aa, synthetic construct; identical to SEQ ID NO: 17591
  source 1..111: note = Description of Artificial Sequence: Synthetic polypeptide; note = VL of XENP020470

SEQ ID NO: 18432 - protein, 15 aa, synthetic construct
  source 1..15: note = Description of Artificial Sequence: Synthetic peptide; note = XENP020470 vlCDR1
KASQSVDYDGDSYMN

SEQ ID NO: 18433 - protein, 7 aa, synthetic construct
  source 1..7: note = Description of Artificial Sequence: Synthetic peptide; note = XENP020470 vlCDR2
AASNLES

SEQ ID NO: 18434 - protein, 9 aa, synthetic construct
  source 1..9: note = Description of Artificial Sequence: Synthetic peptide; note = XENP020470 vlCDR3
QQSNEDPFT

SEQ ID NO: 18435 - protein, 450 aa, synthetic construct
  source 1..450: note = Description of Artificial Sequence: Synthetic polypeptide; note = XENP020471 7G8_H0.23_L0_IgG1_PVA_/S267K Heavy Chain
EVKLEESGGGLVQPGGSMKLSCAASGFTFSDKWMDWVRQSPEKGLEWVAEIRTKANNHATYYAESVKGRFTISRDDSKSSVYLQMNSLRAEDTGIYYCTRLANWDWYFDVWGAGTTVTVSSASTKGPSVFPLAPSSKSTSGGTAALGCLVKDYFPEPVTVSWNSGALTSGVHTFPAVLQSSGLYSLSSVVTVPSSSLGTQTYICNVNHKPSDTKVDKKVEPKSCDKTHTCPPCPAPPVAGPSVFLFPPKPKDTLMISRTPEVTCVVVDVKHEDPEVKFNWYVDGVEVHNAKTKPREEEYNSTYRVVSVLTVLHQDWLNGKEYKCKVSNKALPAPIEKTISKAKGQPREPQVYTLPPSREEMTKNQVSLTCDVSGFYPSDIAVEWESDGQPENNYKTTPPVLDSDGSFFLYSKLTVDKSRWEQGDVFSCSVMHEALHNHYTQKSLSLSPGK

SEQ ID NO: 18436 - protein, 121 aa, synthetic construct
  source 1..121: note = Description of Artificial Sequence: Synthetic polypeptide; note = VH of XENP020471
EVKLEESGGGLVQPGGSMKLSCAASGFTFSDKWMDWVRQSPEKGLEWVAEIRTKANNHATYYAESVKGRFTISRDDSKSSVYLQMNSLRAEDTGIYYCTRLANWDWYFDVWGAGTTVTVSS

SEQ ID NO: 18437 - protein, 5 aa, synthetic construct
  source 1..5: note = Description of Artificial Sequence: Synthetic peptide; note = XENP020471 vhCDR1
DKWMD

SEQ ID NO: 18438 - protein, 19 aa, synthetic construct
  source 1..19: note = Description of Artificial Sequence: Synthetic peptide; note = XENP020471 vhCDR2
EIRTKANNHATYYAESVKG

SEQ ID NO: 18439 - protein, 10 aa, synthetic construct
  source 1..10: note = Description of Artificial Sequence: Synthetic peptide; note = XENP020471 vhCDR3
LANWDWYFDV

SEQ ID NO: 18440 - protein, 218 aa, synthetic construct; identical to SEQ ID NO: 17590
  source 1..218: note = Description of Artificial Sequence: Synthetic polypeptide; note = XENP020471 7G8_H0.23_L0_IgG1_PVA_/S267K Light Chain

SEQ ID NO: 18441 - protein, 111 aa, synthetic construct; identical to SEQ ID NO: 17591
  source 1..111: note = Description of Artificial Sequence: Synthetic polypeptide; note = VL of XENP020471

SEQ ID NO: 18442 - protein, 15 aa, synthetic construct
  source 1..15: note = Description of Artificial Sequence: Synthetic peptide; note = XENP020471 vlCDR1
KASQSVDYDGDSYMN

SEQ ID NO: 18443 - protein, 7 aa, synthetic construct
  source 1..7: note = Description of Artificial Sequence: Synthetic peptide; note = XENP020471 vlCDR2
AASNLES

SEQ ID NO: 18444 - protein, 9 aa, synthetic construct
  source 1..9: note = Description of Artificial Sequence: Synthetic peptide; note = XENP020471 vlCDR3
QQSNEDPFT

SEQ ID NO: 18445 - protein, 450 aa, synthetic construct
  source 1..450: note = Description of Artificial Sequence: Synthetic polypeptide; note = XENP020472 7G8_H0.24_L0_IgG1_PVA_/S267K Heavy Chain
EVKLEESGGGLVQPGGSMKLSCAASGFTFSDYWMDWVRQSPEKGLEWVAEIRTKANNHATYYAESVKGRFTISRDDSKSSVYLQMNSLRAEDTGIYYCTRLANWDWYFDVWGAGTTVTVSSASTKGPSVFPLAPSSKSTSGGTAALGCLVKDYFPEPVTVSWNSGALTSGVHTFPAVLQSSGLYSLSSVVTVPSSSLGTQTYICNVNHKPSDTKVDKKVEPKSCDKTHTCPPCPAPPVAGPSVFLFPPKPKDTLMISRTPEVTCVVVDVKHEDPEVKFNWYVDGVEVHNAKTKPREEEYNSTYRVVSVLTVLHQDWLNGKEYKCKVSNKALPAPIEKTISKAKGQPREPQVYTLPPSREEMTKNQVSLTCDVSGFYPSDIAVEWESDGQPENNYKTTPPVLDSDGSFFLYSKLTVDKSRWEQGDVFSCSVMHEALHNHYTQKSLSLSPGK

SEQ ID NO: 18446 - protein, 121 aa, synthetic construct
  source 1..121: note = Description of Artificial Sequence: Synthetic polypeptide; note = VH of XENP020472
EVKLEESGGGLVQPGGSMKLSCAASGFTFSDYWMDWVRQSPEKGLEWVAEIRTKANNHATYYAESVKGRFTISRDDSKSSVYLQMNSLRAEDTGIYYCTRLANWDWYFDVWGAGTTVTVSS

SEQ ID NO: 18447 - protein, 5 aa, synthetic construct
  source 1..5: note = Description of Artificial Sequence: Synthetic peptide; note = XENP020472 vhCDR1
DYWMD

SEQ ID NO: 18448 - protein, 19 aa, synthetic construct
  source 1..19: note = Description of Artificial Sequence: Synthetic peptide; note = XENP020472 vhCDR2
EIRTKANNHATYYAESVKG

SEQ ID NO: 18449 - protein, 10 aa, synthetic construct
  source 1..10: note = Description of Artificial Sequence: Synthetic peptide; note = XENP020472 vhCDR3
LANWDWYFDV

SEQ ID NO: 18450 - protein, 218 aa, synthetic construct; identical to SEQ ID NO: 17590
  source 1..218: note = Description of Artificial Sequence: Synthetic polypeptide; note = XENP020472 7G8_H0.24_L0_IgG1_PVA_/S267K Light Chain

SEQ ID NO: 18451 - protein, 111 aa, synthetic construct; identical to SEQ ID NO: 17591
  source 1..111: note = Description of Artificial Sequence: Synthetic polypeptide; note = VL of XENP020472

SEQ ID NO: 18452 - protein, 15 aa, synthetic construct
  source 1..15: note = Description of Artificial Sequence: Synthetic peptide; note = XENP020472 vlCDR1
KASQSVDYDGDSYMN

SEQ ID NO: 18453 - protein, 7 aa, synthetic construct
  source 1..7: note = Description of Artificial Sequence: Synthetic peptide; note = XENP020472 vlCDR2
AASNLES

SEQ ID NO: 18454 - protein, 9 aa, synthetic construct
  source 1..9: note = Description of Artificial Sequence: Synthetic peptide; note = XENP020472 vlCDR3
QQSNEDPFT

SEQ ID NO: 18455 - protein, 450 aa, synthetic construct
  source 1..450: note = Description of Artificial Sequence: Synthetic polypeptide; note = XENP020473 7G8_H0.25_L0_IgG1_PVA_/S267K Heavy Chain
EVKLEESGGGLVQPGGSMKLSCAASGFTFSDAYMDWVRQSPEKGLEWVAEIRTKANNHATYYAESVKGRFTISRDDSKSSVYLQMNSLRAEDTGIYYCTRLANWDWYFDVWGAGTTVTVSSASTKGPSVFPLAPSSKSTSGGTAALGCLVKDYFPEPVTVSWNSGALTSGVHTFPAVLQSSGLYSLSSVVTVPSSSLGTQTYICNVNHKPSDTKVDKKVEPKSCDKTHTCPPCPAPPVAGPSVFLFPPKPKDTLMISRTPEVTCVVVDVKHEDPEVKFNWYVDGVEVHNAKTKPREEEYNSTYRVVSVLTVLHQDWLNGKEYKCKVSNKALPAPIEKTISKAKGQPREPQVYTLPPSREEMTKNQVSLTCDVSGFYPSDIAVEWESDGQPENNYKTTPPVLDSDGSFFLYSKLTVDKSRWEQGDVFSCSVMHEALHNHYTQKSLSLSPGK

SEQ ID NO: 18456 - protein, 121 aa, synthetic construct
  source 1..121: note = Description of Artificial Sequence: Synthetic polypeptide; note = VH of XENP020473
EVKLEESGGGLVQPGGSMKLSCAASGFTFSDAYMDWVRQSPEKGLEWVAEIRTKANNHATYYAESVKGRFTISRDDSKSSVYLQMNSLRAEDTGIYYCTRLANWDWYFDVWGAGTTVTVSS

SEQ ID NO: 18457 - protein, 5 aa, synthetic construct
  source 1..5: note = Description of Artificial Sequence: Synthetic peptide; note = XENP020473 vhCDR1
DAYMD

SEQ ID NO: 18458 - protein, 19 aa, synthetic construct
  source 1..19: note = Description of Artificial Sequence: Synthetic peptide; note = XENP020473 vhCDR2
EIRTKANNHATYYAESVKG

SEQ ID NO: 18459 - protein, 10 aa, synthetic construct
  source 1..10: note = Description of Artificial Sequence: Synthetic peptide; note = XENP020473 vhCDR3
LANWDWYFDV

SEQ ID NO: 18460 - protein, 218 aa, synthetic construct; identical to SEQ ID NO: 17590
  source 1..218: note = Description of Artificial Sequence: Synthetic polypeptide; note = XENP020473 7G8_H0.25_L0_IgG1_PVA_/S267K Light Chain

SEQ ID NO: 18461 - protein, 111 aa, synthetic construct; identical to SEQ ID NO: 17591
  source 1..111: note = Description of Artificial Sequence: Synthetic polypeptide; note = VL of XENP020473

SEQ ID NO: 18462 - protein, 15 aa, synthetic construct
  source 1..15: note = Description of Artificial Sequence: Synthetic peptide; note = XENP020473 vlCDR1
KASQSVDYDGDSYMN

SEQ ID NO: 18463 - protein, 7 aa, synthetic construct
  source 1..7: note = Description of Artificial Sequence: Synthetic peptide; note = XENP020473 vlCDR2
AASNLES

SEQ ID NO: 18464 - protein, 9 aa, synthetic construct
  source 1..9: note = Description of Artificial Sequence: Synthetic peptide; note = XENP020473 vlCDR3
QQSNEDPFT

SEQ ID NO: 18465 - protein, 450 aa, synthetic construct
  source 1..450: note = Description of Artificial Sequence: Synthetic polypeptide; note = XENP020474 7G8_H0.26_L0_IgG1_PVA_/S267K Heavy Chain
EVKLEESGGGLVQPGGSMKLSCAASGFTFSDAFMDWVRQSPEKGLEWVAEIRTKANNHATYYAESVKGRFTISRDDSKSSVYLQMNSLRAEDTGIYYCTRLANWDWYFDVWGAGTTVTVSSASTKGPSVFPLAPSSKSTSGGTAALGCLVKDYFPEPVTVSWNSGALTSGVHTFPAVLQSSGLYSLSSVVTVPSSSLGTQTYICNVNHKPSDTKVDKKVEPKSCDKTHTCPPCPAPPVAGPSVFLFPPKPKDTLMISRTPEVTCVVVDVKHEDPEVKFNWYVDGVEVHNAKTKPREEEYNSTYRVVSVLTVLHQDWLNGKEYKCKVSNKALPAPIEKTISKAKGQPREPQVYTLPPSREEMTKNQVSLTCDVSGFYPSDIAVEWESDGQPENNYKTTPPVLDSDGSFFLYSKLTVDKSRWEQGDVFSCSVMHEALHNHYTQKSLSLSPGK

SEQ ID NO: 18466 - protein, 121 aa, synthetic construct
  source 1..121: note = Description of Artificial Sequence: Synthetic polypeptide; note = VH of XENP020474
EVKLEESGGGLVQPGGSMKLSCAASGFTFSDAFMDWVRQSPEKGLEWVAEIRTKANNHATYYAESVKGRFTISRDDSKSSVYLQMNSLRAEDTGIYYCTRLANWDWYFDVWGAGTTVTVSS

SEQ ID NO: 18467 - protein, 5 aa, synthetic construct
  source 1..5: note = Description of Artificial Sequence: Synthetic peptide; note = XENP020474 vhCDR1
DAFMD

SEQ ID NO: 18468 - protein, 19 aa, synthetic construct
  source 1..19: note = Description of Artificial Sequence: Synthetic peptide; note = XENP020474 vhCDR2
EIRTKANNHATYYAESVKG

SEQ ID NO: 18469 - protein, 10 aa, synthetic construct
  source 1..10: note = Description of Artificial Sequence: Synthetic peptide; note = XENP020474 vhCDR3
LANWDWYFDV

SEQ ID NO: 18470 - protein, 218 aa, synthetic construct; identical to SEQ ID NO: 17590
  source 1..218: note = Description of Artificial Sequence: Synthetic polypeptide; note = XENP020474 7G8_H0.26_L0_IgG1_PVA_/S267K Light Chain

SEQ ID NO: 18471 - protein, 111 aa, synthetic construct; identical to SEQ ID NO: 17591
  source 1..111: note = Description of Artificial Sequence: Synthetic polypeptide; note = VL of XENP020474

SEQ ID NO: 18472 - protein, 15 aa, synthetic construct
  source 1..15: note = Description of Artificial Sequence: Synthetic peptide; note = XENP020474 vlCDR1
KASQSVDYDGDSYMN

SEQ ID NO: 18473 - protein, 7 aa, synthetic construct
  source 1..7: note = Description of Artificial Sequence: Synthetic peptide; note = XENP020474 vlCDR2
AASNLES

SEQ ID NO: 18474 - protein, 9 aa, synthetic construct
  source 1..9: note = Description of Artificial Sequence: Synthetic peptide; note = XENP020474 vlCDR3
QQSNEDPFT

SEQ ID NO: 18475 - protein, 450 aa, synthetic construct
  source 1..450: note = Description of Artificial Sequence: Synthetic polypeptide; note = XENP020475 7G8_H0.27_L0_IgG1_PVA_/S267K Heavy Chain
EVKLEESGGGLVQPGGSMKLSCAASGFTFSDAWMDWVRQSPEKGLEWVAEIKTKANNHATYYAESVKGRFTISRDDSKSSVYLQMNSLRAEDTGIYYCTRLANWDWYFDVWGAGTTVTVSSASTKGPSVFPLAPSSKSTSGGTAALGCLVKDYFPEPVTVSWNSGALTSGVHTFPAVLQSSGLYSLSSVVTVPSSSLGTQTYICNVNHKPSDTKVDKKVEPKSCDKTHTCPPCPAPPVAGPSVFLFPPKPKDTLMISRTPEVTCVVVDVKHEDPEVKFNWYVDGVEVHNAKTKPREEEYNSTYRVVSVLTVLHQDWLNGKEYKCKVSNKALPAPIEKTISKAKGQPREPQVYTLPPSREEMTKNQVSLTCDVSGFYPSDIAVEWESDGQPENNYKTTPPVLDSDGSFFLYSKLTVDKSRWEQGDVFSCSVMHEALHNHYTQKSLSLSPGK

SEQ ID NO: 18476 - protein, 121 aa, synthetic construct
  source 1..121: note = Description of Artificial Sequence: Synthetic polypeptide; note = VH of XENP020475
EVKLEESGGGLVQPGGSMKLSCAASGFTFSDAWMDWVRQSPEKGLEWVAEIKTKANNHATYYAESVKGRFTISRDDSKSSVYLQMNSLRAEDTGIYYCTRLANWDWYFDVWGAGTTVTVSS

SEQ ID NO: 18477 - protein, 5 aa, synthetic construct
  source 1..5: note = Description of Artificial Sequence: Synthetic peptide; note = XENP020475 vhCDR1
DAWMD

SEQ ID NO: 18478 - protein, 19 aa, synthetic construct
  source 1..19: note = Description of Artificial Sequence: Synthetic peptide; note = XENP020475 vhCDR2
EIKTKANNHATYYAESVKG

SEQ ID NO: 18479 - protein, 10 aa, synthetic construct
  source 1..10: note = Description of Artificial Sequence: Synthetic peptide; note = XENP020475 vhCDR3
LANWDWYFDV

SEQ ID NO: 18480 - protein, 218 aa, synthetic construct; identical to SEQ ID NO: 17590
  source 1..218: note = Description of Artificial Sequence: Synthetic polypeptide; note = XENP020475 7G8_H0.27_L0_IgG1_PVA_/S267K Light Chain

SEQ ID NO: 18481 - protein, 111 aa, synthetic construct; identical to SEQ ID NO: 17591
  source 1..111: note = Description of Artificial Sequence: Synthetic polypeptide; note = VL of XENP020475

SEQ ID NO: 18482 - protein, 15 aa, synthetic construct
  source 1..15: note = Description of Artificial Sequence: Synthetic peptide; note = XENP020475 vlCDR1
KASQSVDYDGDSYMN

SEQ ID NO: 18483 - protein, 7 aa, synthetic construct
  source 1..7: note = Description of Artificial Sequence: Synthetic peptide; note = XENP020475 vlCDR2
AASNLES

SEQ ID NO: 18484 - protein, 9 aa, synthetic construct
  source 1..9: note = Description of Artificial Sequence: Synthetic peptide; note = XENP020475 vlCDR3
QQSNEDPFT

SEQ ID NO: 18485 - protein, 450 aa, synthetic construct
  source 1..450: note = Description of Artificial Sequence: Synthetic polypeptide; note = XENP020476 7G8_H0.28_L0_IgG1_PVA_/S267K Heavy Chain
EVKLEESGGGLVQPGGSMKLSCAASGFTFSDAWMDWVRQSPEKGLEWVAEIETKANNHATYYAESVKGRFTISRDDSKSSVYLQMNSLRAEDTGIYYCTRLANWDWYFDVWGAGTTVTVSSASTKGPSVFPLAPSSKSTSGGTAALGCLVKDYFPEPVTVSWNSGALTSGVHTFPAVLQSSGLYSLSSVVTVPSSSLGTQTYICNVNHKPSDTKVDKKVEPKSCDKTHTCPPCPAPPVAGPSVFLFPPKPKDTLMISRTPEVTCVVVDVKHEDPEVKFNWYVDGVEVHNAKTKPREEEYNSTYRVVSVLTVLHQDWLNGKEYKCKVSNKALPAPIEKTISKAKGQPREPQVYTLPPSREEMTKNQVSLTCDVSGFYPSDIAVEWESDGQPENNYKTTPPVLDSDGSFFLYSKLTVDKSRWEQGDVFSCSVMHEALHNHYTQKSLSLSPGK

SEQ ID NO: 18486 - protein, 121 aa, synthetic construct
  source 1..121: note = Description of Artificial Sequence: Synthetic polypeptide; note = VH of XENP020476
EVKLEESGGGLVQPGGSMKLSCAASGFTFSDAWMDWVRQSPEKGLEWVAEIETKANNHATYYAESVKGRFTISRDDSKSSVYLQMNSLRAEDTGIYYCTRLANWDWYFDVWGAGTTVTVSS

SEQ ID NO: 18487 - protein, 5 aa, synthetic construct
  source 1..5: note = Description of Artificial Sequence: Synthetic peptide; note = XENP020476 vhCDR1
DAWMD

SEQ ID NO: 18488 - protein, 19 aa, synthetic construct
  source 1..19: note = Description of Artificial Sequence: Synthetic peptide; note = XENP020476 vhCDR2
EIETKANNHATYYAESVKG

SEQ ID NO: 18489 - protein, 10 aa, synthetic construct
  source 1..10: note = Description of Artificial Sequence: Synthetic peptide; note = XENP020476 vhCDR3
LANWDWYFDV

SEQ ID NO: 18490 - protein, 218 aa, synthetic construct; identical to SEQ ID NO: 17590
  source 1..218: note = Description of Artificial Sequence: Synthetic polypeptide; note = XENP020476 7G8_H0.28_L0_IgG1_PVA_/S267K Light Chain

SEQ ID NO: 18491 - protein, 111 aa, synthetic construct; identical to SEQ ID NO: 17591
  source 1..111: note = Description of Artificial Sequence: Synthetic polypeptide; note = VL of XENP020476

SEQ ID NO: 18492 - protein, 15 aa, synthetic construct
  source 1..15: note = Description of Artificial Sequence: Synthetic peptide; note = XENP020476 vlCDR1
KASQSVDYDGDSYMN

SEQ ID NO: 18493 - protein, 7 aa, synthetic construct
  source 1..7: note = Description of Artificial Sequence: Synthetic peptide; note = XENP020476 vlCDR2
AASNLES

SEQ ID NO: 18494 - protein, 9 aa, synthetic construct
  source 1..9: note = Description of Artificial Sequence: Synthetic peptide; note = XENP020476 vlCDR3
QQSNEDPFT

SEQ ID NO: 18495 - protein, 450 aa, synthetic construct
  source 1..450: note = Description of Artificial Sequence: Synthetic polypeptide; note = XENP020477 7G8_H0.29_L0_IgG1_PVA_/S267K Heavy Chain
EVKLEESGGGLVQPGGSMKLSCAASGFTFSDAWMDWVRQSPEKGLEWVAEIDTKANNHATYYAESVKGRFTISRDDSKSSVYLQMNSLRAEDTGIYYCTRLANWDWYFDVWGAGTTVTVSSASTKGPSVFPLAPSSKSTSGGTAALGCLVKDYFPEPVTVSWNSGALTSGVHTFPAVLQSSGLYSLSSVVTVPSSSLGTQTYICNVNHKPSDTKVDKKVEPKSCDKTHTCPPCPAPPVAGPSVFLFPPKPKDTLMISRTPEVTCVVVDVKHEDPEVKFNWYVDGVEVHNAKTKPREEEYNSTYRVVSVLTVLHQDWLNGKEYKCKVSNKALPAPIEKTISKAKGQPREPQVYTLPPSREEMTKNQVSLTCDVSGFYPSDIAVEWESDGQPENNYKTTPPVLDSDGSFFLYSKLTVDKSRWEQGDVFSCSVMHEALHNHYTQKSLSLSPGK

SEQ ID NO: 18496 - protein, 121 aa, synthetic construct
  source 1..121: note = Description of Artificial Sequence: Synthetic polypeptide; note = VH of XENP020477
EVKLEESGGGLVQPGGSMKLSCAASGFTFSDAWMDWVRQSPEKGLEWVAEIDTKANNHATYYAESVKGRFTISRDDSKSSVYLQMNSLRAEDTGIYYCTRLANWDWYFDVWGAGTTVTVSS

SEQ ID NO: 18497 - protein, 5 aa, synthetic construct
  source 1..5: note = Description of Artificial Sequence: Synthetic peptide; note = XENP020477 vhCDR1
DAWMD

SEQ ID NO: 18498 - protein, 19 aa, synthetic construct
  source 1..19: note = Description of Artificial Sequence: Synthetic peptide; note = XENP020477 vhCDR2
EIDTKANNHATYYAESVKG

SEQ ID NO: 18499 - protein, 10 aa, synthetic construct
  source 1..10: note = Description of Artificial Sequence: Synthetic peptide; note = XENP020477 vhCDR3
LANWDWYFDV

SEQ ID NO: 18500 - protein, 218 aa, synthetic construct; identical to SEQ ID NO: 17590
  source 1..218: note = Description of Artificial Sequence: Synthetic polypeptide; note = XENP020477 7G8_H0.29_L0_IgG1_PVA_/S267K Light Chain

SEQ ID NO: 18501 - protein, 111 aa, synthetic construct; identical to SEQ ID NO: 17591
  source 1..111: note = Description of Artificial Sequence: Synthetic polypeptide; note = VL of XENP020477

SEQ ID NO: 18502 - protein, 15 aa, synthetic construct
  source 1..15: note = Description of Artificial Sequence: Synthetic peptide; note = XENP020477 vlCDR1
KASQSVDYDGDSYMN

SEQ ID NO: 18503 - protein, 7 aa, synthetic construct
  source 1..7: note = Description of Artificial Sequence: Synthetic peptide; note = XENP020477 vlCDR2
AASNLES

SEQ ID NO: 18504 - protein, 9 aa, synthetic construct
  source 1..9: note = Description of Artificial Sequence: Synthetic peptide; note = XENP020477 vlCDR3
QQSNEDPFT

SEQ ID NO: 18505 - protein, 450 aa, synthetic construct
  source 1..450: note = Description of Artificial Sequence: Synthetic polypeptide; note = XENP020478 7G8_H0.30_L0_IgG1_PVA_/S267K Heavy Chain
EVKLEESGGGLVQPGGSMKLSCAASGFTFSDAWMDWVRQSPEKGLEWVAEIHTKANNHATYYAESVKGRFTISRDDSKSSVYLQMNSLRAEDTGIYYCTRLANWDWYFDVWGAGTTVTVSSASTKGPSVFPLAPSSKSTSGGTAALGCLVKDYFPEPVTVSWNSGALTSGVHTFPAVLQSSGLYSLSSVVTVPSSSLGTQTYICNVNHKPSDTKVDKKVEPKSCDKTHTCPPCPAPPVAGPSVFLFPPKPKDTLMISRTPEVTCVVVDVKHEDPEVKFNWYVDGVEVHNAKTKPREEEYNSTYRVVSVLTVLHQDWLNGKEYKCKVSNKALPAPIEKTISKAKGQPREPQVYTLPPSREEMTKNQVSLTCDVSGFYPSDIAVEWESDGQPENNYKTTPPVLDSDGSFFLYSKLTVDKSRWEQGDVFSCSVMHEALHNHYTQKSLSLSPGK

SEQ ID NO: 18506 - protein, 121 aa, synthetic construct
  source 1..121: note = Description of Artificial Sequence: Synthetic polypeptide; note = VH of XENP020478
EVKLEESGGGLVQPGGSMKLSCAASGFTFSDAWMDWVRQSPEKGLEWVAEIHTKANNHATYYAESVKGRFTISRDDSKSSVYLQMNSLRAEDTGIYYCTRLANWDWYFDVWGAGTTVTVSS

SEQ ID NO: 18507 - protein, 5 aa, synthetic construct
  source 1..5: note = Description of Artificial Sequence: Synthetic peptide; note = XENP020478 vhCDR1
DAWMD

SEQ ID NO: 18508 - protein, 19 aa, synthetic construct
  source 1..19: note = Description of Artificial Sequence: Synthetic peptide; note = XENP020478 vhCDR2
EIHTKANNHATYYAESVKG

SEQ ID NO: 18509 - protein, 10 aa, synthetic construct
  source 1..10: note = Description of Artificial Sequence: Synthetic peptide; note = XENP020478 vhCDR3
LANWDWYFDV

SEQ ID NO: 18510 - protein, 218 aa, synthetic construct; identical to SEQ ID NO: 17590
  source 1..218: note = Description of Artificial Sequence: Synthetic polypeptide; note = XENP020478 7G8_H0.30_L0_IgG1_PVA_/S267K Light Chain

SEQ ID NO: 18511 - protein, 111 aa, synthetic construct; identical to SEQ ID NO: 17591
  source 1..111: note = Description of Artificial Sequence: Synthetic polypeptide; note = VL of XENP020478

SEQ ID NO: 18512 - protein, 15 aa, synthetic construct
  source 1..15: note = Description of Artificial Sequence: Synthetic peptide; note = XENP020478 vlCDR1
KASQSVDYDGDSYMN

SEQ ID NO: 18513 - protein, 7 aa, synthetic construct
  source 1..7: note = Description of Artificial Sequence: Synthetic peptide; note = XENP020478 vlCDR2
AASNLES

SEQ ID NO: 18514 - protein, 9 aa, synthetic construct
  source 1..9: note = Description of Artificial Sequence: Synthetic peptide; note = XENP020478 vlCDR3
QQSNEDPFT

SEQ ID NO: 18515 - protein, 450 aa, synthetic construct
  source 1..450: note = Description of Artificial Sequence: Synthetic polypeptide; note = XENP020479 7G8_H0.31_L0_IgG1_PVA_/S267K Heavy Chain
EVKLEESGGGLVQPGGSMKLSCAASGFTFSDAWMDWVRQSPEKGLEWVAEISTKANNHATYYAESVKGRFTISRDDSKSSVYLQMNSLRAEDTGIYYCTRLANWDWYFDVWGAGTTVTVSSASTKGPSVFPLAPSSKSTSGGTAALGCLVKDYFPEPVTVSWNSGALTSGVHTFPAVLQSSGLYSLSSVVTVPSSSLGTQTYICNVNHKPSDTKVDKKVEPKSCDKTHTCPPCPAPPVAGPSVFLFPPKPKDTLMISRTPEVTCVVVDVKHEDPEVKFNWYVDGVEVHNAKTKPREEEYNSTYRVVSVLTVLHQDWLNGKEYKCKVSNKALPAPIEKTISKAKGQPREPQVYTLPPSREEMTKNQVSLTCDVSGFYPSDIAVEWESDGQPENNYKTTPPVLDSDGSFFLYSKLTVDKSRWEQGDVFSCSVMHEALHNHYTQKSLSLSPGK

SEQ ID NO: 18516 - protein, 121 aa, synthetic construct
  source 1..121: note = Description of Artificial Sequence: Synthetic polypeptide; note = VH of XENP020479
EVKLEESGGGLVQPGGSMKLSCAASGFTFSDAWMDWVRQSPEKGLEWVAEISTKANNHATYYAESVKGRFTISRDDSKSSVYLQMNSLRAEDTGIYYCTRLANWDWYFDVWGAGTTVTVSS

SEQ ID NO: 18517 - protein, 5 aa, synthetic construct
  source 1..5: note = Description of Artificial Sequence: Synthetic peptide; note = XENP020479 vhCDR1
DAWMD

SEQ ID NO: 18518 - protein, 19 aa, synthetic construct
  source 1..19: note = Description of Artificial Sequence: Synthetic peptide; note = XENP020479 vhCDR2
EISTKANNHATYYAESVKG

SEQ ID NO: 18519 - protein, 10 aa, synthetic construct
  source 1..10: note = Description of Artificial Sequence: Synthetic peptide; note = XENP020479 vhCDR3
LANWDWYFDV

SEQ ID NO: 18520 - protein, 218 aa, synthetic construct; identical to SEQ ID NO: 17590
  source 1..218: note = Description of Artificial Sequence: Synthetic polypeptide; note = XENP020479 7G8_H0.31_L0_IgG1_PVA_/S267K Light Chain

SEQ ID NO: 18521 - protein, 111 aa, synthetic construct; identical to SEQ ID NO: 17591
  source 1..111: note = Description of Artificial Sequence: Synthetic polypeptide; note = VL of XENP020479

SEQ ID NO: 18522 - protein, 15 aa, synthetic construct
  source 1..15: note = Description of Artificial Sequence: Synthetic peptide; note = XENP020479 vlCDR1
KASQSVDYDGDSYMN

SEQ ID NO: 18523 - protein, 7 aa, synthetic construct
  source 1..7: note = Description of Artificial Sequence: Synthetic peptide; note = XENP020479 vlCDR2
AASNLES

SEQ ID NO: 18524 - protein, 9 aa, synthetic construct
  source 1..9: note = Description of Artificial Sequence: Synthetic peptide; note = XENP020479 vlCDR3
QQSNEDPFT

SEQ ID NO: 18525 - protein, 450 aa, synthetic construct
  source 1..450: note = Description of Artificial Sequence: Synthetic polypeptide; note = XENP020480 7G8_H0.32_L0_IgG1_PVA_/S267K Heavy Chain
EVKLEESGGGLVQPGGSMKLSCAASGFTFSDAWMDWVRQSPEKGLEWVAEIGTKANNHATYYAESVKGRFTISRDDSKSSVYLQMNSLRAEDTGIYYCTRLANWDWYFDVWGAGTTVTVSSASTKGPSVFPLAPSSKSTSGGTAALGCLVKDYFPEPVTVSWNSGALTSGVHTFPAVLQSSGLYSLSSVVTVPSSSLGTQTYICNVNHKPSDTKVDKKVEPKSCDKTHTCPPCPAPPVAGPSVFLFPPKPKDTLMISRTPEVTCVVVDVKHEDPEVKFNWYVDGVEVHNAKTKPREEEYNSTYRVVSVLTVLHQDWLNGKEYKCKVSNKALPAPIEKTISKAKGQPREPQVYTLPPSREEMTKNQVSLTCDVSGFYPSDIAVEWESDGQPENNYKTTPPVLDSDGSFFLYSKLTVDKSRWEQGDVFSCSVMHEALHNHYTQKSLSLSPGK

SEQ ID NO: 18526 - protein, 121 aa, synthetic construct
  source 1..121: note = Description of Artificial Sequence: Synthetic polypeptide; note = VH of XENP020480
EVKLEESGGGLVQPGGSMKLSCAASGFTFSDAWMDWVRQSPEKGLEWVAEIGTKANNHATYYAESVKGRFTISRDDSKSSVYLQMNSLRAEDTGIYYCTRLANWDWYFDVWGAGTTVTVSS

SEQ ID NO: 18527 - protein, 5 aa, synthetic construct
  source 1..5: note = Description of Artificial Sequence: Synthetic peptide; note = XENP020480 vhCDR1
DAWMD

SEQ ID NO: 18528 - protein, 19 aa, synthetic construct
  source 1..19: note = Description of Artificial Sequence: Synthetic peptide; note = XENP020480 vhCDR2
EIGTKANNHATYYAESVKG

SEQ ID NO: 18529 - protein, 10 aa, synthetic construct
  source 1..10: note = Description of Artificial Sequence: Synthetic peptide; note = XENP020480 vhCDR3
LANWDWYFDV

SEQ ID NO: 18530 - protein, 218 aa, synthetic construct; identical to SEQ ID NO: 17590
  source 1..218: note = Description of Artificial Sequence: Synthetic polypeptide; note = XENP020480 7G8_H0.32_L0_IgG1_PVA_/S267K Light Chain

SEQ ID NO: 18531 - protein, 111 aa, synthetic construct; identical to SEQ ID NO: 17591
  source 1..111: note = Description of Artificial Sequence: Synthetic polypeptide; note = VL of XENP020480

SEQ ID NO: 18532 - protein, 15 aa, synthetic construct
  source 1..15: note = Description of Artificial Sequence: Synthetic peptide; note = XENP020480 vlCDR1
KASQSVDYDGDSYMN

SEQ ID NO: 18533 - protein, 7 aa, synthetic construct
  source 1..7: note = Description of Artificial Sequence: Synthetic peptide; note = XENP020480 vlCDR2
AASNLES

SEQ ID NO: 18534 - protein, 9 aa, synthetic construct
  source 1..9: note = Description of Artificial Sequence: Synthetic peptide; note = XENP020480 vlCDR3
QQSNEDPFT

SEQ ID NO: 18535 - protein, 450 aa, synthetic construct
  source 1..450: note = Description of Artificial Sequence: Synthetic polypeptide; note = XENP020481 7G8_H0.33_L0_IgG1_PVA_/S267K Heavy Chain
EVKLEESGGGLVQPGGSMKLSCAASGFTFSDAWMDWVRQSPEKGLEWVAEIYTKANNHATYYAESVKGRFTISRDDSKSSVYLQMNSLRAEDTGIYYCTRLANWDWYFDVWGAGTTVTVSSASTKGPSVFPLAPSSKSTSGGTAALGCLVKDYFPEPVTVSWNSGALTSGVHTFPAVLQSSGLYSLSSVVTVPSSSLGTQTYICNVNHKPSDTKVDKKVEPKSCDKTHTCPPCPAPPVAGPSVFLFPPKPKDTLMISRTPEVTCVVVDVKHEDPEVKFNWYVDGVEVHNAKTKPREEEYNSTYRVVSVLTVLHQDWLNGKEYKCKVSNKALPAPIEKTISKAKGQPREPQVYTLPPSREEMTKNQVSLTCDVSGFYPSDIAVEWESDGQPENNYKTTPPVLDSDGSFFLYSKLTVDKSRWEQGDVFSCSVMHEALHNHYTQKSLSLSPGK

SEQ ID NO: 18536 - protein, 121 aa, synthetic construct
  source 1..121: note = Description of Artificial Sequence: Synthetic polypeptide; note = VH of XENP020481
EVKLEESGGGLVQPGGSMKLSCAASGFTFSDAWMDWVRQSPEKGLEWVAEIYTKANNHATYYAESVKGRFTISRDDSKSSVYLQMNSLRAEDTGIYYCTRLANWDWYFDVWGAGTTVTVSS

SEQ ID NO: 18537 - protein, 5 aa, synthetic construct
  source 1..5: note = Description of Artificial Sequence: Synthetic peptide; note = XENP020481 vhCDR1
DAWMD

SEQ ID NO: 18538 - protein, 19 aa, synthetic construct
  source 1..19: note = Description of Artificial Sequence: Synthetic peptide; note = XENP020481 vhCDR2
EIYTKANNHATYYAESVKG

SEQ ID NO: 18539 - protein, 10 aa, synthetic construct
  source 1..10: note = Description of Artificial Sequence: Synthetic peptide; note = XENP020481 vhCDR3
LANWDWYFDV

SEQ ID NO: 18540 - protein, 218 aa, synthetic construct; identical to SEQ ID NO: 17590
  source 1..218: note = Description of Artificial Sequence: Synthetic polypeptide; note = XENP020481 7G8_H0.33_L0_IgG1_PVA_/S267K Light Chain

SEQ ID NO: 18541 - protein, 111 aa, synthetic construct; identical to SEQ ID NO: 17591
  source 1..111: note = Description of Artificial Sequence: Synthetic polypeptide; note = VL of XENP020481

SEQ ID NO: 18542 - protein, 15 aa, synthetic construct
  source 1..15: note = Description of Artificial Sequence: Synthetic peptide; note = XENP020481 vlCDR1
KASQSVDYDGDSYMN

SEQ ID NO: 18543 - protein, 7 aa, synthetic construct
  source 1..7: note = Description of Artificial Sequence: Synthetic peptide; note = XENP020481 vlCDR2
AASNLES

SEQ ID NO: 18544 - protein, 9 aa, synthetic construct
  source 1..9: note = Description of Artificial Sequence: Synthetic peptide; note = XENP020481 vlCDR3
QQSNEDPFT

SEQ ID NO: 18545 - protein, 450 aa, synthetic construct
  source 1..450: note = Description of Artificial Sequence: Synthetic polypeptide; note = XENP020482 7G8_H0.34_L0_IgG1_PVA_/S267K Heavy Chain
EVKLEESGGGLVQPGGSMKLSCAASGFTFSDAWMDWVRQSPEKGLEWVAEIITKANNHATYYAESVKGRFTISRDDSKSSVYLQMNSLRAEDTGIYYCTRLANWDWYFDVWGAGTTVTVSSASTKGPSVFPLAPSSKSTSGGTAALGCLVKDYFPEPVTVSWNSGALTSGVHTFPAVLQSSGLYSLSSVVTVPSSSLGTQTYICNVNHKPSDTKVDKKVEPKSCDKTHTCPPCPAPPVAGPSVFLFPPKPKDTLMISRTPEVTCVVVDVKHEDPEVKFNWYVDGVEVHNAKTKPREEEYNSTYRVVSVLTVLHQDWLNGKEYKCKVSNKALPAPIEKTISKAKGQPREPQVYTLPPSREEMTKNQVSLTCDVSGFYPSDIAVEWESDGQPENNYKTTPPVLDSDGSFFLYSKLTVDKSRWEQGDVFSCSVMHEALHNHYTQKSLSLSPGK

SEQ ID NO: 18546 - protein, 121 aa, synthetic construct
  source 1..121: note = Description of Artificial Sequence: Synthetic polypeptide; note = VH of XENP020482
EVKLEESGGGLVQPGGSMKLSCAASGFTFSDAWMDWVRQSPEKGLEWVAEIITKANNHATYYAESVKGRFTISRDDSKSSVYLQMNSLRAEDTGIYYCTRLANWDWYFDVWGAGTTVTVSS

SEQ ID NO: 18547 - protein, 5 aa, synthetic construct
  source 1..5: note = Description of Artificial Sequence: Synthetic peptide; note = XENP020482 vhCDR1
DAWMD

SEQ ID NO: 18548 - protein, 19 aa, synthetic construct
  source 1..19: note = Description of Artificial Sequence: Synthetic peptide; note = XENP020482 vhCDR2
EIITKANNHATYYAESVKG

SEQ ID NO: 18549 - protein, 10 aa, synthetic construct
  source 1..10: note = Description of Artificial Sequence: Synthetic peptide; note = XENP020482 vhCDR3
LANWDWYFDV

SEQ ID NO: 18550 - protein, 218 aa, synthetic construct; identical to SEQ ID NO: 17590
  source 1..218: note = Description of Artificial Sequence: Synthetic polypeptide; note = XENP020482 7G8_H0.34_L0_IgG1_PVA_/S267K Light Chain

SEQ ID NO: 18551 - protein, 111 aa, synthetic construct; identical to SEQ ID NO: 17591
  source 1..111: note = Description of Artificial Sequence: Synthetic polypeptide; note = VL of XENP020482

SEQ ID NO: 18552 - protein, 15 aa, synthetic construct
  source 1..15: note = Description of Artificial Sequence: Synthetic peptide; note = XENP020482 vlCDR1
KASQSVDYDGDSYMN

SEQ ID NO: 18553 - protein, 7 aa, synthetic construct
  source 1..7: note = Description of Artificial Sequence: Synthetic peptide; note = XENP020482 vlCDR2
AASNLES

SEQ ID NO: 18554 - protein, 9 aa, synthetic construct
  source 1..9: note = Description of Artificial Sequence: Synthetic peptide; note = XENP020482 vlCDR3
QQSNEDPFT

SEQ ID NO: 18555 - protein, 450 aa, synthetic construct
  source 1..450: note = Description of Artificial Sequence: Synthetic polypeptide; note = XENP020483 7G8_H0.35_L0_IgG1_PVA_/S267K Heavy Chain
EVKLEESGGGLVQPGGSMKLSCAASGFTFSDAWMDWVRQSPEKGLEWVAEIWTKANNHATYYAESVKGRFTISRDDSKSSVYLQMNSLRAEDTGIYYCTRLANWDWYFDVWGAGTTVTVSSASTKGPSVFPLAPSSKSTSGGTAALGCLVKDYFPEPVTVSWNSGALTSGVHTFPAVLQSSGLYSLSSVVTVPSSSLGTQTYICNVNHKPSDTKVDKKVEPKSCDKTHTCPPCPAPPVAGPSVFLFPPKPKDTLMISRTPEVTCVVVDVKHEDPEVKFNWYVDGVEVHNAKTKPREEEYNSTYRVVSVLTVLHQDWLNGKEYKCKVSNKALPAPIEKTISKAKGQPREPQVYTLPPSREEMTKNQVSLTCDVSGFYPSDIAVEWESDGQPENNYKTTPPVLDSDGSFFLYSKLTVDKSRWEQGDVFSCSVMHEALHNHYTQKSLSLSPGK

SEQ ID NO: 18556 - protein, 121 aa, synthetic construct
  source 1..121: note = Description of Artificial Sequence: Synthetic polypeptide; note = VH of XENP020483
EVKLEESGGGLVQPGGSMKLSCAASGFTFSDAWMDWVRQSPEKGLEWVAEIWTKANNHATYYAESVKGRFTISRDDSKSSVYLQMNSLRAEDTGIYYCTRLANWDWYFDVWGAGTTVTVSS

SEQ ID NO: 18557 - protein, 5 aa, synthetic construct
  source 1..5: note = Description of Artificial Sequence: Synthetic peptide; note = XENP020483 vhCDR1
DAWMD

SEQ ID NO: 18558 - protein, 19 aa, synthetic construct
  source 1..19: note = Description of Artificial Sequence: Synthetic peptide; note = XENP020483 vhCDR2
EIWTKANNHATYYAESVKG

SEQ ID NO: 18559 - protein, 10 aa, synthetic construct
  source 1..10: note = Description of Artificial Sequence: Synthetic peptide; note = XENP020483 vhCDR3
LANWDWYFDV

SEQ ID NO: 18560 - protein, 218 aa, synthetic construct; identical to SEQ ID NO: 17590
  source 1..218: note = Description of Artificial Sequence: Synthetic polypeptide; note = XENP020483 7G8_H0.35_L0_IgG1_PVA_/S267K Light Chain

SEQ ID NO: 18561 - protein, 111 aa, synthetic construct; identical to SEQ ID NO: 17591
  source 1..111: note = Description of Artificial Sequence: Synthetic polypeptide; note = VL of XENP020483

SEQ ID NO: 18562 - protein, 15 aa, synthetic construct
  source 1..15: note = Description of Artificial Sequence: Synthetic peptide; note = XENP020483 vlCDR1
KASQSVDYDGDSYMN

SEQ ID NO: 18563 - protein, 7 aa, synthetic construct
  source 1..7: note = Description of Artificial Sequence: Synthetic peptide; note = XENP020483 vlCDR2
AASNLES

SEQ ID NO: 18564 - protein, 9 aa, synthetic construct
  source 1..9: note = Description of Artificial Sequence: Synthetic peptide; note = XENP020483 vlCDR3
QQSNEDPFT

SEQ ID NO: 18565 - protein, 450 aa, synthetic construct
  source 1..450: note = Description of Artificial Sequence: Synthetic polypeptide; note = XENP020484 7G8_H0.36_L0_IgG1_PVA_/S267K Heavy Chain
EVKLEESGGGLVQPGGSMKLSCAASGFTFSDAWMDWVRQSPEKGLEWVAEIRVKANNHATYYAESVKGRFTISRDDSKSSVYLQMNSLRAEDTGIYYCTRLANWDWYFDVWGAGTTVTVSSASTKGPSVFPLAPSSKSTSGGTAALGCLVKDYFPEPVTVSWNSGALTSGVHTFPAVLQSSGLYSLSSVVTVPSSSLGTQTYICNVNHKPSDTKVDKKVEPKSCDKTHTCPPCPAPPVAGPSVFLFPPKPKDTLMISRTPEVTCVVVDVKHEDPEVKFNWYVDGVEVHNAKTKPREEEYNSTYRVVSVLTVLHQDWLNGKEYKCKVSNKALPAPIEKTISKAKGQPREPQVYTLPPSREEMTKNQVSLTCDVSGFYPSDIAVEWESDGQPENNYKTTPPVLDSDGSFFLYSKLTVDKSRWEQGDVFSCSVMHEALHNHYTQKSLSLSPGK

SEQ ID NO: 18566 - protein, 121 aa, synthetic construct
  source 1..121: note = Description of Artificial Sequence: Synthetic polypeptide; note = VH of XENP020484
EVKLEESGGGLVQPGGSMKLSCAASGFTFSDAWMDWVRQSPEKGLEWVAEIRVKANNHATYYAESVKGRFTISRDDSKSSVYLQMNSLRAEDTGIYYCTRLANWDWYFDVWGAGTTVTVSS

SEQ ID NO: 18567 - protein, 5 aa, synthetic construct
  source 1..5: note = Description of Artificial Sequence: Synthetic peptide; note = XENP020484 vhCDR1
DAWMD

SEQ ID NO: 18568 - protein, 19 aa, synthetic construct
  source 1..19: note = Description of Artificial Sequence: Synthetic peptide; note = XENP020484 vhCDR2
EIRVKANNHATYYAESVKG

SEQ ID NO: 18569 - protein, 10 aa, synthetic construct
  source 1..10: note = Description of Artificial Sequence: Synthetic peptide; note = XENP020484 vhCDR3
LANWDWYFDV

SEQ ID NO: 18570 - protein, 218 aa, synthetic construct; identical to SEQ ID NO: 17590
  source 1..218: note = Description of Artificial Sequence: Synthetic polypeptide; note = XENP020484 7G8_H0.36_L0_IgG1_PVA_/S267K Light Chain

SEQ ID NO: 18571 - protein, 111 aa, synthetic construct; identical to SEQ ID NO: 17591
  source 1..111: note = Description of Artificial Sequence: Synthetic polypeptide; note = VL of XENP020484

SEQ ID NO: 18572 - protein, 15 aa, synthetic construct
  source 1..15: note = Description of Artificial Sequence: Synthetic peptide; note = XENP020484 vlCDR1
KASQSVDYDGDSYMN

SEQ ID NO: 18573 - protein, 7 aa, synthetic construct
  source 1..7: note = Description of Artificial Sequence: Synthetic peptide; note = XENP020484 vlCDR2
AASNLES

SEQ ID NO: 18574 - protein, 9 aa, synthetic construct
  source 1..9: note = Description of Artificial Sequence: Synthetic peptide; note = XENP020484 vlCDR3
QQSNEDPFT

SEQ ID NO: 18575 - protein, 450 aa, synthetic construct
  source 1..450: note = Description of Artificial Sequence: Synthetic polypeptide; note = XENP020485 7G8_H0.37_L0_IgG1_PVA_/S267K Heavy Chain
EVKLEESGGGLVQPGGSMKLSCAASGFTFSDAWMDWVRQSPEKGLEWVAEIRSKANNHATYYAESVKGRFTISRDDSKSSVYLQMNSLRAEDTGIYYCTRLANWDWYFDVWGAGTTVTVSSASTKGPSVFPLAPSSKSTSGGTAALGCLVKDYFPEPVTVSWNSGALTSGVHTFPAVLQSSGLYSLSSVVTVPSSSLGTQTYICNVNHKPSDTKVDKKVEPKSCDKTHTCPPCPAPPVAGPSVFLFPPKPKDTLMISRTPEVTCVVVDVKHEDPEVKFNWYVDGVEVHNAKTKPREEEYNSTYRVVSVLTVLHQDWLNGKEYKCKVSNKALPAPIEKTISKAKGQPREPQVYTLPPSREEMTKNQVSLTCDVSGFYPSDIAVEWESDGQPENNYKTTPPVLDSDGSFFLYSKLTVDKSRWEQGDVFSCSVMHEALHNHYTQKSLSLSPGK

SEQ ID NO: 18576 - protein, 121 aa, synthetic construct
  source 1..121: note = Description of Artificial Sequence: Synthetic polypeptide; note = VH of XENP020485
EVKLEESGGGLVQPGGSMKLSCAASGFTFSDAWMDWVRQSPEKGLEWVAEIRSKANNHATYYAESVKGRFTISRDDSKSSVYLQMNSLRAEDTGIYYCTRLANWDWYFDVWGAGTTVTVSS

SEQ ID NO: 18577 - protein, 5 aa, synthetic construct
  source 1..5: note = Description of Artificial Sequence: Synthetic peptide; note = XENP020485 vhCDR1
DAWMD

SEQ ID NO: 18578 - protein, 19 aa, synthetic construct
  source 1..19: note = Description of Artificial Sequence: Synthetic peptide; note = XENP020485 vhCDR2
EIRSKANNHATYYAESVKG

SEQ ID NO: 18579 - protein, 10 aa, synthetic construct
  source 1..10: note = Description of Artificial Sequence: Synthetic peptide; note = XENP020485 vhCDR3
LANWDWYFDV

SEQ ID NO: 18580 - protein, 218 aa, synthetic construct; identical to SEQ ID NO: 17590
  source 1..218: note = Description of Artificial Sequence: Synthetic polypeptide; note = XENP020485 7G8_H0.37_L0_IgG1_PVA_/S267K Light Chain

SEQ ID NO: 18581 - protein, 111 aa, synthetic construct; identical to SEQ ID NO: 17591
  source 1..111: note = Description of Artificial Sequence: Synthetic polypeptide; note = VL of XENP020485

SEQ ID NO: 18582 - protein, 15 aa, synthetic construct
  source 1..15: note = Description of Artificial Sequence: Synthetic peptide; note = XENP020485 vlCDR1
KASQSVDYDGDSYMN

SEQ ID NO: 18583 - protein, 7 aa, synthetic construct
  source 1..7: note = Description of Artificial Sequence: Synthetic peptide; note = XENP020485 vlCDR2
AASNLES

SEQ ID NO: 18584 - protein, 9 aa, synthetic construct
  source 1..9: note = Description of Artificial Sequence: Synthetic peptide; note = XENP020485 vlCDR3
QQSNEDPFT

SEQ ID NO: 18585 - protein, 450 aa, synthetic construct
  source 1..450: note = Description of Artificial Sequence: Synthetic polypeptide; note = XENP020486 7G8_H0.38_L0_IgG1_PVA_/S267K Heavy Chain
EVKLEESGGGLVQPGGSMKLSCAASGFTFSDAWMDWVRQSPEKGLEWVAEIRAKANNHATYYAESVKGRFTISRDDSKSSVYLQMNSLRAEDTGIYYCTRLANWDWYFDVWGAGTTVTVSSASTKGPSVFPLAPSSKSTSGGTAALGCLVKDYFPEPVTVSWNSGALTSGVHTFPAVLQSSGLYSLSSVVTVPSSSLGTQTYICNVNHKPSDTKVDKKVEPKSCDKTHTCPPCPAPPVAGPSVFLFPPKPKDTLMISRTPEVTCVVVDVKHEDPEVKFNWYVDGVEVHNAKTKPREEEYNSTYRVVSVLTVLHQDWLNGKEYKCKVSNKALPAPIEKTISKAKGQPREPQVYTLPPSREEMTKNQVSLTCDVSGFYPSDIAVEWESDGQPENNYKTTPPVLDSDGSFFLYSKLTVDKSRWEQGDVFSCSVMHEALHNHYTQKSLSLSPGK

SEQ ID NO: 18586 - protein, 121 aa, synthetic construct
  source 1..121: note = Description of Artificial Sequence: Synthetic polypeptide; note = VH of XENP020486
EVKLEESGGGLVQPGGSMKLSCAASGFTFSDAWMDWVRQSPEKGLEWVAEIRAKANNHATYYAESVKGRFTISRDDSKSSVYLQMNSLRAEDTGIYYCTRLANWDWYFDVWGAGTTVTVSS

SEQ ID NO: 18587 - protein, 5 aa, synthetic construct
  source 1..5: note = Description of Artificial Sequence: Synthetic peptide; note = XENP020486 vhCDR1
DAWMD

SEQ ID NO: 18588 - protein, 19 aa, synthetic construct
  source 1..19: note = Description of Artificial Sequence: Synthetic peptide; note = XENP020486 vhCDR2
EIRAKANNHATYYAESVKG

SEQ ID NO: 18589 - protein, 10 aa, synthetic construct
  source 1..10: note = Description of Artificial Sequence: Synthetic peptide; note = XENP020486 vhCDR3
LANWDWYFDV

SEQ ID NO: 18590 - protein, 218 aa, synthetic construct; identical to SEQ ID NO: 17590
  source 1..218: note = Description of Artificial Sequence: Synthetic polypeptide; note = XENP020486 7G8_H0.38_L0_IgG1_PVA_/S267K Light Chain

SEQ ID NO: 18591 - protein, 111 aa, synthetic construct; identical to SEQ ID NO: 17591
  source 1..111: note = Description of Artificial Sequence: Synthetic polypeptide; note = VL of XENP020486

SEQ ID NO: 18592 - protein, 15 aa, synthetic construct
  source 1..15: note = Description of Artificial Sequence: Synthetic peptide; note = XENP020486 vlCDR1
KASQSVDYDGDSYMN

SEQ ID NO: 18593 - protein, 7 aa, synthetic construct
  source 1..7: note = Description of Artificial Sequence: Synthetic peptide; note = XENP020486 vlCDR2
AASNLES

SEQ ID NO: 18594 - protein, 9 aa, synthetic construct
  source 1..9: note = Description of Artificial Sequence: Synthetic peptide; note = XENP020486 vlCDR3
QQSNEDPFT

SEQ ID NO: 18595 - protein, 450 aa, synthetic construct
  source 1..450: note = Description of Artificial Sequence: Synthetic polypeptide; note = XENP020487 7G8_H0.39_L0_IgG1_PVA_/S267K Heavy Chain
EVKLEESGGGLVQPGGSMKLSCAASGFTFSDAWMDWVRQSPEKGLEWVAEIRIKANNHATYYAESVKGRFTISRDDSKSSVYLQMNSLRAEDTGIYYCTRLANWDWYFDVWGAGTTVTVSSASTKGPSVFPLAPSSKSTSGGTAALGCLVKDYFPEPVTVSWNSGALTSGVHTFPAVLQSSGLYSLSSVVTVPSSSLGTQTYICNVNHKPSDTKVDKKVEPKSCDKTHTCPPCPAPPVAGPSVFLFPPKPKDTLMISRTPEVTCVVVDVKHEDPEVKFNWYVDGVEVHNAKTKPREEEYNSTYRVVSVLTVLHQDWLNGKEYKCKVSNKALPAPIEKTISKAKGQPREPQVYTLPPSREEMTKNQVSLTCDVSGFYPSDIAVEWESDGQPENNYKTTPPVLDSDGSFFLYSKLTVDKSRWEQGDVFSCSVMHEALHNHYTQKSLSLSPGK

SEQ ID NO: 18596 - protein, 121 aa, synthetic construct
  source 1..121: note = Description of Artificial Sequence: Synthetic polypeptide; note = VH of XENP020487
EVKLEESGGGLVQPGGSMKLSCAASGFTFSDAWMDWVRQSPEKGLEWVAEIRIKANNHATYYAESVKGRFTISRDDSKSSVYLQMNSLRAEDTGIYYCTRLANWDWYFDVWGAGTTVTVSS

SEQ ID NO: 18597 - protein, 5 aa, synthetic construct
  source 1..5: note = Description of Artificial Sequence: Synthetic peptide; note = XENP020487 vhCDR1
DAWMD

SEQ ID NO: 18598 - protein, 19 aa, synthetic construct
  source 1..19: note = Description of Artificial Sequence: Synthetic peptide; note = XENP020487 vhCDR2
EIRIKANNHATYYAESVKG

SEQ ID NO: 18599 - protein, 10 aa, synthetic construct
  source 1..10: note = Description of Artificial Sequence: Synthetic peptide; note = XENP020487 vhCDR3
LANWDWYFDV

SEQ ID NO: 18600 - protein, 218 aa, synthetic construct; identical to SEQ ID NO: 17590
  source 1..218: note = Description of Artificial Sequence: Synthetic polypeptide; note = XENP020487 7G8_H0.39_L0_IgG1_PVA_/S267K Light Chain

SEQ ID NO: 18601 - protein, 111 aa, synthetic construct; identical to SEQ ID NO: 17591
  source 1..111: note = Description of Artificial Sequence: Synthetic polypeptide; note = VL of XENP020487

SEQ ID NO: 18602 - protein, 15 aa, synthetic construct
  source 1..15: note = Description of Artificial Sequence: Synthetic peptide; note = XENP020487 vlCDR1
KASQSVDYDGDSYMN

SEQ ID NO: 18603 - protein, 7 aa, synthetic construct
  source 1..7: note = Description of Artificial Sequence: Synthetic peptide; note = XENP020487 vlCDR2
AASNLES

SEQ ID NO: 18604 - protein, 9 aa, synthetic construct
  source 1..9: note = Description of Artificial Sequence: Synthetic peptide; note = XENP020487 vlCDR3
QQSNEDPFT

SEQ ID NO: 18605 - protein, 450 aa, synthetic construct
  source 1..450: note = Description of Artificial Sequence: Synthetic polypeptide; note = XENP020488 7G8_H0.40_L0_IgG1_PVA_/S267K Heavy Chain
EVKLEESGGGLVQPGGSMKLSCAASGFTFSDAWMDWVRQSPEKGLEWVAEIRQKANNHATYYAESVKGRFTISRDDSKSSVYLQMNSLRAEDTGIYYCTRLANWDWYFDVWGAGTTVTVSSASTKGPSVFPLAPSSKSTSGGTAALGCLVKDYFPEPVTVSWNSGALTSGVHTFPAVLQSSGLYSLSSVVTVPSSSLGTQTYICNVNHKPSDTKVDKKVEPKSCDKTHTCPPCPAPPVAGPSVFLFPPKPKDTLMISRTPEVTCVVVDVKHEDPEVKFNWYVDGVEVHNAKTKPREEEYNSTYRVVSVLTVLHQDWLNGKEYKCKVSNKALPAPIEKTISKAKGQPREPQVYTLPPSREEMTKNQVSLTCDVSGFYPSDIAVEWESDGQPENNYKTTPPVLDSDGSFFLYSKLTVDKSRWEQGDVFSCSVMHEALHNHYTQKSLSLSPGK

SEQ ID NO: 18606 - protein, 121 aa, synthetic construct
  source 1..121: note = Description of Artificial Sequence: Synthetic polypeptide; note = VH of XENP020488
EVKLEESGGGLVQPGGSMKLSCAASGFTFSDAWMDWVRQSPEKGLEWVAEIRQKANNHATYYAESVKGRFTISRDDSKSSVYLQMNSLRAEDTGIYYCTRLANWDWYFDVWGAGTTVTVSS

SEQ ID NO: 18607 - protein, 5 aa, synthetic construct
  source 1..5: note = Description of Artificial Sequence: Synthetic peptide; note = XENP020488 vhCDR1
DAWMD

SEQ ID NO: 18608 - protein, 19 aa, synthetic construct
  source 1..19: note = Description of Artificial Sequence: Synthetic peptide; note = XENP020488 vhCDR2
EIRQKANNHATYYAESVKG

SEQ ID NO: 18609 - protein, 10 aa, synthetic construct
  source 1..10: note = Description of Artificial Sequence: Synthetic peptide; note = XENP020488 vhCDR3
LANWDWYFDV

SEQ ID NO: 18610 - protein, 218 aa, synthetic construct; identical to SEQ ID NO: 17590
  source 1..218: note = Description of Artificial Sequence: Synthetic polypeptide; note = XENP020488 7G8_H0.40_L0_IgG1_PVA_/S267K Light Chain

SEQ ID NO: 18611 - protein, 111 aa, synthetic construct; identical to SEQ ID NO: 17591
  source 1..111: note = Description of Artificial Sequence: Synthetic polypeptide; note = VL of XENP020488

SEQ ID NO: 18612 - protein, 15 aa, synthetic construct
  source 1..15: note = Description of Artificial Sequence: Synthetic peptide; note = XENP020488 vlCDR1
KASQSVDYDGDSYMN

SEQ ID NO: 18613 - protein, 7 aa, synthetic construct
  source 1..7: note = Description of Artificial Sequence: Synthetic peptide; note = XENP020488 vlCDR2
AASNLES

SEQ ID NO: 18614 - protein, 9 aa, synthetic construct
  source 1..9: note = Description of Artificial Sequence: Synthetic peptide; note = XENP020488 vlCDR3
QQSNEDPFT

SEQ ID NO: 18615 - protein, 450 aa, synthetic construct
  source 1..450: note = Description of Artificial Sequence: Synthetic polypeptide; note = XENP020489 7G8_H0.41_L0_IgG1_PVA_/S267K Heavy Chain
EVKLEESGGGLVQPGGSMKLSCAASGFTFSDAWMDWVRQSPEKGLEWVAEIRHKANNHATYYAESVKGRFTISRDDSKSSVYLQMNSLRAEDTGIYYCTRLANWDWYFDVWGAGTTVTVSSASTKGPSVFPLAPSSKSTSGGTAALGCLVKDYFPEPVTVSWNSGALTSGVHTFPAVLQSSGLYSLSSVVTVPSSSLGTQTYICNVNHKPSDTKVDKKVEPKSCDKTHTCPPCPAPPVAGPSVFLFPPKPKDTLMISRTPEVTCVVVDVKHEDPEVKFNWYVDGVEVHNAKTKPREEEYNSTYRVVSVLTVLHQDWLNGKEYKCKVSNKALPAPIEKTISKAKGQPREPQVYTLPPSREEMTKNQVSLTCDVSGFYPSDIAVEWESDGQPENNYKTTPPVLDSDGSFFLYSKLTVDKSRWEQGDVFSCSVMHEALHNHYTQKSLSLSPGK

SEQ ID NO: 18616 - protein, 121 aa, synthetic construct
  source 1..121: note = Description of Artificial Sequence: Synthetic polypeptide; note = VH of XENP020489
EVKLEESGGGLVQPGGSMKLSCAASGFTFSDAWMDWVRQSPEKGLEWVAEIRHKANNHATYYAESVKGRFTISRDDSKSSVYLQMNSLRAEDTGIYYCTRLANWDWYFDVWGAGTTVTVSS

SEQ ID NO: 18617 - protein, 5 aa, synthetic construct
  source 1..5: note = Description of Artificial Sequence: Synthetic peptide; note = XENP020489 vhCDR1
DAWMD

SEQ ID NO: 18618 - protein, 19 aa, synthetic construct
  source 1..19: note = Description of Artificial Sequence: Synthetic peptide; note = XENP020489 vhCDR2
EIRHKANNHATYYAESVKG

SEQ ID NO: 18619 - protein, 10 aa, synthetic construct
  source 1..10: note = Description of Artificial Sequence: Synthetic peptide; note = XENP020489 vhCDR3
LANWDWYFDV

SEQ ID NO: 18620 - protein, 218 aa, synthetic construct; identical to SEQ ID NO: 17590
  source 1..218: note = Description of Artificial Sequence: Synthetic polypeptide; note = XENP020489 7G8_H0.41_L0_IgG1_PVA_/S267K Light Chain

SEQ ID NO: 18621 - protein, 111 aa, synthetic construct; identical to SEQ ID NO: 17591
  source 1..111: note = Description of Artificial Sequence: Synthetic polypeptide; note = VL of XENP020489

SEQ ID NO: 18622 - protein, 15 aa, synthetic construct
  source 1..15: note = Description of Artificial Sequence: Synthetic peptide; note = XENP020489 vlCDR1
KASQSVDYDGDSYMN

SEQ ID NO: 18623 - protein, 7 aa, synthetic construct
  source 1..7: note = Description of Artificial Sequence: Synthetic peptide; note = XENP020489 vlCDR2
AASNLES

SEQ ID NO: 18624 - protein, 9 aa, synthetic construct
  source 1..9: note = Description of Artificial Sequence: Synthetic peptide; note = XENP020489 vlCDR3
QQSNEDPFT

SEQ ID NO: 18625 - protein, 450 aa, synthetic construct
  source 1..450: note = Description of Artificial Sequence: Synthetic polypeptide; note = XENP020490 7G8_H0.42_L0_IgG1_PVA_/S267K Heavy Chain
EVKLEESGGGLVQPGGSMKLSCAASGFTFSDAWMDWVRQSPEKGLEWVAEIRDKANNHATYYAESVKGRFTISRDDSKSSVYLQMNSLRAEDTGIYYCTRLANWDWYFDVWGAGTTVTVSSASTKGPSVFPLAPSSKSTSGGTAALGCLVKDYFPEPVTVSWNSGALTSGVHTFPAVLQSSGLYSLSSVVTVPSSSLGTQTYICNVNHKPSDTKVDKKVEPKSCDKTHTCPPCPAPPVAGPSVFLFPPKPKDTLMISRTPEVTCVVVDVKHEDPEVKFNWYVDGVEVHNAKTKPREEEYNSTYRVVSVLTVLHQDWLNGKEYKCKVSNKALPAPIEKTISKAKGQPREPQVYTLPPSREEMTKNQVSLTCDVSGFYPSDIAVEWESDGQPENNYKTTPPVLDSDGSFFLYSKLTVDKSRWEQGDVFSCSVMHEALHNHYTQKSLSLSPGK

SEQ ID NO: 18626 - protein, 121 aa, synthetic construct
  source 1..121: note = Description of Artificial Sequence: Synthetic polypeptide; note = VH of XENP020490
EVKLEESGGGLVQPGGSMKLSCAASGFTFSDAWMDWVRQSPEKGLEWVAEIRDKANNHATYYAESVKGRFTISRDDSKSSVYLQMNSLRAEDTGIYYCTRLANWDWYFDVWGAGTTVTVSS

SEQ ID NO: 18627 - protein, 5 aa, synthetic construct
  source 1..5: note = Description of Artificial Sequence: Synthetic peptide; note = XENP020490 vhCDR1
DAWMD

SEQ ID NO: 18628 - protein, 19 aa, synthetic construct
  source 1..19: note = Description of Artificial Sequence: Synthetic peptide; note = XENP020490 vhCDR2
EIRDKANNHATYYAESVKG

SEQ ID NO: 18629 - protein, 10 aa, synthetic construct
  source 1..10: note = Description of Artificial Sequence: Synthetic peptide; note = XENP020490 vhCDR3
LANWDWYFDV

SEQ ID NO: 18630 - protein, 218 aa, synthetic construct; identical to SEQ ID NO: 17590
  source 1..218: note = Description of Artificial Sequence: Synthetic polypeptide; note = XENP020490 7G8_H0.42_L0_IgG1_PVA_/S267K Light Chain

SEQ ID NO: 18631 - protein, 111 aa, synthetic construct; identical to SEQ ID NO: 17591
  source 1..111: note = Description of Artificial Sequence: Synthetic polypeptide; note = VL of XENP020490

SEQ ID NO: 18632 - protein, 15 aa, synthetic construct
  source 1..15: note = Description of Artificial Sequence: Synthetic peptide; note = XENP020490 vlCDR1
KASQSVDYDGDSYMN

SEQ ID NO: 18633 - protein, 7 aa, synthetic construct
  source 1..7: note = Description of Artificial Sequence: Synthetic peptide; note = XENP020490 vlCDR2
AASNLES

SEQ ID NO: 18634 - protein, 9 aa, synthetic construct
  source 1..9: note = Description of Artificial Sequence: Synthetic peptide; note = XENP020490 vlCDR3
QQSNEDPFT

SEQ ID NO: 18635 - protein, 450 aa, synthetic construct
  source 1..450: note = Description of Artificial Sequence: Synthetic polypeptide; note = XENP020491 7G8_H0.43_L0_IgG1_PVA_/S267K Heavy Chain
EVKLEESGGGLVQPGGSMKLSCAASGFTFSDAWMDWVRQSPEKGLEWVAEIRKKANNHATYYAESVKGRFTISRDDSKSSVYLQMNSLRAEDTGIYYCTRLANWDWYFDVWGAGTTVTVSSASTKGPSVFPLAPSSKSTSGGTAALGCLVKDYFPEPVTVSWNSGALTSGVHTFPAVLQSSGLYSLSSVVTVPSSSLGTQTYICNVNHKPSDTKVDKKVEPKSCDKTHTCPPCPAPPVAGPSVFLFPPKPKDTLMISRTPEVTCVVVDVKHEDPEVKFNWYVDGVEVHNAKTKPREEEYNSTYRVVSVLTVLHQDWLNGKEYKCKVSNKALPAPIEKTISKAKGQPREPQVYTLPPSREEMTKNQVSLTCDVSGFYPSDIAVEWESDGQPENNYKTTPPVLDSDGSFFLYSKLTVDKSRWEQGDVFSCSVMHEALHNHYTQKSLSLSPGK

SEQ ID NO: 18636 - protein, 121 aa, synthetic construct
  source 1..121: note = Description of Artificial Sequence: Synthetic polypeptide; note = VH of XENP020491
EVKLEESGGGLVQPGGSMKLSCAASGFTFSDAWMDWVRQSPEKGLEWVAEIRKKANNHATYYAESVKGRFTISRDDSKSSVYLQMNSLRAEDTGIYYCTRLANWDWYFDVWGAGTTVTVSS

SEQ ID NO: 18637 - protein, 5 aa, synthetic construct
  source 1..5: note = Description of Artificial Sequence: Synthetic peptide; note = XENP020491 vhCDR1
DAWMD

SEQ ID NO: 18638 - protein, 19 aa, synthetic construct
  source 1..19: note = Description of Artificial Sequence: Synthetic peptide; note = XENP020491 vhCDR2
EIRKKANNHATYYAESVKG

SEQ ID NO: 18639 - protein, 10 aa, synthetic construct
  source 1..10: note = Description of Artificial Sequence: Synthetic peptide; note = XENP020491 vhCDR3
LANWDWYFDV

SEQ ID NO: 18640 - protein, 218 aa, synthetic construct; identical to SEQ ID NO: 17590
  source 1..218: note = Description of Artificial Sequence: Synthetic polypeptide; note = XENP020491 7G8_H0.43_L0_IgG1_PVA_/S267K Light Chain

SEQ ID NO: 18641 - protein, 111 aa, synthetic construct; identical to SEQ ID NO: 17591
  source 1..111: note = Description of Artificial Sequence: Synthetic polypeptide; note = VL of XENP020491

SEQ ID NO: 18642 - protein, 15 aa, synthetic construct
  source 1..15: note = Description of Artificial Sequence: Synthetic peptide; note = XENP020491 vlCDR1
KASQSVDYDGDSYMN

SEQ ID NO: 18643 - protein, 7 aa, synthetic construct
  source 1..7: note = Description of Artificial Sequence: Synthetic peptide; note = XENP020491 vlCDR2
AASNLES

SEQ ID NO: 18644 - protein, 9 aa, synthetic construct
  source 1..9: note = Description of Artificial Sequence: Synthetic peptide; note = XENP020491 vlCDR3
QQSNEDPFT

SEQ ID NO: 18645 - protein, 450 aa, synthetic construct
  source 1..450: note = Description of Artificial Sequence: Synthetic polypeptide; note = XENP020492 7G8_H0.44_L0_IgG1_PVA_/S267K Heavy Chain
EVKLEESGGGLVQPGGSMKLSCAASGFTFSDAWMDWVRQSPEKGLEWVAEIRYKANNHATYYAESVKGRFTISRDDSKSSVYLQMNSLRAEDTGIYYCTRLANWDWYFDVWGAGTTVTVSSASTKGPSVFPLAPSSKSTSGGTAALGCLVKDYFPEPVTVSWNSGALTSGVHTFPAVLQSSGLYSLSSVVTVPSSSLGTQTYICNVNHKPSDTKVDKKVEPKSCDKTHTCPPCPAPPVAGPSVFLFPPKPKDTLMISRTPEVTCVVVDVKHEDPEVKFNWYVDGVEVHNAKTKPREEEYNSTYRVVSVLTVLHQDWLNGKEYKCKVSNKALPAPIEKTISKAKGQPREPQVYTLPPSREEMTKNQVSLTCDVSGFYPSDIAVEWESDGQPENNYKTTPPVLDSDGSFFLYSKLTVDKSRWEQGDVFSCSVMHEALHNHYTQKSLSLSPGK

SEQ ID NO: 18646 - protein, 121 aa, synthetic construct
  source 1..121: note = Description of Artificial Sequence: Synthetic polypeptide; note = VH of XENP020492
EVKLEESGGGLVQPGGSMKLSCAASGFTFSDAWMDWVRQSPEKGLEWVAEIRYKANNHATYYAESVKGRFTISRDDSKSSVYLQMNSLRAEDTGIYYCTRLANWDWYFDVWGAGTTVTVSS

SEQ ID NO: 18647 - protein, 5 aa, synthetic construct
  source 1..5: note = Description of Artificial Sequence: Synthetic peptide; note = XENP020492 vhCDR1
DAWMD

SEQ ID NO: 18648 - protein, 19 aa, synthetic construct
  source 1..19: note = Description of Artificial Sequence: Synthetic peptide; note = XENP020492 vhCDR2
EIRYKANNHATYYAESVKG

SEQ ID NO: 18649 - protein, 10 aa, synthetic construct
  source 1..10: note = Description of Artificial Sequence: Synthetic peptide; note = XENP020492 vhCDR3
LANWDWYFDV

SEQ ID NO: 18650 - protein, 218 aa, synthetic construct; identical to SEQ ID NO: 17590
  source 1..218: note = Description of Artificial Sequence: Synthetic polypeptide; note = XENP020492 7G8_H0.44_L0_IgG1_PVA_/S267K Light Chain

SEQ ID NO: 18651 - protein, 111 aa, synthetic construct; identical to SEQ ID NO: 17591
  source 1..111: note = Description of Artificial Sequence: Synthetic polypeptide; note = VL of XENP020492

SEQ ID NO: 18652 - protein, 15 aa, synthetic construct
  source 1..15: note = Description of Artificial Sequence: Synthetic peptide; note = XENP020492 vlCDR1
KASQSVDYDGDSYMN

SEQ ID NO: 18653 - protein, 7 aa, synthetic construct
  source 1..7: note = Description of Artificial Sequence: Synthetic peptide; note = XENP020492 vlCDR2
AASNLES

SEQ ID NO: 18654 - protein, 9 aa, synthetic construct
  source 1..9: note = Description of Artificial Sequence: Synthetic peptide; note = XENP020492 vlCDR3
QQSNEDPFT

SEQ ID NO: 18655 - protein, 450 aa, synthetic construct
  source 1..450: note = Description of Artificial Sequence: Synthetic polypeptide; note = XENP020493 7G8_H0.45_L0_IgG1_PVA_/S267K Heavy Chain
EVKLEESGGGLVQPGGSMKLSCAASGFTFSDAWMDWVRQSPEKGLEWVAEIRTRANNHATYYAESVKGRFTISRDDSKSSVYLQMNSLRAEDTGIYYCTRLANWDWYFDVWGAGTTVTVSSASTKGPSVFPLAPSSKSTSGGTAALGCLVKDYFPEPVTVSWNSGALTSGVHTFPAVLQSSGLYSLSSVVTVPSSSLGTQTYICNVNHKPSDTKVDKKVEPKSCDKTHTCPPCPAPPVAGPSVFLFPPKPKDTLMISRTPEVTCVVVDVKHEDPEVKFNWYVDGVEVHNAKTKPREEEYNSTYRVVSVLTVLHQDWLNGKEYKCKVSNKALPAPIEKTISKAKGQPREPQVYTLPPSREEMTKNQVSLTCDVSGFYPSDIAVEWESDGQPENNYKTTPPVLDSDGSFFLYSKLTVDKSRWEQGDVFSCSVMHEALHNHYTQKSLSLSPGK

SEQ ID NO: 18656 - protein, 121 aa, synthetic construct
  source 1..121: note = Description of Artificial Sequence: Synthetic polypeptide; note = VH of XENP020493
EVKLEESGGGLVQPGGSMKLSCAASGFTFSDAWMDWVRQSPEKGLEWVAEIRTRANNHATYYAESVKGRFTISRDDSKSSVYLQMNSLRAEDTGIYYCTRLANWDWYFDVWGAGTTVTVSS

SEQ ID NO: 18657 - protein, 5 aa, synthetic construct
  source 1..5: note = Description of Artificial Sequence: Synthetic peptide; note = XENP020493 vhCDR1
DAWMD

SEQ ID NO: 18658 - protein, 19 aa, synthetic construct
  source 1..19: note = Description of Artificial Sequence: Synthetic peptide; note = XENP020493 vhCDR2
EIRTRANNHATYYAESVKG

SEQ ID NO: 18659 - protein, 10 aa, synthetic construct
  source 1..10: note = Description of Artificial Sequence: Synthetic peptide; note = XENP020493 vhCDR3
LANWDWYFDV

SEQ ID NO: 18660 - protein, 218 aa, synthetic construct; identical to SEQ ID NO: 17590
  source 1..218: note = Description of Artificial Sequence: Synthetic polypeptide; note = XENP020493 7G8_H0.45_L0_IgG1_PVA_/S267K Light Chain

SEQ ID NO: 18661 - protein, 111 aa, synthetic construct; identical to SEQ ID NO: 17591
  source 1..111: note = Description of Artificial Sequence: Synthetic polypeptide; note = VL of XENP020493

SEQ ID NO: 18662 - protein, 15 aa, synthetic construct
  source 1..15: note = Description of Artificial Sequence: Synthetic peptide; note = XENP020493 vlCDR1
KASQSVDYDGDSYMN

SEQ ID NO: 18663 - protein, 7 aa, synthetic construct
  source 1..7: note = Description of Artificial Sequence: Synthetic peptide; note = XENP020493 vlCDR2
AASNLES

SEQ ID NO: 18664 - protein, 9 aa, synthetic construct
  source 1..9: note = Description of Artificial Sequence: Synthetic peptide; note = XENP020493 vlCDR3
QQSNEDPFT

SEQ ID NO: 18665 - protein, 450 aa, synthetic construct
  source 1..450: note = Description of Artificial Sequence: Synthetic polypeptide; note = XENP020494 7G8_H0.46_L0_IgG1_PVA_/S267K Heavy Chain
EVKLEESGGGLVQPGGSMKLSCAASGFTFSDAWMDWVRQSPEKGLEWVAEIRTEANNHATYYAESVKGRFTISRDDSKSSVYLQMNSLRAEDTGIYYCTRLANWDWYFDVWGAGTTVTVSSASTKGPSVFPLAPSSKSTSGGTAALGCLVKDYFPEPVTVSWNSGALTSGVHTFPAVLQSSGLYSLSSVVTVPSSSLGTQTYICNVNHKPSDTKVDKKVEPKSCDKTHTCPPCPAPPVAGPSVFLFPPKPKDTLMISRTPEVTCVVVDVKHEDPEVKFNWYVDGVEVHNAKTKPREEEYNSTYRVVSVLTVLHQDWLNGKEYKCKVSNKALPAPIEKTISKAKGQPREPQVYTLPPSREEMTKNQVSLTCDVSGFYPSDIAVEWESDGQPENNYKTTPPVLDSDGSFFLYSKLTVDKSRWEQGDVFSCSVMHEALHNHYTQKSLSLSPGK

SEQ ID NO: 18666 - protein, 121 aa, synthetic construct
  source 1..121: note = Description of Artificial Sequence: Synthetic polypeptide; note = VH of XENP020494
EVKLEESGGGLVQPGGSMKLSCAASGFTFSDAWMDWVRQSPEKGLEWVAEIRTEANNHATYYAESVKGRFTISRDDSKSSVYLQMNSLRAEDTGIYYCTRLANWDWYFDVWGAGTTVTVSS

SEQ ID NO: 18667 - protein, 5 aa, synthetic construct
  source 1..5: note = Description of Artificial Sequence: Synthetic peptide; note = XENP020494 vhCDR1
DAWMD

SEQ ID NO: 18668 - protein, 19 aa, synthetic construct
  source 1..19: note = Description of Artificial Sequence: Synthetic peptide; note = XENP020494 vhCDR2
EIRTEANNHATYYAESVKG

SEQ ID NO: 18669 - protein, 10 aa, synthetic construct
  source 1..10: note = Description of Artificial Sequence: Synthetic peptide; note = XENP020494 vhCDR3
LANWDWYFDV

SEQ ID NO: 18670 - protein, 218 aa, synthetic construct; identical to SEQ ID NO: 17590
  source 1..218: note = Description of Artificial Sequence: Synthetic polypeptide; note = XENP020494 7G8_H0.46_L0_IgG1_PVA_/S267K Light Chain

SEQ ID NO: 18671 - protein, 111 aa, synthetic construct; identical to SEQ ID NO: 17591
  source 1..111: note = Description of Artificial Sequence: Synthetic polypeptide; note = VL of XENP020494

SEQ ID NO: 18672 - protein, 15 aa, synthetic construct
  source 1..15: note = Description of Artificial Sequence: Synthetic peptide; note = XENP020494 vlCDR1
KASQSVDYDGDSYMN

SEQ ID NO: 18673 - protein, 7 aa, synthetic construct
  source 1..7: note = Description of Artificial Sequence: Synthetic peptide; note = XENP020494 vlCDR2
AASNLES

SEQ ID NO: 18674 - protein, 9 aa, synthetic construct
  source 1..9: note = Description of Artificial Sequence: Synthetic peptide; note = XENP020494 vlCDR3
QQSNEDPFT

SEQ ID NO: 18675 - protein, 450 aa, synthetic construct
  source 1..450: note = Description of Artificial Sequence: Synthetic polypeptide; note = XENP020495 7G8_H0.47_L0_IgG1_PVA_/S267K Heavy Chain
EVKLEESGGGLVQPGGSMKLSCAASGFTFSDAWMDWVRQSPEKGLEWVAEIRTHANNHATYYAESVKGRFTISRDDSKSSVYLQMNSLRAEDTGIYYCTRLANWDWYFDVWGAGTTVTVSSASTKGPSVFPLAPSSKSTSGGTAALGCLVKDYFPEPVTVSWNSGALTSGVHTFPAVLQSSGLYSLSSVVTVPSSSLGTQTYICNVNHKPSDTKVDKKVEPKSCDKTHTCPPCPAPPVAGPSVFLFPPKPKDTLMISRTPEVTCVVVDVKHEDPEVKFNWYVDGVEVHNAKTKPREEEYNSTYRVVSVLTVLHQDWLNGKEYKCKVSNKALPAPIEKTISKAKGQPREPQVYTLPPSREEMTKNQVSLTCDVSGFYPSDIAVEWESDGQPENNYKTTPPVLDSDGSFFLYSKLTVDKSRWEQGDVFSCSVMHEALHNHYTQKSLSLSPGK

SEQ ID NO: 18676 - protein, 121 aa, synthetic construct
  source 1..121: note = Description of Artificial Sequence: Synthetic polypeptide; note = VH of XENP020495
EVKLEESGGGLVQPGGSMKLSCAASGFTFSDAWMDWVRQSPEKGLEWVAEIRTHANNHATYYAESVKGRFTISRDDSKSSVYLQMNSLRAEDTGIYYCTRLANWDWYFDVWGAGTTVTVSS

SEQ ID NO: 18677 - protein, 5 aa, synthetic construct
  source 1..5: note = Description of Artificial Sequence: Synthetic peptide; note = XENP020495 vhCDR1
DAWMD

SEQ ID NO: 18678 - protein, 19 aa, synthetic construct
  source 1..19: note = Description of Artificial Sequence: Synthetic peptide; note = XENP020495 vhCDR2
EIRTHANNHATYYAESVKG

SEQ ID NO: 18679 - protein, 10 aa, synthetic construct
  source 1..10: note = Description of Artificial Sequence: Synthetic peptide; note = XENP020495 vhCDR3
LANWDWYFDV

SEQ ID NO: 18680 - protein, 218 aa, synthetic construct; identical to SEQ ID NO: 17590
  source 1..218: note = Description of Artificial Sequence: Synthetic polypeptide; note = XENP020495 7G8_H0.47_L0_IgG1_PVA_/S267K Light Chain

SEQ ID NO: 18681 - protein, 111 aa, synthetic construct; identical to SEQ ID NO: 17591
  source 1..111: note = Description of Artificial Sequence: Synthetic polypeptide; note = VL of XENP020495

SEQ ID NO: 18682 - protein, 15 aa, synthetic construct
  source 1..15: note = Description of Artificial Sequence: Synthetic peptide; note = XENP020495 vlCDR1
KASQSVDYDGDSYMN

SEQ ID NO: 18683 - protein, 7 aa, synthetic construct
  source 1..7: note = Description of Artificial Sequence: Synthetic peptide; note = XENP020495 vlCDR2
AASNLES

SEQ ID NO: 18684 - protein, 9 aa, synthetic construct
  source 1..9: note = Description of Artificial Sequence: Synthetic peptide; note = XENP020495 vlCDR3
QQSNEDPFT

SEQ ID NO: 18685 - protein, 450 aa, synthetic construct
  source 1..450: note = Description of Artificial Sequence: Synthetic polypeptide; note = XENP020496 7G8_H0.48_L0_IgG1_PVA_/S267K Heavy Chain
EVKLEESGGGLVQPGGSMKLSCAASGFTFSDAWMDWVRQSPEKGLEWVAEIRTSANNHATYYAESVKGRFTISRDDSKSSVYLQMNSLRAEDTGIYYCTRLANWDWYFDVWGAGTTVTVSSASTKGPSVFPLAPSSKSTSGGTAALGCLVKDYFPEPVTVSWNSGALTSGVHTFPAVLQSSGLYSLSSVVTVPSSSLGTQTYICNVNHKPSDTKVDKKVEPKSCDKTHTCPPCPAPPVAGPSVFLFPPKPKDTLMISRTPEVTCVVVDVKHEDPEVKFNWYVDGVEVHNAKTKPREEEYNSTYRVVSVLTVLHQDWLNGKEYKCKVSNKALPAPIEKTISKAKGQPREPQVYTLPPSREEMTKNQVSLTCDVSGFYPSDIAVEWESDGQPENNYKTTPPVLDSDGSFFLYSKLTVDKSRWEQGDVFSCSVMHEALHNHYTQKSLSLSPGK

SEQ ID NO: 18686 - protein, 121 aa, synthetic construct
  source 1..121: note = Description of Artificial Sequence: Synthetic polypeptide; note = VH of XENP020496
EVKLEESGGGLVQPGGSMKLSCAASGFTFSDAWMDWVRQSPEKGLEWVAEIRTSANNHATYYAESVKGRFTISRDDSKSSVYLQMNSLRAEDTGIYYCTRLANWDWYFDVWGAGTTVTVSS

SEQ ID NO: 18687 - protein, 5 aa, synthetic construct
  source 1..5: note = Description of Artificial Sequence: Synthetic peptide; note = XENP020496 vhCDR1
DAWMD

SEQ ID NO: 18688 - protein, 19 aa, synthetic construct
  source 1..19: note = Description of Artificial Sequence: Synthetic peptide; note = XENP020496 vhCDR2
EIRTSANNHATYYAESVKG

SEQ ID NO: 18689 - protein, 10 aa, synthetic construct
  source 1..10: note = Description of Artificial Sequence: Synthetic peptide; note = XENP020496 vhCDR3
LANWDWYFDV

SEQ ID NO: 18690 - protein, 218 aa, synthetic construct; identical to SEQ ID NO: 17590
  source 1..218: note = Description of Artificial Sequence: Synthetic polypeptide; note = XENP020496 7G8_H0.48_L0_IgG1_PVA_/S267K Light Chain

SEQ ID NO: 18691 - protein, 111 aa, synthetic construct; identical to SEQ ID NO: 17591
  source 1..111: note = Description of Artificial Sequence: Synthetic polypeptide; note = VL of XENP020496

SEQ ID NO: 18692 - protein, 15 aa, synthetic construct
  source 1..15: note = Description of Artificial Sequence: Synthetic peptide; note = XENP020496 vlCDR1
KASQSVDYDGDSYMN

SEQ ID NO: 18693 - protein, 7 aa, synthetic construct
  source 1..7: note = Description of Artificial Sequence: Synthetic peptide; note = XENP020496 vlCDR2
AASNLES

SEQ ID NO: 18694 - protein, 9 aa, synthetic construct
  source 1..9: note = Description of Artificial Sequence: Synthetic peptide; note = XENP020496 vlCDR3
QQSNEDPFT

SEQ ID NO: 18695 - protein, 450 aa, synthetic construct
  source 1..450: note = Description of Artificial Sequence: Synthetic polypeptide; note = XENP020501 7G8_H0.49_L0_IgG1_PVA_/S267K Heavy Chain
EVKLEESGGGLVQPGGSMKLSCAASGFTFSDAWMDWVRQSPEKGLEWVAEIRTDANNHATYYAESVKGRFTISRDDSKSSVYLQMNSLRAEDTGIYYCTRLANWDWYFDVWGAGTTVTVSSASTKGPSVFPLAPSSKSTSGGTAALGCLVKDYFPEPVTVSWNSGALTSGVHTFPAVLQSSGLYSLSSVVTVPSSSLGTQTYICNVNHKPSDTKVDKKVEPKSCDKTHTCPPCPAPPVAGPSVFLFPPKPKDTLMISRTPEVTCVVVDVKHEDPEVKFNWYVDGVEVHNAKTKPREEEYNSTYRVVSVLTVLHQDWLNGKEYKCKVSNKALPAPIEKTISKAKGQPREPQVYTLPPSREEMTKNQVSLTCDVSGFYPSDIAVEWESDGQPENNYKTTPPVLDSDGSFFLYSKLTVDKSRWEQGDVFSCSVMHEALHNHYTQKSLSLSPGK

SEQ ID NO: 18696 - protein, 121 aa, synthetic construct
  source 1..121: note = Description of Artificial Sequence: Synthetic polypeptide; note = VH of XENP020501
EVKLEESGGGLVQPGGSMKLSCAASGFTFSDAWMDWVRQSPEKGLEWVAEIRTDANNHATYYAESVKGRFTISRDDSKSSVYLQMNSLRAEDTGIYYCTRLANWDWYFDVWGAGTTVTVSS

SEQ ID NO: 18697 - protein, 5 aa, synthetic construct
  source 1..5: note = Description of Artificial Sequence: Synthetic peptide; note = XENP020501 vhCDR1
DAWMD

SEQ ID NO: 18698 - protein, 19 aa, synthetic construct
  source 1..19: note = Description of Artificial Sequence: Synthetic peptide; note = XENP020501 vhCDR2
EIRTDANNHATYYAESVKG

SEQ ID NO: 18699 - protein, 10 aa, synthetic construct
  source 1..10: note = Description of Artificial Sequence: Synthetic peptide; note = XENP020501 vhCDR3
LANWDWYFDV

SEQ ID NO: 18700 - protein, 218 aa, synthetic construct; identical to SEQ ID NO: 17590
  source 1..218: note = Description of Artificial Sequence: Synthetic polypeptide; note = XENP020501 7G8_H0.49_L0_IgG1_PVA_/S267K Light Chain

SEQ ID NO: 18701 - protein, 111 aa, synthetic construct; identical to SEQ ID NO: 17591
  source 1..111: note = Description of Artificial Sequence: Synthetic polypeptide; note = VL of XENP020501

SEQ ID NO: 18702 - protein, 15 aa, synthetic construct
  source 1..15: note = Description of Artificial Sequence: Synthetic peptide; note = XENP020501 vlCDR1
KASQSVDYDGDSYMN

SEQ ID NO: 18703 - protein, 7 aa, synthetic construct
  source 1..7: note = Description of Artificial Sequence: Synthetic peptide; note = XENP020501 vlCDR2
AASNLES

SEQ ID NO: 18704 - protein, 9 aa, synthetic construct
  source 1..9: note = Description of Artificial Sequence: Synthetic peptide; note = XENP020501 vlCDR3
QQSNEDPFT

SEQ ID NO: 18705 - protein, 450 aa, synthetic construct
  source 1..450: note = Description of Artificial Sequence: Synthetic polypeptide; note = XENP020502 7G8_H0.50_L0_IgG1_PVA_/S267K Heavy Chain
EVKLEESGGGLVQPGGSMKLSCAASGFTFSDAWMDWVRQSPEKGLEWVAEIRTAANNHATYYAESVKGRFTISRDDSKSSVYLQMNSLRAEDTGIYYCTRLANWDWYFDVWGAGTTVTVSSASTKGPSVFPLAPSSKSTSGGTAALGCLVKDYFPEPVTVSWNSGALTSGVHTFPAVLQSSGLYSLSSVVTVPSSSLGTQTYICNVNHKPSDTKVDKKVEPKSCDKTHTCPPCPAPPVAGPSVFLFPPKPKDTLMISRTPEVTCVVVDVKHEDPEVKFNWYVDGVEVHNAKTKPREEEYNSTYRVVSVLTVLHQDWLNGKEYKCKVSNKALPAPIEKTISKAKGQPREPQVYTLPPSREEMTKNQVSLTCDVSGFYPSDIAVEWESDGQPENNYKTTPPVLDSDGSFFLYSKLTVDKSRWEQGDVFSCSVMHEALHNHYTQKSLSLSPGK

SEQ ID NO: 18706 - protein, 121 aa, synthetic construct
  source 1..121: note = Description of Artificial Sequence: Synthetic polypeptide; note = VH of XENP020502
EVKLEESGGGLVQPGGSMKLSCAASGFTFSDAWMDWVRQSPEKGLEWVAEIRTAANNHATYYAESVKGRFTISRDDSKSSVYLQMNSLRAEDTGIYYCTRLANWDWYFDVWGAGTTVTVSS

SEQ ID NO: 18707 - protein, 5 aa, synthetic construct
  source 1..5: note = Description of Artificial Sequence: Synthetic peptide; note = XENP020502 vhCDR1
DAWMD

SEQ ID NO: 18708 - protein, 19 aa, synthetic construct
  source 1..19: note = Description of Artificial Sequence: Synthetic peptide; note = XENP020502 vhCDR2
EIRTAANNHATYYAESVKG

SEQ ID NO: 18709 - protein, 10 aa, synthetic construct
  source 1..10: note = Description of Artificial Sequence: Synthetic peptide; note = XENP020502 vhCDR3
LANWDWYFDV

SEQ ID NO: 18710 - protein, 218 aa, synthetic construct; identical to SEQ ID NO: 17590
  source 1..218: note = Description of Artificial Sequence: Synthetic polypeptide; note = XENP020502 7G8_H0.50_L0_IgG1_PVA_/S267K Light Chain

SEQ ID NO: 18711 - protein, 111 aa, synthetic construct; identical to SEQ ID NO: 17591
  source 1..111: note = Description of Artificial Sequence: Synthetic polypeptide; note = VL of XENP020502

SEQ ID NO: 18712 - protein, 15 aa, synthetic construct
  source 1..15: note = Description of Artificial Sequence: Synthetic peptide; note = XENP020502 vlCDR1
KASQSVDYDGDSYMN

SEQ ID NO: 18713 - protein, 7 aa, synthetic construct
  source 1..7: note = Description of Artificial Sequence: Synthetic peptide; note = XENP020502 vlCDR2
AASNLES

SEQ ID NO: 18714 - protein, 9 aa, synthetic construct
  source 1..9: note = Description of Artificial Sequence: Synthetic peptide; note = XENP020502 vlCDR3
QQSNEDPFT

SEQ ID NO: 18715 - protein, 450 aa, synthetic construct
  source 1..450: note = Description of Artificial Sequence: Synthetic polypeptide; note = XENP020503 7G8_H0.51_L0_IgG1_PVA_/S267K Heavy Chain
EVKLEESGGGLVQPGGSMKLSCAASGFTFSDAWMDWVRQSPEKGLEWVAEIRTGANNHATYYAESVKGRFTISRDDSKSSVYLQMNSLRAEDTGIYYCTRLANWDWYFDVWGAGTTVTVSSASTKGPSVFPLAPSSKSTSGGTAALGCLVKDYFPEPVTVSWNSGALTSGVHTFPAVLQSSGLYSLSSVVTVPSSSLGTQTYICNVNHKPSDTKVDKKVEPKSCDKTHTCPPCPAPPVAGPSVFLFPPKPKDTLMISRTPEVTCVVVDVKHEDPEVKFNWYVDGVEVHNAKTKPREEEYNSTYRVVSVLTVLHQDWLNGKEYKCKVSNKALPAPIEKTISKAKGQPREPQVYTLPPSREEMTKNQVSLTCDVSGFYPSDIAVEWESDGQPENNYKTTPPVLDSDGSFFLYSKLTVDKSRWEQGDVFSCSVMHEALHNHYTQKSLSLSPGK

SEQ ID NO: 18716 - protein, 121 aa, synthetic construct
  source 1..121: note = Description of Artificial Sequence: Synthetic polypeptide; note = VH of XENP020503
EVKLEESGGGLVQPGGSMKLSCAASGFTFSDAWMDWVRQSPEKGLEWVAEIRTGANNHATYYAESVKGRFTISRDDSKSSVYLQMNSLRAEDTGIYYCTRLANWDWYFDVWGAGTTVTVSS

SEQ ID NO: 18717 - protein, 5 aa, synthetic construct
  source 1..5: note = Description of Artificial Sequence: Synthetic peptide; note = XENP020503 vhCDR1
DAWMD

SEQ ID NO: 18718 - protein, 19 aa, synthetic construct
  source 1..19: note = Description of Artificial Sequence: Synthetic peptide; note = XENP020503 vhCDR2
EIRTGANNHATYYAESVKG

SEQ ID NO: 18719 - protein, 10 aa, synthetic construct
  source 1..10: note = Description of Artificial Sequence: Synthetic peptide; note = XENP020503 vhCDR3
LANWDWYFDV

SEQ ID NO: 18720 - protein, 218 aa, synthetic construct; identical to SEQ ID NO: 17590
  source 1..218: note = Description of Artificial Sequence: Synthetic polypeptide; note = XENP020503 7G8_H0.51_L0_IgG1_PVA_/S267K Light Chain

SEQ ID NO: 18721 - protein, 111 aa, synthetic construct; identical to SEQ ID NO: 17591
  source 1..111: note = Description of Artificial Sequence: Synthetic polypeptide; note = VL of XENP020503

SEQ ID NO: 18722 - protein, 15 aa, synthetic construct
  source 1..15: note = Description of Artificial Sequence: Synthetic peptide; note = XENP020503 vlCDR1
KASQSVDYDGDSYMN

SEQ ID NO: 18723 - protein, 7 aa, synthetic construct
  source 1..7: note = Description of Artificial Sequence: Synthetic peptide; note = XENP020503 vlCDR2
AASNLES

SEQ ID NO: 18724 - protein, 9 aa, synthetic construct
  source 1..9: note = Description of Artificial Sequence: Synthetic peptide; note = XENP020503 vlCDR3
QQSNEDPFT

SEQ ID NO: 18725 - protein, 450 aa, synthetic construct
  source 1..450: note = Description of Artificial Sequence: Synthetic polypeptide; note = XENP020504 7G8_H0.52_L0_IgG1_PVA_/S267K Heavy Chain
EVKLEESGGGLVQPGGSMKLSCAASGFTFSDAWMDWVRQSPEKGLEWVAEIRTYANNHATYYAESVKGRFTISRDDSKSSVYLQMNSLRAEDTGIYYCTRLANWDWYFDVWGAGTTVTVSSASTKGPSVFPLAPSSKSTSGGTAALGCLVKDYFPEPVTVSWNSGALTSGVHTFPAVLQSSGLYSLSSVVTVPSSSLGTQTYICNVNHKPSDTKVDKKVEPKSCDKTHTCPPCPAPPVAGPSVFLFPPKPKDTLMISRTPEVTCVVVDVKHEDPEVKFNWYVDGVEVHNAKTKPREEEYNSTYRVVSVLTVLHQDWLNGKEYKCKVSNKALPAPIEKTISKAKGQPREPQVYTLPPSREEMTKNQVSLTCDVSGFYPSDIAVEWESDGQPENNYKTTPPVLDSDGSFFLYSKLTVDKSRWEQGDVFSCSVMHEALHNHYTQKSLSLSPGK

SEQ ID NO: 18726 - protein, 121 aa, synthetic construct
  source 1..121: note = Description of Artificial Sequence: Synthetic polypeptide; note = VH of XENP020504
EVKLEESGGGLVQPGGSMKLSCAASGFTFSDAWMDWVRQSPEKGLEWVAEIRTYANNHATYYAESVKGRFTISRDDSKSSVYLQMNSLRAEDTGIYYCTRLANWDWYFDVWGAGTTVTVSS

SEQ ID NO: 18727 - protein, 5 aa, synthetic construct
  source 1..5: note = Description of Artificial Sequence: Synthetic peptide; note = XENP020504 vhCDR1
DAWMD

SEQ ID NO: 18728 - protein, 19 aa, synthetic construct
  source 1..19: note = Description of Artificial Sequence: Synthetic peptide; note = XENP020504 vhCDR2
EIRTYANNHATYYAESVKG

SEQ ID NO: 18729 - protein, 10 aa, synthetic construct
  source 1..10: note = Description of Artificial Sequence: Synthetic peptide; note = XENP020504 vhCDR3
LANWDWYFDV

SEQ ID NO: 18730 - protein, 218 aa, synthetic construct; identical to SEQ ID NO: 17590
  source 1..218: note = Description of Artificial Sequence: Synthetic polypeptide; note = XENP020504 7G8_H0.52_L0_IgG1_PVA_/S267K Light Chain

SEQ ID NO: 18731 - protein, 111 aa, synthetic construct; identical to SEQ ID NO: 17591
  source 1..111: note = Description of Artificial Sequence: Synthetic polypeptide; note = VL of XENP020504

SEQ ID NO: 18732 - protein, 15 aa, synthetic construct
  source 1..15: note = Description of Artificial Sequence: Synthetic peptide; note = XENP020504 vlCDR1
KASQSVDYDGDSYMN

SEQ ID NO: 18733 - protein, 7 aa, synthetic construct
  source 1..7: note = Description of Artificial Sequence: Synthetic peptide; note = XENP020504 vlCDR2
AASNLES

SEQ ID NO: 18734 - protein, 9 aa, synthetic construct
  source 1..9: note = Description of Artificial Sequence: Synthetic peptide; note = XENP020504 vlCDR3
QQSNEDPFT

SEQ ID NO: 18735 - protein, 450 aa, synthetic construct
  source 1..450: note = Description of Artificial Sequence: Synthetic polypeptide; note = XENP020505 7G8_H0.53_L0_IgG1_PVA_/S267K Heavy Chain
EVKLEESGGGLVQPGGSMKLSCAASGFTFSDAWMDWVRQSPEKGLEWVAEIRTIANNHATYYAESVKGRFTISRDDSKSSVYLQMNSLRAEDTGIYYCTRLANWDWYFDVWGAGTTVTVSSASTKGPSVFPLAPSSKSTSGGTAALGCLVKDYFPEPVTVSWNSGALTSGVHTFPAVLQSSGLYSLSSVVTVPSSSLGTQTYICNVNHKPSDTKVDKKVEPKSCDKTHTCPPCPAPPVAGPSVFLFPPKPKDTLMISRTPEVTCVVVDVKHEDPEVKFNWYVDGVEVHNAKTKPREEEYNSTYRVVSVLTVLHQDWLNGKEYKCKVSNKALPAPIEKTISKAKGQPREPQVYTLPPSREEMTKNQVSLTCDVSGFYPSDIAVEWESDGQPENNYKTTPPVLDSDGSFFLYSKLTVDKSRWEQGDVFSCSVMHEALHNHYTQKSLSLSPGK

SEQ ID NO: 18736 - protein, 121 aa, synthetic construct
  source 1..121: note = Description of Artificial Sequence: Synthetic polypeptide; note = VH of XENP020505
EVKLEESGGGLVQPGGSMKLSCAASGFTFSDAWMDWVRQSPEKGLEWVAEIRTIANNHATYYAESVKGRFTISRDDSKSSVYLQMNSLRAEDTGIYYCTRLANWDWYFDVWGAGTTVTVSS

SEQ ID NO: 18737 - protein, 5 aa, synthetic construct
  source 1..5: note = Description of Artificial Sequence: Synthetic peptide; note = XENP020505 vhCDR1
DAWMD

SEQ ID NO: 18738 - protein, 19 aa, synthetic construct
  source 1..19: note = Description of Artificial Sequence: Synthetic peptide; note = XENP020505 vhCDR2
EIRTIANNHATYYAESVKG

SEQ ID NO: 18739 - protein, 10 aa, synthetic construct
  source 1..10: note = Description of Artificial Sequence: Synthetic peptide; note = XENP020505 vhCDR3
LANWDWYFDV

SEQ ID NO: 18740 - protein, 218 aa, synthetic construct; identical to SEQ ID NO: 17590
  source 1..218: note = Description of Artificial Sequence: Synthetic polypeptide; note = XENP020505 7G8_H0.53_L0_IgG1_PVA_/S267K Light Chain

SEQ ID NO: 18741 - protein, 111 aa, synthetic construct; identical to SEQ ID NO: 17591
  source 1..111: note = Description of Artificial Sequence: Synthetic polypeptide; note = VL of XENP020505

SEQ ID NO: 18742 - protein, 15 aa, synthetic construct
  source 1..15: note = Description of Artificial Sequence: Synthetic peptide; note = XENP020505 vlCDR1
KASQSVDYDGDSYMN

SEQ ID NO: 18743 - protein, 7 aa, synthetic construct
  source 1..7: note = Description of Artificial Sequence: Synthetic peptide; note = XENP020505 vlCDR2
AASNLES

SEQ ID NO: 18744 - protein, 9 aa, synthetic construct
  source 1..9: note = Description of Artificial Sequence: Synthetic peptide; note = XENP020505 vlCDR3
QQSNEDPFT

SEQ ID NO: 18745 - protein, 450 aa, synthetic construct
  source 1..450: note = Description of Artificial Sequence: Synthetic polypeptide; note = XENP020506 7G8_H0.54_L0_IgG1_PVA_/S267K Heavy Chain
EVKLEESGGGLVQPGGSMKLSCAASGFTFSDAWMDWVRQSPEKGLEWVAEIRTKSNNHATYYAESVKGRFTISRDDSKSSVYLQMNSLRAEDTGIYYCTRLANWDWYFDVWGAGTTVTVSSASTKGPSVFPLAPSSKSTSGGTAALGCLVKDYFPEPVTVSWNSGALTSGVHTFPAVLQSSGLYSLSSVVTVPSSSLGTQTYICNVNHKPSDTKVDKKVEPKSCDKTHTCPPCPAPPVAGPSVFLFPPKPKDTLMISRTPEVTCVVVDVKHEDPEVKFNWYVDGVEVHNAKTKPREEEYNSTYRVVSVLTVLHQDWLNGKEYKCKVSNKALPAPIEKTISKAKGQPREPQVYTLPPSREEMTKNQVSLTCDVSGFYPSDIAVEWESDGQPENNYKTTPPVLDSDGSFFLYSKLTVDKSRWEQGDVFSCSVMHEALHNHYTQKSLSLSPGK

SEQ ID NO: 18746 - protein, 121 aa, synthetic construct
  source 1..121: note = Description of Artificial Sequence: Synthetic polypeptide; note = VH of XENP020506
EVKLEESGGGLVQPGGSMKLSCAASGFTFSDAWMDWVRQSPEKGLEWVAEIRTKSNNHATYYAESVKGRFTISRDDSKSSVYLQMNSLRAEDTGIYYCTRLANWDWYFDVWGAGTTVTVSS

SEQ ID NO: 18747 - protein, 5 aa, synthetic construct
  source 1..5: note = Description of Artificial Sequence: Synthetic peptide; note = XENP020506 vhCDR1
DAWMD

SEQ ID NO: 18748 - protein, 19 aa, synthetic construct
  source 1..19: note = Description of Artificial Sequence: Synthetic peptide; note = XENP020506 vhCDR2
EIRTKSNNHATYYAESVKG

SEQ ID NO: 18749 - protein, 10 aa, synthetic construct
  source 1..10: note = Description of Artificial Sequence: Synthetic peptide; note = XENP020506 vhCDR3
LANWDWYFDV

SEQ ID NO: 18750 - protein, 218 aa, synthetic construct; identical to SEQ ID NO: 17590
  source 1..218: note = Description of Artificial Sequence: Synthetic polypeptide; note = XENP020506 7G8_H0.54_L0_IgG1_PVA_/S267K Light Chain

SEQ ID NO: 18751 - protein, 111 aa, synthetic construct; identical to SEQ ID NO: 17591
  source 1..111: note = Description of Artificial Sequence: Synthetic polypeptide; note = VL of XENP020506

SEQ ID NO: 18752 - protein, 15 aa, synthetic construct
  source 1..15: note = Description of Artificial Sequence: Synthetic peptide; note = XENP020506 vlCDR1
KASQSVDYDGDSYMN

SEQ ID NO: 18753 - protein, 7 aa, synthetic construct
  source 1..7: note = Description of Artificial Sequence: Synthetic peptide; note = XENP020506 vlCDR2
AASNLES

SEQ ID NO: 18754 - protein, 9 aa, synthetic construct
  source 1..9: note = Description of Artificial Sequence: Synthetic peptide; note = XENP020506 vlCDR3
QQSNEDPFT

SEQ ID NO: 18755 - protein, 450 aa, synthetic construct
  source 1..450: note = Description of Artificial Sequence: Synthetic polypeptide; note = XENP020507 7G8_H0.55_L0_IgG1_PVA_/S267K Heavy Chain
EVKLEESGGGLVQPGGSMKLSCAASGFTFSDAWMDWVRQSPEKGLEWVAEIRTKTNNHATYYAESVKGRFTISRDDSKSSVYLQMNSLRAEDTGIYYCTRLANWDWYFDVWGAGTTVTVSSASTKGPSVFPLAPSSKSTSGGTAALGCLVKDYFPEPVTVSWNSGALTSGVHTFPAVLQSSGLYSLSSVVTVPSSSLGTQTYICNVNHKPSDTKVDKKVEPKSCDKTHTCPPCPAPPVAGPSVFLFPPKPKDTLMISRTPEVTCVVVDVKHEDPEVKFNWYVDGVEVHNAKTKPREEEYNSTYRVVSVLTVLHQDWLNGKEYKCKVSNKALPAPIEKTISKAKGQPREPQVYTLPPSREEMTKNQVSLTCDVSGFYPSDIAVEWESDGQPENNYKTTPPVLDSDGSFFLYSKLTVDKSRWEQGDVFSCSVMHEALHNHYTQKSLSLSPGK

SEQ ID NO: 18756 - protein, 121 aa, synthetic construct
  source 1..121: note = Description of Artificial Sequence: Synthetic polypeptide; note = VH of XENP020507
EVKLEESGGGLVQPGGSMKLSCAASGFTFSDAWMDWVRQSPEKGLEWVAEIRTKTNNHATYYAESVKGRFTISRDDSKSSVYLQMNSLRAEDTGIYYCTRLANWDWYFDVWGAGTTVTVSS

SEQ ID NO: 18757 - protein, 5 aa, synthetic construct
  source 1..5: note = Description of Artificial Sequence: Synthetic peptide; note = XENP020507 vhCDR1
DAWMD

SEQ ID NO: 18758 - protein, 19 aa, synthetic construct
  source 1..19: note = Description of Artificial Sequence: Synthetic peptide; note = XENP020507 vhCDR2
EIRTKTNNHATYYAESVKG

SEQ ID NO: 18759 - protein, 10 aa, synthetic construct
  source 1..10: note = Description of Artificial Sequence: Synthetic peptide; note = XENP020507 vhCDR3
LANWDWYFDV

SEQ ID NO: 18760 - protein, 218 aa, synthetic construct; identical to SEQ ID NO: 17590
  source 1..218: note = Description of Artificial Sequence: Synthetic polypeptide; note = XENP020507 7G8_H0.55_L0_IgG1_PVA_/S267K Light Chain

SEQ ID NO: 18761 - protein, 111 aa, synthetic construct; identical to SEQ ID NO: 17591
  source 1..111: note = Description of Artificial Sequence: Synthetic polypeptide; note = VL of XENP020507

SEQ ID NO: 18762 - protein, 15 aa, synthetic construct
  source 1..15: note = Description of Artificial Sequence: Synthetic peptide; note = XENP020507 vlCDR1
KASQSVDYDGDSYMN

SEQ ID NO: 18763 - protein, 7 aa, synthetic construct
  source 1..7: note = Description of Artificial Sequence: Synthetic peptide; note = XENP020507 vlCDR2
AASNLES

SEQ ID NO: 18764 - protein, 9 aa, synthetic construct
  source 1..9: note = Description of Artificial Sequence: Synthetic peptide; note = XENP020507 vlCDR3
QQSNEDPFT

SEQ ID NO: 18765 - protein, 450 aa, synthetic construct
  source 1..450: note = Description of Artificial Sequence: Synthetic polypeptide; note = XENP020508 7G8_H0.56_L0_IgG1_PVA_/S267K Heavy Chain
EVKLEESGGGLVQPGGSMKLSCAASGFTFSDAWMDWVRQSPEKGLEWVAEIRTKGNNHATYYAESVKGRFTISRDDSKSSVYLQMNSLRAEDTGIYYCTRLANWDWYFDVWGAGTTVTVSSASTKGPSVFPLAPSSKSTSGGTAALGCLVKDYFPEPVTVSWNSGALTSGVHTFPAVLQSSGLYSLSSVVTVPSSSLGTQTYICNVNHKPSDTKVDKKVEPKSCDKTHTCPPCPAPPVAGPSVFLFPPKPKDTLMISRTPEVTCVVVDVKHEDPEVKFNWYVDGVEVHNAKTKPREEEYNSTYRVVSVLTVLHQDWLNGKEYKCKVSNKALPAPIEKTISKAKGQPREPQVYTLPPSREEMTKNQVSLTCDVSGFYPSDIAVEWESDGQPENNYKTTPPVLDSDGSFFLYSKLTVDKSRWEQGDVFSCSVMHEALHNHYTQKSLSLSPGK

SEQ ID NO: 18766 - protein, 121 aa, synthetic construct
  source 1..121: note = Description of Artificial Sequence: Synthetic polypeptide; note = VH of XENP020508
EVKLEESGGGLVQPGGSMKLSCAASGFTFSDAWMDWVRQSPEKGLEWVAEIRTKGNNHATYYAESVKGRFTISRDDSKSSVYLQMNSLRAEDTGIYYCTRLANWDWYFDVWGAGTTVTVSS

SEQ ID NO: 18767 - protein, 5 aa, synthetic construct
  source 1..5: note = Description of Artificial Sequence: Synthetic peptide; note = XENP020508 vhCDR1
DAWMD

SEQ ID NO: 18768 - protein, 19 aa, synthetic construct
  source 1..19: note = Description of Artificial Sequence: Synthetic peptide; note = XENP020508 vhCDR2
EIRTKGNNHATYYAESVKG

SEQ ID NO: 18769 - protein, 10 aa, synthetic construct
  source 1..10: note = Description of Artificial Sequence: Synthetic peptide; note = XENP020508 vhCDR3
LANWDWYFDV

SEQ ID NO: 18770 - protein, 218 aa, synthetic construct; identical to SEQ ID NO: 17590
  source 1..218: note = Description of Artificial Sequence: Synthetic polypeptide; note = XENP020508 7G8_H0.56_L0_IgG1_PVA_/S267K Light Chain

SEQ ID NO: 18771 - protein, 111 aa, synthetic construct; identical to SEQ ID NO: 17591
  source 1..111: note = Description of Artificial Sequence: Synthetic polypeptide; note = VL of XENP020508

SEQ ID NO: 18772 - protein, 15 aa, synthetic construct
  source 1..15: note = Description of Artificial Sequence: Synthetic peptide; note = XENP020508 vlCDR1
KASQSVDYDGDSYMN

SEQ ID NO: 18773 - protein, 7 aa, synthetic construct
  source 1..7: note = Description of Artificial Sequence: Synthetic peptide; note = XENP020508 vlCDR2
AASNLES

SEQ ID NO: 18774 - protein, 9 aa, synthetic construct
  source 1..9: note = Description of Artificial Sequence: Synthetic peptide; note = XENP020508 vlCDR3
QQSNEDPFT

SEQ ID NO: 18775 - protein, 450 aa, synthetic construct
  source 1..450: note = Description of Artificial Sequence: Synthetic polypeptide; note = XENP020509 7G8_H0.57_L0_IgG1_PVA_/S267K Heavy Chain
EVKLEESGGGLVQPGGSMKLSCAASGFTFSDAWMDWVRQSPEKGLEWVAEIRTKHNNHATYYAESVKGRFTISRDDSKSSVYLQMNSLRAEDTGIYYCTRLANWDWYFDVWGAGTTVTVSSASTKGPSVFPLAPSSKSTSGGTAALGCLVKDYFPEPVTVSWNSGALTSGVHTFPAVLQSSGLYSLSSVVTVPSSSLGTQTYICNVNHKPSDTKVDKKVEPKSCDKTHTCPPCPAPPVAGPSVFLFPPKPKDTLMISRTPEVTCVVVDVKHEDPEVKFNWYVDGVEVHNAKTKPREEEYNSTYRVVSVLTVLHQDWLNGKEYKCKVSNKALPAPIEKTISKAKGQPREPQVYTLPPSREEMTKNQVSLTCDVSGFYPSDIAVEWESDGQPENNYKTTPPVLDSDGSFFLYSKLTVDKSRWEQGDVFSCSVMHEALHNHYTQKSLSLSPGK

SEQ ID NO: 18776 - protein, 121 aa, synthetic construct
  source 1..121: note = Description of Artificial Sequence: Synthetic polypeptide; note = VH of XENP020509
EVKLEESGGGLVQPGGSMKLSCAASGFTFSDAWMDWVRQSPEKGLEWVAEIRTKHNNHATYYAESVKGRFTISRDDSKSSVYLQMNSLRAEDTGIYYCTRLANWDWYFDVWGAGTTVTVSS

SEQ ID NO: 18777 - protein, 5 aa, synthetic construct
  source 1..5: note = Description of Artificial Sequence: Synthetic peptide; note = XENP020509 vhCDR1
DAWMD

SEQ ID NO: 18778 - protein, 19 aa, synthetic construct
  source 1..19: note = Description of Artificial Sequence: Synthetic peptide; note = XENP020509 vhCDR2
EIRTKHNNHATYYAESVKG

SEQ ID NO: 18779 - protein, 10 aa, synthetic construct
  source 1..10: note = Description of Artificial Sequence: Synthetic peptide; note = XENP020509 vhCDR3
LANWDWYFDV

SEQ ID NO: 18780 - protein, 218 aa, synthetic construct; identical to SEQ ID NO: 17590
  source 1..218: note = Description of Artificial Sequence: Synthetic polypeptide; note = XENP020509 7G8_H0.57_L0_IgG1_PVA_/S267K Light Chain

SEQ ID NO: 18781 - protein, 111 aa, synthetic construct; identical to SEQ ID NO: 17591
  source 1..111: note = Description of Artificial Sequence: Synthetic polypeptide; note = VL of XENP020509

SEQ ID NO: 18782 - protein, 15 aa, synthetic construct
  source 1..15: note = Description of Artificial Sequence: Synthetic peptide; note = XENP020509 vlCDR1
KASQSVDYDGDSYMN

SEQ ID NO: 18783 - protein, 7 aa, synthetic construct
  source 1..7: note = Description of Artificial Sequence: Synthetic peptide; note = XENP020509 vlCDR2
AASNLES

SEQ ID NO: 18784 - protein, 9 aa, synthetic construct
  source 1..9: note = Description of Artificial Sequence: Synthetic peptide; note = XENP020509 vlCDR3
QQSNEDPFT

SEQ ID NO: 18785 - protein, 450 aa, synthetic construct
  source 1..450: note = Description of Artificial Sequence: Synthetic polypeptide; note = XENP020510 7G8_H0.58_L0_IgG1_PVA_/S267K Heavy Chain
EVKLEESGGGLVQPGGSMKLSCAASGFTFSDAWMDWVRQSPEKGLEWVAEIRTKQNNHATYYAESVKGRFTISRDDSKSSVYLQMNSLRAEDTGIYYCTRLANWDWYFDVWGAGTTVTVSSASTKGPSVFPLAPSSKSTSGGTAALGCLVKDYFPEPVTVSWNSGALTSGVHTFPAVLQSSGLYSLSSVVTVPSSSLGTQTYICNVNHKPSDTKVDKKVEPKSCDKTHTCPPCPAPPVAGPSVFLFPPKPKDTLMISRTPEVTCVVVDVKHEDPEVKFNWYVDGVEVHNAKTKPREEEYNSTYRVVSVLTVLHQDWLNGKEYKCKVSNKALPAPIEKTISKAKGQPREPQVYTLPPSREEMTKNQVSLTCDVSGFYPSDIAVEWESDGQPENNYKTTPPVLDSDGSFFLYSKLTVDKSRWEQGDVFSCSVMHEALHNHYTQKSLSLSPGK

SEQ ID NO: 18786 - protein, 121 aa, synthetic construct
  source 1..121: note = Description of Artificial Sequence: Synthetic polypeptide; note = VH of XENP020510
EVKLEESGGGLVQPGGSMKLSCAASGFTFSDAWMDWVRQSPEKGLEWVAEIRTKQNNHATYYAESVKGRFTISRDDSKSSVYLQMNSLRAEDTGIYYCTRLANWDWYFDVWGAGTTVTVSS

SEQ ID NO: 18787 - protein, 5 aa, synthetic construct
  source 1..5: note = Description of Artificial Sequence: Synthetic peptide; note = XENP020510 vhCDR1
DAWMD

SEQ ID NO: 18788 - protein, 19 aa, synthetic construct
  source 1..19: note = Description of Artificial Sequence: Synthetic peptide; note = XENP020510 vhCDR2
EIRTKQNNHATYYAESVKG

SEQ ID NO: 18789 - protein, 10 aa, synthetic construct
  source 1..10: note = Description of Artificial Sequence: Synthetic peptide; note = XENP020510 vhCDR3
LANWDWYFDV

SEQ ID NO: 18790 - protein, 218 aa, synthetic construct; identical to SEQ ID NO: 17590
  source 1..218: note = Description of Artificial Sequence: Synthetic polypeptide; note = XENP020510 7G8_H0.58_L0_IgG1_PVA_/S267K Light Chain

SEQ ID NO: 18791 - protein, 111 aa, synthetic construct; identical to SEQ ID NO: 17591
  source 1..111: note = Description of Artificial Sequence: Synthetic polypeptide; note = VL of XENP020510

SEQ ID NO: 18792 - protein, 15 aa, synthetic construct
  source 1..15: note = Description of Artificial Sequence: Synthetic peptide; note = XENP020510 vlCDR1
KASQSVDYDGDSYMN

SEQ ID NO: 18793 - protein, 7 aa, synthetic construct
  source 1..7: note = Description of Artificial Sequence: Synthetic peptide; note = XENP020510 vlCDR2
AASNLES

SEQ ID NO: 18794 - protein, 9 aa, synthetic construct
  source 1..9: note = Description of Artificial Sequence: Synthetic peptide; note = XENP020510 vlCDR3
QQSNEDPFT

SEQ ID NO: 18795 - protein, 450 aa, synthetic construct
  source 1..450: note = Description of Artificial Sequence: Synthetic polypeptide; note = XENP020511 7G8_H0.59_L0_IgG1_PVA_/S267K Heavy Chain
EVKLEESGGGLVQPGGSMKLSCAASGFTFSDAWMDWVRQSPEKGLEWVAEIRTKDNNHATYYAESVKGRFTISRDDSKSSVYLQMNSLRAEDTGIYYCTRLANWDWYFDVWGAGTTVTVSSASTKGPSVFPLAPSSKSTSGGTAALGCLVKDYFPEPVTVSWNSGALTSGVHTFPAVLQSSGLYSLSSVVTVPSSSLGTQTYICNVNHKPSDTKVDKKVEPKSCDKTHTCPPCPAPPVAGPSVFLFPPKPKDTLMISRTPEVTCVVVDVKHEDPEVKFNWYVDGVEVHNAKTKPREEEYNSTYRVVSVLTVLHQDWLNGKEYKCKVSNKALPAPIEKTISKAKGQPREPQVYTLPPSREEMTKNQVSLTCDVSGFYPSDIAVEWESDGQPENNYKTTPPVLDSDGSFFLYSKLTVDKSRWEQGDVFSCSVMHEALHNHYTQKSLSLSPGK

SEQ ID NO: 18796 - protein, 121 aa, synthetic construct
  source 1..121: note = Description of Artificial Sequence: Synthetic polypeptide; note = VH of XENP020511
EVKLEESGGGLVQPGGSMKLSCAASGFTFSDAWMDWVRQSPEKGLEWVAEIRTKDNNHATYYAESVKGRFTISRDDSKSSVYLQMNSLRAEDTGIYYCTRLANWDWYFDVWGAGTTVTVSS

SEQ ID NO: 18797 - protein, 5 aa, synthetic construct
  source 1..5: note = Description of Artificial Sequence: Synthetic peptide; note = XENP020511 vhCDR1
DAWMD

SEQ ID NO: 18798 - protein, 19 aa, synthetic construct
  source 1..19: note = Description of Artificial Sequence: Synthetic peptide; note = XENP020511 vhCDR2
EIRTKDNNHATYYAESVKG

SEQ ID NO: 18799 - protein, 10 aa, synthetic construct
  source 1..10: note = Description of Artificial Sequence: Synthetic peptide; note = XENP020511 vhCDR3
LANWDWYFDV

SEQ ID NO: 18800 - protein, 218 aa, synthetic construct; identical to SEQ ID NO: 17590
  source 1..218: note = Description of Artificial Sequence: Synthetic polypeptide; note = XENP020511 7G8_H0.59_L0_IgG1_PVA_/S267K Light Chain

SEQ ID NO: 18801 - protein, 111 aa, synthetic construct; identical to SEQ ID NO: 17591
  source 1..111: note = Description of Artificial Sequence: Synthetic polypeptide; note = VL of XENP020511

SEQ ID NO: 18802 - protein, 15 aa, synthetic construct
  source 1..15: note = Description of Artificial Sequence: Synthetic peptide; note = XENP020511 vlCDR1
KASQSVDYDGDSYMN

SEQ ID NO: 18803 - protein, 7 aa, synthetic construct
  source 1..7: note = Description of Artificial Sequence: Synthetic peptide; note = XENP020511 vlCDR2
AASNLES

SEQ ID NO: 18804 - protein, 9 aa, synthetic construct
  source 1..9: note = Description of Artificial Sequence: Synthetic peptide; note = XENP020511 vlCDR3
QQSNEDPFT

SEQ ID NO: 18805 - protein, 450 aa, synthetic construct
  source 1..450: note = Description of Artificial Sequence: Synthetic polypeptide; note = XENP020512 7G8_H0.60_L0_IgG1_PVA_/S267K Heavy Chain
EVKLEESGGGLVQPGGSMKLSCAASGFTFSDAWMDWVRQSPEKGLEWVAEIRTKLNNHATYYAESVKGRFTISRDDSKSSVYLQMNSLRAEDTGIYYCTRLANWDWYFDVWGAGTTVTVSSASTKGPSVFPLAPSSKSTSGGTAALGCLVKDYFPEPVTVSWNSGALTSGVHTFPAVLQSSGLYSLSSVVTVPSSSLGTQTYICNVNHKPSDTKVDKKVEPKSCDKTHTCPPCPAPPVAGPSVFLFPPKPKDTLMISRTPEVTCVVVDVKHEDPEVKFNWYVDGVEVHNAKTKPREEEYNSTYRVVSVLTVLHQDWLNGKEYKCKVSNKALPAPIEKTISKAKGQPREPQVYTLPPSREEMTKNQVSLTCDVSGFYPSDIAVEWESDGQPENNYKTTPPVLDSDGSFFLYSKLTVDKSRWEQGDVFSCSVMHEALHNHYTQKSLSLSPGK

SEQ ID NO: 18806 - protein, 121 aa, synthetic construct
  source 1..121: note = Description of Artificial Sequence: Synthetic polypeptide; note = VH of XENP020512
EVKLEESGGGLVQPGGSMKLSCAASGFTFSDAWMDWVRQSPEKGLEWVAEIRTKLNNHATYYAESVKGRFTISRDDSKSSVYLQMNSLRAEDTGIYYCTRLANWDWYFDVWGAGTTVTVSS

SEQ ID NO: 18807 - protein, 5 aa, synthetic construct
  source 1..5: note = Description of Artificial Sequence: Synthetic peptide; note = XENP020512 vhCDR1
DAWMD

SEQ ID NO: 18808 - protein, 19 aa, synthetic construct
  source 1..19: note = Description of Artificial Sequence: Synthetic peptide; note = XENP020512 vhCDR2
EIRTKLNNHATYYAESVKG

SEQ ID NO: 18809 - protein, 10 aa, synthetic construct
  source 1..10: note = Description of Artificial Sequence: Synthetic peptide; note = XENP020512 vhCDR3
LANWDWYFDV

SEQ ID NO: 18810 - protein, 218 aa, synthetic construct; identical to SEQ ID NO: 17590
  source 1..218: note = Description of Artificial Sequence: Synthetic polypeptide; note = XENP020512 7G8_H0.60_L0_IgG1_PVA_/S267K Light Chain

SEQ ID NO: 18811 - protein, 111 aa, synthetic construct; identical to SEQ ID NO: 17591
  source 1..111: note = Description of Artificial Sequence: Synthetic polypeptide; note = VL of XENP020512

SEQ ID NO: 18812 - protein, 15 aa, synthetic construct
  source 1..15: note = Description of Artificial Sequence: Synthetic peptide; note = XENP020512 vlCDR1
KASQSVDYDGDSYMN

SEQ ID NO: 18813 - protein, 7 aa, synthetic construct
  source 1..7: note = Description of Artificial Sequence: Synthetic peptide; note = XENP020512 vlCDR2
AASNLES

SEQ ID NO: 18814 - protein, 9 aa, synthetic construct
  source 1..9: note = Description of Artificial Sequence: Synthetic peptide; note = XENP020512 vlCDR3
QQSNEDPFT

SEQ ID NO: 18815 - protein, 450 aa, synthetic construct
  source 1..450: note = Description of Artificial Sequence: Synthetic polypeptide; note = XENP020513 7G8_H0.61_L0_IgG1_PVA_/S267K Heavy Chain
EVKLEESGGGLVQPGGSMKLSCAASGFTFSDAWMDWVRQSPEKGLEWVAEIRTKKNNHATYYAESVKGRFTISRDDSKSSVYLQMNSLRAEDTGIYYCTRLANWDWYFDVWGAGTTVTVSSASTKGPSVFPLAPSSKSTSGGTAALGCLVKDYFPEPVTVSWNSGALTSGVHTFPAVLQSSGLYSLSSVVTVPSSSLGTQTYICNVNHKPSDTKVDKKVEPKSCDKTHTCPPCPAPPVAGPSVFLFPPKPKDTLMISRTPEVTCVVVDVKHEDPEVKFNWYVDGVEVHNAKTKPREEEYNSTYRVVSVLTVLHQDWLNGKEYKCKVSNKALPAPIEKTISKAKGQPREPQVYTLPPSREEMTKNQVSLTCDVSGFYPSDIAVEWESDGQPENNYKTTPPVLDSDGSFFLYSKLTVDKSRWEQGDVFSCSVMHEALHNHYTQKSLSLSPGK

SEQ ID NO: 18816 - protein, 121 aa, synthetic construct
  source 1..121: note = Description of Artificial Sequence: Synthetic polypeptide; note = VH of XENP020513
EVKLEESGGGLVQPGGSMKLSCAASGFTFSDAWMDWVRQSPEKGLEWVAEIRTKKNNHATYYAESVKGRFTISRDDSKSSVYLQMNSLRAEDTGIYYCTRLANWDWYFDVWGAGTTVTVSS

SEQ ID NO: 18817 - protein, 5 aa, synthetic construct
  source 1..5: note = Description of Artificial Sequence: Synthetic peptide; note = XENP020513 vhCDR1
DAWMD

SEQ ID NO: 18818 - protein, 19 aa, synthetic construct
  source 1..19: note = Description of Artificial Sequence: Synthetic peptide; note = XENP020513 vhCDR2
EIRTKKNNHATYYAESVKG

SEQ ID NO: 18819 - protein, 10 aa, synthetic construct
  source 1..10: note = Description of Artificial Sequence: Synthetic peptide; note = XENP020513 vhCDR3
LANWDWYFDV

SEQ ID NO: 18820 - protein, 218 aa, synthetic construct; identical to SEQ ID NO: 17590
  source 1..218: note = Description of Artificial Sequence: Synthetic polypeptide; note = XENP020513 7G8_H0.61_L0_IgG1_PVA_/S267K Light Chain

SEQ ID NO: 18821 - protein, 111 aa, synthetic construct; identical to SEQ ID NO: 17591
  source 1..111: note = Description of Artificial Sequence: Synthetic polypeptide; note = VL of XENP020513

SEQ ID NO: 18822 - protein, 15 aa, synthetic construct
  source 1..15: note = Description of Artificial Sequence: Synthetic peptide; note = XENP020513 vlCDR1
KASQSVDYDGDSYMN

SEQ ID NO: 18823 - protein, 7 aa, synthetic construct
  source 1..7: note = Description of Artificial Sequence: Synthetic peptide; note = XENP020513 vlCDR2
AASNLES

SEQ ID NO: 18824 - protein, 9 aa, synthetic construct
  source 1..9: note = Description of Artificial Sequence: Synthetic peptide; note = XENP020513 vlCDR3
QQSNEDPFT

SEQ ID NO: 18825 - protein, 450 aa, synthetic construct
  source 1..450: note = Description of Artificial Sequence: Synthetic polypeptide; note = XENP020514 7G8_H0.62_L0_IgG1_PVA_/S267K Heavy Chain
EVKLEESGGGLVQPGGSMKLSCAASGFTFSDAWMDWVRQSPEKGLEWVAEIRTKYNNHATYYAESVKGRFTISRDDSKSSVYLQMNSLRAEDTGIYYCTRLANWDWYFDVWGAGTTVTVSSASTKGPSVFPLAPSSKSTSGGTAALGCLVKDYFPEPVTVSWNSGALTSGVHTFPAVLQSSGLYSLSSVVTVPSSSLGTQTYICNVNHKPSDTKVDKKVEPKSCDKTHTCPPCPAPPVAGPSVFLFPPKPKDTLMISRTPEVTCVVVDVKHEDPEVKFNWYVDGVEVHNAKTKPREEEYNSTYRVVSVLTVLHQDWLNGKEYKCKVSNKALPAPIEKTISKAKGQPREPQVYTLPPSREEMTKNQVSLTCDVSGFYPSDIAVEWESDGQPENNYKTTPPVLDSDGSFFLYSKLTVDKSRWEQGDVFSCSVMHEALHNHYTQKSLSLSPGK

SEQ ID NO: 18826 - protein, 121 aa, synthetic construct
  source 1..121: note = Description of Artificial Sequence: Synthetic polypeptide; note = VH of XENP020514
EVKLEESGGGLVQPGGSMKLSCAASGFTFSDAWMDWVRQSPEKGLEWVAEIRTKYNNHATYYAESVKGRFTISRDDSKSSVYLQMNSLRAEDTGIYYCTRLANWDWYFDVWGAGTTVTVSS

SEQ ID NO: 18827 - protein, 5 aa, synthetic construct
  source 1..5: note = Description of Artificial Sequence: Synthetic peptide; note = XENP020514 vhCDR1
DAWMD

SEQ ID NO: 18828 - protein, 19 aa, synthetic construct
  source 1..19: note = Description of Artificial Sequence: Synthetic peptide; note = XENP020514 vhCDR2
EIRTKYNNHATYYAESVKG

SEQ ID NO: 18829 - protein, 10 aa, synthetic construct
  source 1..10: note = Description of Artificial Sequence: Synthetic peptide; note = XENP020514 vhCDR3
LANWDWYFDV

SEQ ID NO: 18830 - protein, 218 aa, synthetic construct; identical to SEQ ID NO: 17590
  source 1..218: note = Description of Artificial Sequence: Synthetic polypeptide; note = XENP020514 7G8_H0.62_L0_IgG1_PVA_/S267K Light Chain

SEQ ID NO: 18831 - protein, 111 aa, synthetic construct; identical to SEQ ID NO: 17591
  source 1..111: note = Description of Artificial Sequence: Synthetic polypeptide; note = VL of XENP020514

SEQ ID NO: 18832 - protein, 15 aa, synthetic construct
  source 1..15: note = Description of Artificial Sequence: Synthetic peptide; note = XENP020514 vlCDR1
KASQSVDYDGDSYMN

SEQ ID NO: 18833 - protein, 7 aa, synthetic construct
  source 1..7: note = Description of Artificial Sequence: Synthetic peptide; note = XENP020514 vlCDR2
AASNLES

SEQ ID NO: 18834 - protein, 9 aa, synthetic construct
  source 1..9: note = Description of Artificial Sequence: Synthetic peptide; note = XENP020514 vlCDR3
QQSNEDPFT

SEQ ID NO: 18835 - protein, 450 aa, synthetic construct
  source 1..450: note = Description of Artificial Sequence: Synthetic polypeptide; note = XENP020515 7G8_H0.63_L0_IgG1_PVA_/S267K Heavy Chain
EVKLEESGGGLVQPGGSMKLSCAASGFTFSDAWMDWVRQSPEKGLEWVAEIRTKADNHATYYAESVKGRFTISRDDSKSSVYLQMNSLRAEDTGIYYCTRLANWDWYFDVWGAGTTVTVSSASTKGPSVFPLAPSSKSTSGGTAALGCLVKDYFPEPVTVSWNSGALTSGVHTFPAVLQSSGLYSLSSVVTVPSSSLGTQTYICNVNHKPSDTKVDKKVEPKSCDKTHTCPPCPAPPVAGPSVFLFPPKPKDTLMISRTPEVTCVVVDVKHEDPEVKFNWYVDGVEVHNAKTKPREEEYNSTYRVVSVLTVLHQDWLNGKEYKCKVSNKALPAPIEKTISKAKGQPREPQVYTLPPSREEMTKNQVSLTCDVSGFYPSDIAVEWESDGQPENNYKTTPPVLDSDGSFFLYSKLTVDKSRWEQGDVFSCSVMHEALHNHYTQKSLSLSPGK

SEQ ID NO: 18836 - protein, 121 aa, synthetic construct
  source 1..121: note = Description of Artificial Sequence: Synthetic polypeptide; note = VH of XENP020515
EVKLEESGGGLVQPGGSMKLSCAASGFTFSDAWMDWVRQSPEKGLEWVAEIRTKADNHATYYAESVKGRFTISRDDSKSSVYLQMNSLRAEDTGIYYCTRLANWDWYFDVWGAGTTVTVSS

SEQ ID NO: 18837 - protein, 5 aa, synthetic construct
  source 1..5: note = Description of Artificial Sequence: Synthetic peptide; note = XENP020515 vhCDR1
DAWMD

SEQ ID NO: 18838 - protein, 19 aa, synthetic construct
  source 1..19: note = Description of Artificial Sequence: Synthetic peptide; note = XENP020515 vhCDR2
EIRTKADNHATYYAESVKG

SEQ ID NO: 18839 - protein, 10 aa, synthetic construct
  source 1..10: note = Description of Artificial Sequence: Synthetic peptide; note = XENP020515 vhCDR3
LANWDWYFDV

SEQ ID NO: 18840 - protein, 218 aa, synthetic construct; identical to SEQ ID NO: 17590
  source 1..218: note = Description of Artificial Sequence: Synthetic polypeptide; note = XENP020515 7G8_H0.63_L0_IgG1_PVA_/S267K Light Chain

SEQ ID NO: 18841 - protein, 111 aa, synthetic construct; identical to SEQ ID NO: 17591
  source 1..111: note = Description of Artificial Sequence: Synthetic polypeptide; note = VL of XENP020515

SEQ ID NO: 18842 - protein, 15 aa, synthetic construct
  source 1..15: note = Description of Artificial Sequence: Synthetic peptide; note = XENP020515 vlCDR1
KASQSVDYDGDSYMN

SEQ ID NO: 18843 - protein, 7 aa, synthetic construct
  source 1..7: note = Description of Artificial Sequence: Synthetic peptide; note = XENP020515 vlCDR2
AASNLES

SEQ ID NO: 18844 - protein, 9 aa, synthetic construct
  source 1..9: note = Description of Artificial Sequence: Synthetic peptide; note = XENP020515 vlCDR3
QQSNEDPFT

SEQ ID NO: 18845 - protein, 450 aa, synthetic construct
  source 1..450: note = Description of Artificial Sequence: Synthetic polypeptide; note = XENP020516 7G8_H0.64_L0_IgG1_PVA_/S267K Heavy Chain
EVKLEESGGGLVQPGGSMKLSCAASGFTFSDAWMDWVRQSPEKGLEWVAEIRTKAHNHATYYAESVKGRFTISRDDSKSSVYLQMNSLRAEDTGIYYCTRLANWDWYFDVWGAGTTVTVSSASTKGPSVFPLAPSSKSTSGGTAALGCLVKDYFPEPVTVSWNSGALTSGVHTFPAVLQSSGLYSLSSVVTVPSSSLGTQTYICNVNHKPSDTKVDKKVEPKSCDKTHTCPPCPAPPVAGPSVFLFPPKPKDTLMISRTPEVTCVVVDVKHEDPEVKFNWYVDGVEVHNAKTKPREEEYNSTYRVVSVLTVLHQDWLNGKEYKCKVSNKALPAPIEKTISKAKGQPREPQVYTLPPSREEMTKNQVSLTCDVSGFYPSDIAVEWESDGQPENNYKTTPPVLDSDGSFFLYSKLTVDKSRWEQGDVFSCSVMHEALHNHYTQKSLSLSPGK

SEQ ID NO: 18846 - protein, 121 aa, synthetic construct
  source 1..121: note = Description of Artificial Sequence: Synthetic polypeptide; note = VH of XENP020516
EVKLEESGGGLVQPGGSMKLSCAASGFTFSDAWMDWVRQSPEKGLEWVAEIRTKAHNHATYYAESVKGRFTISRDDSKSSVYLQMNSLRAEDTGIYYCTRLANWDWYFDVWGAGTTVTVSS

SEQ ID NO: 18847 - protein, 5 aa, synthetic construct
  source 1..5: note = Description of Artificial Sequence: Synthetic peptide; note = XENP020516 vhCDR1
DAWMD

SEQ ID NO: 18848 - protein, 19 aa, synthetic construct
  source 1..19: note = Description of Artificial Sequence: Synthetic peptide; note = XENP020516 vhCDR2
EIRTKAHNHATYYAESVKG

SEQ ID NO: 18849 - protein, 10 aa, synthetic construct
  source 1..10: note = Description of Artificial Sequence: Synthetic peptide; note = XENP020516 vhCDR3
LANWDWYFDV

SEQ ID NO: 18850 - protein, 218 aa, synthetic construct; identical to SEQ ID NO: 17590
  source 1..218: note = Description of Artificial Sequence: Synthetic polypeptide; note = XENP020516 7G8_H0.64_L0_IgG1_PVA_/S267K Light Chain

SEQ ID NO: 18851 - protein, 111 aa, synthetic construct; identical to SEQ ID NO: 17591
  source 1..111: note = Description of Artificial Sequence: Synthetic polypeptide; note = VL of XENP020516

SEQ ID NO: 18852 - protein, 15 aa, synthetic construct
  source 1..15: note = Description of Artificial Sequence: Synthetic peptide; note = XENP020516 vlCDR1
KASQSVDYDGDSYMN

SEQ ID NO: 18853 - protein, 7 aa, synthetic construct
  source 1..7: note = Description of Artificial Sequence: Synthetic peptide; note = XENP020516 vlCDR2
AASNLES

SEQ ID NO: 18854 - protein, 9 aa, synthetic construct
  source 1..9: note = Description of Artificial Sequence: Synthetic peptide; note = XENP020516 vlCDR3
QQSNEDPFT

SEQ ID NO: 18855 - protein, 450 aa, synthetic construct
  source 1..450: note = Description of Artificial Sequence: Synthetic polypeptide; note = XENP020517 7G8_H0.65_L0_IgG1_PVA_/S267K Heavy Chain
EVKLEESGGGLVQPGGSMKLSCAASGFTFSDAWMDWVRQSPEKGLEWVAEIRTKAENHATYYAESVKGRFTISRDDSKSSVYLQMNSLRAEDTGIYYCTRLANWDWYFDVWGAGTTVTVSSASTKGPSVFPLAPSSKSTSGGTAALGCLVKDYFPEPVTVSWNSGALTSGVHTFPAVLQSSGLYSLSSVVTVPSSSLGTQTYICNVNHKPSDTKVDKKVEPKSCDKTHTCPPCPAPPVAGPSVFLFPPKPKDTLMISRTPEVTCVVVDVKHEDPEVKFNWYVDGVEVHNAKTKPREEEYNSTYRVVSVLTVLHQDWLNGKEYKCKVSNKALPAPIEKTISKAKGQPREPQVYTLPPSREEMTKNQVSLTCDVSGFYPSDIAVEWESDGQPENNYKTTPPVLDSDGSFFLYSKLTVDKSRWEQGDVFSCSVMHEALHNHYTQKSLSLSPGK

SEQ ID NO: 18856 - protein, 121 aa, synthetic construct
  source 1..121: note = Description of Artificial Sequence: Synthetic polypeptide; note = VH of XENP020517
EVKLEESGGGLVQPGGSMKLSCAASGFTFSDAWMDWVRQSPEKGLEWVAEIRTKAENHATYYAESVKGRFTISRDDSKSSVYLQMNSLRAEDTGIYYCTRLANWDWYFDVWGAGTTVTVSS

SEQ ID NO: 18857 - protein, 5 aa, synthetic construct
  source 1..5: note = Description of Artificial Sequence: Synthetic peptide; note = XENP020517 vhCDR1
DAWMD

SEQ ID NO: 18858 - protein, 19 aa, synthetic construct
  source 1..19: note = Description of Artificial Sequence: Synthetic peptide; note = XENP020517 vhCDR2
EIRTKAENHATYYAESVKG

SEQ ID NO: 18859 - protein, 10 aa, synthetic construct
  source 1..10: note = Description of Artificial Sequence: Synthetic peptide; note = XENP020517 vhCDR3
LANWDWYFDV

SEQ ID NO: 18860 - protein, 218 aa, synthetic construct; identical to SEQ ID NO: 17590
  source 1..218: note = Description of Artificial Sequence: Synthetic polypeptide; note = XENP020517 7G8_H0.65_L0_IgG1_PVA_/S267K Light Chain

SEQ ID NO: 18861 - protein, 111 aa, synthetic construct; identical to SEQ ID NO: 17591
  source 1..111: note = Description of Artificial Sequence: Synthetic polypeptide; note = VL of XENP020517

SEQ ID NO: 18862 - protein, 15 aa, synthetic construct
  source 1..15: note = Description of Artificial Sequence: Synthetic peptide; note = XENP020517 vlCDR1
KASQSVDYDGDSYMN

SEQ ID NO: 18863 - protein, 7 aa, synthetic construct
  source 1..7: note = Description of Artificial Sequence: Synthetic peptide; note = XENP020517 vlCDR2
AASNLES

SEQ ID NO: 18864 - protein, 9 aa, synthetic construct
  source 1..9: note = Description of Artificial Sequence: Synthetic peptide; note = XENP020517 vlCDR3
QQSNEDPFT

SEQ ID NO: 18865 - protein, 450 aa, synthetic construct
  source 1..450: note = Description of Artificial Sequence: Synthetic polypeptide; note = XENP020518 7G8_H0.66_L0_IgG1_PVA_/S267K Heavy Chain
EVKLEESGGGLVQPGGSMKLSCAASGFTFSDAWMDWVRQSPEKGLEWVAEIRTKASNHATYYAESVKGRFTISRDDSKSSVYLQMNSLRAEDTGIYYCTRLANWDWYFDVWGAGTTVTVSSASTKGPSVFPLAPSSKSTSGGTAALGCLVKDYFPEPVTVSWNSGALTSGVHTFPAVLQSSGLYSLSSVVTVPSSSLGTQTYICNVNHKPSDTKVDKKVEPKSCDKTHTCPPCPAPPVAGPSVFLFPPKPKDTLMISRTPEVTCVVVDVKHEDPEVKFNWYVDGVEVHNAKTKPREEEYNSTYRVVSVLTVLHQDWLNGKEYKCKVSNKALPAPIEKTISKAKGQPREPQVYTLPPSREEMTKNQVSLTCDVSGFYPSDIAVEWESDGQPENNYKTTPPVLDSDGSFFLYSKLTVDKSRWEQGDVFSCSVMHEALHNHYTQKSLSLSPGK

SEQ ID NO: 18866 - protein, 121 aa, synthetic construct
  source 1..121: note = Description of Artificial Sequence: Synthetic polypeptide; note = VH of XENP020518
EVKLEESGGGLVQPGGSMKLSCAASGFTFSDAWMDWVRQSPEKGLEWVAEIRTKASNHATYYAESVKGRFTISRDDSKSSVYLQMNSLRAEDTGIYYCTRLANWDWYFDVWGAGTTVTVSS

SEQ ID NO: 18867 - protein, 5 aa, synthetic construct
  source 1..5: note = Description of Artificial Sequence: Synthetic peptide; note = XENP020518 vhCDR1
DAWMD

SEQ ID NO: 18868 - protein, 19 aa, synthetic construct
  source 1..19: note = Description of Artificial Sequence: Synthetic peptide; note = XENP020518 vhCDR2
EIRTKASNHATYYAESVKG

SEQ ID NO: 18869 - protein, 10 aa, synthetic construct
  source 1..10: note = Description of Artificial Sequence: Synthetic peptide; note = XENP020518 vhCDR3
LANWDWYFDV

SEQ ID NO: 18870 - protein, 218 aa, synthetic construct; identical to SEQ ID NO: 17590
  source 1..218: note = Description of Artificial Sequence: Synthetic polypeptide; note = XENP020518 7G8_H0.66_L0_IgG1_PVA_/S267K Light Chain

SEQ ID NO: 18871 - protein, 111 aa, synthetic construct; identical to SEQ ID NO: 17591
  source 1..111: note = Description of Artificial Sequence: Synthetic polypeptide; note = VL of XENP020518

SEQ ID NO: 18872 - protein, 15 aa, synthetic construct
  source 1..15: note = Description of Artificial Sequence: Synthetic peptide; note = XENP020518 vlCDR1
KASQSVDYDGDSYMN

SEQ ID NO: 18873 - protein, 7 aa, synthetic construct
  source 1..7: note = Description of Artificial Sequence: Synthetic peptide; note = XENP020518 vlCDR2
AASNLES

SEQ ID NO: 18874 - protein, 9 aa, synthetic construct
  source 1..9: note = Description of Artificial Sequence: Synthetic peptide; note = XENP020518 vlCDR3
QQSNEDPFT

SEQ ID NO: 18875 - protein, 450 aa, synthetic construct
  source 1..450: note = Description of Artificial Sequence: Synthetic polypeptide; note = XENP020519 7G8_H0.67_L0_IgG1_PVA_/S267K Heavy Chain
EVKLEESGGGLVQPGGSMKLSCAASGFTFSDAWMDWVRQSPEKGLEWVAEIRTKARNHATYYAESVKGRFTISRDDSKSSVYLQMNSLRAEDTGIYYCTRLANWDWYFDVWGAGTTVTVSSASTKGPSVFPLAPSSKSTSGGTAALGCLVKDYFPEPVTVSWNSGALTSGVHTFPAVLQSSGLYSLSSVVTVPSSSLGTQTYICNVNHKPSDTKVDKKVEPKSCDKTHTCPPCPAPPVAGPSVFLFPPKPKDTLMISRTPEVTCVVVDVKHEDPEVKFNWYVDGVEVHNAKTKPREEEYNSTYRVVSVLTVLHQDWLNGKEYKCKVSNKALPAPIEKTISKAKGQPREPQVYTLPPSREEMTKNQVSLTCDVSGFYPSDIAVEWESDGQPENNYKTTPPVLDSDGSFFLYSKLTVDKSRWEQGDVFSCSVMHEALHNHYTQKSLSLSPGK

SEQ ID NO: 18876 - protein, 121 aa, synthetic construct
  source 1..121: note = Description of Artificial Sequence: Synthetic polypeptide; note = VH of XENP020519
EVKLEESGGGLVQPGGSMKLSCAASGFTFSDAWMDWVRQSPEKGLEWVAEIRTKARNHATYYAESVKGRFTISRDDSKSSVYLQMNSLRAEDTGIYYCTRLANWDWYFDVWGAGTTVTVSS

SEQ ID NO: 18877 - protein, 5 aa, synthetic construct
  source 1..5: note = Description of Artificial Sequence: Synthetic peptide; note = XENP020519 vhCDR1
DAWMD

SEQ ID NO: 18878 - protein, 19 aa, synthetic construct
  source 1..19: note = Description of Artificial Sequence: Synthetic peptide; note = XENP020519 vhCDR2
EIRTKARNHATYYAESVKG

SEQ ID NO: 18879 - protein, 10 aa, synthetic construct
  source 1..10: note = Description of Artificial Sequence: Synthetic peptide; note = XENP020519 vhCDR3
LANWDWYFDV

SEQ ID NO: 18880 - protein, 218 aa, synthetic construct; identical to SEQ ID NO: 17590
  source 1..218: note = Description of Artificial Sequence: Synthetic polypeptide; note = XENP020519 7G8_H0.67_L0_IgG1_PVA_/S267K Light Chain

SEQ ID NO: 18881 - protein, 111 aa, synthetic construct; identical to SEQ ID NO: 17591
  source 1..111: note = Description of Artificial Sequence: Synthetic polypeptide; note = VL of XENP020519

SEQ ID NO: 18882 - protein, 15 aa, synthetic construct
  source 1..15: note = Description of Artificial Sequence: Synthetic peptide; note = XENP020519 vlCDR1
KASQSVDYDGDSYMN

SEQ ID NO: 18883 - protein, 7 aa, synthetic construct
  source 1..7: note = Description of Artificial Sequence: Synthetic peptide; note = XENP020519 vlCDR2
AASNLES

SEQ ID NO: 18884 - protein, 9 aa, synthetic construct
  source 1..9: note = Description of Artificial Sequence: Synthetic peptide; note = XENP020519 vlCDR3
QQSNEDPFT

SEQ ID NO: 18885 - protein, 450 aa, synthetic construct
  source 1..450: note = Description of Artificial Sequence: Synthetic polypeptide; note = XENP020520 7G8_H0.68_L0_IgG1_PVA_/S267K Heavy Chain
EVKLEESGGGLVQPGGSMKLSCAASGFTFSDAWMDWVRQSPEKGLEWVAEIRTKALNHATYYAESVKGRFTISRDDSKSSVYLQMNSLRAEDTGIYYCTRLANWDWYFDVWGAGTTVTVSSASTKGPSVFPLAPSSKSTSGGTAALGCLVKDYFPEPVTVSWNSGALTSGVHTFPAVLQSSGLYSLSSVVTVPSSSLGTQTYICNVNHKPSDTKVDKKVEPKSCDKTHTCPPCPAPPVAGPSVFLFPPKPKDTLMISRTPEVTCVVVDVKHEDPEVKFNWYVDGVEVHNAKTKPREEEYNSTYRVVSVLTVLHQDWLNGKEYKCKVSNKALPAPIEKTISKAKGQPREPQVYTLPPSREEMTKNQVSLTCDVSGFYPSDIAVEWESDGQPENNYKTTPPVLDSDGSFFLYSKLTVDKSRWEQGDVFSCSVMHEALHNHYTQKSLSLSPGK

SEQ ID NO: 18886 - protein, 121 aa, synthetic construct
  source 1..121: note = Description of Artificial Sequence: Synthetic polypeptide; note = VH of XENP020520
EVKLEESGGGLVQPGGSMKLSCAASGFTFSDAWMDWVRQSPEKGLEWVAEIRTKALNHATYYAESVKGRFTISRDDSKSSVYLQMNSLRAEDTGIYYCTRLANWDWYFDVWGAGTTVTVSS

SEQ ID NO: 18887 - protein, 5 aa, synthetic construct
  source 1..5: note = Description of Artificial Sequence: Synthetic peptide; note = XENP020520 vhCDR1
DAWMD

SEQ ID NO: 18888 - protein, 19 aa, synthetic construct
  source 1..19: note = Description of Artificial Sequence: Synthetic peptide; note = XENP020520 vhCDR2
EIRTKALNHATYYAESVKG

SEQ ID NO: 18889 - protein, 10 aa, synthetic construct
  source 1..10: note = Description of Artificial Sequence: Synthetic peptide; note = XENP020520 vhCDR3
LANWDWYFDV

SEQ ID NO: 18890 - protein, 218 aa, synthetic construct; identical to SEQ ID NO: 17590
  source 1..218: note = Description of Artificial Sequence: Synthetic polypeptide; note = XENP020520 7G8_H0.68_L0_IgG1_PVA_/S267K Light Chain

SEQ ID NO: 18891 - protein, 111 aa, synthetic construct; identical to SEQ ID NO: 17591
  source 1..111: note = Description of Artificial Sequence: Synthetic polypeptide; note = VL of XENP020520

SEQ ID NO: 18892 - protein, 15 aa, synthetic construct
  source 1..15: note = Description of Artificial Sequence: Synthetic peptide; note = XENP020520 vlCDR1
KASQSVDYDGDSYMN

SEQ ID NO: 18893 - protein, 7 aa, synthetic construct
  source 1..7: note = Description of Artificial Sequence: Synthetic peptide; note = XENP020520 vlCDR2
AASNLES

SEQ ID NO: 18894 - protein, 9 aa, synthetic construct
  source 1..9: note = Description of Artificial Sequence: Synthetic peptide; note = XENP020520 vlCDR3
QQSNEDPFT

SEQ ID NO: 18895 - protein, 450 aa, synthetic construct
  source 1..450: note = Description of Artificial Sequence: Synthetic polypeptide; note = XENP020521 7G8_H0.69_L0_IgG1_PVA_/S267K Heavy Chain
EVKLEESGGGLVQPGGSMKLSCAASGFTFSDAWMDWVRQSPEKGLEWVAEIRTKATNHATYYAESVKGRFTISRDDSKSSVYLQMNSLRAEDTGIYYCTRLANWDWYFDVWGAGTTVTVSSASTKGPSVFPLAPSSKSTSGGTAALGCLVKDYFPEPVTVSWNSGALTSGVHTFPAVLQSSGLYSLSSVVTVPSSSLGTQTYICNVNHKPSDTKVDKKVEPKSCDKTHTCPPCPAPPVAGPSVFLFPPKPKDTLMISRTPEVTCVVVDVKHEDPEVKFNWYVDGVEVHNAKTKPREEEYNSTYRVVSVLTVLHQDWLNGKEYKCKVSNKALPAPIEKTISKAKGQPREPQVYTLPPSREEMTKNQVSLTCDVSGFYPSDIAVEWESDGQPENNYKTTPPVLDSDGSFFLYSKLTVDKSRWEQGDVFSCSVMHEALHNHYTQKSLSLSPGK

SEQ ID NO: 18896 - protein, 121 aa, synthetic construct
  source 1..121: note = Description of Artificial Sequence: Synthetic polypeptide; note = VH of XENP020521
EVKLEESGGGLVQPGGSMKLSCAASGFTFSDAWMDWVRQSPEKGLEWVAEIRTKATNHATYYAESVKGRFTISRDDSKSSVYLQMNSLRAEDTGIYYCTRLANWDWYFDVWGAGTTVTVSS

SEQ ID NO: 18897 - protein, 5 aa, synthetic construct
  source 1..5: note = Description of Artificial Sequence: Synthetic peptide; note = XENP020521 vhCDR1
DAWMD

SEQ ID NO: 18898 - protein, 19 aa, synthetic construct
  source 1..19: note = Description of Artificial Sequence: Synthetic peptide; note = XENP020521 vhCDR2
EIRTKATNHATYYAESVKG

SEQ ID NO: 18899 - protein, 10 aa, synthetic construct
  source 1..10: note = Description of Artificial Sequence: Synthetic peptide; note = XENP020521 vhCDR3
LANWDWYFDV

SEQ ID NO: 18900 - protein, 218 aa, synthetic construct; identical to SEQ ID NO: 17590
  source 1..218: note = Description of Artificial Sequence: Synthetic polypeptide; note = XENP020521 7G8_H0.69_L0_IgG1_PVA_/S267K Light Chain

SEQ ID NO: 18901 - protein, 111 aa, synthetic construct; identical to SEQ ID NO: 17591
  source 1..111: note = Description of Artificial Sequence: Synthetic polypeptide; note = VL of XENP020521

SEQ ID NO: 18902 - protein, 15 aa, synthetic construct
  source 1..15: note = Description of Artificial Sequence: Synthetic peptide; note = XENP020521 vlCDR1
KASQSVDYDGDSYMN

SEQ ID NO: 18903 - protein, 7 aa, synthetic construct
  source 1..7: note = Description of Artificial Sequence: Synthetic peptide; note = XENP020521 vlCDR2
AASNLES

SEQ ID NO: 18904 - protein, 9 aa, synthetic construct
  source 1..9: note = Description of Artificial Sequence: Synthetic peptide; note = XENP020521 vlCDR3
QQSNEDPFT

SEQ ID NO: 18905 - protein, 450 aa, synthetic construct
  source 1..450: note = Description of Artificial Sequence: Synthetic polypeptide; note = XENP020522 7G8_H0.70_L0_IgG1_PVA_/S267K Heavy Chain
EVKLEESGGGLVQPGGSMKLSCAASGFTFSDAWMDWVRQSPEKGLEWVAEIRTKAGNHATYYAESVKGRFTISRDDSKSSVYLQMNSLRAEDTGIYYCTRLANWDWYFDVWGAGTTVTVSSASTKGPSVFPLAPSSKSTSGGTAALGCLVKDYFPEPVTVSWNSGALTSGVHTFPAVLQSSGLYSLSSVVTVPSSSLGTQTYICNVNHKPSDTKVDKKVEPKSCDKTHTCPPCPAPPVAGPSVFLFPPKPKDTLMISRTPEVTCVVVDVKHEDPEVKFNWYVDGVEVHNAKTKPREEEYNSTYRVVSVLTVLHQDWLNGKEYKCKVSNKALPAPIEKTISKAKGQPREPQVYTLPPSREEMTKNQVSLTCDVSGFYPSDIAVEWESDGQPENNYKTTPPVLDSDGSFFLYSKLTVDKSRWEQGDVFSCSVMHEALHNHYTQKSLSLSPGK

SEQ ID NO: 18906 - protein, 121 aa, synthetic construct
  source 1..121: note = Description of Artificial Sequence: Synthetic polypeptide; note = VH of XENP020522
EVKLEESGGGLVQPGGSMKLSCAASGFTFSDAWMDWVRQSPEKGLEWVAEIRTKAGNHATYYAESVKGRFTISRDDSKSSVYLQMNSLRAEDTGIYYCTRLANWDWYFDVWGAGTTVTVSS

SEQ ID NO: 18907 - protein, 5 aa, synthetic construct
  source 1..5: note = Description of Artificial Sequence: Synthetic peptide; note = XENP020522 vhCDR1
DAWMD

SEQ ID NO: 18908 - protein, 19 aa, synthetic construct
  source 1..19: note = Description of Artificial Sequence: Synthetic peptide; note = XENP020522 vhCDR2
EIRTKAGNHATYYAESVKG

SEQ ID NO: 18909 - protein, 10 aa, synthetic construct
  source 1..10: note = Description of Artificial Sequence: Synthetic peptide; note = XENP020522 vhCDR3
LANWDWYFDV

SEQ ID NO: 18910 - protein, 218 aa, synthetic construct; identical to SEQ ID NO: 17590
  source 1..218: note = Description of Artificial Sequence: Synthetic polypeptide; note = XENP020522 7G8_H0.70_L0_IgG1_PVA_/S267K Light Chain

SEQ ID NO: 18911 - protein, 111 aa, synthetic construct; identical to SEQ ID NO: 17591
  source 1..111: note = Description of Artificial Sequence: Synthetic polypeptide; note = VL of XENP020522

SEQ ID NO: 18912 - protein, 15 aa, synthetic construct
  source 1..15: note = Description of Artificial Sequence: Synthetic peptide; note = XENP020522 vlCDR1
KASQSVDYDGDSYMN

SEQ ID NO: 18913 - protein, 7 aa, synthetic construct
  source 1..7: note = Description of Artificial Sequence: Synthetic peptide; note = XENP020522 vlCDR2
AASNLES

SEQ ID NO: 18914 - protein, 9 aa, synthetic construct
  source 1..9: note = Description of Artificial Sequence: Synthetic peptide; note = XENP020522 vlCDR3
QQSNEDPFT

SEQ ID NO: 18915 - protein, 450 aa, synthetic construct
  source 1..450: note = Description of Artificial Sequence: Synthetic polypeptide; note = XENP020523 7G8_H0.71_L0_IgG1_PVA_/S267K Heavy Chain
EVKLEESGGGLVQPGGSMKLSCAASGFTFSDAWMDWVRQSPEKGLEWVAEIRTKAYNHATYYAESVKGRFTISRDDSKSSVYLQMNSLRAEDTGIYYCTRLANWDWYFDVWGAGTTVTVSSASTKGPSVFPLAPSSKSTSGGTAALGCLVKDYFPEPVTVSWNSGALTSGVHTFPAVLQSSGLYSLSSVVTVPSSSLGTQTYICNVNHKPSDTKVDKKVEPKSCDKTHTCPPCPAPPVAGPSVFLFPPKPKDTLMISRTPEVTCVVVDVKHEDPEVKFNWYVDGVEVHNAKTKPREEEYNSTYRVVSVLTVLHQDWLNGKEYKCKVSNKALPAPIEKTISKAKGQPREPQVYTLPPSREEMTKNQVSLTCDVSGFYPSDIAVEWESDGQPENNYKTTPPVLDSDGSFFLYSKLTVDKSRWEQGDVFSCSVMHEALHNHYTQKSLSLSPGK

SEQ ID NO: 18916 - protein, 121 aa, synthetic construct
  source 1..121: note = Description of Artificial Sequence: Synthetic polypeptide; note = VH of XENP020523
EVKLEESGGGLVQPGGSMKLSCAASGFTFSDAWMDWVRQSPEKGLEWVAEIRTKAYNHATYYAESVKGRFTISRDDSKSSVYLQMNSLRAEDTGIYYCTRLANWDWYFDVWGAGTTVTVSS

SEQ ID NO: 18917 - protein, 5 aa, synthetic construct
  source 1..5: note = Description of Artificial Sequence: Synthetic peptide; note = XENP020523 vhCDR1
DAWMD

SEQ ID NO: 18918 - protein, 19 aa, synthetic construct
  source 1..19: note = Description of Artificial Sequence: Synthetic peptide; note = XENP020523 vhCDR2
EIRTKAYNHATYYAESVKG

SEQ ID NO: 18919 - protein, 10 aa, synthetic construct
  source 1..10: note = Description of Artificial Sequence: Synthetic peptide; note = XENP020523 vhCDR3
LANWDWYFDV

SEQ ID NO: 18920 - protein, 218 aa, synthetic construct; identical to SEQ ID NO: 17590
  source 1..218: note = Description of Artificial Sequence: Synthetic polypeptide; note = XENP020523 7G8_H0.71_L0_IgG1_PVA_/S267K Light Chain

SEQ ID NO: 18921 - protein, 111 aa, synthetic construct; identical to SEQ ID NO: 17591
  source 1..111: note = Description of Artificial Sequence: Synthetic polypeptide; note = VL of XENP020523

SEQ ID NO: 18922 - protein, 15 aa, synthetic construct
  source 1..15: note = Description of Artificial Sequence: Synthetic peptide; note = XENP020523 vlCDR1
KASQSVDYDGDSYMN

SEQ ID NO: 18923 - protein, 7 aa, synthetic construct
  source 1..7: note = Description of Artificial Sequence: Synthetic peptide; note = XENP020523 vlCDR2
AASNLES

SEQ ID NO: 18924 - protein, 9 aa, synthetic construct
  source 1..9: note = Description of Artificial Sequence: Synthetic peptide; note = XENP020523 vlCDR3
QQSNEDPFT

SEQ ID NO: 18925 - protein, 450 aa, synthetic construct
  source 1..450: note = Description of Artificial Sequence: Synthetic polypeptide; note = XENP020524 7G8_H0.72_L0_IgG1_PVA_/S267K Heavy Chain
EVKLEESGGGLVQPGGSMKLSCAASGFTFSDAWMDWVRQSPEKGLEWVAEIRTKANDHATYYAESVKGRFTISRDDSKSSVYLQMNSLRAEDTGIYYCTRLANWDWYFDVWGAGTTVTVSSASTKGPSVFPLAPSSKSTSGGTAALGCLVKDYFPEPVTVSWNSGALTSGVHTFPAVLQSSGLYSLSSVVTVPSSSLGTQTYICNVNHKPSDTKVDKKVEPKSCDKTHTCPPCPAPPVAGPSVFLFPPKPKDTLMISRTPEVTCVVVDVKHEDPEVKFNWYVDGVEVHNAKTKPREEEYNSTYRVVSVLTVLHQDWLNGKEYKCKVSNKALPAPIEKTISKAKGQPREPQVYTLPPSREEMTKNQVSLTCDVSGFYPSDIAVEWESDGQPENNYKTTPPVLDSDGSFFLYSKLTVDKSRWEQGDVFSCSVMHEALHNHYTQKSLSLSPGK

SEQ ID NO: 18926 - protein, 121 aa, synthetic construct
  source 1..121: note = Description of Artificial Sequence: Synthetic polypeptide; note = VH of XENP020524
EVKLEESGGGLVQPGGSMKLSCAASGFTFSDAWMDWVRQSPEKGLEWVAEIRTKANDHATYYAESVKGRFTISRDDSKSSVYLQMNSLRAEDTGIYYCTRLANWDWYFDVWGAGTTVTVSS

SEQ ID NO: 18927 - protein, 5 aa, synthetic construct
  source 1..5: note = Description of Artificial Sequence: Synthetic peptide; note = XENP020524 vhCDR1
DAWMD

SEQ ID NO: 18928 - protein, 19 aa, synthetic construct
  source 1..19: note = Description of Artificial Sequence: Synthetic peptide; note = XENP020524 vhCDR2
EIRTKANDHATYYAESVKG

SEQ ID NO: 18929 - protein, 10 aa, synthetic construct
  source 1..10: note = Description of Artificial Sequence: Synthetic peptide; note = XENP020524 vhCDR3
LANWDWYFDV

SEQ ID NO: 18930 - protein, 218 aa, synthetic construct; identical to SEQ ID NO: 17590
  source 1..218: note = Description of Artificial Sequence: Synthetic polypeptide; note = XENP020524 7G8_H0.72_L0_IgG1_PVA_/S267K Light Chain

SEQ ID NO: 18931 - protein, 111 aa, synthetic construct; identical to SEQ ID NO: 17591
  source 1..111: note = Description of Artificial Sequence: Synthetic polypeptide; note = VL of XENP020524

SEQ ID NO: 18932 - protein, 15 aa, synthetic construct
  source 1..15: note = Description of Artificial Sequence: Synthetic peptide; note = XENP020524 vlCDR1
KASQSVDYDGDSYMN

SEQ ID NO: 18933 - protein, 7 aa, synthetic construct
  source 1..7: note = Description of Artificial Sequence: Synthetic peptide; note = XENP020524 vlCDR2
AASNLES

SEQ ID NO: 18934 - protein, 9 aa, synthetic construct
  source 1..9: note = Description of Artificial Sequence: Synthetic peptide; note = XENP020524 vlCDR3
QQSNEDPFT

SEQ ID NO: 18935 - protein, 450 aa, synthetic construct
  source 1..450: note = Description of Artificial Sequence: Synthetic polypeptide; note = XENP020525 7G8_H0.73_L0_IgG1_PVA_/S267K Heavy Chain
EVKLEESGGGLVQPGGSMKLSCAASGFTFSDAWMDWVRQSPEKGLEWVAEIRTKANHHATYYAESVKGRFTISRDDSKSSVYLQMNSLRAEDTGIYYCTRLANWDWYFDVWGAGTTVTVSSASTKGPSVFPLAPSSKSTSGGTAALGCLVKDYFPEPVTVSWNSGALTSGVHTFPAVLQSSGLYSLSSVVTVPSSSLGTQTYICNVNHKPSDTKVDKKVEPKSCDKTHTCPPCPAPPVAGPSVFLFPPKPKDTLMISRTPEVTCVVVDVKHEDPEVKFNWYVDGVEVHNAKTKPREEEYNSTYRVVSVLTVLHQDWLNGKEYKCKVSNKALPAPIEKTISKAKGQPREPQVYTLPPSREEMTKNQVSLTCDVSGFYPSDIAVEWESDGQPENNYKTTPPVLDSDGSFFLYSKLTVDKSRWEQGDVFSCSVMHEALHNHYTQKSLSLSPGK

SEQ ID NO: 18936 - protein, 121 aa, synthetic construct
  source 1..121: note = Description of Artificial Sequence: Synthetic polypeptide; note = VH of XENP020525
EVKLEESGGGLVQPGGSMKLSCAASGFTFSDAWMDWVRQSPEKGLEWVAEIRTKANHHATYYAESVKGRFTISRDDSKSSVYLQMNSLRAEDTGIYYCTRLANWDWYFDVWGAGTTVTVSS

SEQ ID NO: 18937 - protein, 5 aa, synthetic construct
  source 1..5: note = Description of Artificial Sequence: Synthetic peptide; note = XENP020525 vhCDR1
DAWMD

SEQ ID NO: 18938 - protein, 19 aa, synthetic construct
  source 1..19: note = Description of Artificial Sequence: Synthetic peptide; note = XENP020525 vhCDR2
EIRTKANHHATYYAESVKG

SEQ ID NO: 18939 - protein, 10 aa, synthetic construct
  source 1..10: note = Description of Artificial Sequence: Synthetic peptide; note = XENP020525 vhCDR3
LANWDWYFDV

SEQ ID NO: 18940 - protein, 218 aa, synthetic construct; identical to SEQ ID NO: 17590
  source 1..218: note = Description of Artificial Sequence: Synthetic polypeptide; note = XENP020525 7G8_H0.73_L0_IgG1_PVA_/S267K Light Chain

SEQ ID NO: 18941 - protein, 111 aa, synthetic construct; identical to SEQ ID NO: 17591
  source 1..111: note = Description of Artificial Sequence: Synthetic polypeptide; note = VL of XENP020525

SEQ ID NO: 18942 - protein, 15 aa, synthetic construct
  source 1..15: note = Description of Artificial Sequence: Synthetic peptide; note = XENP020525 vlCDR1
KASQSVDYDGDSYMN

SEQ ID NO: 18943 - protein, 7 aa, synthetic construct
  source 1..7: note = Description of Artificial Sequence: Synthetic peptide; note = XENP020525 vlCDR2
AASNLES

SEQ ID NO: 18944 - protein, 9 aa, synthetic construct
  source 1..9: note = Description of Artificial Sequence: Synthetic peptide; note = XENP020525 vlCDR3
QQSNEDPFT

SEQ ID NO: 18945 - protein, 450 aa, synthetic construct
  source 1..450: note = Description of Artificial Sequence: Synthetic polypeptide; note = XENP020526 7G8_H0.74_L0_IgG1_PVA_/S267K Heavy Chain
EVKLEESGGGLVQPGGSMKLSCAASGFTFSDAWMDWVRQSPEKGLEWVAEIRTKANEHATYYAESVKGRFTISRDDSKSSVYLQMNSLRAEDTGIYYCTRLANWDWYFDVWGAGTTVTVSSASTKGPSVFPLAPSSKSTSGGTAALGCLVKDYFPEPVTVSWNSGALTSGVHTFPAVLQSSGLYSLSSVVTVPSSSLGTQTYICNVNHKPSDTKVDKKVEPKSCDKTHTCPPCPAPPVAGPSVFLFPPKPKDTLMISRTPEVTCVVVDVKHEDPEVKFNWYVDGVEVHNAKTKPREEEYNSTYRVVSVLTVLHQDWLNGKEYKCKVSNKALPAPIEKTISKAKGQPREPQVYTLPPSREEMTKNQVSLTCDVSGFYPSDIAVEWESDGQPENNYKTTPPVLDSDGSFFLYSKLTVDKSRWEQGDVFSCSVMHEALHNHYTQKSLSLSPGK

SEQ ID NO: 18946 - protein, 121 aa, synthetic construct
  source 1..121: note = Description of Artificial Sequence: Synthetic polypeptide; note = VH of XENP020526
EVKLEESGGGLVQPGGSMKLSCAASGFTFSDAWMDWVRQSPEKGLEWVAEIRTKANEHATYYAESVKGRFTISRDDSKSSVYLQMNSLRAEDTGIYYCTRLANWDWYFDVWGAGTTVTVSS

SEQ ID NO: 18947 - protein, 5 aa, synthetic construct
  source 1..5: note = Description of Artificial Sequence: Synthetic peptide; note = XENP020526 vhCDR1
DAWMD

SEQ ID NO: 18948 - protein, 19 aa, synthetic construct
  source 1..19: note = Description of Artificial Sequence: Synthetic peptide; note = XENP020526 vhCDR2
EIRTKANEHATYYAESVKG

SEQ ID NO: 18949 - protein, 10 aa, synthetic construct
  source 1..10: note = Description of Artificial Sequence: Synthetic peptide; note = XENP020526 vhCDR3
LANWDWYFDV

SEQ ID NO: 18950 - protein, 218 aa, synthetic construct; identical to SEQ ID NO: 17590
  source 1..218: note = Description of Artificial Sequence: Synthetic polypeptide; note = XENP020526 7G8_H0.74_L0_IgG1_PVA_/S267K Light Chain

SEQ ID NO: 18951 - protein, 111 aa, synthetic construct; identical to SEQ ID NO: 17591
  source 1..111: note = Description of Artificial Sequence: Synthetic polypeptide; note = VL of XENP020526

SEQ ID NO: 18952 - protein, 15 aa, synthetic construct
  source 1..15: note = Description of Artificial Sequence: Synthetic peptide; note = XENP020526 vlCDR1
KASQSVDYDGDSYMN

SEQ ID NO: 18953 - protein, 7 aa, synthetic construct
  source 1..7: note = Description of Artificial Sequence: Synthetic peptide; note = XENP020526 vlCDR2
AASNLES

SEQ ID NO: 18954 - protein, 9 aa, synthetic construct
  source 1..9: note = Description of Artificial Sequence: Synthetic peptide; note = XENP020526 vlCDR3
QQSNEDPFT

SEQ ID NO: 18955 - protein, 450 aa, synthetic construct
  source 1..450: note = Description of Artificial Sequence: Synthetic polypeptide; note = XENP020527 7G8_H0.75_L0_IgG1_PVA_/S267K Heavy Chain
EVKLEESGGGLVQPGGSMKLSCAASGFTFSDAWMDWVRQSPEKGLEWVAEIRTKANSHATYYAESVKGRFTISRDDSKSSVYLQMNSLRAEDTGIYYCTRLANWDWYFDVWGAGTTVTVSSASTKGPSVFPLAPSSKSTSGGTAALGCLVKDYFPEPVTVSWNSGALTSGVHTFPAVLQSSGLYSLSSVVTVPSSSLGTQTYICNVNHKPSDTKVDKKVEPKSCDKTHTCPPCPAPPVAGPSVFLFPPKPKDTLMISRTPEVTCVVVDVKHEDPEVKFNWYVDGVEVHNAKTKPREEEYNSTYRVVSVLTVLHQDWLNGKEYKCKVSNKALPAPIEKTISKAKGQPREPQVYTLPPSREEMTKNQVSLTCDVSGFYPSDIAVEWESDGQPENNYKTTPPVLDSDGSFFLYSKLTVDKSRWEQGDVFSCSVMHEALHNHYTQKSLSLSPGK

SEQ ID NO: 18956 - protein, 121 aa, synthetic construct
  source 1..121: note = Description of Artificial Sequence: Synthetic polypeptide; note = VH of XENP020527
EVKLEESGGGLVQPGGSMKLSCAASGFTFSDAWMDWVRQSPEKGLEWVAEIRTKANSHATYYAESVKGRFTISRDDSKSSVYLQMNSLRAEDTGIYYCTRLANWDWYFDVWGAGTTVTVSS

SEQ ID NO: 18957 - protein, 5 aa, synthetic construct
  source 1..5: note = Description of Artificial Sequence: Synthetic peptide; note = XENP020527 vhCDR1
DAWMD

SEQ ID NO: 18958 - protein, 19 aa, synthetic construct
  source 1..19: note = Description of Artificial Sequence: Synthetic peptide; note = XENP020527 vhCDR2
EIRTKANSHATYYAESVKG

SEQ ID NO: 18959 - protein, 10 aa, synthetic construct
  source 1..10: note = Description of Artificial Sequence: Synthetic peptide; note = XENP020527 vhCDR3
LANWDWYFDV

SEQ ID NO: 18960 - protein, 218 aa, synthetic construct; identical to SEQ ID NO: 17590
  source 1..218: note = Description of Artificial Sequence: Synthetic polypeptide; note = XENP020527 7G8_H0.75_L0_IgG1_PVA_/S267K Light Chain

SEQ ID NO: 18961 - protein, 111 aa, synthetic construct; identical to SEQ ID NO: 17591
  source 1..111: note = Description of Artificial Sequence: Synthetic polypeptide; note = VL of XENP020527

SEQ ID NO: 18962 - protein, 15 aa, synthetic construct
  source 1..15: note = Description of Artificial Sequence: Synthetic peptide; note = XENP020527 vlCDR1
KASQSVDYDGDSYMN

SEQ ID NO: 18963 - protein, 7 aa, synthetic construct
  source 1..7: note = Description of Artificial Sequence: Synthetic peptide; note = XENP020527 vlCDR2
AASNLES

SEQ ID NO: 18964 - protein, 9 aa, synthetic construct
  source 1..9: note = Description of Artificial Sequence: Synthetic peptide; note = XENP020527 vlCDR3
QQSNEDPFT

SEQ ID NO: 18965 - protein, 450 aa, synthetic construct
  source 1..450: note = Description of Artificial Sequence: Synthetic polypeptide; note = XENP020528 7G8_H0.76_L0_IgG1_PVA_/S267K Heavy Chain
EVKLEESGGGLVQPGGSMKLSCAASGFTFSDAWMDWVRQSPEKGLEWVAEIRTKANRHATYYAESVKGRFTISRDDSKSSVYLQMNSLRAEDTGIYYCTRLANWDWYFDVWGAGTTVTVSSASTKGPSVFPLAPSSKSTSGGTAALGCLVKDYFPEPVTVSWNSGALTSGVHTFPAVLQSSGLYSLSSVVTVPSSSLGTQTYICNVNHKPSDTKVDKKVEPKSCDKTHTCPPCPAPPVAGPSVFLFPPKPKDTLMISRTPEVTCVVVDVKHEDPEVKFNWYVDGVEVHNAKTKPREEEYNSTYRVVSVLTVLHQDWLNGKEYKCKVSNKALPAPIEKTISKAKGQPREPQVYTLPPSREEMTKNQVSLTCDVSGFYPSDIAVEWESDGQPENNYKTTPPVLDSDGSFFLYSKLTVDKSRWEQGDVFSCSVMHEALHNHYTQKSLSLSPGK

SEQ ID NO: 18966 - protein, 121 aa, synthetic construct
  source 1..121: note = Description of Artificial Sequence: Synthetic polypeptide; note = VH of XENP020528
EVKLEESGGGLVQPGGSMKLSCAASGFTFSDAWMDWVRQSPEKGLEWVAEIRTKANRHATYYAESVKGRFTISRDDSKSSVYLQMNSLRAEDTGIYYCTRLANWDWYFDVWGAGTTVTVSS

SEQ ID NO: 18967 - protein, 5 aa, synthetic construct
  source 1..5: note = Description of Artificial Sequence: Synthetic peptide; note = XENP020528 vhCDR1
DAWMD

SEQ ID NO: 18968 - protein, 19 aa, synthetic construct
  source 1..19: note = Description of Artificial Sequence: Synthetic peptide; note = XENP020528 vhCDR2
EIRTKANRHATYYAESVKG

SEQ ID NO: 18969 - protein, 10 aa, synthetic construct
  source 1..10: note = Description of Artificial Sequence: Synthetic peptide; note = XENP020528 vhCDR3
LANWDWYFDV

SEQ ID NO: 18970 - protein, 218 aa, synthetic construct; identical to SEQ ID NO: 17590
  source 1..218: note = Description of Artificial Sequence: Synthetic polypeptide; note = XENP020528 7G8_H0.76_L0_IgG1_PVA_/S267K Light Chain

SEQ ID NO: 18971 - protein, 111 aa, synthetic construct; identical to SEQ ID NO: 17591
  source 1..111: note = Description of Artificial Sequence: Synthetic polypeptide; note = VL of XENP020528

SEQ ID NO: 18972 - protein, 15 aa, synthetic construct
  source 1..15: note = Description of Artificial Sequence: Synthetic peptide; note = XENP020528 vlCDR1
KASQSVDYDGDSYMN

SEQ ID NO: 18973 - protein, 7 aa, synthetic construct
  source 1..7: note = Description of Artificial Sequence: Synthetic peptide; note = XENP020528 vlCDR2
AASNLES

SEQ ID NO: 18974 - protein, 9 aa, synthetic construct
  source 1..9: note = Description of Artificial Sequence: Synthetic peptide; note = XENP020528 vlCDR3
QQSNEDPFT

SEQ ID NO: 18975 - protein, 450 aa, synthetic construct
  source 1..450: note = Description of Artificial Sequence: Synthetic polypeptide; note = XENP020529 7G8_H0.77_L0_IgG1_PVA_/S267K Heavy Chain
EVKLEESGGGLVQPGGSMKLSCAASGFTFSDAWMDWVRQSPEKGLEWVAEIRTKANLHATYYAESVKGRFTISRDDSKSSVYLQMNSLRAEDTGIYYCTRLANWDWYFDVWGAGTTVTVSSASTKGPSVFPLAPSSKSTSGGTAALGCLVKDYFPEPVTVSWNSGALTSGVHTFPAVLQSSGLYSLSSVVTVPSSSLGTQTYICNVNHKPSDTKVDKKVEPKSCDKTHTCPPCPAPPVAGPSVFLFPPKPKDTLMISRTPEVTCVVVDVKHEDPEVKFNWYVDGVEVHNAKTKPREEEYNSTYRVVSVLTVLHQDWLNGKEYKCKVSNKALPAPIEKTISKAKGQPREPQVYTLPPSREEMTKNQVSLTCDVSGFYPSDIAVEWESDGQPENNYKTTPPVLDSDGSFFLYSKLTVDKSRWEQGDVFSCSVMHEALHNHYTQKSLSLSPGK

SEQ ID NO: 18976 - protein, 121 aa, synthetic construct
  source 1..121: note = Description of Artificial Sequence: Synthetic polypeptide; note = VH of XENP020529
EVKLEESGGGLVQPGGSMKLSCAASGFTFSDAWMDWVRQSPEKGLEWVAEIRTKANLHATYYAESVKGRFTISRDDSKSSVYLQMNSLRAEDTGIYYCTRLANWDWYFDVWGAGTTVTVSS

SEQ ID NO: 18977 - protein, 5 aa, synthetic construct
  source 1..5: note = Description of Artificial Sequence: Synthetic peptide; note = XENP020529 vhCDR1
DAWMD

SEQ ID NO: 18978 - protein, 19 aa, synthetic construct
  source 1..19: note = Description of Artificial Sequence: Synthetic peptide; note = XENP020529 vhCDR2
EIRTKANLHATYYAESVKG

SEQ ID NO: 18979 - protein, 10 aa, synthetic construct
  source 1..10: note = Description of Artificial Sequence: Synthetic peptide; note = XENP020529 vhCDR3
LANWDWYFDV

SEQ ID NO: 18980 - protein, 218 aa, synthetic construct; identical to SEQ ID NO: 17590
  source 1..218: note = Description of Artificial Sequence: Synthetic polypeptide; note = XENP020529 7G8_H0.77_L0_IgG1_PVA_/S267K Light Chain

SEQ ID NO: 18981 - protein, 111 aa, synthetic construct; identical to SEQ ID NO: 17591
  source 1..111: note = Description of Artificial Sequence: Synthetic polypeptide; note = VL of XENP020529

SEQ ID NO: 18982 - protein, 15 aa, synthetic construct
  source 1..15: note = Description of Artificial Sequence: Synthetic peptide; note = XENP020529 vlCDR1
KASQSVDYDGDSYMN

SEQ ID NO: 18983 - protein, 7 aa, synthetic construct
  source 1..7: note = Description of Artificial Sequence: Synthetic peptide; note = XENP020529 vlCDR2
AASNLES

SEQ ID NO: 18984 - protein, 9 aa, synthetic construct
  source 1..9: note = Description of Artificial Sequence: Synthetic peptide; note = XENP020529 vlCDR3
QQSNEDPFT

SEQ ID NO: 18985 - protein, 450 aa, synthetic construct
  source 1..450: note = Description of Artificial Sequence: Synthetic polypeptide; note = XENP020530 7G8_H0.78_L0_IgG1_PVA_/S267K Heavy Chain
EVKLEESGGGLVQPGGSMKLSCAASGFTFSDAWMDWVRQSPEKGLEWVAEIRTKANTHATYYAESVKGRFTISRDDSKSSVYLQMNSLRAEDTGIYYCTRLANWDWYFDVWGAGTTVTVSSASTKGPSVFPLAPSSKSTSGGTAALGCLVKDYFPEPVTVSWNSGALTSGVHTFPAVLQSSGLYSLSSVVTVPSSSLGTQTYICNVNHKPSDTKVDKKVEPKSCDKTHTCPPCPAPPVAGPSVFLFPPKPKDTLMISRTPEVTCVVVDVKHEDPEVKFNWYVDGVEVHNAKTKPREEEYNSTYRVVSVLTVLHQDWLNGKEYKCKVSNKALPAPIEKTISKAKGQPREPQVYTLPPSREEMTKNQVSLTCDVSGFYPSDIAVEWESDGQPENNYKTTPPVLDSDGSFFLYSKLTVDKSRWEQGDVFSCSVMHEALHNHYTQKSLSLSPGK

SEQ ID NO: 18986 - protein, 121 aa, synthetic construct
  source 1..121: note = Description of Artificial Sequence: Synthetic polypeptide; note = VH of XENP020530
EVKLEESGGGLVQPGGSMKLSCAASGFTFSDAWMDWVRQSPEKGLEWVAEIRTKANTHATYYAESVKGRFTISRDDSKSSVYLQMNSLRAEDTGIYYCTRLANWDWYFDVWGAGTTVTVSS

SEQ ID NO: 18987 - protein, 5 aa, synthetic construct
  source 1..5: note = Description of Artificial Sequence: Synthetic peptide; note = XENP020530 vhCDR1
DAWMD

SEQ ID NO: 18988 - protein, 19 aa, synthetic construct
  source 1..19: note = Description of Artificial Sequence: Synthetic peptide; note = XENP020530 vhCDR2
EIRTKANTHATYYAESVKG

SEQ ID NO: 18989 - protein, 10 aa, synthetic construct
  source 1..10: note = Description of Artificial Sequence: Synthetic peptide; note = XENP020530 vhCDR3
LANWDWYFDV

SEQ ID NO: 18990 - protein, 218 aa, synthetic construct; identical to SEQ ID NO: 17590
  source 1..218: note = Description of Artificial Sequence: Synthetic polypeptide; note = XENP020530 7G8_H0.78_L0_IgG1_PVA_/S267K Light Chain

SEQ ID NO: 18991 - protein, 111 aa, synthetic construct; identical to SEQ ID NO: 17591
  source 1..111: note = Description of Artificial Sequence: Synthetic polypeptide; note = VL of XENP020530

SEQ ID NO: 18992 - protein, 15 aa, synthetic construct
  source 1..15: note = Description of Artificial Sequence: Synthetic peptide; note = XENP020530 vlCDR1
KASQSVDYDGDSYMN

SEQ ID NO: 18993 - protein, 7 aa, synthetic construct
  source 1..7: note = Description of Artificial Sequence: Synthetic peptide; note = XENP020530 vlCDR2
AASNLES

SEQ ID NO: 18994 - protein, 9 aa, synthetic construct
  source 1..9: note = Description of Artificial Sequence: Synthetic peptide; note = XENP020530 vlCDR3
QQSNEDPFT

SEQ ID NO: 18995 - protein, 450 aa, synthetic construct
  source 1..450: note = Description of Artificial Sequence: Synthetic polypeptide; note = XENP020531 7G8_H0.79_L0_IgG1_PVA_/S267K Heavy Chain
EVKLEESGGGLVQPGGSMKLSCAASGFTFSDAWMDWVRQSPEKGLEWVAEIRTKANGHATYYAESVKGRFTISRDDSKSSVYLQMNSLRAEDTGIYYCTRLANWDWYFDVWGAGTTVTVSSASTKGPSVFPLAPSSKSTSGGTAALGCLVKDYFPEPVTVSWNSGALTSGVHTFPAVLQSSGLYSLSSVVTVPSSSLGTQTYICNVNHKPSDTKVDKKVEPKSCDKTHTCPPCPAPPVAGPSVFLFPPKPKDTLMISRTPEVTCVVVDVKHEDPEVKFNWYVDGVEVHNAKTKPREEEYNSTYRVVSVLTVLHQDWLNGKEYKCKVSNKALPAPIEKTISKAKGQPREPQVYTLPPSREEMTKNQVSLTCDVSGFYPSDIAVEWESDGQPENNYKTTPPVLDSDGSFFLYSKLTVDKSRWEQGDVFSCSVMHEALHNHYTQKSLSLSPGK

SEQ ID NO: 18996 - protein, 121 aa, synthetic construct
  source 1..121: note = Description of Artificial Sequence: Synthetic polypeptide; note = VH of XENP020531
EVKLEESGGGLVQPGGSMKLSCAASGFTFSDAWMDWVRQSPEKGLEWVAEIRTKANGHATYYAESVKGRFTISRDDSKSSVYLQMNSLRAEDTGIYYCTRLANWDWYFDVWGAGTTVTVSS

SEQ ID NO: 18997 - protein, 5 aa, synthetic construct
  source 1..5: note = Description of Artificial Sequence: Synthetic peptide; note = XENP020531 vhCDR1
DAWMD

SEQ ID NO: 18998 - protein, 19 aa, synthetic construct
  source 1..19: note = Description of Artificial Sequence: Synthetic peptide; note = XENP020531 vhCDR2
EIRTKANGHATYYAESVKG

SEQ ID NO: 18999 - protein, 10 aa, synthetic construct
  source 1..10: note = Description of Artificial Sequence: Synthetic peptide; note = XENP020531 vhCDR3
LANWDWYFDV

SEQ ID NO: 19000 - protein, 218 aa, synthetic construct; identical to SEQ ID NO: 17590
  source 1..218: note = Description of Artificial Sequence: Synthetic polypeptide; note = XENP020531 7G8_H0.79_L0_IgG1_PVA_/S267K Light Chain

SEQ ID NO: 19001 - protein, 111 aa, synthetic construct; identical to SEQ ID NO: 17591
  source 1..111: note = Description of Artificial Sequence: Synthetic polypeptide; note = VL of XENP020531

SEQ ID NO: 19002 - protein, 15 aa, synthetic construct
  source 1..15: note = Description of Artificial Sequence: Synthetic peptide; note = XENP020531 vlCDR1
KASQSVDYDGDSYMN

SEQ ID NO: 19003 - protein, 7 aa, synthetic construct
  source 1..7: note = Description of Artificial Sequence: Synthetic peptide; note = XENP020531 vlCDR2
AASNLES

SEQ ID NO: 19004 - protein, 9 aa, synthetic construct
  source 1..9: note = Description of Artificial Sequence: Synthetic peptide; note = XENP020531 vlCDR3
QQSNEDPFT

SEQ ID NO: 19005 - protein, 450 aa, synthetic construct
  source 1..450: note = Description of Artificial Sequence: Synthetic polypeptide; note = XENP020532 7G8_H0.80_L0_IgG1_PVA_/S267K Heavy Chain
EVKLEESGGGLVQPGGSMKLSCAASGFTFSDAWMDWVRQSPEKGLEWVAEIRTKANYHATYYAESVKGRFTISRDDSKSSVYLQMNSLRAEDTGIYYCTRLANWDWYFDVWGAGTTVTVSSASTKGPSVFPLAPSSKSTSGGTAALGCLVKDYFPEPVTVSWNSGALTSGVHTFPAVLQSSGLYSLSSVVTVPSSSLGTQTYICNVNHKPSDTKVDKKVEPKSCDKTHTCPPCPAPPVAGPSVFLFPPKPKDTLMISRTPEVTCVVVDVKHEDPEVKFNWYVDGVEVHNAKTKPREEEYNSTYRVVSVLTVLHQDWLNGKEYKCKVSNKALPAPIEKTISKAKGQPREPQVYTLPPSREEMTKNQVSLTCDVSGFYPSDIAVEWESDGQPENNYKTTPPVLDSDGSFFLYSKLTVDKSRWEQGDVFSCSVMHEALHNHYTQKSLSLSPGK

SEQ ID NO: 19006 - protein, 121 aa, synthetic construct
  source 1..121: note = Description of Artificial Sequence: Synthetic polypeptide; note = VH of XENP020532
EVKLEESGGGLVQPGGSMKLSCAASGFTFSDAWMDWVRQSPEKGLEWVAEIRTKANYHATYYAESVKGRFTISRDDSKSSVYLQMNSLRAEDTGIYYCTRLANWDWYFDVWGAGTTVTVSS

SEQ ID NO: 19007 - protein, 5 aa, synthetic construct
  source 1..5: note = Description of Artificial Sequence: Synthetic peptide; note = XENP020532 vhCDR1
DAWMD

SEQ ID NO: 19008 - protein, 19 aa, synthetic construct
  source 1..19: note = Description of Artificial Sequence: Synthetic peptide; note = XENP020532 vhCDR2
EIRTKANYHATYYAESVKG

SEQ ID NO: 19009 - protein, 10 aa, synthetic construct
  source 1..10: note = Description of Artificial Sequence: Synthetic peptide; note = XENP020532 vhCDR3
LANWDWYFDV

SEQ ID NO: 19010 - protein, 218 aa, synthetic construct; identical to SEQ ID NO: 17590
  source 1..218: note = Description of Artificial Sequence: Synthetic polypeptide; note = XENP020532 7G8_H0.80_L0_IgG1_PVA_/S267K Light Chain

SEQ ID NO: 19011 - protein, 111 aa, synthetic construct; identical to SEQ ID NO: 17591
  source 1..111: note = Description of Artificial Sequence: Synthetic polypeptide; note = VL of XENP020532

SEQ ID NO: 19012 - protein, 15 aa, synthetic construct
  source 1..15: note = Description of Artificial Sequence: Synthetic peptide; note = XENP020532 vlCDR1
KASQSVDYDGDSYMN

SEQ ID NO: 19013 - protein, 7 aa, synthetic construct
  source 1..7: note = Description of Artificial Sequence: Synthetic peptide; note = XENP020532 vlCDR2
AASNLES

SEQ ID NO: 19014 - protein, 9 aa, synthetic construct
  source 1..9: note = Description of Artificial Sequence: Synthetic peptide; note = XENP020532 vlCDR3
QQSNEDPFT

SEQ ID NO: 19015 - protein, 450 aa, synthetic construct
  source 1..450: note = Description of Artificial Sequence: Synthetic polypeptide; note = XENP020533 7G8_H0.81_L0_IgG1_PVA_/S267K Heavy Chain
EVKLEESGGGLVQPGGSMKLSCAASGFTFSDAWMDWVRQSPEKGLEWVAEIRTKANNYATYYAESVKGRFTISRDDSKSSVYLQMNSLRAEDTGIYYCTRLANWDWYFDVWGAGTTVTVSSASTKGPSVFPLAPSSKSTSGGTAALGCLVKDYFPEPVTVSWNSGALTSGVHTFPAVLQSSGLYSLSSVVTVPSSSLGTQTYICNVNHKPSDTKVDKKVEPKSCDKTHTCPPCPAPPVAGPSVFLFPPKPKDTLMISRTPEVTCVVVDVKHEDPEVKFNWYVDGVEVHNAKTKPREEEYNSTYRVVSVLTVLHQDWLNGKEYKCKVSNKALPAPIEKTISKAKGQPREPQVYTLPPSREEMTKNQVSLTCDVSGFYPSDIAVEWESDGQPENNYKTTPPVLDSDGSFFLYSKLTVDKSRWEQGDVFSCSVMHEALHNHYTQKSLSLSPGK

SEQ ID NO: 19016 - protein, 121 aa, synthetic construct
  source 1..121: note = Description of Artificial Sequence: Synthetic polypeptide; note = VH of XENP020533
EVKLEESGGGLVQPGGSMKLSCAASGFTFSDAWMDWVRQSPEKGLEWVAEIRTKANNYATYYAESVKGRFTISRDDSKSSVYLQMNSLRAEDTGIYYCTRLANWDWYFDVWGAGTTVTVSS

SEQ ID NO: 19017 - protein, 5 aa, synthetic construct
  source 1..5: note = Description of Artificial Sequence: Synthetic peptide; note = XENP020533 vhCDR1
DAWMD

SEQ ID NO: 19018 - protein, 19 aa, synthetic construct
  source 1..19: note = Description of Artificial Sequence: Synthetic peptide; note = XENP020533 vhCDR2
EIRTKANNYATYYAESVKG

SEQ ID NO: 19019 - protein, 10 aa, synthetic construct
  source 1..10: note = Description of Artificial Sequence: Synthetic peptide; note = XENP020533 vhCDR3
LANWDWYFDV

SEQ ID NO: 19020 - protein, 218 aa, synthetic construct; identical to SEQ ID NO: 17590
  source 1..218: note = Description of Artificial Sequence: Synthetic polypeptide; note = XENP020533 7G8_H0.81_L0_IgG1_PVA_/S267K Light Chain

SEQ ID NO: 19021 - protein, 111 aa, synthetic construct; identical to SEQ ID NO: 17591
  source 1..111: note = Description of Artificial Sequence: Synthetic polypeptide; note = VL of XENP020533

SEQ ID NO: 19022 - protein, 15 aa, synthetic construct
  source 1..15: note = Description of Artificial Sequence: Synthetic peptide; note = XENP020533 vlCDR1
KASQSVDYDGDSYMN

SEQ ID NO: 19023 - protein, 7 aa, synthetic construct
  source 1..7: note = Description of Artificial Sequence: Synthetic peptide; note = XENP020533 vlCDR2
AASNLES

SEQ ID NO: 19024 - protein, 9 aa, synthetic construct
  source 1..9: note = Description of Artificial Sequence: Synthetic peptide; note = XENP020533 vlCDR3
QQSNEDPFT

SEQ ID NO: 19025 - protein, 450 aa, synthetic construct
  source 1..450: note = Description of Artificial Sequence: Synthetic polypeptide; note = XENP020534 7G8_H0.82_L0_IgG1_PVA_/S267K Heavy Chain
EVKLEESGGGLVQPGGSMKLSCAASGFTFSDAWMDWVRQSPEKGLEWVAEIRTKANNQATYYAESVKGRFTISRDDSKSSVYLQMNSLRAEDTGIYYCTRLANWDWYFDVWGAGTTVTVSSASTKGPSVFPLAPSSKSTSGGTAALGCLVKDYFPEPVTVSWNSGALTSGVHTFPAVLQSSGLYSLSSVVTVPSSSLGTQTYICNVNHKPSDTKVDKKVEPKSCDKTHTCPPCPAPPVAGPSVFLFPPKPKDTLMISRTPEVTCVVVDVKHEDPEVKFNWYVDGVEVHNAKTKPREEEYNSTYRVVSVLTVLHQDWLNGKEYKCKVSNKALPAPIEKTISKAKGQPREPQVYTLPPSREEMTKNQVSLTCDVSGFYPSDIAVEWESDGQPENNYKTTPPVLDSDGSFFLYSKLTVDKSRWEQGDVFSCSVMHEALHNHYTQKSLSLSPGK

SEQ ID NO: 19026 - protein, 121 aa, synthetic construct
  source 1..121: note = Description of Artificial Sequence: Synthetic polypeptide; note = VH of XENP020534
EVKLEESGGGLVQPGGSMKLSCAASGFTFSDAWMDWVRQSPEKGLEWVAEIRTKANNQATYYAESVKGRFTISRDDSKSSVYLQMNSLRAEDTGIYYCTRLANWDWYFDVWGAGTTVTVSS

SEQ ID NO: 19027 - protein, 5 aa, synthetic construct
  source 1..5: note = Description of Artificial Sequence: Synthetic peptide; note = XENP020534 vhCDR1
DAWMD

SEQ ID NO: 19028 - protein, 19 aa, synthetic construct
  source 1..19: note = Description of Artificial Sequence: Synthetic peptide; note = XENP020534 vhCDR2
EIRTKANNQATYYAESVKG

SEQ ID NO: 19029 - protein, 10 aa, synthetic construct
  source 1..10: note = Description of Artificial Sequence: Synthetic peptide; note = XENP020534 vhCDR3
LANWDWYFDV

SEQ ID NO: 19030 - protein, 218 aa, synthetic construct; identical to SEQ ID NO: 17590
  source 1..218: note = Description of Artificial Sequence: Synthetic polypeptide; note = XENP020534 7G8_H0.82_L0_IgG1_PVA_/S267K Light Chain

SEQ ID NO: 19031 - protein, 111 aa, synthetic construct; identical to SEQ ID NO: 17591
  source 1..111: note = Description of Artificial Sequence: Synthetic polypeptide; note = VL of XENP020534

SEQ ID NO: 19032 - protein, 15 aa, synthetic construct
  source 1..15: note = Description of Artificial Sequence: Synthetic peptide; note = XENP020534 vlCDR1
KASQSVDYDGDSYMN

SEQ ID NO: 19033 - protein, 7 aa, synthetic construct
  source 1..7: note = Description of Artificial Sequence: Synthetic peptide; note = XENP020534 vlCDR2
AASNLES

SEQ ID NO: 19034 - protein, 9 aa, synthetic construct
  source 1..9: note = Description of Artificial Sequence: Synthetic peptide; note = XENP020534 vlCDR3
QQSNEDPFT

SEQ ID NO: 19035 - protein, 450 aa, synthetic construct
  source 1..450: note = Description of Artificial Sequence: Synthetic polypeptide; note = XENP020535 7G8_H0.83_L0_IgG1_PVA_/S267K Heavy Chain
EVKLEESGGGLVQPGGSMKLSCAASGFTFSDAWMDWVRQSPEKGLEWVAEIRTKANNDATYYAESVKGRFTISRDDSKSSVYLQMNSLRAEDTGIYYCTRLANWDWYFDVWGAGTTVTVSSASTKGPSVFPLAPSSKSTSGGTAALGCLVKDYFPEPVTVSWNSGALTSGVHTFPAVLQSSGLYSLSSVVTVPSSSLGTQTYICNVNHKPSDTKVDKKVEPKSCDKTHTCPPCPAPPVAGPSVFLFPPKPKDTLMISRTPEVTCVVVDVKHEDPEVKFNWYVDGVEVHNAKTKPREEEYNSTYRVVSVLTVLHQDWLNGKEYKCKVSNKALPAPIEKTISKAKGQPREPQVYTLPPSREEMTKNQVSLTCDVSGFYPSDIAVEWESDGQPENNYKTTPPVLDSDGSFFLYSKLTVDKSRWEQGDVFSCSVMHEALHNHYTQKSLSLSPGK

SEQ ID NO: 19036 - protein, 121 aa, synthetic construct
  source 1..121: note = Description of Artificial Sequence: Synthetic polypeptide; note = VH of XENP020535
EVKLEESGGGLVQPGGSMKLSCAASGFTFSDAWMDWVRQSPEKGLEWVAEIRTKANNDATYYAESVKGRFTISRDDSKSSVYLQMNSLRAEDTGIYYCTRLANWDWYFDVWGAGTTVTVSS

SEQ ID NO: 19037 - protein, 5 aa, synthetic construct
  source 1..5: note = Description of Artificial Sequence: Synthetic peptide; note = XENP020535 vhCDR1
DAWMD

SEQ ID NO: 19038 - protein, 19 aa, synthetic construct
  source 1..19: note = Description of Artificial Sequence: Synthetic peptide; note = XENP020535 vhCDR2
EIRTKANNDATYYAESVKG

SEQ ID NO: 19039 - protein, 10 aa, synthetic construct
  source 1..10: note = Description of Artificial Sequence: Synthetic peptide; note = XENP020535 vhCDR3
LANWDWYFDV

SEQ ID NO: 19040 - protein, 218 aa, synthetic construct; identical to SEQ ID NO: 17590
  source 1..218: note = Description of Artificial Sequence: Synthetic polypeptide; note = XENP020535 7G8_H0.83_L0_IgG1_PVA_/S267K Light Chain

SEQ ID NO: 19041 - protein, 111 aa, synthetic construct; identical to SEQ ID NO: 17591
  source 1..111: note = Description of Artificial Sequence: Synthetic polypeptide; note = VL of XENP020535

SEQ ID NO: 19042 - protein, 15 aa, synthetic construct
  source 1..15: note = Description of Artificial Sequence: Synthetic peptide; note = XENP020535 vlCDR1
KASQSVDYDGDSYMN

SEQ ID NO: 19043 - protein, 7 aa, synthetic construct
  source 1..7: note = Description of Artificial Sequence: Synthetic peptide; note = XENP020535 vlCDR2
AASNLES

SEQ ID NO: 19044 - protein, 9 aa, synthetic construct
  source 1..9: note = Description of Artificial Sequence: Synthetic peptide; note = XENP020535 vlCDR3
QQSNEDPFT

SEQ ID NO: 19045 - protein, 450 aa, synthetic construct
  source 1..450: note = Description of Artificial Sequence: Synthetic polypeptide; note = XENP020536 7G8_H0.84_L0_IgG1_PVA_/S267K Heavy Chain
EVKLEESGGGLVQPGGSMKLSCAASGFTFSDAWMDWVRQSPEKGLEWVAEIRTKANNFATYYAESVKGRFTISRDDSKSSVYLQMNSLRAEDTGIYYCTRLANWDWYFDVWGAGTTVTVSSASTKGPSVFPLAPSSKSTSGGTAALGCLVKDYFPEPVTVSWNSGALTSGVHTFPAVLQSSGLYSLSSVVTVPSSSLGTQTYICNVNHKPSDTKVDKKVEPKSCDKTHTCPPCPAPPVAGPSVFLFPPKPKDTLMISRTPEVTCVVVDVKHEDPEVKFNWYVDGVEVHNAKTKPREEEYNSTYRVVSVLTVLHQDWLNGKEYKCKVSNKALPAPIEKTISKAKGQPREPQVYTLPPSREEMTKNQVSLTCDVSGFYPSDIAVEWESDGQPENNYKTTPPVLDSDGSFFLYSKLTVDKSRWEQGDVFSCSVMHEALHNHYTQKSLSLSPGK

SEQ ID NO: 19046 - protein, 121 aa, synthetic construct
  source 1..121: note = Description of Artificial Sequence: Synthetic polypeptide; note = VH of XENP020536
EVKLEESGGGLVQPGGSMKLSCAASGFTFSDAWMDWVRQSPEKGLEWVAEIRTKANNFATYYAESVKGRFTISRDDSKSSVYLQMNSLRAEDTGIYYCTRLANWDWYFDVWGAGTTVTVSS

SEQ ID NO: 19047 - protein, 5 aa, synthetic construct
  source 1..5: note = Description of Artificial Sequence: Synthetic peptide; note = XENP020536 vhCDR1
DAWMD

SEQ ID NO: 19048 - protein, 19 aa, synthetic construct
  source 1..19: note = Description of Artificial Sequence: Synthetic peptide; note = XENP020536 vhCDR2
EIRTKANNFATYYAESVKG

SEQ ID NO: 19049 - protein, 10 aa, synthetic construct
  source 1..10: note = Description of Artificial Sequence: Synthetic peptide; note = XENP020536 vhCDR3
LANWDWYFDV

SEQ ID NO: 19050 - protein, 218 aa, synthetic construct; identical to SEQ ID NO: 17590
  source 1..218: note = Description of Artificial Sequence: Synthetic polypeptide; note = XENP020536 7G8_H0.84_L0_IgG1_PVA_/S267K Light Chain

SEQ ID NO: 19051 - protein, 111 aa, synthetic construct; identical to SEQ ID NO: 17591
  source 1..111: note = Description of Artificial Sequence: Synthetic polypeptide; note = VL of XENP020536

SEQ ID NO: 19052 - protein, 15 aa, synthetic construct
  source 1..15: note = Description of Artificial Sequence: Synthetic peptide; note = XENP020536 vlCDR1
KASQSVDYDGDSYMN

SEQ ID NO: 19053 - protein, 7 aa, synthetic construct
  source 1..7: note = Description of Artificial Sequence: Synthetic peptide; note = XENP020536 vlCDR2
AASNLES

SEQ ID NO: 19054 - protein, 9 aa, synthetic construct
  source 1..9: note = Description of Artificial Sequence: Synthetic peptide; note = XENP020536 vlCDR3
QQSNEDPFT

SEQ ID NO: 19055 - protein, 450 aa, synthetic construct
  source 1..450: note = Description of Artificial Sequence: Synthetic polypeptide; note = XENP020537 7G8_H0.85_L0_IgG1_PVA_/S267K Heavy Chain
EVKLEESGGGLVQPGGSMKLSCAASGFTFSDAWMDWVRQSPEKGLEWVAEIRTKANNAATYYAESVKGRFTISRDDSKSSVYLQMNSLRAEDTGIYYCTRLANWDWYFDVWGAGTTVTVSSASTKGPSVFPLAPSSKSTSGGTAALGCLVKDYFPEPVTVSWNSGALTSGVHTFPAVLQSSGLYSLSSVVTVPSSSLGTQTYICNVNHKPSDTKVDKKVEPKSCDKTHTCPPCPAPPVAGPSVFLFPPKPKDTLMISRTPEVTCVVVDVKHEDPEVKFNWYVDGVEVHNAKTKPREEEYNSTYRVVSVLTVLHQDWLNGKEYKCKVSNKALPAPIEKTISKAKGQPREPQVYTLPPSREEMTKNQVSLTCDVSGFYPSDIAVEWESDGQPENNYKTTPPVLDSDGSFFLYSKLTVDKSRWEQGDVFSCSVMHEALHNHYTQKSLSLSPGK

SEQ ID NO: 19056 - protein, 121 aa, synthetic construct
  source 1..121: note = Description of Artificial Sequence: Synthetic polypeptide; note = VH of XENP020537
EVKLEESGGGLVQPGGSMKLSCAASGFTFSDAWMDWVRQSPEKGLEWVAEIRTKANNAATYYAESVKGRFTISRDDSKSSVYLQMNSLRAEDTGIYYCTRLANWDWYFDVWGAGTTVTVSS

SEQ ID NO: 19057 - protein, 5 aa, synthetic construct
  source 1..5: note = Description of Artificial Sequence: Synthetic peptide; note = XENP020537 vhCDR1
DAWMD

SEQ ID NO: 19058 - protein, 19 aa, synthetic construct
  source 1..19: note = Description of Artificial Sequence: Synthetic peptide; note = XENP020537 vhCDR2
EIRTKANNAATYYAESVKG

SEQ ID NO: 19059 - protein, 10 aa, synthetic construct
  source 1..10: note = Description of Artificial Sequence: Synthetic peptide; note = XENP020537 vhCDR3
LANWDWYFDV

SEQ ID NO: 19060 - protein, 218 aa, synthetic construct; identical to SEQ ID NO: 17590
  source 1..218: note = Description of Artificial Sequence: Synthetic polypeptide; note = XENP020537 7G8_H0.85_L0_IgG1_PVA_/S267K Light Chain

SEQ ID NO: 19061 - protein, 111 aa, synthetic construct; identical to SEQ ID NO: 17591
  source 1..111: note = Description of Artificial Sequence: Synthetic polypeptide; note = VL of XENP020537

SEQ ID NO: 19062 - protein, 15 aa, synthetic construct
  source 1..15: note = Description of Artificial Sequence: Synthetic peptide; note = XENP020537 vlCDR1
KASQSVDYDGDSYMN

SEQ ID NO: 19063 - protein, 7 aa, synthetic construct
  source 1..7: note = Description of Artificial Sequence: Synthetic peptide; note = XENP020537 vlCDR2
AASNLES

SEQ ID NO: 19064 - protein, 9 aa, synthetic construct
  source 1..9: note = Description of Artificial Sequence: Synthetic peptide; note = XENP020537 vlCDR3
QQSNEDPFT

SEQ ID NO: 19065 - protein, 450 aa, synthetic construct
  source 1..450: note = Description of Artificial Sequence: Synthetic polypeptide; note = XENP020538 7G8_H0.86_L0_IgG1_PVA_/S267K Heavy Chain
EVKLEESGGGLVQPGGSMKLSCAASGFTFSDAWMDWVRQSPEKGLEWVAEIRTKANNKATYYAESVKGRFTISRDDSKSSVYLQMNSLRAEDTGIYYCTRLANWDWYFDVWGAGTTVTVSSASTKGPSVFPLAPSSKSTSGGTAALGCLVKDYFPEPVTVSWNSGALTSGVHTFPAVLQSSGLYSLSSVVTVPSSSLGTQTYICNVNHKPSDTKVDKKVEPKSCDKTHTCPPCPAPPVAGPSVFLFPPKPKDTLMISRTPEVTCVVVDVKHEDPEVKFNWYVDGVEVHNAKTKPREEEYNSTYRVVSVLTVLHQDWLNGKEYKCKVSNKALPAPIEKTISKAKGQPREPQVYTLPPSREEMTKNQVSLTCDVSGFYPSDIAVEWESDGQPENNYKTTPPVLDSDGSFFLYSKLTVDKSRWEQGDVFSCSVMHEALHNHYTQKSLSLSPGK

SEQ ID NO: 19066 - protein, 121 aa, synthetic construct
  source 1..121: note = Description of Artificial Sequence: Synthetic polypeptide; note = VH of XENP020538
EVKLEESGGGLVQPGGSMKLSCAASGFTFSDAWMDWVRQSPEKGLEWVAEIRTKANNKATYYAESVKGRFTISRDDSKSSVYLQMNSLRAEDTGIYYCTRLANWDWYFDVWGAGTTVTVSS

SEQ ID NO: 19067 - protein, 5 aa, synthetic construct
  source 1..5: note = Description of Artificial Sequence: Synthetic peptide; note = XENP020538 vhCDR1
DAWMD

SEQ ID NO: 19068 - protein, 19 aa, synthetic construct
  source 1..19: note = Description of Artificial Sequence: Synthetic peptide; note = XENP020538 vhCDR2
EIRTKANNKATYYAESVKG

SEQ ID NO: 19069 - protein, 10 aa, synthetic construct
  source 1..10: note = Description of Artificial Sequence: Synthetic peptide; note = XENP020538 vhCDR3
LANWDWYFDV

SEQ ID NO: 19070 - protein, 218 aa, synthetic construct; identical to SEQ ID NO: 17590
  source 1..218: note = Description of Artificial Sequence: Synthetic polypeptide; note = XENP020538 7G8_H0.86_L0_IgG1_PVA_/S267K Light Chain

SEQ ID NO: 19071 - protein, 111 aa, synthetic construct; identical to SEQ ID NO: 17591
  source 1..111: note = Description of Artificial Sequence: Synthetic polypeptide; note = VL of XENP020538

SEQ ID NO: 19072 - protein, 15 aa, synthetic construct
  source 1..15: note = Description of Artificial Sequence: Synthetic peptide; note = XENP020538 vlCDR1
KASQSVDYDGDSYMN

SEQ ID NO: 19073 - protein, 7 aa, synthetic construct
  source 1..7: note = Description of Artificial Sequence: Synthetic peptide; note = XENP020538 vlCDR2
AASNLES

SEQ ID NO: 19074 - protein, 9 aa, synthetic construct
  source 1..9: note = Description of Artificial Sequence: Synthetic peptide; note = XENP020538 vlCDR3
QQSNEDPFT

SEQ ID NO: 19075 - protein, 450 aa, synthetic construct
  source 1..450: note = Description of Artificial Sequence: Synthetic polypeptide; note = XENP020539 7G8_H0.87_L0_IgG1_PVA_/S267K Heavy Chain
EVKLEESGGGLVQPGGSMKLSCAASGFTFSDAWMDWVRQSPEKGLEWVAEIRTKANNGATYYAESVKGRFTISRDDSKSSVYLQMNSLRAEDTGIYYCTRLANWDWYFDVWGAGTTVTVSSASTKGPSVFPLAPSSKSTSGGTAALGCLVKDYFPEPVTVSWNSGALTSGVHTFPAVLQSSGLYSLSSVVTVPSSSLGTQTYICNVNHKPSDTKVDKKVEPKSCDKTHTCPPCPAPPVAGPSVFLFPPKPKDTLMISRTPEVTCVVVDVKHEDPEVKFNWYVDGVEVHNAKTKPREEEYNSTYRVVSVLTVLHQDWLNGKEYKCKVSNKALPAPIEKTISKAKGQPREPQVYTLPPSREEMTKNQVSLTCDVSGFYPSDIAVEWESDGQPENNYKTTPPVLDSDGSFFLYSKLTVDKSRWEQGDVFSCSVMHEALHNHYTQKSLSLSPGK

SEQ ID NO: 19076 - protein, 121 aa, synthetic construct
  source 1..121: note = Description of Artificial Sequence: Synthetic polypeptide; note = VH of XENP020539
EVKLEESGGGLVQPGGSMKLSCAASGFTFSDAWMDWVRQSPEKGLEWVAEIRTKANNGATYYAESVKGRFTISRDDSKSSVYLQMNSLRAEDTGIYYCTRLANWDWYFDVWGAGTTVTVSS

SEQ ID NO: 19077 - protein, 5 aa, synthetic construct
  source 1..5: note = Description of Artificial Sequence: Synthetic peptide; note = XENP020539 vhCDR1
DAWMD

SEQ ID NO: 19078 - protein, 19 aa, synthetic construct
  source 1..19: note = Description of Artificial Sequence: Synthetic peptide; note = XENP020539 vhCDR2
EIRTKANNGATYYAESVKG

SEQ ID NO: 19079 - protein, 10 aa, synthetic construct
  source 1..10: note = Description of Artificial Sequence: Synthetic peptide; note = XENP020539 vhCDR3
LANWDWYFDV

SEQ ID NO: 19080 - protein, 218 aa, synthetic construct; identical to SEQ ID NO: 17590
  source 1..218: note = Description of Artificial Sequence: Synthetic polypeptide; note = XENP020539 7G8_H0.87_L0_IgG1_PVA_/S267K Light Chain

SEQ ID NO: 19081 - protein, 111 aa, synthetic construct; identical to SEQ ID NO: 17591
  source 1..111: note = Description of Artificial Sequence: Synthetic polypeptide; note = VL of XENP020539

SEQ ID NO: 19082 - protein, 15 aa, synthetic construct
  source 1..15: note = Description of Artificial Sequence: Synthetic peptide; note = XENP020539 vlCDR1
KASQSVDYDGDSYMN

SEQ ID NO: 19083 - protein, 7 aa, synthetic construct
  source 1..7: note = Description of Artificial Sequence: Synthetic peptide; note = XENP020539 vlCDR2
AASNLES

SEQ ID NO: 19084 - protein, 9 aa, synthetic construct
  source 1..9: note = Description of Artificial Sequence: Synthetic peptide; note = XENP020539 vlCDR3
QQSNEDPFT

SEQ ID NO: 19085 - protein, 450 aa, synthetic construct
  source 1..450: note = Description of Artificial Sequence: Synthetic polypeptide; note = XENP020540 7G8_H0.88_L0_IgG1_PVA_/S267K Heavy Chain
EVKLEESGGGLVQPGGSMKLSCAASGFTFSDAWMDWVRQSPEKGLEWVAEIRTKANNLATYYAESVKGRFTISRDDSKSSVYLQMNSLRAEDTGIYYCTRLANWDWYFDVWGAGTTVTVSSASTKGPSVFPLAPSSKSTSGGTAALGCLVKDYFPEPVTVSWNSGALTSGVHTFPAVLQSSGLYSLSSVVTVPSSSLGTQTYICNVNHKPSDTKVDKKVEPKSCDKTHTCPPCPAPPVAGPSVFLFPPKPKDTLMISRTPEVTCVVVDVKHEDPEVKFNWYVDGVEVHNAKTKPREEEYNSTYRVVSVLTVLHQDWLNGKEYKCKVSNKALPAPIEKTISKAKGQPREPQVYTLPPSREEMTKNQVSLTCDVSGFYPSDIAVEWESDGQPENNYKTTPPVLDSDGSFFLYSKLTVDKSRWEQGDVFSCSVMHEALHNHYTQKSLSLSPGK

SEQ ID NO: 19086 - protein, 121 aa, synthetic construct
  source 1..121: note = Description of Artificial Sequence: Synthetic polypeptide; note = VH of XENP020540
EVKLEESGGGLVQPGGSMKLSCAASGFTFSDAWMDWVRQSPEKGLEWVAEIRTKANNLATYYAESVKGRFTISRDDSKSSVYLQMNSLRAEDTGIYYCTRLANWDWYFDVWGAGTTVTVSS

SEQ ID NO: 19087 - protein, 5 aa, synthetic construct
  source 1..5: note = Description of Artificial Sequence: Synthetic peptide; note = XENP020540 vhCDR1
DAWMD

SEQ ID NO: 19088 - protein, 19 aa, synthetic construct
  source 1..19: note = Description of Artificial Sequence: Synthetic peptide; note = XENP020540 vhCDR2
EIRTKANNLATYYAESVKG

SEQ ID NO: 19089 - protein, 10 aa, synthetic construct
  source 1..10: note = Description of Artificial Sequence: Synthetic peptide; note = XENP020540 vhCDR3
LANWDWYFDV

SEQ ID NO: 19090 - protein, 218 aa, synthetic construct; identical to SEQ ID NO: 17590
  source 1..218: note = Description of Artificial Sequence: Synthetic polypeptide; note = XENP020540 7G8_H0.88_L0_IgG1_PVA_/S267K Light Chain

SEQ ID NO: 19091 - protein, 111 aa, synthetic construct; identical to SEQ ID NO: 17591
  source 1..111: note = Description of Artificial Sequence: Synthetic polypeptide; note = VL of XENP020540

SEQ ID NO: 19092 - protein, 15 aa, synthetic construct
  source 1..15: note = Description of Artificial Sequence: Synthetic peptide; note = XENP020540 vlCDR1
KASQSVDYDGDSYMN

SEQ ID NO: 19093 - protein, 7 aa, synthetic construct
  source 1..7: note = Description of Artificial Sequence: Synthetic peptide; note = XENP020540 vlCDR2
AASNLES

SEQ ID NO: 19094 - protein, 9 aa, synthetic construct
  source 1..9: note = Description of Artificial Sequence: Synthetic peptide; note = XENP020540 vlCDR3
QQSNEDPFT

SEQ ID NO: 19095 - protein, 450 aa, synthetic construct
  source 1..450: note = Description of Artificial Sequence: Synthetic polypeptide; note = XENP020541 7G8_H0.89_L0_IgG1_PVA_/S267K Heavy Chain
EVKLEESGGGLVQPGGSMKLSCAASGFTFSDAWMDWVRQSPEKGLEWVAEIRTKANNHGTYYAESVKGRFTISRDDSKSSVYLQMNSLRAEDTGIYYCTRLANWDWYFDVWGAGTTVTVSSASTKGPSVFPLAPSSKSTSGGTAALGCLVKDYFPEPVTVSWNSGALTSGVHTFPAVLQSSGLYSLSSVVTVPSSSLGTQTYICNVNHKPSDTKVDKKVEPKSCDKTHTCPPCPAPPVAGPSVFLFPPKPKDTLMISRTPEVTCVVVDVKHEDPEVKFNWYVDGVEVHNAKTKPREEEYNSTYRVVSVLTVLHQDWLNGKEYKCKVSNKALPAPIEKTISKAKGQPREPQVYTLPPSREEMTKNQVSLTCDVSGFYPSDIAVEWESDGQPENNYKTTPPVLDSDGSFFLYSKLTVDKSRWEQGDVFSCSVMHEALHNHYTQKSLSLSPGK

SEQ ID NO: 19096 - protein, 121 aa, synthetic construct
  source 1..121: note = Description of Artificial Sequence: Synthetic polypeptide; note = VH of XENP020541
EVKLEESGGGLVQPGGSMKLSCAASGFTFSDAWMDWVRQSPEKGLEWVAEIRTKANNHGTYYAESVKGRFTISRDDSKSSVYLQMNSLRAEDTGIYYCTRLANWDWYFDVWGAGTTVTVSS

SEQ ID NO: 19097 - protein, 5 aa, synthetic construct
  source 1..5: note = Description of Artificial Sequence: Synthetic peptide; note = XENP020541 vhCDR1
DAWMD

SEQ ID NO: 19098 - protein, 19 aa, synthetic construct
  source 1..19: note = Description of Artificial Sequence: Synthetic peptide; note = XENP020541 vhCDR2
EIRTKANNHGTYYAESVKG

SEQ ID NO: 19099 - protein, 10 aa, synthetic construct
  source 1..10: note = Description of Artificial Sequence: Synthetic peptide; note = XENP020541 vhCDR3
LANWDWYFDV

SEQ ID NO: 19100 - protein, 218 aa, synthetic construct; identical to SEQ ID NO: 17590
  source 1..218: note = Description of Artificial Sequence: Synthetic polypeptide; note = XENP020541 7G8_H0.89_L0_IgG1_PVA_/S267K Light Chain

SEQ ID NO: 19101 - protein, 111 aa, synthetic construct; identical to SEQ ID NO: 17591
  source 1..111: note = Description of Artificial Sequence: Synthetic polypeptide; note = VL of XENP020541

SEQ ID NO: 19102 - protein, 15 aa, synthetic construct
  source 1..15: note = Description of Artificial Sequence: Synthetic peptide; note = XENP020541 vlCDR1
KASQSVDYDGDSYMN

SEQ ID NO: 19103 - protein, 7 aa, synthetic construct
  source 1..7: note = Description of Artificial Sequence: Synthetic peptide; note = XENP020541 vlCDR2
AASNLES

SEQ ID NO: 19104 - protein, 9 aa, synthetic construct
  source 1..9: note = Description of Artificial Sequence: Synthetic peptide; note = XENP020541 vlCDR3
QQSNEDPFT

SEQ ID NO: 19105 - protein, 450 aa, synthetic construct
  source 1..450: note = Description of Artificial Sequence: Synthetic polypeptide; note = XENP020542 7G8_H0.90_L0_IgG1_PVA_/S267K Heavy Chain
EVKLEESGGGLVQPGGSMKLSCAASGFTFSDAWMDWVRQSPEKGLEWVAEIRTKANNHHTYYAESVKGRFTISRDDSKSSVYLQMNSLRAEDTGIYYCTRLANWDWYFDVWGAGTTVTVSSASTKGPSVFPLAPSSKSTSGGTAALGCLVKDYFPEPVTVSWNSGALTSGVHTFPAVLQSSGLYSLSSVVTVPSSSLGTQTYICNVNHKPSDTKVDKKVEPKSCDKTHTCPPCPAPPVAGPSVFLFPPKPKDTLMISRTPEVTCVVVDVKHEDPEVKFNWYVDGVEVHNAKTKPREEEYNSTYRVVSVLTVLHQDWLNGKEYKCKVSNKALPAPIEKTISKAKGQPREPQVYTLPPSREEMTKNQVSLTCDVSGFYPSDIAVEWESDGQPENNYKTTPPVLDSDGSFFLYSKLTVDKSRWEQGDVFSCSVMHEALHNHYTQKSLSLSPGK

SEQ ID NO: 19106 - protein, 121 aa, synthetic construct
  source 1..121: note = Description of Artificial Sequence: Synthetic polypeptide; note = VH of XENP020542
EVKLEESGGGLVQPGGSMKLSCAASGFTFSDAWMDWVRQSPEKGLEWVAEIRTKANNHHTYYAESVKGRFTISRDDSKSSVYLQMNSLRAEDTGIYYCTRLANWDWYFDVWGAGTTVTVSS

SEQ ID NO: 19107 - protein, 5 aa, synthetic construct
  source 1..5: note = Description of Artificial Sequence: Synthetic peptide; note = XENP020542 vhCDR1
DAWMD

SEQ ID NO: 19108 - protein, 19 aa, synthetic construct
  source 1..19: note = Description of Artificial Sequence: Synthetic peptide; note = XENP020542 vhCDR2
EIRTKANNHHTYYAESVKG

SEQ ID NO: 19109 - protein, 10 aa, synthetic construct
  source 1..10: note = Description of Artificial Sequence: Synthetic peptide; note = XENP020542 vhCDR3
LANWDWYFDV

SEQ ID NO: 19110 - protein, 218 aa, synthetic construct; identical to SEQ ID NO: 17590
  source 1..218: note = Description of Artificial Sequence: Synthetic polypeptide; note = XENP020542 7G8_H0.90_L0_IgG1_PVA_/S267K Light Chain

SEQ ID NO: 19111 - protein, 111 aa, synthetic construct; identical to SEQ ID NO: 17591
  source 1..111: note = Description of Artificial Sequence: Synthetic polypeptide; note = VL of XENP020542

SEQ ID NO: 19112 - protein, 15 aa, synthetic construct
  source 1..15: note = Description of Artificial Sequence: Synthetic peptide; note = XENP020542 vlCDR1
KASQSVDYDGDSYMN

SEQ ID NO: 19113 - protein, 7 aa, synthetic construct
  source 1..7: note = Description of Artificial Sequence: Synthetic peptide; note = XENP020542 vlCDR2
AASNLES

SEQ ID NO: 19114 - protein, 9 aa, synthetic construct
  source 1..9: note = Description of Artificial Sequence: Synthetic peptide; note = XENP020542 vlCDR3
QQSNEDPFT

SEQ ID NO: 19115 - protein, 450 aa, synthetic construct
  source 1..450: note = Description of Artificial Sequence: Synthetic polypeptide; note = XENP020543 7G8_H0.91_L0_IgG1_PVA_/S267K Heavy Chain
EVKLEESGGGLVQPGGSMKLSCAASGFTFSDAWMDWVRQSPEKGLEWVAEIRTKANNHQTYYAESVKGRFTISRDDSKSSVYLQMNSLRAEDTGIYYCTRLANWDWYFDVWGAGTTVTVSSASTKGPSVFPLAPSSKSTSGGTAALGCLVKDYFPEPVTVSWNSGALTSGVHTFPAVLQSSGLYSLSSVVTVPSSSLGTQTYICNVNHKPSDTKVDKKVEPKSCDKTHTCPPCPAPPVAGPSVFLFPPKPKDTLMISRTPEVTCVVVDVKHEDPEVKFNWYVDGVEVHNAKTKPREEEYNSTYRVVSVLTVLHQDWLNGKEYKCKVSNKALPAPIEKTISKAKGQPREPQVYTLPPSREEMTKNQVSLTCDVSGFYPSDIAVEWESDGQPENNYKTTPPVLDSDGSFFLYSKLTVDKSRWEQGDVFSCSVMHEALHNHYTQKSLSLSPGK

SEQ ID NO: 19116 - protein, 121 aa, synthetic construct
  source 1..121: note = Description of Artificial Sequence: Synthetic polypeptide; note = VH of XENP020543
EVKLEESGGGLVQPGGSMKLSCAASGFTFSDAWMDWVRQSPEKGLEWVAEIRTKANNHQTYYAESVKGRFTISRDDSKSSVYLQMNSLRAEDTGIYYCTRLANWDWYFDVWGAGTTVTVSS

SEQ ID NO: 19117 - protein, 5 aa, synthetic construct
  source 1..5: note = Description of Artificial Sequence: Synthetic peptide; note = XENP020543 vhCDR1
DAWMD

SEQ ID NO: 19118 - protein, 19 aa, synthetic construct
  source 1..19: note = Description of Artificial Sequence: Synthetic peptide; note = XENP020543 vhCDR2
EIRTKANNHQTYYAESVKG

SEQ ID NO: 19119 - protein, 10 aa, synthetic construct
  source 1..10: note = Description of Artificial Sequence: Synthetic peptide; note = XENP020543 vhCDR3
LANWDWYFDV

SEQ ID NO: 19120 - protein, 218 aa, synthetic construct; identical to SEQ ID NO: 17590
  source 1..218: note = Description of Artificial Sequence: Synthetic polypeptide; note = XENP020543 7G8_H0.91_L0_IgG1_PVA_/S267K Light Chain

SEQ ID NO: 19121 - protein, 111 aa, synthetic construct; identical to SEQ ID NO: 17591
  source 1..111: note = Description of Artificial Sequence: Synthetic polypeptide; note = VL of XENP020543

SEQ ID NO: 19122 - protein, 15 aa, synthetic construct
  source 1..15: note = Description of Artificial Sequence: Synthetic peptide; note = XENP020543 vlCDR1
KASQSVDYDGDSYMN

SEQ ID NO: 19123 - protein, 7 aa, synthetic construct
  source 1..7: note = Description of Artificial Sequence: Synthetic peptide; note = XENP020543 vlCDR2
AASNLES

SEQ ID NO: 19124 - protein, 9 aa, synthetic construct
  source 1..9: note = Description of Artificial Sequence: Synthetic peptide; note = XENP020543 vlCDR3
QQSNEDPFT

SEQ ID NO: 19125 - protein, 450 aa, synthetic construct
  source 1..450: note = Description of Artificial Sequence: Synthetic polypeptide; note = XENP020544 7G8_H0.92_L0_IgG1_PVA_/S267K Heavy Chain
EVKLEESGGGLVQPGGSMKLSCAASGFTFSDAWMDWVRQSPEKGLEWVAEIRTKANNHDTYYAESVKGRFTISRDDSKSSVYLQMNSLRAEDTGIYYCTRLANWDWYFDVWGAGTTVTVSSASTKGPSVFPLAPSSKSTSGGTAALGCLVKDYFPEPVTVSWNSGALTSGVHTFPAVLQSSGLYSLSSVVTVPSSSLGTQTYICNVNHKPSDTKVDKKVEPKSCDKTHTCPPCPAPPVAGPSVFLFPPKPKDTLMISRTPEVTCVVVDVKHEDPEVKFNWYVDGVEVHNAKTKPREEEYNSTYRVVSVLTVLHQDWLNGKEYKCKVSNKALPAPIEKTISKAKGQPREPQVYTLPPSREEMTKNQVSLTCDVSGFYPSDIAVEWESDGQPENNYKTTPPVLDSDGSFFLYSKLTVDKSRWEQGDVFSCSVMHEALHNHYTQKSLSLSPGK

SEQ ID NO: 19126 - protein, 121 aa, synthetic construct
  source 1..121: note = Description of Artificial Sequence: Synthetic polypeptide; note = VH of XENP020544
EVKLEESGGGLVQPGGSMKLSCAASGFTFSDAWMDWVRQSPEKGLEWVAEIRTKANNHDTYYAESVKGRFTISRDDSKSSVYLQMNSLRAEDTGIYYCTRLANWDWYFDVWGAGTTVTVSS

SEQ ID NO: 19127 - protein, 5 aa, synthetic construct
  source 1..5: note = Description of Artificial Sequence: Synthetic peptide; note = XENP020544 vhCDR1
DAWMD

SEQ ID NO: 19128 - protein, 19 aa, synthetic construct
  source 1..19: note = Description of Artificial Sequence: Synthetic peptide; note = XENP020544 vhCDR2
EIRTKANNHDTYYAESVKG

SEQ ID NO: 19129 - protein, 10 aa, synthetic construct
  source 1..10: note = Description of Artificial Sequence: Synthetic peptide; note = XENP020544 vhCDR3
LANWDWYFDV

SEQ ID NO: 19130 - protein, 218 aa, synthetic construct; identical to SEQ ID NO: 17590
  source 1..218: note = Description of Artificial Sequence: Synthetic polypeptide; note = XENP020544 7G8_H0.92_L0_IgG1_PVA_/S267K Light Chain

SEQ ID NO: 19131 - protein, 111 aa, synthetic construct; identical to SEQ ID NO: 17591
  source 1..111: note = Description of Artificial Sequence: Synthetic polypeptide; note = VL of XENP020544

SEQ ID NO: 19132 - protein, 15 aa, synthetic construct
  source 1..15: note = Description of Artificial Sequence: Synthetic peptide; note = XENP020544 vlCDR1
KASQSVDYDGDSYMN

SEQ ID NO: 19133 - protein, 7 aa, synthetic construct
  source 1..7: note = Description of Artificial Sequence: Synthetic peptide; note = XENP020544 vlCDR2
AASNLES

SEQ ID NO: 19134 - protein, 9 aa, synthetic construct
  source 1..9: note = Description of Artificial Sequence: Synthetic peptide; note = XENP020544 vlCDR3
QQSNEDPFT

SEQ ID NO: 19135 - protein, 450 aa, synthetic construct
  source 1..450: note = Description of Artificial Sequence: Synthetic polypeptide; note = XENP020545 7G8_H0.93_L0_IgG1_PVA_/S267K Heavy Chain
EVKLEESGGGLVQPGGSMKLSCAASGFTFSDAWMDWVRQSPEKGLEWVAEIRTKANNHLTYYAESVKGRFTISRDDSKSSVYLQMNSLRAEDTGIYYCTRLANWDWYFDVWGAGTTVTVSSASTKGPSVFPLAPSSKSTSGGTAALGCLVKDYFPEPVTVSWNSGALTSGVHTFPAVLQSSGLYSLSSVVTVPSSSLGTQTYICNVNHKPSDTKVDKKVEPKSCDKTHTCPPCPAPPVAGPSVFLFPPKPKDTLMISRTPEVTCVVVDVKHEDPEVKFNWYVDGVEVHNAKTKPREEEYNSTYRVVSVLTVLHQDWLNGKEYKCKVSNKALPAPIEKTISKAKGQPREPQVYTLPPSREEMTKNQVSLTCDVSGFYPSDIAVEWESDGQPENNYKTTPPVLDSDGSFFLYSKLTVDKSRWEQGDVFSCSVMHEALHNHYTQKSLSLSPGK

SEQ ID NO: 19136 - protein, 121 aa, synthetic construct
  source 1..121: note = Description of Artificial Sequence: Synthetic polypeptide; note = VH of XENP020545
EVKLEESGGGLVQPGGSMKLSCAASGFTFSDAWMDWVRQSPEKGLEWVAEIRTKANNHLTYYAESVKGRFTISRDDSKSSVYLQMNSLRAEDTGIYYCTRLANWDWYFDVWGAGTTVTVSS

SEQ ID NO: 19137 - protein, 5 aa, synthetic construct
  source 1..5: note = Description of Artificial Sequence: Synthetic peptide; note = XENP020545 vhCDR1
DAWMD

SEQ ID NO: 19138 - protein, 19 aa, synthetic construct
  source 1..19: note = Description of Artificial Sequence: Synthetic peptide; note = XENP020545 vhCDR2
EIRTKANNHLTYYAESVKG

SEQ ID NO: 19139 - protein, 10 aa, synthetic construct
  source 1..10: note = Description of Artificial Sequence: Synthetic peptide; note = XENP020545 vhCDR3
LANWDWYFDV

SEQ ID NO: 19140 - protein, 218 aa, synthetic construct; identical to SEQ ID NO: 17590
  source 1..218: note = Description of Artificial Sequence: Synthetic polypeptide; note = XENP020545 7G8_H0.93_L0_IgG1_PVA_/S267K Light Chain

SEQ ID NO: 19141 - protein, 111 aa, synthetic construct; identical to SEQ ID NO: 17591
  source 1..111: note = Description of Artificial Sequence: Synthetic polypeptide; note = VL of XENP020545

SEQ ID NO: 19142 - protein, 15 aa, synthetic construct
  source 1..15: note = Description of Artificial Sequence: Synthetic peptide; note = XENP020545 vlCDR1
KASQSVDYDGDSYMN

SEQ ID NO: 19143 - protein, 7 aa, synthetic construct
  source 1..7: note = Description of Artificial Sequence: Synthetic peptide; note = XENP020545 vlCDR2
AASNLES

SEQ ID NO: 19144 - protein, 9 aa, synthetic construct
  source 1..9: note = Description of Artificial Sequence: Synthetic peptide; note = XENP020545 vlCDR3
QQSNEDPFT

SEQ ID NO: 19145 - protein, 450 aa, synthetic construct
  source 1..450: note = Description of Artificial Sequence: Synthetic polypeptide; note = XENP020546 7G8_H0.94_L0_IgG1_PVA_/S267K Heavy Chain
EVKLEESGGGLVQPGGSMKLSCAASGFTFSDAWMDWVRQSPEKGLEWVAEIRTKANNHKTYYAESVKGRFTISRDDSKSSVYLQMNSLRAEDTGIYYCTRLANWDWYFDVWGAGTTVTVSSASTKGPSVFPLAPSSKSTSGGTAALGCLVKDYFPEPVTVSWNSGALTSGVHTFPAVLQSSGLYSLSSVVTVPSSSLGTQTYICNVNHKPSDTKVDKKVEPKSCDKTHTCPPCPAPPVAGPSVFLFPPKPKDTLMISRTPEVTCVVVDVKHEDPEVKFNWYVDGVEVHNAKTKPREEEYNSTYRVVSVLTVLHQDWLNGKEYKCKVSNKALPAPIEKTISKAKGQPREPQVYTLPPSREEMTKNQVSLTCDVSGFYPSDIAVEWESDGQPENNYKTTPPVLDSDGSFFLYSKLTVDKSRWEQGDVFSCSVMHEALHNHYTQKSLSLSPGK

SEQ ID NO: 19146 - protein, 121 aa, synthetic construct
  source 1..121: note = Description of Artificial Sequence: Synthetic polypeptide; note = VH of XENP020546
EVKLEESGGGLVQPGGSMKLSCAASGFTFSDAWMDWVRQSPEKGLEWVAEIRTKANNHKTYYAESVKGRFTISRDDSKSSVYLQMNSLRAEDTGIYYCTRLANWDWYFDVWGAGTTVTVSS

SEQ ID NO: 19147 - protein, 5 aa, synthetic construct
  source 1..5: note = Description of Artificial Sequence: Synthetic peptide; note = XENP020546 vhCDR1
DAWMD

SEQ ID NO: 19148 - protein, 19 aa, synthetic construct
  source 1..19: note = Description of Artificial Sequence: Synthetic peptide; note = XENP020546 vhCDR2
EIRTKANNHKTYYAESVKG

SEQ ID NO: 19149 - protein, 10 aa, synthetic construct
  source 1..10: note = Description of Artificial Sequence: Synthetic peptide; note = XENP020546 vhCDR3
LANWDWYFDV

SEQ ID NO: 19150 - protein, 218 aa, synthetic construct; identical to SEQ ID NO: 17590
  source 1..218: note = Description of Artificial Sequence: Synthetic polypeptide; note = XENP020546 7G8_H0.94_L0_IgG1_PVA_/S267K Light Chain

SEQ ID NO: 19151 - protein, 111 aa, synthetic construct; identical to SEQ ID NO: 17591
  source 1..111: note = Description of Artificial Sequence: Synthetic polypeptide; note = VL of XENP020546

SEQ ID NO: 19152 - protein, 15 aa, synthetic construct
  source 1..15: note = Description of Artificial Sequence: Synthetic peptide; note = XENP020546 vlCDR1
KASQSVDYDGDSYMN

SEQ ID NO: 19153 - protein, 7 aa, synthetic construct
  source 1..7: note = Description of Artificial Sequence: Synthetic peptide; note = XENP020546 vlCDR2
AASNLES

SEQ ID NO: 19154 - protein, 9 aa, synthetic construct
  source 1..9: note = Description of Artificial Sequence: Synthetic peptide; note = XENP020546 vlCDR3
QQSNEDPFT

SEQ ID NO: 19155 - protein, 450 aa, synthetic construct
  source 1..450: note = Description of Artificial Sequence: Synthetic polypeptide; note = XENP020547 7G8_H0.95_L0_IgG1_PVA_/S267K Heavy Chain
EVKLEESGGGLVQPGGSMKLSCAASGFTFSDAWMDWVRQSPEKGLEWVAEIRTKANNHYTYYAESVKGRFTISRDDSKSSVYLQMNSLRAEDTGIYYCTRLANWDWYFDVWGAGTTVTVSSASTKGPSVFPLAPSSKSTSGGTAALGCLVKDYFPEPVTVSWNSGALTSGVHTFPAVLQSSGLYSLSSVVTVPSSSLGTQTYICNVNHKPSDTKVDKKVEPKSCDKTHTCPPCPAPPVAGPSVFLFPPKPKDTLMISRTPEVTCVVVDVKHEDPEVKFNWYVDGVEVHNAKTKPREEEYNSTYRVVSVLTVLHQDWLNGKEYKCKVSNKALPAPIEKTISKAKGQPREPQVYTLPPSREEMTKNQVSLTCDVSGFYPSDIAVEWESDGQPENNYKTTPPVLDSDGSFFLYSKLTVDKSRWEQGDVFSCSVMHEALHNHYTQKSLSLSPGK

SEQ ID NO: 19156 - protein, 121 aa, synthetic construct
  source 1..121: note = Description of Artificial Sequence: Synthetic polypeptide; note = VH of XENP020547
EVKLEESGGGLVQPGGSMKLSCAASGFTFSDAWMDWVRQSPEKGLEWVAEIRTKANNHYTYYAESVKGRFTISRDDSKSSVYLQMNSLRAEDTGIYYCTRLANWDWYFDVWGAGTTVTVSS

SEQ ID NO: 19157 - protein, 5 aa, synthetic construct
  source 1..5: note = Description of Artificial Sequence: Synthetic peptide; note = XENP020547 vhCDR1
DAWMD

SEQ ID NO: 19158 - protein, 19 aa, synthetic construct
  source 1..19: note = Description of Artificial Sequence: Synthetic peptide; note = XENP020547 vhCDR2
EIRTKANNHYTYYAESVKG

SEQ ID NO: 19159 - protein, 10 aa, synthetic construct
  source 1..10: note = Description of Artificial Sequence: Synthetic peptide; note = XENP020547 vhCDR3
LANWDWYFDV

SEQ ID NO: 19160 - protein, 218 aa, synthetic construct; identical to SEQ ID NO: 17590
  source 1..218: note = Description of Artificial Sequence: Synthetic polypeptide; note = XENP020547 7G8_H0.95_L0_IgG1_PVA_/S267K Light Chain

SEQ ID NO: 19161 - protein, 111 aa, synthetic construct; identical to SEQ ID NO: 17591
  source 1..111: note = Description of Artificial Sequence: Synthetic polypeptide; note = VL of XENP020547

SEQ ID NO: 19162 - protein, 15 aa, synthetic construct
  source 1..15: note = Description of Artificial Sequence: Synthetic peptide; note = XENP020547 vlCDR1
KASQSVDYDGDSYMN

SEQ ID NO: 19163 - protein, 7 aa, synthetic construct
  source 1..7: note = Description of Artificial Sequence: Synthetic peptide; note = XENP020547 vlCDR2
AASNLES

SEQ ID NO: 19164 - protein, 9 aa, synthetic construct
  source 1..9: note = Description of Artificial Sequence: Synthetic peptide; note = XENP020547 vlCDR3
QQSNEDPFT

SEQ ID NO: 19165 - protein, 450 aa, synthetic construct
  source 1..450: note = Description of Artificial Sequence: Synthetic polypeptide; note = XENP020548 7G8_H0.96_L0_IgG1_PVA_/S267K Heavy Chain
EVKLEESGGGLVQPGGSMKLSCAASGFTFSDAWMDWVRQSPEKGLEWVAEIRTKANNHATFYAESVKGRFTISRDDSKSSVYLQMNSLRAEDTGIYYCTRLANWDWYFDVWGAGTTVTVSSASTKGPSVFPLAPSSKSTSGGTAALGCLVKDYFPEPVTVSWNSGALTSGVHTFPAVLQSSGLYSLSSVVTVPSSSLGTQTYICNVNHKPSDTKVDKKVEPKSCDKTHTCPPCPAPPVAGPSVFLFPPKPKDTLMISRTPEVTCVVVDVKHEDPEVKFNWYVDGVEVHNAKTKPREEEYNSTYRVVSVLTVLHQDWLNGKEYKCKVSNKALPAPIEKTISKAKGQPREPQVYTLPPSREEMTKNQVSLTCDVSGFYPSDIAVEWESDGQPENNYKTTPPVLDSDGSFFLYSKLTVDKSRWEQGDVFSCSVMHEALHNHYTQKSLSLSPGK

SEQ ID NO: 19166 - protein, 121 aa, synthetic construct
  source 1..121: note = Description of Artificial Sequence: Synthetic polypeptide; note = VH of XENP020548
EVKLEESGGGLVQPGGSMKLSCAASGFTFSDAWMDWVRQSPEKGLEWVAEIRTKANNHATFYAESVKGRFTISRDDSKSSVYLQMNSLRAEDTGIYYCTRLANWDWYFDVWGAGTTVTVSS

SEQ ID NO: 19167 - protein, 5 aa, synthetic construct
  source 1..5: note = Description of Artificial Sequence: Synthetic peptide; note = XENP020548 vhCDR1
DAWMD

SEQ ID NO: 19168 - protein, 19 aa, synthetic construct
  source 1..19: note = Description of Artificial Sequence: Synthetic peptide; note = XENP020548 vhCDR2
EIRTKANNHATFYAESVKG

SEQ ID NO: 19169 - protein, 10 aa, synthetic construct
  source 1..10: note = Description of Artificial Sequence: Synthetic peptide; note = XENP020548 vhCDR3
LANWDWYFDV

SEQ ID NO: 19170 - protein, 218 aa, synthetic construct; identical to SEQ ID NO: 17590
  source 1..218: note = Description of Artificial Sequence: Synthetic polypeptide; note = XENP020548 7G8_H0.96_L0_IgG1_PVA_/S267K Light Chain

SEQ ID NO: 19171 - protein, 111 aa, synthetic construct; identical to SEQ ID NO: 17591
  source 1..111: note = Description of Artificial Sequence: Synthetic polypeptide; note = VL of XENP020548

SEQ ID NO: 19172 - protein, 15 aa, synthetic construct
  source 1..15: note = Description of Artificial Sequence: Synthetic peptide; note = XENP020548 vlCDR1
KASQSVDYDGDSYMN

SEQ ID NO: 19173 - protein, 7 aa, synthetic construct
  source 1..7: note = Description of Artificial Sequence: Synthetic peptide; note = XENP020548 vlCDR2
AASNLES

SEQ ID NO: 19174 - protein, 9 aa, synthetic construct
  source 1..9: note = Description of Artificial Sequence: Synthetic peptide; note = XENP020548 vlCDR3
QQSNEDPFT

SEQ ID NO: 19175 - protein, 450 aa, synthetic construct
  source 1..450: note = Description of Artificial Sequence: Synthetic polypeptide; note = XENP020549 7G8_H0.97_L0_IgG1_PVA_/S267K Heavy Chain
EVKLEESGGGLVQPGGSMKLSCAASGFTFSDAWMDWVRQSPEKGLEWVAEIRTKANNHATHYAESVKGRFTISRDDSKSSVYLQMNSLRAEDTGIYYCTRLANWDWYFDVWGAGTTVTVSSASTKGPSVFPLAPSSKSTSGGTAALGCLVKDYFPEPVTVSWNSGALTSGVHTFPAVLQSSGLYSLSSVVTVPSSSLGTQTYICNVNHKPSDTKVDKKVEPKSCDKTHTCPPCPAPPVAGPSVFLFPPKPKDTLMISRTPEVTCVVVDVKHEDPEVKFNWYVDGVEVHNAKTKPREEEYNSTYRVVSVLTVLHQDWLNGKEYKCKVSNKALPAPIEKTISKAKGQPREPQVYTLPPSREEMTKNQVSLTCDVSGFYPSDIAVEWESDGQPENNYKTTPPVLDSDGSFFLYSKLTVDKSRWEQGDVFSCSVMHEALHNHYTQKSLSLSPGK

SEQ ID NO: 19176 - protein, 121 aa, synthetic construct
  source 1..121: note = Description of Artificial Sequence: Synthetic polypeptide; note = VH of XENP020549
EVKLEESGGGLVQPGGSMKLSCAASGFTFSDAWMDWVRQSPEKGLEWVAEIRTKANNHATHYAESVKGRFTISRDDSKSSVYLQMNSLRAEDTGIYYCTRLANWDWYFDVWGAGTTVTVSS

SEQ ID NO: 19177 - protein, 5 aa, synthetic construct
  source 1..5: note = Description of Artificial Sequence: Synthetic peptide; note = XENP020549 vhCDR1
DAWMD

SEQ ID NO: 19178 - protein, 19 aa, synthetic construct
  source 1..19: note = Description of Artificial Sequence: Synthetic peptide; note = XENP020549 vhCDR2
EIRTKANNHATHYAESVKG

SEQ ID NO: 19179 - protein, 10 aa, synthetic construct
  source 1..10: note = Description of Artificial Sequence: Synthetic peptide; note = XENP020549 vhCDR3
LANWDWYFDV

SEQ ID NO: 19180 - protein, 218 aa, synthetic construct; identical to SEQ ID NO: 17590
  source 1..218: note = Description of Artificial Sequence: Synthetic polypeptide; note = XENP020549 7G8_H0.97_L0_IgG1_PVA_/S267K Light Chain

SEQ ID NO: 19181 - protein, 111 aa, synthetic construct; identical to SEQ ID NO: 17591
  source 1..111: note = Description of Artificial Sequence: Synthetic polypeptide; note = VL of XENP020549

SEQ ID NO: 19182 - protein, 15 aa, synthetic construct
  source 1..15: note = Description of Artificial Sequence: Synthetic peptide; note = XENP020549 vlCDR1
KASQSVDYDGDSYMN

SEQ ID NO: 19183 - protein, 7 aa, synthetic construct
  source 1..7: note = Description of Artificial Sequence: Synthetic peptide; note = XENP020549 vlCDR2
AASNLES

SEQ ID NO: 19184 - protein, 9 aa, synthetic construct
  source 1..9: note = Description of Artificial Sequence: Synthetic peptide; note = XENP020549 vlCDR3
QQSNEDPFT

SEQ ID NO: 19185 - protein, 450 aa, synthetic construct
  source 1..450: note = Description of Artificial Sequence: Synthetic polypeptide; note = XENP020550 7G8_H0.98_L0_IgG1_PVA_/S267K Heavy Chain
EVKLEESGGGLVQPGGSMKLSCAASGFTFSDAWMDWVRQSPEKGLEWVAEIRTKANNHATLYAESVKGRFTISRDDSKSSVYLQMNSLRAEDTGIYYCTRLANWDWYFDVWGAGTTVTVSSASTKGPSVFPLAPSSKSTSGGTAALGCLVKDYFPEPVTVSWNSGALTSGVHTFPAVLQSSGLYSLSSVVTVPSSSLGTQTYICNVNHKPSDTKVDKKVEPKSCDKTHTCPPCPAPPVAGPSVFLFPPKPKDTLMISRTPEVTCVVVDVKHEDPEVKFNWYVDGVEVHNAKTKPREEEYNSTYRVVSVLTVLHQDWLNGKEYKCKVSNKALPAPIEKTISKAKGQPREPQVYTLPPSREEMTKNQVSLTCDVSGFYPSDIAVEWESDGQPENNYKTTPPVLDSDGSFFLYSKLTVDKSRWEQGDVFSCSVMHEALHNHYTQKSLSLSPGK

SEQ ID NO: 19186 - protein, 121 aa, synthetic construct
  source 1..121: note = Description of Artificial Sequence: Synthetic polypeptide; note = VH of XENP020550
EVKLEESGGGLVQPGGSMKLSCAASGFTFSDAWMDWVRQSPEKGLEWVAEIRTKANNHATLYAESVKGRFTISRDDSKSSVYLQMNSLRAEDTGIYYCTRLANWDWYFDVWGAGTTVTVSS

SEQ ID NO: 19187 - protein, 5 aa, synthetic construct
  source 1..5: note = Description of Artificial Sequence: Synthetic peptide; note = XENP020550 vhCDR1
DAWMD

SEQ ID NO: 19188 - protein, 19 aa, synthetic construct
  source 1..19: note = Description of Artificial Sequence: Synthetic peptide; note = XENP020550 vhCDR2
EIRTKANNHATLYAESVKG

SEQ ID NO: 19189 - protein, 10 aa, synthetic construct
  source 1..10: note = Description of Artificial Sequence: Synthetic peptide; note = XENP020550 vhCDR3
LANWDWYFDV

SEQ ID NO: 19190 - protein, 218 aa, synthetic construct; identical to SEQ ID NO: 17590
  source 1..218: note = Description of Artificial Sequence: Synthetic polypeptide; note = XENP020550 7G8_H0.98_L0_IgG1_PVA_/S267K Light Chain

SEQ ID NO: 19191 - protein, 111 aa, synthetic construct; identical to SEQ ID NO: 17591
  source 1..111: note = Description of Artificial Sequence: Synthetic polypeptide; note = VL of XENP020550

SEQ ID NO: 19192 - protein, 15 aa, synthetic construct
  source 1..15: note = Description of Artificial Sequence: Synthetic peptide; note = XENP020550 vlCDR1
KASQSVDYDGDSYMN

SEQ ID NO: 19193 - protein, 7 aa, synthetic construct
  source 1..7: note = Description of Artificial Sequence: Synthetic peptide; note = XENP020550 vlCDR2
AASNLES

SEQ ID NO: 19194 - protein, 9 aa, synthetic construct
  source 1..9: note = Description of Artificial Sequence: Synthetic peptide; note = XENP020550 vlCDR3
QQSNEDPFT

SEQ ID NO: 19195 - protein, 450 aa, synthetic construct
  source 1..450: note = Description of Artificial Sequence: Synthetic polypeptide; note = XENP020551 7G8_H0.99_L0_IgG1_PVA_/S267K Heavy Chain
EVKLEESGGGLVQPGGSMKLSCAASGFTFSDAWMDWVRQSPEKGLEWVAEIRTKANNHATWYAESVKGRFTISRDDSKSSVYLQMNSLRAEDTGIYYCTRLANWDWYFDVWGAGTTVTVSSASTKGPSVFPLAPSSKSTSGGTAALGCLVKDYFPEPVTVSWNSGALTSGVHTFPAVLQSSGLYSLSSVVTVPSSSLGTQTYICNVNHKPSDTKVDKKVEPKSCDKTHTCPPCPAPPVAGPSVFLFPPKPKDTLMISRTPEVTCVVVDVKHEDPEVKFNWYVDGVEVHNAKTKPREEEYNSTYRVVSVLTVLHQDWLNGKEYKCKVSNKALPAPIEKTISKAKGQPREPQVYTLPPSREEMTKNQVSLTCDVSGFYPSDIAVEWESDGQPENNYKTTPPVLDSDGSFFLYSKLTVDKSRWEQGDVFSCSVMHEALHNHYTQKSLSLSPGK

SEQ ID NO: 19196 - protein, 121 aa, synthetic construct
  source 1..121: note = Description of Artificial Sequence: Synthetic polypeptide; note = VH of XENP020551
EVKLEESGGGLVQPGGSMKLSCAASGFTFSDAWMDWVRQSPEKGLEWVAEIRTKANNHATWYAESVKGRFTISRDDSKSSVYLQMNSLRAEDTGIYYCTRLANWDWYFDVWGAGTTVTVSS

SEQ ID NO: 19197 - protein, 5 aa, synthetic construct
  source 1..5: note = Description of Artificial Sequence: Synthetic peptide; note = XENP020551 vhCDR1
DAWMD

SEQ ID NO: 19198 - protein, 19 aa, synthetic construct
  source 1..19: note = Description of Artificial Sequence: Synthetic peptide; note = XENP020551 vhCDR2
EIRTKANNHATWYAESVKG

SEQ ID NO: 19199 - protein, 10 aa, synthetic construct
  source 1..10: note = Description of Artificial Sequence: Synthetic peptide; note = XENP020551 vhCDR3
LANWDWYFDV

SEQ ID NO: 19200 - protein, 218 aa, synthetic construct; identical to SEQ ID NO: 17590
  source 1..218: note = Description of Artificial Sequence: Synthetic polypeptide; note = XENP020551 7G8_H0.99_L0_IgG1_PVA_/S267K Light Chain

SEQ ID NO: 19201 - protein, 111 aa, synthetic construct; identical to SEQ ID NO: 17591
  source 1..111: note = Description of Artificial Sequence: Synthetic polypeptide; note = VL of XENP020551

SEQ ID NO: 19202 - protein, 15 aa, synthetic construct
  source 1..15: note = Description of Artificial Sequence: Synthetic peptide; note = XENP020551 vlCDR1
KASQSVDYDGDSYMN

SEQ ID NO: 19203 - protein, 7 aa, synthetic construct
  source 1..7: note = Description of Artificial Sequence: Synthetic peptide; note = XENP020551 vlCDR2
AASNLES

SEQ ID NO: 19204 - protein, 9 aa, synthetic construct
  source 1..9: note = Description of Artificial Sequence: Synthetic peptide; note = XENP020551 vlCDR3
QQSNEDPFT

SEQ ID NO: 19205 - protein, 450 aa, synthetic construct
  source 1..450: note = Description of Artificial Sequence: Synthetic polypeptide; note = XENP020552 7G8_H0.100_L0_IgG1_PVA_/S267K Heavy Chain
EVKLEESGGGLVQPGGSMKLSCAASGFTFSDAWMDWVRQSPEKGLEWVAEIRTKANNHATVYAESVKGRFTISRDDSKSSVYLQMNSLRAEDTGIYYCTRLANWDWYFDVWGAGTTVTVSSASTKGPSVFPLAPSSKSTSGGTAALGCLVKDYFPEPVTVSWNSGALTSGVHTFPAVLQSSGLYSLSSVVTVPSSSLGTQTYICNVNHKPSDTKVDKKVEPKSCDKTHTCPPCPAPPVAGPSVFLFPPKPKDTLMISRTPEVTCVVVDVKHEDPEVKFNWYVDGVEVHNAKTKPREEEYNSTYRVVSVLTVLHQDWLNGKEYKCKVSNKALPAPIEKTISKAKGQPREPQVYTLPPSREEMTKNQVSLTCDVSGFYPSDIAVEWESDGQPENNYKTTPPVLDSDGSFFLYSKLTVDKSRWEQGDVFSCSVMHEALHNHYTQKSLSLSPGK

SEQ ID NO: 19206 - protein, 121 aa, synthetic construct
  source 1..121: note = Description of Artificial Sequence: Synthetic polypeptide; note = VH of XENP020552
EVKLEESGGGLVQPGGSMKLSCAASGFTFSDAWMDWVRQSPEKGLEWVAEIRTKANNHATVYAESVKGRFTISRDDSKSSVYLQMNSLRAEDTGIYYCTRLANWDWYFDVWGAGTTVTVSS

SEQ ID NO: 19207 - protein, 5 aa, synthetic construct
  source 1..5: note = Description of Artificial Sequence: Synthetic peptide; note = XENP020552 vhCDR1
DAWMD

SEQ ID NO: 19208 - protein, 19 aa, synthetic construct
  source 1..19: note = Description of Artificial Sequence: Synthetic peptide; note = XENP020552 vhCDR2
EIRTKANNHATVYAESVKG

SEQ ID NO: 19209 - protein, 10 aa, synthetic construct
  source 1..10: note = Description of Artificial Sequence: Synthetic peptide; note = XENP020552 vhCDR3
LANWDWYFDV

SEQ ID NO: 19210 - protein, 218 aa, synthetic construct; identical to SEQ ID NO: 17590
  source 1..218: note = Description of Artificial Sequence: Synthetic polypeptide; note = XENP020552 7G8_H0.100_L0_IgG1_PVA_/S267K Light Chain

SEQ ID NO: 19211 - protein, 111 aa, synthetic construct; identical to SEQ ID NO: 17591
  source 1..111: note = Description of Artificial Sequence: Synthetic polypeptide; note = VL of XENP020552

SEQ ID NO: 19212 - protein, 15 aa, synthetic construct
  source 1..15: note = Description of Artificial Sequence: Synthetic peptide; note = XENP020552 vlCDR1
KASQSVDYDGDSYMN

SEQ ID NO: 19213 - protein, 7 aa, synthetic construct
  source 1..7: note = Description of Artificial Sequence: Synthetic peptide; note = XENP020552 vlCDR2
AASNLES

SEQ ID NO: 19214 - protein, 9 aa, synthetic construct
  source 1..9: note = Description of Artificial Sequence: Synthetic peptide; note = XENP020552 vlCDR3
QQSNEDPFT

SEQ ID NO: 19215 - protein, 450 aa, synthetic construct
  source 1..450: note = Description of Artificial Sequence: Synthetic polypeptide; note = XENP020553 7G8_H0.101_L0_IgG1_PVA_/S267K Heavy Chain
EVKLEESGGGLVQPGGSMKLSCAASGFTFSDAWMDWVRQSPEKGLEWVAEIRTKANNHATAYAESVKGRFTISRDDSKSSVYLQMNSLRAEDTGIYYCTRLANWDWYFDVWGAGTTVTVSSASTKGPSVFPLAPSSKSTSGGTAALGCLVKDYFPEPVTVSWNSGALTSGVHTFPAVLQSSGLYSLSSVVTVPSSSLGTQTYICNVNHKPSDTKVDKKVEPKSCDKTHTCPPCPAPPVAGPSVFLFPPKPKDTLMISRTPEVTCVVVDVKHEDPEVKFNWYVDGVEVHNAKTKPREEEYNSTYRVVSVLTVLHQDWLNGKEYKCKVSNKALPAPIEKTISKAKGQPREPQVYTLPPSREEMTKNQVSLTCDVSGFYPSDIAVEWESDGQPENNYKTTPPVLDSDGSFFLYSKLTVDKSRWEQGDVFSCSVMHEALHNHYTQKSLSLSPGK

SEQ ID NO: 19216 - protein, 121 aa, synthetic construct
  source 1..121: note = Description of Artificial Sequence: Synthetic polypeptide; note = VH of XENP020553
EVKLEESGGGLVQPGGSMKLSCAASGFTFSDAWMDWVRQSPEKGLEWVAEIRTKANNHATAYAESVKGRFTISRDDSKSSVYLQMNSLRAEDTGIYYCTRLANWDWYFDVWGAGTTVTVSS

SEQ ID NO: 19217 - protein, 5 aa, synthetic construct
  source 1..5: note = Description of Artificial Sequence: Synthetic peptide; note = XENP020553 vhCDR1
DAWMD

SEQ ID NO: 19218 - protein, 19 aa, synthetic construct
  source 1..19: note = Description of Artificial Sequence: Synthetic peptide; note = XENP020553 vhCDR2
EIRTKANNHATAYAESVKG

SEQ ID NO: 19219 - protein, 10 aa, synthetic construct
  source 1..10: note = Description of Artificial Sequence: Synthetic peptide; note = XENP020553 vhCDR3
LANWDWYFDV

SEQ ID NO: 19220 - protein, 218 aa, synthetic construct; identical to SEQ ID NO: 17590
  source 1..218: note = Description of Artificial Sequence: Synthetic polypeptide; note = XENP020553 7G8_H0.101_L0_IgG1_PVA_/S267K Light Chain

SEQ ID NO: 19221 - protein, 111 aa, synthetic construct; identical to SEQ ID NO: 17591
  source 1..111: note = Description of Artificial Sequence: Synthetic polypeptide; note = VL of XENP020553

SEQ ID NO: 19222 - protein, 15 aa, synthetic construct
  source 1..15: note = Description of Artificial Sequence: Synthetic peptide; note = XENP020553 vlCDR1
KASQSVDYDGDSYMN

SEQ ID NO: 19223 - protein, 7 aa, synthetic construct
  source 1..7: note = Description of Artificial Sequence: Synthetic peptide; note = XENP020553 vlCDR2
AASNLES

SEQ ID NO: 19224 - protein, 9 aa, synthetic construct
  source 1..9: note = Description of Artificial Sequence: Synthetic peptide; note = XENP020553 vlCDR3
QQSNEDPFT

SEQ ID NO: 19225 - protein, 450 aa, synthetic construct
  source 1..450: note = Description of Artificial Sequence: Synthetic polypeptide; note = XENP020554 7G8_H0.102_L0_IgG1_PVA_/S267K Heavy Chain
EVKLEESGGGLVQPGGSMKLSCAASGFTFSDAWMDWVRQSPEKGLEWVAEIRTKANNHATQYAESVKGRFTISRDDSKSSVYLQMNSLRAEDTGIYYCTRLANWDWYFDVWGAGTTVTVSSASTKGPSVFPLAPSSKSTSGGTAALGCLVKDYFPEPVTVSWNSGALTSGVHTFPAVLQSSGLYSLSSVVTVPSSSLGTQTYICNVNHKPSDTKVDKKVEPKSCDKTHTCPPCPAPPVAGPSVFLFPPKPKDTLMISRTPEVTCVVVDVKHEDPEVKFNWYVDGVEVHNAKTKPREEEYNSTYRVVSVLTVLHQDWLNGKEYKCKVSNKALPAPIEKTISKAKGQPREPQVYTLPPSREEMTKNQVSLTCDVSGFYPSDIAVEWESDGQPENNYKTTPPVLDSDGSFFLYSKLTVDKSRWEQGDVFSCSVMHEALHNHYTQKSLSLSPGK

SEQ ID NO: 19226 - protein, 121 aa, synthetic construct
  source 1..121: note = Description of Artificial Sequence: Synthetic polypeptide; note = VH of XENP020554
EVKLEESGGGLVQPGGSMKLSCAASGFTFSDAWMDWVRQSPEKGLEWVAEIRTKANNHATQYAESVKGRFTISRDDSKSSVYLQMNSLRAEDTGIYYCTRLANWDWYFDVWGAGTTVTVSS

SEQ ID NO: 19227 - protein, 5 aa, synthetic construct
  source 1..5: note = Description of Artificial Sequence: Synthetic peptide; note = XENP020554 vhCDR1
DAWMD

SEQ ID NO: 19228 - protein, 19 aa, synthetic construct
  source 1..19: note = Description of Artificial Sequence: Synthetic peptide; note = XENP020554 vhCDR2
EIRTKANNHATQYAESVKG

SEQ ID NO: 19229 - protein, 10 aa, synthetic construct
  source 1..10: note = Description of Artificial Sequence: Synthetic peptide; note = XENP020554 vhCDR3
LANWDWYFDV

SEQ ID NO: 19230 - protein, 218 aa, synthetic construct; identical to SEQ ID NO: 17590
  source 1..218: note = Description of Artificial Sequence: Synthetic polypeptide; note = XENP020554 7G8_H0.102_L0_IgG1_PVA_/S267K Light Chain

SEQ ID NO: 19231 - protein, 111 aa, synthetic construct; identical to SEQ ID NO: 17591
  source 1..111: note = Description of Artificial Sequence: Synthetic polypeptide; note = VL of XENP020554

SEQ ID NO: 19232 - protein, 15 aa, synthetic construct
  source 1..15: note = Description of Artificial Sequence: Synthetic peptide; note = XENP020554 vlCDR1
KASQSVDYDGDSYMN

SEQ ID NO: 19233 - protein, 7 aa, synthetic construct
  source 1..7: note = Description of Artificial Sequence: Synthetic peptide; note = XENP020554 vlCDR2
AASNLES

SEQ ID NO: 19234 - protein, 9 aa, synthetic construct
  source 1..9: note = Description of Artificial Sequence: Synthetic peptide; note = XENP020554 vlCDR3
QQSNEDPFT

SEQ ID NO: 19235 - protein, 450 aa, synthetic construct
  source 1..450: note = Description of Artificial Sequence: Synthetic polypeptide; note = XENP020555 7G8_H0.103_L0_IgG1_PVA_/S267K Heavy Chain
EVKLEESGGGLVQPGGSMKLSCAASGFTFSDAWMDWVRQSPEKGLEWVAEIRTKANNHATDYAESVKGRFTISRDDSKSSVYLQMNSLRAEDTGIYYCTRLANWDWYFDVWGAGTTVTVSSASTKGPSVFPLAPSSKSTSGGTAALGCLVKDYFPEPVTVSWNSGALTSGVHTFPAVLQSSGLYSLSSVVTVPSSSLGTQTYICNVNHKPSDTKVDKKVEPKSCDKTHTCPPCPAPPVAGPSVFLFPPKPKDTLMISRTPEVTCVVVDVKHEDPEVKFNWYVDGVEVHNAKTKPREEEYNSTYRVVSVLTVLHQDWLNGKEYKCKVSNKALPAPIEKTISKAKGQPREPQVYTLPPSREEMTKNQVSLTCDVSGFYPSDIAVEWESDGQPENNYKTTPPVLDSDGSFFLYSKLTVDKSRWEQGDVFSCSVMHEALHNHYTQKSLSLSPGK

SEQ ID NO: 19236 - protein, 121 aa, synthetic construct
  source 1..121: note = Description of Artificial Sequence: Synthetic polypeptide; note = VH of XENP020555
EVKLEESGGGLVQPGGSMKLSCAASGFTFSDAWMDWVRQSPEKGLEWVAEIRTKANNHATDYAESVKGRFTISRDDSKSSVYLQMNSLRAEDTGIYYCTRLANWDWYFDVWGAGTTVTVSS

SEQ ID NO: 19237 - protein, 5 aa, synthetic construct
  source 1..5: note = Description of Artificial Sequence: Synthetic peptide; note = XENP020555 vhCDR1
DAWMD

SEQ ID NO: 19238 - protein, 19 aa, synthetic construct
  source 1..19: note = Description of Artificial Sequence: Synthetic peptide; note = XENP020555 vhCDR2
EIRTKANNHATDYAESVKG

SEQ ID NO: 19239 - protein, 10 aa, synthetic construct
  source 1..10: note = Description of Artificial Sequence: Synthetic peptide; note = XENP020555 vhCDR3
LANWDWYFDV

SEQ ID NO: 19240 - protein, 218 aa, synthetic construct; identical to SEQ ID NO: 17590
  source 1..218: note = Description of Artificial Sequence: Synthetic polypeptide; note = XENP020555 7G8_H0.103_L0_IgG1_PVA_/S267K Light Chain

SEQ ID NO: 19241 - protein, 111 aa, synthetic construct; identical to SEQ ID NO: 17591
  source 1..111: note = Description of Artificial Sequence: Synthetic polypeptide; note = VL of XENP020555

SEQ ID NO: 19242 - protein, 15 aa, synthetic construct
  source 1..15: note = Description of Artificial Sequence: Synthetic peptide; note = XENP020555 vlCDR1
KASQSVDYDGDSYMN

SEQ ID NO: 19243 - protein, 7 aa, synthetic construct
  source 1..7: note = Description of Artificial Sequence: Synthetic peptide; note = XENP020555 vlCDR2
AASNLES

SEQ ID NO: 19244 - protein, 9 aa, synthetic construct
  source 1..9: note = Description of Artificial Sequence: Synthetic peptide; note = XENP020555 vlCDR3
QQSNEDPFT

SEQ ID NO: 19245 - protein, 450 aa, synthetic construct
  source 1..450: note = Description of Artificial Sequence: Synthetic polypeptide; note = XENP020556 7G8_H0.104_L0_IgG1_PVA_/S267K Heavy Chain
EVKLEESGGGLVQPGGSMKLSCAASGFTFSDAWMDWVRQSPEKGLEWVAEIRTKANNHATKYAESVKGRFTISRDDSKSSVYLQMNSLRAEDTGIYYCTRLANWDWYFDVWGAGTTVTVSSASTKGPSVFPLAPSSKSTSGGTAALGCLVKDYFPEPVTVSWNSGALTSGVHTFPAVLQSSGLYSLSSVVTVPSSSLGTQTYICNVNHKPSDTKVDKKVEPKSCDKTHTCPPCPAPPVAGPSVFLFPPKPKDTLMISRTPEVTCVVVDVKHEDPEVKFNWYVDGVEVHNAKTKPREEEYNSTYRVVSVLTVLHQDWLNGKEYKCKVSNKALPAPIEKTISKAKGQPREPQVYTLPPSREEMTKNQVSLTCDVSGFYPSDIAVEWESDGQPENNYKTTPPVLDSDGSFFLYSKLTVDKSRWEQGDVFSCSVMHEALHNHYTQKSLSLSPGK

SEQ ID NO: 19246 - protein, 121 aa, synthetic construct
  source 1..121: note = Description of Artificial Sequence: Synthetic polypeptide; note = VH of XENP020556
EVKLEESGGGLVQPGGSMKLSCAASGFTFSDAWMDWVRQSPEKGLEWVAEIRTKANNHATKYAESVKGRFTISRDDSKSSVYLQMNSLRAEDTGIYYCTRLANWDWYFDVWGAGTTVTVSS

SEQ ID NO: 19247 - protein, 5 aa, synthetic construct
  source 1..5: note = Description of Artificial Sequence: Synthetic peptide; note = XENP020556 vhCDR1
DAWMD

SEQ ID NO: 19248 - protein, 19 aa, synthetic construct
  source 1..19: note = Description of Artificial Sequence: Synthetic peptide; note = XENP020556 vhCDR2
EIRTKANNHATKYAESVKG

SEQ ID NO: 19249 - protein, 10 aa, synthetic construct
  source 1..10: note = Description of Artificial Sequence: Synthetic peptide; note = XENP020556 vhCDR3
LANWDWYFDV

SEQ ID NO: 19250 - protein, 218 aa, synthetic construct; identical to SEQ ID NO: 17590
  source 1..218: note = Description of Artificial Sequence: Synthetic polypeptide; note = XENP020556 7G8_H0.104_L0_IgG1_PVA_/S267K Light Chain

SEQ ID NO: 19251 - protein, 111 aa, synthetic construct; identical to SEQ ID NO: 17591
  source 1..111: note = Description of Artificial Sequence: Synthetic polypeptide; note = VL of XENP020556

SEQ ID NO: 19252 - protein, 15 aa, synthetic construct
  source 1..15: note = Description of Artificial Sequence: Synthetic peptide; note = XENP020556 vlCDR1
KASQSVDYDGDSYMN

SEQ ID NO: 19253 - protein, 7 aa, synthetic construct
  source 1..7: note = Description of Artificial Sequence: Synthetic peptide; note = XENP020556 vlCDR2
AASNLES

SEQ ID NO: 19254 - protein, 9 aa, synthetic construct
  source 1..9: note = Description of Artificial Sequence: Synthetic peptide; note = XENP020556 vlCDR3
QQSNEDPFT

SEQ ID NO: 19255 - protein, 450 aa, synthetic construct
  source 1..450: note = Description of Artificial Sequence: Synthetic polypeptide; note = XENP020557 7G8_H0.105_L0_IgG1_PVA_/S267K Heavy Chain
EVKLEESGGGLVQPGGSMKLSCAASGFTFSDAWMDWVRQSPEKGLEWVAEIRTKANNHATYYAESVKGRFTISRDDSKSSVYLQMNSLRAEDTGIYYCTRIANWDWYFDVWGAGTTVTVSSASTKGPSVFPLAPSSKSTSGGTAALGCLVKDYFPEPVTVSWNSGALTSGVHTFPAVLQSSGLYSLSSVVTVPSSSLGTQTYICNVNHKPSDTKVDKKVEPKSCDKTHTCPPCPAPPVAGPSVFLFPPKPKDTLMISRTPEVTCVVVDVKHEDPEVKFNWYVDGVEVHNAKTKPREEEYNSTYRVVSVLTVLHQDWLNGKEYKCKVSNKALPAPIEKTISKAKGQPREPQVYTLPPSREEMTKNQVSLTCDVSGFYPSDIAVEWESDGQPENNYKTTPPVLDSDGSFFLYSKLTVDKSRWEQGDVFSCSVMHEALHNHYTQKSLSLSPGK

SEQ ID NO: 19256 - protein, 121 aa, synthetic construct
  source 1..121: note = Description of Artificial Sequence: Synthetic polypeptide; note = VH of XENP020557
EVKLEESGGGLVQPGGSMKLSCAASGFTFSDAWMDWVRQSPEKGLEWVAEIRTKANNHATYYAESVKGRFTISRDDSKSSVYLQMNSLRAEDTGIYYCTRIANWDWYFDVWGAGTTVTVSS

SEQ ID NO: 19257 - protein, 5 aa, synthetic construct
  source 1..5: note = Description of Artificial Sequence: Synthetic peptide; note = XENP020557 vhCDR1
DAWMD

SEQ ID NO: 19258 - protein, 19 aa, synthetic construct
  source 1..19: note = Description of Artificial Sequence: Synthetic peptide; note = XENP020557 vhCDR2
EIRTKANNHATYYAESVKG

SEQ ID NO: 19259 - protein, 10 aa, synthetic construct
  source 1..10: note = Description of Artificial Sequence: Synthetic peptide; note = XENP020557 vhCDR3
IANWDWYFDV

SEQ ID NO: 19260 - protein, 218 aa, synthetic construct; identical to SEQ ID NO: 17590
  source 1..218: note = Description of Artificial Sequence: Synthetic polypeptide; note = XENP020557 7G8_H0.105_L0_IgG1_PVA_/S267K Light Chain

SEQ ID NO: 19261 - protein, 111 aa, synthetic construct; identical to SEQ ID NO: 17591
  source 1..111: note = Description of Artificial Sequence: Synthetic polypeptide; note = VL of XENP020557

SEQ ID NO: 19262 - protein, 15 aa, synthetic construct
  source 1..15: note = Description of Artificial Sequence: Synthetic peptide; note = XENP020557 vlCDR1
KASQSVDYDGDSYMN

SEQ ID NO: 19263 - protein, 7 aa, synthetic construct
  source 1..7: note = Description of Artificial Sequence: Synthetic peptide; note = XENP020557 vlCDR2
AASNLES

SEQ ID NO: 19264 - protein, 9 aa, synthetic construct
  source 1..9: note = Description of Artificial Sequence: Synthetic peptide; note = XENP020557 vlCDR3
QQSNEDPFT

SEQ ID NO: 19265 - protein, 450 aa, synthetic construct
  source 1..450: note = Description of Artificial Sequence: Synthetic polypeptide; note = XENP020558 7G8_H0.106_L0_IgG1_PVA_/S267K Heavy Chain
EVKLEESGGGLVQPGGSMKLSCAASGFTFSDAWMDWVRQSPEKGLEWVAEIRTKANNHATYYAESVKGRFTISRDDSKSSVYLQMNSLRAEDTGIYYCTRFANWDWYFDVWGAGTTVTVSSASTKGPSVFPLAPSSKSTSGGTAALGCLVKDYFPEPVTVSWNSGALTSGVHTFPAVLQSSGLYSLSSVVTVPSSSLGTQTYICNVNHKPSDTKVDKKVEPKSCDKTHTCPPCPAPPVAGPSVFLFPPKPKDTLMISRTPEVTCVVVDVKHEDPEVKFNWYVDGVEVHNAKTKPREEEYNSTYRVVSVLTVLHQDWLNGKEYKCKVSNKALPAPIEKTISKAKGQPREPQVYTLPPSREEMTKNQVSLTCDVSGFYPSDIAVEWESDGQPENNYKTTPPVLDSDGSFFLYSKLTVDKSRWEQGDVFSCSVMHEALHNHYTQKSLSLSPGK

SEQ ID NO: 19266 - protein, 121 aa, synthetic construct
  source 1..121: note = Description of Artificial Sequence: Synthetic polypeptide; note = VH of XENP020558
EVKLEESGGGLVQPGGSMKLSCAASGFTFSDAWMDWVRQSPEKGLEWVAEIRTKANNHATYYAESVKGRFTISRDDSKSSVYLQMNSLRAEDTGIYYCTRFANWDWYFDVWGAGTTVTVSS

SEQ ID NO: 19267 - protein, 5 aa, synthetic construct
  source 1..5: note = Description of Artificial Sequence: Synthetic peptide; note = XENP020558 vhCDR1
DAWMD

SEQ ID NO: 19268 - protein, 19 aa, synthetic construct
  source 1..19: note = Description of Artificial Sequence: Synthetic peptide; note = XENP020558 vhCDR2
EIRTKANNHATYYAESVKG

SEQ ID NO: 19269 - protein, 10 aa, synthetic construct
  source 1..10: note = Description of Artificial Sequence: Synthetic peptide; note = XENP020558 vhCDR3
FANWDWYFDV

SEQ ID NO: 19270 - protein, 218 aa, synthetic construct; identical to SEQ ID NO: 17590
  source 1..218: note = Description of Artificial Sequence: Synthetic polypeptide; note = XENP020558 7G8_H0.106_L0_IgG1_PVA_/S267K Light Chain

SEQ ID NO: 19271 - protein, 111 aa, synthetic construct; identical to SEQ ID NO: 17591
  source 1..111: note = Description of Artificial Sequence: Synthetic polypeptide; note = VL of XENP020558

SEQ ID NO: 19272 - protein, 15 aa, synthetic construct
  source 1..15: note = Description of Artificial Sequence: Synthetic peptide; note = XENP020558 vlCDR1
KASQSVDYDGDSYMN

SEQ ID NO: 19273 - protein, 7 aa, synthetic construct
  source 1..7: note = Description of Artificial Sequence: Synthetic peptide; note = XENP020558 vlCDR2
AASNLES

SEQ ID NO: 19274 - protein, 9 aa, synthetic construct
  source 1..9: note = Description of Artificial Sequence: Synthetic peptide; note = XENP020558 vlCDR3
QQSNEDPFT

SEQ ID NO: 19275 - protein, 450 aa, synthetic construct
  source 1..450: note = Description of Artificial Sequence: Synthetic polypeptide; note = XENP020559 7G8_H0.107_L0_IgG1_PVA_/S267K Heavy Chain
EVKLEESGGGLVQPGGSMKLSCAASGFTFSDAWMDWVRQSPEKGLEWVAEIRTKANNHATYYAESVKGRFTISRDDSKSSVYLQMNSLRAEDTGIYYCTRVANWDWYFDVWGAGTTVTVSSASTKGPSVFPLAPSSKSTSGGTAALGCLVKDYFPEPVTVSWNSGALTSGVHTFPAVLQSSGLYSLSSVVTVPSSSLGTQTYICNVNHKPSDTKVDKKVEPKSCDKTHTCPPCPAPPVAGPSVFLFPPKPKDTLMISRTPEVTCVVVDVKHEDPEVKFNWYVDGVEVHNAKTKPREEEYNSTYRVVSVLTVLHQDWLNGKEYKCKVSNKALPAPIEKTISKAKGQPREPQVYTLPPSREEMTKNQVSLTCDVSGFYPSDIAVEWESDGQPENNYKTTPPVLDSDGSFFLYSKLTVDKSRWEQGDVFSCSVMHEALHNHYTQKSLSLSPGK

SEQ ID NO: 19276 - protein, 121 aa, synthetic construct
  source 1..121: note = Description of Artificial Sequence: Synthetic polypeptide; note = VH of XENP020559
EVKLEESGGGLVQPGGSMKLSCAASGFTFSDAWMDWVRQSPEKGLEWVAEIRTKANNHATYYAESVKGRFTISRDDSKSSVYLQMNSLRAEDTGIYYCTRVANWDWYFDVWGAGTTVTVSS

SEQ ID NO: 19277 - protein, 5 aa, synthetic construct
  source 1..5: note = Description of Artificial Sequence: Synthetic peptide; note = XENP020559 vhCDR1
DAWMD

SEQ ID NO: 19278 - protein, 19 aa, synthetic construct
  source 1..19: note = Description of Artificial Sequence: Synthetic peptide; note = XENP020559 vhCDR2
EIRTKANNHATYYAESVKG

SEQ ID NO: 19279 - protein, 10 aa, synthetic construct
  source 1..10: note = Description of Artificial Sequence: Synthetic peptide; note = XENP020559 vhCDR3
VANWDWYFDV

SEQ ID NO: 19280 - protein, 218 aa, synthetic construct; identical to SEQ ID NO: 17590
  source 1..218: note = Description of Artificial Sequence: Synthetic polypeptide; note = XENP020559 7G8_H0.107_L0_IgG1_PVA_/S267K Light Chain

SEQ ID NO: 19281 - protein, 111 aa, synthetic construct; identical to SEQ ID NO: 17591
  source 1..111: note = Description of Artificial Sequence: Synthetic polypeptide; note = VL of XENP020559

SEQ ID NO: 19282 - protein, 15 aa, synthetic construct
  source 1..15: note = Description of Artificial Sequence: Synthetic peptide; note = XENP020559 vlCDR1
KASQSVDYDGDSYMN

SEQ ID NO: 19283 - protein, 7 aa, synthetic construct
  source 1..7: note = Description of Artificial Sequence: Synthetic peptide; note = XENP020559 vlCDR2
AASNLES

SEQ ID NO: 19284 - protein, 9 aa, synthetic construct
  source 1..9: note = Description of Artificial Sequence: Synthetic peptide; note = XENP020559 vlCDR3
QQSNEDPFT

SEQ ID NO: 19285 - protein, 450 aa, synthetic construct
  source 1..450: note = Description of Artificial Sequence: Synthetic polypeptide; note = XENP020560 7G8_H0.108_L0_IgG1_PVA_/S267K Heavy Chain
EVKLEESGGGLVQPGGSMKLSCAASGFTFSDAWMDWVRQSPEKGLEWVAEIRTKANNHATYYAESVKGRFTISRDDSKSSVYLQMNSLRAEDTGIYYCTRYANWDWYFDVWGAGTTVTVSSASTKGPSVFPLAPSSKSTSGGTAALGCLVKDYFPEPVTVSWNSGALTSGVHTFPAVLQSSGLYSLSSVVTVPSSSLGTQTYICNVNHKPSDTKVDKKVEPKSCDKTHTCPPCPAPPVAGPSVFLFPPKPKDTLMISRTPEVTCVVVDVKHEDPEVKFNWYVDGVEVHNAKTKPREEEYNSTYRVVSVLTVLHQDWLNGKEYKCKVSNKALPAPIEKTISKAKGQPREPQVYTLPPSREEMTKNQVSLTCDVSGFYPSDIAVEWESDGQPENNYKTTPPVLDSDGSFFLYSKLTVDKSRWEQGDVFSCSVMHEALHNHYTQKSLSLSPGK

SEQ ID NO: 19286 - protein, 121 aa, synthetic construct
  source 1..121: note = Description of Artificial Sequence: Synthetic polypeptide; note = VH of XENP020560
EVKLEESGGGLVQPGGSMKLSCAASGFTFSDAWMDWVRQSPEKGLEWVAEIRTKANNHATYYAESVKGRFTISRDDSKSSVYLQMNSLRAEDTGIYYCTRYANWDWYFDVWGAGTTVTVSS

SEQ ID NO: 19287 - protein, 5 aa, synthetic construct
  source 1..5: note = Description of Artificial Sequence: Synthetic peptide; note = XENP020560 vhCDR1
DAWMD

SEQ ID NO: 19288 - protein, 19 aa, synthetic construct
  source 1..19: note = Description of Artificial Sequence: Synthetic peptide; note = XENP020560 vhCDR2
EIRTKANNHATYYAESVKG

SEQ ID NO: 19289 - protein, 10 aa, synthetic construct
  source 1..10: note = Description of Artificial Sequence: Synthetic peptide; note = XENP020560 vhCDR3
YANWDWYFDV

SEQ ID NO: 19290 - protein, 218 aa, synthetic construct; identical to SEQ ID NO: 17590
  source 1..218: note = Description of Artificial Sequence: Synthetic polypeptide; note = XENP020560 7G8_H0.108_L0_IgG1_PVA_/S267K Light Chain

SEQ ID NO: 19291 - protein, 111 aa, synthetic construct; identical to SEQ ID NO: 17591
  source 1..111: note = Description of Artificial Sequence: Synthetic polypeptide; note = VL of XENP020560

SEQ ID NO: 19292 - protein, 15 aa, synthetic construct
  source 1..15: note = Description of Artificial Sequence: Synthetic peptide; note = XENP020560 vlCDR1
KASQSVDYDGDSYMN

SEQ ID NO: 19293 - protein, 7 aa, synthetic construct
  source 1..7: note = Description of Artificial Sequence: Synthetic peptide; note = XENP020560 vlCDR2
AASNLES

SEQ ID NO: 19294 - protein, 9 aa, synthetic construct
  source 1..9: note = Description of Artificial Sequence: Synthetic peptide; note = XENP020560 vlCDR3
QQSNEDPFT

SEQ ID NO: 19295 - protein, 450 aa, synthetic construct
  source 1..450: note = Description of Artificial Sequence: Synthetic polypeptide; note = XENP020561 7G8_H0.109_L0_IgG1_PVA_/S267K Heavy Chain
EVKLEESGGGLVQPGGSMKLSCAASGFTFSDAWMDWVRQSPEKGLEWVAEIRTKANNHATYYAESVKGRFTISRDDSKSSVYLQMNSLRAEDTGIYYCTRWANWDWYFDVWGAGTTVTVSSASTKGPSVFPLAPSSKSTSGGTAALGCLVKDYFPEPVTVSWNSGALTSGVHTFPAVLQSSGLYSLSSVVTVPSSSLGTQTYICNVNHKPSDTKVDKKVEPKSCDKTHTCPPCPAPPVAGPSVFLFPPKPKDTLMISRTPEVTCVVVDVKHEDPEVKFNWYVDGVEVHNAKTKPREEEYNSTYRVVSVLTVLHQDWLNGKEYKCKVSNKALPAPIEKTISKAKGQPREPQVYTLPPSREEMTKNQVSLTCDVSGFYPSDIAVEWESDGQPENNYKTTPPVLDSDGSFFLYSKLTVDKSRWEQGDVFSCSVMHEALHNHYTQKSLSLSPGK

SEQ ID NO: 19296 - protein, 121 aa, synthetic construct
  source 1..121: note = Description of Artificial Sequence: Synthetic polypeptide; note = VH of XENP020561
EVKLEESGGGLVQPGGSMKLSCAASGFTFSDAWMDWVRQSPEKGLEWVAEIRTKANNHATYYAESVKGRFTISRDDSKSSVYLQMNSLRAEDTGIYYCTRWANWDWYFDVWGAGTTVTVSS

SEQ ID NO: 19297 - protein, 5 aa, synthetic construct
  source 1..5: note = Description of Artificial Sequence: Synthetic peptide; note = XENP020561 vhCDR1
DAWMD

SEQ ID NO: 19298 - protein, 19 aa, synthetic construct
  source 1..19: note = Description of Artificial Sequence: Synthetic peptide; note = XENP020561 vhCDR2
EIRTKANNHATYYAESVKG

SEQ ID NO: 19299 - protein, 10 aa, synthetic construct
  source 1..10: note = Description of Artificial Sequence: Synthetic peptide; note = XENP020561 vhCDR3
WANWDWYFDV

SEQ ID NO: 19300 - protein, 218 aa, synthetic construct; identical to SEQ ID NO: 17590
  source 1..218: note = Description of Artificial Sequence: Synthetic polypeptide; note = XENP020561 7G8_H0.109_L0_IgG1_PVA_/S267K Light Chain

SEQ ID NO: 19301 - protein, 111 aa, synthetic construct; identical to SEQ ID NO: 17591
  source 1..111: note = Description of Artificial Sequence: Synthetic polypeptide; note = VL of XENP020561

SEQ ID NO: 19302 - protein, 15 aa, synthetic construct
  source 1..15: note = Description of Artificial Sequence: Synthetic peptide; note = XENP020561 vlCDR1
KASQSVDYDGDSYMN

SEQ ID NO: 19303 - protein, 7 aa, synthetic construct
  source 1..7: note = Description of Artificial Sequence: Synthetic peptide; note = XENP020561 vlCDR2
AASNLES

SEQ ID NO: 19304 - protein, 9 aa, synthetic construct
  source 1..9: note = Description of Artificial Sequence: Synthetic peptide; note = XENP020561 vlCDR3
QQSNEDPFT

SEQ ID NO: 19305 - protein, 450 aa, synthetic construct
  source 1..450: note = Description of Artificial Sequence: Synthetic polypeptide; note = XENP020562 7G8_H0.110_L0_IgG1_PVA_/S267K Heavy Chain
EVKLEESGGGLVQPGGSMKLSCAASGFTFSDAWMDWVRQSPEKGLEWVAEIRTKANNHATYYAESVKGRFTISRDDSKSSVYLQMNSLRAEDTGIYYCTRDANWDWYFDVWGAGTTVTVSSASTKGPSVFPLAPSSKSTSGGTAALGCLVKDYFPEPVTVSWNSGALTSGVHTFPAVLQSSGLYSLSSVVTVPSSSLGTQTYICNVNHKPSDTKVDKKVEPKSCDKTHTCPPCPAPPVAGPSVFLFPPKPKDTLMISRTPEVTCVVVDVKHEDPEVKFNWYVDGVEVHNAKTKPREEEYNSTYRVVSVLTVLHQDWLNGKEYKCKVSNKALPAPIEKTISKAKGQPREPQVYTLPPSREEMTKNQVSLTCDVSGFYPSDIAVEWESDGQPENNYKTTPPVLDSDGSFFLYSKLTVDKSRWEQGDVFSCSVMHEALHNHYTQKSLSLSPGK

SEQ ID NO: 19306 - protein, 121 aa, synthetic construct
  source 1..121: note = Description of Artificial Sequence: Synthetic polypeptide; note = VH of XENP020562
EVKLEESGGGLVQPGGSMKLSCAASGFTFSDAWMDWVRQSPEKGLEWVAEIRTKANNHATYYAESVKGRFTISRDDSKSSVYLQMNSLRAEDTGIYYCTRDANWDWYFDVWGAGTTVTVSS

SEQ ID NO: 19307 - protein, 5 aa, synthetic construct
  source 1..5: note = Description of Artificial Sequence: Synthetic peptide; note = XENP020562 vhCDR1
DAWMD

SEQ ID NO: 19308 - protein, 19 aa, synthetic construct
  source 1..19: note = Description of Artificial Sequence: Synthetic peptide; note = XENP020562 vhCDR2
EIRTKANNHATYYAESVKG

SEQ ID NO: 19309 - protein, 10 aa, synthetic construct
  source 1..10: note = Description of Artificial Sequence: Synthetic peptide; note = XENP020562 vhCDR3
DANWDWYFDV

SEQ ID NO: 19310 - protein, 218 aa, synthetic construct; identical to SEQ ID NO: 17590
  source 1..218: note = Description of Artificial Sequence: Synthetic polypeptide; note = XENP020562 7G8_H0.110_L0_IgG1_PVA_/S267K Light Chain

SEQ ID NO: 19311 - protein, 111 aa, synthetic construct; identical to SEQ ID NO: 17591
  source 1..111: note = Description of Artificial Sequence: Synthetic polypeptide; note = VL of XENP020562

SEQ ID NO: 19312 - protein, 15 aa, synthetic construct
  source 1..15: note = Description of Artificial Sequence: Synthetic peptide; note = XENP020562 vlCDR1
KASQSVDYDGDSYMN

SEQ ID NO: 19313 - protein, 7 aa, synthetic construct
  source 1..7: note = Description of Artificial Sequence: Synthetic peptide; note = XENP020562 vlCDR2
AASNLES

SEQ ID NO: 19314 - protein, 9 aa, synthetic construct
  source 1..9: note = Description of Artificial Sequence: Synthetic peptide; note = XENP020562 vlCDR3
QQSNEDPFT

SEQ ID NO: 19315 - protein, 450 aa, synthetic construct
  source 1..450: note = Description of Artificial Sequence: Synthetic polypeptide; note = XENP020563 7G8_H0.111_L0_IgG1_PVA_/S267K Heavy Chain
EVKLEESGGGLVQPGGSMKLSCAASGFTFSDAWMDWVRQSPEKGLEWVAEIRTKANNHATYYAESVKGRFTISRDDSKSSVYLQMNSLRAEDTGIYYCTRAANWDWYFDVWGAGTTVTVSSASTKGPSVFPLAPSSKSTSGGTAALGCLVKDYFPEPVTVSWNSGALTSGVHTFPAVLQSSGLYSLSSVVTVPSSSLGTQTYICNVNHKPSDTKVDKKVEPKSCDKTHTCPPCPAPPVAGPSVFLFPPKPKDTLMISRTPEVTCVVVDVKHEDPEVKFNWYVDGVEVHNAKTKPREEEYNSTYRVVSVLTVLHQDWLNGKEYKCKVSNKALPAPIEKTISKAKGQPREPQVYTLPPSREEMTKNQVSLTCDVSGFYPSDIAVEWESDGQPENNYKTTPPVLDSDGSFFLYSKLTVDKSRWEQGDVFSCSVMHEALHNHYTQKSLSLSPGK

SEQ ID NO: 19316 - protein, 121 aa, synthetic construct
  source 1..121: note = Description of Artificial Sequence: Synthetic polypeptide; note = VH of XENP020563
EVKLEESGGGLVQPGGSMKLSCAASGFTFSDAWMDWVRQSPEKGLEWVAEIRTKANNHATYYAESVKGRFTISRDDSKSSVYLQMNSLRAEDTGIYYCTRAANWDWYFDVWGAGTTVTVSS

SEQ ID NO: 19317 - protein, 5 aa, synthetic construct
  source 1..5: note = Description of Artificial Sequence: Synthetic peptide; note = XENP020563 vhCDR1
DAWMD

SEQ ID NO: 19318 - protein, 19 aa, synthetic construct
  source 1..19: note = Description of Artificial Sequence: Synthetic peptide; note = XENP020563 vhCDR2
EIRTKANNHATYYAESVKG

SEQ ID NO: 19319 - protein, 10 aa, synthetic construct
  source 1..10: note = Description of Artificial Sequence: Synthetic peptide; note = XENP020563 vhCDR3
AANWDWYFDV

SEQ ID NO: 19320 - protein, 218 aa, synthetic construct; identical to SEQ ID NO: 17590
  source 1..218: note = Description of Artificial Sequence: Synthetic polypeptide; note = XENP020563 7G8_H0.111_L0_IgG1_PVA_/S267K Light Chain

SEQ ID NO: 19321 - protein, 111 aa, synthetic construct; identical to SEQ ID NO: 17591
  source 1..111: note = Description of Artificial Sequence: Synthetic polypeptide; note = VL of XENP020563

SEQ ID NO: 19322 - protein, 15 aa, synthetic construct
  source 1..15: note = Description of Artificial Sequence: Synthetic peptide; note = XENP020563 vlCDR1
KASQSVDYDGDSYMN

SEQ ID NO: 19323 - protein, 7 aa, synthetic construct
  source 1..7: note = Description of Artificial Sequence: Synthetic peptide; note = XENP020563 vlCDR2
AASNLES

SEQ ID NO: 19324 - protein, 9 aa, synthetic construct
  source 1..9: note = Description of Artificial Sequence: Synthetic peptide; note = XENP020563 vlCDR3
QQSNEDPFT

SEQ ID NO: 19325 - protein, 450 aa, synthetic construct
  source 1..450: note = Description of Artificial Sequence: Synthetic polypeptide; note = XENP020564 7G8_H0.112_L0_IgG1_PVA_/S267K Heavy Chain
EVKLEESGGGLVQPGGSMKLSCAASGFTFSDAWMDWVRQSPEKGLEWVAEIRTKANNHATYYAESVKGRFTISRDDSKSSVYLQMNSLRAEDTGIYYCTRQANWDWYFDVWGAGTTVTVSSASTKGPSVFPLAPSSKSTSGGTAALGCLVKDYFPEPVTVSWNSGALTSGVHTFPAVLQSSGLYSLSSVVTVPSSSLGTQTYICNVNHKPSDTKVDKKVEPKSCDKTHTCPPCPAPPVAGPSVFLFPPKPKDTLMISRTPEVTCVVVDVKHEDPEVKFNWYVDGVEVHNAKTKPREEEYNSTYRVVSVLTVLHQDWLNGKEYKCKVSNKALPAPIEKTISKAKGQPREPQVYTLPPSREEMTKNQVSLTCDVSGFYPSDIAVEWESDGQPENNYKTTPPVLDSDGSFFLYSKLTVDKSRWEQGDVFSCSVMHEALHNHYTQKSLSLSPGK

SEQ ID NO: 19326 - protein, 121 aa, synthetic construct
  source 1..121: note = Description of Artificial Sequence: Synthetic polypeptide; note = VH of XENP020564
EVKLEESGGGLVQPGGSMKLSCAASGFTFSDAWMDWVRQSPEKGLEWVAEIRTKANNHATYYAESVKGRFTISRDDSKSSVYLQMNSLRAEDTGIYYCTRQANWDWYFDVWGAGTTVTVSS

SEQ ID NO: 19327 - protein, 5 aa, synthetic construct
  source 1..5: note = Description of Artificial Sequence: Synthetic peptide; note = XENP020564 vhCDR1
DAWMD

SEQ ID NO: 19328 - protein, 19 aa, synthetic construct
  source 1..19: note = Description of Artificial Sequence: Synthetic peptide; note = XENP020564 vhCDR2
EIRTKANNHATYYAESVKG

SEQ ID NO: 19329 - protein, 10 aa, synthetic construct
  source 1..10: note = Description of Artificial Sequence: Synthetic peptide; note = XENP020564 vhCDR3
QANWDWYFDV

SEQ ID NO: 19330 - protein, 218 aa, synthetic construct; identical to SEQ ID NO: 17590
  source 1..218: note = Description of Artificial Sequence: Synthetic polypeptide; note = XENP020564 7G8_H0.112_L0_IgG1_PVA_/S267K Light Chain

SEQ ID NO: 19331 - protein, 111 aa, synthetic construct; identical to SEQ ID NO: 17591
  source 1..111: note = Description of Artificial Sequence: Synthetic polypeptide; note = VL of XENP020564

SEQ ID NO: 19332 - protein, 15 aa, synthetic construct
  source 1..15: note = Description of Artificial Sequence: Synthetic peptide; note = XENP020564 vlCDR1
KASQSVDYDGDSYMN

SEQ ID NO: 19333 - protein, 7 aa, synthetic construct
  source 1..7: note = Description of Artificial Sequence: Synthetic peptide; note = XENP020564 vlCDR2
AASNLES

SEQ ID NO: 19334 - protein, 9 aa, synthetic construct
  source 1..9: note = Description of Artificial Sequence: Synthetic peptide; note = XENP020564 vlCDR3
QQSNEDPFT

SEQ ID NO: 19335 - protein, 450 aa, synthetic construct
  source 1..450: note = Description of Artificial Sequence: Synthetic polypeptide; note = XENP020565 7G8_H0.113_L0_IgG1_PVA_/S267K Heavy Chain
EVKLEESGGGLVQPGGSMKLSCAASGFTFSDAWMDWVRQSPEKGLEWVAEIRTKANNHATYYAESVKGRFTISRDDSKSSVYLQMNSLRAEDTGIYYCTRKANWDWYFDVWGAGTTVTVSSASTKGPSVFPLAPSSKSTSGGTAALGCLVKDYFPEPVTVSWNSGALTSGVHTFPAVLQSSGLYSLSSVVTVPSSSLGTQTYICNVNHKPSDTKVDKKVEPKSCDKTHTCPPCPAPPVAGPSVFLFPPKPKDTLMISRTPEVTCVVVDVKHEDPEVKFNWYVDGVEVHNAKTKPREEEYNSTYRVVSVLTVLHQDWLNGKEYKCKVSNKALPAPIEKTISKAKGQPREPQVYTLPPSREEMTKNQVSLTCDVSGFYPSDIAVEWESDGQPENNYKTTPPVLDSDGSFFLYSKLTVDKSRWEQGDVFSCSVMHEALHNHYTQKSLSLSPGK

SEQ ID NO: 19336 - protein, 121 aa, synthetic construct
  source 1..121: note = Description of Artificial Sequence: Synthetic polypeptide; note = VH of XENP020565
EVKLEESGGGLVQPGGSMKLSCAASGFTFSDAWMDWVRQSPEKGLEWVAEIRTKANNHATYYAESVKGRFTISRDDSKSSVYLQMNSLRAEDTGIYYCTRKANWDWYFDVWGAGTTVTVSS

SEQ ID NO: 19337 - protein, 5 aa, synthetic construct
  source 1..5: note = Description of Artificial Sequence: Synthetic peptide; note = XENP020565 vhCDR1
DAWMD

SEQ ID NO: 19338 - protein, 19 aa, synthetic construct
  source 1..19: note = Description of Artificial Sequence: Synthetic peptide; note = XENP020565 vhCDR2
EIRTKANNHATYYAESVKG

SEQ ID NO: 19339 - protein, 10 aa, synthetic construct
  source 1..10: note = Description of Artificial Sequence: Synthetic peptide; note = XENP020565 vhCDR3
KANWDWYFDV

SEQ ID NO: 19340 - protein, 218 aa, synthetic construct; identical to SEQ ID NO: 17590
  source 1..218: note = Description of Artificial Sequence: Synthetic polypeptide; note = XENP020565 7G8_H0.113_L0_IgG1_PVA_/S267K Light Chain

SEQ ID NO: 19341 - protein, 111 aa, synthetic construct; identical to SEQ ID NO: 17591
  source 1..111: note = Description of Artificial Sequence: Synthetic polypeptide; note = VL of XENP020565

SEQ ID NO: 19342 - protein, 15 aa, synthetic construct
  source 1..15: note = Description of Artificial Sequence: Synthetic peptide; note = XENP020565 vlCDR1
KASQSVDYDGDSYMN

SEQ ID NO: 19343 - protein, 7 aa, synthetic construct
  source 1..7: note = Description of Artificial Sequence: Synthetic peptide; note = XENP020565 vlCDR2
AASNLES

SEQ ID NO: 19344 - protein, 9 aa, synthetic construct
  source 1..9: note = Description of Artificial Sequence: Synthetic peptide; note = XENP020565 vlCDR3
QQSNEDPFT

SEQ ID NO: 19345 - protein, 450 aa, synthetic construct
  source 1..450: note = Description of Artificial Sequence: Synthetic polypeptide; note = XENP020566 7G8_H0.114_L0_IgG1_PVA_/S267K Heavy Chain
EVKLEESGGGLVQPGGSMKLSCAASGFTFSDAWMDWVRQSPEKGLEWVAEIRTKANNHATYYAESVKGRFTISRDDSKSSVYLQMNSLRAEDTGIYYCTRLSNWDWYFDVWGAGTTVTVSSASTKGPSVFPLAPSSKSTSGGTAALGCLVKDYFPEPVTVSWNSGALTSGVHTFPAVLQSSGLYSLSSVVTVPSSSLGTQTYICNVNHKPSDTKVDKKVEPKSCDKTHTCPPCPAPPVAGPSVFLFPPKPKDTLMISRTPEVTCVVVDVKHEDPEVKFNWYVDGVEVHNAKTKPREEEYNSTYRVVSVLTVLHQDWLNGKEYKCKVSNKALPAPIEKTISKAKGQPREPQVYTLPPSREEMTKNQVSLTCDVSGFYPSDIAVEWESDGQPENNYKTTPPVLDSDGSFFLYSKLTVDKSRWEQGDVFSCSVMHEALHNHYTQKSLSLSPGK

SEQ ID NO: 19346 - protein, 121 aa, synthetic construct
  source 1..121: note = Description of Artificial Sequence: Synthetic polypeptide; note = VH of XENP020566
EVKLEESGGGLVQPGGSMKLSCAASGFTFSDAWMDWVRQSPEKGLEWVAEIRTKANNHATYYAESVKGRFTISRDDSKSSVYLQMNSLRAEDTGIYYCTRLSNWDWYFDVWGAGTTVTVSS

SEQ ID NO: 19347 - protein, 5 aa, synthetic construct
  source 1..5: note = Description of Artificial Sequence: Synthetic peptide; note = XENP020566 vhCDR1
DAWMD

SEQ ID NO: 19348 - protein, 19 aa, synthetic construct
  source 1..19: note = Description of Artificial Sequence: Synthetic peptide; note = XENP020566 vhCDR2
EIRTKANNHATYYAESVKG

SEQ ID NO: 19349 - protein, 10 aa, synthetic construct
  source 1..10: note = Description of Artificial Sequence: Synthetic peptide; note = XENP020566 vhCDR3
LSNWDWYFDV

SEQ ID NO: 19350 - protein, 218 aa, synthetic construct; identical to SEQ ID NO: 17590
  source 1..218: note = Description of Artificial Sequence: Synthetic polypeptide; note = XENP020566 7G8_H0.114_L0_IgG1_PVA_/S267K Light Chain

SEQ ID NO: 19351 - protein, 111 aa, synthetic construct; identical to SEQ ID NO: 17591
  source 1..111: note = Description of Artificial Sequence: Synthetic polypeptide; note = VL of XENP020566

SEQ ID NO: 19352 - protein, 15 aa, synthetic construct
  source 1..15: note = Description of Artificial Sequence: Synthetic peptide; note = XENP020566 vlCDR1
KASQSVDYDGDSYMN

SEQ ID NO: 19353 - protein, 7 aa, synthetic construct
  source 1..7: note = Description of Artificial Sequence: Synthetic peptide; note = XENP020566 vlCDR2
AASNLES

SEQ ID NO: 19354 - protein, 9 aa, synthetic construct
  source 1..9: note = Description of Artificial Sequence: Synthetic peptide; note = XENP020566 vlCDR3
QQSNEDPFT

SEQ ID NO: 19355 - protein, 450 aa, synthetic construct
  source 1..450: note = Description of Artificial Sequence: Synthetic polypeptide; note = XENP020567 7G8_H0.115_L0_IgG1_PVA_/S267K Heavy Chain
EVKLEESGGGLVQPGGSMKLSCAASGFTFSDAWMDWVRQSPEKGLEWVAEIRTKANNHATYYAESVKGRFTISRDDSKSSVYLQMNSLRAEDTGIYYCTRLTNWDWYFDVWGAGTTVTVSSASTKGPSVFPLAPSSKSTSGGTAALGCLVKDYFPEPVTVSWNSGALTSGVHTFPAVLQSSGLYSLSSVVTVPSSSLGTQTYICNVNHKPSDTKVDKKVEPKSCDKTHTCPPCPAPPVAGPSVFLFPPKPKDTLMISRTPEVTCVVVDVKHEDPEVKFNWYVDGVEVHNAKTKPREEEYNSTYRVVSVLTVLHQDWLNGKEYKCKVSNKALPAPIEKTISKAKGQPREPQVYTLPPSREEMTKNQVSLTCDVSGFYPSDIAVEWESDGQPENNYKTTPPVLDSDGSFFLYSKLTVDKSRWEQGDVFSCSVMHEALHNHYTQKSLSLSPGK

SEQ ID NO: 19356 - protein, 121 aa, synthetic construct
  source 1..121: note = Description of Artificial Sequence: Synthetic polypeptide; note = VH of XENP020567
EVKLEESGGGLVQPGGSMKLSCAASGFTFSDAWMDWVRQSPEKGLEWVAEIRTKANNHATYYAESVKGRFTISRDDSKSSVYLQMNSLRAEDTGIYYCTRLTNWDWYFDVWGAGTTVTVSS

SEQ ID NO: 19357 - protein, 5 aa, synthetic construct
  source 1..5: note = Description of Artificial Sequence: Synthetic peptide; note = XENP020567 vhCDR1
DAWMD

SEQ ID NO: 19358 - protein, 19 aa, synthetic construct
  source 1..19: note = Description of Artificial Sequence: Synthetic peptide; note = XENP020567 vhCDR2
EIRTKANNHATYYAESVKG

SEQ ID NO: 19359 - protein, 10 aa, synthetic construct
  source 1..10: note = Description of Artificial Sequence: Synthetic peptide; note = XENP020567 vhCDR3
LTNWDWYFDV

SEQ ID NO: 19360 - protein, 218 aa, synthetic construct; identical to SEQ ID NO: 17590
  source 1..218: note = Description of Artificial Sequence: Synthetic polypeptide; note = XENP020567 7G8_H0.115_L0_IgG1_PVA_/S267K Light Chain

SEQ ID NO: 19361 - protein, 111 aa, synthetic construct; identical to SEQ ID NO: 17591
  source 1..111: note = Description of Artificial Sequence: Synthetic polypeptide; note = VL of XENP020567

SEQ ID NO: 19362 - protein, 15 aa, synthetic construct
  source 1..15: note = Description of Artificial Sequence: Synthetic peptide; note = XENP020567 vlCDR1
KASQSVDYDGDSYMN

SEQ ID NO: 19363 - protein, 7 aa, synthetic construct
  source 1..7: note = Description of Artificial Sequence: Synthetic peptide; note = XENP020567 vlCDR2
AASNLES

SEQ ID NO: 19364 - protein, 9 aa, synthetic construct
  source 1..9: note = Description of Artificial Sequence: Synthetic peptide; note = XENP020567 vlCDR3
QQSNEDPFT

SEQ ID NO: 19365 - protein, 450 aa, synthetic construct
  source 1..450: note = Description of Artificial Sequence: Synthetic polypeptide; note = XENP020568 7G8_H0.116_L0_IgG1_PVA_/S267K Heavy Chain
EVKLEESGGGLVQPGGSMKLSCAASGFTFSDAWMDWVRQSPEKGLEWVAEIRTKANNHATYYAESVKGRFTISRDDSKSSVYLQMNSLRAEDTGIYYCTRLGNWDWYFDVWGAGTTVTVSSASTKGPSVFPLAPSSKSTSGGTAALGCLVKDYFPEPVTVSWNSGALTSGVHTFPAVLQSSGLYSLSSVVTVPSSSLGTQTYICNVNHKPSDTKVDKKVEPKSCDKTHTCPPCPAPPVAGPSVFLFPPKPKDTLMISRTPEVTCVVVDVKHEDPEVKFNWYVDGVEVHNAKTKPREEEYNSTYRVVSVLTVLHQDWLNGKEYKCKVSNKALPAPIEKTISKAKGQPREPQVYTLPPSREEMTKNQVSLTCDVSGFYPSDIAVEWESDGQPENNYKTTPPVLDSDGSFFLYSKLTVDKSRWEQGDVFSCSVMHEALHNHYTQKSLSLSPGK

SEQ ID NO: 19366 - protein, 121 aa, synthetic construct
  source 1..121: note = Description of Artificial Sequence: Synthetic polypeptide; note = VH of XENP020568
EVKLEESGGGLVQPGGSMKLSCAASGFTFSDAWMDWVRQSPEKGLEWVAEIRTKANNHATYYAESVKGRFTISRDDSKSSVYLQMNSLRAEDTGIYYCTRLGNWDWYFDVWGAGTTVTVSS

SEQ ID NO: 19367 - protein, 5 aa, synthetic construct
  source 1..5: note = Description of Artificial Sequence: Synthetic peptide; note = XENP020568 vhCDR1
DAWMD

SEQ ID NO: 19368 - protein, 19 aa, synthetic construct
  source 1..19: note = Description of Artificial Sequence: Synthetic peptide; note = XENP020568 vhCDR2
EIRTKANNHATYYAESVKG

SEQ ID NO: 19369 - protein, 10 aa, synthetic construct
  source 1..10: note = Description of Artificial Sequence: Synthetic peptide; note = XENP020568 vhCDR3
LGNWDWYFDV

SEQ ID NO: 19370 - protein, 218 aa, synthetic construct; identical to SEQ ID NO: 17590
  source 1..218: note = Description of Artificial Sequence: Synthetic polypeptide; note = XENP020568 7G8_H0.116_L0_IgG1_PVA_/S267K Light Chain

SEQ ID NO: 19371 - protein, 111 aa, synthetic construct; identical to SEQ ID NO: 17591
  source 1..111: note = Description of Artificial Sequence: Synthetic polypeptide; note = VL of XENP020568

SEQ ID NO: 19372 - protein, 15 aa, synthetic construct
  source 1..15: note = Description of Artificial Sequence: Synthetic peptide; note = XENP020568 vlCDR1
KASQSVDYDGDSYMN

SEQ ID NO: 19373 - protein, 7 aa, synthetic construct
  source 1..7: note = Description of Artificial Sequence: Synthetic peptide; note = XENP020568 vlCDR2
AASNLES

SEQ ID NO: 19374 - protein, 9 aa, synthetic construct
  source 1..9: note = Description of Artificial Sequence: Synthetic peptide; note = XENP020568 vlCDR3
QQSNEDPFT

SEQ ID NO: 19375 - protein, 450 aa, synthetic construct
  source 1..450: note = Description of Artificial Sequence: Synthetic polypeptide; note = XENP020569 7G8_H0.117_L0_IgG1_PVA_/S267K Heavy Chain
EVKLEESGGGLVQPGGSMKLSCAASGFTFSDAWMDWVRQSPEKGLEWVAEIRTKANNHATYYAESVKGRFTISRDDSKSSVYLQMNSLRAEDTGIYYCTRLHNWDWYFDVWGAGTTVTVSSASTKGPSVFPLAPSSKSTSGGTAALGCLVKDYFPEPVTVSWNSGALTSGVHTFPAVLQSSGLYSLSSVVTVPSSSLGTQTYICNVNHKPSDTKVDKKVEPKSCDKTHTCPPCPAPPVAGPSVFLFPPKPKDTLMISRTPEVTCVVVDVKHEDPEVKFNWYVDGVEVHNAKTKPREEEYNSTYRVVSVLTVLHQDWLNGKEYKCKVSNKALPAPIEKTISKAKGQPREPQVYTLPPSREEMTKNQVSLTCDVSGFYPSDIAVEWESDGQPENNYKTTPPVLDSDGSFFLYSKLTVDKSRWEQGDVFSCSVMHEALHNHYTQKSLSLSPGK

SEQ ID NO: 19376 - protein, 121 aa, synthetic construct
  source 1..121: note = Description of Artificial Sequence: Synthetic polypeptide; note = VH of XENP020569
EVKLEESGGGLVQPGGSMKLSCAASGFTFSDAWMDWVRQSPEKGLEWVAEIRTKANNHATYYAESVKGRFTISRDDSKSSVYLQMNSLRAEDTGIYYCTRLHNWDWYFDVWGAGTTVTVSS

SEQ ID NO: 19377 - protein, 5 aa, synthetic construct
  source 1..5: note = Description of Artificial Sequence: Synthetic peptide; note = XENP020569 vhCDR1
DAWMD

SEQ ID NO: 19378 - protein, 19 aa, synthetic construct
  source 1..19: note = Description of Artificial Sequence: Synthetic peptide; note = XENP020569 vhCDR2
EIRTKANNHATYYAESVKG

SEQ ID NO: 19379 - protein, 10 aa, synthetic construct
  source 1..10: note = Description of Artificial Sequence: Synthetic peptide; note = XENP020569 vhCDR3
LHNWDWYFDV

SEQ ID NO: 19380 - protein, 218 aa, synthetic construct; identical to SEQ ID NO: 17590
  source 1..218: note = Description of Artificial Sequence: Synthetic polypeptide; note = XENP020569 7G8_H0.117_L0_IgG1_PVA_/S267K Light Chain

SEQ ID NO: 19381 - protein, 111 aa, synthetic construct; identical to SEQ ID NO: 17591
  source 1..111: note = Description of Artificial Sequence: Synthetic polypeptide; note = VL of XENP020569

SEQ ID NO: 19382 - protein, 15 aa, synthetic construct
  source 1..15: note = Description of Artificial Sequence: Synthetic peptide; note = XENP020569 vlCDR1
KASQSVDYDGDSYMN

SEQ ID NO: 19383 - protein, 7 aa, synthetic construct
  source 1..7: note = Description of Artificial Sequence: Synthetic peptide; note = XENP020569 vlCDR2
AASNLES

SEQ ID NO: 19384 - protein, 9 aa, synthetic construct
  source 1..9: note = Description of Artificial Sequence: Synthetic peptide; note = XENP020569 vlCDR3
QQSNEDPFT

SEQ ID NO: 19385 - protein, 450 aa, synthetic construct
  source 1..450: note = Description of Artificial Sequence: Synthetic polypeptide; note = XENP020570 7G8_H0.118_L0_IgG1_PVA_/S267K Heavy Chain
EVKLEESGGGLVQPGGSMKLSCAASGFTFSDAWMDWVRQSPEKGLEWVAEIRTKANNHATYYAESVKGRFTISRDDSKSSVYLQMNSLRAEDTGIYYCTRLQNWDWYFDVWGAGTTVTVSSASTKGPSVFPLAPSSKSTSGGTAALGCLVKDYFPEPVTVSWNSGALTSGVHTFPAVLQSSGLYSLSSVVTVPSSSLGTQTYICNVNHKPSDTKVDKKVEPKSCDKTHTCPPCPAPPVAGPSVFLFPPKPKDTLMISRTPEVTCVVVDVKHEDPEVKFNWYVDGVEVHNAKTKPREEEYNSTYRVVSVLTVLHQDWLNGKEYKCKVSNKALPAPIEKTISKAKGQPREPQVYTLPPSREEMTKNQVSLTCDVSGFYPSDIAVEWESDGQPENNYKTTPPVLDSDGSFFLYSKLTVDKSRWEQGDVFSCSVMHEALHNHYTQKSLSLSPGK

SEQ ID NO: 19386 - protein, 121 aa, synthetic construct
  source 1..121: note = Description of Artificial Sequence: Synthetic polypeptide; note = VH of XENP020570
EVKLEESGGGLVQPGGSMKLSCAASGFTFSDAWMDWVRQSPEKGLEWVAEIRTKANNHATYYAESVKGRFTISRDDSKSSVYLQMNSLRAEDTGIYYCTRLQNWDWYFDVWGAGTTVTVSS

SEQ ID NO: 19387 - protein, 5 aa, synthetic construct
  source 1..5: note = Description of Artificial Sequence: Synthetic peptide; note = XENP020570 vhCDR1
DAWMD

SEQ ID NO: 19388 - protein, 19 aa, synthetic construct
  source 1..19: note = Description of Artificial Sequence: Synthetic peptide; note = XENP020570 vhCDR2
EIRTKANNHATYYAESVKG

SEQ ID NO: 19389 - protein, 10 aa, synthetic construct
  source 1..10: note = Description of Artificial Sequence: Synthetic peptide; note = XENP020570 vhCDR3
LQNWDWYFDV

SEQ ID NO: 19390 - protein, 218 aa, synthetic construct; identical to SEQ ID NO: 17590
  source 1..218: note = Description of Artificial Sequence: Synthetic polypeptide; note = XENP020570 7G8_H0.118_L0_IgG1_PVA_/S267K Light Chain

SEQ ID NO: 19391 - protein, 111 aa, synthetic construct; identical to SEQ ID NO: 17591
  source 1..111: note = Description of Artificial Sequence: Synthetic polypeptide; note = VL of XENP020570

SEQ ID NO: 19392 - protein, 15 aa, synthetic construct
  source 1..15: note = Description of Artificial Sequence: Synthetic peptide; note = XENP020570 vlCDR1
KASQSVDYDGDSYMN

SEQ ID NO: 19393 - protein, 7 aa, synthetic construct
  source 1..7: note = Description of Artificial Sequence: Synthetic peptide; note = XENP020570 vlCDR2
AASNLES

SEQ ID NO: 19394 - protein, 9 aa, synthetic construct
  source 1..9: note = Description of Artificial Sequence: Synthetic peptide; note = XENP020570 vlCDR3
QQSNEDPFT

SEQ ID NO: 19395 - protein, 450 aa, synthetic construct
  source 1..450: note = Description of Artificial Sequence: Synthetic polypeptide; note = XENP020571 7G8_H0.119_L0_IgG1_PVA_/S267K Heavy Chain
EVKLEESGGGLVQPGGSMKLSCAASGFTFSDAWMDWVRQSPEKGLEWVAEIRTKANNHATYYAESVKGRFTISRDDSKSSVYLQMNSLRAEDTGIYYCTRLDNWDWYFDVWGAGTTVTVSSASTKGPSVFPLAPSSKSTSGGTAALGCLVKDYFPEPVTVSWNSGALTSGVHTFPAVLQSSGLYSLSSVVTVPSSSLGTQTYICNVNHKPSDTKVDKKVEPKSCDKTHTCPPCPAPPVAGPSVFLFPPKPKDTLMISRTPEVTCVVVDVKHEDPEVKFNWYVDGVEVHNAKTKPREEEYNSTYRVVSVLTVLHQDWLNGKEYKCKVSNKALPAPIEKTISKAKGQPREPQVYTLPPSREEMTKNQVSLTCDVSGFYPSDIAVEWESDGQPENNYKTTPPVLDSDGSFFLYSKLTVDKSRWEQGDVFSCSVMHEALHNHYTQKSLSLSPGK

SEQ ID NO: 19396 - protein, 121 aa, synthetic construct
  source 1..121: note = Description of Artificial Sequence: Synthetic polypeptide; note = VH of XENP020571
EVKLEESGGGLVQPGGSMKLSCAASGFTFSDAWMDWVRQSPEKGLEWVAEIRTKANNHATYYAESVKGRFTISRDDSKSSVYLQMNSLRAEDTGIYYCTRLDNWDWYFDVWGAGTTVTVSS

SEQ ID NO: 19397 - protein, 5 aa, synthetic construct
  source 1..5: note = Description of Artificial Sequence: Synthetic peptide; note = XENP020571 vhCDR1
DAWMD

SEQ ID NO: 19398 - protein, 19 aa, synthetic construct
  source 1..19: note = Description of Artificial Sequence: Synthetic peptide; note = XENP020571 vhCDR2
EIRTKANNHATYYAESVKG

SEQ ID NO: 19399 - protein, 10 aa, synthetic construct
  source 1..10: note = Description of Artificial Sequence: Synthetic peptide; note = XENP020571 vhCDR3
LDNWDWYFDV

SEQ ID NO: 19400 - protein, 218 aa, synthetic construct; identical to SEQ ID NO: 17590
  source 1..218: note = Description of Artificial Sequence: Synthetic polypeptide; note = XENP020571 7G8_H0.119_L0_IgG1_PVA_/S267K Light Chain

SEQ ID NO: 19401 - protein, 111 aa, synthetic construct; identical to SEQ ID NO: 17591
  source 1..111: note = Description of Artificial Sequence: Synthetic polypeptide; note = VL of XENP020571

SEQ ID NO: 19402 - protein, 15 aa, synthetic construct
  source 1..15: note = Description of Artificial Sequence: Synthetic peptide; note = XENP020571 vlCDR1
KASQSVDYDGDSYMN

SEQ ID NO: 19403 - protein, 7 aa, synthetic construct
  source 1..7: note = Description of Artificial Sequence: Synthetic peptide; note = XENP020571 vlCDR2
AASNLES

SEQ ID NO: 19404 - protein, 9 aa, synthetic construct
  source 1..9: note = Description of Artificial Sequence: Synthetic peptide; note = XENP020571 vlCDR3
QQSNEDPFT

SEQ ID NO: 19405 - protein, 450 aa, synthetic construct
  source 1..450: note = Description of Artificial Sequence: Synthetic polypeptide; note = XENP020572 7G8_H0.120_L0_IgG1_PVA_/S267K Heavy Chain
EVKLEESGGGLVQPGGSMKLSCAASGFTFSDAWMDWVRQSPEKGLEWVAEIRTKANNHATYYAESVKGRFTISRDDSKSSVYLQMNSLRAEDTGIYYCTRLLNWDWYFDVWGAGTTVTVSSASTKGPSVFPLAPSSKSTSGGTAALGCLVKDYFPEPVTVSWNSGALTSGVHTFPAVLQSSGLYSLSSVVTVPSSSLGTQTYICNVNHKPSDTKVDKKVEPKSCDKTHTCPPCPAPPVAGPSVFLFPPKPKDTLMISRTPEVTCVVVDVKHEDPEVKFNWYVDGVEVHNAKTKPREEEYNSTYRVVSVLTVLHQDWLNGKEYKCKVSNKALPAPIEKTISKAKGQPREPQVYTLPPSREEMTKNQVSLTCDVSGFYPSDIAVEWESDGQPENNYKTTPPVLDSDGSFFLYSKLTVDKSRWEQGDVFSCSVMHEALHNHYTQKSLSLSPGK

SEQ ID NO: 19406 - protein, 121 aa, synthetic construct
  source 1..121: note = Description of Artificial Sequence: Synthetic polypeptide; note = VH of XENP020572
EVKLEESGGGLVQPGGSMKLSCAASGFTFSDAWMDWVRQSPEKGLEWVAEIRTKANNHATYYAESVKGRFTISRDDSKSSVYLQMNSLRAEDTGIYYCTRLLNWDWYFDVWGAGTTVTVSS

SEQ ID NO: 19407 - protein, 5 aa, synthetic construct
  source 1..5: note = Description of Artificial Sequence: Synthetic peptide; note = XENP020572 vhCDR1
DAWMD

SEQ ID NO: 19408 - protein, 19 aa, synthetic construct
  source 1..19: note = Description of Artificial Sequence: Synthetic peptide; note = XENP020572 vhCDR2
EIRTKANNHATYYAESVKG

SEQ ID NO: 19409 - protein, 10 aa, synthetic construct
  source 1..10: note = Description of Artificial Sequence: Synthetic peptide; note = XENP020572 vhCDR3
LLNWDWYFDV

SEQ ID NO: 19410 - protein, 218 aa, synthetic construct; identical to SEQ ID NO: 17590
  source 1..218: note = Description of Artificial Sequence: Synthetic polypeptide; note = XENP020572 7G8_H0.120_L0_IgG1_PVA_/S267K Light Chain

SEQ ID NO: 19411 - protein, 111 aa, synthetic construct; identical to SEQ ID NO: 17591
  source 1..111: note = Description of Artificial Sequence: Synthetic polypeptide; note = VL of XENP020572

SEQ ID NO: 19412 - protein, 15 aa, synthetic construct
  source 1..15: note = Description of Artificial Sequence: Synthetic peptide; note = XENP020572 vlCDR1
KASQSVDYDGDSYMN

SEQ ID NO: 19413 - protein, 7 aa, synthetic construct
  source 1..7: note = Description of Artificial Sequence: Synthetic peptide; note = XENP020572 vlCDR2
AASNLES

SEQ ID NO: 19414 - protein, 9 aa, synthetic construct
  source 1..9: note = Description of Artificial Sequence: Synthetic peptide; note = XENP020572 vlCDR3
QQSNEDPFT

SEQ ID NO: 19415 - protein, 450 aa, synthetic construct
  source 1..450: note = Description of Artificial Sequence: Synthetic polypeptide; note = XENP020573 7G8_H0.121_L0_IgG1_PVA_/S267K Heavy Chain
EVKLEESGGGLVQPGGSMKLSCAASGFTFSDAWMDWVRQSPEKGLEWVAEIRTKANNHATYYAESVKGRFTISRDDSKSSVYLQMNSLRAEDTGIYYCTRLKNWDWYFDVWGAGTTVTVSSASTKGPSVFPLAPSSKSTSGGTAALGCLVKDYFPEPVTVSWNSGALTSGVHTFPAVLQSSGLYSLSSVVTVPSSSLGTQTYICNVNHKPSDTKVDKKVEPKSCDKTHTCPPCPAPPVAGPSVFLFPPKPKDTLMISRTPEVTCVVVDVKHEDPEVKFNWYVDGVEVHNAKTKPREEEYNSTYRVVSVLTVLHQDWLNGKEYKCKVSNKALPAPIEKTISKAKGQPREPQVYTLPPSREEMTKNQVSLTCDVSGFYPSDIAVEWESDGQPENNYKTTPPVLDSDGSFFLYSKLTVDKSRWEQGDVFSCSVMHEALHNHYTQKSLSLSPGK

SEQ ID NO: 19416 - protein, 121 aa, synthetic construct
  source 1..121: note = Description of Artificial Sequence: Synthetic polypeptide; note = VH of XENP020573
EVKLEESGGGLVQPGGSMKLSCAASGFTFSDAWMDWVRQSPEKGLEWVAEIRTKANNHATYYAESVKGRFTISRDDSKSSVYLQMNSLRAEDTGIYYCTRLKNWDWYFDVWGAGTTVTVSS

SEQ ID NO: 19417 - protein, 5 aa, synthetic construct
  source 1..5: note = Description of Artificial Sequence: Synthetic peptide; note = XENP020573 vhCDR1
DAWMD

SEQ ID NO: 19418 - protein, 19 aa, synthetic construct
  source 1..19: note = Description of Artificial Sequence: Synthetic peptide; note = XENP020573 vhCDR2
EIRTKANNHATYYAESVKG

SEQ ID NO: 19419 - protein, 10 aa, synthetic construct
  source 1..10: note = Description of Artificial Sequence: Synthetic peptide; note = XENP020573 vhCDR3
LKNWDWYFDV

SEQ ID NO: 19420 - protein, 218 aa, synthetic construct; identical to SEQ ID NO: 17590
  source 1..218: note = Description of Artificial Sequence: Synthetic polypeptide; note = XENP020573 7G8_H0.121_L0_IgG1_PVA_/S267K Light Chain

SEQ ID NO: 19421 - protein, 111 aa, synthetic construct; identical to SEQ ID NO: 17591
  source 1..111: note = Description of Artificial Sequence: Synthetic polypeptide; note = VL of XENP020573

SEQ ID NO: 19422 - protein, 15 aa, synthetic construct
  source 1..15: note = Description of Artificial Sequence: Synthetic peptide; note = XENP020573 vlCDR1
KASQSVDYDGDSYMN

SEQ ID NO: 19423 - protein, 7 aa, synthetic construct
  source 1..7: note = Description of Artificial Sequence: Synthetic peptide; note = XENP020573 vlCDR2
AASNLES

SEQ ID NO: 19424 - protein, 9 aa, synthetic construct
  source 1..9: note = Description of Artificial Sequence: Synthetic peptide; note = XENP020573 vlCDR3
QQSNEDPFT

SEQ ID NO: 19425 - protein, 450 aa, synthetic construct
  source 1..450: note = Description of Artificial Sequence: Synthetic polypeptide; note = XENP020574 7G8_H0.122_L0_IgG1_PVA_/S267K Heavy Chain
EVKLEESGGGLVQPGGSMKLSCAASGFTFSDAWMDWVRQSPEKGLEWVAEIRTKANNHATYYAESVKGRFTISRDDSKSSVYLQMNSLRAEDTGIYYCTRLYNWDWYFDVWGAGTTVTVSSASTKGPSVFPLAPSSKSTSGGTAALGCLVKDYFPEPVTVSWNSGALTSGVHTFPAVLQSSGLYSLSSVVTVPSSSLGTQTYICNVNHKPSDTKVDKKVEPKSCDKTHTCPPCPAPPVAGPSVFLFPPKPKDTLMISRTPEVTCVVVDVKHEDPEVKFNWYVDGVEVHNAKTKPREEEYNSTYRVVSVLTVLHQDWLNGKEYKCKVSNKALPAPIEKTISKAKGQPREPQVYTLPPSREEMTKNQVSLTCDVSGFYPSDIAVEWESDGQPENNYKTTPPVLDSDGSFFLYSKLTVDKSRWEQGDVFSCSVMHEALHNHYTQKSLSLSPGK

SEQ ID NO: 19426 - protein, 121 aa, synthetic construct
  source 1..121: note = Description of Artificial Sequence: Synthetic polypeptide; note = VH of XENP020574
EVKLEESGGGLVQPGGSMKLSCAASGFTFSDAWMDWVRQSPEKGLEWVAEIRTKANNHATYYAESVKGRFTISRDDSKSSVYLQMNSLRAEDTGIYYCTRLYNWDWYFDVWGAGTTVTVSS

SEQ ID NO: 19427 - protein, 5 aa, synthetic construct
  source 1..5: note = Description of Artificial Sequence: Synthetic peptide; note = XENP020574 vhCDR1
DAWMD

SEQ ID NO: 19428 - protein, 19 aa, synthetic construct
  source 1..19: note = Description of Artificial Sequence: Synthetic peptide; note = XENP020574 vhCDR2
EIRTKANNHATYYAESVKG

SEQ ID NO: 19429 - protein, 10 aa, synthetic construct
  source 1..10: note = Description of Artificial Sequence: Synthetic peptide; note = XENP020574 vhCDR3
LYNWDWYFDV

SEQ ID NO: 19430 - protein, 218 aa, synthetic construct; identical to SEQ ID NO: 17590
  source 1..218: note = Description of Artificial Sequence: Synthetic polypeptide; note = XENP020574 7G8_H0.122_L0_IgG1_PVA_/S267K Light Chain

SEQ ID NO: 19431 - protein, 111 aa, synthetic construct; identical to SEQ ID NO: 17591
  source 1..111: note = Description of Artificial Sequence: Synthetic polypeptide; note = VL of XENP020574

SEQ ID NO: 19432 - protein, 15 aa, synthetic construct
  source 1..15: note = Description of Artificial Sequence: Synthetic peptide; note = XENP020574 vlCDR1
KASQSVDYDGDSYMN

SEQ ID NO: 19433 - protein, 7 aa, synthetic construct
  source 1..7: note = Description of Artificial Sequence: Synthetic peptide; note = XENP020574 vlCDR2
AASNLES

SEQ ID NO: 19434 - protein, 9 aa, synthetic construct
  source 1..9: note = Description of Artificial Sequence: Synthetic peptide; note = XENP020574 vlCDR3
QQSNEDPFT

SEQ ID NO: 19435 - protein, 450 aa, synthetic construct
  source 1..450: note = Description of Artificial Sequence: Synthetic polypeptide; note = XENP020575 7G8_H0.123_L0_IgG1_PVA_/S267K Heavy Chain
EVKLEESGGGLVQPGGSMKLSCAASGFTFSDAWMDWVRQSPEKGLEWVAEIRTKANNHATYYAESVKGRFTISRDDSKSSVYLQMNSLRAEDTGIYYCTRLADWDWYFDVWGAGTTVTVSSASTKGPSVFPLAPSSKSTSGGTAALGCLVKDYFPEPVTVSWNSGALTSGVHTFPAVLQSSGLYSLSSVVTVPSSSLGTQTYICNVNHKPSDTKVDKKVEPKSCDKTHTCPPCPAPPVAGPSVFLFPPKPKDTLMISRTPEVTCVVVDVKHEDPEVKFNWYVDGVEVHNAKTKPREEEYNSTYRVVSVLTVLHQDWLNGKEYKCKVSNKALPAPIEKTISKAKGQPREPQVYTLPPSREEMTKNQVSLTCDVSGFYPSDIAVEWESDGQPENNYKTTPPVLDSDGSFFLYSKLTVDKSRWEQGDVFSCSVMHEALHNHYTQKSLSLSPGK

SEQ ID NO: 19436 - protein, 121 aa, synthetic construct
  source 1..121: note = Description of Artificial Sequence: Synthetic polypeptide; note = VH of XENP020575
EVKLEESGGGLVQPGGSMKLSCAASGFTFSDAWMDWVRQSPEKGLEWVAEIRTKANNHATYYAESVKGRFTISRDDSKSSVYLQMNSLRAEDTGIYYCTRLADWDWYFDVWGAGTTVTVSS

SEQ ID NO: 19437 - protein, 5 aa, synthetic construct
  source 1..5: note = Description of Artificial Sequence: Synthetic peptide; note = XENP020575 vhCDR1
DAWMD

SEQ ID NO: 19438 - protein, 19 aa, synthetic construct
  source 1..19: note = Description of Artificial Sequence: Synthetic peptide; note = XENP020575 vhCDR2
EIRTKANNHATYYAESVKG

SEQ ID NO: 19439 - protein, 10 aa, synthetic construct
  source 1..10: note = Description of Artificial Sequence: Synthetic peptide; note = XENP020575 vhCDR3
LADWDWYFDV

SEQ ID NO: 19440 - protein, 218 aa, synthetic construct; identical to SEQ ID NO: 17590
  source 1..218: note = Description of Artificial Sequence: Synthetic polypeptide; note = XENP020575 7G8_H0.123_L0_IgG1_PVA_/S267K Light Chain

SEQ ID NO: 19441 - protein, 111 aa, synthetic construct; identical to SEQ ID NO: 17591
  source 1..111: note = Description of Artificial Sequence: Synthetic polypeptide; note = VL of XENP020575

SEQ ID NO: 19442 - protein, 15 aa, synthetic construct
  source 1..15: note = Description of Artificial Sequence: Synthetic peptide; note = XENP020575 vlCDR1
KASQSVDYDGDSYMN

SEQ ID NO: 19443 - protein, 7 aa, synthetic construct
  source 1..7: note = Description of Artificial Sequence: Synthetic peptide; note = XENP020575 vlCDR2
AASNLES

SEQ ID NO: 19444 - protein, 9 aa, synthetic construct
  source 1..9: note = Description of Artificial Sequence: Synthetic peptide; note = XENP020575 vlCDR3
QQSNEDPFT

SEQ ID NO: 19445 - protein, 450 aa, synthetic construct
  source 1..450: note = Description of Artificial Sequence: Synthetic polypeptide; note = XENP020576 7G8_H0.124_L0_IgG1_PVA_/S267K Heavy Chain
EVKLEESGGGLVQPGGSMKLSCAASGFTFSDAWMDWVRQSPEKGLEWVAEIRTKANNHATYYAESVKGRFTISRDDSKSSVYLQMNSLRAEDTGIYYCTRLAHWDWYFDVWGAGTTVTVSSASTKGPSVFPLAPSSKSTSGGTAALGCLVKDYFPEPVTVSWNSGALTSGVHTFPAVLQSSGLYSLSSVVTVPSSSLGTQTYICNVNHKPSDTKVDKKVEPKSCDKTHTCPPCPAPPVAGPSVFLFPPKPKDTLMISRTPEVTCVVVDVKHEDPEVKFNWYVDGVEVHNAKTKPREEEYNSTYRVVSVLTVLHQDWLNGKEYKCKVSNKALPAPIEKTISKAKGQPREPQVYTLPPSREEMTKNQVSLTCDVSGFYPSDIAVEWESDGQPENNYKTTPPVLDSDGSFFLYSKLTVDKSRWEQGDVFSCSVMHEALHNHYTQKSLSLSPGK

SEQ ID NO: 19446 - protein, 121 aa, synthetic construct
  source 1..121: note = Description of Artificial Sequence: Synthetic polypeptide; note = VH of XENP020576
EVKLEESGGGLVQPGGSMKLSCAASGFTFSDAWMDWVRQSPEKGLEWVAEIRTKANNHATYYAESVKGRFTISRDDSKSSVYLQMNSLRAEDTGIYYCTRLAHWDWYFDVWGAGTTVTVSS

SEQ ID NO: 19447 - protein, 5 aa, synthetic construct
  source 1..5: note = Description of Artificial Sequence: Synthetic peptide; note = XENP020576 vhCDR1
DAWMD

SEQ ID NO: 19448 - protein, 19 aa, synthetic construct
  source 1..19: note = Description of Artificial Sequence: Synthetic peptide; note = XENP020576 vhCDR2
EIRTKANNHATYYAESVKG

SEQ ID NO: 19449 - protein, 10 aa, synthetic construct
  source 1..10: note = Description of Artificial Sequence: Synthetic peptide; note = XENP020576 vhCDR3
LAHWDWYFDV

SEQ ID NO: 19450 - protein, 218 aa, synthetic construct; identical to SEQ ID NO: 17590
  source 1..218: note = Description of Artificial Sequence: Synthetic polypeptide; note = XENP020576 7G8_H0.124_L0_IgG1_PVA_/S267K Light Chain

SEQ ID NO: 19451 - protein, 111 aa, synthetic construct; identical to SEQ ID NO: 17591
  source 1..111: note = Description of Artificial Sequence: Synthetic polypeptide; note = VL of XENP020576

SEQ ID NO: 19452 - protein, 15 aa, synthetic construct
  source 1..15: note = Description of Artificial Sequence: Synthetic peptide; note = XENP020576 vlCDR1
KASQSVDYDGDSYMN

SEQ ID NO: 19453 - protein, 7 aa, synthetic construct
  source 1..7: note = Description of Artificial Sequence: Synthetic peptide; note = XENP020576 vlCDR2
AASNLES

SEQ ID NO: 19454 - protein, 9 aa, synthetic construct
  source 1..9: note = Description of Artificial Sequence: Synthetic peptide; note = XENP020576 vlCDR3
QQSNEDPFT

SEQ ID NO: 19455 - protein, 450 aa, synthetic construct
  source 1..450: note = Description of Artificial Sequence: Synthetic polypeptide; note = XENP020577 7G8_H0.125_L0_IgG1_PVA_/S267K Heavy Chain
EVKLEESGGGLVQPGGSMKLSCAASGFTFSDAWMDWVRQSPEKGLEWVAEIRTKANNHATYYAESVKGRFTISRDDSKSSVYLQMNSLRAEDTGIYYCTRLAEWDWYFDVWGAGTTVTVSSASTKGPSVFPLAPSSKSTSGGTAALGCLVKDYFPEPVTVSWNSGALTSGVHTFPAVLQSSGLYSLSSVVTVPSSSLGTQTYICNVNHKPSDTKVDKKVEPKSCDKTHTCPPCPAPPVAGPSVFLFPPKPKDTLMISRTPEVTCVVVDVKHEDPEVKFNWYVDGVEVHNAKTKPREEEYNSTYRVVSVLTVLHQDWLNGKEYKCKVSNKALPAPIEKTISKAKGQPREPQVYTLPPSREEMTKNQVSLTCDVSGFYPSDIAVEWESDGQPENNYKTTPPVLDSDGSFFLYSKLTVDKSRWEQGDVFSCSVMHEALHNHYTQKSLSLSPGK

SEQ ID NO: 19456 - protein, 121 aa, synthetic construct
  source 1..121: note = Description of Artificial Sequence: Synthetic polypeptide; note = VH of XENP020577
EVKLEESGGGLVQPGGSMKLSCAASGFTFSDAWMDWVRQSPEKGLEWVAEIRTKANNHATYYAESVKGRFTISRDDSKSSVYLQMNSLRAEDTGIYYCTRLAEWDWYFDVWGAGTTVTVSS

SEQ ID NO: 19457 - protein, 5 aa, synthetic construct
  source 1..5: note = Description of Artificial Sequence: Synthetic peptide; note = XENP020577 vhCDR1
DAWMD

SEQ ID NO: 19458 - protein, 19 aa, synthetic construct
  source 1..19: note = Description of Artificial Sequence: Synthetic peptide; note = XENP020577 vhCDR2
EIRTKANNHATYYAESVKG

SEQ ID NO: 19459 - protein, 10 aa, synthetic construct
  source 1..10: note = Description of Artificial Sequence: Synthetic peptide; note = XENP020577 vhCDR3
LAEWDWYFDV

SEQ ID NO: 19460 - protein, 218 aa, synthetic construct; identical to SEQ ID NO: 17590
  source 1..218: note = Description of Artificial Sequence: Synthetic polypeptide; note = XENP020577 7G8_H0.125_L0_IgG1_PVA_/S267K Light Chain

SEQ ID NO: 19461 - protein, 111 aa, synthetic construct; identical to SEQ ID NO: 17591
  source 1..111: note = Description of Artificial Sequence: Synthetic polypeptide; note = VL of XENP020577

SEQ ID NO: 19462 - protein, 15 aa, synthetic construct
  source 1..15: note = Description of Artificial Sequence: Synthetic peptide; note = XENP020577 vlCDR1
KASQSVDYDGDSYMN

SEQ ID NO: 19463 - protein, 7 aa, synthetic construct
  source 1..7: note = Description of Artificial Sequence: Synthetic peptide; note = XENP020577 vlCDR2
AASNLES

SEQ ID NO: 19464 - protein, 9 aa, synthetic construct
  source 1..9: note = Description of Artificial Sequence: Synthetic peptide; note = XENP020577 vlCDR3
QQSNEDPFT

SEQ ID NO: 19465 - protein, 450 aa, synthetic construct
  source 1..450: note = Description of Artificial Sequence: Synthetic polypeptide; note = XENP020578 7G8_H0.126_L0_IgG1_PVA_/S267K Heavy Chain
EVKLEESGGGLVQPGGSMKLSCAASGFTFSDAWMDWVRQSPEKGLEWVAEIRTKANNHATYYAESVKGRFTISRDDSKSSVYLQMNSLRAEDTGIYYCTRLASWDWYFDVWGAGTTVTVSSASTKGPSVFPLAPSSKSTSGGTAALGCLVKDYFPEPVTVSWNSGALTSGVHTFPAVLQSSGLYSLSSVVTVPSSSLGTQTYICNVNHKPSDTKVDKKVEPKSCDKTHTCPPCPAPPVAGPSVFLFPPKPKDTLMISRTPEVTCVVVDVKHEDPEVKFNWYVDGVEVHNAKTKPREEEYNSTYRVVSVLTVLHQDWLNGKEYKCKVSNKALPAPIEKTISKAKGQPREPQVYTLPPSREEMTKNQVSLTCDVSGFYPSDIAVEWESDGQPENNYKTTPPVLDSDGSFFLYSKLTVDKSRWEQGDVFSCSVMHEALHNHYTQKSLSLSPGK

SEQ ID NO: 19466 - protein, 121 aa, synthetic construct
  source 1..121: note = Description of Artificial Sequence: Synthetic polypeptide; note = VH of XENP020578
EVKLEESGGGLVQPGGSMKLSCAASGFTFSDAWMDWVRQSPEKGLEWVAEIRTKANNHATYYAESVKGRFTISRDDSKSSVYLQMNSLRAEDTGIYYCTRLASWDWYFDVWGAGTTVTVSS

SEQ ID NO: 19467 - protein, 5 aa, synthetic construct
  source 1..5: note = Description of Artificial Sequence: Synthetic peptide; note = XENP020578 vhCDR1
DAWMD

SEQ ID NO: 19468 - protein, 19 aa, synthetic construct
  source 1..19: note = Description of Artificial Sequence: Synthetic peptide; note = XENP020578 vhCDR2
EIRTKANNHATYYAESVKG

SEQ ID NO: 19469 - protein, 10 aa, synthetic construct
  source 1..10: note = Description of Artificial Sequence: Synthetic peptide; note = XENP020578 vhCDR3
LASWDWYFDV

SEQ ID NO: 19470 - protein, 218 aa, synthetic construct; identical to SEQ ID NO: 17590
  source 1..218: note = Description of Artificial Sequence: Synthetic polypeptide; note = XENP020578 7G8_H0.126_L0_IgG1_PVA_/S267K Light Chain

SEQ ID NO: 19471 - protein, 111 aa, synthetic construct; identical to SEQ ID NO: 17591
  source 1..111: note = Description of Artificial Sequence: Synthetic polypeptide; note = VL of XENP020578

SEQ ID NO: 19472 - protein, 15 aa, synthetic construct
  source 1..15: note = Description of Artificial Sequence: Synthetic peptide; note = XENP020578 vlCDR1
KASQSVDYDGDSYMN

SEQ ID NO: 19473 - protein, 7 aa, synthetic construct
  source 1..7: note = Description of Artificial Sequence: Synthetic peptide; note = XENP020578 vlCDR2
AASNLES

SEQ ID NO: 19474 - protein, 9 aa, synthetic construct
  source 1..9: note = Description of Artificial Sequence: Synthetic peptide; note = XENP020578 vlCDR3
QQSNEDPFT

SEQ ID NO: 19475 - protein, 450 aa, synthetic construct
  source 1..450: note = Description of Artificial Sequence: Synthetic polypeptide; note = XENP020579 7G8_H0.127_L0_IgG1_PVA_/S267K Heavy Chain
EVKLEESGGGLVQPGGSMKLSCAASGFTFSDAWMDWVRQSPEKGLEWVAEIRTKANNHATYYAESVKGRFTISRDDSKSSVYLQMNSLRAEDTGIYYCTRLARWDWYFDVWGAGTTVTVSSASTKGPSVFPLAPSSKSTSGGTAALGCLVKDYFPEPVTVSWNSGALTSGVHTFPAVLQSSGLYSLSSVVTVPSSSLGTQTYICNVNHKPSDTKVDKKVEPKSCDKTHTCPPCPAPPVAGPSVFLFPPKPKDTLMISRTPEVTCVVVDVKHEDPEVKFNWYVDGVEVHNAKTKPREEEYNSTYRVVSVLTVLHQDWLNGKEYKCKVSNKALPAPIEKTISKAKGQPREPQVYTLPPSREEMTKNQVSLTCDVSGFYPSDIAVEWESDGQPENNYKTTPPVLDSDGSFFLYSKLTVDKSRWEQGDVFSCSVMHEALHNHYTQKSLSLSPGK

SEQ ID NO: 19476 - protein, 121 aa, synthetic construct
  source 1..121: note = Description of Artificial Sequence: Synthetic polypeptide; note = VH of XENP020579
EVKLEESGGGLVQPGGSMKLSCAASGFTFSDAWMDWVRQSPEKGLEWVAEIRTKANNHATYYAESVKGRFTISRDDSKSSVYLQMNSLRAEDTGIYYCTRLARWDWYFDVWGAGTTVTVSS

SEQ ID NO: 19477 - protein, 5 aa, synthetic construct
  source 1..5: note = Description of Artificial Sequence: Synthetic peptide; note = XENP020579 vhCDR1
DAWMD

SEQ ID NO: 19478 - protein, 19 aa, synthetic construct
  source 1..19: note = Description of Artificial Sequence: Synthetic peptide; note = XENP020579 vhCDR2
EIRTKANNHATYYAESVKG

SEQ ID NO: 19479 - protein, 10 aa, synthetic construct
  source 1..10: note = Description of Artificial Sequence: Synthetic peptide; note = XENP020579 vhCDR3
LARWDWYFDV

SEQ ID NO: 19480 - protein, 218 aa, synthetic construct; identical to SEQ ID NO: 17590
  source 1..218: note = Description of Artificial Sequence: Synthetic polypeptide; note = XENP020579 7G8_H0.127_L0_IgG1_PVA_/S267K Light Chain

SEQ ID NO: 19481 - protein, 111 aa, synthetic construct; identical to SEQ ID NO: 17591
  source 1..111: note = Description of Artificial Sequence: Synthetic polypeptide; note = VL of XENP020579

SEQ ID NO: 19482 - protein, 15 aa, synthetic construct
  source 1..15: note = Description of Artificial Sequence: Synthetic peptide; note = XENP020579 vlCDR1
KASQSVDYDGDSYMN

SEQ ID NO: 19483 - protein, 7 aa, synthetic construct
  source 1..7: note = Description of Artificial Sequence: Synthetic peptide; note = XENP020579 vlCDR2
AASNLES

SEQ ID NO: 19484 - protein, 9 aa, synthetic construct
  source 1..9: note = Description of Artificial Sequence: Synthetic peptide; note = XENP020579 vlCDR3
QQSNEDPFT

SEQ ID NO: 19485 - protein, 450 aa, synthetic construct
  source 1..450: note = Description of Artificial Sequence: Synthetic polypeptide; note = XENP020580 7G8_H0.128_L0_IgG1_PVA_/S267K Heavy Chain
EVKLEESGGGLVQPGGSMKLSCAASGFTFSDAWMDWVRQSPEKGLEWVAEIRTKANNHATYYAESVKGRFTISRDDSKSSVYLQMNSLRAEDTGIYYCTRLALWDWYFDVWGAGTTVTVSSASTKGPSVFPLAPSSKSTSGGTAALGCLVKDYFPEPVTVSWNSGALTSGVHTFPAVLQSSGLYSLSSVVTVPSSSLGTQTYICNVNHKPSDTKVDKKVEPKSCDKTHTCPPCPAPPVAGPSVFLFPPKPKDTLMISRTPEVTCVVVDVKHEDPEVKFNWYVDGVEVHNAKTKPREEEYNSTYRVVSVLTVLHQDWLNGKEYKCKVSNKALPAPIEKTISKAKGQPREPQVYTLPPSREEMTKNQVSLTCDVSGFYPSDIAVEWESDGQPENNYKTTPPVLDSDGSFFLYSKLTVDKSRWEQGDVFSCSVMHEALHNHYTQKSLSLSPGK

SEQ ID NO: 19486 - protein, 121 aa, synthetic construct
  source 1..121: note = Description of Artificial Sequence: Synthetic polypeptide; note = VH of XENP020580
EVKLEESGGGLVQPGGSMKLSCAASGFTFSDAWMDWVRQSPEKGLEWVAEIRTKANNHATYYAESVKGRFTISRDDSKSSVYLQMNSLRAEDTGIYYCTRLALWDWYFDVWGAGTTVTVSS

SEQ ID NO: 19487 - protein, 5 aa, synthetic construct
  source 1..5: note = Description of Artificial Sequence: Synthetic peptide; note = XENP020580 vhCDR1
DAWMD

SEQ ID NO: 19488 - protein, 19 aa, synthetic construct
  source 1..19: note = Description of Artificial Sequence: Synthetic peptide; note = XENP020580 vhCDR2
EIRTKANNHATYYAESVKG

SEQ ID NO: 19489 - protein, 10 aa, synthetic construct
  source 1..10: note = Description of Artificial Sequence: Synthetic peptide; note = XENP020580 vhCDR3
LALWDWYFDV

SEQ ID NO: 19490 - protein, 218 aa, synthetic construct; identical to SEQ ID NO: 17590
  source 1..218: note = Description of Artificial Sequence: Synthetic polypeptide; note = XENP020580 7G8_H0.128_L0_IgG1_PVA_/S267K Light Chain

SEQ ID NO: 19491 - protein, 111 aa, synthetic construct; identical to SEQ ID NO: 17591
  source 1..111: note = Description of Artificial Sequence: Synthetic polypeptide; note = VL of XENP020580

SEQ ID NO: 19492 - protein, 15 aa, synthetic construct
  source 1..15: note = Description of Artificial Sequence: Synthetic peptide; note = XENP020580 vlCDR1
KASQSVDYDGDSYMN

SEQ ID NO: 19493 - protein, 7 aa, synthetic construct
  source 1..7: note = Description of Artificial Sequence: Synthetic peptide; note = XENP020580 vlCDR2
AASNLES

SEQ ID NO: 19494 - protein, 9 aa, synthetic construct
  source 1..9: note = Description of Artificial Sequence: Synthetic peptide; note = XENP020580 vlCDR3
QQSNEDPFT

SEQ ID NO: 19495 - protein, 450 aa, synthetic construct
  source 1..450: note = Description of Artificial Sequence: Synthetic polypeptide; note = XENP020581 7G8_H0.129_L0_IgG1_PVA_/S267K Heavy Chain
EVKLEESGGGLVQPGGSMKLSCAASGFTFSDAWMDWVRQSPEKGLEWVAEIRTKANNHATYYAESVKGRFTISRDDSKSSVYLQMNSLRAEDTGIYYCTRLATWDWYFDVWGAGTTVTVSSASTKGPSVFPLAPSSKSTSGGTAALGCLVKDYFPEPVTVSWNSGALTSGVHTFPAVLQSSGLYSLSSVVTVPSSSLGTQTYICNVNHKPSDTKVDKKVEPKSCDKTHTCPPCPAPPVAGPSVFLFPPKPKDTLMISRTPEVTCVVVDVKHEDPEVKFNWYVDGVEVHNAKTKPREEEYNSTYRVVSVLTVLHQDWLNGKEYKCKVSNKALPAPIEKTISKAKGQPREPQVYTLPPSREEMTKNQVSLTCDVSGFYPSDIAVEWESDGQPENNYKTTPPVLDSDGSFFLYSKLTVDKSRWEQGDVFSCSVMHEALHNHYTQKSLSLSPGK

SEQ ID NO: 19496 - protein, 121 aa, synthetic construct
  source 1..121: note = Description of Artificial Sequence: Synthetic polypeptide; note = VH of XENP020581
EVKLEESGGGLVQPGGSMKLSCAASGFTFSDAWMDWVRQSPEKGLEWVAEIRTKANNHATYYAESVKGRFTISRDDSKSSVYLQMNSLRAEDTGIYYCTRLATWDWYFDVWGAGTTVTVSS

SEQ ID NO: 19497 - protein, 5 aa, synthetic construct
  source 1..5: note = Description of Artificial Sequence: Synthetic peptide; note = XENP020581 vhCDR1
DAWMD

SEQ ID NO: 19498 - protein, 19 aa, synthetic construct
  source 1..19: note = Description of Artificial Sequence: Synthetic peptide; note = XENP020581 vhCDR2
EIRTKANNHATYYAESVKG

SEQ ID NO: 19499 - protein, 10 aa, synthetic construct
  source 1..10: note = Description of Artificial Sequence: Synthetic peptide; note = XENP020581 vhCDR3
LATWDWYFDV

SEQ ID NO: 19500 - protein, 218 aa, synthetic construct; identical to SEQ ID NO: 17590
  source 1..218: note = Description of Artificial Sequence: Synthetic polypeptide; note = XENP020581 7G8_H0.129_L0_IgG1_PVA_/S267K Light Chain

SEQ ID NO: 19501 - protein, 111 aa, synthetic construct; identical to SEQ ID NO: 17591
  source 1..111: note = Description of Artificial Sequence: Synthetic polypeptide; note = VL of XENP020581

SEQ ID NO: 19502 - protein, 15 aa, synthetic construct
  source 1..15: note = Description of Artificial Sequence: Synthetic peptide; note = XENP020581 vlCDR1
KASQSVDYDGDSYMN

SEQ ID NO: 19503 - protein, 7 aa, synthetic construct
  source 1..7: note = Description of Artificial Sequence: Synthetic peptide; note = XENP020581 vlCDR2
AASNLES

SEQ ID NO: 19504 - protein, 9 aa, synthetic construct
  source 1..9: note = Description of Artificial Sequence: Synthetic peptide; note = XENP020581 vlCDR3
QQSNEDPFT

SEQ ID NO: 19505 - protein, 450 aa, synthetic construct
  source 1..450: note = Description of Artificial Sequence: Synthetic polypeptide; note = XENP020582 7G8_H0.130_L0_IgG1_PVA_/S267K Heavy Chain
EVKLEESGGGLVQPGGSMKLSCAASGFTFSDAWMDWVRQSPEKGLEWVAEIRTKANNHATYYAESVKGRFTISRDDSKSSVYLQMNSLRAEDTGIYYCTRLAGWDWYFDVWGAGTTVTVSSASTKGPSVFPLAPSSKSTSGGTAALGCLVKDYFPEPVTVSWNSGALTSGVHTFPAVLQSSGLYSLSSVVTVPSSSLGTQTYICNVNHKPSDTKVDKKVEPKSCDKTHTCPPCPAPPVAGPSVFLFPPKPKDTLMISRTPEVTCVVVDVKHEDPEVKFNWYVDGVEVHNAKTKPREEEYNSTYRVVSVLTVLHQDWLNGKEYKCKVSNKALPAPIEKTISKAKGQPREPQVYTLPPSREEMTKNQVSLTCDVSGFYPSDIAVEWESDGQPENNYKTTPPVLDSDGSFFLYSKLTVDKSRWEQGDVFSCSVMHEALHNHYTQKSLSLSPGK

SEQ ID NO: 19506 - protein, 121 aa, synthetic construct
  source 1..121: note = Description of Artificial Sequence: Synthetic polypeptide; note = VH of XENP020582
EVKLEESGGGLVQPGGSMKLSCAASGFTFSDAWMDWVRQSPEKGLEWVAEIRTKANNHATYYAESVKGRFTISRDDSKSSVYLQMNSLRAEDTGIYYCTRLAGWDWYFDVWGAGTTVTVSS

SEQ ID NO: 19507 - protein, 5 aa, synthetic construct
  source 1..5: note = Description of Artificial Sequence: Synthetic peptide; note = XENP020582 vhCDR1
DAWMD

SEQ ID NO: 19508 - protein, 19 aa, synthetic construct
  source 1..19: note = Description of Artificial Sequence: Synthetic peptide; note = XENP020582 vhCDR2
EIRTKANNHATYYAESVKG

SEQ ID NO: 19509 - protein, 10 aa, synthetic construct
  source 1..10: note = Description of Artificial Sequence: Synthetic peptide; note = XENP020582 vhCDR3
LAGWDWYFDV

SEQ ID NO: 19510 - protein, 218 aa, synthetic construct; identical to SEQ ID NO: 17590
  source 1..218: note = Description of Artificial Sequence: Synthetic polypeptide; note = XENP020582 7G8_H0.130_L0_IgG1_PVA_/S267K Light Chain

SEQ ID NO: 19511 - protein, 111 aa, synthetic construct; identical to SEQ ID NO: 17591
  source 1..111: note = Description of Artificial Sequence: Synthetic polypeptide; note = VL of XENP020582

SEQ ID NO: 19512 - protein, 15 aa, synthetic construct
  source 1..15: note = Description of Artificial Sequence: Synthetic peptide; note = XENP020582 vlCDR1
KASQSVDYDGDSYMN

SEQ ID NO: 19513 - protein, 7 aa, synthetic construct
  source 1..7: note = Description of Artificial Sequence: Synthetic peptide; note = XENP020582 vlCDR2
AASNLES

SEQ ID NO: 19514 - protein, 9 aa, synthetic construct
  source 1..9: note = Description of Artificial Sequence: Synthetic peptide; note = XENP020582 vlCDR3
QQSNEDPFT

SEQ ID NO: 19515 - protein, 450 aa, synthetic construct
  source 1..450: note = Description of Artificial Sequence: Synthetic polypeptide; note = XENP020583 7G8_H0.131_L0_IgG1_PVA_/S267K Heavy Chain
EVKLEESGGGLVQPGGSMKLSCAASGFTFSDAWMDWVRQSPEKGLEWVAEIRTKANNHATYYAESVKGRFTISRDDSKSSVYLQMNSLRAEDTGIYYCTRLAYWDWYFDVWGAGTTVTVSSASTKGPSVFPLAPSSKSTSGGTAALGCLVKDYFPEPVTVSWNSGALTSGVHTFPAVLQSSGLYSLSSVVTVPSSSLGTQTYICNVNHKPSDTKVDKKVEPKSCDKTHTCPPCPAPPVAGPSVFLFPPKPKDTLMISRTPEVTCVVVDVKHEDPEVKFNWYVDGVEVHNAKTKPREEEYNSTYRVVSVLTVLHQDWLNGKEYKCKVSNKALPAPIEKTISKAKGQPREPQVYTLPPSREEMTKNQVSLTCDVSGFYPSDIAVEWESDGQPENNYKTTPPVLDSDGSFFLYSKLTVDKSRWEQGDVFSCSVMHEALHNHYTQKSLSLSPGK

SEQ ID NO: 19516 - protein, 121 aa, synthetic construct
  source 1..121: note = Description of Artificial Sequence: Synthetic polypeptide; note = VH of XENP020583
EVKLEESGGGLVQPGGSMKLSCAASGFTFSDAWMDWVRQSPEKGLEWVAEIRTKANNHATYYAESVKGRFTISRDDSKSSVYLQMNSLRAEDTGIYYCTRLAYWDWYFDVWGAGTTVTVSS

SEQ ID NO: 19517 - protein, 5 aa, synthetic construct
  source 1..5: note = Description of Artificial Sequence: Synthetic peptide; note = XENP020583 vhCDR1
DAWMD

SEQ ID NO: 19518 - protein, 19 aa, synthetic construct
  source 1..19: note = Description of Artificial Sequence: Synthetic peptide; note = XENP020583 vhCDR2
EIRTKANNHATYYAESVKG

SEQ ID NO: 19519 - protein, 10 aa, synthetic construct
  source 1..10: note = Description of Artificial Sequence: Synthetic peptide; note = XENP020583 vhCDR3
LAYWDWYFDV

SEQ ID NO: 19520 - protein, 218 aa, synthetic construct; identical to SEQ ID NO: 17590
  source 1..218: note = Description of Artificial Sequence: Synthetic polypeptide; note = XENP020583 7G8_H0.131_L0_IgG1_PVA_/S267K Light Chain

SEQ ID NO: 19521 - protein, 111 aa, synthetic construct; identical to SEQ ID NO: 17591
  source 1..111: note = Description of Artificial Sequence: Synthetic polypeptide; note = VL of XENP020583

SEQ ID NO: 19522 - protein, 15 aa, synthetic construct
  source 1..15: note = Description of Artificial Sequence: Synthetic peptide; note = XENP020583 vlCDR1
KASQSVDYDGDSYMN

SEQ ID NO: 19523 - protein, 7 aa, synthetic construct
  source 1..7: note = Description of Artificial Sequence: Synthetic peptide; note = XENP020583 vlCDR2
AASNLES

SEQ ID NO: 19524 - protein, 9 aa, synthetic construct
  source 1..9: note = Description of Artificial Sequence: Synthetic peptide; note = XENP020583 vlCDR3
QQSNEDPFT

SEQ ID NO: 19525 - protein, 450 aa, synthetic construct
  source 1..450: note = Description of Artificial Sequence: Synthetic polypeptide; note = XENP020584 7G8_H0.132_L0_IgG1_PVA_/S267K Heavy Chain
EVKLEESGGGLVQPGGSMKLSCAASGFTFSDAWMDWVRQSPEKGLEWVAEIRTKANNHATYYAESVKGRFTISRDDSKSSVYLQMNSLRAEDTGIYYCTRLANFDWYFDVWGAGTTVTVSSASTKGPSVFPLAPSSKSTSGGTAALGCLVKDYFPEPVTVSWNSGALTSGVHTFPAVLQSSGLYSLSSVVTVPSSSLGTQTYICNVNHKPSDTKVDKKVEPKSCDKTHTCPPCPAPPVAGPSVFLFPPKPKDTLMISRTPEVTCVVVDVKHEDPEVKFNWYVDGVEVHNAKTKPREEEYNSTYRVVSVLTVLHQDWLNGKEYKCKVSNKALPAPIEKTISKAKGQPREPQVYTLPPSREEMTKNQVSLTCDVSGFYPSDIAVEWESDGQPENNYKTTPPVLDSDGSFFLYSKLTVDKSRWEQGDVFSCSVMHEALHNHYTQKSLSLSPGK

SEQ ID NO: 19526 - protein, 121 aa, synthetic construct
  source 1..121: note = Description of Artificial Sequence: Synthetic polypeptide; note = VH of XENP020584
EVKLEESGGGLVQPGGSMKLSCAASGFTFSDAWMDWVRQSPEKGLEWVAEIRTKANNHATYYAESVKGRFTISRDDSKSSVYLQMNSLRAEDTGIYYCTRLANFDWYFDVWGAGTTVTVSS

SEQ ID NO: 19527 - protein, 5 aa, synthetic construct
  source 1..5: note = Description of Artificial Sequence: Synthetic peptide; note = XENP020584 vhCDR1
DAWMD

SEQ ID NO: 19528 - protein, 19 aa, synthetic construct
  source 1..19: note = Description of Artificial Sequence: Synthetic peptide; note = XENP020584 vhCDR2
EIRTKANNHATYYAESVKG

SEQ ID NO: 19529 - protein, 10 aa, synthetic construct
  source 1..10: note = Description of Artificial Sequence: Synthetic peptide; note = XENP020584 vhCDR3
LANFDWYFDV

SEQ ID NO: 19530 - protein, 218 aa, synthetic construct; identical to SEQ ID NO: 17590
  source 1..218: note = Description of Artificial Sequence: Synthetic polypeptide; note = XENP020584 7G8_H0.132_L0_IgG1_PVA_/S267K Light Chain

SEQ ID NO: 19531 - protein, 111 aa, synthetic construct; identical to SEQ ID NO: 17591
  source 1..111: note = Description of Artificial Sequence: Synthetic polypeptide; note = VL of XENP020584

SEQ ID NO: 19532 - protein, 15 aa, synthetic construct
  source 1..15: note = Description of Artificial Sequence: Synthetic peptide; note = XENP020584 vlCDR1
KASQSVDYDGDSYMN

SEQ ID NO: 19533 - protein, 7 aa, synthetic construct
  source 1..7: note = Description of Artificial Sequence: Synthetic peptide; note = XENP020584 vlCDR2
AASNLES

SEQ ID NO: 19534 - protein, 9 aa, synthetic construct
  source 1..9: note = Description of Artificial Sequence: Synthetic peptide; note = XENP020584 vlCDR3
QQSNEDPFT

SEQ ID NO: 19535 - protein, 450 aa, synthetic construct
  source 1..450: note = Description of Artificial Sequence: Synthetic polypeptide; note = XENP020585 7G8_H0.133_L0_IgG1_PVA_/S267K Heavy Chain
EVKLEESGGGLVQPGGSMKLSCAASGFTFSDAWMDWVRQSPEKGLEWVAEIRTKANNHATYYAESVKGRFTISRDDSKSSVYLQMNSLRAEDTGIYYCTRLANLDWYFDVWGAGTTVTVSSASTKGPSVFPLAPSSKSTSGGTAALGCLVKDYFPEPVTVSWNSGALTSGVHTFPAVLQSSGLYSLSSVVTVPSSSLGTQTYICNVNHKPSDTKVDKKVEPKSCDKTHTCPPCPAPPVAGPSVFLFPPKPKDTLMISRTPEVTCVVVDVKHEDPEVKFNWYVDGVEVHNAKTKPREEEYNSTYRVVSVLTVLHQDWLNGKEYKCKVSNKALPAPIEKTISKAKGQPREPQVYTLPPSREEMTKNQVSLTCDVSGFYPSDIAVEWESDGQPENNYKTTPPVLDSDGSFFLYSKLTVDKSRWEQGDVFSCSVMHEALHNHYTQKSLSLSPGK

SEQ ID NO: 19536 - protein, 121 aa, synthetic construct
  source 1..121: note = Description of Artificial Sequence: Synthetic polypeptide; note = VH of XENP020585
EVKLEESGGGLVQPGGSMKLSCAASGFTFSDAWMDWVRQSPEKGLEWVAEIRTKANNHATYYAESVKGRFTISRDDSKSSVYLQMNSLRAEDTGIYYCTRLANLDWYFDVWGAGTTVTVSS

SEQ ID NO: 19537 - protein, 5 aa, synthetic construct
  source 1..5: note = Description of Artificial Sequence: Synthetic peptide; note = XENP020585 vhCDR1
DAWMD

SEQ ID NO: 19538 - protein, 19 aa, synthetic construct
  source 1..19: note = Description of Artificial Sequence: Synthetic peptide; note = XENP020585 vhCDR2
EIRTKANNHATYYAESVKG

SEQ ID NO: 19539 - protein, 10 aa, synthetic construct
  source 1..10: note = Description of Artificial Sequence: Synthetic peptide; note = XENP020585 vhCDR3
LANLDWYFDV

SEQ ID NO: 19540 - protein, 218 aa, synthetic construct; identical to SEQ ID NO: 17590
  source 1..218: note = Description of Artificial Sequence: Synthetic polypeptide; note = XENP020585 7G8_H0.133_L0_IgG1_PVA_/S267K Light Chain

SEQ ID NO: 19541 - protein, 111 aa, synthetic construct; identical to SEQ ID NO: 17591
  source 1..111: note = Description of Artificial Sequence: Synthetic polypeptide; note = VL of XENP020585

SEQ ID NO: 19542 - protein, 15 aa, synthetic construct
  source 1..15: note = Description of Artificial Sequence: Synthetic peptide; note = XENP020585 vlCDR1
KASQSVDYDGDSYMN

SEQ ID NO: 19543 - protein, 7 aa, synthetic construct
  source 1..7: note = Description of Artificial Sequence: Synthetic peptide; note = XENP020585 vlCDR2
AASNLES

SEQ ID NO: 19544 - protein, 9 aa, synthetic construct
  source 1..9: note = Description of Artificial Sequence: Synthetic peptide; note = XENP020585 vlCDR3
QQSNEDPFT

SEQ ID NO: 19545 - protein, 450 aa, synthetic construct
  source 1..450: note = Description of Artificial Sequence: Synthetic polypeptide; note = XENP020586 7G8_H0.134_L0_IgG1_PVA_/S267K Heavy Chain
EVKLEESGGGLVQPGGSMKLSCAASGFTFSDAWMDWVRQSPEKGLEWVAEIRTKANNHATYYAESVKGRFTISRDDSKSSVYLQMNSLRAEDTGIYYCTRLANYDWYFDVWGAGTTVTVSSASTKGPSVFPLAPSSKSTSGGTAALGCLVKDYFPEPVTVSWNSGALTSGVHTFPAVLQSSGLYSLSSVVTVPSSSLGTQTYICNVNHKPSDTKVDKKVEPKSCDKTHTCPPCPAPPVAGPSVFLFPPKPKDTLMISRTPEVTCVVVDVKHEDPEVKFNWYVDGVEVHNAKTKPREEEYNSTYRVVSVLTVLHQDWLNGKEYKCKVSNKALPAPIEKTISKAKGQPREPQVYTLPPSREEMTKNQVSLTCDVSGFYPSDIAVEWESDGQPENNYKTTPPVLDSDGSFFLYSKLTVDKSRWEQGDVFSCSVMHEALHNHYTQKSLSLSPGK

SEQ ID NO: 19546 - protein, 121 aa, synthetic construct
  source 1..121: note = Description of Artificial Sequence: Synthetic polypeptide; note = VH of XENP020586
EVKLEESGGGLVQPGGSMKLSCAASGFTFSDAWMDWVRQSPEKGLEWVAEIRTKANNHATYYAESVKGRFTISRDDSKSSVYLQMNSLRAEDTGIYYCTRLANYDWYFDVWGAGTTVTVSS

SEQ ID NO: 19547 - protein, 5 aa, synthetic construct
  source 1..5: note = Description of Artificial Sequence: Synthetic peptide; note = XENP020586 vhCDR1
DAWMD

SEQ ID NO: 19548 - protein, 19 aa, synthetic construct
  source 1..19: note = Description of Artificial Sequence: Synthetic peptide; note = XENP020586 vhCDR2
EIRTKANNHATYYAESVKG

SEQ ID NO: 19549 - protein, 10 aa, synthetic construct
  source 1..10: note = Description of Artificial Sequence: Synthetic peptide; note = XENP020586 vhCDR3
LANYDWYFDV

SEQ ID NO: 19550 - protein, 218 aa, synthetic construct; identical to SEQ ID NO: 17590
  source 1..218: note = Description of Artificial Sequence: Synthetic polypeptide; note = XENP020586 7G8_H0.134_L0_IgG1_PVA_/S267K Light Chain

SEQ ID NO: 19551 - protein, 111 aa, synthetic construct; identical to SEQ ID NO: 17591
  source 1..111: note = Description of Artificial Sequence: Synthetic polypeptide; note = VL of XENP020586

SEQ ID NO: 19552 - protein, 15 aa, synthetic construct
  source 1..15: note = Description of Artificial Sequence: Synthetic peptide; note = XENP020586 vlCDR1
KASQSVDYDGDSYMN

SEQ ID NO: 19553 - protein, 7 aa, synthetic construct
  source 1..7: note = Description of Artificial Sequence: Synthetic peptide; note = XENP020586 vlCDR2
AASNLES

SEQ ID NO: 19554 - protein, 9 aa, synthetic construct
  source 1..9: note = Description of Artificial Sequence: Synthetic peptide; note = XENP020586 vlCDR3
QQSNEDPFT

SEQ ID NO: 19555 - protein, 450 aa, synthetic construct
  source 1..450: note = Description of Artificial Sequence: Synthetic polypeptide; note = XENP020587 7G8_H0.135_L0_IgG1_PVA_/S267K Heavy Chain
EVKLEESGGGLVQPGGSMKLSCAASGFTFSDAWMDWVRQSPEKGLEWVAEIRTKANNHATYYAESVKGRFTISRDDSKSSVYLQMNSLRAEDTGIYYCTRLANIDWYFDVWGAGTTVTVSSASTKGPSVFPLAPSSKSTSGGTAALGCLVKDYFPEPVTVSWNSGALTSGVHTFPAVLQSSGLYSLSSVVTVPSSSLGTQTYICNVNHKPSDTKVDKKVEPKSCDKTHTCPPCPAPPVAGPSVFLFPPKPKDTLMISRTPEVTCVVVDVKHEDPEVKFNWYVDGVEVHNAKTKPREEEYNSTYRVVSVLTVLHQDWLNGKEYKCKVSNKALPAPIEKTISKAKGQPREPQVYTLPPSREEMTKNQVSLTCDVSGFYPSDIAVEWESDGQPENNYKTTPPVLDSDGSFFLYSKLTVDKSRWEQGDVFSCSVMHEALHNHYTQKSLSLSPGK

SEQ ID NO: 19556 - protein, 121 aa, synthetic construct
  source 1..121: note = Description of Artificial Sequence: Synthetic polypeptide; note = VH of XENP020587
EVKLEESGGGLVQPGGSMKLSCAASGFTFSDAWMDWVRQSPEKGLEWVAEIRTKANNHATYYAESVKGRFTISRDDSKSSVYLQMNSLRAEDTGIYYCTRLANIDWYFDVWGAGTTVTVSS

SEQ ID NO: 19557 - protein, 5 aa, synthetic construct
  source 1..5: note = Description of Artificial Sequence: Synthetic peptide; note = XENP020587 vhCDR1
DAWMD

SEQ ID NO: 19558 - protein, 19 aa, synthetic construct
  source 1..19: note = Description of Artificial Sequence: Synthetic peptide; note = XENP020587 vhCDR2
EIRTKANNHATYYAESVKG

SEQ ID NO: 19559 - protein, 10 aa, synthetic construct
  source 1..10: note = Description of Artificial Sequence: Synthetic peptide; note = XENP020587 vhCDR3
LANIDWYFDV

SEQ ID NO: 19560 - protein, 218 aa, synthetic construct; identical to SEQ ID NO: 17590
  source 1..218: note = Description of Artificial Sequence: Synthetic polypeptide; note = XENP020587 7G8_H0.135_L0_IgG1_PVA_/S267K Light Chain

SEQ ID NO: 19561 - protein, 111 aa, synthetic construct; identical to SEQ ID NO: 17591
  source 1..111: note = Description of Artificial Sequence: Synthetic polypeptide; note = VL of XENP020587

SEQ ID NO: 19562 - protein, 15 aa, synthetic construct
  source 1..15: note = Description of Artificial Sequence: Synthetic peptide; note = XENP020587 vlCDR1
KASQSVDYDGDSYMN

SEQ ID NO: 19563 - protein, 7 aa, synthetic construct
  source 1..7: note = Description of Artificial Sequence: Synthetic peptide; note = XENP020587 vlCDR2
AASNLES

SEQ ID NO: 19564 - protein, 9 aa, synthetic construct
  source 1..9: note = Description of Artificial Sequence: Synthetic peptide; note = XENP020587 vlCDR3
QQSNEDPFT

SEQ ID NO: 19565 - protein, 450 aa, synthetic construct
  source 1..450: note = Description of Artificial Sequence: Synthetic polypeptide; note = XENP020588 7G8_H0.136_L0_IgG1_PVA_/S267K Heavy Chain
EVKLEESGGGLVQPGGSMKLSCAASGFTFSDAWMDWVRQSPEKGLEWVAEIRTKANNHATYYAESVKGRFTISRDDSKSSVYLQMNSLRAEDTGIYYCTRLANHDWYFDVWGAGTTVTVSSASTKGPSVFPLAPSSKSTSGGTAALGCLVKDYFPEPVTVSWNSGALTSGVHTFPAVLQSSGLYSLSSVVTVPSSSLGTQTYICNVNHKPSDTKVDKKVEPKSCDKTHTCPPCPAPPVAGPSVFLFPPKPKDTLMISRTPEVTCVVVDVKHEDPEVKFNWYVDGVEVHNAKTKPREEEYNSTYRVVSVLTVLHQDWLNGKEYKCKVSNKALPAPIEKTISKAKGQPREPQVYTLPPSREEMTKNQVSLTCDVSGFYPSDIAVEWESDGQPENNYKTTPPVLDSDGSFFLYSKLTVDKSRWEQGDVFSCSVMHEALHNHYTQKSLSLSPGK

SEQ ID NO: 19566 - protein, 121 aa, synthetic construct
  source 1..121: note = Description of Artificial Sequence: Synthetic polypeptide; note = VH of XENP020588
EVKLEESGGGLVQPGGSMKLSCAASGFTFSDAWMDWVRQSPEKGLEWVAEIRTKANNHATYYAESVKGRFTISRDDSKSSVYLQMNSLRAEDTGIYYCTRLANHDWYFDVWGAGTTVTVSS

SEQ ID NO: 19567 - protein, 5 aa, synthetic construct
  source 1..5: note = Description of Artificial Sequence: Synthetic peptide; note = XENP020588 vhCDR1
DAWMD

SEQ ID NO: 19568 - protein, 19 aa, synthetic construct
  source 1..19: note = Description of Artificial Sequence: Synthetic peptide; note = XENP020588 vhCDR2
EIRTKANNHATYYAESVKG

SEQ ID NO: 19569 - protein, 10 aa, synthetic construct
  source 1..10: note = Description of Artificial Sequence: Synthetic peptide; note = XENP020588 vhCDR3
LANHDWYFDV

SEQ ID NO: 19570 - protein, 218 aa, synthetic construct; identical to SEQ ID NO: 17590
  source 1..218: note = Description of Artificial Sequence: Synthetic polypeptide; note = XENP020588 7G8_H0.136_L0_IgG1_PVA_/S267K Light Chain

SEQ ID NO: 19571 - protein, 111 aa, synthetic construct; identical to SEQ ID NO: 17591
  source 1..111: note = Description of Artificial Sequence: Synthetic polypeptide; note = VL of XENP020588

SEQ ID NO: 19572 - protein, 15 aa, synthetic construct
  source 1..15: note = Description of Artificial Sequence: Synthetic peptide; note = XENP020588 vlCDR1
KASQSVDYDGDSYMN

SEQ ID NO: 19573 - protein, 7 aa, synthetic construct
  source 1..7: note = Description of Artificial Sequence: Synthetic peptide; note = XENP020588 vlCDR2
AASNLES

SEQ ID NO: 19574 - protein, 9 aa, synthetic construct
  source 1..9: note = Description of Artificial Sequence: Synthetic peptide; note = XENP020588 vlCDR3
QQSNEDPFT

SEQ ID NO: 19575 - protein, 450 aa, synthetic construct
  source 1..450: note = Description of Artificial Sequence: Synthetic polypeptide; note = XENP020589 7G8_H0.137_L0_IgG1_PVA_/S267K Heavy Chain
EVKLEESGGGLVQPGGSMKLSCAASGFTFSDAWMDWVRQSPEKGLEWVAEIRTKANNHATYYAESVKGRFTISRDDSKSSVYLQMNSLRAEDTGIYYCTRLANQDWYFDVWGAGTTVTVSSASTKGPSVFPLAPSSKSTSGGTAALGCLVKDYFPEPVTVSWNSGALTSGVHTFPAVLQSSGLYSLSSVVTVPSSSLGTQTYICNVNHKPSDTKVDKKVEPKSCDKTHTCPPCPAPPVAGPSVFLFPPKPKDTLMISRTPEVTCVVVDVKHEDPEVKFNWYVDGVEVHNAKTKPREEEYNSTYRVVSVLTVLHQDWLNGKEYKCKVSNKALPAPIEKTISKAKGQPREPQVYTLPPSREEMTKNQVSLTCDVSGFYPSDIAVEWESDGQPENNYKTTPPVLDSDGSFFLYSKLTVDKSRWEQGDVFSCSVMHEALHNHYTQKSLSLSPGK

SEQ ID NO: 19576 - protein, 121 aa, synthetic construct
  source 1..121: note = Description of Artificial Sequence: Synthetic polypeptide; note = VH of XENP020589
EVKLEESGGGLVQPGGSMKLSCAASGFTFSDAWMDWVRQSPEKGLEWVAEIRTKANNHATYYAESVKGRFTISRDDSKSSVYLQMNSLRAEDTGIYYCTRLANQDWYFDVWGAGTTVTVSS

SEQ ID NO: 19577 - protein, 5 aa, synthetic construct
  source 1..5: note = Description of Artificial Sequence: Synthetic peptide; note = XENP020589 vhCDR1
DAWMD

SEQ ID NO: 19578 - protein, 19 aa, synthetic construct
  source 1..19: note = Description of Artificial Sequence: Synthetic peptide; note = XENP020589 vhCDR2
EIRTKANNHATYYAESVKG

SEQ ID NO: 19579 - protein, 10 aa, synthetic construct
  source 1..10: note = Description of Artificial Sequence: Synthetic peptide; note = XENP020589 vhCDR3
LANQDWYFDV

SEQ ID NO: 19580 - protein, 218 aa, synthetic construct; identical to SEQ ID NO: 17590
  source 1..218: note = Description of Artificial Sequence: Synthetic polypeptide; note = XENP020589 7G8_H0.137_L0_IgG1_PVA_/S267K Light Chain

SEQ ID NO: 19581 - protein, 111 aa, synthetic construct; identical to SEQ ID NO: 17591
  source 1..111: note = Description of Artificial Sequence: Synthetic polypeptide; note = VL of XENP020589

SEQ ID NO: 19582 - protein, 15 aa, synthetic construct
  source 1..15: note = Description of Artificial Sequence: Synthetic peptide; note = XENP020589 vlCDR1
KASQSVDYDGDSYMN

SEQ ID NO: 19583 - protein, 7 aa, synthetic construct
  source 1..7: note = Description of Artificial Sequence: Synthetic peptide; note = XENP020589 vlCDR2
AASNLES

SEQ ID NO: 19584 - protein, 9 aa, synthetic construct
  source 1..9: note = Description of Artificial Sequence: Synthetic peptide; note = XENP020589 vlCDR3
QQSNEDPFT

SEQ ID NO: 19585 - protein, 450 aa, synthetic construct
  source 1..450: note = Description of Artificial Sequence: Synthetic polypeptide; note = XENP020590 7G8_H0.138_L0_IgG1_PVA_/S267K Heavy Chain
EVKLEESGGGLVQPGGSMKLSCAASGFTFSDAWMDWVRQSPEKGLEWVAEIRTKANNHATYYAESVKGRFTISRDDSKSSVYLQMNSLRAEDTGIYYCTRLANSDWYFDVWGAGTTVTVSSASTKGPSVFPLAPSSKSTSGGTAALGCLVKDYFPEPVTVSWNSGALTSGVHTFPAVLQSSGLYSLSSVVTVPSSSLGTQTYICNVNHKPSDTKVDKKVEPKSCDKTHTCPPCPAPPVAGPSVFLFPPKPKDTLMISRTPEVTCVVVDVKHEDPEVKFNWYVDGVEVHNAKTKPREEEYNSTYRVVSVLTVLHQDWLNGKEYKCKVSNKALPAPIEKTISKAKGQPREPQVYTLPPSREEMTKNQVSLTCDVSGFYPSDIAVEWESDGQPENNYKTTPPVLDSDGSFFLYSKLTVDKSRWEQGDVFSCSVMHEALHNHYTQKSLSLSPGK

SEQ ID NO: 19586 - protein, 121 aa, synthetic construct
  source 1..121: note = Description of Artificial Sequence: Synthetic polypeptide; note = VH of XENP020590
EVKLEESGGGLVQPGGSMKLSCAASGFTFSDAWMDWVRQSPEKGLEWVAEIRTKANNHATYYAESVKGRFTISRDDSKSSVYLQMNSLRAEDTGIYYCTRLANSDWYFDVWGAGTTVTVSS

SEQ ID NO: 19587 - protein, 5 aa, synthetic construct
  source 1..5: note = Description of Artificial Sequence: Synthetic peptide; note = XENP020590 vhCDR1
DAWMD

SEQ ID NO: 19588 - protein, 19 aa, synthetic construct
  source 1..19: note = Description of Artificial Sequence: Synthetic peptide; note = XENP020590 vhCDR2
EIRTKANNHATYYAESVKG

SEQ ID NO: 19589 - protein, 10 aa, synthetic construct
  source 1..10: note = Description of Artificial Sequence: Synthetic peptide; note = XENP020590 vhCDR3
LANSDWYFDV

SEQ ID NO: 19590 - protein, 218 aa, synthetic construct; identical to SEQ ID NO: 17590
  source 1..218: note = Description of Artificial Sequence: Synthetic polypeptide; note = XENP020590 7G8_H0.138_L0_IgG1_PVA_/S267K Light Chain

SEQ ID NO: 19591 - protein, 111 aa, synthetic construct; identical to SEQ ID NO: 17591
  source 1..111: note = Description of Artificial Sequence: Synthetic polypeptide; note = VL of XENP020590

SEQ ID NO: 19592 - protein, 15 aa, synthetic construct
  source 1..15: note = Description of Artificial Sequence: Synthetic peptide; note = XENP020590 vlCDR1
KASQSVDYDGDSYMN

SEQ ID NO: 19593 - protein, 7 aa, synthetic construct
  source 1..7: note = Description of Artificial Sequence: Synthetic peptide; note = XENP020590 vlCDR2
AASNLES

SEQ ID NO: 19594 - protein, 9 aa, synthetic construct
  source 1..9: note = Description of Artificial Sequence: Synthetic peptide; note = XENP020590 vlCDR3
QQSNEDPFT

SEQ ID NO: 19595 - protein, 450 aa, synthetic construct
  source 1..450: note = Description of Artificial Sequence: Synthetic polypeptide; note = XENP020591 7G8_H0.139_L0_IgG1_PVA_/S267K Heavy Chain
EVKLEESGGGLVQPGGSMKLSCAASGFTFSDAWMDWVRQSPEKGLEWVAEIRTKANNHATYYAESVKGRFTISRDDSKSSVYLQMNSLRAEDTGIYYCTRLANDDWYFDVWGAGTTVTVSSASTKGPSVFPLAPSSKSTSGGTAALGCLVKDYFPEPVTVSWNSGALTSGVHTFPAVLQSSGLYSLSSVVTVPSSSLGTQTYICNVNHKPSDTKVDKKVEPKSCDKTHTCPPCPAPPVAGPSVFLFPPKPKDTLMISRTPEVTCVVVDVKHEDPEVKFNWYVDGVEVHNAKTKPREEEYNSTYRVVSVLTVLHQDWLNGKEYKCKVSNKALPAPIEKTISKAKGQPREPQVYTLPPSREEMTKNQVSLTCDVSGFYPSDIAVEWESDGQPENNYKTTPPVLDSDGSFFLYSKLTVDKSRWEQGDVFSCSVMHEALHNHYTQKSLSLSPGK

SEQ ID NO: 19596 - protein, 121 aa, synthetic construct
  source 1..121: note = Description of Artificial Sequence: Synthetic polypeptide; note = VH of XENP020591
EVKLEESGGGLVQPGGSMKLSCAASGFTFSDAWMDWVRQSPEKGLEWVAEIRTKANNHATYYAESVKGRFTISRDDSKSSVYLQMNSLRAEDTGIYYCTRLANDDWYFDVWGAGTTVTVSS

SEQ ID NO: 19597 - protein, 5 aa, synthetic construct
  source 1..5: note = Description of Artificial Sequence: Synthetic peptide; note = XENP020591 vhCDR1
DAWMD

SEQ ID NO: 19598 - protein, 19 aa, synthetic construct
  source 1..19: note = Description of Artificial Sequence: Synthetic peptide; note = XENP020591 vhCDR2
EIRTKANNHATYYAESVKG

SEQ ID NO: 19599 - protein, 10 aa, synthetic construct
  source 1..10: note = Description of Artificial Sequence: Synthetic peptide; note = XENP020591 vhCDR3
LANDDWYFDV

SEQ ID NO: 19600 - protein, 218 aa, synthetic construct; identical to SEQ ID NO: 17590
  source 1..218: note = Description of Artificial Sequence: Synthetic polypeptide; note = XENP020591 7G8_H0.139_L0_IgG1_PVA_/S267K Light Chain

SEQ ID NO: 19601 - protein, 111 aa, synthetic construct; identical to SEQ ID NO: 17591
  source 1..111: note = Description of Artificial Sequence: Synthetic polypeptide; note = VL of XENP020591

SEQ ID NO: 19602 - protein, 15 aa, synthetic construct
  source 1..15: note = Description of Artificial Sequence: Synthetic peptide; note = XENP020591 vlCDR1
KASQSVDYDGDSYMN

SEQ ID NO: 19603 - protein, 7 aa, synthetic construct
  source 1..7: note = Description of Artificial Sequence: Synthetic peptide; note = XENP020591 vlCDR2
AASNLES

SEQ ID NO: 19604 - protein, 9 aa, synthetic construct
  source 1..9: note = Description of Artificial Sequence: Synthetic peptide; note = XENP020591 vlCDR3
QQSNEDPFT

SEQ ID NO: 19605 - protein, 450 aa, synthetic construct
  source 1..450: note = Description of Artificial Sequence: Synthetic polypeptide; note = XENP020592 7G8_H0.140_L0_IgG1_PVA_/S267K Heavy Chain
EVKLEESGGGLVQPGGSMKLSCAASGFTFSDAWMDWVRQSPEKGLEWVAEIRTKANNHATYYAESVKGRFTISRDDSKSSVYLQMNSLRAEDTGIYYCTRLANRDWYFDVWGAGTTVTVSSASTKGPSVFPLAPSSKSTSGGTAALGCLVKDYFPEPVTVSWNSGALTSGVHTFPAVLQSSGLYSLSSVVTVPSSSLGTQTYICNVNHKPSDTKVDKKVEPKSCDKTHTCPPCPAPPVAGPSVFLFPPKPKDTLMISRTPEVTCVVVDVKHEDPEVKFNWYVDGVEVHNAKTKPREEEYNSTYRVVSVLTVLHQDWLNGKEYKCKVSNKALPAPIEKTISKAKGQPREPQVYTLPPSREEMTKNQVSLTCDVSGFYPSDIAVEWESDGQPENNYKTTPPVLDSDGSFFLYSKLTVDKSRWEQGDVFSCSVMHEALHNHYTQKSLSLSPGK

SEQ ID NO: 19606 - protein, 121 aa, synthetic construct
  source 1..121: note = Description of Artificial Sequence: Synthetic polypeptide; note = VH of XENP020592
EVKLEESGGGLVQPGGSMKLSCAASGFTFSDAWMDWVRQSPEKGLEWVAEIRTKANNHATYYAESVKGRFTISRDDSKSSVYLQMNSLRAEDTGIYYCTRLANRDWYFDVWGAGTTVTVSS

SEQ ID NO: 19607 - protein, 5 aa, synthetic construct
  source 1..5: note = Description of Artificial Sequence: Synthetic peptide; note = XENP020592 vhCDR1
DAWMD

SEQ ID NO: 19608 - protein, 19 aa, synthetic construct
  source 1..19: note = Description of Artificial Sequence: Synthetic peptide; note = XENP020592 vhCDR2
EIRTKANNHATYYAESVKG

SEQ ID NO: 19609 - protein, 10 aa, synthetic construct
  source 1..10: note = Description of Artificial Sequence: Synthetic peptide; note = XENP020592 vhCDR3
LANRDWYFDV

SEQ ID NO: 19610 - protein, 218 aa, synthetic construct; identical to SEQ ID NO: 17590
  source 1..218: note = Description of Artificial Sequence: Synthetic polypeptide; note = XENP020592 7G8_H0.140_L0_IgG1_PVA_/S267K Light Chain

SEQ ID NO: 19611 - protein, 111 aa, synthetic construct; identical to SEQ ID NO: 17591
  source 1..111: note = Description of Artificial Sequence: Synthetic polypeptide; note = VL of XENP020592

SEQ ID NO: 19612 - protein, 15 aa, synthetic construct
  source 1..15: note = Description of Artificial Sequence: Synthetic peptide; note = XENP020592 vlCDR1
KASQSVDYDGDSYMN

SEQ ID NO: 19613 - protein, 7 aa, synthetic construct
  source 1..7: note = Description of Artificial Sequence: Synthetic peptide; note = XENP020592 vlCDR2
AASNLES

SEQ ID NO: 19614 - protein, 9 aa, synthetic construct
  source 1..9: note = Description of Artificial Sequence: Synthetic peptide; note = XENP020592 vlCDR3
QQSNEDPFT

SEQ ID NO: 19615 - protein, 450 aa, synthetic construct
  source 1..450: note = Description of Artificial Sequence: Synthetic polypeptide; note = XENP020593 7G8_H0.141_L0_IgG1_PVA_/S267K Heavy Chain
EVKLEESGGGLVQPGGSMKLSCAASGFTFSDAWMDWVRQSPEKGLEWVAEIRTKANNHATYYAESVKGRFTISRDDSKSSVYLQMNSLRAEDTGIYYCTRLANWNWYFDVWGAGTTVTVSSASTKGPSVFPLAPSSKSTSGGTAALGCLVKDYFPEPVTVSWNSGALTSGVHTFPAVLQSSGLYSLSSVVTVPSSSLGTQTYICNVNHKPSDTKVDKKVEPKSCDKTHTCPPCPAPPVAGPSVFLFPPKPKDTLMISRTPEVTCVVVDVKHEDPEVKFNWYVDGVEVHNAKTKPREEEYNSTYRVVSVLTVLHQDWLNGKEYKCKVSNKALPAPIEKTISKAKGQPREPQVYTLPPSREEMTKNQVSLTCDVSGFYPSDIAVEWESDGQPENNYKTTPPVLDSDGSFFLYSKLTVDKSRWEQGDVFSCSVMHEALHNHYTQKSLSLSPGK

SEQ ID NO: 19616 - protein, 121 aa, synthetic construct
  source 1..121: note = Description of Artificial Sequence: Synthetic polypeptide; note = VH of XENP020593
EVKLEESGGGLVQPGGSMKLSCAASGFTFSDAWMDWVRQSPEKGLEWVAEIRTKANNHATYYAESVKGRFTISRDDSKSSVYLQMNSLRAEDTGIYYCTRLANWNWYFDVWGAGTTVTVSS

SEQ ID NO: 19617 - protein, 5 aa, synthetic construct
  source 1..5: note = Description of Artificial Sequence: Synthetic peptide; note = XENP020593 vhCDR1
DAWMD

SEQ ID NO: 19618 - protein, 19 aa, synthetic construct
  source 1..19: note = Description of Artificial Sequence: Synthetic peptide; note = XENP020593 vhCDR2
EIRTKANNHATYYAESVKG

SEQ ID NO: 19619 - protein, 10 aa, synthetic construct
  source 1..10: note = Description of Artificial Sequence: Synthetic peptide; note = XENP020593 vhCDR3
LANWNWYFDV

SEQ ID NO: 19620 - protein, 218 aa, synthetic construct; identical to SEQ ID NO: 17590
  source 1..218: note = Description of Artificial Sequence: Synthetic polypeptide; note = XENP020593 7G8_H0.141_L0_IgG1_PVA_/S267K Light Chain

SEQ ID NO: 19621 - protein, 111 aa, synthetic construct; identical to SEQ ID NO: 17591
  source 1..111: note = Description of Artificial Sequence: Synthetic polypeptide; note = VL of XENP020593

SEQ ID NO: 19622 - protein, 15 aa, synthetic construct
  source 1..15: note = Description of Artificial Sequence: Synthetic peptide; note = XENP020593 vlCDR1
KASQSVDYDGDSYMN

SEQ ID NO: 19623 - protein, 7 aa, synthetic construct
  source 1..7: note = Description of Artificial Sequence: Synthetic peptide; note = XENP020593 vlCDR2
AASNLES

SEQ ID NO: 19624 - protein, 9 aa, synthetic construct
  source 1..9: note = Description of Artificial Sequence: Synthetic peptide; note = XENP020593 vlCDR3
QQSNEDPFT

SEQ ID NO: 19625 - protein, 450 aa, synthetic construct
  source 1..450: note = Description of Artificial Sequence: Synthetic polypeptide; note = XENP020594 7G8_H0.142_L0_IgG1_PVA_/S267K Heavy Chain
EVKLEESGGGLVQPGGSMKLSCAASGFTFSDAWMDWVRQSPEKGLEWVAEIRTKANNHATYYAESVKGRFTISRDDSKSSVYLQMNSLRAEDTGIYYCTRLANWEWYFDVWGAGTTVTVSSASTKGPSVFPLAPSSKSTSGGTAALGCLVKDYFPEPVTVSWNSGALTSGVHTFPAVLQSSGLYSLSSVVTVPSSSLGTQTYICNVNHKPSDTKVDKKVEPKSCDKTHTCPPCPAPPVAGPSVFLFPPKPKDTLMISRTPEVTCVVVDVKHEDPEVKFNWYVDGVEVHNAKTKPREEEYNSTYRVVSVLTVLHQDWLNGKEYKCKVSNKALPAPIEKTISKAKGQPREPQVYTLPPSREEMTKNQVSLTCDVSGFYPSDIAVEWESDGQPENNYKTTPPVLDSDGSFFLYSKLTVDKSRWEQGDVFSCSVMHEALHNHYTQKSLSLSPGK

SEQ ID NO: 19626 - protein, 121 aa, synthetic construct
  source 1..121: note = Description of Artificial Sequence: Synthetic polypeptide; note = VH of XENP020594
EVKLEESGGGLVQPGGSMKLSCAASGFTFSDAWMDWVRQSPEKGLEWVAEIRTKANNHATYYAESVKGRFTISRDDSKSSVYLQMNSLRAEDTGIYYCTRLANWEWYFDVWGAGTTVTVSS

SEQ ID NO: 19627 - protein, 5 aa, synthetic construct
  source 1..5: note = Description of Artificial Sequence: Synthetic peptide; note = XENP020594 vhCDR1
DAWMD

SEQ ID NO: 19628 - protein, 19 aa, synthetic construct
  source 1..19: note = Description of Artificial Sequence: Synthetic peptide; note = XENP020594 vhCDR2
EIRTKANNHATYYAESVKG

SEQ ID NO: 19629 - protein, 10 aa, synthetic construct
  source 1..10: note = Description of Artificial Sequence: Synthetic peptide; note = XENP020594 vhCDR3
LANWEWYFDV

SEQ ID NO: 19630 - protein, 218 aa, synthetic construct; identical to SEQ ID NO: 17590
  source 1..218: note = Description of Artificial Sequence: Synthetic polypeptide; note = XENP020594 7G8_H0.142_L0_IgG1_PVA_/S267K Light Chain

SEQ ID NO: 19631 - protein, 111 aa, synthetic construct; identical to SEQ ID NO: 17591
  source 1..111: note = Description of Artificial Sequence: Synthetic polypeptide; note = VL of XENP020594

SEQ ID NO: 19632 - protein, 15 aa, synthetic construct
  source 1..15: note = Description of Artificial Sequence: Synthetic peptide; note = XENP020594 vlCDR1
KASQSVDYDGDSYMN

SEQ ID NO: 19633 - protein, 7 aa, synthetic construct
  source 1..7: note = Description of Artificial Sequence: Synthetic peptide; note = XENP020594 vlCDR2
AASNLES

SEQ ID NO: 19634 - protein, 9 aa, synthetic construct
  source 1..9: note = Description of Artificial Sequence: Synthetic peptide; note = XENP020594 vlCDR3
QQSNEDPFT

SEQ ID NO: 19635 - protein, 450 aa, synthetic construct
  source 1..450: note = Description of Artificial Sequence: Synthetic polypeptide; note = XENP020595 7G8_H0.143_L0_IgG1_PVA_/S267K Heavy Chain
EVKLEESGGGLVQPGGSMKLSCAASGFTFSDAWMDWVRQSPEKGLEWVAEIRTKANNHATYYAESVKGRFTISRDDSKSSVYLQMNSLRAEDTGIYYCTRLANWHWYFDVWGAGTTVTVSSASTKGPSVFPLAPSSKSTSGGTAALGCLVKDYFPEPVTVSWNSGALTSGVHTFPAVLQSSGLYSLSSVVTVPSSSLGTQTYICNVNHKPSDTKVDKKVEPKSCDKTHTCPPCPAPPVAGPSVFLFPPKPKDTLMISRTPEVTCVVVDVKHEDPEVKFNWYVDGVEVHNAKTKPREEEYNSTYRVVSVLTVLHQDWLNGKEYKCKVSNKALPAPIEKTISKAKGQPREPQVYTLPPSREEMTKNQVSLTCDVSGFYPSDIAVEWESDGQPENNYKTTPPVLDSDGSFFLYSKLTVDKSRWEQGDVFSCSVMHEALHNHYTQKSLSLSPGK

SEQ ID NO: 19636 - protein, 121 aa, synthetic construct
  source 1..121: note = Description of Artificial Sequence: Synthetic polypeptide; note = VH of XENP020595
EVKLEESGGGLVQPGGSMKLSCAASGFTFSDAWMDWVRQSPEKGLEWVAEIRTKANNHATYYAESVKGRFTISRDDSKSSVYLQMNSLRAEDTGIYYCTRLANWHWYFDVWGAGTTVTVSS

SEQ ID NO: 19637 - protein, 5 aa, synthetic construct
  source 1..5: note = Description of Artificial Sequence: Synthetic peptide; note = XENP020595 vhCDR1
DAWMD

SEQ ID NO: 19638 - protein, 19 aa, synthetic construct
  source 1..19: note = Description of Artificial Sequence: Synthetic peptide; note = XENP020595 vhCDR2
EIRTKANNHATYYAESVKG

SEQ ID NO: 19639 - protein, 10 aa, synthetic construct
  source 1..10: note = Description of Artificial Sequence: Synthetic peptide; note = XENP020595 vhCDR3
LANWHWYFDV

SEQ ID NO: 19640 - protein, 218 aa, synthetic construct; identical to SEQ ID NO: 17590
  source 1..218: note = Description of Artificial Sequence: Synthetic polypeptide; note = XENP020595 7G8_H0.143_L0_IgG1_PVA_/S267K Light Chain

SEQ ID NO: 19641 - protein, 111 aa, synthetic construct; identical to SEQ ID NO: 17591
  source 1..111: note = Description of Artificial Sequence: Synthetic polypeptide; note = VL of XENP020595

SEQ ID NO: 19642 - protein, 15 aa, synthetic construct
  source 1..15: note = Description of Artificial Sequence: Synthetic peptide; note = XENP020595 vlCDR1
KASQSVDYDGDSYMN

SEQ ID NO: 19643 - protein, 7 aa, synthetic construct
  source 1..7: note = Description of Artificial Sequence: Synthetic peptide; note = XENP020595 vlCDR2
AASNLES

SEQ ID NO: 19644 - protein, 9 aa, synthetic construct
  source 1..9: note = Description of Artificial Sequence: Synthetic peptide; note = XENP020595 vlCDR3
QQSNEDPFT

SEQ ID NO: 19645 - protein, 450 aa, synthetic construct
  source 1..450: note = Description of Artificial Sequence: Synthetic polypeptide; note = XENP020596 7G8_H0.144_L0_IgG1_PVA_/S267K Heavy Chain
EVKLEESGGGLVQPGGSMKLSCAASGFTFSDAWMDWVRQSPEKGLEWVAEIRTKANNHATYYAESVKGRFTISRDDSKSSVYLQMNSLRAEDTGIYYCTRLANWRWYFDVWGAGTTVTVSSASTKGPSVFPLAPSSKSTSGGTAALGCLVKDYFPEPVTVSWNSGALTSGVHTFPAVLQSSGLYSLSSVVTVPSSSLGTQTYICNVNHKPSDTKVDKKVEPKSCDKTHTCPPCPAPPVAGPSVFLFPPKPKDTLMISRTPEVTCVVVDVKHEDPEVKFNWYVDGVEVHNAKTKPREEEYNSTYRVVSVLTVLHQDWLNGKEYKCKVSNKALPAPIEKTISKAKGQPREPQVYTLPPSREEMTKNQVSLTCDVSGFYPSDIAVEWESDGQPENNYKTTPPVLDSDGSFFLYSKLTVDKSRWEQGDVFSCSVMHEALHNHYTQKSLSLSPGK

SEQ ID NO: 19646 - protein, 121 aa, synthetic construct
  source 1..121: note = Description of Artificial Sequence: Synthetic polypeptide; note = VH of XENP020596
EVKLEESGGGLVQPGGSMKLSCAASGFTFSDAWMDWVRQSPEKGLEWVAEIRTKANNHATYYAESVKGRFTISRDDSKSSVYLQMNSLRAEDTGIYYCTRLANWRWYFDVWGAGTTVTVSS

SEQ ID NO: 19647 - protein, 5 aa, synthetic construct
  source 1..5: note = Description of Artificial Sequence: Synthetic peptide; note = XENP020596 vhCDR1
DAWMD

SEQ ID NO: 19648 - protein, 19 aa, synthetic construct
  source 1..19: note = Description of Artificial Sequence: Synthetic peptide; note = XENP020596 vhCDR2
EIRTKANNHATYYAESVKG

SEQ ID NO: 19649 - protein, 10 aa, synthetic construct
  source 1..10: note = Description of Artificial Sequence: Synthetic peptide; note = XENP020596 vhCDR3
LANWRWYFDV

SEQ ID NO: 19650 - protein, 218 aa, synthetic construct; identical to SEQ ID NO: 17590
  source 1..218: note = Description of Artificial Sequence: Synthetic polypeptide; note = XENP020596 7G8_H0.144_L0_IgG1_PVA_/S267K Light Chain

SEQ ID NO: 19651 - protein, 111 aa, synthetic construct; identical to SEQ ID NO: 17591
  source 1..111: note = Description of Artificial Sequence: Synthetic polypeptide; note = VL of XENP020596

SEQ ID NO: 19652 - protein, 15 aa, synthetic construct
  source 1..15: note = Description of Artificial Sequence: Synthetic peptide; note = XENP020596 vlCDR1
KASQSVDYDGDSYMN

SEQ ID NO: 19653 - protein, 7 aa, synthetic construct
  source 1..7: note = Description of Artificial Sequence: Synthetic peptide; note = XENP020596 vlCDR2
AASNLES

SEQ ID NO: 19654 - protein, 9 aa, synthetic construct
  source 1..9: note = Description of Artificial Sequence: Synthetic peptide; note = XENP020596 vlCDR3
QQSNEDPFT

SEQ ID NO: 19655 - protein, 450 aa, synthetic construct
  source 1..450: note = Description of Artificial Sequence: Synthetic polypeptide; note = XENP020601 7G8_H0.145_L0_IgG1_PVA_/S267K Heavy Chain
EVKLEESGGGLVQPGGSMKLSCAASGFTFSDAWMDWVRQSPEKGLEWVAEIRTKANNHATYYAESVKGRFTISRDDSKSSVYLQMNSLRAEDTGIYYCTRLANWLWYFDVWGAGTTVTVSSASTKGPSVFPLAPSSKSTSGGTAALGCLVKDYFPEPVTVSWNSGALTSGVHTFPAVLQSSGLYSLSSVVTVPSSSLGTQTYICNVNHKPSDTKVDKKVEPKSCDKTHTCPPCPAPPVAGPSVFLFPPKPKDTLMISRTPEVTCVVVDVKHEDPEVKFNWYVDGVEVHNAKTKPREEEYNSTYRVVSVLTVLHQDWLNGKEYKCKVSNKALPAPIEKTISKAKGQPREPQVYTLPPSREEMTKNQVSLTCDVSGFYPSDIAVEWESDGQPENNYKTTPPVLDSDGSFFLYSKLTVDKSRWEQGDVFSCSVMHEALHNHYTQKSLSLSPGK

SEQ ID NO: 19656 - protein, 121 aa, synthetic construct
  source 1..121: note = Description of Artificial Sequence: Synthetic polypeptide; note = VH of XENP020601
EVKLEESGGGLVQPGGSMKLSCAASGFTFSDAWMDWVRQSPEKGLEWVAEIRTKANNHATYYAESVKGRFTISRDDSKSSVYLQMNSLRAEDTGIYYCTRLANWLWYFDVWGAGTTVTVSS

SEQ ID NO: 19657 - protein, 5 aa, synthetic construct
  source 1..5: note = Description of Artificial Sequence: Synthetic peptide; note = XENP020601 vhCDR1
DAWMD

SEQ ID NO: 19658 - protein, 19 aa, synthetic construct
  source 1..19: note = Description of Artificial Sequence: Synthetic peptide; note = XENP020601 vhCDR2
EIRTKANNHATYYAESVKG

SEQ ID NO: 19659 - protein, 10 aa, synthetic construct
  source 1..10: note = Description of Artificial Sequence: Synthetic peptide; note = XENP020601 vhCDR3
LANWLWYFDV

SEQ ID NO: 19660 - protein, 218 aa, synthetic construct; identical to SEQ ID NO: 17590
  source 1..218: note = Description of Artificial Sequence: Synthetic polypeptide; note = XENP020601 7G8_H0.145_L0_IgG1_PVA_/S267K Light Chain

SEQ ID NO: 19661 - protein, 111 aa, synthetic construct; identical to SEQ ID NO: 17591
  source 1..111: note = Description of Artificial Sequence: Synthetic polypeptide; note = VL of XENP020601

SEQ ID NO: 19662 - protein, 15 aa, synthetic construct
  source 1..15: note = Description of Artificial Sequence: Synthetic peptide; note = XENP020601 vlCDR1
KASQSVDYDGDSYMN

SEQ ID NO: 19663 - protein, 7 aa, synthetic construct
  source 1..7: note = Description of Artificial Sequence: Synthetic peptide; note = XENP020601 vlCDR2
AASNLES

SEQ ID NO: 19664 - protein, 9 aa, synthetic construct
  source 1..9: note = Description of Artificial Sequence: Synthetic peptide; note = XENP020601 vlCDR3
QQSNEDPFT

SEQ ID NO: 19665 - protein, 450 aa, synthetic construct
  source 1..450: note = Description of Artificial Sequence: Synthetic polypeptide; note = XENP020602 7G8_H0.146_L0_IgG1_PVA_/S267K Heavy Chain
EVKLEESGGGLVQPGGSMKLSCAASGFTFSDAWMDWVRQSPEKGLEWVAEIRTKANNHATYYAESVKGRFTISRDDSKSSVYLQMNSLRAEDTGIYYCTRLANWGWYFDVWGAGTTVTVSSASTKGPSVFPLAPSSKSTSGGTAALGCLVKDYFPEPVTVSWNSGALTSGVHTFPAVLQSSGLYSLSSVVTVPSSSLGTQTYICNVNHKPSDTKVDKKVEPKSCDKTHTCPPCPAPPVAGPSVFLFPPKPKDTLMISRTPEVTCVVVDVKHEDPEVKFNWYVDGVEVHNAKTKPREEEYNSTYRVVSVLTVLHQDWLNGKEYKCKVSNKALPAPIEKTISKAKGQPREPQVYTLPPSREEMTKNQVSLTCDVSGFYPSDIAVEWESDGQPENNYKTTPPVLDSDGSFFLYSKLTVDKSRWEQGDVFSCSVMHEALHNHYTQKSLSLSPGK

SEQ ID NO: 19666 - protein, 121 aa, synthetic construct
  source 1..121: note = Description of Artificial Sequence: Synthetic polypeptide; note = VH of XENP020602
EVKLEESGGGLVQPGGSMKLSCAASGFTFSDAWMDWVRQSPEKGLEWVAEIRTKANNHATYYAESVKGRFTISRDDSKSSVYLQMNSLRAEDTGIYYCTRLANWGWYFDVWGAGTTVTVSS

SEQ ID NO: 19667 - protein, 5 aa, synthetic construct
  source 1..5: note = Description of Artificial Sequence: Synthetic peptide; note = XENP020602 vhCDR1
DAWMD

SEQ ID NO: 19668 - protein, 19 aa, synthetic construct
  source 1..19: note = Description of Artificial Sequence: Synthetic peptide; note = XENP020602 vhCDR2
EIRTKANNHATYYAESVKG

SEQ ID NO: 19669 - protein, 10 aa, synthetic construct
  source 1..10: note = Description of Artificial Sequence: Synthetic peptide; note = XENP020602 vhCDR3
LANWGWYFDV

SEQ ID NO: 19670 - protein, 218 aa, synthetic construct; identical to SEQ ID NO: 17590
  source 1..218: note = Description of Artificial Sequence: Synthetic polypeptide; note = XENP020602 7G8_H0.146_L0_IgG1_PVA_/S267K Light Chain

SEQ ID NO: 19671 - protein, 111 aa, synthetic construct; identical to SEQ ID NO: 17591
  source 1..111: note = Description of Artificial Sequence: Synthetic polypeptide; note = VL of XENP020602

SEQ ID NO: 19672 - protein, 15 aa, synthetic construct
  source 1..15: note = Description of Artificial Sequence: Synthetic peptide; note = XENP020602 vlCDR1
KASQSVDYDGDSYMN

SEQ ID NO: 19673 - protein, 7 aa, synthetic construct
  source 1..7: note = Description of Artificial Sequence: Synthetic peptide; note = XENP020602 vlCDR2
AASNLES

SEQ ID NO: 19674 - protein, 9 aa, synthetic construct
  source 1..9: note = Description of Artificial Sequence: Synthetic peptide; note = XENP020602 vlCDR3
QQSNEDPFT

SEQ ID NO: 19675 - protein, 450 aa, synthetic construct
  source 1..450: note = Description of Artificial Sequence: Synthetic polypeptide; note = XENP020603 7G8_H0.147_L0_IgG1_PVA_/S267K Heavy Chain
EVKLEESGGGLVQPGGSMKLSCAASGFTFSDAWMDWVRQSPEKGLEWVAEIRTKANNHATYYAESVKGRFTISRDDSKSSVYLQMNSLRAEDTGIYYCTRLANWYWYFDVWGAGTTVTVSSASTKGPSVFPLAPSSKSTSGGTAALGCLVKDYFPEPVTVSWNSGALTSGVHTFPAVLQSSGLYSLSSVVTVPSSSLGTQTYICNVNHKPSDTKVDKKVEPKSCDKTHTCPPCPAPPVAGPSVFLFPPKPKDTLMISRTPEVTCVVVDVKHEDPEVKFNWYVDGVEVHNAKTKPREEEYNSTYRVVSVLTVLHQDWLNGKEYKCKVSNKALPAPIEKTISKAKGQPREPQVYTLPPSREEMTKNQVSLTCDVSGFYPSDIAVEWESDGQPENNYKTTPPVLDSDGSFFLYSKLTVDKSRWEQGDVFSCSVMHEALHNHYTQKSLSLSPGK

SEQ ID NO: 19676 - protein, 121 aa, synthetic construct
  source 1..121: note = Description of Artificial Sequence: Synthetic polypeptide; note = VH of XENP020603
EVKLEESGGGLVQPGGSMKLSCAASGFTFSDAWMDWVRQSPEKGLEWVAEIRTKANNHATYYAESVKGRFTISRDDSKSSVYLQMNSLRAEDTGIYYCTRLANWYWYFDVWGAGTTVTVSS

SEQ ID NO: 19677 - protein, 5 aa, synthetic construct
  source 1..5: note = Description of Artificial Sequence: Synthetic peptide; note = XENP020603 vhCDR1
DAWMD

SEQ ID NO: 19678 - protein, 19 aa, synthetic construct
  source 1..19: note = Description of Artificial Sequence: Synthetic peptide; note = XENP020603 vhCDR2
EIRTKANNHATYYAESVKG

SEQ ID NO: 19679 - protein, 10 aa, synthetic construct
  source 1..10: note = Description of Artificial Sequence: Synthetic peptide; note = XENP020603 vhCDR3
LANWYWYFDV

SEQ ID NO: 19680 - protein, 218 aa, synthetic construct; identical to SEQ ID NO: 17590
  source 1..218: note = Description of Artificial Sequence: Synthetic polypeptide; note = XENP020603 7G8_H0.147_L0_IgG1_PVA_/S267K Light Chain

SEQ ID NO: 19681 - protein, 111 aa, synthetic construct; identical to SEQ ID NO: 17591
  source 1..111: note = Description of Artificial Sequence: Synthetic polypeptide; note = VL of XENP020603

SEQ ID NO: 19682 - protein, 15 aa, synthetic construct
  source 1..15: note = Description of Artificial Sequence: Synthetic peptide; note = XENP020603 vlCDR1
KASQSVDYDGDSYMN

SEQ ID NO: 19683 - protein, 7 aa, synthetic construct
  source 1..7: note = Description of Artificial Sequence: Synthetic peptide; note = XENP020603 vlCDR2
AASNLES

SEQ ID NO: 19684 - protein, 9 aa, synthetic construct
  source 1..9: note = Description of Artificial Sequence: Synthetic peptide; note = XENP020603 vlCDR3
QQSNEDPFT

SEQ ID NO: 19685 - protein, 450 aa, synthetic construct
  source 1..450: note = Description of Artificial Sequence: Synthetic polypeptide; note = XENP020604 7G8_H0.148_L0_IgG1_PVA_/S267K Heavy Chain
EVKLEESGGGLVQPGGSMKLSCAASGFTFSDAWMDWVRQSPEKGLEWVAEIRTKANNHATYYAESVKGRFTISRDDSKSSVYLQMNSLRAEDTGIYYCTRLANWDYYFDVWGAGTTVTVSSASTKGPSVFPLAPSSKSTSGGTAALGCLVKDYFPEPVTVSWNSGALTSGVHTFPAVLQSSGLYSLSSVVTVPSSSLGTQTYICNVNHKPSDTKVDKKVEPKSCDKTHTCPPCPAPPVAGPSVFLFPPKPKDTLMISRTPEVTCVVVDVKHEDPEVKFNWYVDGVEVHNAKTKPREEEYNSTYRVVSVLTVLHQDWLNGKEYKCKVSNKALPAPIEKTISKAKGQPREPQVYTLPPSREEMTKNQVSLTCDVSGFYPSDIAVEWESDGQPENNYKTTPPVLDSDGSFFLYSKLTVDKSRWEQGDVFSCSVMHEALHNHYTQKSLSLSPGK

SEQ ID NO: 19686 - protein, 121 aa, synthetic construct
  source 1..121: note = Description of Artificial Sequence: Synthetic polypeptide; note = VH of XENP020604
EVKLEESGGGLVQPGGSMKLSCAASGFTFSDAWMDWVRQSPEKGLEWVAEIRTKANNHATYYAESVKGRFTISRDDSKSSVYLQMNSLRAEDTGIYYCTRLANWDYYFDVWGAGTTVTVSS

SEQ ID NO: 19687 - protein, 5 aa, synthetic construct
  source 1..5: note = Description of Artificial Sequence: Synthetic peptide; note = XENP020604 vhCDR1
DAWMD

SEQ ID NO: 19688 - protein, 19 aa, synthetic construct
  source 1..19: note = Description of Artificial Sequence: Synthetic peptide; note = XENP020604 vhCDR2
EIRTKANNHATYYAESVKG

SEQ ID NO: 19689 - protein, 10 aa, synthetic construct
  source 1..10: note = Description of Artificial Sequence: Synthetic peptide; note = XENP020604 vhCDR3
LANWDYYFDV

SEQ ID NO: 19690 - protein, 218 aa, synthetic construct; identical to SEQ ID NO: 17590
  source 1..218: note = Description of Artificial Sequence: Synthetic polypeptide; note = XENP020604 7G8_H0.148_L0_IgG1_PVA_/S267K Light Chain

SEQ ID NO: 19691 - protein, 111 aa, synthetic construct; identical to SEQ ID NO: 17591
  source 1..111: note = Description of Artificial Sequence: Synthetic polypeptide; note = VL of XENP020604

SEQ ID NO: 19692 - protein, 15 aa, synthetic construct
  source 1..15: note = Description of Artificial Sequence: Synthetic peptide; note = XENP020604 vlCDR1
KASQSVDYDGDSYMN

SEQ ID NO: 19693 - protein, 7 aa, synthetic construct
  source 1..7: note = Description of Artificial Sequence: Synthetic peptide; note = XENP020604 vlCDR2
AASNLES

SEQ ID NO: 19694 - protein, 9 aa, synthetic construct
  source 1..9: note = Description of Artificial Sequence: Synthetic peptide; note = XENP020604 vlCDR3
QQSNEDPFT

SEQ ID NO: 19695 - protein, 450 aa, synthetic construct; identical to SEQ ID NO: 17585
  source 1..450: note = Description of Artificial Sequence: Synthetic polypeptide; note = XENP020605 7G8_H0_L0.1_IgG1_PVA_/S267K Heavy Chain

SEQ ID NO: 19696 - protein, 121 aa, synthetic construct; identical to SEQ ID NO: 17586
  source 1..121: note = Description of Artificial Sequence: Synthetic polypeptide; note = VH of XENP020605

SEQ ID NO: 19697 - protein, 5 aa, synthetic construct
  source 1..5: note = Description of Artificial Sequence: Synthetic peptide; note = XENP020605 vhCDR1
DAWMD

SEQ ID NO: 19698 - protein, 19 aa, synthetic construct
  source 1..19: note = Description of Artificial Sequence: Synthetic peptide; note = XENP020605 vhCDR2
EIRTKANNHATYYAESVKG

SEQ ID NO: 19699 - protein, 10 aa, synthetic construct
  source 1..10: note = Description of Artificial Sequence: Synthetic peptide; note = XENP020605 vhCDR3
LANWDWYFDV

SEQ ID NO: 19700 - protein, 218 aa, synthetic construct
  source 1..218: note = Description of Artificial Sequence: Synthetic polypeptide; note = XENP020605 7G8_H0_L0.1_IgG1_PVA_/S267K Light Chain
DTVLTQSPASLAVSLGQRATISCKASQSVNYDGDSYMNWYQQKPGQPPKLLIYAASNLESGIPARLSGSGSGTDFTLNIHPVEEEDAATYYCQQSNEDPFTFGSGTKLEVKRTVAAPSVFIFPPSDEQLKSGTASVVCLLNNFYPREAKVQWKVDNALQSGNSQESVTEQDSKDSTYSLSSTLTLSKADYEKHKVYACEVTHQGLSSPVTKSFNRGEC

SEQ ID NO: 19701 - protein, 111 aa, synthetic construct
  source 1..111: note = Description of Artificial Sequence: Synthetic polypeptide; note = VL of XENP020605
DTVLTQSPASLAVSLGQRATISCKASQSVNYDGDSYMNWYQQKPGQPPKLLIYAASNLESGIPARLSGSGSGTDFTLNIHPVEEEDAATYYCQQSNEDPFTFGSGTKLEVK

SEQ ID NO: 19702 - protein, 15 aa, synthetic construct
  source 1..15: note = Description of Artificial Sequence: Synthetic peptide; note = XENP020605 vlCDR1
KASQSVNYDGDSYMN

SEQ ID NO: 19703 - protein, 7 aa, synthetic construct
  source 1..7: note = Description of Artificial Sequence: Synthetic peptide; note = XENP020605 vlCDR2
AASNLES

SEQ ID NO: 19704 - protein, 9 aa, synthetic construct
  source 1..9: note = Description of Artificial Sequence: Synthetic peptide; note = XENP020605 vlCDR3
QQSNEDPFT

SEQ ID NO: 19705 - protein, 450 aa, synthetic construct; identical to SEQ ID NO: 17585
  source 1..450: note = Description of Artificial Sequence: Synthetic polypeptide; note = XENP020606 7G8_H0_L0.2_IgG1_PVA_/S267K Heavy Chain

SEQ ID NO: 19706 - protein, 121 aa, synthetic construct; identical to SEQ ID NO: 17586
  source 1..121: note = Description of Artificial Sequence: Synthetic polypeptide; note = VH of XENP020606

SEQ ID NO: 19707 - protein, 5 aa, synthetic construct
  source 1..5: note = Description of Artificial Sequence: Synthetic peptide; note = XENP020606 vhCDR1
DAWMD

SEQ ID NO: 19708 - protein, 19 aa, synthetic construct
  source 1..19: note = Description of Artificial Sequence: Synthetic peptide; note = XENP020606 vhCDR2
EIRTKANNHATYYAESVKG

SEQ ID NO: 19709 - protein, 10 aa, synthetic construct
  source 1..10: note = Description of Artificial Sequence: Synthetic peptide; note = XENP020606 vhCDR3
LANWDWYFDV

SEQ ID NO: 19710 - protein, 218 aa, synthetic construct
  source 1..218: note = Description of Artificial Sequence: Synthetic polypeptide; note = XENP020606 7G8_H0_L0.2_IgG1_PVA_/S267K Light Chain
DTVLTQSPASLAVSLGQRATISCKASQSVEYDGDSYMNWYQQKPGQPPKLLIYAASNLESGIPARLSGSGSGTDFTLNIHPVEEEDAATYYCQQSNEDPFTFGSGTKLEVKRTVAAPSVFIFPPSDEQLKSGTASVVCLLNNFYPREAKVQWKVDNALQSGNSQESVTEQDSKDSTYSLSSTLTLSKADYEKHKVYACEVTHQGLSSPVTKSFNRGEC

SEQ ID NO: 19711 - protein, 111 aa, synthetic construct
  source 1..111: note = Description of Artificial Sequence: Synthetic polypeptide; note = VL of XENP020606
DTVLTQSPASLAVSLGQRATISCKASQSVEYDGDSYMNWYQQKPGQPPKLLIYAASNLESGIPARLSGSGSGTDFTLNIHPVEEEDAATYYCQQSNEDPFTFGSGTKLEVK

SEQ ID NO: 19712 - protein, 15 aa, synthetic construct
  source 1..15: note = Description of Artificial Sequence: Synthetic peptide; note = XENP020606 vlCDR1
KASQSVEYDGDSYMN

SEQ ID NO: 19713 - protein, 7 aa, synthetic construct
  source 1..7: note = Description of Artificial Sequence: Synthetic peptide; note = XENP020606 vlCDR2
AASNLES

SEQ ID NO: 19714 - protein, 9 aa, synthetic construct
  source 1..9: note = Description of Artificial Sequence: Synthetic peptide; note = XENP020606 vlCDR3
QQSNEDPFT

SEQ ID NO: 19715 - protein, 450 aa, synthetic construct; identical to SEQ ID NO: 17585
  source 1..450: note = Description of Artificial Sequence: Synthetic polypeptide; note = XENP020607 7G8_H0_L0.3_IgG1_PVA_/S267K Heavy Chain

SEQ ID NO: 19716 - protein, 121 aa, synthetic construct; identical to SEQ ID NO: 17586
  source 1..121: note = Description of Artificial Sequence: Synthetic polypeptide; note = VH of XENP020607

SEQ ID NO: 19717 - protein, 5 aa, synthetic construct
  source 1..5: note = Description of Artificial Sequence: Synthetic peptide; note = XENP020607 vhCDR1
DAWMD

SEQ ID NO: 19718 - protein, 19 aa, synthetic construct
  source 1..19: note = Description of Artificial Sequence: Synthetic peptide; note = XENP020607 vhCDR2
EIRTKANNHATYYAESVKG

SEQ ID NO: 19719 - protein, 10 aa, synthetic construct
  source 1..10: note = Description of Artificial Sequence: Synthetic peptide; note = XENP020607 vhCDR3
LANWDWYFDV

SEQ ID NO: 19720 - protein, 218 aa, synthetic construct
  source 1..218: note = Description of Artificial Sequence: Synthetic polypeptide; note = XENP020607 7G8_H0_L0.3_IgG1_PVA_/S267K Light Chain
DTVLTQSPASLAVSLGQRATISCKASQSVHYDGDSYMNWYQQKPGQPPKLLIYAASNLESGIPARLSGSGSGTDFTLNIHPVEEEDAATYYCQQSNEDPFTFGSGTKLEVKRTVAAPSVFIFPPSDEQLKSGTASVVCLLNNFYPREAKVQWKVDNALQSGNSQESVTEQDSKDSTYSLSSTLTLSKADYEKHKVYACEVTHQGLSSPVTKSFNRGEC

SEQ ID NO: 19721 - protein, 111 aa, synthetic construct
  source 1..111: note = Description of Artificial Sequence: Synthetic polypeptide; note = VL of XENP020607
DTVLTQSPASLAVSLGQRATISCKASQSVHYDGDSYMNWYQQKPGQPPKLLIYAASNLESGIPARLSGSGSGTDFTLNIHPVEEEDAATYYCQQSNEDPFTFGSGTKLEVK

SEQ ID NO: 19722 - protein, 15 aa, synthetic construct
  source 1..15: note = Description of Artificial Sequence: Synthetic peptide; note = XENP020607 vlCDR1
KASQSVHYDGDSYMN

SEQ ID NO: 19723 - protein, 7 aa, synthetic construct
  source 1..7: note = Description of Artificial Sequence: Synthetic peptide; note = XENP020607 vlCDR2
AASNLES

SEQ ID NO: 19724 - protein, 9 aa, synthetic construct
  source 1..9: note = Description of Artificial Sequence: Synthetic peptide; note = XENP020607 vlCDR3
QQSNEDPFT

SEQ ID NO: 19725 - protein, 450 aa, synthetic construct; identical to SEQ ID NO: 17585
  source 1..450: note = Description of Artificial Sequence: Synthetic polypeptide; note = XENP020608 7G8_H0_L0.4_IgG1_PVA_/S267K Heavy Chain

SEQ ID NO: 19726 - protein, 121 aa, synthetic construct; identical to SEQ ID NO: 17586
  source 1..121: note = Description of Artificial Sequence: Synthetic polypeptide; note = VH of XENP020608

SEQ ID NO: 19727 - protein, 5 aa, synthetic construct
  source 1..5: note = Description of Artificial Sequence: Synthetic peptide; note = XENP020608 vhCDR1
DAWMD

SEQ ID NO: 19728 - protein, 19 aa, synthetic construct
  source 1..19: note = Description of Artificial Sequence: Synthetic peptide; note = XENP020608 vhCDR2
EIRTKANNHATYYAESVKG

SEQ ID NO: 19729 - protein, 10 aa, synthetic construct
  source 1..10: note = Description of Artificial Sequence: Synthetic peptide; note = XENP020608 vhCDR3
LANWDWYFDV

SEQ ID NO: 19730 - protein, 218 aa, synthetic construct
  source 1..218: note = Description of Artificial Sequence: Synthetic polypeptide; note = XENP020608 7G8_H0_L0.4_IgG1_PVA_/S267K Light Chain
DTVLTQSPASLAVSLGQRATISCKASQSVSYDGDSYMNWYQQKPGQPPKLLIYAASNLESGIPARLSGSGSGTDFTLNIHPVEEEDAATYYCQQSNEDPFTFGSGTKLEVKRTVAAPSVFIFPPSDEQLKSGTASVVCLLNNFYPREAKVQWKVDNALQSGNSQESVTEQDSKDSTYSLSSTLTLSKADYEKHKVYACEVTHQGLSSPVTKSFNRGEC

SEQ ID NO: 19731 - protein, 111 aa, synthetic construct
  source 1..111: note = Description of Artificial Sequence: Synthetic polypeptide; note = VL of XENP020608
DTVLTQSPASLAVSLGQRATISCKASQSVSYDGDSYMNWYQQKPGQPPKLLIYAASNLESGIPARLSGSGSGTDFTLNIHPVEEEDAATYYCQQSNEDPFTFGSGTKLEVK

SEQ ID NO: 19732 - protein, 15 aa, synthetic construct
  source 1..15: note = Description of Artificial Sequence: Synthetic peptide; note = XENP020608 vlCDR1
KASQSVSYDGDSYMN

SEQ ID NO: 19733 - protein, 7 aa, synthetic construct
  source 1..7: note = Description of Artificial Sequence: Synthetic peptide; note = XENP020608 vlCDR2
AASNLES

SEQ ID NO: 19734 - protein, 9 aa, synthetic construct
  source 1..9: note = Description of Artificial Sequence: Synthetic peptide; note = XENP020608 vlCDR3
QQSNEDPFT

SEQ ID NO: 19735 - protein, 450 aa, synthetic construct; identical to SEQ ID NO: 17585
  source 1..450: note = Description of Artificial Sequence: Synthetic polypeptide; note = XENP020609 7G8_H0_L0.5_IgG1_PVA_/S267K Heavy Chain

SEQ ID NO: 19736 - protein, 121 aa, synthetic construct; identical to SEQ ID NO: 17586
  source 1..121: note = Description of Artificial Sequence: Synthetic polypeptide; note = VH of XENP020609

SEQ ID NO: 19737 - protein, 5 aa, synthetic construct
  source 1..5: note = Description of Artificial Sequence: Synthetic peptide; note = XENP020609 vhCDR1
DAWMD

SEQ ID NO: 19738 - protein, 19 aa, synthetic construct
  source 1..19: note = Description of Artificial Sequence: Synthetic peptide; note = XENP020609 vhCDR2
EIRTKANNHATYYAESVKG

SEQ ID NO: 19739 - protein, 10 aa, synthetic construct
  source 1..10: note = Description of Artificial Sequence: Synthetic peptide; note = XENP020609 vhCDR3
LANWDWYFDV

SEQ ID NO: 19740 - protein, 218 aa, synthetic construct
  source 1..218: note = Description of Artificial Sequence: Synthetic polypeptide; note = XENP020609 7G8_H0_L0.5_IgG1_PVA_/S267K Light Chain
DTVLTQSPASLAVSLGQRATISCKASQSVRYDGDSYMNWYQQKPGQPPKLLIYAASNLESGIPARLSGSGSGTDFTLNIHPVEEEDAATYYCQQSNEDPFTFGSGTKLEVKRTVAAPSVFIFPPSDEQLKSGTASVVCLLNNFYPREAKVQWKVDNALQSGNSQESVTEQDSKDSTYSLSSTLTLSKADYEKHKVYACEVTHQGLSSPVTKSFNRGEC

SEQ ID NO: 19741 - protein, 111 aa, synthetic construct
  source 1..111: note = Description of Artificial Sequence: Synthetic polypeptide; note = VL of XENP020609
DTVLTQSPASLAVSLGQRATISCKASQSVRYDGDSYMNWYQQKPGQPPKLLIYAASNLESGIPARLSGSGSGTDFTLNIHPVEEEDAATYYCQQSNEDPFTFGSGTKLEVK

SEQ ID NO: 19742 - protein, 15 aa, synthetic construct
  source 1..15: note = Description of Artificial Sequence: Synthetic peptide; note = XENP020609 vlCDR1
KASQSVRYDGDSYMN

SEQ ID NO: 19743 - protein, 7 aa, synthetic construct
  source 1..7: note = Description of Artificial Sequence: Synthetic peptide; note = XENP020609 vlCDR2
AASNLES

SEQ ID NO: 19744 - protein, 9 aa, synthetic construct
  source 1..9: note = Description of Artificial Sequence: Synthetic peptide; note = XENP020609 vlCDR3
QQSNEDPFT

SEQ ID NO: 19745 - protein, 450 aa, synthetic construct; identical to SEQ ID NO: 17585
  source 1..450: note = Description of Artificial Sequence: Synthetic polypeptide; note = XENP020610 7G8_H0_L0.6_IgG1_PVA_/S267K Heavy Chain

SEQ ID NO: 19746 - protein, 121 aa, synthetic construct; identical to SEQ ID NO: 17586
  source 1..121: note = Description of Artificial Sequence: Synthetic polypeptide; note = VH of XENP020610

SEQ ID NO: 19747 - protein, 5 aa, synthetic construct
  source 1..5: note = Description of Artificial Sequence: Synthetic peptide; note = XENP020610 vhCDR1
DAWMD

SEQ ID NO: 19748 - protein, 19 aa, synthetic construct
  source 1..19: note = Description of Artificial Sequence: Synthetic peptide; note = XENP020610 vhCDR2
EIRTKANNHATYYAESVKG

SEQ ID NO: 19749 - protein, 10 aa, synthetic construct
  source 1..10: note = Description of Artificial Sequence: Synthetic peptide; note = XENP020610 vhCDR3
LANWDWYFDV

SEQ ID NO: 19750 - protein, 218 aa, synthetic construct
  source 1..218: note = Description of Artificial Sequence: Synthetic polypeptide; note = XENP020610 7G8_H0_L0.6_IgG1_PVA_/S267K Light Chain
DTVLTQSPASLAVSLGQRATISCKASQSVLYDGDSYMNWYQQKPGQPPKLLIYAASNLESGIPARLSGSGSGTDFTLNIHPVEEEDAATYYCQQSNEDPFTFGSGTKLEVKRTVAAPSVFIFPPSDEQLKSGTASVVCLLNNFYPREAKVQWKVDNALQSGNSQESVTEQDSKDSTYSLSSTLTLSKADYEKHKVYACEVTHQGLSSPVTKSFNRGEC

SEQ ID NO: 19751 - protein, 111 aa, synthetic construct
  source 1..111: note = Description of Artificial Sequence: Synthetic polypeptide; note = VL of XENP020610
DTVLTQSPASLAVSLGQRATISCKASQSVLYDGDSYMNWYQQKPGQPPKLLIYAASNLESGIPARLSGSGSGTDFTLNIHPVEEEDAATYYCQQSNEDPFTFGSGTKLEVK

SEQ ID NO: 19752 - protein, 15 aa, synthetic construct
  source 1..15: note = Description of Artificial Sequence: Synthetic peptide; note = XENP020610 vlCDR1
KASQSVLYDGDSYMN

SEQ ID NO: 19753 - protein, 7 aa, synthetic construct
  source 1..7: note = Description of Artificial Sequence: Synthetic peptide; note = XENP020610 vlCDR2
AASNLES

SEQ ID NO: 19754 - protein, 9 aa, synthetic construct
  source 1..9: note = Description of Artificial Sequence: Synthetic peptide; note = XENP020610 vlCDR3
QQSNEDPFT

SEQ ID NO: 19755 - protein, 450 aa, synthetic construct; identical to SEQ ID NO: 17585
  source 1..450: note = Description of Artificial Sequence: Synthetic polypeptide; note = XENP020611 7G8_H0_L0.7_IgG1_PVA_/S267K Heavy Chain

SEQ ID NO: 19756 - protein, 121 aa, synthetic construct; identical to SEQ ID NO: 17586
  source 1..121: note = Description of Artificial Sequence: Synthetic polypeptide; note = VH of XENP020611

SEQ ID NO: 19757 - protein, 5 aa, synthetic construct
  source 1..5: note = Description of Artificial Sequence: Synthetic peptide; note = XENP020611 vhCDR1
DAWMD

SEQ ID NO: 19758 - protein, 19 aa, synthetic construct
  source 1..19: note = Description of Artificial Sequence: Synthetic peptide; note = XENP020611 vhCDR2
EIRTKANNHATYYAESVKG

SEQ ID NO: 19759 - protein, 10 aa, synthetic construct
  source 1..10: note = Description of Artificial Sequence: Synthetic peptide; note = XENP020611 vhCDR3
LANWDWYFDV

SEQ ID NO: 19760 - protein, 218 aa, synthetic construct
  source 1..218: note = Description of Artificial Sequence: Synthetic polypeptide; note = XENP020611 7G8_H0_L0.7_IgG1_PVA_/S267K Light Chain
DTVLTQSPASLAVSLGQRATISCKASQSVTYDGDSYMNWYQQKPGQPPKLLIYAASNLESGIPARLSGSGSGTDFTLNIHPVEEEDAATYYCQQSNEDPFTFGSGTKLEVKRTVAAPSVFIFPPSDEQLKSGTASVVCLLNNFYPREAKVQWKVDNALQSGNSQESVTEQDSKDSTYSLSSTLTLSKADYEKHKVYACEVTHQGLSSPVTKSFNRGEC

SEQ ID NO: 19761 - protein, 111 aa, synthetic construct
  source 1..111: note = Description of Artificial Sequence: Synthetic polypeptide; note = VL of XENP020611
DTVLTQSPASLAVSLGQRATISCKASQSVTYDGDSYMNWYQQKPGQPPKLLIYAASNLESGIPARLSGSGSGTDFTLNIHPVEEEDAATYYCQQSNEDPFTFGSGTKLEVK

SEQ ID NO: 19762 - protein, 15 aa, synthetic construct
  source 1..15: note = Description of Artificial Sequence: Synthetic peptide; note = XENP020611 vlCDR1
KASQSVTYDGDSYMN

SEQ ID NO: 19763 - protein, 7 aa, synthetic construct
  source 1..7: note = Description of Artificial Sequence: Synthetic peptide; note = XENP020611 vlCDR2
AASNLES

SEQ ID NO: 19764 - protein, 9 aa, synthetic construct
  source 1..9: note = Description of Artificial Sequence: Synthetic peptide; note = XENP020611 vlCDR3
QQSNEDPFT

SEQ ID NO: 19765 - protein, 450 aa, synthetic construct; identical to SEQ ID NO: 17585
  source 1..450: note = Description of Artificial Sequence: Synthetic polypeptide; note = XENP020612 7G8_H0_L0.8_IgG1_PVA_/S267K Heavy Chain

SEQ ID NO: 19766 - protein, 121 aa, synthetic construct; identical to SEQ ID NO: 17586
  source 1..121: note = Description of Artificial Sequence: Synthetic polypeptide; note = VH of XENP020612

SEQ ID NO: 19767 - protein, 5 aa, synthetic construct
  source 1..5: note = Description of Artificial Sequence: Synthetic peptide; note = XENP020612 vhCDR1
DAWMD

SEQ ID NO: 19768 - protein, 19 aa, synthetic construct
  source 1..19: note = Description of Artificial Sequence: Synthetic peptide; note = XENP020612 vhCDR2
EIRTKANNHATYYAESVKG

SEQ ID NO: 19769 - protein, 10 aa, synthetic construct
  source 1..10: note = Description of Artificial Sequence: Synthetic peptide; note = XENP020612 vhCDR3
LANWDWYFDV

SEQ ID NO: 19770 - protein, 218 aa, synthetic construct
  source 1..218: note = Description of Artificial Sequence: Synthetic polypeptide; note = XENP020612 7G8_H0_L0.8_IgG1_PVA_/S267K Light Chain
DTVLTQSPASLAVSLGQRATISCKASQSVGYDGDSYMNWYQQKPGQPPKLLIYAASNLESGIPARLSGSGSGTDFTLNIHPVEEEDAATYYCQQSNEDPFTFGSGTKLEVKRTVAAPSVFIFPPSDEQLKSGTASVVCLLNNFYPREAKVQWKVDNALQSGNSQESVTEQDSKDSTYSLSSTLTLSKADYEKHKVYACEVTHQGLSSPVTKSFNRGEC

SEQ ID NO: 19771 - protein, 111 aa, synthetic construct
  source 1..111: note = Description of Artificial Sequence: Synthetic polypeptide; note = VL of XENP020612
DTVLTQSPASLAVSLGQRATISCKASQSVGYDGDSYMNWYQQKPGQPPKLLIYAASNLESGIPARLSGSGSGTDFTLNIHPVEEEDAATYYCQQSNEDPFTFGSGTKLEVK

SEQ ID NO: 19772 - protein, 15 aa, synthetic construct
  source 1..15: note = Description of Artificial Sequence: Synthetic peptide; note = XENP020612 vlCDR1
KASQSVGYDGDSYMN

SEQ ID NO: 19773 - protein, 7 aa, synthetic construct
  source 1..7: note = Description of Artificial Sequence: Synthetic peptide; note = XENP020612 vlCDR2
AASNLES

SEQ ID NO: 19774 - protein, 9 aa, synthetic construct
  source 1..9: note = Description of Artificial Sequence: Synthetic peptide; note = XENP020612 vlCDR3
QQSNEDPFT

SEQ ID NO: 19775 - protein, 450 aa, synthetic construct; identical to SEQ ID NO: 17585
  source 1..450: note = Description of Artificial Sequence: Synthetic polypeptide; note = XENP020613 7G8_H0_L0.9_IgG1_PVA_/S267K Heavy Chain

SEQ ID NO: 19776 - protein, 121 aa, synthetic construct; identical to SEQ ID NO: 17586
  source 1..121: note = Description of Artificial Sequence: Synthetic polypeptide; note = VH of XENP020613

SEQ ID NO: 19777 - protein, 5 aa, synthetic construct
  source 1..5: note = Description of Artificial Sequence: Synthetic peptide; note = XENP020613 vhCDR1
DAWMD

SEQ ID NO: 19778 - protein, 19 aa, synthetic construct
  source 1..19: note = Description of Artificial Sequence: Synthetic peptide; note = XENP020613 vhCDR2
EIRTKANNHATYYAESVKG

SEQ ID NO: 19779 - protein, 10 aa, synthetic construct
  source 1..10: note = Description of Artificial Sequence: Synthetic peptide; note = XENP020613 vhCDR3
LANWDWYFDV

SEQ ID NO: 19780 - protein, 218 aa, synthetic construct
  source 1..218: note = Description of Artificial Sequence: Synthetic polypeptide; note = XENP020613 7G8_H0_L0.9_IgG1_PVA_/S267K Light Chain
DTVLTQSPASLAVSLGQRATISCKASQSVYYDGDSYMNWYQQKPGQPPKLLIYAASNLESGIPARLSGSGSGTDFTLNIHPVEEEDAATYYCQQSNEDPFTFGSGTKLEVKRTVAAPSVFIFPPSDEQLKSGTASVVCLLNNFYPREAKVQWKVDNALQSGNSQESVTEQDSKDSTYSLSSTLTLSKADYEKHKVYACEVTHQGLSSPVTKSFNRGEC

SEQ ID NO: 19781 - protein, 111 aa, synthetic construct
  source 1..111: note = Description of Artificial Sequence: Synthetic polypeptide; note = VL of XENP020613
DTVLTQSPASLAVSLGQRATISCKASQSVYYDGDSYMNWYQQKPGQPPKLLIYAASNLESGIPARLSGSGSGTDFTLNIHPVEEEDAATYYCQQSNEDPFTFGSGTKLEVK

SEQ ID NO: 19782 - protein, 15 aa, synthetic construct
  source 1..15: note = Description of Artificial Sequence: Synthetic peptide; note = XENP020613 vlCDR1
KASQSVYYDGDSYMN

SEQ ID NO: 19783 - protein, 7 aa, synthetic construct
  source 1..7: note = Description of Artificial Sequence: Synthetic peptide; note = XENP020613 vlCDR2
AASNLES

SEQ ID NO: 19784 - protein, 9 aa, synthetic construct
  source 1..9: note = Description of Artificial Sequence: Synthetic peptide; note = XENP020613 vlCDR3
QQSNEDPFT

SEQ ID NO: 19785 - protein, 450 aa, synthetic construct; identical to SEQ ID NO: 17585
  source 1..450: note = Description of Artificial Sequence: Synthetic polypeptide; note = XENP020614 7G8_H0_L0.10_IgG1_PVA_/S267K Heavy Chain

SEQ ID NO: 19786 - protein, 121 aa, synthetic construct; identical to SEQ ID NO: 17586
  source 1..121: note = Description of Artificial Sequence: Synthetic polypeptide; note = VH of XENP020614

SEQ ID NO: 19787 - protein, 5 aa, synthetic construct
  source 1..5: note = Description of Artificial Sequence: Synthetic peptide; note = XENP020614 vhCDR1
DAWMD

SEQ ID NO: 19788 - protein, 19 aa, synthetic construct
  source 1..19: note = Description of Artificial Sequence: Synthetic peptide; note = XENP020614 vhCDR2
EIRTKANNHATYYAESVKG

SEQ ID NO: 19789 - protein, 10 aa, synthetic construct
  source 1..10: note = Description of Artificial Sequence: Synthetic peptide; note = XENP020614 vhCDR3
LANWDWYFDV

SEQ ID NO: 19790 - protein, 218 aa, synthetic construct
  source 1..218: note = Description of Artificial Sequence: Synthetic polypeptide; note = XENP020614 7G8_H0_L0.10_IgG1_PVA_/S267K Light Chain
DTVLTQSPASLAVSLGQRATISCKASQSVDFDGDSYMNWYQQKPGQPPKLLIYAASNLESGIPARLSGSGSGTDFTLNIHPVEEEDAATYYCQQSNEDPFTFGSGTKLEVKRTVAAPSVFIFPPSDEQLKSGTASVVCLLNNFYPREAKVQWKVDNALQSGNSQESVTEQDSKDSTYSLSSTLTLSKADYEKHKVYACEVTHQGLSSPVTKSFNRGEC

SEQ ID NO: 19791 - protein, 111 aa, synthetic construct
  source 1..111: note = Description of Artificial Sequence: Synthetic polypeptide; note = VL of XENP020614
DTVLTQSPASLAVSLGQRATISCKASQSVDFDGDSYMNWYQQKPGQPPKLLIYAASNLESGIPARLSGSGSGTDFTLNIHPVEEEDAATYYCQQSNEDPFTFGSGTKLEVK

SEQ ID NO: 19792 - protein, 15 aa, synthetic construct
  source 1..15: note = Description of Artificial Sequence: Synthetic peptide; note = XENP020614 vlCDR1
KASQSVDFDGDSYMN

SEQ ID NO: 19793 - protein, 7 aa, synthetic construct
  source 1..7: note = Description of Artificial Sequence: Synthetic peptide; note = XENP020614 vlCDR2
AASNLES

SEQ ID NO: 19794 - protein, 9 aa, synthetic construct
  source 1..9: note = Description of Artificial Sequence: Synthetic peptide; note = XENP020614 vlCDR3
QQSNEDPFT

SEQ ID NO: 19795 - protein, 450 aa, synthetic construct; identical to SEQ ID NO: 17585
  source 1..450: note = Description of Artificial Sequence: Synthetic polypeptide; note = XENP020615 7G8_H0_L0.11_IgG1_PVA_/S267K Heavy Chain

SEQ ID NO: 19796 - protein, 121 aa, synthetic construct; identical to SEQ ID NO: 17586
  source 1..121: note = Description of Artificial Sequence: Synthetic polypeptide; note = VH of XENP020615

SEQ ID NO: 19797 - protein, 5 aa, synthetic construct
  source 1..5: note = Description of Artificial Sequence: Synthetic peptide; note = XENP020615 vhCDR1
DAWMD

SEQ ID NO: 19798 - protein, 19 aa, synthetic construct
  source 1..19: note = Description of Artificial Sequence: Synthetic peptide; note = XENP020615 vhCDR2
EIRTKANNHATYYAESVKG

SEQ ID NO: 19799 - protein, 10 aa, synthetic construct
  source 1..10: note = Description of Artificial Sequence: Synthetic peptide; note = XENP020615 vhCDR3
LANWDWYFDV

SEQ ID NO: 19800 - protein, 218 aa, synthetic construct
  source 1..218: note = Description of Artificial Sequence: Synthetic polypeptide; note = XENP020615 7G8_H0_L0.11_IgG1_PVA_/S267K Light Chain
DTVLTQSPASLAVSLGQRATISCKASQSVDHDGDSYMNWYQQKPGQPPKLLIYAASNLESGIPARLSGSGSGTDFTLNIHPVEEEDAATYYCQQSNEDPFTFGSGTKLEVKRTVAAPSVFIFPPSDEQLKSGTASVVCLLNNFYPREAKVQWKVDNALQSGNSQESVTEQDSKDSTYSLSSTLTLSKADYEKHKVYACEVTHQGLSSPVTKSFNRGEC

SEQ ID NO: 19801 - protein, 111 aa, synthetic construct
  source 1..111: note = Description of Artificial Sequence: Synthetic polypeptide; note = VL of XENP020615
DTVLTQSPASLAVSLGQRATISCKASQSVDHDGDSYMNWYQQKPGQPPKLLIYAASNLESGIPARLSGSGSGTDFTLNIHPVEEEDAATYYCQQSNEDPFTFGSGTKLEVK

SEQ ID NO: 19802 - protein, 15 aa, synthetic construct
  source 1..15: note = Description of Artificial Sequence: Synthetic peptide; note = XENP020615 vlCDR1
KASQSVDHDGDSYMN

SEQ ID NO: 19803 - protein, 7 aa, synthetic construct
  source 1..7: note = Description of Artificial Sequence: Synthetic peptide; note = XENP020615 vlCDR2
AASNLES

SEQ ID NO: 19804 - protein, 9 aa, synthetic construct
  source 1..9: note = Description of Artificial Sequence: Synthetic peptide; note = XENP020615 vlCDR3
QQSNEDPFT

SEQ ID NO: 19805 - protein, 450 aa, synthetic construct; identical to SEQ ID NO: 17585
  source 1..450: note = Description of Artificial Sequence: Synthetic polypeptide; note = XENP020616 7G8_H0_L0.12_IgG1_PVA_/S267K Heavy Chain

SEQ ID NO: 19806 - protein, 121 aa, synthetic construct; identical to SEQ ID NO: 17586
  source 1..121: note = Description of Artificial Sequence: Synthetic polypeptide; note = VH of XENP020616

SEQ ID NO: 19807 - protein, 5 aa, synthetic construct
  source 1..5: note = Description of Artificial Sequence: Synthetic peptide; note = XENP020616 vhCDR1
DAWMD

SEQ ID NO: 19808 - protein, 19 aa, synthetic construct
  source 1..19: note = Description of Artificial Sequence: Synthetic peptide; note = XENP020616 vhCDR2
EIRTKANNHATYYAESVKG

SEQ ID NO: 19809 - protein, 10 aa, synthetic construct
  source 1..10: note = Description of Artificial Sequence: Synthetic peptide; note = XENP020616 vhCDR3
LANWDWYFDV

SEQ ID NO: 19810 - protein, 218 aa, synthetic construct
  source 1..218: note = Description of Artificial Sequence: Synthetic polypeptide; note = XENP020616 7G8_H0_L0.12_IgG1_PVA_/S267K Light Chain
DTVLTQSPASLAVSLGQRATISCKASQSVDLDGDSYMNWYQQKPGQPPKLLIYAASNLESGIPARLSGSGSGTDFTLNIHPVEEEDAATYYCQQSNEDPFTFGSGTKLEVKRTVAAPSVFIFPPSDEQLKSGTASVVCLLNNFYPREAKVQWKVDNALQSGNSQESVTEQDSKDSTYSLSSTLTLSKADYEKHKVYACEVTHQGLSSPVTKSFNRGEC

SEQ ID NO: 19811 - protein, 111 aa, synthetic construct
  source 1..111: note = Description of Artificial Sequence: Synthetic polypeptide; note = VL of XENP020616
DTVLTQSPASLAVSLGQRATISCKASQSVDLDGDSYMNWYQQKPGQPPKLLIYAASNLESGIPARLSGSGSGTDFTLNIHPVEEEDAATYYCQQSNEDPFTFGSGTKLEVK

SEQ ID NO: 19812 - protein, 15 aa, synthetic construct
  source 1..15: note = Description of Artificial Sequence: Synthetic peptide; note = XENP020616 vlCDR1
KASQSVDLDGDSYMN

SEQ ID NO: 19813 - protein, 7 aa, synthetic construct
  source 1..7: note = Description of Artificial Sequence: Synthetic peptide; note = XENP020616 vlCDR2
AASNLES

SEQ ID NO: 19814 - protein, 9 aa, synthetic construct
  source 1..9: note = Description of Artificial Sequence: Synthetic peptide; note = XENP020616 vlCDR3
QQSNEDPFT

SEQ ID NO: 19815 - protein, 450 aa, synthetic construct; identical to SEQ ID NO: 17585
  source 1..450: note = Description of Artificial Sequence: Synthetic polypeptide; note = XENP020617 7G8_H0_L0.13_IgG1_PVA_/S267K Heavy Chain

SEQ ID NO: 19816 - protein, 121 aa, synthetic construct; identical to SEQ ID NO: 17586
  source 1..121: note = Description of Artificial Sequence: Synthetic polypeptide; note = VH of XENP020617

SEQ ID NO: 19817 - protein, 5 aa, synthetic construct
  source 1..5: note = Description of Artificial Sequence: Synthetic peptide; note = XENP020617 vhCDR1
DAWMD

SEQ ID NO: 19818 - protein, 19 aa, synthetic construct
  source 1..19: note = Description of Artificial Sequence: Synthetic peptide; note = XENP020617 vhCDR2
EIRTKANNHATYYAESVKG

SEQ ID NO: 19819 - protein, 10 aa, synthetic construct
  source 1..10: note = Description of Artificial Sequence: Synthetic peptide; note = XENP020617 vhCDR3
LANWDWYFDV

SEQ ID NO: 19820 - protein, 218 aa, synthetic construct
  source 1..218: note = Description of Artificial Sequence: Synthetic polypeptide; note = XENP020617 7G8_H0_L0.13_IgG1_PVA_/S267K Light Chain
DTVLTQSPASLAVSLGQRATISCKASQSVDWDGDSYMNWYQQKPGQPPKLLIYAASNLESGIPARLSGSGSGTDFTLNIHPVEEEDAATYYCQQSNEDPFTFGSGTKLEVKRTVAAPSVFIFPPSDEQLKSGTASVVCLLNNFYPREAKVQWKVDNALQSGNSQESVTEQDSKDSTYSLSSTLTLSKADYEKHKVYACEVTHQGLSSPVTKSFNRGEC

SEQ ID NO: 19821 - protein, 111 aa, synthetic construct
  source 1..111: note = Description of Artificial Sequence: Synthetic polypeptide; note = VL of XENP020617
DTVLTQSPASLAVSLGQRATISCKASQSVDWDGDSYMNWYQQKPGQPPKLLIYAASNLESGIPARLSGSGSGTDFTLNIHPVEEEDAATYYCQQSNEDPFTFGSGTKLEVK

SEQ ID NO: 19822 - protein, 15 aa, synthetic construct
  source 1..15: note = Description of Artificial Sequence: Synthetic peptide; note = XENP020617 vlCDR1
KASQSVDWDGDSYMN

SEQ ID NO: 19823 - protein, 7 aa, synthetic construct
  source 1..7: note = Description of Artificial Sequence: Synthetic peptide; note = XENP020617 vlCDR2
AASNLES

SEQ ID NO: 19824 - protein, 9 aa, synthetic construct
  source 1..9: note = Description of Artificial Sequence: Synthetic peptide; note = XENP020617 vlCDR3
QQSNEDPFT

SEQ ID NO: 19825 - protein, 450 aa, synthetic construct; identical to SEQ ID NO: 17585
  source 1..450: note = Description of Artificial Sequence: Synthetic polypeptide; note = XENP020618 7G8_H0_L0.14_IgG1_PVA_/S267K Heavy Chain

SEQ ID NO: 19826 - protein, 121 aa, synthetic construct; identical to SEQ ID NO: 17586
  source 1..121: note = Description of Artificial Sequence: Synthetic polypeptide; note = VH of XENP020618

SEQ ID NO: 19827 - protein, 5 aa, synthetic construct
  source 1..5: note = Description of Artificial Sequence: Synthetic peptide; note = XENP020618 vhCDR1
DAWMD

SEQ ID NO: 19828 - protein, 19 aa, synthetic construct
  source 1..19: note = Description of Artificial Sequence: Synthetic peptide; note = XENP020618 vhCDR2
EIRTKANNHATYYAESVKG

SEQ ID NO: 19829 - protein, 10 aa, synthetic construct
  source 1..10: note = Description of Artificial Sequence: Synthetic peptide; note = XENP020618 vhCDR3
LANWDWYFDV

SEQ ID NO: 19830 - protein, 218 aa, synthetic construct
  source 1..218: note = Description of Artificial Sequence: Synthetic polypeptide; note = XENP020618 7G8_H0_L0.14_IgG1_PVA_/S267K Light Chain
DTVLTQSPASLAVSLGQRATISCKASQSVDVDGDSYMNWYQQKPGQPPKLLIYAASNLESGIPARLSGSGSGTDFTLNIHPVEEEDAATYYCQQSNEDPFTFGSGTKLEVKRTVAAPSVFIFPPSDEQLKSGTASVVCLLNNFYPREAKVQWKVDNALQSGNSQESVTEQDSKDSTYSLSSTLTLSKADYEKHKVYACEVTHQGLSSPVTKSFNRGEC

SEQ ID NO: 19831 - protein, 111 aa, synthetic construct
  source 1..111: note = Description of Artificial Sequence: Synthetic polypeptide; note = VL of XENP020618
DTVLTQSPASLAVSLGQRATISCKASQSVDVDGDSYMNWYQQKPGQPPKLLIYAASNLESGIPARLSGSGSGTDFTLNIHPVEEEDAATYYCQQSNEDPFTFGSGTKLEVK

SEQ ID NO: 19832 - protein, 15 aa, synthetic construct
  source 1..15: note = Description of Artificial Sequence: Synthetic peptide; note = XENP020618 vlCDR1
KASQSVDVDGDSYMN

SEQ ID NO: 19833 - protein, 7 aa, synthetic construct
  source 1..7: note = Description of Artificial Sequence: Synthetic peptide; note = XENP020618 vlCDR2
AASNLES

SEQ ID NO: 19834 - protein, 9 aa, synthetic construct
  source 1..9: note = Description of Artificial Sequence: Synthetic peptide; note = XENP020618 vlCDR3
QQSNEDPFT

SEQ ID NO: 19835 - protein, 450 aa, synthetic construct; identical to SEQ ID NO: 17585
  source 1..450: note = Description of Artificial Sequence: Synthetic polypeptide; note = XENP020619 7G8_H0_L0.15_IgG1_PVA_/S267K Heavy Chain

SEQ ID NO: 19836 - protein, 121 aa, synthetic construct; identical to SEQ ID NO: 17586
  source 1..121: note = Description of Artificial Sequence: Synthetic polypeptide; note = VH of XENP020619

SEQ ID NO: 19837 - protein, 5 aa, synthetic construct
  source 1..5: note = Description of Artificial Sequence: Synthetic peptide; note = XENP020619 vhCDR1
DAWMD

SEQ ID NO: 19838 - protein, 19 aa, synthetic construct
  source 1..19: note = Description of Artificial Sequence: Synthetic peptide; note = XENP020619 vhCDR2
EIRTKANNHATYYAESVKG

SEQ ID NO: 19839 - protein, 10 aa, synthetic construct
  source 1..10: note = Description of Artificial Sequence: Synthetic peptide; note = XENP020619 vhCDR3
LANWDWYFDV

SEQ ID NO: 19840 - protein, 218 aa, synthetic construct
  source 1..218: note = Description of Artificial Sequence: Synthetic polypeptide; note = XENP020619 7G8_H0_L0.15_IgG1_PVA_/S267K Light Chain
DTVLTQSPASLAVSLGQRATISCKASQSVDADGDSYMNWYQQKPGQPPKLLIYAASNLESGIPARLSGSGSGTDFTLNIHPVEEEDAATYYCQQSNEDPFTFGSGTKLEVKRTVAAPSVFIFPPSDEQLKSGTASVVCLLNNFYPREAKVQWKVDNALQSGNSQESVTEQDSKDSTYSLSSTLTLSKADYEKHKVYACEVTHQGLSSPVTKSFNRGEC

SEQ ID NO: 19841 - protein, 111 aa, synthetic construct
  source 1..111: note = Description of Artificial Sequence: Synthetic polypeptide; note = VL of XENP020619
DTVLTQSPASLAVSLGQRATISCKASQSVDADGDSYMNWYQQKPGQPPKLLIYAASNLESGIPARLSGSGSGTDFTLNIHPVEEEDAATYYCQQSNEDPFTFGSGTKLEVK

SEQ ID NO: 19842 - protein, 15 aa, synthetic construct
  source 1..15: note = Description of Artificial Sequence: Synthetic peptide; note = XENP020619 vlCDR1
KASQSVDADGDSYMN

SEQ ID NO: 19843 - protein, 7 aa, synthetic construct
  source 1..7: note = Description of Artificial Sequence: Synthetic peptide; note = XENP020619 vlCDR2
AASNLES

SEQ ID NO: 19844 - protein, 9 aa, synthetic construct
  source 1..9: note = Description of Artificial Sequence: Synthetic peptide; note = XENP020619 vlCDR3
QQSNEDPFT

SEQ ID NO: 19845 - protein, 450 aa, synthetic construct; identical to SEQ ID NO: 17585
  source 1..450: note = Description of Artificial Sequence: Synthetic polypeptide; note = XENP020620 7G8_H0_L0.16_IgG1_PVA_/S267K Heavy Chain

SEQ ID NO: 19846 - protein, 121 aa, synthetic construct; identical to SEQ ID NO: 17586
  source 1..121: note = Description of Artificial Sequence: Synthetic polypeptide; note = VH of XENP020620

SEQ ID NO: 19847 - protein, 5 aa, synthetic construct
  source 1..5: note = Description of Artificial Sequence: Synthetic peptide; note = XENP020620 vhCDR1
DAWMD

SEQ ID NO: 19848 - protein, 19 aa, synthetic construct
  source 1..19: note = Description of Artificial Sequence: Synthetic peptide; note = XENP020620 vhCDR2
EIRTKANNHATYYAESVKG

SEQ ID NO: 19849 - protein, 10 aa, synthetic construct
  source 1..10: note = Description of Artificial Sequence: Synthetic peptide; note = XENP020620 vhCDR3
LANWDWYFDV

SEQ ID NO: 19850 - protein, 218 aa, synthetic construct
  source 1..218: note = Description of Artificial Sequence: Synthetic polypeptide; note = XENP020620 7G8_H0_L0.16_IgG1_PVA_/S267K Light Chain
DTVLTQSPASLAVSLGQRATISCKASQSVDQDGDSYMNWYQQKPGQPPKLLIYAASNLESGIPARLSGSGSGTDFTLNIHPVEEEDAATYYCQQSNEDPFTFGSGTKLEVKRTVAAPSVFIFPPSDEQLKSGTASVVCLLNNFYPREAKVQWKVDNALQSGNSQESVTEQDSKDSTYSLSSTLTLSKADYEKHKVYACEVTHQGLSSPVTKSFNRGEC

SEQ ID NO: 19851 - protein, 111 aa, synthetic construct
  source 1..111: note = Description of Artificial Sequence: Synthetic polypeptide; note = VL of XENP020620
DTVLTQSPASLAVSLGQRATISCKASQSVDQDGDSYMNWYQQKPGQPPKLLIYAASNLESGIPARLSGSGSGTDFTLNIHPVEEEDAATYYCQQSNEDPFTFGSGTKLEVK

SEQ ID NO: 19852 - protein, 15 aa, synthetic construct
  source 1..15: note = Description of Artificial Sequence: Synthetic peptide; note = XENP020620 vlCDR1
KASQSVDQDGDSYMN

SEQ ID NO: 19853 - protein, 7 aa, synthetic construct
  source 1..7: note = Description of Artificial Sequence: Synthetic peptide; note = XENP020620 vlCDR2
AASNLES

SEQ ID NO: 19854 - protein, 9 aa, synthetic construct
  source 1..9: note = Description of Artificial Sequence: Synthetic peptide; note = XENP020620 vlCDR3
QQSNEDPFT

SEQ ID NO: 19855 - protein, 450 aa, synthetic construct; identical to SEQ ID NO: 17585
  source 1..450: note = Description of Artificial Sequence: Synthetic polypeptide; note = XENP020621 7G8_H0_L0.17_IgG1_PVA_/S267K Heavy Chain

SEQ ID NO: 19856 - protein, 121 aa, synthetic construct; identical to SEQ ID NO: 17586
  source 1..121: note = Description of Artificial Sequence: Synthetic polypeptide; note = VH of XENP020621

SEQ ID NO: 19857 - protein, 5 aa, synthetic construct
  source 1..5: note = Description of Artificial Sequence: Synthetic peptide; note = XENP020621 vhCDR1
DAWMD

SEQ ID NO: 19858 - protein, 19 aa, synthetic construct
  source 1..19: note = Description of Artificial Sequence: Synthetic peptide; note = XENP020621 vhCDR2
EIRTKANNHATYYAESVKG

SEQ ID NO: 19859 - protein, 10 aa, synthetic construct
  source 1..10: note = Description of Artificial Sequence: Synthetic peptide; note = XENP020621 vhCDR3
LANWDWYFDV

SEQ ID NO: 19860 - protein, 218 aa, synthetic construct
  source 1..218: note = Description of Artificial Sequence: Synthetic polypeptide; note = XENP020621 7G8_H0_L0.17_IgG1_PVA_/S267K Light Chain
DTVLTQSPASLAVSLGQRATISCKASQSVDDDGDSYMNWYQQKPGQPPKLLIYAASNLESGIPARLSGSGSGTDFTLNIHPVEEEDAATYYCQQSNEDPFTFGSGTKLEVKRTVAAPSVFIFPPSDEQLKSGTASVVCLLNNFYPREAKVQWKVDNALQSGNSQESVTEQDSKDSTYSLSSTLTLSKADYEKHKVYACEVTHQGLSSPVTKSFNRGEC

SEQ ID NO: 19861 - protein, 111 aa, synthetic construct
  source 1..111: note = Description of Artificial Sequence: Synthetic polypeptide; note = VL of XENP020621
DTVLTQSPASLAVSLGQRATISCKASQSVDDDGDSYMNWYQQKPGQPPKLLIYAASNLESGIPARLSGSGSGTDFTLNIHPVEEEDAATYYCQQSNEDPFTFGSGTKLEVK

SEQ ID NO: 19862 - protein, 15 aa, synthetic construct
  source 1..15: note = Description of Artificial Sequence: Synthetic peptide; note = XENP020621 vlCDR1
KASQSVDDDGDSYMN

SEQ ID NO: 19863 - protein, 7 aa, synthetic construct
  source 1..7: note = Description of Artificial Sequence: Synthetic peptide; note = XENP020621 vlCDR2
AASNLES

SEQ ID NO: 19864 - protein, 9 aa, synthetic construct
  source 1..9: note = Description of Artificial Sequence: Synthetic peptide; note = XENP020621 vlCDR3
QQSNEDPFT

SEQ ID NO: 19865 - protein, 450 aa, synthetic construct; identical to SEQ ID NO: 17585
  source 1..450: note = Description of Artificial Sequence: Synthetic polypeptide; note = XENP020622 7G8_H0_L0.18_IgG1_PVA_/S267K Heavy Chain

SEQ ID NO: 19866 - protein, 121 aa, synthetic construct; identical to SEQ ID NO: 17586
  source 1..121: note = Description of Artificial Sequence: Synthetic polypeptide; note = VH of XENP020622

SEQ ID NO: 19867 - protein, 5 aa, synthetic construct
  source 1..5: note = Description of Artificial Sequence: Synthetic peptide; note = XENP020622 vhCDR1
DAWMD

SEQ ID NO: 19868 - protein, 19 aa, synthetic construct
  source 1..19: note = Description of Artificial Sequence: Synthetic peptide; note = XENP020622 vhCDR2
EIRTKANNHATYYAESVKG

SEQ ID NO: 19869 - protein, 10 aa, synthetic construct
  source 1..10: note = Description of Artificial Sequence: Synthetic peptide; note = XENP020622 vhCDR3
LANWDWYFDV

SEQ ID NO: 19870 - protein, 218 aa, synthetic construct
  source 1..218: note = Description of Artificial Sequence: Synthetic polypeptide; note = XENP020622 7G8_H0_L0.18_IgG1_PVA_/S267K Light Chain
DTVLTQSPASLAVSLGQRATISCKASQSVDKDGDSYMNWYQQKPGQPPKLLIYAASNLESGIPARLSGSGSGTDFTLNIHPVEEEDAATYYCQQSNEDPFTFGSGTKLEVKRTVAAPSVFIFPPSDEQLKSGTASVVCLLNNFYPREAKVQWKVDNALQSGNSQESVTEQDSKDSTYSLSSTLTLSKADYEKHKVYACEVTHQGLSSPVTKSFNRGEC

SEQ ID NO: 19871 - protein, 111 aa, synthetic construct
  source 1..111: note = Description of Artificial Sequence: Synthetic polypeptide; note = VL of XENP020622
DTVLTQSPASLAVSLGQRATISCKASQSVDKDGDSYMNWYQQKPGQPPKLLIYAASNLESGIPARLSGSGSGTDFTLNIHPVEEEDAATYYCQQSNEDPFTFGSGTKLEVK

SEQ ID NO: 19872 - protein, 15 aa, synthetic construct
  source 1..15: note = Description of Artificial Sequence: Synthetic peptide; note = XENP020622 vlCDR1
KASQSVDKDGDSYMN

SEQ ID NO: 19873 - protein, 7 aa, synthetic construct
  source 1..7: note = Description of Artificial Sequence: Synthetic peptide; note = XENP020622 vlCDR2
AASNLES

SEQ ID NO: 19874 - protein, 9 aa, synthetic construct
  source 1..9: note = Description of Artificial Sequence: Synthetic peptide; note = XENP020622 vlCDR3
QQSNEDPFT

SEQ ID NO: 19875 - protein, 450 aa, synthetic construct; identical to SEQ ID NO: 17585
  source 1..450: note = Description of Artificial Sequence: Synthetic polypeptide; note = XENP020623 7G8_H0_L0.19_IgG1_PVA_/S267K Heavy Chain

SEQ ID NO: 19876 - protein, 121 aa, synthetic construct; identical to SEQ ID NO: 17586
  source 1..121: note = Description of Artificial Sequence: Synthetic polypeptide; note = VH of XENP020623

SEQ ID NO: 19877 - protein, 5 aa, synthetic construct
  source 1..5: note = Description of Artificial Sequence: Synthetic peptide; note = XENP020623 vhCDR1
DAWMD

SEQ ID NO: 19878 - protein, 19 aa, synthetic construct
  source 1..19: note = Description of Artificial Sequence: Synthetic peptide; note = XENP020623 vhCDR2
EIRTKANNHATYYAESVKG

SEQ ID NO: 19879 - protein, 10 aa, synthetic construct
  source 1..10: note = Description of Artificial Sequence: Synthetic peptide; note = XENP020623 vhCDR3
LANWDWYFDV

SEQ ID NO: 19880 - protein, 218 aa, synthetic construct
  source 1..218: note = Description of Artificial Sequence: Synthetic polypeptide; note = XENP020623 7G8_H0_L0.19_IgG1_PVA_/S267K Light Chain
DTVLTQSPASLAVSLGQRATISCKASQSVDNDGDSYMNWYQQKPGQPPKLLIYAASNLESGIPARLSGSGSGTDFTLNIHPVEEEDAATYYCQQSNEDPFTFGSGTKLEVKRTVAAPSVFIFPPSDEQLKSGTASVVCLLNNFYPREAKVQWKVDNALQSGNSQESVTEQDSKDSTYSLSSTLTLSKADYEKHKVYACEVTHQGLSSPVTKSFNRGEC

SEQ ID NO: 19881 - protein, 111 aa, synthetic construct
  source 1..111: note = Description of Artificial Sequence: Synthetic polypeptide; note = VL of XENP020623
DTVLTQSPASLAVSLGQRATISCKASQSVDNDGDSYMNWYQQKPGQPPKLLIYAASNLESGIPARLSGSGSGTDFTLNIHPVEEEDAATYYCQQSNEDPFTFGSGTKLEVK

SEQ ID NO: 19882 - protein, 15 aa, synthetic construct
  source 1..15: note = Description of Artificial Sequence: Synthetic peptide; note = XENP020623 vlCDR1
KASQSVDNDGDSYMN

SEQ ID NO: 19883 - protein, 7 aa, synthetic construct
  source 1..7: note = Description of Artificial Sequence: Synthetic peptide; note = XENP020623 vlCDR2
AASNLES

SEQ ID NO: 19884 - protein, 9 aa, synthetic construct
  source 1..9: note = Description of Artificial Sequence: Synthetic peptide; note = XENP020623 vlCDR3
QQSNEDPFT

SEQ ID NO: 19885 - protein, 450 aa, synthetic construct; identical to SEQ ID NO: 17585
  source 1..450: note = Description of Artificial Sequence: Synthetic polypeptide; note = XENP020624 7G8_H0_L0.20_IgG1_PVA_/S267K Heavy Chain

SEQ ID NO: 19886 - protein, 121 aa, synthetic construct; identical to SEQ ID NO: 17586
  source 1..121: note = Description of Artificial Sequence: Synthetic polypeptide; note = VH of XENP020624

SEQ ID NO: 19887 - protein, 5 aa, synthetic construct
  source 1..5: note = Description of Artificial Sequence: Synthetic peptide; note = XENP020624 vhCDR1
DAWMD

SEQ ID NO: 19888 - protein, 19 aa, synthetic construct
  source 1..19: note = Description of Artificial Sequence: Synthetic peptide; note = XENP020624 vhCDR2
EIRTKANNHATYYAESVKG

SEQ ID NO: 19889 - protein, 10 aa, synthetic construct
  source 1..10: note = Description of Artificial Sequence: Synthetic peptide; note = XENP020624 vhCDR3
LANWDWYFDV

SEQ ID NO: 19890 - protein, 218 aa, synthetic construct
  source 1..218: note = Description of Artificial Sequence: Synthetic polypeptide; note = XENP020624 7G8_H0_L0.20_IgG1_PVA_/S267K Light Chain
DTVLTQSPASLAVSLGQRATISCKASQSVDYNGDSYMNWYQQKPGQPPKLLIYAASNLESGIPARLSGSGSGTDFTLNIHPVEEEDAATYYCQQSNEDPFTFGSGTKLEVKRTVAAPSVFIFPPSDEQLKSGTASVVCLLNNFYPREAKVQWKVDNALQSGNSQESVTEQDSKDSTYSLSSTLTLSKADYEKHKVYACEVTHQGLSSPVTKSFNRGEC

SEQ ID NO: 19891 - protein, 111 aa, synthetic construct
  source 1..111: note = Description of Artificial Sequence: Synthetic polypeptide; note = VL of XENP020624
DTVLTQSPASLAVSLGQRATISCKASQSVDYNGDSYMNWYQQKPGQPPKLLIYAASNLESGIPARLSGSGSGTDFTLNIHPVEEEDAATYYCQQSNEDPFTFGSGTKLEVK

SEQ ID NO: 19892 - protein, 15 aa, synthetic construct
  source 1..15: note = Description of Artificial Sequence: Synthetic peptide; note = XENP020624 vlCDR1
KASQSVDYNGDSYMN

SEQ ID NO: 19893 - protein, 7 aa, synthetic construct
  source 1..7: note = Description of Artificial Sequence: Synthetic peptide; note = XENP020624 vlCDR2
AASNLES

SEQ ID NO: 19894 - protein, 9 aa, synthetic construct
  source 1..9: note = Description of Artificial Sequence: Synthetic peptide; note = XENP020624 vlCDR3
QQSNEDPFT

SEQ ID NO: 19895 - protein, 450 aa, synthetic construct; identical to SEQ ID NO: 17585
  source 1..450: note = Description of Artificial Sequence: Synthetic polypeptide; note = XENP020625 7G8_H0_L0.21_IgG1_PVA_/S267K Heavy Chain

SEQ ID NO: 19896 - protein, 121 aa, synthetic construct; identical to SEQ ID NO: 17586
  source 1..121: note = Description of Artificial Sequence: Synthetic polypeptide; note = VH of XENP020625

SEQ ID NO: 19897 - protein, 5 aa, synthetic construct
  source 1..5: note = Description of Artificial Sequence: Synthetic peptide; note = XENP020625 vhCDR1
DAWMD

SEQ ID NO: 19898 - protein, 19 aa, synthetic construct
  source 1..19: note = Description of Artificial Sequence: Synthetic peptide; note = XENP020625 vhCDR2
EIRTKANNHATYYAESVKG

SEQ ID NO: 19899 - protein, 10 aa, synthetic construct
  source 1..10: note = Description of Artificial Sequence: Synthetic peptide; note = XENP020625 vhCDR3
LANWDWYFDV

SEQ ID NO: 19900 - protein, 218 aa, synthetic construct
  source 1..218: note = Description of Artificial Sequence: Synthetic polypeptide; note = XENP020625 7G8_H0_L0.21_IgG1_PVA_/S267K Light Chain
DTVLTQSPASLAVSLGQRATISCKASQSVDYEGDSYMNWYQQKPGQPPKLLIYAASNLESGIPARLSGSGSGTDFTLNIHPVEEEDAATYYCQQSNEDPFTFGSGTKLEVKRTVAAPSVFIFPPSDEQLKSGTASVVCLLNNFYPREAKVQWKVDNALQSGNSQESVTEQDSKDSTYSLSSTLTLSKADYEKHKVYACEVTHQGLSSPVTKSFNRGEC

SEQ ID NO: 19901 - protein, 111 aa, synthetic construct
  source 1..111: note = Description of Artificial Sequence: Synthetic polypeptide; note = VL of XENP020625
DTVLTQSPASLAVSLGQRATISCKASQSVDYEGDSYMNWYQQKPGQPPKLLIYAASNLESGIPARLSGSGSGTDFTLNIHPVEEEDAATYYCQQSNEDPFTFGSGTKLEVK

SEQ ID NO: 19902 - protein, 15 aa, synthetic construct
  source 1..15: note = Description of Artificial Sequence: Synthetic peptide; note = XENP020625 vlCDR1
KASQSVDYEGDSYMN

SEQ ID NO: 19903 - protein, 7 aa, synthetic construct
  source 1..7: note = Description of Artificial Sequence: Synthetic peptide; note = XENP020625 vlCDR2
AASNLES

SEQ ID NO: 19904 - protein, 9 aa, synthetic construct
  source 1..9: note = Description of Artificial Sequence: Synthetic peptide; note = XENP020625 vlCDR3
QQSNEDPFT

SEQ ID NO: 19905 - protein, 450 aa, synthetic construct; identical to SEQ ID NO: 17585
  source 1..450: note = Description of Artificial Sequence: Synthetic polypeptide; note = XENP020626 7G8_H0_L0.22_IgG1_PVA_/S267K Heavy Chain

SEQ ID NO: 19906 - protein, 121 aa, synthetic construct; identical to SEQ ID NO: 17586
  source 1..121: note = Description of Artificial Sequence: Synthetic polypeptide; note = VH of XENP020626

SEQ ID NO: 19907 - protein, 5 aa, synthetic construct
  source 1..5: note = Description of Artificial Sequence: Synthetic peptide; note = XENP020626 vhCDR1
DAWMD

SEQ ID NO: 19908 - protein, 19 aa, synthetic construct
  source 1..19: note = Description of Artificial Sequence: Synthetic peptide; note = XENP020626 vhCDR2
EIRTKANNHATYYAESVKG

SEQ ID NO: 19909 - protein, 10 aa, synthetic construct
  source 1..10: note = Description of Artificial Sequence: Synthetic peptide; note = XENP020626 vhCDR3
LANWDWYFDV

SEQ ID NO: 19910 - protein, 218 aa, synthetic construct
  source 1..218: note = Description of Artificial Sequence: Synthetic polypeptide; note = XENP020626 7G8_H0_L0.22_IgG1_PVA_/S267K Light Chain
DTVLTQSPASLAVSLGQRATISCKASQSVDYHGDSYMNWYQQKPGQPPKLLIYAASNLESGIPARLSGSGSGTDFTLNIHPVEEEDAATYYCQQSNEDPFTFGSGTKLEVKRTVAAPSVFIFPPSDEQLKSGTASVVCLLNNFYPREAKVQWKVDNALQSGNSQESVTEQDSKDSTYSLSSTLTLSKADYEKHKVYACEVTHQGLSSPVTKSFNRGEC

SEQ ID NO: 19911 - protein, 111 aa, synthetic construct
  source 1..111: note = Description of Artificial Sequence: Synthetic polypeptide; note = VL of XENP020626
DTVLTQSPASLAVSLGQRATISCKASQSVDYHGDSYMNWYQQKPGQPPKLLIYAASNLESGIPARLSGSGSGTDFTLNIHPVEEEDAATYYCQQSNEDPFTFGSGTKLEVK

SEQ ID NO: 19912 - protein, 15 aa, synthetic construct
  source 1..15: note = Description of Artificial Sequence: Synthetic peptide; note = XENP020626 vlCDR1
KASQSVDYHGDSYMN

SEQ ID NO: 19913 - protein, 7 aa, synthetic construct
  source 1..7: note = Description of Artificial Sequence: Synthetic peptide; note = XENP020626 vlCDR2
AASNLES

SEQ ID NO: 19914 - protein, 9 aa, synthetic construct
  source 1..9: note = Description of Artificial Sequence: Synthetic peptide; note = XENP020626 vlCDR3
QQSNEDPFT

SEQ ID NO: 19915 - protein, 450 aa, synthetic construct; identical to SEQ ID NO: 17585
  source 1..450: note = Description of Artificial Sequence: Synthetic polypeptide; note = XENP020627 7G8_H0_L0.23_IgG1_PVA_/S267K Heavy Chain

SEQ ID NO: 19916 - protein, 121 aa, synthetic construct; identical to SEQ ID NO: 17586
  source 1..121: note = Description of Artificial Sequence: Synthetic polypeptide; note = VH of XENP020627

SEQ ID NO: 19917 - protein, 5 aa, synthetic construct
  source 1..5: note = Description of Artificial Sequence: Synthetic peptide; note = XENP020627 vhCDR1
DAWMD

SEQ ID NO: 19918 - protein, 19 aa, synthetic construct
  source 1..19: note = Description of Artificial Sequence: Synthetic peptide; note = XENP020627 vhCDR2
EIRTKANNHATYYAESVKG

SEQ ID NO: 19919 - protein, 10 aa, synthetic construct
  source 1..10: note = Description of Artificial Sequence: Synthetic peptide; note = XENP020627 vhCDR3
LANWDWYFDV

SEQ ID NO: 19920 - protein, 218 aa, synthetic construct
  source 1..218: note = Description of Artificial Sequence: Synthetic polypeptide; note = XENP020627 7G8_H0_L0.23_IgG1_PVA_/S267K Light Chain
DTVLTQSPASLAVSLGQRATISCKASQSVDYSGDSYMNWYQQKPGQPPKLLIYAASNLESGIPARLSGSGSGTDFTLNIHPVEEEDAATYYCQQSNEDPFTFGSGTKLEVKRTVAAPSVFIFPPSDEQLKSGTASVVCLLNNFYPREAKVQWKVDNALQSGNSQESVTEQDSKDSTYSLSSTLTLSKADYEKHKVYACEVTHQGLSSPVTKSFNRGEC

SEQ ID NO: 19921 - protein, 111 aa, synthetic construct
  source 1..111: note = Description of Artificial Sequence: Synthetic polypeptide; note = VL of XENP020627
DTVLTQSPASLAVSLGQRATISCKASQSVDYSGDSYMNWYQQKPGQPPKLLIYAASNLESGIPARLSGSGSGTDFTLNIHPVEEEDAATYYCQQSNEDPFTFGSGTKLEVK

SEQ ID NO: 19922 - protein, 15 aa, synthetic construct
  source 1..15: note = Description of Artificial Sequence: Synthetic peptide; note = XENP020627 vlCDR1
KASQSVDYSGDSYMN

SEQ ID NO: 19923 - protein, 7 aa, synthetic construct
  source 1..7: note = Description of Artificial Sequence: Synthetic peptide; note = XENP020627 vlCDR2
AASNLES

SEQ ID NO: 19924 - protein, 9 aa, synthetic construct
  source 1..9: note = Description of Artificial Sequence: Synthetic peptide; note = XENP020627 vlCDR3
QQSNEDPFT

SEQ ID NO: 19925 - protein, 450 aa, synthetic construct; identical to SEQ ID NO: 17585
  source 1..450: note = Description of Artificial Sequence: Synthetic polypeptide; note = XENP020628 7G8_H0_L0.24_IgG1_PVA_/S267K Heavy Chain

SEQ ID NO: 19926 - protein, 121 aa, synthetic construct; identical to SEQ ID NO: 17586
  source 1..121: note = Description of Artificial Sequence: Synthetic polypeptide; note = VH of XENP020628

SEQ ID NO: 19927 - protein, 5 aa, synthetic construct
  source 1..5: note = Description of Artificial Sequence: Synthetic peptide; note = XENP020628 vhCDR1
DAWMD

SEQ ID NO: 19928 - protein, 19 aa, synthetic construct
  source 1..19: note = Description of Artificial Sequence: Synthetic peptide; note = XENP020628 vhCDR2
EIRTKANNHATYYAESVKG

SEQ ID NO: 19929 - protein, 10 aa, synthetic construct
  source 1..10: note = Description of Artificial Sequence: Synthetic peptide; note = XENP020628 vhCDR3
LANWDWYFDV

SEQ ID NO: 19930 - protein, 218 aa, synthetic construct
  source 1..218: note = Description of Artificial Sequence: Synthetic polypeptide; note = XENP020628 7G8_H0_L0.24_IgG1_PVA_/S267K Light Chain
DTVLTQSPASLAVSLGQRATISCKASQSVDYRGDSYMNWYQQKPGQPPKLLIYAASNLESGIPARLSGSGSGTDFTLNIHPVEEEDAATYYCQQSNEDPFTFGSGTKLEVKRTVAAPSVFIFPPSDEQLKSGTASVVCLLNNFYPREAKVQWKVDNALQSGNSQESVTEQDSKDSTYSLSSTLTLSKADYEKHKVYACEVTHQGLSSPVTKSFNRGEC

SEQ ID NO: 19931 - protein, 111 aa, synthetic construct
  source 1..111: note = Description of Artificial Sequence: Synthetic polypeptide; note = VL of XENP020628
DTVLTQSPASLAVSLGQRATISCKASQSVDYRGDSYMNWYQQKPGQPPKLLIYAASNLESGIPARLSGSGSGTDFTLNIHPVEEEDAATYYCQQSNEDPFTFGSGTKLEVK

SEQ ID NO: 19932 - protein, 15 aa, synthetic construct
  source 1..15: note = Description of Artificial Sequence: Synthetic peptide; note = XENP020628 vlCDR1
KASQSVDYRGDSYMN

SEQ ID NO: 19933 - protein, 7 aa, synthetic construct
  source 1..7: note = Description of Artificial Sequence: Synthetic peptide; note = XENP020628 vlCDR2
AASNLES

SEQ ID NO: 19934 - protein, 9 aa, synthetic construct
  source 1..9: note = Description of Artificial Sequence: Synthetic peptide; note = XENP020628 vlCDR3
QQSNEDPFT

SEQ ID NO: 19935 - protein, 450 aa, synthetic construct; identical to SEQ ID NO: 17585
  source 1..450: note = Description of Artificial Sequence: Synthetic polypeptide; note = XENP020629 7G8_H0_L0.25_IgG1_PVA_/S267K Heavy Chain

SEQ ID NO: 19936 - protein, 121 aa, synthetic construct; identical to SEQ ID NO: 17586
  source 1..121: note = Description of Artificial Sequence: Synthetic polypeptide; note = VH of XENP020629

SEQ ID NO: 19937 - protein, 5 aa, synthetic construct
  source 1..5: note = Description of Artificial Sequence: Synthetic peptide; note = XENP020629 vhCDR1
DAWMD

SEQ ID NO: 19938 - protein, 19 aa, synthetic construct
  source 1..19: note = Description of Artificial Sequence: Synthetic peptide; note = XENP020629 vhCDR2
EIRTKANNHATYYAESVKG

SEQ ID NO: 19939 - protein, 10 aa, synthetic construct
  source 1..10: note = Description of Artificial Sequence: Synthetic peptide; note = XENP020629 vhCDR3
LANWDWYFDV

SEQ ID NO: 19940 - protein, 218 aa, synthetic construct
  source 1..218: note = Description of Artificial Sequence: Synthetic polypeptide; note = XENP020629 7G8_H0_L0.25_IgG1_PVA_/S267K Light Chain
DTVLTQSPASLAVSLGQRATISCKASQSVDYLGDSYMNWYQQKPGQPPKLLIYAASNLESGIPARLSGSGSGTDFTLNIHPVEEEDAATYYCQQSNEDPFTFGSGTKLEVKRTVAAPSVFIFPPSDEQLKSGTASVVCLLNNFYPREAKVQWKVDNALQSGNSQESVTEQDSKDSTYSLSSTLTLSKADYEKHKVYACEVTHQGLSSPVTKSFNRGEC

SEQ ID NO: 19941 - protein, 111 aa, synthetic construct
  source 1..111: note = Description of Artificial Sequence: Synthetic polypeptide; note = VL of XENP020629
DTVLTQSPASLAVSLGQRATISCKASQSVDYLGDSYMNWYQQKPGQPPKLLIYAASNLESGIPARLSGSGSGTDFTLNIHPVEEEDAATYYCQQSNEDPFTFGSGTKLEVK

SEQ ID NO: 19942 - protein, 15 aa, synthetic construct
  source 1..15: note = Description of Artificial Sequence: Synthetic peptide; note = XENP020629 vlCDR1
KASQSVDYLGDSYMN

SEQ ID NO: 19943 - protein, 7 aa, synthetic construct
  source 1..7: note = Description of Artificial Sequence: Synthetic peptide; note = XENP020629 vlCDR2
AASNLES

SEQ ID NO: 19944 - protein, 9 aa, synthetic construct
  source 1..9: note = Description of Artificial Sequence: Synthetic peptide; note = XENP020629 vlCDR3
QQSNEDPFT

SEQ ID NO: 19945 - protein, 450 aa, synthetic construct; identical to SEQ ID NO: 17585
  source 1..450: note = Description of Artificial Sequence: Synthetic polypeptide; note = XENP020630 7G8_H0_L0.26_IgG1_PVA_/S267K Heavy Chain

SEQ ID NO: 19946 - protein, 121 aa, synthetic construct; identical to SEQ ID NO: 17586
  source 1..121: note = Description of Artificial Sequence: Synthetic polypeptide; note = VH of XENP020630

SEQ ID NO: 19947 - protein, 5 aa, synthetic construct
  source 1..5: note = Description of Artificial Sequence: Synthetic peptide; note = XENP020630 vhCDR1
DAWMD

SEQ ID NO: 19948 - protein, 19 aa, synthetic construct
  source 1..19: note = Description of Artificial Sequence: Synthetic peptide; note = XENP020630 vhCDR2
EIRTKANNHATYYAESVKG

SEQ ID NO: 19949 - protein, 10 aa, synthetic construct
  source 1..10: note = Description of Artificial Sequence: Synthetic peptide; note = XENP020630 vhCDR3
LANWDWYFDV

SEQ ID NO: 19950 - protein, 218 aa, synthetic construct
  source 1..218: note = Description of Artificial Sequence: Synthetic polypeptide; note = XENP020630 7G8_H0_L0.26_IgG1_PVA_/S267K Light Chain
DTVLTQSPASLAVSLGQRATISCKASQSVDYTGDSYMNWYQQKPGQPPKLLIYAASNLESGIPARLSGSGSGTDFTLNIHPVEEEDAATYYCQQSNEDPFTFGSGTKLEVKRTVAAPSVFIFPPSDEQLKSGTASVVCLLNNFYPREAKVQWKVDNALQSGNSQESVTEQDSKDSTYSLSSTLTLSKADYEKHKVYACEVTHQGLSSPVTKSFNRGEC

SEQ ID NO: 19951 - protein, 111 aa, synthetic construct
  source 1..111: note = Description of Artificial Sequence: Synthetic polypeptide; note = VL of XENP020630
DTVLTQSPASLAVSLGQRATISCKASQSVDYTGDSYMNWYQQKPGQPPKLLIYAASNLESGIPARLSGSGSGTDFTLNIHPVEEEDAATYYCQQSNEDPFTFGSGTKLEVK

SEQ ID NO: 19952 - protein, 15 aa, synthetic construct
  source 1..15: note = Description of Artificial Sequence: Synthetic peptide; note = XENP020630 vlCDR1
KASQSVDYTGDSYMN

SEQ ID NO: 19953 - protein, 7 aa, synthetic construct
  source 1..7: note = Description of Artificial Sequence: Synthetic peptide; note = XENP020630 vlCDR2
AASNLES

SEQ ID NO: 19954 - protein, 9 aa, synthetic construct
  source 1..9: note = Description of Artificial Sequence: Synthetic peptide; note = XENP020630 vlCDR3
QQSNEDPFT

SEQ ID NO: 19955 - protein, 450 aa, synthetic construct; identical to SEQ ID NO: 17585
  source 1..450: note = Description of Artificial Sequence: Synthetic polypeptide; note = XENP020631 7G8_H0_L0.27_IgG1_PVA_/S267K Heavy Chain

SEQ ID NO: 19956 - protein, 121 aa, synthetic construct; identical to SEQ ID NO: 17586
  source 1..121: note = Description of Artificial Sequence: Synthetic polypeptide; note = VH of XENP020631

SEQ ID NO: 19957 - protein, 5 aa, synthetic construct
  source 1..5: note = Description of Artificial Sequence: Synthetic peptide; note = XENP020631 vhCDR1
DAWMD

SEQ ID NO: 19958 - protein, 19 aa, synthetic construct
  source 1..19: note = Description of Artificial Sequence: Synthetic peptide; note = XENP020631 vhCDR2
EIRTKANNHATYYAESVKG

SEQ ID NO: 19959 - protein, 10 aa, synthetic construct
  source 1..10: note = Description of Artificial Sequence: Synthetic peptide; note = XENP020631 vhCDR3
LANWDWYFDV

SEQ ID NO: 19960 - protein, 218 aa, synthetic construct
  source 1..218: note = Description of Artificial Sequence: Synthetic polypeptide; note = XENP020631 7G8_H0_L0.27_IgG1_PVA_/S267K Light Chain
DTVLTQSPASLAVSLGQRATISCKASQSVDYGGDSYMNWYQQKPGQPPKLLIYAASNLESGIPARLSGSGSGTDFTLNIHPVEEEDAATYYCQQSNEDPFTFGSGTKLEVKRTVAAPSVFIFPPSDEQLKSGTASVVCLLNNFYPREAKVQWKVDNALQSGNSQESVTEQDSKDSTYSLSSTLTLSKADYEKHKVYACEVTHQGLSSPVTKSFNRGEC

SEQ ID NO: 19961 - protein, 111 aa, synthetic construct
  source 1..111: note = Description of Artificial Sequence: Synthetic polypeptide; note = VL of XENP020631
DTVLTQSPASLAVSLGQRATISCKASQSVDYGGDSYMNWYQQKPGQPPKLLIYAASNLESGIPARLSGSGSGTDFTLNIHPVEEEDAATYYCQQSNEDPFTFGSGTKLEVK

SEQ ID NO: 19962 - protein, 15 aa, synthetic construct
  source 1..15: note = Description of Artificial Sequence: Synthetic peptide; note = XENP020631 vlCDR1
KASQSVDYGGDSYMN

SEQ ID NO: 19963 - protein, 7 aa, synthetic construct
  source 1..7: note = Description of Artificial Sequence: Synthetic peptide; note = XENP020631 vlCDR2
AASNLES

SEQ ID NO: 19964 - protein, 9 aa, synthetic construct
  source 1..9: note = Description of Artificial Sequence: Synthetic peptide; note = XENP020631 vlCDR3
QQSNEDPFT

SEQ ID NO: 19965 - protein, 450 aa, synthetic construct; identical to SEQ ID NO: 17585
  source 1..450: note = Description of Artificial Sequence: Synthetic polypeptide; note = XENP020632 7G8_H0_L0.28_IgG1_PVA_/S267K Heavy Chain

SEQ ID NO: 19966 - protein, 121 aa, synthetic construct; identical to SEQ ID NO: 17586
  source 1..121: note = Description of Artificial Sequence: Synthetic polypeptide; note = VH of XENP020632

SEQ ID NO: 19967 - protein, 5 aa, synthetic construct
  source 1..5: note = Description of Artificial Sequence: Synthetic peptide; note = XENP020632 vhCDR1
DAWMD

SEQ ID NO: 19968 - protein, 19 aa, synthetic construct
  source 1..19: note = Description of Artificial Sequence: Synthetic peptide; note = XENP020632 vhCDR2
EIRTKANNHATYYAESVKG

SEQ ID NO: 19969 - protein, 10 aa, synthetic construct
  source 1..10: note = Description of Artificial Sequence: Synthetic peptide; note = XENP020632 vhCDR3
LANWDWYFDV

SEQ ID NO: 19970 - protein, 218 aa, synthetic construct
  source 1..218: note = Description of Artificial Sequence: Synthetic polypeptide; note = XENP020632 7G8_H0_L0.28_IgG1_PVA_/S267K Light Chain
DTVLTQSPASLAVSLGQRATISCKASQSVDYYGDSYMNWYQQKPGQPPKLLIYAASNLESGIPARLSGSGSGTDFTLNIHPVEEEDAATYYCQQSNEDPFTFGSGTKLEVKRTVAAPSVFIFPPSDEQLKSGTASVVCLLNNFYPREAKVQWKVDNALQSGNSQESVTEQDSKDSTYSLSSTLTLSKADYEKHKVYACEVTHQGLSSPVTKSFNRGEC

SEQ ID NO: 19971 - protein, 111 aa, synthetic construct
  source 1..111: note = Description of Artificial Sequence: Synthetic polypeptide; note = VL of XENP020632
DTVLTQSPASLAVSLGQRATISCKASQSVDYYGDSYMNWYQQKPGQPPKLLIYAASNLESGIPARLSGSGSGTDFTLNIHPVEEEDAATYYCQQSNEDPFTFGSGTKLEVK

SEQ ID NO: 19972 - protein, 15 aa, synthetic construct
  source 1..15: note = Description of Artificial Sequence: Synthetic peptide; note = XENP020632 vlCDR1
KASQSVDYYGDSYMN

SEQ ID NO: 19973 - protein, 7 aa, synthetic construct
  source 1..7: note = Description of Artificial Sequence: Synthetic peptide; note = XENP020632 vlCDR2
AASNLES

SEQ ID NO: 19974 - protein, 9 aa, synthetic construct
  source 1..9: note = Description of Artificial Sequence: Synthetic peptide; note = XENP020632 vlCDR3
QQSNEDPFT

SEQ ID NO: 19975 - protein, 450 aa, synthetic construct; identical to SEQ ID NO: 17585
  source 1..450: note = Description of Artificial Sequence: Synthetic polypeptide; note = XENP020633 7G8_H0_L0.29_IgG1_PVA_/S267K Heavy Chain

SEQ ID NO: 19976 - protein, 121 aa, synthetic construct; identical to SEQ ID NO: 17586
  source 1..121: note = Description of Artificial Sequence: Synthetic polypeptide; note = VH of XENP020633

SEQ ID NO: 19977 - protein, 5 aa, synthetic construct
  source 1..5: note = Description of Artificial Sequence: Synthetic peptide; note = XENP020633 vhCDR1
DAWMD

SEQ ID NO: 19978 - protein, 19 aa, synthetic construct
  source 1..19: note = Description of Artificial Sequence: Synthetic peptide; note = XENP020633 vhCDR2
EIRTKANNHATYYAESVKG

SEQ ID NO: 19979 - protein, 10 aa, synthetic construct
  source 1..10: note = Description of Artificial Sequence: Synthetic peptide; note = XENP020633 vhCDR3
LANWDWYFDV

SEQ ID NO: 19980 - protein, 218 aa, synthetic construct
  source 1..218: note = Description of Artificial Sequence: Synthetic polypeptide; note = XENP020633 7G8_H0_L0.29_IgG1_PVA_/S267K Light Chain
DTVLTQSPASLAVSLGQRATISCKASQSVDYDADSYMNWYQQKPGQPPKLLIYAASNLESGIPARLSGSGSGTDFTLNIHPVEEEDAATYYCQQSNEDPFTFGSGTKLEVKRTVAAPSVFIFPPSDEQLKSGTASVVCLLNNFYPREAKVQWKVDNALQSGNSQESVTEQDSKDSTYSLSSTLTLSKADYEKHKVYACEVTHQGLSSPVTKSFNRGEC

SEQ ID NO: 19981 - protein, 111 aa, synthetic construct
  source 1..111: note = Description of Artificial Sequence: Synthetic polypeptide; note = VL of XENP020633
DTVLTQSPASLAVSLGQRATISCKASQSVDYDADSYMNWYQQKPGQPPKLLIYAASNLESGIPARLSGSGSGTDFTLNIHPVEEEDAATYYCQQSNEDPFTFGSGTKLEVK

SEQ ID NO: 19982 - protein, 15 aa, synthetic construct
  source 1..15: note = Description of Artificial Sequence: Synthetic peptide; note = XENP020633 vlCDR1
KASQSVDYDADSYMN

SEQ ID NO: 19983 - protein, 7 aa, synthetic construct
  source 1..7: note = Description of Artificial Sequence: Synthetic peptide; note = XENP020633 vlCDR2
AASNLES

SEQ ID NO: 19984 - protein, 9 aa, synthetic construct
  source 1..9: note = Description of Artificial Sequence: Synthetic peptide; note = XENP020633 vlCDR3
QQSNEDPFT

SEQ ID NO: 19985 - protein, 450 aa, synthetic construct; identical to SEQ ID NO: 17585
  source 1..450: note = Description of Artificial Sequence: Synthetic polypeptide; note = XENP020634 7G8_H0_L0.30_IgG1_PVA_/S267K Heavy Chain

SEQ ID NO: 19986 - protein, 121 aa, synthetic construct; identical to SEQ ID NO: 17586
  source 1..121: note = Description of Artificial Sequence: Synthetic polypeptide; note = VH of XENP020634

SEQ ID NO: 19987 - protein, 5 aa, synthetic construct
  source 1..5: note = Description of Artificial Sequence: Synthetic peptide; note = XENP020634 vhCDR1
DAWMD

SEQ ID NO: 19988 - protein, 19 aa, synthetic construct
  source 1..19: note = Description of Artificial Sequence: Synthetic peptide; note = XENP020634 vhCDR2
EIRTKANNHATYYAESVKG

SEQ ID NO: 19989 - protein, 10 aa, synthetic construct
  source 1..10: note = Description of Artificial Sequence: Synthetic peptide; note = XENP020634 vhCDR3
LANWDWYFDV

SEQ ID NO: 19990 - protein, 218 aa, synthetic construct
  source 1..218: note = Description of Artificial Sequence: Synthetic polypeptide; note = XENP020634 7G8_H0_L0.30_IgG1_PVA_/S267K Light Chain
DTVLTQSPASLAVSLGQRATISCKASQSVDYDSDSYMNWYQQKPGQPPKLLIYAASNLESGIPARLSGSGSGTDFTLNIHPVEEEDAATYYCQQSNEDPFTFGSGTKLEVKRTVAAPSVFIFPPSDEQLKSGTASVVCLLNNFYPREAKVQWKVDNALQSGNSQESVTEQDSKDSTYSLSSTLTLSKADYEKHKVYACEVTHQGLSSPVTKSFNRGEC

SEQ ID NO: 19991 - protein, 111 aa, synthetic construct
  source 1..111: note = Description of Artificial Sequence: Synthetic polypeptide; note = VL of XENP020634
DTVLTQSPASLAVSLGQRATISCKASQSVDYDSDSYMNWYQQKPGQPPKLLIYAASNLESGIPARLSGSGSGTDFTLNIHPVEEEDAATYYCQQSNEDPFTFGSGTKLEVK

SEQ ID NO: 19992 - protein, 15 aa, synthetic construct
  source 1..15: note = Description of Artificial Sequence: Synthetic peptide; note = XENP020634 vlCDR1
KASQSVDYDSDSYMN

SEQ ID NO: 19993 - protein, 7 aa, synthetic construct
  source 1..7: note = Description of Artificial Sequence: Synthetic peptide; note = XENP020634 vlCDR2
AASNLES

SEQ ID NO: 19994 - protein, 9 aa, synthetic construct
  source 1..9: note = Description of Artificial Sequence: Synthetic peptide; note = XENP020634 vlCDR3
QQSNEDPFT

SEQ ID NO: 19995 - protein, 450 aa, synthetic construct; identical to SEQ ID NO: 17585
  source 1..450: note = Description of Artificial Sequence: Synthetic polypeptide; note = XENP020635 7G8_H0_L0.31_IgG1_PVA_/S267K Heavy Chain

SEQ ID NO: 19996 - protein, 121 aa, synthetic construct; identical to SEQ ID NO: 17586
  source 1..121: note = Description of Artificial Sequence: Synthetic polypeptide; note = VH of XENP020635

SEQ ID NO: 19997 - protein, 5 aa, synthetic construct
  source 1..5: note = Description of Artificial Sequence: Synthetic peptide; note = XENP020635 vhCDR1
DAWMD

SEQ ID NO: 19998 - protein, 19 aa, synthetic construct
  source 1..19: note = Description of Artificial Sequence: Synthetic peptide; note = XENP020635 vhCDR2
EIRTKANNHATYYAESVKG

SEQ ID NO: 19999 - protein, 10 aa, synthetic construct
  source 1..10: note = Description of Artificial Sequence: Synthetic peptide; note = XENP020635 vhCDR3
LANWDWYFDV

SEQ ID NO: 20000 - protein, 218 aa, synthetic construct
  source 1..218: note = Description of Artificial Sequence: Synthetic polypeptide; note = XENP020635 7G8_H0_L0.31_IgG1_PVA_/S267K Light Chain
DTVLTQSPASLAVSLGQRATISCKASQSVDYDTDSYMNWYQQKPGQPPKLLIYAASNLESGIPARLSGSGSGTDFTLNIHPVEEEDAATYYCQQSNEDPFTFGSGTKLEVKRTVAAPSVFIFPPSDEQLKSGTASVVCLLNNFYPREAKVQWKVDNALQSGNSQESVTEQDSKDSTYSLSSTLTLSKADYEKHKVYACEVTHQGLSSPVTKSFNRGEC

SEQ ID NO: 20001 - protein, 111 aa, synthetic construct
  source 1..111: note = Description of Artificial Sequence: Synthetic polypeptide; note = VL of XENP020635
DTVLTQSPASLAVSLGQRATISCKASQSVDYDTDSYMNWYQQKPGQPPKLLIYAASNLESGIPARLSGSGSGTDFTLNIHPVEEEDAATYYCQQSNEDPFTFGSGTKLEVK

SEQ ID NO: 20002 - protein, 15 aa, synthetic construct
  source 1..15: note = Description of Artificial Sequence: Synthetic peptide; note = XENP020635 vlCDR1
KASQSVDYDTDSYMN

SEQ ID NO: 20003 - protein, 7 aa, synthetic construct
  source 1..7: note = Description of Artificial Sequence: Synthetic peptide; note = XENP020635 vlCDR2
AASNLES

SEQ ID NO: 20004 - protein, 9 aa, synthetic construct
  source 1..9: note = Description of Artificial Sequence: Synthetic peptide; note = XENP020635 vlCDR3
QQSNEDPFT

SEQ ID NO: 20005 - protein, 450 aa, synthetic construct; identical to SEQ ID NO: 17585
  source 1..450: note = Description of Artificial Sequence: Synthetic polypeptide; note = XENP020636 7G8_H0_L0.32_IgG1_PVA_/S267K Heavy Chain

SEQ ID NO: 20006 - protein, 121 aa, synthetic construct; identical to SEQ ID NO: 17586
  source 1..121: note = Description of Artificial Sequence: Synthetic polypeptide; note = VH of XENP020636

SEQ ID NO: 20007 - protein, 5 aa, synthetic construct
  source 1..5: note = Description of Artificial Sequence: Synthetic peptide; note = XENP020636 vhCDR1
DAWMD

SEQ ID NO: 20008 - protein, 19 aa, synthetic construct
  source 1..19: note = Description of Artificial Sequence: Synthetic peptide; note = XENP020636 vhCDR2
EIRTKANNHATYYAESVKG

SEQ ID NO: 20009 - protein, 10 aa, synthetic construct
  source 1..10: note = Description of Artificial Sequence: Synthetic peptide; note = XENP020636 vhCDR3
LANWDWYFDV

SEQ ID NO: 20010 - protein, 218 aa, synthetic construct
  source 1..218: note = Description of Artificial Sequence: Synthetic polypeptide; note = XENP020636 7G8_H0_L0.32_IgG1_PVA_/S267K Light Chain
DTVLTQSPASLAVSLGQRATISCKASQSVDYDQDSYMNWYQQKPGQPPKLLIYAASNLESGIPARLSGSGSGTDFTLNIHPVEEEDAATYYCQQSNEDPFTFGSGTKLEVKRTVAAPSVFIFPPSDEQLKSGTASVVCLLNNFYPREAKVQWKVDNALQSGNSQESVTEQDSKDSTYSLSSTLTLSKADYEKHKVYACEVTHQGLSSPVTKSFNRGEC

SEQ ID NO: 20011 - protein, 111 aa, synthetic construct
  source 1..111: note = Description of Artificial Sequence: Synthetic polypeptide; note = VL of XENP020636
DTVLTQSPASLAVSLGQRATISCKASQSVDYDQDSYMNWYQQKPGQPPKLLIYAASNLESGIPARLSGSGSGTDFTLNIHPVEEEDAATYYCQQSNEDPFTFGSGTKLEVK

SEQ ID NO: 20012 - protein, 15 aa, synthetic construct
  source 1..15: note = Description of Artificial Sequence: Synthetic peptide; note = XENP020636 vlCDR1
KASQSVDYDQDSYMN

SEQ ID NO: 20013 - protein, 7 aa, synthetic construct
  source 1..7: note = Description of Artificial Sequence: Synthetic peptide; note = XENP020636 vlCDR2
AASNLES

SEQ ID NO: 20014 - protein, 9 aa, synthetic construct
  source 1..9: note = Description of Artificial Sequence: Synthetic peptide; note = XENP020636 vlCDR3
QQSNEDPFT

SEQ ID NO: 20015 - protein, 450 aa, synthetic construct; identical to SEQ ID NO: 17585
  source 1..450: note = Description of Artificial Sequence: Synthetic polypeptide; note = XENP020637 7G8_H0_L0.33_IgG1_PVA_/S267K Heavy Chain

SEQ ID NO: 20016 - protein, 121 aa, synthetic construct; identical to SEQ ID NO: 17586
  source 1..121: note = Description of Artificial Sequence: Synthetic polypeptide; note = VH of XENP020637

SEQ ID NO: 20017 - protein, 5 aa, synthetic construct
  source 1..5: note = Description of Artificial Sequence: Synthetic peptide; note = XENP020637 vhCDR1
DAWMD

SEQ ID NO: 20018 - protein, 19 aa, synthetic construct
  source 1..19: note = Description of Artificial Sequence: Synthetic peptide; note = XENP020637 vhCDR2
EIRTKANNHATYYAESVKG

SEQ ID NO: 20019 - protein, 10 aa, synthetic construct
  source 1..10: note = Description of Artificial Sequence: Synthetic peptide; note = XENP020637 vhCDR3
LANWDWYFDV

SEQ ID NO: 20020 - protein, 218 aa, synthetic construct
  source 1..218: note = Description of Artificial Sequence: Synthetic polypeptide; note = XENP020637 7G8_H0_L0.33_IgG1_PVA_/S267K Light Chain
DTVLTQSPASLAVSLGQRATISCKASQSVDYDHDSYMNWYQQKPGQPPKLLIYAASNLESGIPARLSGSGSGTDFTLNIHPVEEEDAATYYCQQSNEDPFTFGSGTKLEVKRTVAAPSVFIFPPSDEQLKSGTASVVCLLNNFYPREAKVQWKVDNALQSGNSQESVTEQDSKDSTYSLSSTLTLSKADYEKHKVYACEVTHQGLSSPVTKSFNRGEC

SEQ ID NO: 20021 - protein, 111 aa, synthetic construct
  source 1..111: note = Description of Artificial Sequence: Synthetic polypeptide; note = VL of XENP020637
DTVLTQSPASLAVSLGQRATISCKASQSVDYDHDSYMNWYQQKPGQPPKLLIYAASNLESGIPARLSGSGSGTDFTLNIHPVEEEDAATYYCQQSNEDPFTFGSGTKLEVK

SEQ ID NO: 20022 - protein, 15 aa, synthetic construct
  source 1..15: note = Description of Artificial Sequence: Synthetic peptide; note = XENP020637 vlCDR1
KASQSVDYDHDSYMN

SEQ ID NO: 20023 - protein, 7 aa, synthetic construct
  source 1..7: note = Description of Artificial Sequence: Synthetic peptide; note = XENP020637 vlCDR2
AASNLES

SEQ ID NO: 20024 - protein, 9 aa, synthetic construct
  source 1..9: note = Description of Artificial Sequence: Synthetic peptide; note = XENP020637 vlCDR3
QQSNEDPFT

SEQ ID NO: 20025 - protein, 450 aa, synthetic construct; identical to SEQ ID NO: 17585
  source 1..450: note = Description of Artificial Sequence: Synthetic polypeptide; note = XENP020638 7G8_H0_L0.34_IgG1_PVA_/S267K Heavy Chain

SEQ ID NO: 20026 - protein, 121 aa, synthetic construct; identical to SEQ ID NO: 17586
  source 1..121: note = Description of Artificial Sequence: Synthetic polypeptide; note = VH of XENP020638

SEQ ID NO: 20027 - protein, 5 aa, synthetic construct
  source 1..5: note = Description of Artificial Sequence: Synthetic peptide; note = XENP020638 vhCDR1
DAWMD

SEQ ID NO: 20028 - protein, 19 aa, synthetic construct
  source 1..19: note = Description of Artificial Sequence: Synthetic peptide; note = XENP020638 vhCDR2
EIRTKANNHATYYAESVKG

SEQ ID NO: 20029 - protein, 10 aa, synthetic construct
  source 1..10: note = Description of Artificial Sequence: Synthetic peptide; note = XENP020638 vhCDR3
LANWDWYFDV

SEQ ID NO: 20030 - protein, 218 aa, synthetic construct
  source 1..218: note = Description of Artificial Sequence: Synthetic polypeptide; note = XENP020638 7G8_H0_L0.34_IgG1_PVA_/S267K Light Chain
DTVLTQSPASLAVSLGQRATISCKASQSVDYDDDSYMNWYQQKPGQPPKLLIYAASNLESGIPARLSGSGSGTDFTLNIHPVEEEDAATYYCQQSNEDPFTFGSGTKLEVKRTVAAPSVFIFPPSDEQLKSGTASVVCLLNNFYPREAKVQWKVDNALQSGNSQESVTEQDSKDSTYSLSSTLTLSKADYEKHKVYACEVTHQGLSSPVTKSFNRGEC

SEQ ID NO: 20031 - protein, 111 aa, synthetic construct
  source 1..111: note = Description of Artificial Sequence: Synthetic polypeptide; note = VL of XENP020638
DTVLTQSPASLAVSLGQRATISCKASQSVDYDDDSYMNWYQQKPGQPPKLLIYAASNLESGIPARLSGSGSGTDFTLNIHPVEEEDAATYYCQQSNEDPFTFGSGTKLEVK

SEQ ID NO: 20032 - protein, 15 aa, synthetic construct
  source 1..15: note = Description of Artificial Sequence: Synthetic peptide; note = XENP020638 vlCDR1
KASQSVDYDDDSYMN

SEQ ID NO: 20033 - protein, 7 aa, synthetic construct
  source 1..7: note = Description of Artificial Sequence: Synthetic peptide; note = XENP020638 vlCDR2
AASNLES

SEQ ID NO: 20034 - protein, 9 aa, synthetic construct
  source 1..9: note = Description of Artificial Sequence: Synthetic peptide; note = XENP020638 vlCDR3
QQSNEDPFT

SEQ ID NO: 20035 - protein, 450 aa, synthetic construct; identical to SEQ ID NO: 17585
  source 1..450: note = Description of Artificial Sequence: Synthetic polypeptide; note = XENP020639 7G8_H0_L0.35_IgG1_PVA_/S267K Heavy Chain

SEQ ID NO: 20036 - protein, 121 aa, synthetic construct; identical to SEQ ID NO: 17586
  source 1..121: note = Description of Artificial Sequence: Synthetic polypeptide; note = VH of XENP020639

SEQ ID NO: 20037 - protein, 5 aa, synthetic construct
  source 1..5: note = Description of Artificial Sequence: Synthetic peptide; note = XENP020639 vhCDR1
DAWMD

SEQ ID NO: 20038 - protein, 19 aa, synthetic construct
  source 1..19: note = Description of Artificial Sequence: Synthetic peptide; note = XENP020639 vhCDR2
EIRTKANNHATYYAESVKG

SEQ ID NO: 20039 - protein, 10 aa, synthetic construct
  source 1..10: note = Description of Artificial Sequence: Synthetic peptide; note = XENP020639 vhCDR3
LANWDWYFDV

SEQ ID NO: 20040 - protein, 218 aa, synthetic construct
  source 1..218: note = Description of Artificial Sequence: Synthetic polypeptide; note = XENP020639 7G8_H0_L0.35_IgG1_PVA_/S267K Light Chain
DTVLTQSPASLAVSLGQRATISCKASQSVDYDKDSYMNWYQQKPGQPPKLLIYAASNLESGIPARLSGSGSGTDFTLNIHPVEEEDAATYYCQQSNEDPFTFGSGTKLEVKRTVAAPSVFIFPPSDEQLKSGTASVVCLLNNFYPREAKVQWKVDNALQSGNSQESVTEQDSKDSTYSLSSTLTLSKADYEKHKVYACEVTHQGLSSPVTKSFNRGEC

SEQ ID NO: 20041 - protein, 111 aa, synthetic construct
  source 1..111: note = Description of Artificial Sequence: Synthetic polypeptide; note = VL of XENP020639
DTVLTQSPASLAVSLGQRATISCKASQSVDYDKDSYMNWYQQKPGQPPKLLIYAASNLESGIPARLSGSGSGTDFTLNIHPVEEEDAATYYCQQSNEDPFTFGSGTKLEVK

SEQ ID NO: 20042 - protein, 15 aa, synthetic construct
  source 1..15: note = Description of Artificial Sequence: Synthetic peptide; note = XENP020639 vlCDR1
KASQSVDYDKDSYMN

SEQ ID NO: 20043 - protein, 7 aa, synthetic construct
  source 1..7: note = Description of Artificial Sequence: Synthetic peptide; note = XENP020639 vlCDR2
AASNLES

SEQ ID NO: 20044 - protein, 9 aa, synthetic construct
  source 1..9: note = Description of Artificial Sequence: Synthetic peptide; note = XENP020639 vlCDR3
QQSNEDPFT

SEQ ID NO: 20045 - protein, 450 aa, synthetic construct; identical to SEQ ID NO: 17585
  source 1..450: note = Description of Artificial Sequence: Synthetic polypeptide; note = XENP020640 7G8_H0_L0.36_IgG1_PVA_/S267K Heavy Chain

SEQ ID NO: 20046 - protein, 121 aa, synthetic construct; identical to SEQ ID NO: 17586
  source 1..121: note = Description of Artificial Sequence: Synthetic polypeptide; note = VH of XENP020640

SEQ ID NO: 20047 - protein, 5 aa, synthetic construct
  source 1..5: note = Description of Artificial Sequence: Synthetic peptide; note = XENP020640 vhCDR1
DAWMD

SEQ ID NO: 20048 - protein, 19 aa, synthetic construct
  source 1..19: note = Description of Artificial Sequence: Synthetic peptide; note = XENP020640 vhCDR2
EIRTKANNHATYYAESVKG

SEQ ID NO: 20049 - protein, 10 aa, synthetic construct
  source 1..10: note = Description of Artificial Sequence: Synthetic peptide; note = XENP020640 vhCDR3
LANWDWYFDV

SEQ ID NO: 20050 - protein, 218 aa, synthetic construct
  source 1..218: note = Description of Artificial Sequence: Synthetic polypeptide; note = XENP020640 7G8_H0_L0.36_IgG1_PVA_/S267K Light Chain
DTVLTQSPASLAVSLGQRATISCKASQSVDYDLDSYMNWYQQKPGQPPKLLIYAASNLESGIPARLSGSGSGTDFTLNIHPVEEEDAATYYCQQSNEDPFTFGSGTKLEVKRTVAAPSVFIFPPSDEQLKSGTASVVCLLNNFYPREAKVQWKVDNALQSGNSQESVTEQDSKDSTYSLSSTLTLSKADYEKHKVYACEVTHQGLSSPVTKSFNRGEC

SEQ ID NO: 20051 - protein, 111 aa, synthetic construct
  source 1..111: note = Description of Artificial Sequence: Synthetic polypeptide; note = VL of XENP020640
DTVLTQSPASLAVSLGQRATISCKASQSVDYDLDSYMNWYQQKPGQPPKLLIYAASNLESGIPARLSGSGSGTDFTLNIHPVEEEDAATYYCQQSNEDPFTFGSGTKLEVK

SEQ ID NO: 20052 - protein, 15 aa, synthetic construct
  source 1..15: note = Description of Artificial Sequence: Synthetic peptide; note = XENP020640 vlCDR1
KASQSVDYDLDSYMN

SEQ ID NO: 20053 - protein, 7 aa, synthetic construct
  source 1..7: note = Description of Artificial Sequence: Synthetic peptide; note = XENP020640 vlCDR2
AASNLES

SEQ ID NO: 20054 - protein, 9 aa, synthetic construct
  source 1..9: note = Description of Artificial Sequence: Synthetic peptide; note = XENP020640 vlCDR3
QQSNEDPFT

SEQ ID NO: 20055 - protein, 450 aa, synthetic construct; identical to SEQ ID NO: 17585
  source 1..450: note = Description of Artificial Sequence: Synthetic polypeptide; note = XENP020641 7G8_H0_L0.37_IgG1_PVA_/S267K Heavy Chain

SEQ ID NO: 20056 - protein, 121 aa, synthetic construct; identical to SEQ ID NO: 17586
  source 1..121: note = Description of Artificial Sequence: Synthetic polypeptide; note = VH of XENP020641

SEQ ID NO: 20057 - protein, 5 aa, synthetic construct
  source 1..5: note = Description of Artificial Sequence: Synthetic peptide; note = XENP020641 vhCDR1
DAWMD

SEQ ID NO: 20058 - protein, 19 aa, synthetic construct
  source 1..19: note = Description of Artificial Sequence: Synthetic peptide; note = XENP020641 vhCDR2
EIRTKANNHATYYAESVKG

SEQ ID NO: 20059 - protein, 10 aa, synthetic construct
  source 1..10: note = Description of Artificial Sequence: Synthetic peptide; note = XENP020641 vhCDR3
LANWDWYFDV

SEQ ID NO: 20060 - protein, 218 aa, synthetic construct
  source 1..218: note = Description of Artificial Sequence: Synthetic polypeptide; note = XENP020641 7G8_H0_L0.37_IgG1_PVA_/S267K Light Chain
DTVLTQSPASLAVSLGQRATISCKASQSVDYDYDSYMNWYQQKPGQPPKLLIYAASNLESGIPARLSGSGSGTDFTLNIHPVEEEDAATYYCQQSNEDPFTFGSGTKLEVKRTVAAPSVFIFPPSDEQLKSGTASVVCLLNNFYPREAKVQWKVDNALQSGNSQESVTEQDSKDSTYSLSSTLTLSKADYEKHKVYACEVTHQGLSSPVTKSFNRGEC

SEQ ID NO: 20061 - protein, 111 aa, synthetic construct
  source 1..111: note = Description of Artificial Sequence: Synthetic polypeptide; note = VL of XENP020641
DTVLTQSPASLAVSLGQRATISCKASQSVDYDYDSYMNWYQQKPGQPPKLLIYAASNLESGIPARLSGSGSGTDFTLNIHPVEEEDAATYYCQQSNEDPFTFGSGTKLEVK

SEQ ID NO: 20062 - protein, 15 aa, synthetic construct
  source 1..15: note = Description of Artificial Sequence: Synthetic peptide; note = XENP020641 vlCDR1
KASQSVDYDYDSYMN

SEQ ID NO: 20063 - protein, 7 aa, synthetic construct
  source 1..7: note = Description of Artificial Sequence: Synthetic peptide; note = XENP020641 vlCDR2
AASNLES

SEQ ID NO: 20064 - protein, 9 aa, synthetic construct
  source 1..9: note = Description of Artificial Sequence: Synthetic peptide; note = XENP020641 vlCDR3
QQSNEDPFT

SEQ ID NO: 20065 - protein, 450 aa, synthetic construct; identical to SEQ ID NO: 17585
  source 1..450: note = Description of Artificial Sequence: Synthetic polypeptide; note = XENP020642 7G8_H0_L0.38_IgG1_PVA_/S267K Heavy Chain

SEQ ID NO: 20066 - protein, 121 aa, synthetic construct; identical to SEQ ID NO: 17586
  source 1..121: note = Description of Artificial Sequence: Synthetic polypeptide; note = VH of XENP020642

SEQ ID NO: 20067 - protein, 5 aa, synthetic construct
  source 1..5: note = Description of Artificial Sequence: Synthetic peptide; note = XENP020642 vhCDR1
DAWMD

SEQ ID NO: 20068 - protein, 19 aa, synthetic construct
  source 1..19: note = Description of Artificial Sequence: Synthetic peptide; note = XENP020642 vhCDR2
EIRTKANNHATYYAESVKG

SEQ ID NO: 20069 - protein, 10 aa, synthetic construct
  source 1..10: note = Description of Artificial Sequence: Synthetic peptide; note = XENP020642 vhCDR3
LANWDWYFDV

SEQ ID NO: 20070 - protein, 218 aa, synthetic construct
  source 1..218: note = Description of Artificial Sequence: Synthetic polypeptide; note = XENP020642 7G8_H0_L0.38_IgG1_PVA_/S267K Light Chain
DTVLTQSPASLAVSLGQRATISCKASQSVDYDGNSYMNWYQQKPGQPPKLLIYAASNLESGIPARLSGSGSGTDFTLNIHPVEEEDAATYYCQQSNEDPFTFGSGTKLEVKRTVAAPSVFIFPPSDEQLKSGTASVVCLLNNFYPREAKVQWKVDNALQSGNSQESVTEQDSKDSTYSLSSTLTLSKADYEKHKVYACEVTHQGLSSPVTKSFNRGEC

SEQ ID NO: 20071 - protein, 111 aa, synthetic construct
  source 1..111: note = Description of Artificial Sequence: Synthetic polypeptide; note = VL of XENP020642
DTVLTQSPASLAVSLGQRATISCKASQSVDYDGNSYMNWYQQKPGQPPKLLIYAASNLESGIPARLSGSGSGTDFTLNIHPVEEEDAATYYCQQSNEDPFTFGSGTKLEVK

SEQ ID NO: 20072 - protein, 15 aa, synthetic construct
  source 1..15: note = Description of Artificial Sequence: Synthetic peptide; note = XENP020642 vlCDR1
KASQSVDYDGNSYMN

SEQ ID NO: 20073 - protein, 7 aa, synthetic construct
  source 1..7: note = Description of Artificial Sequence: Synthetic peptide; note = XENP020642 vlCDR2
AASNLES

SEQ ID NO: 20074 - protein, 9 aa, synthetic construct
  source 1..9: note = Description of Artificial Sequence: Synthetic peptide; note = XENP020642 vlCDR3
QQSNEDPFT

SEQ ID NO: 20075 - protein, 450 aa, synthetic construct; identical to SEQ ID NO: 17585
  source 1..450: note = Description of Artificial Sequence: Synthetic polypeptide; note = XENP020643 7G8_H0_L0.39_IgG1_PVA_/S267K Heavy Chain

SEQ ID NO: 20076 - protein, 121 aa, synthetic construct; identical to SEQ ID NO: 17586
  source 1..121: note = Description of Artificial Sequence: Synthetic polypeptide; note = VH of XENP020643

SEQ ID NO: 20077 - protein, 5 aa, synthetic construct
  source 1..5: note = Description of Artificial Sequence: Synthetic peptide; note = XENP020643 vhCDR1
DAWMD

SEQ ID NO: 20078 - protein, 19 aa, synthetic construct
  source 1..19: note = Description of Artificial Sequence: Synthetic peptide; note = XENP020643 vhCDR2
EIRTKANNHATYYAESVKG

SEQ ID NO: 20079 - protein, 10 aa, synthetic construct
  source 1..10: note = Description of Artificial Sequence: Synthetic peptide; note = XENP020643 vhCDR3
LANWDWYFDV

SEQ ID NO: 20080 - protein, 218 aa, synthetic construct
  source 1..218: note = Description of Artificial Sequence: Synthetic polypeptide; note = XENP020643 7G8_H0_L0.39_IgG1_PVA_/S267K Light Chain
DTVLTQSPASLAVSLGQRATISCKASQSVDYDGESYMNWYQQKPGQPPKLLIYAASNLESGIPARLSGSGSGTDFTLNIHPVEEEDAATYYCQQSNEDPFTFGSGTKLEVKRTVAAPSVFIFPPSDEQLKSGTASVVCLLNNFYPREAKVQWKVDNALQSGNSQESVTEQDSKDSTYSLSSTLTLSKADYEKHKVYACEVTHQGLSSPVTKSFNRGEC

SEQ ID NO: 20081 - protein, 111 aa, synthetic construct
  source 1..111: note = Description of Artificial Sequence: Synthetic polypeptide; note = VL of XENP020643
DTVLTQSPASLAVSLGQRATISCKASQSVDYDGESYMNWYQQKPGQPPKLLIYAASNLESGIPARLSGSGSGTDFTLNIHPVEEEDAATYYCQQSNEDPFTFGSGTKLEVK

SEQ ID NO: 20082 - protein, 15 aa, synthetic construct
  source 1..15: note = Description of Artificial Sequence: Synthetic peptide; note = XENP020643 vlCDR1
KASQSVDYDGESYMN

SEQ ID NO: 20083 - protein, 7 aa, synthetic construct
  source 1..7: note = Description of Artificial Sequence: Synthetic peptide; note = XENP020643 vlCDR2
AASNLES

SEQ ID NO: 20084 - protein, 9 aa, synthetic construct
  source 1..9: note = Description of Artificial Sequence: Synthetic peptide; note = XENP020643 vlCDR3
QQSNEDPFT

SEQ ID NO: 20085 - protein, 450 aa, synthetic construct; identical to SEQ ID NO: 17585
  source 1..450: note = Description of Artificial Sequence: Synthetic polypeptide; note = XENP020644 7G8_H0_L0.40_IgG1_PVA_/S267K Heavy Chain

SEQ ID NO: 20086 - protein, 121 aa, synthetic construct; identical to SEQ ID NO: 17586
  source 1..121: note = Description of Artificial Sequence: Synthetic polypeptide; note = VH of XENP020644

SEQ ID NO: 20087 - protein, 5 aa, synthetic construct
  source 1..5: note = Description of Artificial Sequence: Synthetic peptide; note = XENP020644 vhCDR1
DAWMD

SEQ ID NO: 20088 - protein, 19 aa, synthetic construct
  source 1..19: note = Description of Artificial Sequence: Synthetic peptide; note = XENP020644 vhCDR2
EIRTKANNHATYYAESVKG

SEQ ID NO: 20089 - protein, 10 aa, synthetic construct
  source 1..10: note = Description of Artificial Sequence: Synthetic peptide; note = XENP020644 vhCDR3
LANWDWYFDV

SEQ ID NO: 20090 - protein, 218 aa, synthetic construct
  source 1..218: note = Description of Artificial Sequence: Synthetic polypeptide; note = XENP020644 7G8_H0_L0.40_IgG1_PVA_/S267K Light Chain
DTVLTQSPASLAVSLGQRATISCKASQSVDYDGHSYMNWYQQKPGQPPKLLIYAASNLESGIPARLSGSGSGTDFTLNIHPVEEEDAATYYCQQSNEDPFTFGSGTKLEVKRTVAAPSVFIFPPSDEQLKSGTASVVCLLNNFYPREAKVQWKVDNALQSGNSQESVTEQDSKDSTYSLSSTLTLSKADYEKHKVYACEVTHQGLSSPVTKSFNRGEC

SEQ ID NO: 20091 - protein, 111 aa, synthetic construct
  source 1..111: note = Description of Artificial Sequence: Synthetic polypeptide; note = VL of XENP020644
DTVLTQSPASLAVSLGQRATISCKASQSVDYDGHSYMNWYQQKPGQPPKLLIYAASNLESGIPARLSGSGSGTDFTLNIHPVEEEDAATYYCQQSNEDPFTFGSGTKLEVK

SEQ ID NO: 20092 - protein, 15 aa, synthetic construct
  source 1..15: note = Description of Artificial Sequence: Synthetic peptide; note = XENP020644 vlCDR1
KASQSVDYDGHSYMN

SEQ ID NO: 20093 - protein, 7 aa, synthetic construct
  source 1..7: note = Description of Artificial Sequence: Synthetic peptide; note = XENP020644 vlCDR2
AASNLES

SEQ ID NO: 20094 - protein, 9 aa, synthetic construct
  source 1..9: note = Description of Artificial Sequence: Synthetic peptide; note = XENP020644 vlCDR3
QQSNEDPFT

SEQ ID NO: 20095 - protein, 450 aa, synthetic construct; identical to SEQ ID NO: 17585
  source 1..450: note = Description of Artificial Sequence: Synthetic polypeptide; note = XENP020645 7G8_H0_L0.41_IgG1_PVA_/S267K Heavy Chain

SEQ ID NO: 20096 - protein, 121 aa, synthetic construct; identical to SEQ ID NO: 17586
  source 1..121: note = Description of Artificial Sequence: Synthetic polypeptide; note = VH of XENP020645

SEQ ID NO: 20097 - protein, 5 aa, synthetic construct
  source 1..5: note = Description of Artificial Sequence: Synthetic peptide; note = XENP020645 vhCDR1
DAWMD

SEQ ID NO: 20098 - protein, 19 aa, synthetic construct
  source 1..19: note = Description of Artificial Sequence: Synthetic peptide; note = XENP020645 vhCDR2
EIRTKANNHATYYAESVKG

SEQ ID NO: 20099 - protein, 10 aa, synthetic construct
  source 1..10: note = Description of Artificial Sequence: Synthetic peptide; note = XENP020645 vhCDR3
LANWDWYFDV

SEQ ID NO: 20100 - protein, 218 aa, synthetic construct
  source 1..218: note = Description of Artificial Sequence: Synthetic polypeptide; note = XENP020645 7G8_H0_L0.41_IgG1_PVA_/S267K Light Chain
DTVLTQSPASLAVSLGQRATISCKASQSVDYDGSSYMNWYQQKPGQPPKLLIYAASNLESGIPARLSGSGSGTDFTLNIHPVEEEDAATYYCQQSNEDPFTFGSGTKLEVKRTVAAPSVFIFPPSDEQLKSGTASVVCLLNNFYPREAKVQWKVDNALQSGNSQESVTEQDSKDSTYSLSSTLTLSKADYEKHKVYACEVTHQGLSSPVTKSFNRGEC

SEQ ID NO: 20101 - protein, 111 aa, synthetic construct
  source 1..111: note = Description of Artificial Sequence: Synthetic polypeptide; note = VL of XENP020645
DTVLTQSPASLAVSLGQRATISCKASQSVDYDGSSYMNWYQQKPGQPPKLLIYAASNLESGIPARLSGSGSGTDFTLNIHPVEEEDAATYYCQQSNEDPFTFGSGTKLEVK

SEQ ID NO: 20102 - protein, 15 aa, synthetic construct
  source 1..15: note = Description of Artificial Sequence: Synthetic peptide; note = XENP020645 vlCDR1
KASQSVDYDGSSYMN

SEQ ID NO: 20103 - protein, 7 aa, synthetic construct
  source 1..7: note = Description of Artificial Sequence: Synthetic peptide; note = XENP020645 vlCDR2
AASNLES

SEQ ID NO: 20104 - protein, 9 aa, synthetic construct
  source 1..9: note = Description of Artificial Sequence: Synthetic peptide; note = XENP020645 vlCDR3
QQSNEDPFT

SEQ ID NO: 20105 - protein, 450 aa, synthetic construct; identical to SEQ ID NO: 17585
  source 1..450: note = Description of Artificial Sequence: Synthetic polypeptide; note = XENP020646 7G8_H0_L0.42_IgG1_PVA_/S267K Heavy Chain

SEQ ID NO: 20106 - protein, 121 aa, synthetic construct; identical to SEQ ID NO: 17586
  source 1..121: note = Description of Artificial Sequence: Synthetic polypeptide; note = VH of XENP020646

SEQ ID NO: 20107 - protein, 5 aa, synthetic construct
  source 1..5: note = Description of Artificial Sequence: Synthetic peptide; note = XENP020646 vhCDR1
DAWMD

SEQ ID NO: 20108 - protein, 19 aa, synthetic construct
  source 1..19: note = Description of Artificial Sequence: Synthetic peptide; note = XENP020646 vhCDR2
EIRTKANNHATYYAESVKG

SEQ ID NO: 20109 - protein, 10 aa, synthetic construct
  source 1..10: note = Description of Artificial Sequence: Synthetic peptide; note = XENP020646 vhCDR3
LANWDWYFDV

SEQ ID NO: 20110 - protein, 218 aa, synthetic construct
  source 1..218: note = Description of Artificial Sequence: Synthetic polypeptide; note = XENP020646 7G8_H0_L0.42_IgG1_PVA_/S267K Light Chain
DTVLTQSPASLAVSLGQRATISCKASQSVDYDGRSYMNWYQQKPGQPPKLLIYAASNLESGIPARLSGSGSGTDFTLNIHPVEEEDAATYYCQQSNEDPFTFGSGTKLEVKRTVAAPSVFIFPPSDEQLKSGTASVVCLLNNFYPREAKVQWKVDNALQSGNSQESVTEQDSKDSTYSLSSTLTLSKADYEKHKVYACEVTHQGLSSPVTKSFNRGEC

SEQ ID NO: 20111 - protein, 111 aa, synthetic construct
  source 1..111: note = Description of Artificial Sequence: Synthetic polypeptide; note = VL of XENP020646
DTVLTQSPASLAVSLGQRATISCKASQSVDYDGRSYMNWYQQKPGQPPKLLIYAASNLESGIPARLSGSGSGTDFTLNIHPVEEEDAATYYCQQSNEDPFTFGSGTKLEVK

SEQ ID NO: 20112 - protein, 15 aa, synthetic construct
  source 1..15: note = Description of Artificial Sequence: Synthetic peptide; note = XENP020646 vlCDR1
KASQSVDYDGRSYMN

SEQ ID NO: 20113 - protein, 7 aa, synthetic construct
  source 1..7: note = Description of Artificial Sequence: Synthetic peptide; note = XENP020646 vlCDR2
AASNLES

SEQ ID NO: 20114 - protein, 9 aa, synthetic construct
  source 1..9: note = Description of Artificial Sequence: Synthetic peptide; note = XENP020646 vlCDR3
QQSNEDPFT

SEQ ID NO: 20115 - protein, 450 aa, synthetic construct; identical to SEQ ID NO: 17585
  source 1..450: note = Description of Artificial Sequence: Synthetic polypeptide; note = XENP020647 7G8_H0_L0.43_IgG1_PVA_/S267K Heavy Chain

SEQ ID NO: 20116 - protein, 121 aa, synthetic construct; identical to SEQ ID NO: 17586
  source 1..121: note = Description of Artificial Sequence: Synthetic polypeptide; note = VH of XENP020647

SEQ ID NO: 20117 - protein, 5 aa, synthetic construct
  source 1..5: note = Description of Artificial Sequence: Synthetic peptide; note = XENP020647 vhCDR1
DAWMD

SEQ ID NO: 20118 - protein, 19 aa, synthetic construct
  source 1..19: note = Description of Artificial Sequence: Synthetic peptide; note = XENP020647 vhCDR2
EIRTKANNHATYYAESVKG

SEQ ID NO: 20119 - protein, 10 aa, synthetic construct
  source 1..10: note = Description of Artificial Sequence: Synthetic peptide; note = XENP020647 vhCDR3
LANWDWYFDV

SEQ ID NO: 20120 - protein, 218 aa, synthetic construct
  source 1..218: note = Description of Artificial Sequence: Synthetic polypeptide; note = XENP020647 7G8_H0_L0.43_IgG1_PVA_/S267K Light Chain
DTVLTQSPASLAVSLGQRATISCKASQSVDYDGLSYMNWYQQKPGQPPKLLIYAASNLESGIPARLSGSGSGTDFTLNIHPVEEEDAATYYCQQSNEDPFTFGSGTKLEVKRTVAAPSVFIFPPSDEQLKSGTASVVCLLNNFYPREAKVQWKVDNALQSGNSQESVTEQDSKDSTYSLSSTLTLSKADYEKHKVYACEVTHQGLSSPVTKSFNRGEC

SEQ ID NO: 20121 - protein, 111 aa, synthetic construct
  source 1..111: note = Description of Artificial Sequence: Synthetic polypeptide; note = VL of XENP020647
DTVLTQSPASLAVSLGQRATISCKASQSVDYDGLSYMNWYQQKPGQPPKLLIYAASNLESGIPARLSGSGSGTDFTLNIHPVEEEDAATYYCQQSNEDPFTFGSGTKLEVK

SEQ ID NO: 20122 - protein, 15 aa, synthetic construct
  source 1..15: note = Description of Artificial Sequence: Synthetic peptide; note = XENP020647 vlCDR1
KASQSVDYDGLSYMN

SEQ ID NO: 20123 - protein, 7 aa, synthetic construct
  source 1..7: note = Description of Artificial Sequence: Synthetic peptide; note = XENP020647 vlCDR2
AASNLES

SEQ ID NO: 20124 - protein, 9 aa, synthetic construct
  source 1..9: note = Description of Artificial Sequence: Synthetic peptide; note = XENP020647 vlCDR3
QQSNEDPFT

SEQ ID NO: 20125 - protein, 450 aa, synthetic construct; identical to SEQ ID NO: 17585
  source 1..450: note = Description of Artificial Sequence: Synthetic polypeptide; note = XENP020648 7G8_H0_L0.44_IgG1_PVA_/S267K Heavy Chain

SEQ ID NO: 20126 - protein, 121 aa, synthetic construct; identical to SEQ ID NO: 17586
  source 1..121: note = Description of Artificial Sequence: Synthetic polypeptide; note = VH of XENP020648

SEQ ID NO: 20127 - protein, 5 aa, synthetic construct
  source 1..5: note = Description of Artificial Sequence: Synthetic peptide; note = XENP020648 vhCDR1
DAWMD

SEQ ID NO: 20128 - protein, 19 aa, synthetic construct
  source 1..19: note = Description of Artificial Sequence: Synthetic peptide; note = XENP020648 vhCDR2
EIRTKANNHATYYAESVKG

SEQ ID NO: 20129 - protein, 10 aa, synthetic construct
  source 1..10: note = Description of Artificial Sequence: Synthetic peptide; note = XENP020648 vhCDR3
LANWDWYFDV

SEQ ID NO: 20130 - protein, 218 aa, synthetic construct
  source 1..218: note = Description of Artificial Sequence: Synthetic polypeptide; note = XENP020648 7G8_H0_L0.44_IgG1_PVA_/S267K Light Chain
DTVLTQSPASLAVSLGQRATISCKASQSVDYDGTSYMNWYQQKPGQPPKLLIYAASNLESGIPARLSGSGSGTDFTLNIHPVEEEDAATYYCQQSNEDPFTFGSGTKLEVKRTVAAPSVFIFPPSDEQLKSGTASVVCLLNNFYPREAKVQWKVDNALQSGNSQESVTEQDSKDSTYSLSSTLTLSKADYEKHKVYACEVTHQGLSSPVTKSFNRGEC

SEQ ID NO: 20131 - protein, 111 aa, synthetic construct
  source 1..111: note = Description of Artificial Sequence: Synthetic polypeptide; note = VL of XENP020648
DTVLTQSPASLAVSLGQRATISCKASQSVDYDGTSYMNWYQQKPGQPPKLLIYAASNLESGIPARLSGSGSGTDFTLNIHPVEEEDAATYYCQQSNEDPFTFGSGTKLEVK

SEQ ID NO: 20132 - protein, 15 aa, synthetic construct
  source 1..15: note = Description of Artificial Sequence: Synthetic peptide; note = XENP020648 vlCDR1
KASQSVDYDGTSYMN

SEQ ID NO: 20133 - protein, 7 aa, synthetic construct
  source 1..7: note = Description of Artificial Sequence: Synthetic peptide; note = XENP020648 vlCDR2
AASNLES

SEQ ID NO: 20134 - protein, 9 aa, synthetic construct
  source 1..9: note = Description of Artificial Sequence: Synthetic peptide; note = XENP020648 vlCDR3
QQSNEDPFT

SEQ ID NO: 20135 - protein, 450 aa, synthetic construct; identical to SEQ ID NO: 17585
  source 1..450: note = Description of Artificial Sequence: Synthetic polypeptide; note = XENP020649 7G8_H0_L0.45_IgG1_PVA_/S267K Heavy Chain

SEQ ID NO: 20136 - protein, 121 aa, synthetic construct; identical to SEQ ID NO: 17586
  source 1..121: note = Description of Artificial Sequence: Synthetic polypeptide; note = VH of XENP020649

SEQ ID NO: 20137 - protein, 5 aa, synthetic construct
  source 1..5: note = Description of Artificial Sequence: Synthetic peptide; note = XENP020649 vhCDR1
DAWMD

SEQ ID NO: 20138 - protein, 19 aa, synthetic construct
  source 1..19: note = Description of Artificial Sequence: Synthetic peptide; note = XENP020649 vhCDR2
EIRTKANNHATYYAESVKG

SEQ ID NO: 20139 - protein, 10 aa, synthetic construct
  source 1..10: note = Description of Artificial Sequence: Synthetic peptide; note = XENP020649 vhCDR3
LANWDWYFDV

SEQ ID NO: 20140 - protein, 218 aa, synthetic construct
  source 1..218: note = Description of Artificial Sequence: Synthetic polypeptide; note = XENP020649 7G8_H0_L0.45_IgG1_PVA_/S267K Light Chain
DTVLTQSPASLAVSLGQRATISCKASQSVDYDGGSYMNWYQQKPGQPPKLLIYAASNLESGIPARLSGSGSGTDFTLNIHPVEEEDAATYYCQQSNEDPFTFGSGTKLEVKRTVAAPSVFIFPPSDEQLKSGTASVVCLLNNFYPREAKVQWKVDNALQSGNSQESVTEQDSKDSTYSLSSTLTLSKADYEKHKVYACEVTHQGLSSPVTKSFNRGEC

SEQ ID NO: 20141 - protein, 111 aa, synthetic construct
  source 1..111: note = Description of Artificial Sequence: Synthetic polypeptide; note = VL of XENP020649
DTVLTQSPASLAVSLGQRATISCKASQSVDYDGGSYMNWYQQKPGQPPKLLIYAASNLESGIPARLSGSGSGTDFTLNIHPVEEEDAATYYCQQSNEDPFTFGSGTKLEVK

SEQ ID NO: 20142 - protein, 15 aa, synthetic construct
  source 1..15: note = Description of Artificial Sequence: Synthetic peptide; note = XENP020649 vlCDR1
KASQSVDYDGGSYMN

SEQ ID NO: 20143 - protein, 7 aa, synthetic construct
  source 1..7: note = Description of Artificial Sequence: Synthetic peptide; note = XENP020649 vlCDR2
AASNLES

SEQ ID NO: 20144 - protein, 9 aa, synthetic construct
  source 1..9: note = Description of Artificial Sequence: Synthetic peptide; note = XENP020649 vlCDR3
QQSNEDPFT

SEQ ID NO: 20145 - protein, 450 aa, synthetic construct; identical to SEQ ID NO: 17585
  source 1..450: note = Description of Artificial Sequence: Synthetic polypeptide; note = XENP020650 7G8_H0_L0.46_IgG1_PVA_/S267K Heavy Chain

SEQ ID NO: 20146 - protein, 121 aa, synthetic construct; identical to SEQ ID NO: 17586
  source 1..121: note = Description of Artificial Sequence: Synthetic polypeptide; note = VH of XENP020650

SEQ ID NO: 20147 - protein, 5 aa, synthetic construct
  source 1..5: note = Description of Artificial Sequence: Synthetic peptide; note = XENP020650 vhCDR1
DAWMD

SEQ ID NO: 20148 - protein, 19 aa, synthetic construct
  source 1..19: note = Description of Artificial Sequence: Synthetic peptide; note = XENP020650 vhCDR2
EIRTKANNHATYYAESVKG

SEQ ID NO: 20149 - protein, 10 aa, synthetic construct
  source 1..10: note = Description of Artificial Sequence: Synthetic peptide; note = XENP020650 vhCDR3
LANWDWYFDV

SEQ ID NO: 20150 - protein, 218 aa, synthetic construct
  source 1..218: note = Description of Artificial Sequence: Synthetic polypeptide; note = XENP020650 7G8_H0_L0.46_IgG1_PVA_/S267K Light Chain
DTVLTQSPASLAVSLGQRATISCKASQSVDYDGYSYMNWYQQKPGQPPKLLIYAASNLESGIPARLSGSGSGTDFTLNIHPVEEEDAATYYCQQSNEDPFTFGSGTKLEVKRTVAAPSVFIFPPSDEQLKSGTASVVCLLNNFYPREAKVQWKVDNALQSGNSQESVTEQDSKDSTYSLSSTLTLSKADYEKHKVYACEVTHQGLSSPVTKSFNRGEC

SEQ ID NO: 20151 - protein, 111 aa, synthetic construct
  source 1..111: note = Description of Artificial Sequence: Synthetic polypeptide; note = VL of XENP020650
DTVLTQSPASLAVSLGQRATISCKASQSVDYDGYSYMNWYQQKPGQPPKLLIYAASNLESGIPARLSGSGSGTDFTLNIHPVEEEDAATYYCQQSNEDPFTFGSGTKLEVK

SEQ ID NO: 20152 - protein, 15 aa, synthetic construct
  source 1..15: note = Description of Artificial Sequence: Synthetic peptide; note = XENP020650 vlCDR1
KASQSVDYDGYSYMN

SEQ ID NO: 20153 - protein, 7 aa, synthetic construct
  source 1..7: note = Description of Artificial Sequence: Synthetic peptide; note = XENP020650 vlCDR2
AASNLES

SEQ ID NO: 20154 - protein, 9 aa, synthetic construct
  source 1..9: note = Description of Artificial Sequence: Synthetic peptide; note = XENP020650 vlCDR3
QQSNEDPFT

SEQ ID NO: 20155 - protein, 450 aa, synthetic construct; identical to SEQ ID NO: 17585
  source 1..450: note = Description of Artificial Sequence: Synthetic polypeptide; note = XENP020651 7G8_H0_L0.47_IgG1_PVA_/S267K Heavy Chain

SEQ ID NO: 20156 - protein, 121 aa, synthetic construct; identical to SEQ ID NO: 17586
  source 1..121: note = Description of Artificial Sequence: Synthetic polypeptide; note = VH of XENP020651

SEQ ID NO: 20157 - protein, 5 aa, synthetic construct
  source 1..5: note = Description of Artificial Sequence: Synthetic peptide; note = XENP020651 vhCDR1
DAWMD

SEQ ID NO: 20158 - protein, 19 aa, synthetic construct
  source 1..19: note = Description of Artificial Sequence: Synthetic peptide; note = XENP020651 vhCDR2
EIRTKANNHATYYAESVKG

SEQ ID NO: 20159 - protein, 10 aa, synthetic construct
  source 1..10: note = Description of Artificial Sequence: Synthetic peptide; note = XENP020651 vhCDR3
LANWDWYFDV

SEQ ID NO: 20160 - protein, 218 aa, synthetic construct
  source 1..218: note = Description of Artificial Sequence: Synthetic polypeptide; note = XENP020651 7G8_H0_L0.47_IgG1_PVA_/S267K Light Chain
DTVLTQSPASLAVSLGQRATISCKASQSVDYDGDSYMNWYQQKPGQPPKLLIKAASNLESGIPARLSGSGSGTDFTLNIHPVEEEDAATYYCQQSNEDPFTFGSGTKLEVKRTVAAPSVFIFPPSDEQLKSGTASVVCLLNNFYPREAKVQWKVDNALQSGNSQESVTEQDSKDSTYSLSSTLTLSKADYEKHKVYACEVTHQGLSSPVTKSFNRGEC

SEQ ID NO: 20161 - protein, 111 aa, synthetic construct
  source 1..111: note = Description of Artificial Sequence: Synthetic polypeptide; note = VL of XENP020651
DTVLTQSPASLAVSLGQRATISCKASQSVDYDGDSYMNWYQQKPGQPPKLLIKAASNLESGIPARLSGSGSGTDFTLNIHPVEEEDAATYYCQQSNEDPFTFGSGTKLEVK

SEQ ID NO: 20162 - protein, 15 aa, synthetic construct
  source 1..15: note = Description of Artificial Sequence: Synthetic peptide; note = XENP020651 vlCDR1
KASQSVDYDGDSYMN

SEQ ID NO: 20163 - protein, 7 aa, synthetic construct
  source 1..7: note = Description of Artificial Sequence: Synthetic peptide; note = XENP020651 vlCDR2
AASNLES

SEQ ID NO: 20164 - protein, 9 aa, synthetic construct
  source 1..9: note = Description of Artificial Sequence: Synthetic peptide; note = XENP020651 vlCDR3
QQSNEDPFT

SEQ ID NO: 20165 - protein, 450 aa, synthetic construct; identical to SEQ ID NO: 17585
  source 1..450: note = Description of Artificial Sequence: Synthetic polypeptide; note = XENP020652 7G8_H0_L0.48_IgG1_PVA_/S267K Heavy Chain

SEQ ID NO: 20166 - protein, 121 aa, synthetic construct; identical to SEQ ID NO: 17586
  source 1..121: note = Description of Artificial Sequence: Synthetic polypeptide; note = VH of XENP020652

SEQ ID NO: 20167 - protein, 5 aa, synthetic construct
  source 1..5: note = Description of Artificial Sequence: Synthetic peptide; note = XENP020652 vhCDR1
DAWMD

SEQ ID NO: 20168 - protein, 19 aa, synthetic construct
  source 1..19: note = Description of Artificial Sequence: Synthetic peptide; note = XENP020652 vhCDR2
EIRTKANNHATYYAESVKG

SEQ ID NO: 20169 - protein, 10 aa, synthetic construct
  source 1..10: note = Description of Artificial Sequence: Synthetic peptide; note = XENP020652 vhCDR3
LANWDWYFDV

SEQ ID NO: 20170 - protein, 218 aa, synthetic construct
  source 1..218: note = Description of Artificial Sequence: Synthetic polypeptide; note = XENP020652 7G8_H0_L0.48_IgG1_PVA_/S267K Light Chain
DTVLTQSPASLAVSLGQRATISCKASQSVDYDGDSYMNWYQQKPGQPPKLLIYSASNLESGIPARLSGSGSGTDFTLNIHPVEEEDAATYYCQQSNEDPFTFGSGTKLEVKRTVAAPSVFIFPPSDEQLKSGTASVVCLLNNFYPREAKVQWKVDNALQSGNSQESVTEQDSKDSTYSLSSTLTLSKADYEKHKVYACEVTHQGLSSPVTKSFNRGEC

SEQ ID NO: 20171 - protein, 111 aa, synthetic construct
  source 1..111: note = Description of Artificial Sequence: Synthetic polypeptide; note = VL of XENP020652
DTVLTQSPASLAVSLGQRATISCKASQSVDYDGDSYMNWYQQKPGQPPKLLIYSASNLESGIPARLSGSGSGTDFTLNIHPVEEEDAATYYCQQSNEDPFTFGSGTKLEVK

SEQ ID NO: 20172 - protein, 15 aa, synthetic construct
  source 1..15: note = Description of Artificial Sequence: Synthetic peptide; note = XENP020652 vlCDR1
KASQSVDYDGDSYMN

SEQ ID NO: 20173 - protein, 7 aa, synthetic construct
  source 1..7: note = Description of Artificial Sequence: Synthetic peptide; note = XENP020652 vlCDR2
SASNLES

SEQ ID NO: 20174 - protein, 9 aa, synthetic construct
  source 1..9: note = Description of Artificial Sequence: Synthetic peptide; note = XENP020652 vlCDR3
QQSNEDPFT

SEQ ID NO: 20175 - protein, 450 aa, synthetic construct; identical to SEQ ID NO: 17585
  source 1..450: note = Description of Artificial Sequence: Synthetic polypeptide; note = XENP020653 7G8_H0_L0.49_IgG1_PVA_/S267K Heavy Chain

SEQ ID NO: 20176 - protein, 121 aa, synthetic construct; identical to SEQ ID NO: 17586
  source 1..121: note = Description of Artificial Sequence: Synthetic polypeptide; note = VH of XENP020653

SEQ ID NO: 20177 - protein, 5 aa, synthetic construct
  source 1..5: note = Description of Artificial Sequence: Synthetic peptide; note = XENP020653 vhCDR1
DAWMD

SEQ ID NO: 20178 - protein, 19 aa, synthetic construct
  source 1..19: note = Description of Artificial Sequence: Synthetic peptide; note = XENP020653 vhCDR2
EIRTKANNHATYYAESVKG

SEQ ID NO: 20179 - protein, 10 aa, synthetic construct
  source 1..10: note = Description of Artificial Sequence: Synthetic peptide; note = XENP020653 vhCDR3
LANWDWYFDV

SEQ ID NO: 20180 - protein, 218 aa, synthetic construct
  source 1..218: note = Description of Artificial Sequence: Synthetic polypeptide; note = XENP020653 7G8_H0_L0.49_IgG1_PVA_/S267K Light Chain
DTVLTQSPASLAVSLGQRATISCKASQSVDYDGDSYMNWYQQKPGQPPKLLIYTASNLESGIPARLSGSGSGTDFTLNIHPVEEEDAATYYCQQSNEDPFTFGSGTKLEVKRTVAAPSVFIFPPSDEQLKSGTASVVCLLNNFYPREAKVQWKVDNALQSGNSQESVTEQDSKDSTYSLSSTLTLSKADYEKHKVYACEVTHQGLSSPVTKSFNRGEC

SEQ ID NO: 20181 - protein, 111 aa, synthetic construct
  source 1..111: note = Description of Artificial Sequence: Synthetic polypeptide; note = VL of XENP020653
DTVLTQSPASLAVSLGQRATISCKASQSVDYDGDSYMNWYQQKPGQPPKLLIYTASNLESGIPARLSGSGSGTDFTLNIHPVEEEDAATYYCQQSNEDPFTFGSGTKLEVK

SEQ ID NO: 20182 - protein, 15 aa, synthetic construct
  source 1..15: note = Description of Artificial Sequence: Synthetic peptide; note = XENP020653 vlCDR1
KASQSVDYDGDSYMN

SEQ ID NO: 20183 - protein, 7 aa, synthetic construct
  source 1..7: note = Description of Artificial Sequence: Synthetic peptide; note = XENP020653 vlCDR2
TASNLES

SEQ ID NO: 20184 - protein, 9 aa, synthetic construct
  source 1..9: note = Description of Artificial Sequence: Synthetic peptide; note = XENP020653 vlCDR3
QQSNEDPFT

SEQ ID NO: 20185 - protein, 450 aa, synthetic construct; identical to SEQ ID NO: 17585
  source 1..450: note = Description of Artificial Sequence: Synthetic polypeptide; note = XENP020654 7G8_H0_L0.50_IgG1_PVA_/S267K Heavy Chain

SEQ ID NO: 20186 - protein, 121 aa, synthetic construct; identical to SEQ ID NO: 17586
  source 1..121: note = Description of Artificial Sequence: Synthetic polypeptide; note = VH of XENP020654

SEQ ID NO: 20187 - protein, 5 aa, synthetic construct
  source 1..5: note = Description of Artificial Sequence: Synthetic peptide; note = XENP020654 vhCDR1
DAWMD

SEQ ID NO: 20188 - protein, 19 aa, synthetic construct
  source 1..19: note = Description of Artificial Sequence: Synthetic peptide; note = XENP020654 vhCDR2
EIRTKANNHATYYAESVKG

SEQ ID NO: 20189 - protein, 10 aa, synthetic construct
  source 1..10: note = Description of Artificial Sequence: Synthetic peptide; note = XENP020654 vhCDR3
LANWDWYFDV

SEQ ID NO: 20190 - protein, 218 aa, synthetic construct
  source 1..218: note = Description of Artificial Sequence: Synthetic polypeptide; note = XENP020654 7G8_H0_L0.50_IgG1_PVA_/S267K Light Chain
DTVLTQSPASLAVSLGQRATISCKASQSVDYDGDSYMNWYQQKPGQPPKLLIYGASNLESGIPARLSGSGSGTDFTLNIHPVEEEDAATYYCQQSNEDPFTFGSGTKLEVKRTVAAPSVFIFPPSDEQLKSGTASVVCLLNNFYPREAKVQWKVDNALQSGNSQESVTEQDSKDSTYSLSSTLTLSKADYEKHKVYACEVTHQGLSSPVTKSFNRGEC

SEQ ID NO: 20191 - protein, 111 aa, synthetic construct
  source 1..111: note = Description of Artificial Sequence: Synthetic polypeptide; note = VL of XENP020654
DTVLTQSPASLAVSLGQRATISCKASQSVDYDGDSYMNWYQQKPGQPPKLLIYGASNLESGIPARLSGSGSGTDFTLNIHPVEEEDAATYYCQQSNEDPFTFGSGTKLEVK

SEQ ID NO: 20192 - protein, 15 aa, synthetic construct
  source 1..15: note = Description of Artificial Sequence: Synthetic peptide; note = XENP020654 vlCDR1
KASQSVDYDGDSYMN

SEQ ID NO: 20193 - protein, 7 aa, synthetic construct
  source 1..7: note = Description of Artificial Sequence: Synthetic peptide; note = XENP020654 vlCDR2
GASNLES

SEQ ID NO: 20194 - protein, 9 aa, synthetic construct
  source 1..9: note = Description of Artificial Sequence: Synthetic peptide; note = XENP020654 vlCDR3
QQSNEDPFT

SEQ ID NO: 20195 - protein, 450 aa, synthetic construct; identical to SEQ ID NO: 17585
  source 1..450: note = Description of Artificial Sequence: Synthetic polypeptide; note = XENP020655 7G8_H0_L0.51_IgG1_PVA_/S267K Heavy Chain

SEQ ID NO: 20196 - protein, 121 aa, synthetic construct; identical to SEQ ID NO: 17586
  source 1..121: note = Description of Artificial Sequence: Synthetic polypeptide; note = VH of XENP020655

SEQ ID NO: 20197 - protein, 5 aa, synthetic construct
  source 1..5: note = Description of Artificial Sequence: Synthetic peptide; note = XENP020655 vhCDR1
DAWMD

SEQ ID NO: 20198 - protein, 19 aa, synthetic construct
  source 1..19: note = Description of Artificial Sequence: Synthetic peptide; note = XENP020655 vhCDR2
EIRTKANNHATYYAESVKG

SEQ ID NO: 20199 - protein, 10 aa, synthetic construct
  source 1..10: note = Description of Artificial Sequence: Synthetic peptide; note = XENP020655 vhCDR3
LANWDWYFDV

SEQ ID NO: 20200 - protein, 218 aa, synthetic construct
  source 1..218: note = Description of Artificial Sequence: Synthetic polypeptide; note = XENP020655 7G8_H0_L0.51_IgG1_PVA_/S267K Light Chain
DTVLTQSPASLAVSLGQRATISCKASQSVDYDGDSYMNWYQQKPGQPPKLLIYHASNLESGIPARLSGSGSGTDFTLNIHPVEEEDAATYYCQQSNEDPFTFGSGTKLEVKRTVAAPSVFIFPPSDEQLKSGTASVVCLLNNFYPREAKVQWKVDNALQSGNSQESVTEQDSKDSTYSLSSTLTLSKADYEKHKVYACEVTHQGLSSPVTKSFNRGEC

SEQ ID NO: 20201 - protein, 111 aa, synthetic construct
  source 1..111: note = Description of Artificial Sequence: Synthetic polypeptide; note = VL of XENP020655
DTVLTQSPASLAVSLGQRATISCKASQSVDYDGDSYMNWYQQKPGQPPKLLIYHASNLESGIPARLSGSGSGTDFTLNIHPVEEEDAATYYCQQSNEDPFTFGSGTKLEVK

SEQ ID NO: 20202 - protein, 15 aa, synthetic construct
  source 1..15: note = Description of Artificial Sequence: Synthetic peptide; note = XENP020655 vlCDR1
KASQSVDYDGDSYMN

SEQ ID NO: 20203 - protein, 7 aa, synthetic construct
  source 1..7: note = Description of Artificial Sequence: Synthetic peptide; note = XENP020655 vlCDR2
HASNLES

SEQ ID NO: 20204 - protein, 9 aa, synthetic construct
  source 1..9: note = Description of Artificial Sequence: Synthetic peptide; note = XENP020655 vlCDR3
QQSNEDPFT

SEQ ID NO: 20205 - protein, 450 aa, synthetic construct; identical to SEQ ID NO: 17585
  source 1..450: note = Description of Artificial Sequence: Synthetic polypeptide; note = XENP020656 7G8_H0_L0.52_IgG1_PVA_/S267K Heavy Chain

SEQ ID NO: 20206 - protein, 121 aa, synthetic construct; identical to SEQ ID NO: 17586
  source 1..121: note = Description of Artificial Sequence: Synthetic polypeptide; note = VH of XENP020656

SEQ ID NO: 20207 - protein, 5 aa, synthetic construct
  source 1..5: note = Description of Artificial Sequence: Synthetic peptide; note = XENP020656 vhCDR1
DAWMD

SEQ ID NO: 20208 - protein, 19 aa, synthetic construct
  source 1..19: note = Description of Artificial Sequence: Synthetic peptide; note = XENP020656 vhCDR2
EIRTKANNHATYYAESVKG

SEQ ID NO: 20209 - protein, 10 aa, synthetic construct
  source 1..10: note = Description of Artificial Sequence: Synthetic peptide; note = XENP020656 vhCDR3
LANWDWYFDV

SEQ ID NO: 20210 - protein, 218 aa, synthetic construct
  source 1..218: note = Description of Artificial Sequence: Synthetic polypeptide; note = XENP020656 7G8_H0_L0.52_IgG1_PVA_/S267K Light Chain
DTVLTQSPASLAVSLGQRATISCKASQSVDYDGDSYMNWYQQKPGQPPKLLIYQASNLESGIPARLSGSGSGTDFTLNIHPVEEEDAATYYCQQSNEDPFTFGSGTKLEVKRTVAAPSVFIFPPSDEQLKSGTASVVCLLNNFYPREAKVQWKVDNALQSGNSQESVTEQDSKDSTYSLSSTLTLSKADYEKHKVYACEVTHQGLSSPVTKSFNRGEC

SEQ ID NO: 20211 - protein, 111 aa, synthetic construct
  source 1..111: note = Description of Artificial Sequence: Synthetic polypeptide; note = VL of XENP020656
DTVLTQSPASLAVSLGQRATISCKASQSVDYDGDSYMNWYQQKPGQPPKLLIYQASNLESGIPARLSGSGSGTDFTLNIHPVEEEDAATYYCQQSNEDPFTFGSGTKLEVK

SEQ ID NO: 20212 - protein, 15 aa, synthetic construct
  source 1..15: note = Description of Artificial Sequence: Synthetic peptide; note = XENP020656 vlCDR1
KASQSVDYDGDSYMN

SEQ ID NO: 20213 - protein, 7 aa, synthetic construct
  source 1..7: note = Description of Artificial Sequence: Synthetic peptide; note = XENP020656 vlCDR2
QASNLES

SEQ ID NO: 20214 - protein, 9 aa, synthetic construct
  source 1..9: note = Description of Artificial Sequence: Synthetic peptide; note = XENP020656 vlCDR3
QQSNEDPFT

SEQ ID NO: 20215 - protein, 450 aa, synthetic construct; identical to SEQ ID NO: 17585
  source 1..450: note = Description of Artificial Sequence: Synthetic polypeptide; note = XENP020657 7G8_H0_L0.53_IgG1_PVA_/S267K Heavy Chain

SEQ ID NO: 20216 - protein, 121 aa, synthetic construct; identical to SEQ ID NO: 17586
  source 1..121: note = Description of Artificial Sequence: Synthetic polypeptide; note = VH of XENP020657

SEQ ID NO: 20217 - protein, 5 aa, synthetic construct
  source 1..5: note = Description of Artificial Sequence: Synthetic peptide; note = XENP020657 vhCDR1
DAWMD

SEQ ID NO: 20218 - protein, 19 aa, synthetic construct
  source 1..19: note = Description of Artificial Sequence: Synthetic peptide; note = XENP020657 vhCDR2
EIRTKANNHATYYAESVKG

SEQ ID NO: 20219 - protein, 10 aa, synthetic construct
  source 1..10: note = Description of Artificial Sequence: Synthetic peptide; note = XENP020657 vhCDR3
LANWDWYFDV

SEQ ID NO: 20220 - protein, 218 aa, synthetic construct
  source 1..218: note = Description of Artificial Sequence: Synthetic polypeptide; note = XENP020657 7G8_H0_L0.53_IgG1_PVA_/S267K Light Chain
DTVLTQSPASLAVSLGQRATISCKASQSVDYDGDSYMNWYQQKPGQPPKLLIYDASNLESGIPARLSGSGSGTDFTLNIHPVEEEDAATYYCQQSNEDPFTFGSGTKLEVKRTVAAPSVFIFPPSDEQLKSGTASVVCLLNNFYPREAKVQWKVDNALQSGNSQESVTEQDSKDSTYSLSSTLTLSKADYEKHKVYACEVTHQGLSSPVTKSFNRGEC

SEQ ID NO: 20221 - protein, 111 aa, synthetic construct
  source 1..111: note = Description of Artificial Sequence: Synthetic polypeptide; note = VL of XENP020657
DTVLTQSPASLAVSLGQRATISCKASQSVDYDGDSYMNWYQQKPGQPPKLLIYDASNLESGIPARLSGSGSGTDFTLNIHPVEEEDAATYYCQQSNEDPFTFGSGTKLEVK

SEQ ID NO: 20222 - protein, 15 aa, synthetic construct
  source 1..15: note = Description of Artificial Sequence: Synthetic peptide; note = XENP020657 vlCDR1
KASQSVDYDGDSYMN

SEQ ID NO: 20223 - protein, 7 aa, synthetic construct
  source 1..7: note = Description of Artificial Sequence: Synthetic peptide; note = XENP020657 vlCDR2
DASNLES

SEQ ID NO: 20224 - protein, 9 aa, synthetic construct
  source 1..9: note = Description of Artificial Sequence: Synthetic peptide; note = XENP020657 vlCDR3
QQSNEDPFT

SEQ ID NO: 20225 - protein, 450 aa, synthetic construct; identical to SEQ ID NO: 17585
  source 1..450: note = Description of Artificial Sequence: Synthetic polypeptide; note = XENP020658 7G8_H0_L0.54_IgG1_PVA_/S267K Heavy Chain

SEQ ID NO: 20226 - protein, 121 aa, synthetic construct; identical to SEQ ID NO: 17586
  source 1..121: note = Description of Artificial Sequence: Synthetic polypeptide; note = VH of XENP020658

SEQ ID NO: 20227 - protein, 5 aa, synthetic construct
  source 1..5: note = Description of Artificial Sequence: Synthetic peptide; note = XENP020658 vhCDR1
DAWMD

SEQ ID NO: 20228 - protein, 19 aa, synthetic construct
  source 1..19: note = Description of Artificial Sequence: Synthetic peptide; note = XENP020658 vhCDR2
EIRTKANNHATYYAESVKG

SEQ ID NO: 20229 - protein, 10 aa, synthetic construct
  source 1..10: note = Description of Artificial Sequence: Synthetic peptide; note = XENP020658 vhCDR3
LANWDWYFDV

SEQ ID NO: 20230 - protein, 218 aa, synthetic construct
  source 1..218: note = Description of Artificial Sequence: Synthetic polypeptide; note = XENP020658 7G8_H0_L0.54_IgG1_PVA_/S267K Light Chain
DTVLTQSPASLAVSLGQRATISCKASQSVDYDGDSYMNWYQQKPGQPPKLLIYLASNLESGIPARLSGSGSGTDFTLNIHPVEEEDAATYYCQQSNEDPFTFGSGTKLEVKRTVAAPSVFIFPPSDEQLKSGTASVVCLLNNFYPREAKVQWKVDNALQSGNSQESVTEQDSKDSTYSLSSTLTLSKADYEKHKVYACEVTHQGLSSPVTKSFNRGEC

SEQ ID NO: 20231 - protein, 111 aa, synthetic construct
  source 1..111: note = Description of Artificial Sequence: Synthetic polypeptide; note = VL of XENP020658
DTVLTQSPASLAVSLGQRATISCKASQSVDYDGDSYMNWYQQKPGQPPKLLIYLASNLESGIPARLSGSGSGTDFTLNIHPVEEEDAATYYCQQSNEDPFTFGSGTKLEVK

SEQ ID NO: 20232 - protein, 15 aa, synthetic construct
  source 1..15: note = Description of Artificial Sequence: Synthetic peptide; note = XENP020658 vlCDR1
KASQSVDYDGDSYMN

SEQ ID NO: 20233 - protein, 7 aa, synthetic construct
  source 1..7: note = Description of Artificial Sequence: Synthetic peptide; note = XENP020658 vlCDR2
LASNLES

SEQ ID NO: 20234 - protein, 9 aa, synthetic construct
  source 1..9: note = Description of Artificial Sequence: Synthetic peptide; note = XENP020658 vlCDR3
QQSNEDPFT

SEQ ID NO: 20235 - protein, 450 aa, synthetic construct; identical to SEQ ID NO: 17585
  source 1..450: note = Description of Artificial Sequence: Synthetic polypeptide; note = XENP020659 7G8_H0_L0.55_IgG1_PVA_/S267K Heavy Chain

SEQ ID NO: 20236 - protein, 121 aa, synthetic construct; identical to SEQ ID NO: 17586
  source 1..121: note = Description of Artificial Sequence: Synthetic polypeptide; note = VH of XENP020659

SEQ ID NO: 20237 - protein, 5 aa, synthetic construct
  source 1..5: note = Description of Artificial Sequence: Synthetic peptide; note = XENP020659 vhCDR1
DAWMD

SEQ ID NO: 20238 - protein, 19 aa, synthetic construct
  source 1..19: note = Description of Artificial Sequence: Synthetic peptide; note = XENP020659 vhCDR2
EIRTKANNHATYYAESVKG

SEQ ID NO: 20239 - protein, 10 aa, synthetic construct
  source 1..10: note = Description of Artificial Sequence: Synthetic peptide; note = XENP020659 vhCDR3
LANWDWYFDV

SEQ ID NO: 20240 - protein, 218 aa, synthetic construct
  source 1..218: note = Description of Artificial Sequence: Synthetic polypeptide; note = XENP020659 7G8_H0_L0.55_IgG1_PVA_/S267K Light Chain
DTVLTQSPASLAVSLGQRATISCKASQSVDYDGDSYMNWYQQKPGQPPKLLIYKASNLESGIPARLSGSGSGTDFTLNIHPVEEEDAATYYCQQSNEDPFTFGSGTKLEVKRTVAAPSVFIFPPSDEQLKSGTASVVCLLNNFYPREAKVQWKVDNALQSGNSQESVTEQDSKDSTYSLSSTLTLSKADYEKHKVYACEVTHQGLSSPVTKSFNRGEC

SEQ ID NO: 20241 - protein, 111 aa, synthetic construct
  source 1..111: note = Description of Artificial Sequence: Synthetic polypeptide; note = VL of XENP020659
DTVLTQSPASLAVSLGQRATISCKASQSVDYDGDSYMNWYQQKPGQPPKLLIYKASNLESGIPARLSGSGSGTDFTLNIHPVEEEDAATYYCQQSNEDPFTFGSGTKLEVK

SEQ ID NO: 20242 - protein, 15 aa, synthetic construct
  source 1..15: note = Description of Artificial Sequence: Synthetic peptide; note = XENP020659 vlCDR1
KASQSVDYDGDSYMN

SEQ ID NO: 20243 - protein, 7 aa, synthetic construct
  source 1..7: note = Description of Artificial Sequence: Synthetic peptide; note = XENP020659 vlCDR2
KASNLES

SEQ ID NO: 20244 - protein, 9 aa, synthetic construct
  source 1..9: note = Description of Artificial Sequence: Synthetic peptide; note = XENP020659 vlCDR3
QQSNEDPFT

SEQ ID NO: 20245 - protein, 450 aa, synthetic construct; identical to SEQ ID NO: 17585
  source 1..450: note = Description of Artificial Sequence: Synthetic polypeptide; note = XENP020660 7G8_H0_L0.56_IgG1_PVA_/S267K Heavy Chain

SEQ ID NO: 20246 - protein, 121 aa, synthetic construct; identical to SEQ ID NO: 17586
  source 1..121: note = Description of Artificial Sequence: Synthetic polypeptide; note = VH of XENP020660

SEQ ID NO: 20247 - protein, 5 aa, synthetic construct
  source 1..5: note = Description of Artificial Sequence: Synthetic peptide; note = XENP020660 vhCDR1
DAWMD

SEQ ID NO: 20248 - protein, 19 aa, synthetic construct
  source 1..19: note = Description of Artificial Sequence: Synthetic peptide; note = XENP020660 vhCDR2
EIRTKANNHATYYAESVKG

SEQ ID NO: 20249 - protein, 10 aa, synthetic construct
  source 1..10: note = Description of Artificial Sequence: Synthetic peptide; note = XENP020660 vhCDR3
LANWDWYFDV

SEQ ID NO: 20250 - protein, 218 aa, synthetic construct
  source 1..218: note = Description of Artificial Sequence: Synthetic polypeptide; note = XENP020660 7G8_H0_L0.56_IgG1_PVA_/S267K Light Chain
DTVLTQSPASLAVSLGQRATISCKASQSVDYDGDSYMNWYQQKPGQPPKLLIYYASNLESGIPARLSGSGSGTDFTLNIHPVEEEDAATYYCQQSNEDPFTFGSGTKLEVKRTVAAPSVFIFPPSDEQLKSGTASVVCLLNNFYPREAKVQWKVDNALQSGNSQESVTEQDSKDSTYSLSSTLTLSKADYEKHKVYACEVTHQGLSSPVTKSFNRGEC

SEQ ID NO: 20251 - protein, 111 aa, synthetic construct
  source 1..111: note = Description of Artificial Sequence: Synthetic polypeptide; note = VL of XENP020660
DTVLTQSPASLAVSLGQRATISCKASQSVDYDGDSYMNWYQQKPGQPPKLLIYYASNLESGIPARLSGSGSGTDFTLNIHPVEEEDAATYYCQQSNEDPFTFGSGTKLEVK

SEQ ID NO: 20252 - protein, 15 aa, synthetic construct
  source 1..15: note = Description of Artificial Sequence: Synthetic peptide; note = XENP020660 vlCDR1
KASQSVDYDGDSYMN

SEQ ID NO: 20253 - protein, 7 aa, synthetic construct
  source 1..7: note = Description of Artificial Sequence: Synthetic peptide; note = XENP020660 vlCDR2
YASNLES

SEQ ID NO: 20254 - protein, 9 aa, synthetic construct
  source 1..9: note = Description of Artificial Sequence: Synthetic peptide; note = XENP020660 vlCDR3
QQSNEDPFT

SEQ ID NO: 20255 - protein, 450 aa, synthetic construct; identical to SEQ ID NO: 17585
  source 1..450: note = Description of Artificial Sequence: Synthetic polypeptide; note = XENP020661 7G8_H0_L0.57_IgG1_PVA_/S267K Heavy Chain

SEQ ID NO: 20256 - protein, 121 aa, synthetic construct; identical to SEQ ID NO: 17586
  source 1..121: note = Description of Artificial Sequence: Synthetic polypeptide; note = VH of XENP020661

SEQ ID NO: 20257 - protein, 5 aa, synthetic construct
  source 1..5: note = Description of Artificial Sequence: Synthetic peptide; note = XENP020661 vhCDR1
DAWMD

SEQ ID NO: 20258 - protein, 19 aa, synthetic construct
  source 1..19: note = Description of Artificial Sequence: Synthetic peptide; note = XENP020661 vhCDR2
EIRTKANNHATYYAESVKG

SEQ ID NO: 20259 - protein, 10 aa, synthetic construct
  source 1..10: note = Description of Artificial Sequence: Synthetic peptide; note = XENP020661 vhCDR3
LANWDWYFDV

SEQ ID NO: 20260 - protein, 218 aa, synthetic construct
  source 1..218: note = Description of Artificial Sequence: Synthetic polypeptide; note = XENP020661 7G8_H0_L0.57_IgG1_PVA_/S267K Light Chain
DTVLTQSPASLAVSLGQRATISCKASQSVDYDGDSYMNWYQQKPGQPPKLLIYAASDLESGIPARLSGSGSGTDFTLNIHPVEEEDAATYYCQQSNEDPFTFGSGTKLEVKRTVAAPSVFIFPPSDEQLKSGTASVVCLLNNFYPREAKVQWKVDNALQSGNSQESVTEQDSKDSTYSLSSTLTLSKADYEKHKVYACEVTHQGLSSPVTKSFNRGEC

SEQ ID NO: 20261 - protein, 111 aa, synthetic construct
  source 1..111: note = Description of Artificial Sequence: Synthetic polypeptide; note = VL of XENP020661
DTVLTQSPASLAVSLGQRATISCKASQSVDYDGDSYMNWYQQKPGQPPKLLIYAASDLESGIPARLSGSGSGTDFTLNIHPVEEEDAATYYCQQSNEDPFTFGSGTKLEVK

SEQ ID NO: 20262 - protein, 15 aa, synthetic construct
  source 1..15: note = Description of Artificial Sequence: Synthetic peptide; note = XENP020661 vlCDR1
KASQSVDYDGDSYMN

SEQ ID NO: 20263 - protein, 7 aa, synthetic construct
  source 1..7: note = Description of Artificial Sequence: Synthetic peptide; note = XENP020661 vlCDR2
AASDLES

SEQ ID NO: 20264 - protein, 9 aa, synthetic construct
  source 1..9: note = Description of Artificial Sequence: Synthetic peptide; note = XENP020661 vlCDR3
QQSNEDPFT

SEQ ID NO: 20265 - protein, 450 aa, synthetic construct; identical to SEQ ID NO: 17585
  source 1..450: note = Description of Artificial Sequence: Synthetic polypeptide; note = XENP020662 7G8_H0_L0.58_IgG1_PVA_/S267K Heavy Chain

SEQ ID NO: 20266 - protein, 121 aa, synthetic construct; identical to SEQ ID NO: 17586
  source 1..121: note = Description of Artificial Sequence: Synthetic polypeptide; note = VH of XENP020662

SEQ ID NO: 20267 - protein, 5 aa, synthetic construct
  source 1..5: note = Description of Artificial Sequence: Synthetic peptide; note = XENP020662 vhCDR1
DAWMD

SEQ ID NO: 20268 - protein, 19 aa, synthetic construct
  source 1..19: note = Description of Artificial Sequence: Synthetic peptide; note = XENP020662 vhCDR2
EIRTKANNHATYYAESVKG

SEQ ID NO: 20269 - protein, 10 aa, synthetic construct
  source 1..10: note = Description of Artificial Sequence: Synthetic peptide; note = XENP020662 vhCDR3
LANWDWYFDV

SEQ ID NO: 20270 - protein, 218 aa, synthetic construct
  source 1..218: note = Description of Artificial Sequence: Synthetic polypeptide; note = XENP020662 7G8_H0_L0.58_IgG1_PVA_/S267K Light Chain
DTVLTQSPASLAVSLGQRATISCKASQSVDYDGDSYMNWYQQKPGQPPKLLIYAASHLESGIPARLSGSGSGTDFTLNIHPVEEEDAATYYCQQSNEDPFTFGSGTKLEVKRTVAAPSVFIFPPSDEQLKSGTASVVCLLNNFYPREAKVQWKVDNALQSGNSQESVTEQDSKDSTYSLSSTLTLSKADYEKHKVYACEVTHQGLSSPVTKSFNRGEC

SEQ ID NO: 20271 - protein, 111 aa, synthetic construct
  source 1..111: note = Description of Artificial Sequence: Synthetic polypeptide; note = VL of XENP020662
DTVLTQSPASLAVSLGQRATISCKASQSVDYDGDSYMNWYQQKPGQPPKLLIYAASHLESGIPARLSGSGSGTDFTLNIHPVEEEDAATYYCQQSNEDPFTFGSGTKLEVK

SEQ ID NO: 20272 - protein, 15 aa, synthetic construct
  source 1..15: note = Description of Artificial Sequence: Synthetic peptide; note = XENP020662 vlCDR1
KASQSVDYDGDSYMN

SEQ ID NO: 20273 - protein, 7 aa, synthetic construct
  source 1..7: note = Description of Artificial Sequence: Synthetic peptide; note = XENP020662 vlCDR2
AASHLES

SEQ ID NO: 20274 - protein, 9 aa, synthetic construct
  source 1..9: note = Description of Artificial Sequence: Synthetic peptide; note = XENP020662 vlCDR3
QQSNEDPFT

SEQ ID NO: 20275 - protein, 450 aa, synthetic construct; identical to SEQ ID NO: 17585
  source 1..450: note = Description of Artificial Sequence: Synthetic polypeptide; note = XENP020663 7G8_H0_L0.59_IgG1_PVA_/S267K Heavy Chain

SEQ ID NO: 20276 - protein, 121 aa, synthetic construct; identical to SEQ ID NO: 17586
  source 1..121: note = Description of Artificial Sequence: Synthetic polypeptide; note = VH of XENP020663

SEQ ID NO: 20277 - protein, 5 aa, synthetic construct
  source 1..5: note = Description of Artificial Sequence: Synthetic peptide; note = XENP020663 vhCDR1
DAWMD

SEQ ID NO: 20278 - protein, 19 aa, synthetic construct
  source 1..19: note = Description of Artificial Sequence: Synthetic peptide; note = XENP020663 vhCDR2
EIRTKANNHATYYAESVKG

SEQ ID NO: 20279 - protein, 10 aa, synthetic construct
  source 1..10: note = Description of Artificial Sequence: Synthetic peptide; note = XENP020663 vhCDR3
LANWDWYFDV

SEQ ID NO: 20280 - protein, 218 aa, synthetic construct
  source 1..218: note = Description of Artificial Sequence: Synthetic polypeptide; note = XENP020663 7G8_H0_L0.59_IgG1_PVA_/S267K Light Chain
DTVLTQSPASLAVSLGQRATISCKASQSVDYDGDSYMNWYQQKPGQPPKLLIYAASELESGIPARLSGSGSGTDFTLNIHPVEEEDAATYYCQQSNEDPFTFGSGTKLEVKRTVAAPSVFIFPPSDEQLKSGTASVVCLLNNFYPREAKVQWKVDNALQSGNSQESVTEQDSKDSTYSLSSTLTLSKADYEKHKVYACEVTHQGLSSPVTKSFNRGEC

SEQ ID NO: 20281 - protein, 111 aa, synthetic construct
  source 1..111: note = Description of Artificial Sequence: Synthetic polypeptide; note = VL of XENP020663
DTVLTQSPASLAVSLGQRATISCKASQSVDYDGDSYMNWYQQKPGQPPKLLIYAASELESGIPARLSGSGSGTDFTLNIHPVEEEDAATYYCQQSNEDPFTFGSGTKLEVK

SEQ ID NO: 20282 - protein, 15 aa, synthetic construct
  source 1..15: note = Description of Artificial Sequence: Synthetic peptide; note = XENP020663 vlCDR1
KASQSVDYDGDSYMN

SEQ ID NO: 20283 - protein, 7 aa, synthetic construct
  source 1..7: note = Description of Artificial Sequence: Synthetic peptide; note = XENP020663 vlCDR2
AASELES

SEQ ID NO: 20284 - protein, 9 aa, synthetic construct
  source 1..9: note = Description of Artificial Sequence: Synthetic peptide; note = XENP020663 vlCDR3
QQSNEDPFT

SEQ ID NO: 20285 - protein, 450 aa, synthetic construct; identical to SEQ ID NO: 17585
  source 1..450: note = Description of Artificial Sequence: Synthetic polypeptide; note = XENP020664 7G8_H0_L0.60_IgG1_PVA_/S267K Heavy Chain

SEQ ID NO: 20286 - protein, 121 aa, synthetic construct; identical to SEQ ID NO: 17586
  source 1..121: note = Description of Artificial Sequence: Synthetic polypeptide; note = VH of XENP020664

SEQ ID NO: 20287 - protein, 5 aa, synthetic construct
  source 1..5: note = Description of Artificial Sequence: Synthetic peptide; note = XENP020664 vhCDR1
DAWMD

SEQ ID NO: 20288 - protein, 19 aa, synthetic construct
  source 1..19: note = Description of Artificial Sequence: Synthetic peptide; note = XENP020664 vhCDR2
EIRTKANNHATYYAESVKG

SEQ ID NO: 20289 - protein, 10 aa, synthetic construct
  source 1..10: note = Description of Artificial Sequence: Synthetic peptide; note = XENP020664 vhCDR3
LANWDWYFDV

SEQ ID NO: 20290 - protein, 218 aa, synthetic construct
  source 1..218: note = Description of Artificial Sequence: Synthetic polypeptide; note = XENP020664 7G8_H0_L0.60_IgG1_PVA_/S267K Light Chain
DTVLTQSPASLAVSLGQRATISCKASQSVDYDGDSYMNWYQQKPGQPPKLLIYAASSLESGIPARLSGSGSGTDFTLNIHPVEEEDAATYYCQQSNEDPFTFGSGTKLEVKRTVAAPSVFIFPPSDEQLKSGTASVVCLLNNFYPREAKVQWKVDNALQSGNSQESVTEQDSKDSTYSLSSTLTLSKADYEKHKVYACEVTHQGLSSPVTKSFNRGEC

SEQ ID NO: 20291 - protein, 111 aa, synthetic construct
  source 1..111: note = Description of Artificial Sequence: Synthetic polypeptide; note = VL of XENP020664
DTVLTQSPASLAVSLGQRATISCKASQSVDYDGDSYMNWYQQKPGQPPKLLIYAASSLESGIPARLSGSGSGTDFTLNIHPVEEEDAATYYCQQSNEDPFTFGSGTKLEVK

SEQ ID NO: 20292 - protein, 15 aa, synthetic construct
  source 1..15: note = Description of Artificial Sequence: Synthetic peptide; note = XENP020664 vlCDR1
KASQSVDYDGDSYMN

SEQ ID NO: 20293 - protein, 7 aa, synthetic construct
  source 1..7: note = Description of Artificial Sequence: Synthetic peptide; note = XENP020664 vlCDR2
AASSLES

SEQ ID NO: 20294 - protein, 9 aa, synthetic construct
  source 1..9: note = Description of Artificial Sequence: Synthetic peptide; note = XENP020664 vlCDR3
QQSNEDPFT

SEQ ID NO: 20295 - protein, 450 aa, synthetic construct; identical to SEQ ID NO: 17585
  source 1..450: note = Description of Artificial Sequence: Synthetic polypeptide; note = XENP020665 7G8_H0_L0.61_IgG1_PVA_/S267K Heavy Chain

SEQ ID NO: 20296 - protein, 121 aa, synthetic construct; identical to SEQ ID NO: 17586
  source 1..121: note = Description of Artificial Sequence: Synthetic polypeptide; note = VH of XENP020665

SEQ ID NO: 20297 - protein, 5 aa, synthetic construct
  source 1..5: note = Description of Artificial Sequence: Synthetic peptide; note = XENP020665 vhCDR1
DAWMD

SEQ ID NO: 20298 - protein, 19 aa, synthetic construct
  source 1..19: note = Description of Artificial Sequence: Synthetic peptide; note = XENP020665 vhCDR2
EIRTKANNHATYYAESVKG

SEQ ID NO: 20299 - protein, 10 aa, synthetic construct
  source 1..10: note = Description of Artificial Sequence: Synthetic peptide; note = XENP020665 vhCDR3
LANWDWYFDV

SEQ ID NO: 20300 - protein, 218 aa, synthetic construct
  source 1..218: note = Description of Artificial Sequence: Synthetic polypeptide; note = XENP020665 7G8_H0_L0.61_IgG1_PVA_/S267K Light Chain
DTVLTQSPASLAVSLGQRATISCKASQSVDYDGDSYMNWYQQKPGQPPKLLIYAASRLESGIPARLSGSGSGTDFTLNIHPVEEEDAATYYCQQSNEDPFTFGSGTKLEVKRTVAAPSVFIFPPSDEQLKSGTASVVCLLNNFYPREAKVQWKVDNALQSGNSQESVTEQDSKDSTYSLSSTLTLSKADYEKHKVYACEVTHQGLSSPVTKSFNRGEC

SEQ ID NO: 20301 - protein, 111 aa, synthetic construct
  source 1..111: note = Description of Artificial Sequence: Synthetic polypeptide; note = VL of XENP020665
DTVLTQSPASLAVSLGQRATISCKASQSVDYDGDSYMNWYQQKPGQPPKLLIYAASRLESGIPARLSGSGSGTDFTLNIHPVEEEDAATYYCQQSNEDPFTFGSGTKLEVK

SEQ ID NO: 20302 - protein, 15 aa, synthetic construct
  source 1..15: note = Description of Artificial Sequence: Synthetic peptide; note = XENP020665 vlCDR1
KASQSVDYDGDSYMN

SEQ ID NO: 20303 - protein, 7 aa, synthetic construct
  source 1..7: note = Description of Artificial Sequence: Synthetic peptide; note = XENP020665 vlCDR2
AASRLES

SEQ ID NO: 20304 - protein, 9 aa, synthetic construct
  source 1..9: note = Description of Artificial Sequence: Synthetic peptide; note = XENP020665 vlCDR3
QQSNEDPFT

SEQ ID NO: 20305 - protein, 450 aa, synthetic construct; identical to SEQ ID NO: 17585
  source 1..450: note = Description of Artificial Sequence: Synthetic polypeptide; note = XENP020666 7G8_H0_L0.62_IgG1_PVA_/S267K Heavy Chain

SEQ ID NO: 20306 - protein, 121 aa, synthetic construct; identical to SEQ ID NO: 17586
  source 1..121: note = Description of Artificial Sequence: Synthetic polypeptide; note = VH of XENP020666

SEQ ID NO: 20307 - protein, 5 aa, synthetic construct
  source 1..5: note = Description of Artificial Sequence: Synthetic peptide; note = XENP020666 vhCDR1
DAWMD

SEQ ID NO: 20308 - protein, 19 aa, synthetic construct
  source 1..19: note = Description of Artificial Sequence: Synthetic peptide; note = XENP020666 vhCDR2
EIRTKANNHATYYAESVKG

SEQ ID NO: 20309 - protein, 10 aa, synthetic construct
  source 1..10: note = Description of Artificial Sequence: Synthetic peptide; note = XENP020666 vhCDR3
LANWDWYFDV

SEQ ID NO: 20310 - protein, 218 aa, synthetic construct
  source 1..218: note = Description of Artificial Sequence: Synthetic polypeptide; note = XENP020666 7G8_H0_L0.62_IgG1_PVA_/S267K Light Chain
DTVLTQSPASLAVSLGQRATISCKASQSVDYDGDSYMNWYQQKPGQPPKLLIYAASLLESGIPARLSGSGSGTDFTLNIHPVEEEDAATYYCQQSNEDPFTFGSGTKLEVKRTVAAPSVFIFPPSDEQLKSGTASVVCLLNNFYPREAKVQWKVDNALQSGNSQESVTEQDSKDSTYSLSSTLTLSKADYEKHKVYACEVTHQGLSSPVTKSFNRGEC

SEQ ID NO: 20311 - protein, 111 aa, synthetic construct
  source 1..111: note = Description of Artificial Sequence: Synthetic polypeptide; note = VL of XENP020666
DTVLTQSPASLAVSLGQRATISCKASQSVDYDGDSYMNWYQQKPGQPPKLLIYAASLLESGIPARLSGSGSGTDFTLNIHPVEEEDAATYYCQQSNEDPFTFGSGTKLEVK

SEQ ID NO: 20312 - protein, 15 aa, synthetic construct
  source 1..15: note = Description of Artificial Sequence: Synthetic peptide; note = XENP020666 vlCDR1
KASQSVDYDGDSYMN

SEQ ID NO: 20313 - protein, 7 aa, synthetic construct
  source 1..7: note = Description of Artificial Sequence: Synthetic peptide; note = XENP020666 vlCDR2
AASLLES

SEQ ID NO: 20314 - protein, 9 aa, synthetic construct
  source 1..9: note = Description of Artificial Sequence: Synthetic peptide; note = XENP020666 vlCDR3
QQSNEDPFT

SEQ ID NO: 20315 - protein, 450 aa, synthetic construct; identical to SEQ ID NO: 17585
  source 1..450: note = Description of Artificial Sequence: Synthetic polypeptide; note = XENP020667 7G8_H0_L0.63_IgG1_PVA_/S267K Heavy Chain

SEQ ID NO: 20316 - protein, 121 aa, synthetic construct; identical to SEQ ID NO: 17586
  source 1..121: note = Description of Artificial Sequence: Synthetic polypeptide; note = VH of XENP020667

SEQ ID NO: 20317 - protein, 5 aa, synthetic construct
  source 1..5: note = Description of Artificial Sequence: Synthetic peptide; note = XENP020667 vhCDR1
DAWMD

SEQ ID NO: 20318 - protein, 19 aa, synthetic construct
  source 1..19: note = Description of Artificial Sequence: Synthetic peptide; note = XENP020667 vhCDR2
EIRTKANNHATYYAESVKG

SEQ ID NO: 20319 - protein, 10 aa, synthetic construct
  source 1..10: note = Description of Artificial Sequence: Synthetic peptide; note = XENP020667 vhCDR3
LANWDWYFDV

SEQ ID NO: 20320 - protein, 218 aa, synthetic construct
  source 1..218: note = Description of Artificial Sequence: Synthetic polypeptide; note = XENP020667 7G8_H0_L0.63_IgG1_PVA_/S267K Light Chain
DTVLTQSPASLAVSLGQRATISCKASQSVDYDGDSYMNWYQQKPGQPPKLLIYAASTLESGIPARLSGSGSGTDFTLNIHPVEEEDAATYYCQQSNEDPFTFGSGTKLEVKRTVAAPSVFIFPPSDEQLKSGTASVVCLLNNFYPREAKVQWKVDNALQSGNSQESVTEQDSKDSTYSLSSTLTLSKADYEKHKVYACEVTHQGLSSPVTKSFNRGEC

SEQ ID NO: 20321 - protein, 111 aa, synthetic construct
  source 1..111: note = Description of Artificial Sequence: Synthetic polypeptide; note = VL of XENP020667
DTVLTQSPASLAVSLGQRATISCKASQSVDYDGDSYMNWYQQKPGQPPKLLIYAASTLESGIPARLSGSGSGTDFTLNIHPVEEEDAATYYCQQSNEDPFTFGSGTKLEVK

SEQ ID NO: 20322 - protein, 15 aa, synthetic construct
  source 1..15: note = Description of Artificial Sequence: Synthetic peptide; note = XENP020667 vlCDR1
KASQSVDYDGDSYMN

SEQ ID NO: 20323 - protein, 7 aa, synthetic construct
  source 1..7: note = Description of Artificial Sequence: Synthetic peptide; note = XENP020667 vlCDR2
AASTLES

SEQ ID NO: 20324 - protein, 9 aa, synthetic construct
  source 1..9: note = Description of Artificial Sequence: Synthetic peptide; note = XENP020667 vlCDR3
QQSNEDPFT

SEQ ID NO: 20325 - protein, 450 aa, synthetic construct; identical to SEQ ID NO: 17585
  source 1..450: note = Description of Artificial Sequence: Synthetic polypeptide; note = XENP020668 7G8_H0_L0.64_IgG1_PVA_/S267K Heavy Chain

SEQ ID NO: 20326 - protein, 121 aa, synthetic construct; identical to SEQ ID NO: 17586
  source 1..121: note = Description of Artificial Sequence: Synthetic polypeptide; note = VH of XENP020668

SEQ ID NO: 20327 - protein, 5 aa, synthetic construct
  source 1..5: note = Description of Artificial Sequence: Synthetic peptide; note = XENP020668 vhCDR1
DAWMD

SEQ ID NO: 20328 - protein, 19 aa, synthetic construct
  source 1..19: note = Description of Artificial Sequence: Synthetic peptide; note = XENP020668 vhCDR2
EIRTKANNHATYYAESVKG

SEQ ID NO: 20329 - protein, 10 aa, synthetic construct
  source 1..10: note = Description of Artificial Sequence: Synthetic peptide; note = XENP020668 vhCDR3
LANWDWYFDV

SEQ ID NO: 20330 - protein, 218 aa, synthetic construct
  source 1..218: note = Description of Artificial Sequence: Synthetic polypeptide; note = XENP020668 7G8_H0_L0.64_IgG1_PVA_/S267K Light Chain
DTVLTQSPASLAVSLGQRATISCKASQSVDYDGDSYMNWYQQKPGQPPKLLIYAASGLESGIPARLSGSGSGTDFTLNIHPVEEEDAATYYCQQSNEDPFTFGSGTKLEVKRTVAAPSVFIFPPSDEQLKSGTASVVCLLNNFYPREAKVQWKVDNALQSGNSQESVTEQDSKDSTYSLSSTLTLSKADYEKHKVYACEVTHQGLSSPVTKSFNRGEC

SEQ ID NO: 20331 - protein, 111 aa, synthetic construct
  source 1..111: note = Description of Artificial Sequence: Synthetic polypeptide; note = VL of XENP020668
DTVLTQSPASLAVSLGQRATISCKASQSVDYDGDSYMNWYQQKPGQPPKLLIYAASGLESGIPARLSGSGSGTDFTLNIHPVEEEDAATYYCQQSNEDPFTFGSGTKLEVK

SEQ ID NO: 20332 - protein, 15 aa, synthetic construct
  source 1..15: note = Description of Artificial Sequence: Synthetic peptide; note = XENP020668 vlCDR1
KASQSVDYDGDSYMN

SEQ ID NO: 20333 - protein, 7 aa, synthetic construct
  source 1..7: note = Description of Artificial Sequence: Synthetic peptide; note = XENP020668 vlCDR2
AASGLES

SEQ ID NO: 20334 - protein, 9 aa, synthetic construct
  source 1..9: note = Description of Artificial Sequence: Synthetic peptide; note = XENP020668 vlCDR3
QQSNEDPFT

SEQ ID NO: 20335 - protein, 450 aa, synthetic construct; identical to SEQ ID NO: 17585
  source 1..450: note = Description of Artificial Sequence: Synthetic polypeptide; note = XENP020669 7G8_H0_L0.65_IgG1_PVA_/S267K Heavy Chain

SEQ ID NO: 20336 - protein, 121 aa, synthetic construct; identical to SEQ ID NO: 17586
  source 1..121: note = Description of Artificial Sequence: Synthetic polypeptide; note = VH of XENP020669

SEQ ID NO: 20337 - protein, 5 aa, synthetic construct
  source 1..5: note = Description of Artificial Sequence: Synthetic peptide; note = XENP020669 vhCDR1
DAWMD

SEQ ID NO: 20338 - protein, 19 aa, synthetic construct
  source 1..19: note = Description of Artificial Sequence: Synthetic peptide; note = XENP020669 vhCDR2
EIRTKANNHATYYAESVKG

SEQ ID NO: 20339 - protein, 10 aa, synthetic construct
  source 1..10: note = Description of Artificial Sequence: Synthetic peptide; note = XENP020669 vhCDR3
LANWDWYFDV

SEQ ID NO: 20340 - protein, 218 aa, synthetic construct
  source 1..218: note = Description of Artificial Sequence: Synthetic polypeptide; note = XENP020669 7G8_H0_L0.65_IgG1_PVA_/S267K Light Chain
DTVLTQSPASLAVSLGQRATISCKASQSVDYDGDSYMNWYQQKPGQPPKLLIYAASYLESGIPARLSGSGSGTDFTLNIHPVEEEDAATYYCQQSNEDPFTFGSGTKLEVKRTVAAPSVFIFPPSDEQLKSGTASVVCLLNNFYPREAKVQWKVDNALQSGNSQESVTEQDSKDSTYSLSSTLTLSKADYEKHKVYACEVTHQGLSSPVTKSFNRGEC

SEQ ID NO: 20341 - protein, 111 aa, synthetic construct
  source 1..111: note = Description of Artificial Sequence: Synthetic polypeptide; note = VL of XENP020669
DTVLTQSPASLAVSLGQRATISCKASQSVDYDGDSYMNWYQQKPGQPPKLLIYAASYLESGIPARLSGSGSGTDFTLNIHPVEEEDAATYYCQQSNEDPFTFGSGTKLEVK

SEQ ID NO: 20342 - protein, 15 aa, synthetic construct
  source 1..15: note = Description of Artificial Sequence: Synthetic peptide; note = XENP020669 vlCDR1
KASQSVDYDGDSYMN

SEQ ID NO: 20343 - protein, 7 aa, synthetic construct
  source 1..7: note = Description of Artificial Sequence: Synthetic peptide; note = XENP020669 vlCDR2
AASYLES

SEQ ID NO: 20344 - protein, 9 aa, synthetic construct
  source 1..9: note = Description of Artificial Sequence: Synthetic peptide; note = XENP020669 vlCDR3
QQSNEDPFT

SEQ ID NO: 20345 - protein, 450 aa, synthetic construct; identical to SEQ ID NO: 17585
  source 1..450: note = Description of Artificial Sequence: Synthetic polypeptide; note = XENP020670 7G8_H0_L0.66_IgG1_PVA_/S267K Heavy Chain

SEQ ID NO: 20346 - protein, 121 aa, synthetic construct; identical to SEQ ID NO: 17586
  source 1..121: note = Description of Artificial Sequence: Synthetic polypeptide; note = VH of XENP020670

SEQ ID NO: 20347 - protein, 5 aa, synthetic construct
  source 1..5: note = Description of Artificial Sequence: Synthetic peptide; note = XENP020670 vhCDR1
DAWMD

SEQ ID NO: 20348 - protein, 19 aa, synthetic construct
  source 1..19: note = Description of Artificial Sequence: Synthetic peptide; note = XENP020670 vhCDR2
EIRTKANNHATYYAESVKG

SEQ ID NO: 20349 - protein, 10 aa, synthetic construct
  source 1..10: note = Description of Artificial Sequence: Synthetic peptide; note = XENP020670 vhCDR3
LANWDWYFDV

SEQ ID NO: 20350 - protein, 218 aa, synthetic construct
  source 1..218: note = Description of Artificial Sequence: Synthetic polypeptide; note = XENP020670 7G8_H0_L0.66_IgG1_PVA_/S267K Light Chain
DTVLTQSPASLAVSLGQRATISCKASQSVDYDGDSYMNWYQQKPGQPPKLLIYAASNLQSGIPARLSGSGSGTDFTLNIHPVEEEDAATYYCQQSNEDPFTFGSGTKLEVKRTVAAPSVFIFPPSDEQLKSGTASVVCLLNNFYPREAKVQWKVDNALQSGNSQESVTEQDSKDSTYSLSSTLTLSKADYEKHKVYACEVTHQGLSSPVTKSFNRGEC

SEQ ID NO: 20351 - protein, 111 aa, synthetic construct
  source 1..111: note = Description of Artificial Sequence: Synthetic polypeptide; note = VL of XENP020670
DTVLTQSPASLAVSLGQRATISCKASQSVDYDGDSYMNWYQQKPGQPPKLLIYAASNLQSGIPARLSGSGSGTDFTLNIHPVEEEDAATYYCQQSNEDPFTFGSGTKLEVK

SEQ ID NO: 20352 - protein, 15 aa, synthetic construct
  source 1..15: note = Description of Artificial Sequence: Synthetic peptide; note = XENP020670 vlCDR1
KASQSVDYDGDSYMN

SEQ ID NO: 20353 - protein, 7 aa, synthetic construct
  source 1..7: note = Description of Artificial Sequence: Synthetic peptide; note = XENP020670 vlCDR2
AASNLQS

SEQ ID NO: 20354 - protein, 9 aa, synthetic construct
  source 1..9: note = Description of Artificial Sequence: Synthetic peptide; note = XENP020670 vlCDR3
QQSNEDPFT

SEQ ID NO: 20355 - protein, 450 aa, synthetic construct; identical to SEQ ID NO: 17585
  source 1..450: note = Description of Artificial Sequence: Synthetic polypeptide; note = XENP020671 7G8_H0_L0.67_IgG1_PVA_/S267K Heavy Chain

SEQ ID NO: 20356 - protein, 121 aa, synthetic construct; identical to SEQ ID NO: 17586
  source 1..121: note = Description of Artificial Sequence: Synthetic polypeptide; note = VH of XENP020671

SEQ ID NO: 20357 - protein, 5 aa, synthetic construct
  source 1..5: note = Description of Artificial Sequence: Synthetic peptide; note = XENP020671 vhCDR1
DAWMD

SEQ ID NO: 20358 - protein, 19 aa, synthetic construct
  source 1..19: note = Description of Artificial Sequence: Synthetic peptide; note = XENP020671 vhCDR2
EIRTKANNHATYYAESVKG

SEQ ID NO: 20359 - protein, 10 aa, synthetic construct
  source 1..10: note = Description of Artificial Sequence: Synthetic peptide; note = XENP020671 vhCDR3
LANWDWYFDV

SEQ ID NO: 20360 - protein, 218 aa, synthetic construct
  source 1..218: note = Description of Artificial Sequence: Synthetic polypeptide; note = XENP020671 7G8_H0_L0.67_IgG1_PVA_/S267K Light Chain
DTVLTQSPASLAVSLGQRATISCKASQSVDYDGDSYMNWYQQKPGQPPKLLIYAASNLDSGIPARLSGSGSGTDFTLNIHPVEEEDAATYYCQQSNEDPFTFGSGTKLEVKRTVAAPSVFIFPPSDEQLKSGTASVVCLLNNFYPREAKVQWKVDNALQSGNSQESVTEQDSKDSTYSLSSTLTLSKADYEKHKVYACEVTHQGLSSPVTKSFNRGEC

SEQ ID NO: 20361 - protein, 111 aa, synthetic construct
  source 1..111: note = Description of Artificial Sequence: Synthetic polypeptide; note = VL of XENP020671
DTVLTQSPASLAVSLGQRATISCKASQSVDYDGDSYMNWYQQKPGQPPKLLIYAASNLDSGIPARLSGSGSGTDFTLNIHPVEEEDAATYYCQQSNEDPFTFGSGTKLEVK

SEQ ID NO: 20362 - protein, 15 aa, synthetic construct
  source 1..15: note = Description of Artificial Sequence: Synthetic peptide; note = XENP020671 vlCDR1
KASQSVDYDGDSYMN

SEQ ID NO: 20363 - protein, 7 aa, synthetic construct
  source 1..7: note = Description of Artificial Sequence: Synthetic peptide; note = XENP020671 vlCDR2
AASNLDS

SEQ ID NO: 20364 - protein, 9 aa, synthetic construct
  source 1..9: note = Description of Artificial Sequence: Synthetic peptide; note = XENP020671 vlCDR3
QQSNEDPFT

SEQ ID NO: 20365 - protein, 450 aa, synthetic construct; identical to SEQ ID NO: 17585
  source 1..450: note = Description of Artificial Sequence: Synthetic polypeptide; note = XENP020672 7G8_H0_L0.68_IgG1_PVA_/S267K Heavy Chain

SEQ ID NO: 20366 - protein, 121 aa, synthetic construct; identical to SEQ ID NO: 17586
  source 1..121: note = Description of Artificial Sequence: Synthetic polypeptide; note = VH of XENP020672

SEQ ID NO: 20367 - protein, 5 aa, synthetic construct
  source 1..5: note = Description of Artificial Sequence: Synthetic peptide; note = XENP020672 vhCDR1
DAWMD

SEQ ID NO: 20368 - protein, 19 aa, synthetic construct
  source 1..19: note = Description of Artificial Sequence: Synthetic peptide; note = XENP020672 vhCDR2
EIRTKANNHATYYAESVKG

SEQ ID NO: 20369 - protein, 10 aa, synthetic construct
  source 1..10: note = Description of Artificial Sequence: Synthetic peptide; note = XENP020672 vhCDR3
LANWDWYFDV

SEQ ID NO: 20370 - protein, 218 aa, synthetic construct
  source 1..218: note = Description of Artificial Sequence: Synthetic polypeptide; note = XENP020672 7G8_H0_L0.68_IgG1_PVA_/S267K Light Chain
DTVLTQSPASLAVSLGQRATISCKASQSVDYDGDSYMNWYQQKPGQPPKLLIYAASNLKSGIPARLSGSGSGTDFTLNIHPVEEEDAATYYCQQSNEDPFTFGSGTKLEVKRTVAAPSVFIFPPSDEQLKSGTASVVCLLNNFYPREAKVQWKVDNALQSGNSQESVTEQDSKDSTYSLSSTLTLSKADYEKHKVYACEVTHQGLSSPVTKSFNRGEC

SEQ ID NO: 20371 - protein, 111 aa, synthetic construct
  source 1..111: note = Description of Artificial Sequence: Synthetic polypeptide; note = VL of XENP020672
DTVLTQSPASLAVSLGQRATISCKASQSVDYDGDSYMNWYQQKPGQPPKLLIYAASNLKSGIPARLSGSGSGTDFTLNIHPVEEEDAATYYCQQSNEDPFTFGSGTKLEVK

SEQ ID NO: 20372 - protein, 15 aa, synthetic construct
  source 1..15: note = Description of Artificial Sequence: Synthetic peptide; note = XENP020672 vlCDR1
KASQSVDYDGDSYMN

SEQ ID NO: 20373 - protein, 7 aa, synthetic construct
  source 1..7: note = Description of Artificial Sequence: Synthetic peptide; note = XENP020672 vlCDR2
AASNLKS

SEQ ID NO: 20374 - protein, 9 aa, synthetic construct
  source 1..9: note = Description of Artificial Sequence: Synthetic peptide; note = XENP020672 vlCDR3
QQSNEDPFT

SEQ ID NO: 20375 - protein, 450 aa, synthetic construct; identical to SEQ ID NO: 17585
  source 1..450: note = Description of Artificial Sequence: Synthetic polypeptide; note = XENP020673 7G8_H0_L0.69_IgG1_PVA_/S267K Heavy Chain

SEQ ID NO: 20376 - protein, 121 aa, synthetic construct; identical to SEQ ID NO: 17586
  source 1..121: note = Description of Artificial Sequence: Synthetic polypeptide; note = VH of XENP020673

SEQ ID NO: 20377 - protein, 5 aa, synthetic construct
  source 1..5: note = Description of Artificial Sequence: Synthetic peptide; note = XENP020673 vhCDR1
DAWMD

SEQ ID NO: 20378 - protein, 19 aa, synthetic construct
  source 1..19: note = Description of Artificial Sequence: Synthetic peptide; note = XENP020673 vhCDR2
EIRTKANNHATYYAESVKG

SEQ ID NO: 20379 - protein, 10 aa, synthetic construct
  source 1..10: note = Description of Artificial Sequence: Synthetic peptide; note = XENP020673 vhCDR3
LANWDWYFDV

SEQ ID NO: 20380 - protein, 218 aa, synthetic construct
  source 1..218: note = Description of Artificial Sequence: Synthetic polypeptide; note = XENP020673 7G8_H0_L0.69_IgG1_PVA_/S267K Light Chain
DTVLTQSPASLAVSLGQRATISCKASQSVDYDGDSYMNWYQQKPGQPPKLLIYAASNLHSGIPARLSGSGSGTDFTLNIHPVEEEDAATYYCQQSNEDPFTFGSGTKLEVKRTVAAPSVFIFPPSDEQLKSGTASVVCLLNNFYPREAKVQWKVDNALQSGNSQESVTEQDSKDSTYSLSSTLTLSKADYEKHKVYACEVTHQGLSSPVTKSFNRGEC

SEQ ID NO: 20381 - protein, 111 aa, synthetic construct
  source 1..111: note = Description of Artificial Sequence: Synthetic polypeptide; note = VL of XENP020673
DTVLTQSPASLAVSLGQRATISCKASQSVDYDGDSYMNWYQQKPGQPPKLLIYAASNLHSGIPARLSGSGSGTDFTLNIHPVEEEDAATYYCQQSNEDPFTFGSGTKLEVK

SEQ ID NO: 20382 - protein, 15 aa, synthetic construct
  source 1..15: note = Description of Artificial Sequence: Synthetic peptide; note = XENP020673 vlCDR1
KASQSVDYDGDSYMN

SEQ ID NO: 20383 - protein, 7 aa, synthetic construct
  source 1..7: note = Description of Artificial Sequence: Synthetic peptide; note = XENP020673 vlCDR2
AASNLHS

SEQ ID NO: 20384 - protein, 9 aa, synthetic construct
  source 1..9: note = Description of Artificial Sequence: Synthetic peptide; note = XENP020673 vlCDR3
QQSNEDPFT

SEQ ID NO: 20385 - protein, 450 aa, synthetic construct; identical to SEQ ID NO: 17585
  source 1..450: note = Description of Artificial Sequence: Synthetic polypeptide; note = XENP020674 7G8_H0_L0.70_IgG1_PVA_/S267K Heavy Chain

SEQ ID NO: 20386 - protein, 121 aa, synthetic construct; identical to SEQ ID NO: 17586
  source 1..121: note = Description of Artificial Sequence: Synthetic polypeptide; note = VH of XENP020674

SEQ ID NO: 20387 - protein, 5 aa, synthetic construct
  source 1..5: note = Description of Artificial Sequence: Synthetic peptide; note = XENP020674 vhCDR1
DAWMD

SEQ ID NO: 20388 - protein, 19 aa, synthetic construct
  source 1..19: note = Description of Artificial Sequence: Synthetic peptide; note = XENP020674 vhCDR2
EIRTKANNHATYYAESVKG

SEQ ID NO: 20389 - protein, 10 aa, synthetic construct
  source 1..10: note = Description of Artificial Sequence: Synthetic peptide; note = XENP020674 vhCDR3
LANWDWYFDV

SEQ ID NO: 20390 - protein, 218 aa, synthetic construct
  source 1..218: note = Description of Artificial Sequence: Synthetic polypeptide; note = XENP020674 7G8_H0_L0.70_IgG1_PVA_/S267K Light Chain
DTVLTQSPASLAVSLGQRATISCKASQSVDYDGDSYMNWYQQKPGQPPKLLIYAASNLASGIPARLSGSGSGTDFTLNIHPVEEEDAATYYCQQSNEDPFTFGSGTKLEVKRTVAAPSVFIFPPSDEQLKSGTASVVCLLNNFYPREAKVQWKVDNALQSGNSQESVTEQDSKDSTYSLSSTLTLSKADYEKHKVYACEVTHQGLSSPVTKSFNRGEC

SEQ ID NO: 20391 - protein, 111 aa, synthetic construct
  source 1..111: note = Description of Artificial Sequence: Synthetic polypeptide; note = VL of XENP020674
DTVLTQSPASLAVSLGQRATISCKASQSVDYDGDSYMNWYQQKPGQPPKLLIYAASNLASGIPARLSGSGSGTDFTLNIHPVEEEDAATYYCQQSNEDPFTFGSGTKLEVK

SEQ ID NO: 20392 - protein, 15 aa, synthetic construct
  source 1..15: note = Description of Artificial Sequence: Synthetic peptide; note = XENP020674 vlCDR1
KASQSVDYDGDSYMN

SEQ ID NO: 20393 - protein, 7 aa, synthetic construct
  source 1..7: note = Description of Artificial Sequence: Synthetic peptide; note = XENP020674 vlCDR2
AASNLAS

SEQ ID NO: 20394 - protein, 9 aa, synthetic construct
  source 1..9: note = Description of Artificial Sequence: Synthetic peptide; note = XENP020674 vlCDR3
QQSNEDPFT

SEQ ID NO: 20395 - protein, 450 aa, synthetic construct; identical to SEQ ID NO: 17585
  source 1..450: note = Description of Artificial Sequence: Synthetic polypeptide; note = XENP020675 7G8_H0_L0.71_IgG1_PVA_/S267K Heavy Chain

SEQ ID NO: 20396 - protein, 121 aa, synthetic construct; identical to SEQ ID NO: 17586
  source 1..121: note = Description of Artificial Sequence: Synthetic polypeptide; note = VH of XENP020675

SEQ ID NO: 20397 - protein, 5 aa, synthetic construct
  source 1..5: note = Description of Artificial Sequence: Synthetic peptide; note = XENP020675 vhCDR1
DAWMD

SEQ ID NO: 20398 - protein, 19 aa, synthetic construct
  source 1..19: note = Description of Artificial Sequence: Synthetic peptide; note = XENP020675 vhCDR2
EIRTKANNHATYYAESVKG

SEQ ID NO: 20399 - protein, 10 aa, synthetic construct
  source 1..10: note = Description of Artificial Sequence: Synthetic peptide; note = XENP020675 vhCDR3
LANWDWYFDV

SEQ ID NO: 20400 - protein, 218 aa, synthetic construct
  source 1..218: note = Description of Artificial Sequence: Synthetic polypeptide; note = XENP020675 7G8_H0_L0.71_IgG1_PVA_/S267K Light Chain
DTVLTQSPASLAVSLGQRATISCKASQSVDYDGDSYMNWYQQKPGQPPKLLIYAASNLGSGIPARLSGSGSGTDFTLNIHPVEEEDAATYYCQQSNEDPFTFGSGTKLEVKRTVAAPSVFIFPPSDEQLKSGTASVVCLLNNFYPREAKVQWKVDNALQSGNSQESVTEQDSKDSTYSLSSTLTLSKADYEKHKVYACEVTHQGLSSPVTKSFNRGEC

SEQ ID NO: 20401 - protein, 111 aa, synthetic construct
  source 1..111: note = Description of Artificial Sequence: Synthetic polypeptide; note = VL of XENP020675
DTVLTQSPASLAVSLGQRATISCKASQSVDYDGDSYMNWYQQKPGQPPKLLIYAASNLGSGIPARLSGSGSGTDFTLNIHPVEEEDAATYYCQQSNEDPFTFGSGTKLEVK

SEQ ID NO: 20402 - protein, 15 aa, synthetic construct
  source 1..15: note = Description of Artificial Sequence: Synthetic peptide; note = XENP020675 vlCDR1
KASQSVDYDGDSYMN

SEQ ID NO: 20403 - protein, 7 aa, synthetic construct
  source 1..7: note = Description of Artificial Sequence: Synthetic peptide; note = XENP020675 vlCDR2
AASNLGS

SEQ ID NO: 20404 - protein, 9 aa, synthetic construct
  source 1..9: note = Description of Artificial Sequence: Synthetic peptide; note = XENP020675 vlCDR3
QQSNEDPFT

SEQ ID NO: 20405 - protein, 450 aa, synthetic construct; identical to SEQ ID NO: 17585
  source 1..450: note = Description of Artificial Sequence: Synthetic polypeptide; note = XENP020676 7G8_H0_L0.72_IgG1_PVA_/S267K Heavy Chain

SEQ ID NO: 20406 - protein, 121 aa, synthetic construct; identical to SEQ ID NO: 17586
  source 1..121: note = Description of Artificial Sequence: Synthetic polypeptide; note = VH of XENP020676

SEQ ID NO: 20407 - protein, 5 aa, synthetic construct
  source 1..5: note = Description of Artificial Sequence: Synthetic peptide; note = XENP020676 vhCDR1
DAWMD

SEQ ID NO: 20408 - protein, 19 aa, synthetic construct
  source 1..19: note = Description of Artificial Sequence: Synthetic peptide; note = XENP020676 vhCDR2
EIRTKANNHATYYAESVKG

SEQ ID NO: 20409 - protein, 10 aa, synthetic construct
  source 1..10: note = Description of Artificial Sequence: Synthetic peptide; note = XENP020676 vhCDR3
LANWDWYFDV

SEQ ID NO: 20410 - protein, 218 aa, synthetic construct
  source 1..218: note = Description of Artificial Sequence: Synthetic polypeptide; note = XENP020676 7G8_H0_L0.72_IgG1_PVA_/S267K Light Chain
DTVLTQSPASLAVSLGQRATISCKASQSVDYDGDSYMNWYQQKPGQPPKLLIYAASNLYSGIPARLSGSGSGTDFTLNIHPVEEEDAATYYCQQSNEDPFTFGSGTKLEVKRTVAAPSVFIFPPSDEQLKSGTASVVCLLNNFYPREAKVQWKVDNALQSGNSQESVTEQDSKDSTYSLSSTLTLSKADYEKHKVYACEVTHQGLSSPVTKSFNRGEC

SEQ ID NO: 20411 - protein, 111 aa, synthetic construct
  source 1..111: note = Description of Artificial Sequence: Synthetic polypeptide; note = VL of XENP020676
DTVLTQSPASLAVSLGQRATISCKASQSVDYDGDSYMNWYQQKPGQPPKLLIYAASNLYSGIPARLSGSGSGTDFTLNIHPVEEEDAATYYCQQSNEDPFTFGSGTKLEVK

SEQ ID NO: 20412 - protein, 15 aa, synthetic construct
  source 1..15: note = Description of Artificial Sequence: Synthetic peptide; note = XENP020676 vlCDR1
KASQSVDYDGDSYMN

SEQ ID NO: 20413 - protein, 7 aa, synthetic construct
  source 1..7: note = Description of Artificial Sequence: Synthetic peptide; note = XENP020676 vlCDR2
AASNLYS

SEQ ID NO: 20414 - protein, 9 aa, synthetic construct
  source 1..9: note = Description of Artificial Sequence: Synthetic peptide; note = XENP020676 vlCDR3
QQSNEDPFT

SEQ ID NO: 20415 - protein, 450 aa, synthetic construct; identical to SEQ ID NO: 17585
  source 1..450: note = Description of Artificial Sequence: Synthetic polypeptide; note = XENP020677 7G8_H0_L0.73_IgG1_PVA_/S267K Heavy Chain

SEQ ID NO: 20416 - protein, 121 aa, synthetic construct; identical to SEQ ID NO: 17586
  source 1..121: note = Description of Artificial Sequence: Synthetic polypeptide; note = VH of XENP020677

SEQ ID NO: 20417 - protein, 5 aa, synthetic construct
  source 1..5: note = Description of Artificial Sequence: Synthetic peptide; note = XENP020677 vhCDR1
DAWMD

SEQ ID NO: 20418 - protein, 19 aa, synthetic construct
  source 1..19: note = Description of Artificial Sequence: Synthetic peptide; note = XENP020677 vhCDR2
EIRTKANNHATYYAESVKG

SEQ ID NO: 20419 - protein, 10 aa, synthetic construct
  source 1..10: note = Description of Artificial Sequence: Synthetic peptide; note = XENP020677 vhCDR3
LANWDWYFDV

SEQ ID NO: 20420 - protein, 218 aa, synthetic construct
  source 1..218: note = Description of Artificial Sequence: Synthetic polypeptide; note = XENP020677 7G8_H0_L0.73_IgG1_PVA_/S267K Light Chain
DTVLTQSPASLAVSLGQRATISCKASQSVDYDGDSYMNWYQQKPGQPPKLLIYAASNLISGIPARLSGSGSGTDFTLNIHPVEEEDAATYYCQQSNEDPFTFGSGTKLEVKRTVAAPSVFIFPPSDEQLKSGTASVVCLLNNFYPREAKVQWKVDNALQSGNSQESVTEQDSKDSTYSLSSTLTLSKADYEKHKVYACEVTHQGLSSPVTKSFNRGEC

SEQ ID NO: 20421 - protein, 111 aa, synthetic construct
  source 1..111: note = Description of Artificial Sequence: Synthetic polypeptide; note = VL of XENP020677
DTVLTQSPASLAVSLGQRATISCKASQSVDYDGDSYMNWYQQKPGQPPKLLIYAASNLISGIPARLSGSGSGTDFTLNIHPVEEEDAATYYCQQSNEDPFTFGSGTKLEVK

SEQ ID NO: 20422 - protein, 15 aa, synthetic construct
  source 1..15: note = Description of Artificial Sequence: Synthetic peptide; note = XENP020677 vlCDR1
KASQSVDYDGDSYMN

SEQ ID NO: 20423 - protein, 7 aa, synthetic construct
  source 1..7: note = Description of Artificial Sequence: Synthetic peptide; note = XENP020677 vlCDR2
AASNLIS

SEQ ID NO: 20424 - protein, 9 aa, synthetic construct
  source 1..9: note = Description of Artificial Sequence: Synthetic peptide; note = XENP020677 vlCDR3
QQSNEDPFT

SEQ ID NO: 20425 - protein, 450 aa, synthetic construct; identical to SEQ ID NO: 17585
  source 1..450: note = Description of Artificial Sequence: Synthetic polypeptide; note = XENP020678 7G8_H0_L0.74_IgG1_PVA_/S267K Heavy Chain

SEQ ID NO: 20426 - protein, 121 aa, synthetic construct; identical to SEQ ID NO: 17586
  source 1..121: note = Description of Artificial Sequence: Synthetic polypeptide; note = VH of XENP020678

SEQ ID NO: 20427 - protein, 5 aa, synthetic construct
  source 1..5: note = Description of Artificial Sequence: Synthetic peptide; note = XENP020678 vhCDR1
DAWMD

SEQ ID NO: 20428 - protein, 19 aa, synthetic construct
  source 1..19: note = Description of Artificial Sequence: Synthetic peptide; note = XENP020678 vhCDR2
EIRTKANNHATYYAESVKG

SEQ ID NO: 20429 - protein, 10 aa, synthetic construct
  source 1..10: note = Description of Artificial Sequence: Synthetic peptide; note = XENP020678 vhCDR3
LANWDWYFDV

SEQ ID NO: 20430 - protein, 218 aa, synthetic construct
  source 1..218: note = Description of Artificial Sequence: Synthetic polypeptide; note = XENP020678 7G8_H0_L0.74_IgG1_PVA_/S267K Light Chain
DTVLTQSPASLAVSLGQRATISCKASQSVDYDGDSYMNWYQQKPGQPPKLLIYAASNLESGIPARLSGSGSGTDFTLNIHPVEEEDAATYYCQQTNEDPFTFGSGTKLEVKRTVAAPSVFIFPPSDEQLKSGTASVVCLLNNFYPREAKVQWKVDNALQSGNSQESVTEQDSKDSTYSLSSTLTLSKADYEKHKVYACEVTHQGLSSPVTKSFNRGEC

SEQ ID NO: 20431 - protein, 111 aa, synthetic construct
  source 1..111: note = Description of Artificial Sequence: Synthetic polypeptide; note = VL of XENP020678
DTVLTQSPASLAVSLGQRATISCKASQSVDYDGDSYMNWYQQKPGQPPKLLIYAASNLESGIPARLSGSGSGTDFTLNIHPVEEEDAATYYCQQTNEDPFTFGSGTKLEVK

SEQ ID NO: 20432 - protein, 15 aa, synthetic construct
  source 1..15: note = Description of Artificial Sequence: Synthetic peptide; note = XENP020678 vlCDR1
KASQSVDYDGDSYMN

SEQ ID NO: 20433 - protein, 7 aa, synthetic construct
  source 1..7: note = Description of Artificial Sequence: Synthetic peptide; note = XENP020678 vlCDR2
AASNLES

SEQ ID NO: 20434 - protein, 9 aa, synthetic construct
  source 1..9: note = Description of Artificial Sequence: Synthetic peptide; note = XENP020678 vlCDR3
QQTNEDPFT

SEQ ID NO: 20435 - protein, 450 aa, synthetic construct; identical to SEQ ID NO: 17585
  source 1..450: note = Description of Artificial Sequence: Synthetic polypeptide; note = XENP020679 7G8_H0_L0.75_IgG1_PVA_/S267K Heavy Chain

SEQ ID NO: 20436 - protein, 121 aa, synthetic construct; identical to SEQ ID NO: 17586
  source 1..121: note = Description of Artificial Sequence: Synthetic polypeptide; note = VH of XENP020679

SEQ ID NO: 20437 - protein, 5 aa, synthetic construct
  source 1..5: note = Description of Artificial Sequence: Synthetic peptide; note = XENP020679 vhCDR1
DAWMD

SEQ ID NO: 20438 - protein, 19 aa, synthetic construct
  source 1..19: note = Description of Artificial Sequence: Synthetic peptide; note = XENP020679 vhCDR2
EIRTKANNHATYYAESVKG

SEQ ID NO: 20439 - protein, 10 aa, synthetic construct
  source 1..10: note = Description of Artificial Sequence: Synthetic peptide; note = XENP020679 vhCDR3
LANWDWYFDV

SEQ ID NO: 20440 - protein, 218 aa, synthetic construct
  source 1..218: note = Description of Artificial Sequence: Synthetic polypeptide; note = XENP020679 7G8_H0_L0.75_IgG1_PVA_/S267K Light Chain
DTVLTQSPASLAVSLGQRATISCKASQSVDYDGDSYMNWYQQKPGQPPKLLIYAASNLESGIPARLSGSGSGTDFTLNIHPVEEEDAATYYCQQANEDPFTFGSGTKLEVKRTVAAPSVFIFPPSDEQLKSGTASVVCLLNNFYPREAKVQWKVDNALQSGNSQESVTEQDSKDSTYSLSSTLTLSKADYEKHKVYACEVTHQGLSSPVTKSFNRGEC

SEQ ID NO: 20441 - protein, 111 aa, synthetic construct
  source 1..111: note = Description of Artificial Sequence: Synthetic polypeptide; note = VL of XENP020679
DTVLTQSPASLAVSLGQRATISCKASQSVDYDGDSYMNWYQQKPGQPPKLLIYAASNLESGIPARLSGSGSGTDFTLNIHPVEEEDAATYYCQQANEDPFTFGSGTKLEVK

SEQ ID NO: 20442 - protein, 15 aa, synthetic construct
  source 1..15: note = Description of Artificial Sequence: Synthetic peptide; note = XENP020679 vlCDR1
KASQSVDYDGDSYMN

SEQ ID NO: 20443 - protein, 7 aa, synthetic construct
  source 1..7: note = Description of Artificial Sequence: Synthetic peptide; note = XENP020679 vlCDR2
AASNLES

SEQ ID NO: 20444 - protein, 9 aa, synthetic construct
  source 1..9: note = Description of Artificial Sequence: Synthetic peptide; note = XENP020679 vlCDR3
QQANEDPFT

SEQ ID NO: 20445 - protein, 450 aa, synthetic construct; identical to SEQ ID NO: 17585
  source 1..450: note = Description of Artificial Sequence: Synthetic polypeptide; note = XENP020680 7G8_H0_L0.76_IgG1_PVA_/S267K Heavy Chain

SEQ ID NO: 20446 - protein, 121 aa, synthetic construct; identical to SEQ ID NO: 17586
  source 1..121: note = Description of Artificial Sequence: Synthetic polypeptide; note = VH of XENP020680

SEQ ID NO: 20447 - protein, 5 aa, synthetic construct
  source 1..5: note = Description of Artificial Sequence: Synthetic peptide; note = XENP020680 vhCDR1
DAWMD

SEQ ID NO: 20448 - protein, 19 aa, synthetic construct
  source 1..19: note = Description of Artificial Sequence: Synthetic peptide; note = XENP020680 vhCDR2
EIRTKANNHATYYAESVKG

SEQ ID NO: 20449 - protein, 10 aa, synthetic construct
  source 1..10: note = Description of Artificial Sequence: Synthetic peptide; note = XENP020680 vhCDR3
LANWDWYFDV

SEQ ID NO: 20450 - protein, 218 aa, synthetic construct
  source 1..218: note = Description of Artificial Sequence: Synthetic polypeptide; note = XENP020680 7G8_H0_L0.76_IgG1_PVA_/S267K Light Chain
DTVLTQSPASLAVSLGQRATISCKASQSVDYDGDSYMNWYQQKPGQPPKLLIYAASNLESGIPARLSGSGSGTDFTLNIHPVEEEDAATYYCQQQNEDPFTFGSGTKLEVKRTVAAPSVFIFPPSDEQLKSGTASVVCLLNNFYPREAKVQWKVDNALQSGNSQESVTEQDSKDSTYSLSSTLTLSKADYEKHKVYACEVTHQGLSSPVTKSFNRGEC

SEQ ID NO: 20451 - protein, 111 aa, synthetic construct
  source 1..111: note = Description of Artificial Sequence: Synthetic polypeptide; note = VL of XENP020680
DTVLTQSPASLAVSLGQRATISCKASQSVDYDGDSYMNWYQQKPGQPPKLLIYAASNLESGIPARLSGSGSGTDFTLNIHPVEEEDAATYYCQQQNEDPFTFGSGTKLEVK

SEQ ID NO: 20452 - protein, 15 aa, synthetic construct
  source 1..15: note = Description of Artificial Sequence: Synthetic peptide; note = XENP020680 vlCDR1
KASQSVDYDGDSYMN

SEQ ID NO: 20453 - protein, 7 aa, synthetic construct
  source 1..7: note = Description of Artificial Sequence: Synthetic peptide; note = XENP020680 vlCDR2
AASNLES

SEQ ID NO: 20454 - protein, 9 aa, synthetic construct
  source 1..9: note = Description of Artificial Sequence: Synthetic peptide; note = XENP020680 vlCDR3
QQQNEDPFT

SEQ ID NO: 20455 - protein, 450 aa, synthetic construct; identical to SEQ ID NO: 17585
  source 1..450: note = Description of Artificial Sequence: Synthetic polypeptide; note = XENP020681 7G8_H0_L0.77_IgG1_PVA_/S267K Heavy Chain

SEQ ID NO: 20456 - protein, 121 aa, synthetic construct; identical to SEQ ID NO: 17586
  source 1..121: note = Description of Artificial Sequence: Synthetic polypeptide; note = VH of XENP020681

SEQ ID NO: 20457 - protein, 5 aa, synthetic construct
  source 1..5: note = Description of Artificial Sequence: Synthetic peptide; note = XENP020681 vhCDR1
DAWMD

SEQ ID NO: 20458 - protein, 19 aa, synthetic construct
  source 1..19: note = Description of Artificial Sequence: Synthetic peptide; note = XENP020681 vhCDR2
EIRTKANNHATYYAESVKG

SEQ ID NO: 20459 - protein, 10 aa, synthetic construct
  source 1..10: note = Description of Artificial Sequence: Synthetic peptide; note = XENP020681 vhCDR3
LANWDWYFDV

SEQ ID NO: 20460 - protein, 218 aa, synthetic construct
  source 1..218: note = Description of Artificial Sequence: Synthetic polypeptide; note = XENP020681 7G8_H0_L0.77_IgG1_PVA_/S267K Light Chain
DTVLTQSPASLAVSLGQRATISCKASQSVDYDGDSYMNWYQQKPGQPPKLLIYAASNLESGIPARLSGSGSGTDFTLNIHPVEEEDAATYYCQQGNEDPFTFGSGTKLEVKRTVAAPSVFIFPPSDEQLKSGTASVVCLLNNFYPREAKVQWKVDNALQSGNSQESVTEQDSKDSTYSLSSTLTLSKADYEKHKVYACEVTHQGLSSPVTKSFNRGEC

SEQ ID NO: 20461 - protein, 111 aa, synthetic construct
  source 1..111: note = Description of Artificial Sequence: Synthetic polypeptide; note = VL of XENP020681
DTVLTQSPASLAVSLGQRATISCKASQSVDYDGDSYMNWYQQKPGQPPKLLIYAASNLESGIPARLSGSGSGTDFTLNIHPVEEEDAATYYCQQGNEDPFTFGSGTKLEVK

SEQ ID NO: 20462 - protein, 15 aa, synthetic construct
  source 1..15: note = Description of Artificial Sequence: Synthetic peptide; note = XENP020681 vlCDR1
KASQSVDYDGDSYMN

SEQ ID NO: 20463 - protein, 7 aa, synthetic construct
  source 1..7: note = Description of Artificial Sequence: Synthetic peptide; note = XENP020681 vlCDR2
AASNLES

SEQ ID NO: 20464 - protein, 9 aa, synthetic construct
  source 1..9: note = Description of Artificial Sequence: Synthetic peptide; note = XENP020681 vlCDR3
QQGNEDPFT

SEQ ID NO: 20465 - protein, 450 aa, synthetic construct; identical to SEQ ID NO: 17585
  source 1..450: note = Description of Artificial Sequence: Synthetic polypeptide; note = XENP020682 7G8_H0_L0.78_IgG1_PVA_/S267K Heavy Chain

SEQ ID NO: 20466 - protein, 121 aa, synthetic construct; identical to SEQ ID NO: 17586
  source 1..121: note = Description of Artificial Sequence: Synthetic polypeptide; note = VH of XENP020682

SEQ ID NO: 20467 - protein, 5 aa, synthetic construct
  source 1..5: note = Description of Artificial Sequence: Synthetic peptide; note = XENP020682 vhCDR1
DAWMD

SEQ ID NO: 20468 - protein, 19 aa, synthetic construct
  source 1..19: note = Description of Artificial Sequence: Synthetic peptide; note = XENP020682 vhCDR2
EIRTKANNHATYYAESVKG

SEQ ID NO: 20469 - protein, 10 aa, synthetic construct
  source 1..10: note = Description of Artificial Sequence: Synthetic peptide; note = XENP020682 vhCDR3
LANWDWYFDV

SEQ ID NO: 20470 - protein, 218 aa, synthetic construct
  source 1..218: note = Description of Artificial Sequence: Synthetic polypeptide; note = XENP020682 7G8_H0_L0.78_IgG1_PVA_/S267K Light Chain
DTVLTQSPASLAVSLGQRATISCKASQSVDYDGDSYMNWYQQKPGQPPKLLIYAASNLESGIPARLSGSGSGTDFTLNIHPVEEEDAATYYCQQVNEDPFTFGSGTKLEVKRTVAAPSVFIFPPSDEQLKSGTASVVCLLNNFYPREAKVQWKVDNALQSGNSQESVTEQDSKDSTYSLSSTLTLSKADYEKHKVYACEVTHQGLSSPVTKSFNRGEC

SEQ ID NO: 20471 - protein, 111 aa, synthetic construct
  source 1..111: note = Description of Artificial Sequence: Synthetic polypeptide; note = VL of XENP020682
DTVLTQSPASLAVSLGQRATISCKASQSVDYDGDSYMNWYQQKPGQPPKLLIYAASNLESGIPARLSGSGSGTDFTLNIHPVEEEDAATYYCQQVNEDPFTFGSGTKLEVK

SEQ ID NO: 20472 - protein, 15 aa, synthetic construct
  source 1..15: note = Description of Artificial Sequence: Synthetic peptide; note = XENP020682 vlCDR1
KASQSVDYDGDSYMN

SEQ ID NO: 20473 - protein, 7 aa, synthetic construct
  source 1..7: note = Description of Artificial Sequence: Synthetic peptide; note = XENP020682 vlCDR2
AASNLES

SEQ ID NO: 20474 - protein, 9 aa, synthetic construct
  source 1..9: note = Description of Artificial Sequence: Synthetic peptide; note = XENP020682 vlCDR3
QQVNEDPFT

SEQ ID NO: 20475 - protein, 450 aa, synthetic construct; identical to SEQ ID NO: 17585
  source 1..450: note = Description of Artificial Sequence: Synthetic polypeptide; note = XENP020683 7G8_H0_L0.79_IgG1_PVA_/S267K Heavy Chain

SEQ ID NO: 20476 - protein, 121 aa, synthetic construct; identical to SEQ ID NO: 17586
  source 1..121: note = Description of Artificial Sequence: Synthetic polypeptide; note = VH of XENP020683

SEQ ID NO: 20477 - protein, 5 aa, synthetic construct
  source 1..5: note = Description of Artificial Sequence: Synthetic peptide; note = XENP020683 vhCDR1
DAWMD

SEQ ID NO: 20478 - protein, 19 aa, synthetic construct
  source 1..19: note = Description of Artificial Sequence: Synthetic peptide; note = XENP020683 vhCDR2
EIRTKANNHATYYAESVKG

SEQ ID NO: 20479 - protein, 10 aa, synthetic construct
  source 1..10: note = Description of Artificial Sequence: Synthetic peptide; note = XENP020683 vhCDR3
LANWDWYFDV

SEQ ID NO: 20480 - protein, 218 aa, synthetic construct
  source 1..218: note = Description of Artificial Sequence: Synthetic polypeptide; note = XENP020683 7G8_H0_L0.79_IgG1_PVA_/S267K Light Chain
DTVLTQSPASLAVSLGQRATISCKASQSVDYDGDSYMNWYQQKPGQPPKLLIYAASNLESGIPARLSGSGSGTDFTLNIHPVEEEDAATYYCQQHNEDPFTFGSGTKLEVKRTVAAPSVFIFPPSDEQLKSGTASVVCLLNNFYPREAKVQWKVDNALQSGNSQESVTEQDSKDSTYSLSSTLTLSKADYEKHKVYACEVTHQGLSSPVTKSFNRGEC

SEQ ID NO: 20481 - protein, 111 aa, synthetic construct
  source 1..111: note = Description of Artificial Sequence: Synthetic polypeptide; note = VL of XENP020683
DTVLTQSPASLAVSLGQRATISCKASQSVDYDGDSYMNWYQQKPGQPPKLLIYAASNLESGIPARLSGSGSGTDFTLNIHPVEEEDAATYYCQQHNEDPFTFGSGTKLEVK

SEQ ID NO: 20482 - protein, 15 aa, synthetic construct
  source 1..15: note = Description of Artificial Sequence: Synthetic peptide; note = XENP020683 vlCDR1
KASQSVDYDGDSYMN

SEQ ID NO: 20483 - protein, 7 aa, synthetic construct
  source 1..7: note = Description of Artificial Sequence: Synthetic peptide; note = XENP020683 vlCDR2
AASNLES

SEQ ID NO: 20484 - protein, 9 aa, synthetic construct
  source 1..9: note = Description of Artificial Sequence: Synthetic peptide; note = XENP020683 vlCDR3
QQHNEDPFT

SEQ ID NO: 20485 - protein, 450 aa, synthetic construct; identical to SEQ ID NO: 17585
  source 1..450: note = Description of Artificial Sequence: Synthetic polypeptide; note = XENP020684 7G8_H0_L0.80_IgG1_PVA_/S267K Heavy Chain

SEQ ID NO: 20486 - protein, 121 aa, synthetic construct; identical to SEQ ID NO: 17586
  source 1..121: note = Description of Artificial Sequence: Synthetic polypeptide; note = VH of XENP020684

SEQ ID NO: 20487 - protein, 5 aa, synthetic construct
  source 1..5: note = Description of Artificial Sequence: Synthetic peptide; note = XENP020684 vhCDR1
DAWMD

SEQ ID NO: 20488 - protein, 19 aa, synthetic construct
  source 1..19: note = Description of Artificial Sequence: Synthetic peptide; note = XENP020684 vhCDR2
EIRTKANNHATYYAESVKG

SEQ ID NO: 20489 - protein, 10 aa, synthetic construct
  source 1..10: note = Description of Artificial Sequence: Synthetic peptide; note = XENP020684 vhCDR3
LANWDWYFDV

SEQ ID NO: 20490 - protein, 218 aa, synthetic construct
  source 1..218: note = Description of Artificial Sequence: Synthetic polypeptide; note = XENP020684 7G8_H0_L0.80_IgG1_PVA_/S267K Light Chain
DTVLTQSPASLAVSLGQRATISCKASQSVDYDGDSYMNWYQQKPGQPPKLLIYAASNLESGIPARLSGSGSGTDFTLNIHPVEEEDAATYYCQQDNEDPFTFGSGTKLEVKRTVAAPSVFIFPPSDEQLKSGTASVVCLLNNFYPREAKVQWKVDNALQSGNSQESVTEQDSKDSTYSLSSTLTLSKADYEKHKVYACEVTHQGLSSPVTKSFNRGEC

SEQ ID NO: 20491 - protein, 111 aa, synthetic construct
  source 1..111: note = Description of Artificial Sequence: Synthetic polypeptide; note = VL of XENP020684
DTVLTQSPASLAVSLGQRATISCKASQSVDYDGDSYMNWYQQKPGQPPKLLIYAASNLESGIPARLSGSGSGTDFTLNIHPVEEEDAATYYCQQDNEDPFTFGSGTKLEVK

SEQ ID NO: 20492 - protein, 15 aa, synthetic construct
  source 1..15: note = Description of Artificial Sequence: Synthetic peptide; note = XENP020684 vlCDR1
KASQSVDYDGDSYMN

SEQ ID NO: 20493 - protein, 7 aa, synthetic construct
  source 1..7: note = Description of Artificial Sequence: Synthetic peptide; note = XENP020684 vlCDR2
AASNLES

SEQ ID NO: 20494 - protein, 9 aa, synthetic construct
  source 1..9: note = Description of Artificial Sequence: Synthetic peptide; note = XENP020684 vlCDR3
QQDNEDPFT

SEQ ID NO: 20495 - protein, 450 aa, synthetic construct; identical to SEQ ID NO: 17585
  source 1..450: note = Description of Artificial Sequence: Synthetic polypeptide; note = XENP020685 7G8_H0_L0.81_IgG1_PVA_/S267K Heavy Chain

SEQ ID NO: 20496 - protein, 121 aa, synthetic construct; identical to SEQ ID NO: 17586
  source 1..121: note = Description of Artificial Sequence: Synthetic polypeptide; note = VH of XENP020685

SEQ ID NO: 20497 - protein, 5 aa, synthetic construct
  source 1..5: note = Description of Artificial Sequence: Synthetic peptide; note = XENP020685 vhCDR1
DAWMD

SEQ ID NO: 20498 - protein, 19 aa, synthetic construct
  source 1..19: note = Description of Artificial Sequence: Synthetic peptide; note = XENP020685 vhCDR2
EIRTKANNHATYYAESVKG

SEQ ID NO: 20499 - protein, 10 aa, synthetic construct
  source 1..10: note = Description of Artificial Sequence: Synthetic peptide; note = XENP020685 vhCDR3
LANWDWYFDV

SEQ ID NO: 20500 - protein, 218 aa, synthetic construct
  source 1..218: note = Description of Artificial Sequence: Synthetic polypeptide; note = XENP020685 7G8_H0_L0.81_IgG1_PVA_/S267K Light Chain
DTVLTQSPASLAVSLGQRATISCKASQSVDYDGDSYMNWYQQKPGQPPKLLIYAASNLESGIPARLSGSGSGTDFTLNIHPVEEEDAATYYCQQKNEDPFTFGSGTKLEVKRTVAAPSVFIFPPSDEQLKSGTASVVCLLNNFYPREAKVQWKVDNALQSGNSQESVTEQDSKDSTYSLSSTLTLSKADYEKHKVYACEVTHQGLSSPVTKSFNRGEC

SEQ ID NO: 20501 - protein, 111 aa, synthetic construct
  source 1..111: note = Description of Artificial Sequence: Synthetic polypeptide; note = VL of XENP020685
DTVLTQSPASLAVSLGQRATISCKASQSVDYDGDSYMNWYQQKPGQPPKLLIYAASNLESGIPARLSGSGSGTDFTLNIHPVEEEDAATYYCQQKNEDPFTFGSGTKLEVK

SEQ ID NO: 20502 - protein, 15 aa, synthetic construct
  source 1..15: note = Description of Artificial Sequence: Synthetic peptide; note = XENP020685 vlCDR1
KASQSVDYDGDSYMN

SEQ ID NO: 20503 - protein, 7 aa, synthetic construct
  source 1..7: note = Description of Artificial Sequence: Synthetic peptide; note = XENP020685 vlCDR2
AASNLES

SEQ ID NO: 20504 - protein, 9 aa, synthetic construct
  source 1..9: note = Description of Artificial Sequence: Synthetic peptide; note = XENP020685 vlCDR3
QQKNEDPFT

SEQ ID NO: 20505 - protein, 450 aa, synthetic construct; identical to SEQ ID NO: 17585
  source 1..450: note = Description of Artificial Sequence: Synthetic polypeptide; note = XENP020686 7G8_H0_L0.82_IgG1_PVA_/S267K Heavy Chain

SEQ ID NO: 20506 - protein, 121 aa, synthetic construct; identical to SEQ ID NO: 17586
  source 1..121: note = Description of Artificial Sequence: Synthetic polypeptide; note = VH of XENP020686

SEQ ID NO: 20507 - protein, 5 aa, synthetic construct
  source 1..5: note = Description of Artificial Sequence: Synthetic peptide; note = XENP020686 vhCDR1
DAWMD

SEQ ID NO: 20508 - protein, 19 aa, synthetic construct
  source 1..19: note = Description of Artificial Sequence: Synthetic peptide; note = XENP020686 vhCDR2
EIRTKANNHATYYAESVKG

SEQ ID NO: 20509 - protein, 10 aa, synthetic construct
  source 1..10: note = Description of Artificial Sequence: Synthetic peptide; note = XENP020686 vhCDR3
LANWDWYFDV

SEQ ID NO: 20510 - protein, 218 aa, synthetic construct
  source 1..218: note = Description of Artificial Sequence: Synthetic polypeptide; note = XENP020686 7G8_H0_L0.82_IgG1_PVA_/S267K Light Chain
DTVLTQSPASLAVSLGQRATISCKASQSVDYDGDSYMNWYQQKPGQPPKLLIYAASNLESGIPARLSGSGSGTDFTLNIHPVEEEDAATYYCQQYNEDPFTFGSGTKLEVKRTVAAPSVFIFPPSDEQLKSGTASVVCLLNNFYPREAKVQWKVDNALQSGNSQESVTEQDSKDSTYSLSSTLTLSKADYEKHKVYACEVTHQGLSSPVTKSFNRGEC

SEQ ID NO: 20511 - protein, 111 aa, synthetic construct
  source 1..111: note = Description of Artificial Sequence: Synthetic polypeptide; note = VL of XENP020686
DTVLTQSPASLAVSLGQRATISCKASQSVDYDGDSYMNWYQQKPGQPPKLLIYAASNLESGIPARLSGSGSGTDFTLNIHPVEEEDAATYYCQQYNEDPFTFGSGTKLEVK

SEQ ID NO: 20512 - protein, 15 aa, synthetic construct
  source 1..15: note = Description of Artificial Sequence: Synthetic peptide; note = XENP020686 vlCDR1
KASQSVDYDGDSYMN

SEQ ID NO: 20513 - protein, 7 aa, synthetic construct
  source 1..7: note = Description of Artificial Sequence: Synthetic peptide; note = XENP020686 vlCDR2
AASNLES

SEQ ID NO: 20514 - protein, 9 aa, synthetic construct
  source 1..9: note = Description of Artificial Sequence: Synthetic peptide; note = XENP020686 vlCDR3
QQYNEDPFT

SEQ ID NO: 20515 - protein, 450 aa, synthetic construct; identical to SEQ ID NO: 17585
  source 1..450: note = Description of Artificial Sequence: Synthetic polypeptide; note = XENP020687 7G8_H0_L0.83_IgG1_PVA_/S267K Heavy Chain

SEQ ID NO: 20516 - protein, 121 aa, synthetic construct; identical to SEQ ID NO: 17586
  source 1..121: note = Description of Artificial Sequence: Synthetic polypeptide; note = VH of XENP020687

SEQ ID NO: 20517 - protein, 5 aa, synthetic construct
  source 1..5: note = Description of Artificial Sequence: Synthetic peptide; note = XENP020687 vhCDR1
DAWMD

SEQ ID NO: 20518 - protein, 19 aa, synthetic construct
  source 1..19: note = Description of Artificial Sequence: Synthetic peptide; note = XENP020687 vhCDR2
EIRTKANNHATYYAESVKG

SEQ ID NO: 20519 - protein, 10 aa, synthetic construct
  source 1..10: note = Description of Artificial Sequence: Synthetic peptide; note = XENP020687 vhCDR3
LANWDWYFDV

SEQ ID NO: 20520 - protein, 218 aa, synthetic construct
  source 1..218: note = Description of Artificial Sequence: Synthetic polypeptide; note = XENP020687 7G8_H0_L0.83_IgG1_PVA_/S267K Light Chain
DTVLTQSPASLAVSLGQRATISCKASQSVDYDGDSYMNWYQQKPGQPPKLLIYAASNLESGIPARLSGSGSGTDFTLNIHPVEEEDAATYYCQQSDEDPFTFGSGTKLEVKRTVAAPSVFIFPPSDEQLKSGTASVVCLLNNFYPREAKVQWKVDNALQSGNSQESVTEQDSKDSTYSLSSTLTLSKADYEKHKVYACEVTHQGLSSPVTKSFNRGEC

SEQ ID NO: 20521 - protein, 111 aa, synthetic construct
  source 1..111: note = Description of Artificial Sequence: Synthetic polypeptide; note = VL of XENP020687
DTVLTQSPASLAVSLGQRATISCKASQSVDYDGDSYMNWYQQKPGQPPKLLIYAASNLESGIPARLSGSGSGTDFTLNIHPVEEEDAATYYCQQSDEDPFTFGSGTKLEVK

SEQ ID NO: 20522 - protein, 15 aa, synthetic construct
  source 1..15: note = Description of Artificial Sequence: Synthetic peptide; note = XENP020687 vlCDR1
KASQSVDYDGDSYMN

SEQ ID NO: 20523 - protein, 7 aa, synthetic construct
  source 1..7: note = Description of Artificial Sequence: Synthetic peptide; note = XENP020687 vlCDR2
AASNLES

SEQ ID NO: 20524 - protein, 9 aa, synthetic construct
  source 1..9: note = Description of Artificial Sequence: Synthetic peptide; note = XENP020687 vlCDR3
QQSDEDPFT

SEQ ID NO: 20525 - protein, 450 aa, synthetic construct; identical to SEQ ID NO: 17585
  source 1..450: note = Description of Artificial Sequence: Synthetic polypeptide; note = XENP020688 7G8_H0_L0.84_IgG1_PVA_/S267K Heavy Chain

SEQ ID NO: 20526 - protein, 121 aa, synthetic construct; identical to SEQ ID NO: 17586
  source 1..121: note = Description of Artificial Sequence: Synthetic polypeptide; note = VH of XENP020688

SEQ ID NO: 20527 - protein, 5 aa, synthetic construct
  source 1..5: note = Description of Artificial Sequence: Synthetic peptide; note = XENP020688 vhCDR1
DAWMD

SEQ ID NO: 20528 - protein, 19 aa, synthetic construct
  source 1..19: note = Description of Artificial Sequence: Synthetic peptide; note = XENP020688 vhCDR2
EIRTKANNHATYYAESVKG

SEQ ID NO: 20529 - protein, 10 aa, synthetic construct
  source 1..10: note = Description of Artificial Sequence: Synthetic peptide; note = XENP020688 vhCDR3
LANWDWYFDV

SEQ ID NO: 20530 - protein, 218 aa, synthetic construct
  source 1..218: note = Description of Artificial Sequence: Synthetic polypeptide; note = XENP020688 7G8_H0_L0.84_IgG1_PVA_/S267K Light Chain
DTVLTQSPASLAVSLGQRATISCKASQSVDYDGDSYMNWYQQKPGQPPKLLIYAASNLESGIPARLSGSGSGTDFTLNIHPVEEEDAATYYCQQSHEDPFTFGSGTKLEVKRTVAAPSVFIFPPSDEQLKSGTASVVCLLNNFYPREAKVQWKVDNALQSGNSQESVTEQDSKDSTYSLSSTLTLSKADYEKHKVYACEVTHQGLSSPVTKSFNRGEC

SEQ ID NO: 20531 - protein, 111 aa, synthetic construct
  source 1..111: note = Description of Artificial Sequence: Synthetic polypeptide; note = VL of XENP020688
DTVLTQSPASLAVSLGQRATISCKASQSVDYDGDSYMNWYQQKPGQPPKLLIYAASNLESGIPARLSGSGSGTDFTLNIHPVEEEDAATYYCQQSHEDPFTFGSGTKLEVK

SEQ ID NO: 20532 - protein, 15 aa, synthetic construct
  source 1..15: note = Description of Artificial Sequence: Synthetic peptide; note = XENP020688 vlCDR1
KASQSVDYDGDSYMN

SEQ ID NO: 20533 - protein, 7 aa, synthetic construct
  source 1..7: note = Description of Artificial Sequence: Synthetic peptide; note = XENP020688 vlCDR2
AASNLES

SEQ ID NO: 20534 - protein, 9 aa, synthetic construct
  source 1..9: note = Description of Artificial Sequence: Synthetic peptide; note = XENP020688 vlCDR3
QQSHEDPFT

SEQ ID NO: 20535 - protein, 450 aa, synthetic construct; identical to SEQ ID NO: 17585
  source 1..450: note = Description of Artificial Sequence: Synthetic polypeptide; note = XENP020689 7G8_H0_L0.85_IgG1_PVA_/S267K Heavy Chain

SEQ ID NO: 20536 - protein, 121 aa, synthetic construct; identical to SEQ ID NO: 17586
  source 1..121: note = Description of Artificial Sequence: Synthetic polypeptide; note = VH of XENP020689

SEQ ID NO: 20537 - protein, 5 aa, synthetic construct
  source 1..5: note = Description of Artificial Sequence: Synthetic peptide; note = XENP020689 vhCDR1
DAWMD

SEQ ID NO: 20538 - protein, 19 aa, synthetic construct
  source 1..19: note = Description of Artificial Sequence: Synthetic peptide; note = XENP020689 vhCDR2
EIRTKANNHATYYAESVKG

SEQ ID NO: 20539 - protein, 10 aa, synthetic construct
  source 1..10: note = Description of Artificial Sequence: Synthetic peptide; note = XENP020689 vhCDR3
LANWDWYFDV

SEQ ID NO: 20540 - protein, 218 aa, synthetic construct
  source 1..218: note = Description of Artificial Sequence: Synthetic polypeptide; note = XENP020689 7G8_H0_L0.85_IgG1_PVA_/S267K Light Chain
DTVLTQSPASLAVSLGQRATISCKASQSVDYDGDSYMNWYQQKPGQPPKLLIYAASNLESGIPARLSGSGSGTDFTLNIHPVEEEDAATYYCQQSEEDPFTFGSGTKLEVKRTVAAPSVFIFPPSDEQLKSGTASVVCLLNNFYPREAKVQWKVDNALQSGNSQESVTEQDSKDSTYSLSSTLTLSKADYEKHKVYACEVTHQGLSSPVTKSFNRGEC

SEQ ID NO: 20541 - protein, 111 aa, synthetic construct
  source 1..111: note = Description of Artificial Sequence: Synthetic polypeptide; note = VL of XENP020689
DTVLTQSPASLAVSLGQRATISCKASQSVDYDGDSYMNWYQQKPGQPPKLLIYAASNLESGIPARLSGSGSGTDFTLNIHPVEEEDAATYYCQQSEEDPFTFGSGTKLEVK

SEQ ID NO: 20542 - protein, 15 aa, synthetic construct
  source 1..15: note = Description of Artificial Sequence: Synthetic peptide; note = XENP020689 vlCDR1
KASQSVDYDGDSYMN

SEQ ID NO: 20543 - protein, 7 aa, synthetic construct
  source 1..7: note = Description of Artificial Sequence: Synthetic peptide; note = XENP020689 vlCDR2
AASNLES

SEQ ID NO: 20544 - protein, 9 aa, synthetic construct
  source 1..9: note = Description of Artificial Sequence: Synthetic peptide; note = XENP020689 vlCDR3
QQSEEDPFT

SEQ ID NO: 20545 - protein, 450 aa, synthetic construct; identical to SEQ ID NO: 17585
  source 1..450: note = Description of Artificial Sequence: Synthetic polypeptide; note = XENP020690 7G8_H0_L0.86_IgG1_PVA_/S267K Heavy Chain

SEQ ID NO: 20546 - protein, 121 aa, synthetic construct; identical to SEQ ID NO: 17586
  source 1..121: note = Description of Artificial Sequence: Synthetic polypeptide; note = VH of XENP020690

SEQ ID NO: 20547 - protein, 5 aa, synthetic construct
  source 1..5: note = Description of Artificial Sequence: Synthetic peptide; note = XENP020690 vhCDR1
DAWMD

SEQ ID NO: 20548 - protein, 19 aa, synthetic construct
  source 1..19: note = Description of Artificial Sequence: Synthetic peptide; note = XENP020690 vhCDR2
EIRTKANNHATYYAESVKG

SEQ ID NO: 20549 - protein, 10 aa, synthetic construct
  source 1..10: note = Description of Artificial Sequence: Synthetic peptide; note = XENP020690 vhCDR3
LANWDWYFDV

SEQ ID NO: 20550 - protein, 218 aa, synthetic construct
  source 1..218: note = Description of Artificial Sequence: Synthetic polypeptide; note = XENP020690 7G8_H0_L0.86_IgG1_PVA_/S267K Light Chain
DTVLTQSPASLAVSLGQRATISCKASQSVDYDGDSYMNWYQQKPGQPPKLLIYAASNLESGIPARLSGSGSGTDFTLNIHPVEEEDAATYYCQQSSEDPFTFGSGTKLEVKRTVAAPSVFIFPPSDEQLKSGTASVVCLLNNFYPREAKVQWKVDNALQSGNSQESVTEQDSKDSTYSLSSTLTLSKADYEKHKVYACEVTHQGLSSPVTKSFNRGEC

SEQ ID NO: 20551 - protein, 111 aa, synthetic construct
  source 1..111: note = Description of Artificial Sequence: Synthetic polypeptide; note = VL of XENP020690
DTVLTQSPASLAVSLGQRATISCKASQSVDYDGDSYMNWYQQKPGQPPKLLIYAASNLESGIPARLSGSGSGTDFTLNIHPVEEEDAATYYCQQSSEDPFTFGSGTKLEVK

SEQ ID NO: 20552 - protein, 15 aa, synthetic construct
  source 1..15: note = Description of Artificial Sequence: Synthetic peptide; note = XENP020690 vlCDR1
KASQSVDYDGDSYMN

SEQ ID NO: 20553 - protein, 7 aa, synthetic construct
  source 1..7: note = Description of Artificial Sequence: Synthetic peptide; note = XENP020690 vlCDR2
AASNLES

SEQ ID NO: 20554 - protein, 9 aa, synthetic construct
  source 1..9: note = Description of Artificial Sequence: Synthetic peptide; note = XENP020690 vlCDR3
QQSSEDPFT

SEQ ID NO: 20555 - protein, 450 aa, synthetic construct; identical to SEQ ID NO: 17585
  source 1..450: note = Description of Artificial Sequence: Synthetic polypeptide; note = XENP020691 7G8_H0_L0.87_IgG1_PVA_/S267K Heavy Chain

SEQ ID NO: 20556 - protein, 121 aa, synthetic construct; identical to SEQ ID NO: 17586
  source 1..121: note = Description of Artificial Sequence: Synthetic polypeptide; note = VH of XENP020691

SEQ ID NO: 20557 - protein, 5 aa, synthetic construct
  source 1..5: note = Description of Artificial Sequence: Synthetic peptide; note = XENP020691 vhCDR1
DAWMD

SEQ ID NO: 20558 - protein, 19 aa, synthetic construct
  source 1..19: note = Description of Artificial Sequence: Synthetic peptide; note = XENP020691 vhCDR2
EIRTKANNHATYYAESVKG

SEQ ID NO: 20559 - protein, 10 aa, synthetic construct
  source 1..10: note = Description of Artificial Sequence: Synthetic peptide; note = XENP020691 vhCDR3
LANWDWYFDV

SEQ ID NO: 20560 - protein, 218 aa, synthetic construct
  source 1..218: note = Description of Artificial Sequence: Synthetic polypeptide; note = XENP020691 7G8_H0_L0.87_IgG1_PVA_/S267K Light Chain
DTVLTQSPASLAVSLGQRATISCKASQSVDYDGDSYMNWYQQKPGQPPKLLIYAASNLESGIPARLSGSGSGTDFTLNIHPVEEEDAATYYCQQSREDPFTFGSGTKLEVKRTVAAPSVFIFPPSDEQLKSGTASVVCLLNNFYPREAKVQWKVDNALQSGNSQESVTEQDSKDSTYSLSSTLTLSKADYEKHKVYACEVTHQGLSSPVTKSFNRGEC

SEQ ID NO: 20561 - protein, 111 aa, synthetic construct
  source 1..111: note = Description of Artificial Sequence: Synthetic polypeptide; note = VL of XENP020691
DTVLTQSPASLAVSLGQRATISCKASQSVDYDGDSYMNWYQQKPGQPPKLLIYAASNLESGIPARLSGSGSGTDFTLNIHPVEEEDAATYYCQQSREDPFTFGSGTKLEVK

SEQ ID NO: 20562 - protein, 15 aa, synthetic construct
  source 1..15: note = Description of Artificial Sequence: Synthetic peptide; note = XENP020691 vlCDR1
KASQSVDYDGDSYMN

SEQ ID NO: 20563 - protein, 7 aa, synthetic construct
  source 1..7: note = Description of Artificial Sequence: Synthetic peptide; note = XENP020691 vlCDR2
AASNLES

SEQ ID NO: 20564 - protein, 9 aa, synthetic construct
  source 1..9: note = Description of Artificial Sequence: Synthetic peptide; note = XENP020691 vlCDR3
QQSREDPFT

SEQ ID NO: 20565 - protein, 450 aa, synthetic construct; identical to SEQ ID NO: 17585
  source 1..450: note = Description of Artificial Sequence: Synthetic polypeptide; note = XENP020692 7G8_H0_L0.88_IgG1_PVA_/S267K Heavy Chain

SEQ ID NO: 20566 - protein, 121 aa, synthetic construct; identical to SEQ ID NO: 17586
  source 1..121: note = Description of Artificial Sequence: Synthetic polypeptide; note = VH of XENP020692

SEQ ID NO: 20567 - protein, 5 aa, synthetic construct
  source 1..5: note = Description of Artificial Sequence: Synthetic peptide; note = XENP020692 vhCDR1
DAWMD

SEQ ID NO: 20568 - protein, 19 aa, synthetic construct
  source 1..19: note = Description of Artificial Sequence: Synthetic peptide; note = XENP020692 vhCDR2
EIRTKANNHATYYAESVKG

SEQ ID NO: 20569 - protein, 10 aa, synthetic construct
  source 1..10: note = Description of Artificial Sequence: Synthetic peptide; note = XENP020692 vhCDR3
LANWDWYFDV

SEQ ID NO: 20570 - protein, 218 aa, synthetic construct
  source 1..218: note = Description of Artificial Sequence: Synthetic polypeptide; note = XENP020692 7G8_H0_L0.88_IgG1_PVA_/S267K Light Chain
DTVLTQSPASLAVSLGQRATISCKASQSVDYDGDSYMNWYQQKPGQPPKLLIYAASNLESGIPARLSGSGSGTDFTLNIHPVEEEDAATYYCQQSLEDPFTFGSGTKLEVKRTVAAPSVFIFPPSDEQLKSGTASVVCLLNNFYPREAKVQWKVDNALQSGNSQESVTEQDSKDSTYSLSSTLTLSKADYEKHKVYACEVTHQGLSSPVTKSFNRGEC

SEQ ID NO: 20571 - protein, 111 aa, synthetic construct
  source 1..111: note = Description of Artificial Sequence: Synthetic polypeptide; note = VL of XENP020692
DTVLTQSPASLAVSLGQRATISCKASQSVDYDGDSYMNWYQQKPGQPPKLLIYAASNLESGIPARLSGSGSGTDFTLNIHPVEEEDAATYYCQQSLEDPFTFGSGTKLEVK

SEQ ID NO: 20572 - protein, 15 aa, synthetic construct
  source 1..15: note = Description of Artificial Sequence: Synthetic peptide; note = XENP020692 vlCDR1
KASQSVDYDGDSYMN

SEQ ID NO: 20573 - protein, 7 aa, synthetic construct
  source 1..7: note = Description of Artificial Sequence: Synthetic peptide; note = XENP020692 vlCDR2
AASNLES

SEQ ID NO: 20574 - protein, 9 aa, synthetic construct
  source 1..9: note = Description of Artificial Sequence: Synthetic peptide; note = XENP020692 vlCDR3
QQSLEDPFT

SEQ ID NO: 20575 - protein, 450 aa, synthetic construct; identical to SEQ ID NO: 17585
  source 1..450: note = Description of Artificial Sequence: Synthetic polypeptide; note = XENP020693 7G8_H0_L0.89_IgG1_PVA_/S267K Heavy Chain

SEQ ID NO: 20576 - protein, 121 aa, synthetic construct; identical to SEQ ID NO: 17586
  source 1..121: note = Description of Artificial Sequence: Synthetic polypeptide; note = VH of XENP020693

SEQ ID NO: 20577 - protein, 5 aa, synthetic construct
  source 1..5: note = Description of Artificial Sequence: Synthetic peptide; note = XENP020693 vhCDR1
DAWMD

SEQ ID NO: 20578 - protein, 19 aa, synthetic construct
  source 1..19: note = Description of Artificial Sequence: Synthetic peptide; note = XENP020693 vhCDR2
EIRTKANNHATYYAESVKG

SEQ ID NO: 20579 - protein, 10 aa, synthetic construct
  source 1..10: note = Description of Artificial Sequence: Synthetic peptide; note = XENP020693 vhCDR3
LANWDWYFDV

SEQ ID NO: 20580 - protein, 218 aa, synthetic construct
  source 1..218: note = Description of Artificial Sequence: Synthetic polypeptide; note = XENP020693 7G8_H0_L0.89_IgG1_PVA_/S267K Light Chain
DTVLTQSPASLAVSLGQRATISCKASQSVDYDGDSYMNWYQQKPGQPPKLLIYAASNLESGIPARLSGSGSGTDFTLNIHPVEEEDAATYYCQQSTEDPFTFGSGTKLEVKRTVAAPSVFIFPPSDEQLKSGTASVVCLLNNFYPREAKVQWKVDNALQSGNSQESVTEQDSKDSTYSLSSTLTLSKADYEKHKVYACEVTHQGLSSPVTKSFNRGEC

SEQ ID NO: 20581 - protein, 111 aa, synthetic construct
  source 1..111: note = Description of Artificial Sequence: Synthetic polypeptide; note = VL of XENP020693
DTVLTQSPASLAVSLGQRATISCKASQSVDYDGDSYMNWYQQKPGQPPKLLIYAASNLESGIPARLSGSGSGTDFTLNIHPVEEEDAATYYCQQSTEDPFTFGSGTKLEVK

SEQ ID NO: 20582 - protein, 15 aa, synthetic construct
  source 1..15: note = Description of Artificial Sequence: Synthetic peptide; note = XENP020693 vlCDR1
KASQSVDYDGDSYMN

SEQ ID NO: 20583 - protein, 7 aa, synthetic construct
  source 1..7: note = Description of Artificial Sequence: Synthetic peptide; note = XENP020693 vlCDR2
AASNLES

SEQ ID NO: 20584 - protein, 9 aa, synthetic construct
  source 1..9: note = Description of Artificial Sequence: Synthetic peptide; note = XENP020693 vlCDR3
QQSTEDPFT

SEQ ID NO: 20585 - protein, 450 aa, synthetic construct; identical to SEQ ID NO: 17585
  source 1..450: note = Description of Artificial Sequence: Synthetic polypeptide; note = XENP020694 7G8_H0_L0.90_IgG1_PVA_/S267K Heavy Chain

SEQ ID NO: 20586 - protein, 121 aa, synthetic construct; identical to SEQ ID NO: 17586
  source 1..121: note = Description of Artificial Sequence: Synthetic polypeptide; note = VH of XENP020694

SEQ ID NO: 20587 - protein, 5 aa, synthetic construct
  source 1..5: note = Description of Artificial Sequence: Synthetic peptide; note = XENP020694 vhCDR1
DAWMD

SEQ ID NO: 20588 - protein, 19 aa, synthetic construct
  source 1..19: note = Description of Artificial Sequence: Synthetic peptide; note = XENP020694 vhCDR2
EIRTKANNHATYYAESVKG

SEQ ID NO: 20589 - protein, 10 aa, synthetic construct
  source 1..10: note = Description of Artificial Sequence: Synthetic peptide; note = XENP020694 vhCDR3
LANWDWYFDV

SEQ ID NO: 20590 - protein, 218 aa, synthetic construct
  source 1..218: note = Description of Artificial Sequence: Synthetic polypeptide; note = XENP020694 7G8_H0_L0.90_IgG1_PVA_/S267K Light Chain
DTVLTQSPASLAVSLGQRATISCKASQSVDYDGDSYMNWYQQKPGQPPKLLIYAASNLESGIPARLSGSGSGTDFTLNIHPVEEEDAATYYCQQSGEDPFTFGSGTKLEVKRTVAAPSVFIFPPSDEQLKSGTASVVCLLNNFYPREAKVQWKVDNALQSGNSQESVTEQDSKDSTYSLSSTLTLSKADYEKHKVYACEVTHQGLSSPVTKSFNRGEC

SEQ ID NO: 20591 - protein, 111 aa, synthetic construct
  source 1..111: note = Description of Artificial Sequence: Synthetic polypeptide; note = VL of XENP020694
DTVLTQSPASLAVSLGQRATISCKASQSVDYDGDSYMNWYQQKPGQPPKLLIYAASNLESGIPARLSGSGSGTDFTLNIHPVEEEDAATYYCQQSGEDPFTFGSGTKLEVK

SEQ ID NO: 20592 - protein, 15 aa, synthetic construct
  source 1..15: note = Description of Artificial Sequence: Synthetic peptide; note = XENP020694 vlCDR1
KASQSVDYDGDSYMN

SEQ ID NO: 20593 - protein, 7 aa, synthetic construct
  source 1..7: note = Description of Artificial Sequence: Synthetic peptide; note = XENP020694 vlCDR2
AASNLES

SEQ ID NO: 20594 - protein, 9 aa, synthetic construct
  source 1..9: note = Description of Artificial Sequence: Synthetic peptide; note = XENP020694 vlCDR3
QQSGEDPFT

SEQ ID NO: 20595 - protein, 450 aa, synthetic construct; identical to SEQ ID NO: 17585
  source 1..450: note = Description of Artificial Sequence: Synthetic polypeptide; note = XENP020695 7G8_H0_L0.91_IgG1_PVA_/S267K Heavy Chain

SEQ ID NO: 20596 - protein, 121 aa, synthetic construct; identical to SEQ ID NO: 17586
  source 1..121: note = Description of Artificial Sequence: Synthetic polypeptide; note = VH of XENP020695

SEQ ID NO: 20597 - protein, 5 aa, synthetic construct
  source 1..5: note = Description of Artificial Sequence: Synthetic peptide; note = XENP020695 vhCDR1
DAWMD

SEQ ID NO: 20598 - protein, 19 aa, synthetic construct
  source 1..19: note = Description of Artificial Sequence: Synthetic peptide; note = XENP020695 vhCDR2
EIRTKANNHATYYAESVKG

SEQ ID NO: 20599 - protein, 10 aa, synthetic construct
  source 1..10: note = Description of Artificial Sequence: Synthetic peptide; note = XENP020695 vhCDR3
LANWDWYFDV

SEQ ID NO: 20600 - protein, 218 aa, synthetic construct
  source 1..218: note = Description of Artificial Sequence: Synthetic polypeptide; note = XENP020695 7G8_H0_L0.91_IgG1_PVA_/S267K Light Chain
DTVLTQSPASLAVSLGQRATISCKASQSVDYDGDSYMNWYQQKPGQPPKLLIYAASNLESGIPARLSGSGSGTDFTLNIHPVEEEDAATYYCQQSYEDPFTFGSGTKLEVKRTVAAPSVFIFPPSDEQLKSGTASVVCLLNNFYPREAKVQWKVDNALQSGNSQESVTEQDSKDSTYSLSSTLTLSKADYEKHKVYACEVTHQGLSSPVTKSFNRGEC

SEQ ID NO: 20601 - protein, 111 aa, synthetic construct
  source 1..111: note = Description of Artificial Sequence: Synthetic polypeptide; note = VL of XENP020695
DTVLTQSPASLAVSLGQRATISCKASQSVDYDGDSYMNWYQQKPGQPPKLLIYAASNLESGIPARLSGSGSGTDFTLNIHPVEEEDAATYYCQQSYEDPFTFGSGTKLEVK

SEQ ID NO: 20602 - protein, 15 aa, synthetic construct
  source 1..15: note = Description of Artificial Sequence: Synthetic peptide; note = XENP020695 vlCDR1
KASQSVDYDGDSYMN

SEQ ID NO: 20603 - protein, 7 aa, synthetic construct
  source 1..7: note = Description of Artificial Sequence: Synthetic peptide; note = XENP020695 vlCDR2
AASNLES

SEQ ID NO: 20604 - protein, 9 aa, synthetic construct
  source 1..9: note = Description of Artificial Sequence: Synthetic peptide; note = XENP020695 vlCDR3
QQSYEDPFT

SEQ ID NO: 20605 - protein, 450 aa, synthetic construct; identical to SEQ ID NO: 17585
  source 1..450: note = Description of Artificial Sequence: Synthetic polypeptide; note = XENP020696 7G8_H0_L0.92_IgG1_PVA_/S267K Heavy Chain

SEQ ID NO: 20606 - protein, 121 aa, synthetic construct; identical to SEQ ID NO: 17586
  source 1..121: note = Description of Artificial Sequence: Synthetic polypeptide; note = VH of XENP020696

SEQ ID NO: 20607 - protein, 5 aa, synthetic construct
  source 1..5: note = Description of Artificial Sequence: Synthetic peptide; note = XENP020696 vhCDR1
DAWMD

SEQ ID NO: 20608 - protein, 19 aa, synthetic construct
  source 1..19: note = Description of Artificial Sequence: Synthetic peptide; note = XENP020696 vhCDR2
EIRTKANNHATYYAESVKG

SEQ ID NO: 20609 - protein, 10 aa, synthetic construct
  source 1..10: note = Description of Artificial Sequence: Synthetic peptide; note = XENP020696 vhCDR3
LANWDWYFDV

SEQ ID NO: 20610 - protein, 218 aa, synthetic construct
  source 1..218: note = Description of Artificial Sequence: Synthetic polypeptide; note = XENP020696 7G8_H0_L0.92_IgG1_PVA_/S267K Light Chain
DTVLTQSPASLAVSLGQRATISCKASQSVDYDGDSYMNWYQQKPGQPPKLLIYAASNLESGIPARLSGSGSGTDFTLNIHPVEEEDAATYYCQQSNQDPFTFGSGTKLEVKRTVAAPSVFIFPPSDEQLKSGTASVVCLLNNFYPREAKVQWKVDNALQSGNSQESVTEQDSKDSTYSLSSTLTLSKADYEKHKVYACEVTHQGLSSPVTKSFNRGEC

SEQ ID NO: 20611 - protein, 111 aa, synthetic construct
  source 1..111: note = Description of Artificial Sequence: Synthetic polypeptide; note = VL of XENP020696
DTVLTQSPASLAVSLGQRATISCKASQSVDYDGDSYMNWYQQKPGQPPKLLIYAASNLESGIPARLSGSGSGTDFTLNIHPVEEEDAATYYCQQSNQDPFTFGSGTKLEVK

SEQ ID NO: 20612 - protein, 15 aa, synthetic construct
  source 1..15: note = Description of Artificial Sequence: Synthetic peptide; note = XENP020696 vlCDR1
KASQSVDYDGDSYMN

SEQ ID NO: 20613 - protein, 7 aa, synthetic construct
  source 1..7: note = Description of Artificial Sequence: Synthetic peptide; note = XENP020696 vlCDR2
AASNLES

SEQ ID NO: 20614 - protein, 9 aa, synthetic construct
  source 1..9: note = Description of Artificial Sequence: Synthetic peptide; note = XENP020696 vlCDR3
QQSNQDPFT

SEQ ID NO: 20615 - protein, 450 aa, synthetic construct; identical to SEQ ID NO: 17585
  source 1..450: note = Description of Artificial Sequence: Synthetic polypeptide; note = XENP020701 7G8_H0_L0.93_IgG1_PVA_/S267K Heavy Chain

SEQ ID NO: 20616 - protein, 121 aa, synthetic construct; identical to SEQ ID NO: 17586
  source 1..121: note = Description of Artificial Sequence: Synthetic polypeptide; note = VH of XENP020701

SEQ ID NO: 20617 - protein, 5 aa, synthetic construct
  source 1..5: note = Description of Artificial Sequence: Synthetic peptide; note = XENP020701 vhCDR1
DAWMD

SEQ ID NO: 20618 - protein, 19 aa, synthetic construct
  source 1..19: note = Description of Artificial Sequence: Synthetic peptide; note = XENP020701 vhCDR2
EIRTKANNHATYYAESVKG

SEQ ID NO: 20619 - protein, 10 aa, synthetic construct
  source 1..10: note = Description of Artificial Sequence: Synthetic peptide; note = XENP020701 vhCDR3
LANWDWYFDV

SEQ ID NO: 20620 - protein, 218 aa, synthetic construct
  source 1..218: note = Description of Artificial Sequence: Synthetic polypeptide; note = XENP020701 7G8_H0_L0.93_IgG1_PVA_/S267K Light Chain
DTVLTQSPASLAVSLGQRATISCKASQSVDYDGDSYMNWYQQKPGQPPKLLIYAASNLESGIPARLSGSGSGTDFTLNIHPVEEEDAATYYCQQSNDDPFTFGSGTKLEVKRTVAAPSVFIFPPSDEQLKSGTASVVCLLNNFYPREAKVQWKVDNALQSGNSQESVTEQDSKDSTYSLSSTLTLSKADYEKHKVYACEVTHQGLSSPVTKSFNRGEC

SEQ ID NO: 20621 - protein, 111 aa, synthetic construct
  source 1..111: note = Description of Artificial Sequence: Synthetic polypeptide; note = VL of XENP020701
DTVLTQSPASLAVSLGQRATISCKASQSVDYDGDSYMNWYQQKPGQPPKLLIYAASNLESGIPARLSGSGSGTDFTLNIHPVEEEDAATYYCQQSNDDPFTFGSGTKLEVK

SEQ ID NO: 20622 - protein, 15 aa, synthetic construct
  source 1..15: note = Description of Artificial Sequence: Synthetic peptide; note = XENP020701 vlCDR1
KASQSVDYDGDSYMN

SEQ ID NO: 20623 - protein, 7 aa, synthetic construct
  source 1..7: note = Description of Artificial Sequence: Synthetic peptide; note = XENP020701 vlCDR2
AASNLES

SEQ ID NO: 20624 - protein, 9 aa, synthetic construct
  source 1..9: note = Description of Artificial Sequence: Synthetic peptide; note = XENP020701 vlCDR3
QQSNDDPFT

SEQ ID NO: 20625 - protein, 450 aa, synthetic construct; identical to SEQ ID NO: 17585
  source 1..450: note = Description of Artificial Sequence: Synthetic polypeptide; note = XENP020702 7G8_H0_L0.94_IgG1_PVA_/S267K Heavy Chain

SEQ ID NO: 20626 - protein, 121 aa, synthetic construct; identical to SEQ ID NO: 17586
  source 1..121: note = Description of Artificial Sequence: Synthetic polypeptide; note = VH of XENP020702

SEQ ID NO: 20627 - protein, 5 aa, synthetic construct
  source 1..5: note = Description of Artificial Sequence: Synthetic peptide; note = XENP020702 vhCDR1
DAWMD

SEQ ID NO: 20628 - protein, 19 aa, synthetic construct
  source 1..19: note = Description of Artificial Sequence: Synthetic peptide; note = XENP020702 vhCDR2
EIRTKANNHATYYAESVKG

SEQ ID NO: 20629 - protein, 10 aa, synthetic construct
  source 1..10: note = Description of Artificial Sequence: Synthetic peptide; note = XENP020702 vhCDR3
LANWDWYFDV

SEQ ID NO: 20630 - protein, 218 aa, synthetic construct
  source 1..218: note = Description of Artificial Sequence: Synthetic polypeptide; note = XENP020702 7G8_H0_L0.94_IgG1_PVA_/S267K Light Chain
DTVLTQSPASLAVSLGQRATISCKASQSVDYDGDSYMNWYQQKPGQPPKLLIYAASNLESGIPARLSGSGSGTDFTLNIHPVEEEDAATYYCQQSNKDPFTFGSGTKLEVKRTVAAPSVFIFPPSDEQLKSGTASVVCLLNNFYPREAKVQWKVDNALQSGNSQESVTEQDSKDSTYSLSSTLTLSKADYEKHKVYACEVTHQGLSSPVTKSFNRGEC

SEQ ID NO: 20631 - protein, 111 aa, synthetic construct
  source 1..111: note = Description of Artificial Sequence: Synthetic polypeptide; note = VL of XENP020702
DTVLTQSPASLAVSLGQRATISCKASQSVDYDGDSYMNWYQQKPGQPPKLLIYAASNLESGIPARLSGSGSGTDFTLNIHPVEEEDAATYYCQQSNKDPFTFGSGTKLEVK

SEQ ID NO: 20632 - protein, 15 aa, synthetic construct
  source 1..15: note = Description of Artificial Sequence: Synthetic peptide; note = XENP020702 vlCDR1
KASQSVDYDGDSYMN

SEQ ID NO: 20633 - protein, 7 aa, synthetic construct
  source 1..7: note = Description of Artificial Sequence: Synthetic peptide; note = XENP020702 vlCDR2
AASNLES

SEQ ID NO: 20634 - protein, 9 aa, synthetic construct
  source 1..9: note = Description of Artificial Sequence: Synthetic peptide; note = XENP020702 vlCDR3
QQSNKDPFT

SEQ ID NO: 20635 - protein, 450 aa, synthetic construct; identical to SEQ ID NO: 17585
  source 1..450: note = Description of Artificial Sequence: Synthetic polypeptide; note = XENP020703 7G8_H0_L0.95_IgG1_PVA_/S267K Heavy Chain

SEQ ID NO: 20636 - protein, 121 aa, synthetic construct; identical to SEQ ID NO: 17586
  source 1..121: note = Description of Artificial Sequence: Synthetic polypeptide; note = VH of XENP020703

SEQ ID NO: 20637 - protein, 5 aa, synthetic construct
  source 1..5: note = Description of Artificial Sequence: Synthetic peptide; note = XENP020703 vhCDR1
DAWMD

SEQ ID NO: 20638 - protein, 19 aa, synthetic construct
  source 1..19: note = Description of Artificial Sequence: Synthetic peptide; note = XENP020703 vhCDR2
EIRTKANNHATYYAESVKG

SEQ ID NO: 20639 - protein, 10 aa, synthetic construct
  source 1..10: note = Description of Artificial Sequence: Synthetic peptide; note = XENP020703 vhCDR3
LANWDWYFDV

SEQ ID NO: 20640 - protein, 218 aa, synthetic construct
  source 1..218: note = Description of Artificial Sequence: Synthetic polypeptide; note = XENP020703 7G8_H0_L0.95_IgG1_PVA_/S267K Light Chain
DTVLTQSPASLAVSLGQRATISCKASQSVDYDGDSYMNWYQQKPGQPPKLLIYAASNLESGIPARLSGSGSGTDFTLNIHPVEEEDAATYYCQQSNSDPFTFGSGTKLEVKRTVAAPSVFIFPPSDEQLKSGTASVVCLLNNFYPREAKVQWKVDNALQSGNSQESVTEQDSKDSTYSLSSTLTLSKADYEKHKVYACEVTHQGLSSPVTKSFNRGEC

SEQ ID NO: 20641 - protein, 111 aa, synthetic construct
  source 1..111: note = Description of Artificial Sequence: Synthetic polypeptide; note = VL of XENP020703
DTVLTQSPASLAVSLGQRATISCKASQSVDYDGDSYMNWYQQKPGQPPKLLIYAASNLESGIPARLSGSGSGTDFTLNIHPVEEEDAATYYCQQSNSDPFTFGSGTKLEVK

SEQ ID NO: 20642 - protein, 15 aa, synthetic construct
  source 1..15: note = Description of Artificial Sequence: Synthetic peptide; note = XENP020703 vlCDR1
KASQSVDYDGDSYMN

SEQ ID NO: 20643 - protein, 7 aa, synthetic construct
  source 1..7: note = Description of Artificial Sequence: Synthetic peptide; note = XENP020703 vlCDR2
AASNLES

SEQ ID NO: 20644 - protein, 9 aa, synthetic construct
  source 1..9: note = Description of Artificial Sequence: Synthetic peptide; note = XENP020703 vlCDR3
QQSNSDPFT

SEQ ID NO: 20645 - protein, 450 aa, synthetic construct; identical to SEQ ID NO: 17585
  source 1..450: note = Description of Artificial Sequence: Synthetic polypeptide; note = XENP020704 7G8_H0_L0.96_IgG1_PVA_/S267K Heavy Chain

SEQ ID NO: 20646 - protein, 121 aa, synthetic construct; identical to SEQ ID NO: 17586
  source 1..121: note = Description of Artificial Sequence: Synthetic polypeptide; note = VH of XENP020704

SEQ ID NO: 20647 - protein, 5 aa, synthetic construct
  source 1..5: note = Description of Artificial Sequence: Synthetic peptide; note = XENP020704 vhCDR1
DAWMD

SEQ ID NO: 20648 - protein, 19 aa, synthetic construct
  source 1..19: note = Description of Artificial Sequence: Synthetic peptide; note = XENP020704 vhCDR2
EIRTKANNHATYYAESVKG

SEQ ID NO: 20649 - protein, 10 aa, synthetic construct
  source 1..10: note = Description of Artificial Sequence: Synthetic peptide; note = XENP020704 vhCDR3
LANWDWYFDV

SEQ ID NO: 20650 - protein, 218 aa, synthetic construct
  source 1..218: note = Description of Artificial Sequence: Synthetic polypeptide; note = XENP020704 7G8_H0_L0.96_IgG1_PVA_/S267K Light Chain
DTVLTQSPASLAVSLGQRATISCKASQSVDYDGDSYMNWYQQKPGQPPKLLIYAASNLESGIPARLSGSGSGTDFTLNIHPVEEEDAATYYCQQSNHDPFTFGSGTKLEVKRTVAAPSVFIFPPSDEQLKSGTASVVCLLNNFYPREAKVQWKVDNALQSGNSQESVTEQDSKDSTYSLSSTLTLSKADYEKHKVYACEVTHQGLSSPVTKSFNRGEC

SEQ ID NO: 20651 - protein, 111 aa, synthetic construct
  source 1..111: note = Description of Artificial Sequence: Synthetic polypeptide; note = VL of XENP020704
DTVLTQSPASLAVSLGQRATISCKASQSVDYDGDSYMNWYQQKPGQPPKLLIYAASNLESGIPARLSGSGSGTDFTLNIHPVEEEDAATYYCQQSNHDPFTFGSGTKLEVK

SEQ ID NO: 20652 - protein, 15 aa, synthetic construct
  source 1..15: note = Description of Artificial Sequence: Synthetic peptide; note = XENP020704 vlCDR1
KASQSVDYDGDSYMN

SEQ ID NO: 20653 - protein, 7 aa, synthetic construct
  source 1..7: note = Description of Artificial Sequence: Synthetic peptide; note = XENP020704 vlCDR2
AASNLES

SEQ ID NO: 20654 - protein, 9 aa, synthetic construct
  source 1..9: note = Description of Artificial Sequence: Synthetic peptide; note = XENP020704 vlCDR3
QQSNHDPFT

SEQ ID NO: 20655 - protein, 450 aa, synthetic construct; identical to SEQ ID NO: 17585
  source 1..450: note = Description of Artificial Sequence: Synthetic polypeptide; note = XENP020705 7G8_H0_L0.97_IgG1_PVA_/S267K Heavy Chain

SEQ ID NO: 20656 - protein, 121 aa, synthetic construct; identical to SEQ ID NO: 17586
  source 1..121: note = Description of Artificial Sequence: Synthetic polypeptide; note = VH of XENP020705

SEQ ID NO: 20657 - protein, 5 aa, synthetic construct
  source 1..5: note = Description of Artificial Sequence: Synthetic peptide; note = XENP020705 vhCDR1
DAWMD

SEQ ID NO: 20658 - protein, 19 aa, synthetic construct
  source 1..19: note = Description of Artificial Sequence: Synthetic peptide; note = XENP020705 vhCDR2
EIRTKANNHATYYAESVKG

SEQ ID NO: 20659 - protein, 10 aa, synthetic construct
  source 1..10: note = Description of Artificial Sequence: Synthetic peptide; note = XENP020705 vhCDR3
LANWDWYFDV

SEQ ID NO: 20660 - protein, 218 aa, synthetic construct
  source 1..218: note = Description of Artificial Sequence: Synthetic polypeptide; note = XENP020705 7G8_H0_L0.97_IgG1_PVA_/S267K Light Chain
DTVLTQSPASLAVSLGQRATISCKASQSVDYDGDSYMNWYQQKPGQPPKLLIYAASNLESGIPARLSGSGSGTDFTLNIHPVEEEDAATYYCQQSNADPFTFGSGTKLEVKRTVAAPSVFIFPPSDEQLKSGTASVVCLLNNFYPREAKVQWKVDNALQSGNSQESVTEQDSKDSTYSLSSTLTLSKADYEKHKVYACEVTHQGLSSPVTKSFNRGEC

SEQ ID NO: 20661 - protein, 111 aa, synthetic construct
  source 1..111: note = Description of Artificial Sequence: Synthetic polypeptide; note = VL of XENP020705
DTVLTQSPASLAVSLGQRATISCKASQSVDYDGDSYMNWYQQKPGQPPKLLIYAASNLESGIPARLSGSGSGTDFTLNIHPVEEEDAATYYCQQSNADPFTFGSGTKLEVK

SEQ ID NO: 20662 - protein, 15 aa, synthetic construct
  source 1..15: note = Description of Artificial Sequence: Synthetic peptide; note = XENP020705 vlCDR1
KASQSVDYDGDSYMN

SEQ ID NO: 20663 - protein, 7 aa, synthetic construct
  source 1..7: note = Description of Artificial Sequence: Synthetic peptide; note = XENP020705 vlCDR2
AASNLES

SEQ ID NO: 20664 - protein, 9 aa, synthetic construct
  source 1..9: note = Description of Artificial Sequence: Synthetic peptide; note = XENP020705 vlCDR3
QQSNADPFT

SEQ ID NO: 20665 - protein, 450 aa, synthetic construct; identical to SEQ ID NO: 17585
  source 1..450: note = Description of Artificial Sequence: Synthetic polypeptide; note = XENP020706 7G8_H0_L0.98_IgG1_PVA_/S267K Heavy Chain

SEQ ID NO: 20666 - protein, 121 aa, synthetic construct; identical to SEQ ID NO: 17586
  source 1..121: note = Description of Artificial Sequence: Synthetic polypeptide; note = VH of XENP020706

SEQ ID NO: 20667 - protein, 5 aa, synthetic construct
  source 1..5: note = Description of Artificial Sequence: Synthetic peptide; note = XENP020706 vhCDR1
DAWMD

SEQ ID NO: 20668 - protein, 19 aa, synthetic construct
  source 1..19: note = Description of Artificial Sequence: Synthetic peptide; note = XENP020706 vhCDR2
EIRTKANNHATYYAESVKG

SEQ ID NO: 20669 - protein, 10 aa, synthetic construct
  source 1..10: note = Description of Artificial Sequence: Synthetic peptide; note = XENP020706 vhCDR3
LANWDWYFDV

SEQ ID NO: 20670 - protein, 218 aa, synthetic construct
  source 1..218: note = Description of Artificial Sequence: Synthetic polypeptide; note = XENP020706 7G8_H0_L0.98_IgG1_PVA_/S267K Light Chain
DTVLTQSPASLAVSLGQRATISCKASQSVDYDGDSYMNWYQQKPGQPPKLLIYAASNLESGIPARLSGSGSGTDFTLNIHPVEEEDAATYYCQQSNGDPFTFGSGTKLEVKRTVAAPSVFIFPPSDEQLKSGTASVVCLLNNFYPREAKVQWKVDNALQSGNSQESVTEQDSKDSTYSLSSTLTLSKADYEKHKVYACEVTHQGLSSPVTKSFNRGEC

SEQ ID NO: 20671 - protein, 111 aa, synthetic construct
  source 1..111: note = Description of Artificial Sequence: Synthetic polypeptide; note = VL of XENP020706
DTVLTQSPASLAVSLGQRATISCKASQSVDYDGDSYMNWYQQKPGQPPKLLIYAASNLESGIPARLSGSGSGTDFTLNIHPVEEEDAATYYCQQSNGDPFTFGSGTKLEVK

SEQ ID NO: 20672 - protein, 15 aa, synthetic construct
  source 1..15: note = Description of Artificial Sequence: Synthetic peptide; note = XENP020706 vlCDR1
KASQSVDYDGDSYMN

SEQ ID NO: 20673 - protein, 7 aa, synthetic construct
  source 1..7: note = Description of Artificial Sequence: Synthetic peptide; note = XENP020706 vlCDR2
AASNLES

SEQ ID NO: 20674 - protein, 9 aa, synthetic construct
  source 1..9: note = Description of Artificial Sequence: Synthetic peptide; note = XENP020706 vlCDR3
QQSNGDPFT

SEQ ID NO: 20675 - protein, 450 aa, synthetic construct; identical to SEQ ID NO: 17585
  source 1..450: note = Description of Artificial Sequence: Synthetic polypeptide; note = XENP020707 7G8_H0_L0.99_IgG1_PVA_/S267K Heavy Chain

SEQ ID NO: 20676 - protein, 121 aa, synthetic construct; identical to SEQ ID NO: 17586
  source 1..121: note = Description of Artificial Sequence: Synthetic polypeptide; note = VH of XENP020707

SEQ ID NO: 20677 - protein, 5 aa, synthetic construct
  source 1..5: note = Description of Artificial Sequence: Synthetic peptide; note = XENP020707 vhCDR1
DAWMD

SEQ ID NO: 20678 - protein, 19 aa, synthetic construct
  source 1..19: note = Description of Artificial Sequence: Synthetic peptide; note = XENP020707 vhCDR2
EIRTKANNHATYYAESVKG

SEQ ID NO: 20679 - protein, 10 aa, synthetic construct
  source 1..10: note = Description of Artificial Sequence: Synthetic peptide; note = XENP020707 vhCDR3
LANWDWYFDV

SEQ ID NO: 20680 - protein, 218 aa, synthetic construct
  source 1..218: note = Description of Artificial Sequence: Synthetic polypeptide; note = XENP020707 7G8_H0_L0.99_IgG1_PVA_/S267K Light Chain
DTVLTQSPASLAVSLGQRATISCKASQSVDYDGDSYMNWYQQKPGQPPKLLIYAASNLESGIPARLSGSGSGTDFTLNIHPVEEEDAATYYCQQSNYDPFTFGSGTKLEVKRTVAAPSVFIFPPSDEQLKSGTASVVCLLNNFYPREAKVQWKVDNALQSGNSQESVTEQDSKDSTYSLSSTLTLSKADYEKHKVYACEVTHQGLSSPVTKSFNRGEC

SEQ ID NO: 20681 - protein, 111 aa, synthetic construct
  source 1..111: note = Description of Artificial Sequence: Synthetic polypeptide; note = VL of XENP020707
DTVLTQSPASLAVSLGQRATISCKASQSVDYDGDSYMNWYQQKPGQPPKLLIYAASNLESGIPARLSGSGSGTDFTLNIHPVEEEDAATYYCQQSNYDPFTFGSGTKLEVK

SEQ ID NO: 20682 - protein, 15 aa, synthetic construct
  source 1..15: note = Description of Artificial Sequence: Synthetic peptide; note = XENP020707 vlCDR1
KASQSVDYDGDSYMN

SEQ ID NO: 20683 - protein, 7 aa, synthetic construct
  source 1..7: note = Description of Artificial Sequence: Synthetic peptide; note = XENP020707 vlCDR2
AASNLES

SEQ ID NO: 20684 - protein, 9 aa, synthetic construct
  source 1..9: note = Description of Artificial Sequence: Synthetic peptide; note = XENP020707 vlCDR3
QQSNYDPFT

SEQ ID NO: 20685 - protein, 450 aa, synthetic construct; identical to SEQ ID NO: 17585
  source 1..450: note = Description of Artificial Sequence: Synthetic polypeptide; note = XENP020708 7G8_H0_L0.100_IgG1_PVA_/S267K Heavy Chain

SEQ ID NO: 20686 - protein, 121 aa, synthetic construct; identical to SEQ ID NO: 17586
  source 1..121: note = Description of Artificial Sequence: Synthetic polypeptide; note = VH of XENP020708

SEQ ID NO: 20687 - protein, 5 aa, synthetic construct
  source 1..5: note = Description of Artificial Sequence: Synthetic peptide; note = XENP020708 vhCDR1
DAWMD

SEQ ID NO: 20688 - protein, 19 aa, synthetic construct
  source 1..19: note = Description of Artificial Sequence: Synthetic peptide; note = XENP020708 vhCDR2
EIRTKANNHATYYAESVKG

SEQ ID NO: 20689 - protein, 10 aa, synthetic construct
  source 1..10: note = Description of Artificial Sequence: Synthetic peptide; note = XENP020708 vhCDR3
LANWDWYFDV

SEQ ID NO: 20690 - protein, 218 aa, synthetic construct
  source 1..218: note = Description of Artificial Sequence: Synthetic polypeptide; note = XENP020708 7G8_H0_L0.100_IgG1_PVA_/S267K Light Chain
DTVLTQSPASLAVSLGQRATISCKASQSVDYDGDSYMNWYQQKPGQPPKLLIYAASNLESGIPARLSGSGSGTDFTLNIHPVEEEDAATYYCQQSNIDPFTFGSGTKLEVKRTVAAPSVFIFPPSDEQLKSGTASVVCLLNNFYPREAKVQWKVDNALQSGNSQESVTEQDSKDSTYSLSSTLTLSKADYEKHKVYACEVTHQGLSSPVTKSFNRGEC

SEQ ID NO: 20691 - protein, 111 aa, synthetic construct
  source 1..111: note = Description of Artificial Sequence: Synthetic polypeptide; note = VL of XENP020708
DTVLTQSPASLAVSLGQRATISCKASQSVDYDGDSYMNWYQQKPGQPPKLLIYAASNLESGIPARLSGSGSGTDFTLNIHPVEEEDAATYYCQQSNIDPFTFGSGTKLEVK

SEQ ID NO: 20692 - protein, 15 aa, synthetic construct
  source 1..15: note = Description of Artificial Sequence: Synthetic peptide; note = XENP020708 vlCDR1
KASQSVDYDGDSYMN

SEQ ID NO: 20693 - protein, 7 aa, synthetic construct
  source 1..7: note = Description of Artificial Sequence: Synthetic peptide; note = XENP020708 vlCDR2
AASNLES

SEQ ID NO: 20694 - protein, 9 aa, synthetic construct
  source 1..9: note = Description of Artificial Sequence: Synthetic peptide; note = XENP020708 vlCDR3
QQSNIDPFT

SEQ ID NO: 20695 - protein, 450 aa, synthetic construct; identical to SEQ ID NO: 17585
  source 1..450: note = Description of Artificial Sequence: Synthetic polypeptide; note = XENP020709 7G8_H0_L0.101_IgG1_PVA_/S267K Heavy Chain

SEQ ID NO: 20696 - protein, 121 aa, synthetic construct; identical to SEQ ID NO: 17586
  source 1..121: note = Description of Artificial Sequence: Synthetic polypeptide; note = VH of XENP020709

SEQ ID NO: 20697 - protein, 5 aa, synthetic construct
  source 1..5: note = Description of Artificial Sequence: Synthetic peptide; note = XENP020709 vhCDR1
DAWMD

SEQ ID NO: 20698 - protein, 19 aa, synthetic construct
  source 1..19: note = Description of Artificial Sequence: Synthetic peptide; note = XENP020709 vhCDR2
EIRTKANNHATYYAESVKG

SEQ ID NO: 20699 - protein, 10 aa, synthetic construct
  source 1..10: note = Description of Artificial Sequence: Synthetic peptide; note = XENP020709 vhCDR3
LANWDWYFDV

SEQ ID NO: 20700 - protein, 218 aa, synthetic construct
  source 1..218: note = Description of Artificial Sequence: Synthetic polypeptide; note = XENP020709 7G8_H0_L0.101_IgG1_PVA_/S267K Light Chain
DTVLTQSPASLAVSLGQRATISCKASQSVDYDGDSYMNWYQQKPGQPPKLLIYAASNLESGIPARLSGSGSGTDFTLNIHPVEEEDAATYYCQQSNENPFTFGSGTKLEVKRTVAAPSVFIFPPSDEQLKSGTASVVCLLNNFYPREAKVQWKVDNALQSGNSQESVTEQDSKDSTYSLSSTLTLSKADYEKHKVYACEVTHQGLSSPVTKSFNRGEC

SEQ ID NO: 20701 - protein, 111 aa, synthetic construct
  source 1..111: note = Description of Artificial Sequence: Synthetic polypeptide; note = VL of XENP020709
DTVLTQSPASLAVSLGQRATISCKASQSVDYDGDSYMNWYQQKPGQPPKLLIYAASNLESGIPARLSGSGSGTDFTLNIHPVEEEDAATYYCQQSNENPFTFGSGTKLEVK

SEQ ID NO: 20702 - protein, 15 aa, synthetic construct
  source 1..15: note = Description of Artificial Sequence: Synthetic peptide; note = XENP020709 vlCDR1
KASQSVDYDGDSYMN

SEQ ID NO: 20703 - protein, 7 aa, synthetic construct
  source 1..7: note = Description of Artificial Sequence: Synthetic peptide; note = XENP020709 vlCDR2
AASNLES

SEQ ID NO: 20704 - protein, 9 aa, synthetic construct
  source 1..9: note = Description of Artificial Sequence: Synthetic peptide; note = XENP020709 vlCDR3
QQSNENPFT

SEQ ID NO: 20705 - protein, 450 aa, synthetic construct; identical to SEQ ID NO: 17585
  source 1..450: note = Description of Artificial Sequence: Synthetic polypeptide; note = XENP020710 7G8_H0_L0.102_IgG1_PVA_/S267K Heavy Chain

SEQ ID NO: 20706 - protein, 121 aa, synthetic construct; identical to SEQ ID NO: 17586
  source 1..121: note = Description of Artificial Sequence: Synthetic polypeptide; note = VH of XENP020710

SEQ ID NO: 20707 - protein, 5 aa, synthetic construct
  source 1..5: note = Description of Artificial Sequence: Synthetic peptide; note = XENP020710 vhCDR1
DAWMD

SEQ ID NO: 20708 - protein, 19 aa, synthetic construct
  source 1..19: note = Description of Artificial Sequence: Synthetic peptide; note = XENP020710 vhCDR2
EIRTKANNHATYYAESVKG

SEQ ID NO: 20709 - protein, 10 aa, synthetic construct
  source 1..10: note = Description of Artificial Sequence: Synthetic peptide; note = XENP020710 vhCDR3
LANWDWYFDV

SEQ ID NO: 20710 - protein, 218 aa, synthetic construct
  source 1..218: note = Description of Artificial Sequence: Synthetic polypeptide; note = XENP020710 7G8_H0_L0.102_IgG1_PVA_/S267K Light Chain
DTVLTQSPASLAVSLGQRATISCKASQSVDYDGDSYMNWYQQKPGQPPKLLIYAASNLESGIPARLSGSGSGTDFTLNIHPVEEEDAATYYCQQSNEEPFTFGSGTKLEVKRTVAAPSVFIFPPSDEQLKSGTASVVCLLNNFYPREAKVQWKVDNALQSGNSQESVTEQDSKDSTYSLSSTLTLSKADYEKHKVYACEVTHQGLSSPVTKSFNRGEC

SEQ ID NO: 20711 - protein, 111 aa, synthetic construct
  source 1..111: note = Description of Artificial Sequence: Synthetic polypeptide; note = VL of XENP020710
DTVLTQSPASLAVSLGQRATISCKASQSVDYDGDSYMNWYQQKPGQPPKLLIYAASNLESGIPARLSGSGSGTDFTLNIHPVEEEDAATYYCQQSNEEPFTFGSGTKLEVK

SEQ ID NO: 20712 - protein, 15 aa, synthetic construct
  source 1..15: note = Description of Artificial Sequence: Synthetic peptide; note = XENP020710 vlCDR1
KASQSVDYDGDSYMN

SEQ ID NO: 20713 - protein, 7 aa, synthetic construct
  source 1..7: note = Description of Artificial Sequence: Synthetic peptide; note = XENP020710 vlCDR2
AASNLES

SEQ ID NO: 20714 - protein, 9 aa, synthetic construct
  source 1..9: note = Description of Artificial Sequence: Synthetic peptide; note = XENP020710 vlCDR3
QQSNEEPFT

SEQ ID NO: 20715 - protein, 450 aa, synthetic construct; identical to SEQ ID NO: 17585
  source 1..450: note = Description of Artificial Sequence: Synthetic polypeptide; note = XENP020711 7G8_H0_L0.103_IgG1_PVA_/S267K Heavy Chain

SEQ ID NO: 20716 - protein, 121 aa, synthetic construct; identical to SEQ ID NO: 17586
  source 1..121: note = Description of Artificial Sequence: Synthetic polypeptide; note = VH of XENP020711

SEQ ID NO: 20717 - protein, 5 aa, synthetic construct
  source 1..5: note = Description of Artificial Sequence: Synthetic peptide; note = XENP020711 vhCDR1
DAWMD

SEQ ID NO: 20718 - protein, 19 aa, synthetic construct
  source 1..19: note = Description of Artificial Sequence: Synthetic peptide; note = XENP020711 vhCDR2
EIRTKANNHATYYAESVKG

SEQ ID NO: 20719 - protein, 10 aa, synthetic construct
  source 1..10: note = Description of Artificial Sequence: Synthetic peptide; note = XENP020711 vhCDR3
LANWDWYFDV

SEQ ID NO: 20720 - protein, 218 aa, synthetic construct
  source 1..218: note = Description of Artificial Sequence: Synthetic polypeptide; note = XENP020711 7G8_H0_L0.103_IgG1_PVA_/S267K Light Chain
DTVLTQSPASLAVSLGQRATISCKASQSVDYDGDSYMNWYQQKPGQPPKLLIYAASNLESGIPARLSGSGSGTDFTLNIHPVEEEDAATYYCQQSNEHPFTFGSGTKLEVKRTVAAPSVFIFPPSDEQLKSGTASVVCLLNNFYPREAKVQWKVDNALQSGNSQESVTEQDSKDSTYSLSSTLTLSKADYEKHKVYACEVTHQGLSSPVTKSFNRGEC

SEQ ID NO: 20721 - protein, 111 aa, synthetic construct
  source 1..111: note = Description of Artificial Sequence: Synthetic polypeptide; note = VL of XENP020711
DTVLTQSPASLAVSLGQRATISCKASQSVDYDGDSYMNWYQQKPGQPPKLLIYAASNLESGIPARLSGSGSGTDFTLNIHPVEEEDAATYYCQQSNEHPFTFGSGTKLEVK

SEQ ID NO: 20722 - protein, 15 aa, synthetic construct
  source 1..15: note = Description of Artificial Sequence: Synthetic peptide; note = XENP020711 vlCDR1
KASQSVDYDGDSYMN

SEQ ID NO: 20723 - protein, 7 aa, synthetic construct
  source 1..7: note = Description of Artificial Sequence: Synthetic peptide; note = XENP020711 vlCDR2
AASNLES

SEQ ID NO: 20724 - protein, 9 aa, synthetic construct
  source 1..9: note = Description of Artificial Sequence: Synthetic peptide; note = XENP020711 vlCDR3
QQSNEHPFT

SEQ ID NO: 20725 - protein, 450 aa, synthetic construct; identical to SEQ ID NO: 17585
  source 1..450: note = Description of Artificial Sequence: Synthetic polypeptide; note = XENP020712 7G8_H0_L0.104_IgG1_PVA_/S267K Heavy Chain

SEQ ID NO: 20726 - protein, 121 aa, synthetic construct; identical to SEQ ID NO: 17586
  source 1..121: note = Description of Artificial Sequence: Synthetic polypeptide; note = VH of XENP020712

SEQ ID NO: 20727 - protein, 5 aa, synthetic construct
  source 1..5: note = Description of Artificial Sequence: Synthetic peptide; note = XENP020712 vhCDR1
DAWMD

SEQ ID NO: 20728 - protein, 19 aa, synthetic construct
  source 1..19: note = Description of Artificial Sequence: Synthetic peptide; note = XENP020712 vhCDR2
EIRTKANNHATYYAESVKG

SEQ ID NO: 20729 - protein, 10 aa, synthetic construct
  source 1..10: note = Description of Artificial Sequence: Synthetic peptide; note = XENP020712 vhCDR3
LANWDWYFDV

SEQ ID NO: 20730 - protein, 218 aa, synthetic construct
  source 1..218: note = Description of Artificial Sequence: Synthetic polypeptide; note = XENP020712 7G8_H0_L0.104_IgG1_PVA_/S267K Light Chain
DTVLTQSPASLAVSLGQRATISCKASQSVDYDGDSYMNWYQQKPGQPPKLLIYAASNLESGIPARLSGSGSGTDFTLNIHPVEEEDAATYYCQQSNERPFTFGSGTKLEVKRTVAAPSVFIFPPSDEQLKSGTASVVCLLNNFYPREAKVQWKVDNALQSGNSQESVTEQDSKDSTYSLSSTLTLSKADYEKHKVYACEVTHQGLSSPVTKSFNRGEC

SEQ ID NO: 20731 - protein, 111 aa, synthetic construct
  source 1..111: note = Description of Artificial Sequence: Synthetic polypeptide; note = VL of XENP020712
DTVLTQSPASLAVSLGQRATISCKASQSVDYDGDSYMNWYQQKPGQPPKLLIYAASNLESGIPARLSGSGSGTDFTLNIHPVEEEDAATYYCQQSNERPFTFGSGTKLEVK

SEQ ID NO: 20732 - protein, 15 aa, synthetic construct
  source 1..15: note = Description of Artificial Sequence: Synthetic peptide; note = XENP020712 vlCDR1
KASQSVDYDGDSYMN

SEQ ID NO: 20733 - protein, 7 aa, synthetic construct
  source 1..7: note = Description of Artificial Sequence: Synthetic peptide; note = XENP020712 vlCDR2
AASNLES

SEQ ID NO: 20734 - protein, 9 aa, synthetic construct
  source 1..9: note = Description of Artificial Sequence: Synthetic peptide; note = XENP020712 vlCDR3
QQSNERPFT

SEQ ID NO: 20735 - protein, 450 aa, synthetic construct; identical to SEQ ID NO: 17585
  source 1..450: note = Description of Artificial Sequence: Synthetic polypeptide; note = XENP020713 7G8_H0_L0.105_IgG1_PVA_/S267K Heavy Chain

SEQ ID NO: 20736 - protein, 121 aa, synthetic construct; identical to SEQ ID NO: 17586
  source 1..121: note = Description of Artificial Sequence: Synthetic polypeptide; note = VH of XENP020713

SEQ ID NO: 20737 - protein, 5 aa, synthetic construct
  source 1..5: note = Description of Artificial Sequence: Synthetic peptide; note = XENP020713 vhCDR1
DAWMD

SEQ ID NO: 20738 - protein, 19 aa, synthetic construct
  source 1..19: note = Description of Artificial Sequence: Synthetic peptide; note = XENP020713 vhCDR2
EIRTKANNHATYYAESVKG

SEQ ID NO: 20739 - protein, 10 aa, synthetic construct
  source 1..10: note = Description of Artificial Sequence: Synthetic peptide; note = XENP020713 vhCDR3
LANWDWYFDV

SEQ ID NO: 20740 - protein, 218 aa, synthetic construct
  source 1..218: note = Description of Artificial Sequence: Synthetic polypeptide; note = XENP020713 7G8_H0_L0.105_IgG1_PVA_/S267K Light Chain
DTVLTQSPASLAVSLGQRATISCKASQSVDYDGDSYMNWYQQKPGQPPKLLIYAASNLESGIPARLSGSGSGTDFTLNIHPVEEEDAATYYCQQSNELPFTFGSGTKLEVKRTVAAPSVFIFPPSDEQLKSGTASVVCLLNNFYPREAKVQWKVDNALQSGNSQESVTEQDSKDSTYSLSSTLTLSKADYEKHKVYACEVTHQGLSSPVTKSFNRGEC

SEQ ID NO: 20741 - protein, 111 aa, synthetic construct
  source 1..111: note = Description of Artificial Sequence: Synthetic polypeptide; note = VL of XENP020713
DTVLTQSPASLAVSLGQRATISCKASQSVDYDGDSYMNWYQQKPGQPPKLLIYAASNLESGIPARLSGSGSGTDFTLNIHPVEEEDAATYYCQQSNELPFTFGSGTKLEVK

SEQ ID NO: 20742 - protein, 15 aa, synthetic construct
  source 1..15: note = Description of Artificial Sequence: Synthetic peptide; note = XENP020713 vlCDR1
KASQSVDYDGDSYMN

SEQ ID NO: 20743 - protein, 7 aa, synthetic construct
  source 1..7: note = Description of Artificial Sequence: Synthetic peptide; note = XENP020713 vlCDR2
AASNLES

SEQ ID NO: 20744 - protein, 9 aa, synthetic construct
  source 1..9: note = Description of Artificial Sequence: Synthetic peptide; note = XENP020713 vlCDR3
QQSNELPFT

SEQ ID NO: 20745 - protein, 450 aa, synthetic construct; identical to SEQ ID NO: 17585
  source 1..450: note = Description of Artificial Sequence: Synthetic polypeptide; note = XENP020714 7G8_H0_L0.106_IgG1_PVA_/S267K Heavy Chain

SEQ ID NO: 20746 - protein, 121 aa, synthetic construct; identical to SEQ ID NO: 17586
  source 1..121: note = Description of Artificial Sequence: Synthetic polypeptide; note = VH of XENP020714

SEQ ID NO: 20747 - protein, 5 aa, synthetic construct
  source 1..5: note = Description of Artificial Sequence: Synthetic peptide; note = XENP020714 vhCDR1
DAWMD

SEQ ID NO: 20748 - protein, 19 aa, synthetic construct
  source 1..19: note = Description of Artificial Sequence: Synthetic peptide; note = XENP020714 vhCDR2
EIRTKANNHATYYAESVKG

SEQ ID NO: 20749 - protein, 10 aa, synthetic construct
  source 1..10: note = Description of Artificial Sequence: Synthetic peptide; note = XENP020714 vhCDR3
LANWDWYFDV

SEQ ID NO: 20750 - protein, 218 aa, synthetic construct
  source 1..218: note = Description of Artificial Sequence: Synthetic polypeptide; note = XENP020714 7G8_H0_L0.106_IgG1_PVA_/S267K Light Chain
DTVLTQSPASLAVSLGQRATISCKASQSVDYDGDSYMNWYQQKPGQPPKLLIYAASNLESGIPARLSGSGSGTDFTLNIHPVEEEDAATYYCQQSNEGPFTFGSGTKLEVKRTVAAPSVFIFPPSDEQLKSGTASVVCLLNNFYPREAKVQWKVDNALQSGNSQESVTEQDSKDSTYSLSSTLTLSKADYEKHKVYACEVTHQGLSSPVTKSFNRGEC

SEQ ID NO: 20751 - protein, 111 aa, synthetic construct
  source 1..111: note = Description of Artificial Sequence: Synthetic polypeptide; note = VL of XENP020714
DTVLTQSPASLAVSLGQRATISCKASQSVDYDGDSYMNWYQQKPGQPPKLLIYAASNLESGIPARLSGSGSGTDFTLNIHPVEEEDAATYYCQQSNEGPFTFGSGTKLEVK

SEQ ID NO: 20752 - protein, 15 aa, synthetic construct
  source 1..15: note = Description of Artificial Sequence: Synthetic peptide; note = XENP020714 vlCDR1
KASQSVDYDGDSYMN

SEQ ID NO: 20753 - protein, 7 aa, synthetic construct
  source 1..7: note = Description of Artificial Sequence: Synthetic peptide; note = XENP020714 vlCDR2
AASNLES

SEQ ID NO: 20754 - protein, 9 aa, synthetic construct
  source 1..9: note = Description of Artificial Sequence: Synthetic peptide; note = XENP020714 vlCDR3
QQSNEGPFT

SEQ ID NO: 20755 - protein, 450 aa, synthetic construct; identical to SEQ ID NO: 17585
  source 1..450: note = Description of Artificial Sequence: Synthetic polypeptide; note = XENP020715 7G8_H0_L0.107_IgG1_PVA_/S267K Heavy Chain

SEQ ID NO: 20756 - protein, 121 aa, synthetic construct; identical to SEQ ID NO: 17586
  source 1..121: note = Description of Artificial Sequence: Synthetic polypeptide; note = VH of XENP020715

SEQ ID NO: 20757 - protein, 5 aa, synthetic construct
  source 1..5: note = Description of Artificial Sequence: Synthetic peptide; note = XENP020715 vhCDR1
DAWMD

SEQ ID NO: 20758 - protein, 19 aa, synthetic construct
  source 1..19: note = Description of Artificial Sequence: Synthetic peptide; note = XENP020715 vhCDR2
EIRTKANNHATYYAESVKG

SEQ ID NO: 20759 - protein, 10 aa, synthetic construct
  source 1..10: note = Description of Artificial Sequence: Synthetic peptide; note = XENP020715 vhCDR3
LANWDWYFDV

SEQ ID NO: 20760 - protein, 218 aa, synthetic construct
  source 1..218: note = Description of Artificial Sequence: Synthetic polypeptide; note = XENP020715 7G8_H0_L0.107_IgG1_PVA_/S267K Light Chain
DTVLTQSPASLAVSLGQRATISCKASQSVDYDGDSYMNWYQQKPGQPPKLLIYAASNLESGIPARLSGSGSGTDFTLNIHPVEEEDAATYYCQQSNEYPFTFGSGTKLEVKRTVAAPSVFIFPPSDEQLKSGTASVVCLLNNFYPREAKVQWKVDNALQSGNSQESVTEQDSKDSTYSLSSTLTLSKADYEKHKVYACEVTHQGLSSPVTKSFNRGEC

SEQ ID NO: 20761 - protein, 111 aa, synthetic construct
  source 1..111: note = Description of Artificial Sequence: Synthetic polypeptide; note = VL of XENP020715
DTVLTQSPASLAVSLGQRATISCKASQSVDYDGDSYMNWYQQKPGQPPKLLIYAASNLESGIPARLSGSGSGTDFTLNIHPVEEEDAATYYCQQSNEYPFTFGSGTKLEVK

SEQ ID NO: 20762 - protein, 15 aa, synthetic construct
  source 1..15: note = Description of Artificial Sequence: Synthetic peptide; note = XENP020715 vlCDR1
KASQSVDYDGDSYMN

SEQ ID NO: 20763 - protein, 7 aa, synthetic construct
  source 1..7: note = Description of Artificial Sequence: Synthetic peptide; note = XENP020715 vlCDR2
AASNLES

SEQ ID NO: 20764 - protein, 9 aa, synthetic construct
  source 1..9: note = Description of Artificial Sequence: Synthetic peptide; note = XENP020715 vlCDR3
QQSNEYPFT

SEQ ID NO: 20765 - protein, 446 aa, synthetic construct
  source 1..446: note = Description of Artificial Sequence: Synthetic polypeptide; note = XENP016275 mAb8213_H0L0_IgG1_PVA_/S267K Heavy Chain
QVQLVQSGAEVKKPGASVKVSCKASGYTFTSYWMHWVRQAPGQGLEWMGEINPSNGRTNYNEKFKTRVTITADTSTSTAYMELSSLRSEDTAVYYCARGYYLYFDYWGQGTLVTVSSASTKGPSVFPLAPSSKSTSGGTAALGCLVKDYFPEPVTVSWNSGALTSGVHTFPAVLQSSGLYSLSSVVTVPSSSLGTQTYICNVNHKPSNTKVDKKVEPKSCDKTHTCPPCPAPPVAGPSVFLFPPKPKDTLMISRTPEVTCVVVDVKHEDPEVKFNWYVDGVEVHNAKTKPREEQYNSTYRVVSVLTVLHQDWLNGKEYKCKVSNKALPAPIEKTISKAKGQPREPQVYTLPPSREEMTKNQVSLTCLVKGFYPSDIAVEWESNGQPENNYKTTPPVLDSDGSFFLYSKLTVDKSRWQQGNVFSCSVMHEALHNHYTQKSLSLSPGK

SEQ ID NO: 20766 - protein, 117 aa, synthetic construct
  source 1..117: note = Description of Artificial Sequence: Synthetic polypeptide; note = VH of XENP016275
QVQLVQSGAEVKKPGASVKVSCKASGYTFTSYWMHWVRQAPGQGLEWMGEINPSNGRTNYNEKFKTRVTITADTSTSTAYMELSSLRSEDTAVYYCARGYYLYFDYWGQGTLVTVSS

SEQ ID NO: 20767 - protein, 5 aa, synthetic construct
  source 1..5: note = Description of Artificial Sequence: Synthetic peptide; note = XENP016275 vhCDR1
SYWMH

SEQ ID NO: 20768 - protein, 17 aa, synthetic construct
  source 1..17: note = Description of Artificial Sequence: Synthetic peptide; note = XENP016275 vhCDR2
EINPSNGRTNYNEKFKT

SEQ ID NO: 20769 - protein, 8 aa, synthetic construct
  source 1..8: note = Description of Artificial Sequence: Synthetic peptide; note = XENP016275 vhCDR3
GYYLYFDY

SEQ ID NO: 20770 - protein, 214 aa, synthetic construct
  source 1..214: note = Description of Artificial Sequence: Synthetic polypeptide; note = XENP016275 mAb8213_H0L0_IgG1_PVA_/S267K Light Chain
DIQMTQSPSSLSASVGDRVTITCHASQGIRINIGWYQQKPGKAPKLLIYHGTNLEDGVPSRFSGSGSGTDFTLTISSLQPEDFATYYCVQYGQFPWTFGQGTKLEIKRTVAAPSVFIFPPSDEQLKSGTASVVCLLNNFYPREAKVQWKVDNALQSGNSQESVTEQDSKDSTYSLSSTLTLSKADYEKHKVYACEVTHQGLSSPVTKSFNRGEC

SEQ ID NO: 20771 - protein, 107 aa, synthetic construct
  source 1..107: note = Description of Artificial Sequence: Synthetic polypeptide; note = VL of XENP016275
DIQMTQSPSSLSASVGDRVTITCHASQGIRINIGWYQQKPGKAPKLLIYHGTNLEDGVPSRFSGSGSGTDFTLTISSLQPEDFATYYCVQYGQFPWTFGQGTKLEIK

SEQ ID NO: 20772 - protein, 11 aa, synthetic construct
  source 1..11: note = Description of Artificial Sequence: Synthetic peptide; note = XENP016275 vlCDR1
HASQGIRINIG

SEQ ID NO: 20773 - protein, 7 aa, synthetic construct
  source 1..7: note = Description of Artificial Sequence: Synthetic peptide; note = XENP016275 vlCDR2
HGTNLED

SEQ ID NO: 20774 - protein, 9 aa, synthetic construct
  source 1..9: note = Description of Artificial Sequence: Synthetic peptide; note = XENP016275 vlCDR3
VQYGQFPWT

SEQ ID NO: 20775 - protein, 447 aa, synthetic construct
  source 1..447: note = Description of Artificial Sequence: Synthetic polypeptide; note = XENP017973 ABTIM3_H0L0_IgG1_PVA_/S267K Heavy Chain
QVQLQQPGAELVKPGASVKMSCKASGYTFTSYNMHWIKQTPGQGLEWIGDIYPGNGDTSYNQKFKGKATLTADKSSSTVYMQLSSLTSEDSAVYYCARVGGAFPMDYWGQGTSVTVSSASTKGPSVFPLAPSSKSTSGGTAALGCLVKDYFPEPVTVSWNSGALTSGVHTFPAVLQSSGLYSLSSVVTVPSSSLGTQTYICNVNHKPSNTKVDKKVEPKSCDKTHTCPPCPAPPVAGPSVFLFPPKPKDTLMISRTPEVTCVVVDVKHEDPEVKFNWYVDGVEVHNAKTKPREEQYNSTYRVVSVLTVLHQDWLNGKEYKCKVSNKALPAPIEKTISKAKGQPREPQVYTLPPSREEMTKNQVSLTCLVKGFYPSDIAVEWESNGQPENNYKTTPPVLDSDGSFFLYSKLTVDKSRWQQGNVFSCSVMHEALHNHYTQKSLSLSPGK

SEQ ID NO: 20776 - protein, 118 aa, synthetic construct
  source 1..118: note = Description of Artificial Sequence: Synthetic polypeptide; note = VH of XENP017973
QVQLQQPGAELVKPGASVKMSCKASGYTFTSYNMHWIKQTPGQGLEWIGDIYPGNGDTSYNQKFKGKATLTADKSSSTVYMQLSSLTSEDSAVYYCARVGGAFPMDYWGQGTSVTVSS

SEQ ID NO: 20777 - protein, 5 aa, synthetic construct
  source 1..5: note = Description of Artificial Sequence: Synthetic peptide; note = XENP017973 vhCDR1
SYNMH

SEQ ID NO: 20778 - protein, 17 aa, synthetic construct
  source 1..17: note = Description of Artificial Sequence: Synthetic peptide; note = XENP017973 vhCDR2
DIYPGNGDTSYNQKFKG

SEQ ID NO: 20779 - protein, 9 aa, synthetic construct
  source 1..9: note = Description of Artificial Sequence: Synthetic peptide; note = XENP017973 vhCDR3
VGGAFPMDY

SEQ ID NO: 20780 - protein, 218 aa, synthetic construct
  source 1..218: note = Description of Artificial Sequence: Synthetic polypeptide; note = XENP017973 ABTIM3_H0L0_IgG1_PVA_/S267K Light Chain
DIVLTQSPASLAVSLGQRATISCRASESVEYYGTSLMQWYQQKPGQPPKLLIYAASNVESGVPARFSGSGSGTDFSLNIHPVEEDDIAIYFCQQSRKDPSTFGGGTKLEIKRTVAAPSVFIFPPSDEQLKSGTASVVCLLNNFYPREAKVQWKVDNALQSGNSQESVTEQDSKDSTYSLSSTLTLSKADYEKHKVYACEVTHQGLSSPVTKSFNRGEC

SEQ ID NO: 20781 - protein, 111 aa, synthetic construct
  source 1..111: note = Description of Artificial Sequence: Synthetic polypeptide; note = VL of XENP017973
DIVLTQSPASLAVSLGQRATISCRASESVEYYGTSLMQWYQQKPGQPPKLLIYAASNVESGVPARFSGSGSGTDFSLNIHPVEEDDIAIYFCQQSRKDPSTFGGGTKLEIK

SEQ ID NO: 20782 - protein, 15 aa, synthetic construct
  source 1..15: note = Description of Artificial Sequence: Synthetic peptide; note = XENP017973 vlCDR1
RASESVEYYGTSLMQ

SEQ ID NO: 20783 - protein, 7 aa, synthetic construct
  source 1..7: note = Description of Artificial Sequence: Synthetic peptide; note = XENP017973 vlCDR2
AASNVES

SEQ ID NO: 20784 - protein, 9 aa, synthetic construct
  source 1..9: note = Description of Artificial Sequence: Synthetic peptide; note = XENP017973 vlCDR3
QQSRKDPST

SEQ ID NO: 20785 - protein, 447 aa, synthetic construct
  source 1..447: note = Description of Artificial Sequence: Synthetic polypeptide; note = XENP017975 ABTIM3-hum11_H0L0_IgG1_PVA_/S267K Heavy Chain
QVQLVQSGAEVKKPGSSVKVSCKASGYTFTSYNMHWVRQAPGQGLEWMGDIYPGNGDTSYNQKFKGRVTITADKSTSTVYMELSSLRSEDTAVYYCARVGGAFPMDYWGQGTTVTVSSASTKGPSVFPLAPSSKSTSGGTAALGCLVKDYFPEPVTVSWNSGALTSGVHTFPAVLQSSGLYSLSSVVTVPSSSLGTQTYICNVNHKPSNTKVDKKVEPKSCDKTHTCPPCPAPPVAGPSVFLFPPKPKDTLMISRTPEVTCVVVDVKHEDPEVKFNWYVDGVEVHNAKTKPREEQYNSTYRVVSVLTVLHQDWLNGKEYKCKVSNKALPAPIEKTISKAKGQPREPQVYTLPPSREEMTKNQVSLTCLVKGFYPSDIAVEWESNGQPENNYKTTPPVLDSDGSFFLYSKLTVDKSRWQQGNVFSCSVMHEALHNHYTQKSLSLSPGK

SEQ ID NO: 20786 - protein, 118 aa, synthetic construct
  source 1..118: note = Description of Artificial Sequence: Synthetic polypeptide; note = VH of XENP017975
QVQLVQSGAEVKKPGSSVKVSCKASGYTFTSYNMHWVRQAPGQGLEWMGDIYPGNGDTSYNQKFKGRVTITADKSTSTVYMELSSLRSEDTAVYYCARVGGAFPMDYWGQGTTVTVSS

SEQ ID NO: 20787 - protein, 5 aa, synthetic construct
  source 1..5: note = Description of Artificial Sequence: Synthetic peptide; note = XENP017975 vhCDR1
SYNMH

SEQ ID NO: 20788 - protein, 17 aa, synthetic construct
  source 1..17: note = Description of Artificial Sequence: Synthetic peptide; note = XENP017975 vhCDR2
DIYPGNGDTSYNQKFKG

SEQ ID NO: 20789 - protein, 9 aa, synthetic construct
  source 1..9: note = Description of Artificial Sequence: Synthetic peptide; note = XENP017975 vhCDR3
VGGAFPMDY

SEQ ID NO: 20790 - protein, 218 aa, synthetic construct
  source 1..218: note = Description of Artificial Sequence: Synthetic polypeptide; note = XENP017975 ABTIM3-hum11_H0L0_IgG1_PVA_/S267K Light Chain
AIQLTQSPSSLSASVGDRVTITCRASESVEYYGTSLMQWYQQKPGKAPKLLIYAASNVESGVPSRFSGSGSGTDFTLTISSLQPEDFATYFCQQSRKDPSTFGGGTKVEIKRTVAAPSVFIFPPSDEQLKSGTASVVCLLNNFYPREAKVQWKVDNALQSGNSQESVTEQDSKDSTYSLSSTLTLSKADYEKHKVYACEVTHQGLSSPVTKSFNRGEC

SEQ ID NO: 20791 - protein, 111 aa, synthetic construct
  source 1..111: note = Description of Artificial Sequence: Synthetic polypeptide; note = VL of XENP017975
AIQLTQSPSSLSASVGDRVTITCRASESVEYYGTSLMQWYQQKPGKAPKLLIYAASNVESGVPSRFSGSGSGTDFTLTISSLQPEDFATYFCQQSRKDPSTFGGGTKVEIK

SEQ ID NO: 20792 - protein, 15 aa, synthetic construct
  source 1..15: note = Description of Artificial Sequence: Synthetic peptide; note = XENP017975 vlCDR1
RASESVEYYGTSLMQ

SEQ ID NO: 20793 - protein, 7 aa, synthetic construct
  source 1..7: note = Description of Artificial Sequence: Synthetic peptide; note = XENP017975 vlCDR2
AASNVES

SEQ ID NO: 20794 - protein, 9 aa, synthetic construct
  source 1..9: note = Description of Artificial Sequence: Synthetic peptide; note = XENP017975 vlCDR3
QQSRKDPST

SEQ ID NO: 20795 - protein, 446 aa, synthetic construct
  source 1..446: note = Description of Artificial Sequence: Synthetic polypeptide; note = XENP020403 1B3_H0L0_IgG1_PVA_/S267K Heavy Chain
EVKLVESGGGLVKPGGSLTLSCAASEFTFSSYAMSWVRQTPEKRLEWVASISSGGRTYYPDSVKGRFTISRDNARNILYLQMSSLRSEDTAMYYCARGRGFDVMDYWGQGTSVTVSSASTKGPSVFPLAPSSKSTSGGTAALGCLVKDYFPEPVTVSWNSGALTSGVHTFPAVLQSSGLYSLSSVVTVPSSSLGTQTYICNVNHKPSNTKVDKKVEPKSCDKTHTCPPCPAPPVAGPSVFLFPPKPKDTLMISRTPEVTCVVVDVKHEDPEVKFNWYVDGVEVHNAKTKPREEQYNSTYRVVSVLTVLHQDWLNGKEYKCKVSNKALPAPIEKTISKAKGQPREPQVYTLPPSREEMTKNQVSLTCLVKGFYPSDIAVEWESNGQPENNYKTTPPVLDSDGSFFLYSKLTVDKSRWQQGNVFSCSVMHEALHNHYTQKSLSLSPGK

SEQ ID NO: 20796 - protein, 117 aa, synthetic construct
  source 1..117: note = Description of Artificial Sequence: Synthetic polypeptide; note = VH of XENP020403
EVKLVESGGGLVKPGGSLTLSCAASEFTFSSYAMSWVRQTPEKRLEWVASISSGGRTYYPDSVKGRFTISRDNARNILYLQMSSLRSEDTAMYYCARGRGFDVMDYWGQGTSVTVSS

SEQ ID NO: 20797 - protein, 5 aa, synthetic construct
  source 1..5: note = Description of Artificial Sequence: Synthetic peptide; note = XENP020403 vhCDR1
SYAMS

SEQ ID NO: 20798 - protein, 16 aa, synthetic construct
  source 1..16: note = Description of Artificial Sequence: Synthetic peptide; note = XENP020403 vhCDR2
SISSGGRTYYPDSVKG

SEQ ID NO: 20799 - protein, 9 aa, synthetic construct
  source 1..9: note = Description of Artificial Sequence: Synthetic peptide; note = XENP020403 vhCDR3
GRGFDVMDY

SEQ ID NO: 20800 - protein, 214 aa, synthetic construct
  source 1..214: note = Description of Artificial Sequence: Synthetic polypeptide; note = XENP020403 1B3_H0L0_IgG1_PVA_/S267K Light Chain
DIQMTQTTSSLSASLGDRVTISCRASQDISNYLNWYQQKPDGTVKLLIYYTSRLHSGVPSRFSGSGSGTDYSLTISNLEQEDIATYFCQQGNTLPYTFGGGTKLEIKRTVAAPSVFIFPPSDEQLKSGTASVVCLLNNFYPREAKVQWKVDNALQSGNSQESVTEQDSKDSTYSLSSTLTLSKADYEKHKVYACEVTHQGLSSPVTKSFNRGEC

SEQ ID NO: 20801 - protein, 107 aa, synthetic construct
  source 1..107: note = Description of Artificial Sequence: Synthetic polypeptide; note = VL of XENP020403
DIQMTQTTSSLSASLGDRVTISCRASQDISNYLNWYQQKPDGTVKLLIYYTSRLHSGVPSRFSGSGSGTDYSLTISNLEQEDIATYFCQQGNTLPYTFGGGTKLEIK

SEQ ID NO: 20802 - protein, 11 aa, synthetic construct
  source 1..11: note = Description of Artificial Sequence: Synthetic peptide; note = XENP020403 vlCDR1
RASQDISNYLN

SEQ ID NO: 20803 - protein, 7 aa, synthetic construct
  source 1..7: note = Description of Artificial Sequence: Synthetic peptide; note = XENP020403 vlCDR2
YTSRLHS

SEQ ID NO: 20804 - protein, 9 aa, synthetic construct
  source 1..9: note = Description of Artificial Sequence: Synthetic peptide; note = XENP020403 vlCDR3
QQGNTLPYT

SEQ ID NO: 20805 - protein, 446 aa, synthetic construct
  source 1..446: note = Description of Artificial Sequence: Synthetic polypeptide; note = XENP020404 1D12_H0L0_IgG1_PVA_/S267K Heavy Chain
QVQLQQSAADLARPGASVKLSCKASGYTFTSYTMHWVKQRPGQGLEWIGYLIPSSGYTDYNQRFKDKTTLTADKSSSTAYMQLSSLTSEDSAVYYCARGDSVYFDYWGQGTALTVSSASTKGPSVFPLAPSSKSTSGGTAALGCLVKDYFPEPVTVSWNSGALTSGVHTFPAVLQSSGLYSLSSVVTVPSSSLGTQTYICNVNHKPSNTKVDKKVEPKSCDKTHTCPPCPAPPVAGPSVFLFPPKPKDTLMISRTPEVTCVVVDVKHEDPEVKFNWYVDGVEVHNAKTKPREEQYNSTYRVVSVLTVLHQDWLNGKEYKCKVSNKALPAPIEKTISKAKGQPREPQVYTLPPSREEMTKNQVSLTCLVKGFYPSDIAVEWESNGQPENNYKTTPPVLDSDGSFFLYSKLTVDKSRWQQGNVFSCSVMHEALHNHYTQKSLSLSPGK

SEQ ID NO: 20806 - protein, 117 aa, synthetic construct
  source 1..117: note = Description of Artificial Sequence: Synthetic polypeptide; note = VH of XENP020404
QVQLQQSAADLARPGASVKLSCKASGYTFTSYTMHWVKQRPGQGLEWIGYLIPSSGYTDYNQRFKDKTTLTADKSSSTAYMQLSSLTSEDSAVYYCARGDSVYFDYWGQGTALTVSS

SEQ ID NO: 20807 - protein, 5 aa, synthetic construct
  source 1..5: note = Description of Artificial Sequence: Synthetic peptide; note = XENP020404 vhCDR1
SYTMH

SEQ ID NO: 20808 - protein, 17 aa, synthetic construct
  source 1..17: note = Description of Artificial Sequence: Synthetic peptide; note = XENP020404 vhCDR2
YLIPSSGYTDYNQRFKD

SEQ ID NO: 20809 - protein, 8 aa, synthetic construct
  source 1..8: note = Description of Artificial Sequence: Synthetic peptide; note = XENP020404 vhCDR3
GDSVYFDY

SEQ ID NO: 20810 - protein, 218 aa, synthetic construct
  source 1..218: note = Description of Artificial Sequence: Synthetic polypeptide; note = XENP020404 1D12_H0L0_IgG1_PVA_/S267K Light Chain
DIVLTQSPASLAVSLGQRATISCRASESVEYYGTSLQQKYQQKPGQPPKLLIYAASNVESGVPARFSGSGSGTDFSLNIHPVEEDDIAQYFCQQSRKVPWTFGGGTKLEIKRTVAAPSVFIFPPSDEQLKSGTASVVCLLNNFYPREAKVQWKVDNALQSGNSQESVTEQDSKDSTYSLSSTLTLSKADYEKHKVYACEVTHQGLSSPVTKSFNRGEC

SEQ ID NO: 20811 - protein, 111 aa, synthetic construct
  source 1..111: note = Description of Artificial Sequence: Synthetic polypeptide; note = VL of XENP020404
DIVLTQSPASLAVSLGQRATISCRASESVEYYGTSLQQKYQQKPGQPPKLLIYAASNVESGVPARFSGSGSGTDFSLNIHPVEEDDIAQYFCQQSRKVPWTFGGGTKLEIK

SEQ ID NO: 20812 - protein, 15 aa, synthetic construct
  source 1..15: note = Description of Artificial Sequence: Synthetic peptide; note = XENP020404 vlCDR1
RASESVEYYGTSLQQ

SEQ ID NO: 20813 - protein, 7 aa, synthetic construct
  source 1..7: note = Description of Artificial Sequence: Synthetic peptide; note = XENP020404 vlCDR2
AASNVES

SEQ ID NO: 20814 - protein, 9 aa, synthetic construct
  source 1..9: note = Description of Artificial Sequence: Synthetic peptide; note = XENP020404 vlCDR3
QQSRKVPWT

SEQ ID NO: 20815 - protein, 446 aa, synthetic construct
  source 1..446: note = Description of Artificial Sequence: Synthetic polypeptide; note = XENP020405 3H3_H0L0_IgG1_PVA_/S267K Heavy Chain
QVQLKESGPGLVAPSQSLSITCTVSGFSLNGYGVNWVRQPPGKGLEWLGYIIGDGSTDYNSALKSRLSISKDNSKSQVFLKMNSLQTDDTARYYCARSYYTSDEDYWGQGTLVTVSAASTKGPSVFPLAPSSKSTSGGTAALGCLVKDYFPEPVTVSWNSGALTSGVHTFPAVLQSSGLYSLSSVVTVPSSSLGTQTYICNVNHKPSNTKVDKKVEPKSCDKTHTCPPCPAPPVAGPSVFLFPPKPKDTLMISRTPEVTCVVVDVKHEDPEVKFNWYVDGVEVHNAKTKPREEQYNSTYRVVSVLTVLHQDWLNGKEYKCKVSNKALPAPIEKTISKAKGQPREPQVYTLPPSREEMTKNQVSLTCLVKGFYPSDIAVEWESNGQPENNYKTTPPVLDSDGSFFLYSKLTVDKSRWQQGNVFSCSVMHEALHNHYTQKSLSLSPGK

SEQ ID NO: 20816 - protein, 117 aa, synthetic construct
  source 1..117: note = Description of Artificial Sequence: Synthetic polypeptide; note = VH of XENP020405
QVQLKESGPGLVAPSQSLSITCTVSGFSLNGYGVNWVRQPPGKGLEWLGYIIGDGSTDYNSALKSRLSISKDNSKSQVFLKMNSLQTDDTARYYCARSYYTSDEDYWGQGTLVTVSA

SEQ ID NO: 20817 - protein, 5 aa, synthetic construct
  source 1..5: note = Description of Artificial Sequence: Synthetic peptide; note = XENP020405 vhCDR1
GYGVN

SEQ ID NO: 20818 - protein, 16 aa, synthetic construct
  source 1..16: note = Description of Artificial Sequence: Synthetic peptide; note = XENP020405 vhCDR2
YIIGDGSTDYNSALKS

SEQ ID NO: 20819 - protein, 9 aa, synthetic construct
  source 1..9: note = Description of Artificial Sequence: Synthetic peptide; note = XENP020405 vhCDR3
SYYTSDEDY

SEQ ID NO: 20820 - protein, 219 aa, synthetic construct
  source 1..219: note = Description of Artificial Sequence: Synthetic polypeptide; note = XENP020405 3H3_H0L0_IgG1_PVA_/S267K Light Chain
DIVLSQSPSSLAVSAGEKVTISCKSSQSLLNSRTRKNYLAQYQQKPGQSPKLLIYSASTRESGVPDRFTGSGSGTDFTLTISSVLAEDLAVYYCKQSYSLRTFGGGTKLEIKRTVAAPSVFIFPPSDEQLKSGTASVVCLLNNFYPREAKVQWKVDNALQSGNSQESVTEQDSKDSTYSLSSTLTLSKADYEKHKVYACEVTHQGLSSPVTKSFNRGEC

SEQ ID NO: 20821 - protein, 112 aa, synthetic construct
  source 1..112: note = Description of Artificial Sequence: Synthetic polypeptide; note = VL of XENP020405
DIVLSQSPSSLAVSAGEKVTISCKSSQSLLNSRTRKNYLAQYQQKPGQSPKLLIYSASTRESGVPDRFTGSGSGTDFTLTISSVLAEDLAVYYCKQSYSLRTFGGGTKLEIK

SEQ ID NO: 20822 - protein, 17 aa, synthetic construct
  source 1..17: note = Description of Artificial Sequence: Synthetic peptide; note = XENP020405 vlCDR1
KSSQSLLNSRTRKNYLA

SEQ ID NO: 20823 - protein, 7 aa, synthetic construct
  source 1..7: note = Description of Artificial Sequence: Synthetic peptide; note = XENP020405 vlCDR2
SASTRES

SEQ ID NO: 20824 - protein, 8 aa, synthetic construct
  source 1..8: note = Description of Artificial Sequence: Synthetic peptide; note = XENP020405 vlCDR3
KQSYSLRT

SEQ ID NO: 20825 - protein, 446 aa, synthetic construct
  source 1..446: note = Description of Artificial Sequence: Synthetic polypeptide; note = XENP020406 6D9_H0_1D12_L0_IgG1_PVA_/S267K Heavy Chain
QVQLKQSGPGLVQPSQSLSITCTVSGFSLTSYGVHWVRQSPGKGLEWLGVIISGGSTEYNAAFISRLSISKDNSKSQVFFKMNSLQADDTAIYYCARGGLLSPFDYWGQGTTLTVSSASTKGPSVFPLAPSSKSTSGGTAALGCLVKDYFPEPVTVSWNSGALTSGVHTFPAVLQSSGLYSLSSVVTVPSSSLGTQTYICNVNHKPSNTKVDKKVEPKSCDKTHTCPPCPAPPVAGPSVFLFPPKPKDTLMISRTPEVTCVVVDVKHEDPEVKFNWYVDGVEVHNAKTKPREEQYNSTYRVVSVLTVLHQDWLNGKEYKCKVSNKALPAPIEKTISKAKGQPREPQVYTLPPSREEMTKNQVSLTCLVKGFYPSDIAVEWESNGQPENNYKTTPPVLDSDGSFFLYSKLTVDKSRWQQGNVFSCSVMHEALHNHYTQKSLSLSPGK

SEQ ID NO: 20826 - protein, 117 aa, synthetic construct
  source 1..117: note = Description of Artificial Sequence: Synthetic polypeptide; note = VH of XENP020406
QVQLKQSGPGLVQPSQSLSITCTVSGFSLTSYGVHWVRQSPGKGLEWLGVIISGGSTEYNAAFISRLSISKDNSKSQVFFKMNSLQADDTAIYYCARGGLLSPFDYWGQGTTLTVSS

SEQ ID NO: 20827 - protein, 5 aa, synthetic construct
  source 1..5: note = Description of Artificial Sequence: Synthetic peptide; note = XENP020406 vhCDR1
SYGVH

SEQ ID NO: 20828 - protein, 16 aa, synthetic construct
  source 1..16: note = Description of Artificial Sequence: Synthetic peptide; note = XENP020406 vhCDR2
VIISGGSTEYNAAFIS

SEQ ID NO: 20829 - protein, 9 aa, synthetic construct
  source 1..9: note = Description of Artificial Sequence: Synthetic peptide; note = XENP020406 vhCDR3
GGLLSPFDY

SEQ ID NO: 20830 - protein, 218 aa, synthetic construct; identical to SEQ ID NO: 20810
  source 1..218: note = Description of Artificial Sequence: Synthetic polypeptide; note = XENP020406 6D9_H0_1D12_L0_IgG1_PVA_/S267K Light Chain

SEQ ID NO: 20831 - protein, 111 aa, synthetic construct; identical to SEQ ID NO: 20811
  source 1..111: note = Description of Artificial Sequence: Synthetic polypeptide; note = VL of XENP020406

SEQ ID NO: 20832 - protein, 15 aa, synthetic construct
  source 1..15: note = Description of Artificial Sequence: Synthetic peptide; note = XENP020406 vlCDR1
RASESVEYYGTSLQQ

SEQ ID NO: 20833 - protein, 7 aa, synthetic construct
  source 1..7: note = Description of Artificial Sequence: Synthetic peptide; note = XENP020406 vlCDR2
AASNVES

SEQ ID NO: 20834 - protein, 9 aa, synthetic construct
  source 1..9: note = Description of Artificial Sequence: Synthetic peptide; note = XENP020406 vlCDR3
QQSRKVPWT

SEQ ID NO: 20835 - protein, 447 aa, synthetic construct
  source 1..447: note = Description of Artificial Sequence: Synthetic polypeptide; note = XENP020407 7B11_H0L0_IgG1_PVA_/S267K Heavy Chain
QVQLKQSGPGLVQPSQSLSITCTVSGFSLTSYAVNWVRQSPGKGLEWLGVIWSGGSTDYNAAFISRLSISKDNSKSQVFFKMNSLQANDTAIYYCVSLYYRYDGFDYWGQGTLVTVSAASTKGPSVFPLAPSSKSTSGGTAALGCLVKDYFPEPVTVSWNSGALTSGVHTFPAVLQSSGLYSLSSVVTVPSSSLGTQTYICNVNHKPSNTKVDKKVEPKSCDKTHTCPPCPAPPVAGPSVFLFPPKPKDTLMISRTPEVTCVVVDVKHEDPEVKFNWYVDGVEVHNAKTKPREEQYNSTYRVVSVLTVLHQDWLNGKEYKCKVSNKALPAPIEKTISKAKGQPREPQVYTLPPSREEMTKNQVSLTCLVKGFYPSDIAVEWESNGQPENNYKTTPPVLDSDGSFFLYSKLTVDKSRWQQGNVFSCSVMHEALHNHYTQKSLSLSPGK

SEQ ID NO: 20836 - protein, 118 aa, synthetic construct
  source 1..118: note = Description of Artificial Sequence: Synthetic polypeptide; note = VH of XENP020407
QVQLKQSGPGLVQPSQSLSITCTVSGFSLTSYAVNWVRQSPGKGLEWLGVIWSGGSTDYNAAFISRLSISKDNSKSQVFFKMNSLQANDTAIYYCVSLYYRYDGFDYWGQGTLVTVSA

SEQ ID NO: 20837 - protein, 5 aa, synthetic construct
  source 1..5: note = Description of Artificial Sequence: Synthetic peptide; note = XENP020407 vhCDR1
SYAVN

SEQ ID NO: 20838 - protein, 16 aa, synthetic construct
  source 1..16: note = Description of Artificial Sequence: Synthetic peptide; note = XENP020407 vhCDR2
VIWSGGSTDYNAAFIS

SEQ ID NO: 20839 - protein, 10 aa, synthetic construct
  source 1..10: note = Description of Artificial Sequence: Synthetic peptide; note = XENP020407 vhCDR3
LYYRYDGFDY

SEQ ID NO: 20840 - protein, 214 aa, synthetic construct
  source 1..214: note = Description of Artificial Sequence: Synthetic polypeptide; note = XENP020407 7B11_H0L0_IgG1_PVA_/S267K Light Chain
DIVLTQSQKFLSTSVGDRVSVTCKASQNVGTHVARYQQKPGQSPKALVYSASYRYSGVPDRFTGSGSGTDFTLTISNVQSEDLAEYFCQQYNSYPLTFGGGTKLEIKRTVAAPSVFIFPPSDEQLKSGTASVVCLLNNFYPREAKVQWKVDNALQSGNSQESVTEQDSKDSTYSLSSTLTLSKADYEKHKVYACEVTHQGLSSPVTKSFNRGEC

SEQ ID NO: 20841 - protein, 107 aa, synthetic construct
  source 1..107: note = Description of Artificial Sequence: Synthetic polypeptide; note = VL of XENP020407
DIVLTQSQKFLSTSVGDRVSVTCKASQNVGTHVARYQQKPGQSPKALVYSASYRYSGVPDRFTGSGSGTDFTLTISNVQSEDLAEYFCQQYNSYPLTFGGGTKLEIK

SEQ ID NO: 20842 - protein, 11 aa, synthetic construct
  source 1..11: note = Description of Artificial Sequence: Synthetic peptide; note = XENP020407 vlCDR1
KASQNVGTHVA

SEQ ID NO: 20843 - protein, 7 aa, synthetic construct
  source 1..7: note = Description of Artificial Sequence: Synthetic peptide; note = XENP020407 vlCDR2
SASYRYS

SEQ ID NO: 20844 - protein, 9 aa, synthetic construct
  source 1..9: note = Description of Artificial Sequence: Synthetic peptide; note = XENP020407 vlCDR3
QQYNSYPLT

SEQ ID NO: 20845 - protein, 447 aa, synthetic construct
  source 1..447: note = Description of Artificial Sequence: Synthetic polypeptide; note = XENP020408 7B11var_H0L0_IgG1_PVA_/S267K Heavy Chain
QVQLKQSGPGLVQPSQSLSITCTVSGFSLTSYAVNWVRQSPGKGLEWLGVIWSGGSTDYNAAFISRLSISKDNSKSQVFFKMNSLQADDTAIYYCVSLYYRYDGFDYWGQGTLVTVSAASTKGPSVFPLAPSSKSTSGGTAALGCLVKDYFPEPVTVSWNSGALTSGVHTFPAVLQSSGLYSLSSVVTVPSSSLGTQTYICNVNHKPSNTKVDKKVEPKSCDKTHTCPPCPAPPVAGPSVFLFPPKPKDTLMISRTPEVTCVVVDVKHEDPEVKFNWYVDGVEVHNAKTKPREEQYNSTYRVVSVLTVLHQDWLNGKEYKCKVSNKALPAPIEKTISKAKGQPREPQVYTLPPSREEMTKNQVSLTCLVKGFYPSDIAVEWESNGQPENNYKTTPPVLDSDGSFFLYSKLTVDKSRWQQGNVFSCSVMHEALHNHYTQKSLSLSPGK

SEQ ID NO: 20846 - protein, 118 aa, synthetic construct
  source 1..118: note = Description of Artificial Sequence: Synthetic polypeptide; note = VH of XENP020408
QVQLKQSGPGLVQPSQSLSITCTVSGFSLTSYAVNWVRQSPGKGLEWLGVIWSGGSTDYNAAFISRLSISKDNSKSQVFFKMNSLQADDTAIYYCVSLYYRYDGFDYWGQGTLVTVSA

SEQ ID NO: 20847 - protein, 5 aa, synthetic construct
  source 1..5: note = Description of Artificial Sequence: Synthetic peptide; note = XENP020408 vhCDR1
SYAVN

SEQ ID NO: 20848 - protein, 16 aa, synthetic construct
  source 1..16: note = Description of Artificial Sequence: Synthetic peptide; note = XENP020408 vhCDR2
VIWSGGSTDYNAAFIS

SEQ ID NO: 20849 - protein, 10 aa, synthetic construct
  source 1..10: note = Description of Artificial Sequence: Synthetic peptide; note = XENP020408 vhCDR3
LYYRYDGFDY

SEQ ID NO: 20850 - protein, 214 aa, synthetic construct; identical to SEQ ID NO: 20840
  source 1..214: note = Description of Artificial Sequence: Synthetic polypeptide; note = XENP020408 7B11var_H0L0_IgG1_PVA_/S267K Light Chain

SEQ ID NO: 20851 - protein, 107 aa, synthetic construct; identical to SEQ ID NO: 20841
  source 1..107: note = Description of Artificial Sequence: Synthetic polypeptide; note = VL of XENP020408

SEQ ID NO: 20852 - protein, 11 aa, synthetic construct
  source 1..11: note = Description of Artificial Sequence: Synthetic peptide; note = XENP020408 vlCDR1
KASQNVGTHVA

SEQ ID NO: 20853 - protein, 7 aa, synthetic construct
  source 1..7: note = Description of Artificial Sequence: Synthetic peptide; note = XENP020408 vlCDR2
SASYRYS

SEQ ID NO: 20854 - protein, 9 aa, synthetic construct
  source 1..9: note = Description of Artificial Sequence: Synthetic peptide; note = XENP020408 vlCDR3
QQYNSYPLT

SEQ ID NO: 20855 - protein, 446 aa, synthetic construct
  source 1..446: note = Description of Artificial Sequence: Synthetic polypeptide; note = XENP020409 6C8_H0L0_IgG1_PVA_/S267K Heavy Chain
QVQLQQSGAELVRPGTSVKISCKAAGYTFTNYAIGWVKQRPGHGLEWIGDFYPGGGYTNYNEKFKGKATLTADTSSSTAYMQLSSLTSEDSAIYFCARGYYRVFDYWGQGTTLTVSSASTKGPSVFPLAPSSKSTSGGTAALGCLVKDYFPEPVTVSWNSGALTSGVHTFPAVLQSSGLYSLSSVVTVPSSSLGTQTYICNVNHKPSNTKVDKKVEPKSCDKTHTCPPCPAPPVAGPSVFLFPPKPKDTLMISRTPEVTCVVVDVKHEDPEVKFNWYVDGVEVHNAKTKPREEQYNSTYRVVSVLTVLHQDWLNGKEYKCKVSNKALPAPIEKTISKAKGQPREPQVYTLPPSREEMTKNQVSLTCLVKGFYPSDIAVEWESNGQPENNYKTTPPVLDSDGSFFLYSKLTVDKSRWQQGNVFSCSVMHEALHNHYTQKSLSLSPGK

SEQ ID NO: 20856 - protein, 117 aa, synthetic construct
  source 1..117: note = Description of Artificial Sequence: Synthetic polypeptide; note = VH of XENP020409
QVQLQQSGAELVRPGTSVKISCKAAGYTFTNYAIGWVKQRPGHGLEWIGDFYPGGGYTNYNEKFKGKATLTADTSSSTAYMQLSSLTSEDSAIYFCARGYYRVFDYWGQGTTLTVSS

SEQ ID NO: 20857 - protein, 5 aa, synthetic construct
  source 1..5: note = Description of Artificial Sequence: Synthetic peptide; note = XENP020409 vhCDR1
NYAIG

SEQ ID NO: 20858 - protein, 17 aa, synthetic construct
  source 1..17: note = Description of Artificial Sequence: Synthetic peptide; note = XENP020409 vhCDR2
DFYPGGGYTNYNEKFKG

SEQ ID NO: 20859 - protein, 8 aa, synthetic construct
  source 1..8: note = Description of Artificial Sequence: Synthetic peptide; note = XENP020409 vhCDR3
GYYRVFDY

SEQ ID NO: 20860 - protein, 214 aa, synthetic construct
  source 1..214: note = Description of Artificial Sequence: Synthetic polypeptide; note = XENP020409 6C8_H0L0_IgG1_PVA_/S267K Light Chain
DIVLTQSQKFLSTSVGDRVSVTCKASQNVGSNVARCQQKPGQSPKALIYSASFRYSGVPDRFTGSGSGTDFTLTISNVQSEDLAEYFCQQYNSYPYTFGGGTKLEIKRTVAAPSVFIFPPSDEQLKSGTASVVCLLNNFYPREAKVQWKVDNALQSGNSQESVTEQDSKDSTYSLSSTLTLSKADYEKHKVYACEVTHQGLSSPVTKSFNRGEC

SEQ ID NO: 20861 - protein, 107 aa, synthetic construct
  source 1..107: note = Description of Artificial Sequence: Synthetic polypeptide; note = VL of XENP020409
DIVLTQSQKFLSTSVGDRVSVTCKASQNVGSNVARCQQKPGQSPKALIYSASFRYSGVPDRFTGSGSGTDFTLTISNVQSEDLAEYFCQQYNSYPYTFGGGTKLEIK

SEQ ID NO: 20862 - protein, 11 aa, synthetic construct
  source 1..11: note = Description of Artificial Sequence: Synthetic peptide; note = XENP020409 vlCDR1
KASQNVGSNVA

SEQ ID NO: 20863 - protein, 7 aa, synthetic construct
  source 1..7: note = Description of Artificial Sequence: Synthetic peptide; note = XENP020409 vlCDR2
SASFRYS

SEQ ID NO: 20864 - protein, 9 aa, synthetic construct
  source 1..9: note = Description of Artificial Sequence: Synthetic peptide; note = XENP020409 vlCDR3
QQYNSYPYT

SEQ ID NO: 20865 - protein, 446 aa, synthetic construct
  source 1..446: note = Description of Artificial Sequence: Synthetic polypeptide; note = XENP020410 7C2_H0L0_IgG1_PVA_/S267K Heavy Chain
EVKVVESGGGLVKPGGSLKLSCAASGFTFSRYAISWVRQTPEKRLEWVASISSGGSTYYPDSVQGRFTISRDNARNILYLQMSSLRSEDTAMYYCARGDYEGYFDYWGQGTSLTVSSASTKGPSVFPLAPSSKSTSGGTAALGCLVKDYFPEPVTVSWNSGALTSGVHTFPAVLQSSGLYSLSSVVTVPSSSLGTQTYICNVNHKPSNTKVDKKVEPKSCDKTHTCPPCPAPPVAGPSVFLFPPKPKDTLMISRTPEVTCVVVDVKHEDPEVKFNWYVDGVEVHNAKTKPREEQYNSTYRVVSVLTVLHQDWLNGKEYKCKVSNKALPAPIEKTISKAKGQPREPQVYTLPPSREEMTKNQVSLTCLVKGFYPSDIAVEWESNGQPENNYKTTPPVLDSDGSFFLYSKLTVDKSRWQQGNVFSCSVMHEALHNHYTQKSLSLSPGK

SEQ ID NO: 20866 - protein, 117 aa, synthetic construct
  source 1..117: note = Description of Artificial Sequence: Synthetic polypeptide; note = VH of XENP020410
EVKVVESGGGLVKPGGSLKLSCAASGFTFSRYAISWVRQTPEKRLEWVASISSGGSTYYPDSVQGRFTISRDNARNILYLQMSSLRSEDTAMYYCARGDYEGYFDYWGQGTSLTVSS

SEQ ID NO: 20867 - protein, 5 aa, synthetic construct
  source 1..5: note = Description of Artificial Sequence: Synthetic peptide; note = XENP020410 vhCDR1
RYAIS

SEQ ID NO: 20868 - protein, 16 aa, synthetic construct
  source 1..16: note = Description of Artificial Sequence: Synthetic peptide; note = XENP020410 vhCDR2
SISSGGSTYYPDSVQG

SEQ ID NO: 20869 - protein, 9 aa, synthetic construct
  source 1..9: note = Description of Artificial Sequence: Synthetic peptide; note = XENP020410 vhCDR3
GDYEGYFDY

SEQ ID NO: 20870 - protein, 220 aa, synthetic construct
  source 1..220: note = Description of Artificial Sequence: Synthetic polypeptide; note = XENP020410 7C2_H0L0_IgG1_PVA_/S267K Light Chain
DIVLTQSPSSLATSVGQKVTVSCKSSQSLLNSINQKNYLAGYQQKPGQSPKLLVYFASTRESGVPDRFIGSGSGTDFTLTISSVQAEDLADYFCQQHYSTPLTFGAGTKLELKRTVAAPSVFIFPPSDEQLKSGTASVVCLLNNFYPREAKVQWKVDNALQSGNSQESVTEQDSKDSTYSLSSTLTLSKADYEKHKVYACEVTHQGLSSPVTKSFNRGEC

SEQ ID NO: 20871 - protein, 113 aa, synthetic construct
  source 1..113: note = Description of Artificial Sequence: Synthetic polypeptide; note = VL of XENP020410
DIVLTQSPSSLATSVGQKVTVSCKSSQSLLNSINQKNYLAGYQQKPGQSPKLLVYFASTRESGVPDRFIGSGSGTDFTLTISSVQAEDLADYFCQQHYSTPLTFGAGTKLELK

SEQ ID NO: 20872 - protein, 17 aa, synthetic construct
  source 1..17: note = Description of Artificial Sequence: Synthetic peptide; note = XENP020410 vlCDR1
KSSQSLLNSINQKNYLA

SEQ ID NO: 20873 - protein, 7 aa, synthetic construct
  source 1..7: note = Description of Artificial Sequence: Synthetic peptide; note = XENP020410 vlCDR2
FASTRES

SEQ ID NO: 20874 - protein, 9 aa, synthetic construct
  source 1..9: note = Description of Artificial Sequence: Synthetic peptide; note = XENP020410 vlCDR3
QQHYSTPLT

SEQ ID NO: 20875 - protein, 442 aa, synthetic construct
  source 1..442: note = Description of Artificial Sequence: Synthetic polypeptide; note = XENP020411 1D10_H0L0_IgG1_PVA_/S267K Heavy Chain
EVQLVESGGGLVKPGGSLKFSCAASGFAFSSFDISWVRQTPEKRLEWVAYISSDGASTFYPDTMKGRFTISRDNAKNTLYLQMSSLKSEDTAMYYCTRLGAYWGQGTLVTVSAASTKGPSVFPLAPSSKSTSGGTAALGCLVKDYFPEPVTVSWNSGALTSGVHTFPAVLQSSGLYSLSSVVTVPSSSLGTQTYICNVNHKPSNTKVDKKVEPKSCDKTHTCPPCPAPPVAGPSVFLFPPKPKDTLMISRTPEVTCVVVDVKHEDPEVKFNWYVDGVEVHNAKTKPREEQYNSTYRVVSVLTVLHQDWLNGKEYKCKVSNKALPAPIEKTISKAKGQPREPQVYTLPPSREEMTKNQVSLTCLVKGFYPSDIAVEWESNGQPENNYKTTPPVLDSDGSFFLYSKLTVDKSRWQQGNVFSCSVMHEALHNHYTQKSLSLSPGK

SEQ ID NO: 20876 - protein, 113 aa, synthetic construct
  source 1..113: note = Description of Artificial Sequence: Synthetic polypeptide; note = VH of XENP020411
EVQLVESGGGLVKPGGSLKFSCAASGFAFSSFDISWVRQTPEKRLEWVAYISSDGASTFYPDTMKGRFTISRDNAKNTLYLQMSSLKSEDTAMYYCTRLGAYWGQGTLVTVSA

SEQ ID NO: 20877 - protein, 5 aa, synthetic construct
  source 1..5: note = Description of Artificial Sequence: Synthetic peptide; note = XENP020411 vhCDR1
SFDIS

SEQ ID NO: 20878 - protein, 17 aa, synthetic construct
  source 1..17: note = Description of Artificial Sequence: Synthetic peptide; note = XENP020411 vhCDR2
YISSDGASTFYPDTMKG

SEQ ID NO: 20879 - protein, 4 aa, synthetic construct
  source 1..4: note = Description of Artificial Sequence: Synthetic peptide; note = XENP020411 vhCDR3
LGAY

SEQ ID NO: 20880 - protein, 219 aa, synthetic construct
  source 1..219: note = Description of Artificial Sequence: Synthetic polypeptide; note = XENP020411 1D10_H0L0_IgG1_PVA_/S267K Light Chain
DVVLTQTPLTLSVTIGQPASISCKSSQSLLDSDGKTYLNWLLQRPGQSPKRLIYLVSKLDSGVPDRFTGSGSGTDFTLKISRVEAEDLGVYYCWQGTHFPYTFGGGTKLEIKRTVAAPSVFIFPPSDEQLKSGTASVVCLLNNFYPREAKVQWKVDNALQSGNSQESVTEQDSKDSTYSLSSTLTLSKADYEKHKVYACEVTHQGLSSPVTKSFNRGEC

SEQ ID NO: 20881 - protein, 112 aa, synthetic construct
  source 1..112: note = Description of Artificial Sequence: Synthetic polypeptide; note = VL of XENP020411
DVVLTQTPLTLSVTIGQPASISCKSSQSLLDSDGKTYLNWLLQRPGQSPKRLIYLVSKLDSGVPDRFTGSGSGTDFTLKISRVEAEDLGVYYCWQGTHFPYTFGGGTKLEIK

SEQ ID NO: 20882 - protein, 16 aa, synthetic construct
  source 1..16: note = Description of Artificial Sequence: Synthetic peptide; note = XENP020411 vlCDR1
KSSQSLLDSDGKTYLN

SEQ ID NO: 20883 - protein, 7 aa, synthetic construct
  source 1..7: note = Description of Artificial Sequence: Synthetic peptide; note = XENP020411 vlCDR2
LVSKLDS

SEQ ID NO: 20884 - protein, 9 aa, synthetic construct
  source 1..9: note = Description of Artificial Sequence: Synthetic peptide; note = XENP020411 vlCDR3
WQGTHFPYT

SEQ ID NO: 20885 - protein, 448 aa, synthetic construct
  source 1..448: note = Description of Artificial Sequence: Synthetic polypeptide; note = XENP017883 4C7_H0L0_IgG1_PVA_/S267K Heavy Chain
QVQLQESGPGLVKPSETLSLTCTVHGGSINHYYWSWIRQPPGKGLEWIGYIYYSGSTKYNPSLKSRVSISVDTSKNQFSLKLTSVTAADTAVYYCAREWPYYYYEMDVWGQGTTVTVSSASTKGPSVFPLAPSSKSTSGGTAALGCLVKDYFPEPVTVSWNSGALTSGVHTFPAVLQSSGLYSLSSVVTVPSSSLGTQTYICNVNHKPSNTKVDKKVEPKSCDKTHTCPPCPAPPVAGPSVFLFPPKPKDTLMISRTPEVTCVVVDVKHEDPEVKFNWYVDGVEVHNAKTKPREEQYNSTYRVVSVLTVLHQDWLNGKEYKCKVSNKALPAPIEKTISKAKGQPREPQVYTLPPSREEMTKNQVSLTCLVKGFYPSDIAVEWESNGQPENNYKTTPPVLDSDGSFFLYSKLTVDKSRWQQGNVFSCSVMHEALHNHYTQKSLSLSPGK

SEQ ID NO: 20886 - protein, 119 aa, synthetic construct
  source 1..119: note = Description of Artificial Sequence: Synthetic polypeptide; note = VH of XENP017883
QVQLQESGPGLVKPSETLSLTCTVHGGSINHYYWSWIRQPPGKGLEWIGYIYYSGSTKYNPSLKSRVSISVDTSKNQFSLKLTSVTAADTAVYYCAREWPYYYYEMDVWGQGTTVTVSS

SEQ ID NO: 20887 - protein, 5 aa, synthetic construct
  source 1..5: note = Description of Artificial Sequence: Synthetic peptide; note = XENP017883 vhCDR1
HYYWS

SEQ ID NO: 20888 - protein, 16 aa, synthetic construct
  source 1..16: note = Description of Artificial Sequence: Synthetic peptide; note = XENP017883 vhCDR2
YIYYSGSTKYNPSLKS

SEQ ID NO: 20889 - protein, 11 aa, synthetic construct
  source 1..11: note = Description of Artificial Sequence: Synthetic peptide; note = XENP017883 vhCDR3
EWPYYYYEMDV

SEQ ID NO: 20890 - protein, 215 aa, synthetic construct
  source 1..215: note = Description of Artificial Sequence: Synthetic polypeptide; note = XENP017883 4C7_H0L0_IgG1_PVA_/S267K Light Chain
EIVLTQSPGTLSLSPGERATLSCRASQSVSSSYLAWYQQKPGQAPRLLIYGASSRATGIPDRFSGSGSGTDFTLTISRLEPEDFAVYYCQQYGSSFRTFGQGTKVEIKRTVAAPSVFIFPPSDEQLKSGTASVVCLLNNFYPREAKVQWKVDNALQSGNSQESVTEQDSKDSTYSLSSTLTLSKADYEKHKVYACEVTHQGLSSPVTKSFNRGEC

SEQ ID NO: 20891 - protein, 108 aa, synthetic construct
  source 1..108: note = Description of Artificial Sequence: Synthetic polypeptide; note = VL of XENP017883
EIVLTQSPGTLSLSPGERATLSCRASQSVSSSYLAWYQQKPGQAPRLLIYGASSRATGIPDRFSGSGSGTDFTLTISRLEPEDFAVYYCQQYGSSFRTFGQGTKVEIK

SEQ ID NO: 20892 - protein, 12 aa, synthetic construct
  source 1..12: note = Description of Artificial Sequence: Synthetic peptide; note = XENP017883 vlCDR1
RASQSVSSSYLA

SEQ ID NO: 20893 - protein, 7 aa, synthetic construct
  source 1..7: note = Description of Artificial Sequence: Synthetic peptide; note = XENP017883 vlCDR2
GASSRAT

SEQ ID NO: 20894 - protein, 9 aa, synthetic construct
  source 1..9: note = Description of Artificial Sequence: Synthetic peptide; note = XENP017883 vlCDR3
QQYGSSFRT

SEQ ID NO: 20895 - protein, 450 aa, synthetic construct
  source 1..450: note = Description of Artificial Sequence: Synthetic polypeptide; note = XENP017884 8D5_H0L0_IgG1_PVA_/S267K Heavy Chain
EVQLVESGGGLVQPGGSLRLSCAASGFTISSYDMHWVRQATGKGLEWVSVIGPAGDTYYPGSVKGRFTISRENAKNSLYLQMNSLRAGDTAVYYCAREGMAAHNYYGMDVWGQGTTVTVSSASTKGPSVFPLAPSSKSTSGGTAALGCLVKDYFPEPVTVSWNSGALTSGVHTFPAVLQSSGLYSLSSVVTVPSSSLGTQTYICNVNHKPSNTKVDKKVEPKSCDKTHTCPPCPAPPVAGPSVFLFPPKPKDTLMISRTPEVTCVVVDVKHEDPEVKFNWYVDGVEVHNAKTKPREEQYNSTYRVVSVLTVLHQDWLNGKEYKCKVSNKALPAPIEKTISKAKGQPREPQVYTLPPSREEMTKNQVSLTCLVKGFYPSDIAVEWESNGQPENNYKTTPPVLDSDGSFFLYSKLTVDKSRWQQGNVFSCSVMHEALHNHYTQKSLSLSPGK

SEQ ID NO: 20896 - protein, 121 aa, synthetic construct
  source 1..121: note = Description of Artificial Sequence: Synthetic polypeptide; note = VH of XENP017884
EVQLVESGGGLVQPGGSLRLSCAASGFTISSYDMHWVRQATGKGLEWVSVIGPAGDTYYPGSVKGRFTISRENAKNSLYLQMNSLRAGDTAVYYCAREGMAAHNYYGMDVWGQGTTVTVSS

SEQ ID NO: 20897 - protein, 5 aa, synthetic construct
  source 1..5: note = Description of Artificial Sequence: Synthetic peptide; note = XENP017884 vhCDR1
SYDMH

SEQ ID NO: 20898 - protein, 16 aa, synthetic construct
  source 1..16: note = Description of Artificial Sequence: Synthetic peptide; note = XENP017884 vhCDR2
VIGPAGDTYYPGSVKG

SEQ ID NO: 20899 - protein, 13 aa, synthetic construct
  source 1..13: note = Description of Artificial Sequence: Synthetic peptide; note = XENP017884 vhCDR3
EGMAAHNYYGMDV

SEQ ID NO: 20900 - protein, 215 aa, synthetic construct
  source 1..215: note = Description of Artificial Sequence: Synthetic polypeptide; note = XENP017884 8D5_H0L0_IgG1_PVA_/S267K Light Chain
EIVLTQSPATLSLSPGERATLSCRASQSVSSYLAWYQQKPGQAPRLLIYDASNRATGIPARFSGSGSGTDFTLTISSLEPEDFAVYYCQQRSNWPPITFGQGTRLEIKRTVAAPSVFIFPPSDEQLKSGTASVVCLLNNFYPREAKVQWKVDNALQSGNSQESVTEQDSKDSTYSLSSTLTLSKADYEKHKVYACEVTHQGLSSPVTKSFNRGEC

SEQ ID NO: 20901 - protein, 108 aa, synthetic construct
  source 1..108: note = Description of Artificial Sequence: Synthetic polypeptide; note = VL of XENP017884
EIVLTQSPATLSLSPGERATLSCRASQSVSSYLAWYQQKPGQAPRLLIYDASNRATGIPARFSGSGSGTDFTLTISSLEPEDFAVYYCQQRSNWPPITFGQGTRLEIK

SEQ ID NO: 20902 - protein, 11 aa, synthetic construct
  source 1..11: note = Description of Artificial Sequence: Synthetic peptide; note = XENP017884 vlCDR1
RASQSVSSYLA

SEQ ID NO: 20903 - protein, 7 aa, synthetic construct
  source 1..7: note = Description of Artificial Sequence: Synthetic peptide; note = XENP017884 vlCDR2
DASNRAT

SEQ ID NO: 20904 - protein, 10 aa, synthetic construct
  source 1..10: note = Description of Artificial Sequence: Synthetic peptide; note = XENP017884 vlCDR3
QQRSNWPPIT

SEQ ID NO: 20905 - protein, 457 aa, synthetic construct
  source 1..457: note = Description of Artificial Sequence: Synthetic polypeptide; note = XENP017885 E8D9_H0L0_IgG1_PVA_/S267K Heavy Chain
QITLKESGPTLVKPTQTLTLTCTFSGFSLSTSGVGVGWIRQPPGKALEWLALIYWDDDKRYSPSLKSRLTITKDTSKNQVVLTMTNMDPVDTATYYCAHTSITEVRGAIIYYYGMDVWGQGTTVTVSSASTKGPSVFPLAPSSKSTSGGTAALGCLVKDYFPEPVTVSWNSGALTSGVHTFPAVLQSSGLYSLSSVVTVPSSSLGTQTYICNVNHKPSNTKVDKKVEPKSCDKTHTCPPCPAPPVAGPSVFLFPPKPKDTLMISRTPEVTCVVVDVKHEDPEVKFNWYVDGVEVHNAKTKPREEQYNSTYRVVSVLTVLHQDWLNGKEYKCKVSNKALPAPIEKTISKAKGQPREPQVYTLPPSREEMTKNQVSLTCLVKGFYPSDIAVEWESNGQPENNYKTTPPVLDSDGSFFLYSKLTVDKSRWQQGNVFSCSVMHEALHNHYTQKSLSLSPGK

SEQ ID NO: 20906 - protein, 128 aa, synthetic construct
  source 1..128: note = Description of Artificial Sequence: Synthetic polypeptide; note = VH of XENP017885
QITLKESGPTLVKPTQTLTLTCTFSGFSLSTSGVGVGWIRQPPGKALEWLALIYWDDDKRYSPSLKSRLTITKDTSKNQVVLTMTNMDPVDTATYYCAHTSITEVRGAIIYYYGMDVWGQGTTVTVSS

SEQ ID NO: 20907 - protein, 7 aa, synthetic construct
  source 1..7: note = Description of Artificial Sequence: Synthetic peptide; note = XENP017885 vhCDR1
TSGVGVG

SEQ ID NO: 20908 - protein, 16 aa, synthetic construct
  source 1..16: note = Description of Artificial Sequence: Synthetic peptide; note = XENP017885 vhCDR2
LIYWDDDKRYSPSLKS

SEQ ID NO: 20909 - protein, 18 aa, synthetic construct
  source 1..18: note = Description of Artificial Sequence: Synthetic peptide; note = XENP017885 vhCDR3
TSITEVRGAIIYYYGMDV

SEQ ID NO: 20910 - protein, 214 aa, synthetic construct
  source 1..214: note = Description of Artificial Sequence: Synthetic polypeptide; note = XENP017885 E8D9_H0L0_IgG1_PVA_/S267K Light Chain
EIVLTQSPGTLSLSPGERATLSCRASQSVSSSYLAWYQQKPGQAPRLLIYGASSRATGIPDRFSGSGSGTDFTLTISRLEPEDFAVYYCQQYGHSLTFGGGTKVEIKRTVAAPSVFIFPPSDEQLKSGTASVVCLLNNFYPREAKVQWKVDNALQSGNSQESVTEQDSKDSTYSLSSTLTLSKADYEKHKVYACEVTHQGLSSPVTKSFNRGEC

SEQ ID NO: 20911 - protein, 107 aa, synthetic construct
  source 1..107: note = Description of Artificial Sequence: Synthetic polypeptide; note = VL of XENP017885
EIVLTQSPGTLSLSPGERATLSCRASQSVSSSYLAWYQQKPGQAPRLLIYGASSRATGIPDRFSGSGSGTDFTLTISRLEPEDFAVYYCQQYGHSLTFGGGTKVEIK

SEQ ID NO: 20912 - protein, 12 aa, synthetic construct
  source 1..12: note = Description of Artificial Sequence: Synthetic peptide; note = XENP017885 vlCDR1
RASQSVSSSYLA

SEQ ID NO: 20913 - protein, 7 aa, synthetic construct
  source 1..7: note = Description of Artificial Sequence: Synthetic peptide; note = XENP017885 vlCDR2
GASSRAT

SEQ ID NO: 20914 - protein, 8 aa, synthetic construct
  source 1..8: note = Description of Artificial Sequence: Synthetic peptide; note = XENP017885 vlCDR3
QQYGHSLT

SEQ ID NO: 20915 - protein, 449 aa, synthetic construct
  source 1..449: note = Description of Artificial Sequence: Synthetic polypeptide; note = XENP020267 3F6_H0L0_anti-BTLA_IgG1_PVA_/S267K Heavy Chain
EVQLQESGPSLVKPSQTLSLTCSVTGDSITSGYWNWIRKFPGNKLEYMGYLSYSGSTYYNPSLKSRISITRDTSKNQYYLQLNSVTTEDTATYYCARYFYGSYYEAMDYWGQGTSVTVSSASTKGPSVFPLAPSSKSTSGGTAALGCLVKDYFPEPVTVSWNSGALTSGVHTFPAVLQSSGLYSLSSVVTVPSSSLGTQTYICNVNHKPSNTKVDKKVEPKSCDKTHTCPPCPAPPVAGPSVFLFPPKPKDTLMISRTPEVTCVVVDVKHEDPEVKFNWYVDGVEVHNAKTKPREEQYNSTYRVVSVLTVLHQDWLNGKEYKCKVSNKALPAPIEKTISKAKGQPREPQVYTLPPSREEMTKNQVSLTCLVKGFYPSDIAVEWESNGQPENNYKTTPPVLDSDGSFFLYSKLTVDKSRWQQGNVFSCSVMHEALHNHYTQKSLSLSPGK

SEQ ID NO: 20916 - protein, 120 aa, synthetic construct
  source 1..120: note = Description of Artificial Sequence: Synthetic polypeptide; note = VH of XENP020267
EVQLQESGPSLVKPSQTLSLTCSVTGDSITSGYWNWIRKFPGNKLEYMGYLSYSGSTYYNPSLKSRISITRDTSKNQYYLQLNSVTTEDTATYYCARYFYGSYYEAMDYWGQGTSVTVSS

SEQ ID NO: 20917 - protein, 5 aa, synthetic construct
  source 1..5: note = Description of Artificial Sequence: Synthetic peptide; note = XENP020267 vhCDR1
SGYWN

SEQ ID NO: 20918 - protein, 16 aa, synthetic construct
  source 1..16: note = Description of Artificial Sequence: Synthetic peptide; note = XENP020267 vhCDR2
YLSYSGSTYYNPSLKS

SEQ ID NO: 20919 - protein, 12 aa, synthetic construct
  source 1..12: note = Description of Artificial Sequence: Synthetic peptide; note = XENP020267 vhCDR3
YFYGSYYEAMDY

SEQ ID NO: 20920 - protein, 214 aa, synthetic construct
  source 1..214: note = Description of Artificial Sequence: Synthetic polypeptide; note = XENP020267 3F6_H0L0_anti-BTLA_IgG1_PVA_/S267K Light Chain
DVQITQSPSYLAASPGETISINCRASKSISKYLAWYQEKPGKTNKLLIYSGSTLQSGIPSRFSGSGSGTDFTLTISSLEPEDFAMYYCQQHNEYPWTFGGGTKLEIKRTVAAPSVFIFPPSDEQLKSGTASVVCLLNNFYPREAKVQWKVDNALQSGNSQESVTEQDSKDSTYSLSSTLTLSKADYEKHKVYACEVTHQGLSSPVTKSFNRGEC

SEQ ID NO: 20921 - protein, 107 aa, synthetic construct
  source 1..107: note = Description of Artificial Sequence: Synthetic polypeptide; note = VL of XENP020267
DVQITQSPSYLAASPGETISINCRASKSISKYLAWYQEKPGKTNKLLIYSGSTLQSGIPSRFSGSGSGTDFTLTISSLEPEDFAMYYCQQHNEYPWTFGGGTKLEIK

SEQ ID NO: 20922 - protein, 11 aa, synthetic construct
  source 1..11: note = Description of Artificial Sequence: Synthetic peptide; note = XENP020267 vlCDR1
RASKSISKYLA

SEQ ID NO: 20923 - protein, 7 aa, synthetic construct
  source 1..7: note = Description of Artificial Sequence: Synthetic peptide; note = XENP020267 vlCDR2
SGSTLQS

SEQ ID NO: 20924 - protein, 9 aa, synthetic construct
  source 1..9: note = Description of Artificial Sequence: Synthetic peptide; note = XENP020267 vlCDR3
QQHNEYPWT

SEQ ID NO: 20925 - protein, 448 aa, synthetic construct
  source 1..448: note = Description of Artificial Sequence: Synthetic polypeptide; note = XENP020268 1A9_H0L0_anti-BTLA_IgG1_PVA_/S267K Heavy Chain
DVQLVESGGGLVQPGGSRKLSCAASGFTFSSFGMHWVRQAPEKGLEWVAYISSGISTIYYADTVKGRFTISRDNPKNTLFLQMTSLRSEDTAMYYCARDWLRGYAMDYWGQGTSVTVSSASTKGPSVFPLAPSSKSTSGGTAALGCLVKDYFPEPVTVSWNSGALTSGVHTFPAVLQSSGLYSLSSVVTVPSSSLGTQTYICNVNHKPSNTKVDKKVEPKSCDKTHTCPPCPAPPVAGPSVFLFPPKPKDTLMISRTPEVTCVVVDVKHEDPEVKFNWYVDGVEVHNAKTKPREEQYNSTYRVVSVLTVLHQDWLNGKEYKCKVSNKALPAPIEKTISKAKGQPREPQVYTLPPSREEMTKNQVSLTCLVKGFYPSDIAVEWESNGQPENNYKTTPPVLDSDGSFFLYSKLTVDKSRWQQGNVFSCSVMHEALHNHYTQKSLSLSPGK

SEQ ID NO: 20926 - protein, 119 aa, synthetic construct
  source 1..119: note = Description of Artificial Sequence: Synthetic polypeptide; note = VH of XENP020268
DVQLVESGGGLVQPGGSRKLSCAASGFTFSSFGMHWVRQAPEKGLEWVAYISSGISTIYYADTVKGRFTISRDNPKNTLFLQMTSLRSEDTAMYYCARDWLRGYAMDYWGQGTSVTVSS

SEQ ID NO: 20927 - protein, 5 aa, synthetic construct
  source 1..5: note = Description of Artificial Sequence: Synthetic peptide; note = XENP020268 vhCDR1
SFGMH

SEQ ID NO: 20928 - protein, 17 aa, synthetic construct
  source 1..17: note = Description of Artificial Sequence: Synthetic peptide; note = XENP020268 vhCDR2
YISSGISTIYYADTVKG

SEQ ID NO: 20929 - protein, 10 aa, synthetic construct
  source 1..10: note = Description of Artificial Sequence: Synthetic peptide; note = XENP020268 vhCDR3
DWLRGYAMDY

SEQ ID NO: 20930 - protein, 218 aa, synthetic construct
  source 1..218: note = Description of Artificial Sequence: Synthetic polypeptide; note = XENP020268 1A9_H0L0_anti-BTLA_IgG1_PVA_/S267K Light Chain
DIVLTQSPASLAVSLGQRATISCKASQSIDYDGDSYMNWYQQKPGQPPKLLIYAASNLDFGIPARFSGSGSGTDFTLNIHPVEEEDAATYYCQQSNEDPWTFGGGTKLEIKRTVAAPSVFIFPPSDEQLKSGTASVVCLLNNFYPREAKVQWKVDNALQSGNSQESVTEQDSKDSTYSLSSTLTLSKADYEKHKVYACEVTHQGLSSPVTKSFNRGEC

SEQ ID NO: 20931 - protein, 111 aa, synthetic construct
  source 1..111: note = Description of Artificial Sequence: Synthetic polypeptide; note = VL of XENP020268
DIVLTQSPASLAVSLGQRATISCKASQSIDYDGDSYMNWYQQKPGQPPKLLIYAASNLDFGIPARFSGSGSGTDFTLNIHPVEEEDAATYYCQQSNEDPWTFGGGTKLEIK

SEQ ID NO: 20932 - protein, 15 aa, synthetic construct
  source 1..15: note = Description of Artificial Sequence: Synthetic peptide; note = XENP020268 vlCDR1
KASQSIDYDGDSYMN

SEQ ID NO: 20933 - protein, 7 aa, synthetic construct
  source 1..7: note = Description of Artificial Sequence: Synthetic peptide; note = XENP020268 vlCDR2
AASNLDF

SEQ ID NO: 20934 - protein, 9 aa, synthetic construct
  source 1..9: note = Description of Artificial Sequence: Synthetic peptide; note = XENP020268 vlCDR3
QQSNEDPWT

SEQ ID NO: 20935 - protein, 447 aa, synthetic construct
  source 1..447: note = Description of Artificial Sequence: Synthetic polypeptide; note = XENP020269 9C6_H0L0_anti-BTLA_IgG1_PVA_/S267K Heavy Chain
QVQLKESGPGLVAPSQSLSITCTVSGFSLTGYGVNWVRQPPGKGLEWLGMIWIDGSTDYNSALKSRLSINKDNSKSQVFLKMNSLQTDDTARYYCARDRPDGRAMDYWGQGTSVTVSSASTKGPSVFPLAPSSKSTSGGTAALGCLVKDYFPEPVTVSWNSGALTSGVHTFPAVLQSSGLYSLSSVVTVPSSSLGTQTYICNVNHKPSNTKVDKKVEPKSCDKTHTCPPCPAPPVAGPSVFLFPPKPKDTLMISRTPEVTCVVVDVKHEDPEVKFNWYVDGVEVHNAKTKPREEQYNSTYRVVSVLTVLHQDWLNGKEYKCKVSNKALPAPIEKTISKAKGQPREPQVYTLPPSREEMTKNQVSLTCLVKGFYPSDIAVEWESNGQPENNYKTTPPVLDSDGSFFLYSKLTVDKSRWQQGNVFSCSVMHEALHNHYTQKSLSLSPGK

SEQ ID NO: 20936 - protein, 118 aa, synthetic construct
  source 1..118: note = Description of Artificial Sequence: Synthetic polypeptide; note = VH of XENP020269
QVQLKESGPGLVAPSQSLSITCTVSGFSLTGYGVNWVRQPPGKGLEWLGMIWIDGSTDYNSALKSRLSINKDNSKSQVFLKMNSLQTDDTARYYCARDRPDGRAMDYWGQGTSVTVSS

SEQ ID NO: 20937 - protein, 5 aa, synthetic construct
  source 1..5: note = Description of Artificial Sequence: Synthetic peptide; note = XENP020269 vhCDR1
GYGVN

SEQ ID NO: 20938 - protein, 16 aa, synthetic construct
  source 1..16: note = Description of Artificial Sequence: Synthetic peptide; note = XENP020269 vhCDR2
MIWIDGSTDYNSALKS

SEQ ID NO: 20939 - protein, 10 aa, synthetic construct
  source 1..10: note = Description of Artificial Sequence: Synthetic peptide; note = XENP020269 vhCDR3
DRPDGRAMDY

SEQ ID NO: 20940 - protein, 213 aa, synthetic construct
  source 1..213: note = Description of Artificial Sequence: Synthetic polypeptide; note = XENP020269 9C6_H0L0_anti-BTLA_IgG1_PVA_/S267K Light Chain
SIVMTQTPKFLLVSAGDRVTITCKASQSVSNDVAWYQQKPGQSPKLLIYYASNRYTGVPDRFTGSGYGTDFTFTISTVQAEDLAVYFCQQDYSSPTFGGGTKLEIKRTVAAPSVFIFPPSDEQLKSGTASVVCLLNNFYPREAKVQWKVDNALQSGNSQESVTEQDSKDSTYSLSSTLTLSKADYEKHKVYACEVTHQGLSSPVTKSFNRGEC

SEQ ID NO: 20941 - protein, 106 aa, synthetic construct
  source 1..106: note = Description of Artificial Sequence: Synthetic polypeptide; note = VL of XENP020269
SIVMTQTPKFLLVSAGDRVTITCKASQSVSNDVAWYQQKPGQSPKLLIYYASNRYTGVPDRFTGSGYGTDFTFTISTVQAEDLAVYFCQQDYSSPTFGGGTKLEIK

SEQ ID NO: 20942 - protein, 11 aa, synthetic construct
  source 1..11: note = Description of Artificial Sequence: Synthetic peptide; note = XENP020269 vlCDR1
KASQSVSNDVA

SEQ ID NO: 20943 - protein, 7 aa, synthetic construct
  source 1..7: note = Description of Artificial Sequence: Synthetic peptide; note = XENP020269 vlCDR2
YASNRYT

SEQ ID NO: 20944 - protein, 8 aa, synthetic construct
  source 1..8: note = Description of Artificial Sequence: Synthetic peptide; note = XENP020269 vlCDR3
QQDYSSPT

SEQ ID NO: 20945 - protein, 447 aa, synthetic construct; identical to SEQ ID NO: 20935
  source 1..447: note = Description of Artificial Sequence: Synthetic polypeptide; note = XENP020270 7H2_H0L0_anti-BTLA_IgG1_PVA_/S267K Heavy Chain

SEQ ID NO: 20946 - protein, 118 aa, synthetic construct; identical to SEQ ID NO: 20936
  source 1..118: note = Description of Artificial Sequence: Synthetic polypeptide; note = VH of XENP020270

SEQ ID NO: 20947 - protein, 5 aa, synthetic construct
  source 1..5: note = Description of Artificial Sequence: Synthetic peptide; note = XENP020270 vhCDR1
GYGVN

SEQ ID NO: 20948 - protein, 16 aa, synthetic construct
  source 1..16: note = Description of Artificial Sequence: Synthetic peptide; note = XENP020270 vhCDR2
MIWIDGSTDYNSALKS

SEQ ID NO: 20949 - protein, 10 aa, synthetic construct
  source 1..10: note = Description of Artificial Sequence: Synthetic peptide; note = XENP020270 vhCDR3
DRPDGRAMDY

SEQ ID NO: 20950 - protein, 213 aa, synthetic construct
  source 1..213: note = Description of Artificial Sequence: Synthetic polypeptide; note = XENP020270 7H2_H0L0_anti-BTLA_IgG1_PVA_/S267K Light Chain
SIVMTQTPKFLLVSAGDRVTITCKASQSVSNDVAWYQQKPGQSPKLLIYYASNRYTGVPDRFTGSGYGTDFTFTISTVQAEDLAVYFCQQDYNSPTFGGGTKLEIKRTVAAPSVFIFPPSDEQLKSGTASVVCLLNNFYPREAKVQWKVDNALQSGNSQESVTEQDSKDSTYSLSSTLTLSKADYEKHKVYACEVTHQGLSSPVTKSFNRGEC

SEQ ID NO: 20951 - protein, 106 aa, synthetic construct
  source 1..106: note = Description of Artificial Sequence: Synthetic polypeptide; note = VL of XENP020270
SIVMTQTPKFLLVSAGDRVTITCKASQSVSNDVAWYQQKPGQSPKLLIYYASNRYTGVPDRFTGSGYGTDFTFTISTVQAEDLAVYFCQQDYNSPTFGGGTKLEIK

SEQ ID NO: 20952 - protein, 11 aa, synthetic construct
  source 1..11: note = Description of Artificial Sequence: Synthetic peptide; note = XENP020270 vlCDR1
KASQSVSNDVA

SEQ ID NO: 20953 - protein, 7 aa, synthetic construct
  source 1..7: note = Description of Artificial Sequence: Synthetic peptide; note = XENP020270 vlCDR2
YASNRYT

SEQ ID NO: 20954 - protein, 8 aa, synthetic construct
  source 1..8: note = Description of Artificial Sequence: Synthetic peptide; note = XENP020270 vlCDR3
QQDYNSPT

SEQ ID NO: 20955 - protein, 447 aa, synthetic construct
  source 1..447: note = Description of Artificial Sequence: Synthetic polypeptide; note = XENP020271 6C3_H0L0_anti-BTLA_IgG1_PVA_/S267K Heavy Chain
EVQLQQSGAELVRSGASVKLSCTASGFNIKDYYMHWVKQRPEQGLEWIGWLDPENGDTVYVPKFQGKATMTADTSSNTAYLQLTSLTSEDSAVYYCNAGDYGSSFNYWGQGTTLTVSSASTKGPSVFPLAPSSKSTSGGTAALGCLVKDYFPEPVTVSWNSGALTSGVHTFPAVLQSSGLYSLSSVVTVPSSSLGTQTYICNVNHKPSNTKVDKKVEPKSCDKTHTCPPCPAPPVAGPSVFLFPPKPKDTLMISRTPEVTCVVVDVKHEDPEVKFNWYVDGVEVHNAKTKPREEQYNSTYRVVSVLTVLHQDWLNGKEYKCKVSNKALPAPIEKTISKAKGQPREPQVYTLPPSREEMTKNQVSLTCLVKGFYPSDIAVEWESNGQPENNYKTTPPVLDSDGSFFLYSKLTVDKSRWQQGNVFSCSVMHEALHNHYTQKSLSLSPGK

SEQ ID NO: 20956 - protein, 118 aa, synthetic construct
  source 1..118: note = Description of Artificial Sequence: Synthetic polypeptide; note = VH of XENP020271
EVQLQQSGAELVRSGASVKLSCTASGFNIKDYYMHWVKQRPEQGLEWIGWLDPENGDTVYVPKFQGKATMTADTSSNTAYLQLTSLTSEDSAVYYCNAGDYGSSFNYWGQGTTLTVSS

SEQ ID NO: 20957 - protein, 5 aa, synthetic construct
  source 1..5: note = Description of Artificial Sequence: Synthetic peptide; note = XENP020271 vhCDR1
DYYMH

SEQ ID NO: 20958 - protein, 17 aa, synthetic construct
  source 1..17: note = Description of Artificial Sequence: Synthetic peptide; note = XENP020271 vhCDR2
WLDPENGDTVYVPKFQG

SEQ ID NO: 20959 - protein, 9 aa, synthetic construct
  source 1..9: note = Description of Artificial Sequence: Synthetic peptide; note = XENP020271 vhCDR3
GDYGSSFNY

SEQ ID NO: 20960 - protein, 219 aa, synthetic construct
  source 1..219: note = Description of Artificial Sequence: Synthetic polypeptide; note = XENP020271 6C3_H0L0_anti-BTLA_IgG1_PVA_/S267K Light Chain
DIVMSQSPSSLAVSVGEKVTMSCKSSQSLLYSGNQKNYLAWYQQRPGQSPKLLIYWASTRESGVPDRFTGSGSGTDFTLTISSVKTEDLAVYYCQQYYTYHTFGGGTKLEIKRTVAAPSVFIFPPSDEQLKSGTASVVCLLNNFYPREAKVQWKVDNALQSGNSQESVTEQDSKDSTYSLSSTLTLSKADYEKHKVYACEVTHQGLSSPVTKSFNRGEC

SEQ ID NO: 20961 - protein, 112 aa, synthetic construct
  source 1..112: note = Description of Artificial Sequence: Synthetic polypeptide; note = VL of XENP020271
DIVMSQSPSSLAVSVGEKVTMSCKSSQSLLYSGNQKNYLAWYQQRPGQSPKLLIYWASTRESGVPDRFTGSGSGTDFTLTISSVKTEDLAVYYCQQYYTYHTFGGGTKLEIK

SEQ ID NO: 20962 - protein, 17 aa, synthetic construct
  source 1..17: note = Description of Artificial Sequence: Synthetic peptide; note = XENP020271 vlCDR1
KSSQSLLYSGNQKNYLA

SEQ ID NO: 20963 - protein, 7 aa, synthetic construct
  source 1..7: note = Description of Artificial Sequence: Synthetic peptide; note = XENP020271 vlCDR2
WASTRES

SEQ ID NO: 20964 - protein, 8 aa, synthetic construct
  source 1..8: note = Description of Artificial Sequence: Synthetic peptide; note = XENP020271 vlCDR3
QQYYTYHT

SEQ ID NO: 20965 - protein, 449 aa, synthetic construct
  source 1..449: note = Description of Artificial Sequence: Synthetic polypeptide; note = XENP020272 9C10_H0L0_anti-BTLA_IgG1_PVA_/S267K Heavy Chain
EVQLQESGPSLVKPSQTLSLTCSVTGDSITSGYWNWIRKFPGNKLEYMGYISYSGSTYYNPSLKSRISITRDTSKNQYYLQLNSVTTEDTATYYCARYYYGSYYEAMDYWGQGTSVTVSSASTKGPSVFPLAPSSKSTSGGTAALGCLVKDYFPEPVTVSWNSGALTSGVHTFPAVLQSSGLYSLSSVVTVPSSSLGTQTYICNVNHKPSNTKVDKKVEPKSCDKTHTCPPCPAPPVAGPSVFLFPPKPKDTLMISRTPEVTCVVVDVKHEDPEVKFNWYVDGVEVHNAKTKPREEQYNSTYRVVSVLTVLHQDWLNGKEYKCKVSNKALPAPIEKTISKAKGQPREPQVYTLPPSREEMTKNQVSLTCLVKGFYPSDIAVEWESNGQPENNYKTTPPVLDSDGSFFLYSKLTVDKSRWQQGNVFSCSVMHEALHNHYTQKSLSLSPGK

SEQ ID NO: 20966 - protein, 120 aa, synthetic construct
  source 1..120: note = Description of Artificial Sequence: Synthetic polypeptide; note = VH of XENP020272
EVQLQESGPSLVKPSQTLSLTCSVTGDSITSGYWNWIRKFPGNKLEYMGYISYSGSTYYNPSLKSRISITRDTSKNQYYLQLNSVTTEDTATYYCARYYYGSYYEAMDYWGQGTSVTVSS

SEQ ID NO: 20967 - protein, 5 aa, synthetic construct
  source 1..5: note = Description of Artificial Sequence: Synthetic peptide; note = XENP020272 vhCDR1
SGYWN

SEQ ID NO: 20968 - protein, 16 aa, synthetic construct
  source 1..16: note = Description of Artificial Sequence: Synthetic peptide; note = XENP020272 vhCDR2
YISYSGSTYYNPSLKS

SEQ ID NO: 20969 - protein, 12 aa, synthetic construct
  source 1..12: note = Description of Artificial Sequence: Synthetic peptide; note = XENP020272 vhCDR3
YYYGSYYEAMDY

SEQ ID NO: 20970 - protein, 214 aa, synthetic construct
  source 1..214: note = Description of Artificial Sequence: Synthetic polypeptide; note = XENP020272 9C10_H0L0_anti-BTLA_IgG1_PVA_/S267K Light Chain
DVQITQSPSYLAASPGETITINCRASKSISKYLAWYQEKPGKTNKLLLYSGSTLQSGIPSRFSGSGSGTDFTLTISSLEPEDFAMYYCQQHNEYPWTFGGGTKLEIKRTVAAPSVFIFPPSDEQLKSGTASVVCLLNNFYPREAKVQWKVDNALQSGNSQESVTEQDSKDSTYSLSSTLTLSKADYEKHKVYACEVTHQGLSSPVTKSFNRGEC

SEQ ID NO: 20971 - protein, 107 aa, synthetic construct
  source 1..107: note = Description of Artificial Sequence: Synthetic polypeptide; note = VL of XENP020272
DVQITQSPSYLAASPGETITINCRASKSISKYLAWYQEKPGKTNKLLLYSGSTLQSGIPSRFSGSGSGTDFTLTISSLEPEDFAMYYCQQHNEYPWTFGGGTKLEIK

SEQ ID NO: 20972 - protein, 11 aa, synthetic construct
  source 1..11: note = Description of Artificial Sequence: Synthetic peptide; note = XENP020272 vlCDR1
RASKSISKYLA

SEQ ID NO: 20973 - protein, 7 aa, synthetic construct
  source 1..7: note = Description of Artificial Sequence: Synthetic peptide; note = XENP020272 vlCDR2
SGSTLQS

SEQ ID NO: 20974 - protein, 9 aa, synthetic construct
  source 1..9: note = Description of Artificial Sequence: Synthetic peptide; note = XENP020272 vlCDR3
QQHNEYPWT

SEQ ID NO: 20975 - protein, 443 aa, synthetic construct
  source 1..443: note = Description of Artificial Sequence: Synthetic polypeptide; note = XENP020273 12E6_H0L0_anti-BTLA_IgG1_PVA_/S267K Heavy Chain
QVQLQQSGAELMKPGASVKISCKATGYTFSNYWIEWVKQRPGHGLEWIGEILPGSGGTNYNEKFKGKATFTADTSSNTAYMQLSGLTSEDSAVYYCASPRYDLWGQGTSVTASSASTKGPSVFPLAPSSKSTSGGTAALGCLVKDYFPEPVTVSWNSGALTSGVHTFPAVLQSSGLYSLSSVVTVPSSSLGTQTYICNVNHKPSNTKVDKKVEPKSCDKTHTCPPCPAPPVAGPSVFLFPPKPKDTLMISRTPEVTCVVVDVKHEDPEVKFNWYVDGVEVHNAKTKPREEQYNSTYRVVSVLTVLHQDWLNGKEYKCKVSNKALPAPIEKTISKAKGQPREPQVYTLPPSREEMTKNQVSLTCLVKGFYPSDIAVEWESNGQPENNYKTTPPVLDSDGSFFLYSKLTVDKSRWQQGNVFSCSVMHEALHNHYTQKSLSLSPGK

SEQ ID NO: 20976 - protein, 114 aa, synthetic construct
  source 1..114: note = Description of Artificial Sequence: Synthetic polypeptide; note = VH of XENP020273
QVQLQQSGAELMKPGASVKISCKATGYTFSNYWIEWVKQRPGHGLEWIGEILPGSGGTNYNEKFKGKATFTADTSSNTAYMQLSGLTSEDSAVYYCASPRYDLWGQGTSVTASS

SEQ ID NO: 20977 - protein, 5 aa, synthetic construct
  source 1..5: note = Description of Artificial Sequence: Synthetic peptide; note = XENP020273 vhCDR1
NYWIE

SEQ ID NO: 20978 - protein, 17 aa, synthetic construct
  source 1..17: note = Description of Artificial Sequence: Synthetic peptide; note = XENP020273 vhCDR2
EILPGSGGTNYNEKFKG

SEQ ID NO: 20979 - protein, 5 aa, synthetic construct
  source 1..5: note = Description of Artificial Sequence: Synthetic peptide; note = XENP020273 vhCDR3
PRYDL

SEQ ID NO: 20980 - protein, 219 aa, synthetic construct
  source 1..219: note = Description of Artificial Sequence: Synthetic polypeptide; note = XENP020273 12E6_H0L0_anti-BTLA_IgG1_PVA_/S267K Light Chain
DVVMTQTPLTLSVTVGQPASISCKSSQSLLHSDGETYLNWFLQRPGQSPKRLIYLVSKRDSGVPDRFTGSGSGTDFTLKISRVEAEDLGVYYCWQGIHFPQTFGRGTKLEIKRTVAAPSVFIFPPSDEQLKSGTASVVCLLNNFYPREAKVQWKVDNALQSGNSQESVTEQDSKDSTYSLSSTLTLSKADYEKHKVYACEVTHQGLSSPVTKSFNRGEC

SEQ ID NO: 20981 - protein, 112 aa, synthetic construct
  source 1..112: note = Description of Artificial Sequence: Synthetic polypeptide; note = VL of XENP020273
DVVMTQTPLTLSVTVGQPASISCKSSQSLLHSDGETYLNWFLQRPGQSPKRLIYLVSKRDSGVPDRFTGSGSGTDFTLKISRVEAEDLGVYYCWQGIHFPQTFGRGTKLEIK

SEQ ID NO: 20982 - protein, 16 aa, synthetic construct
  source 1..16: note = Description of Artificial Sequence: Synthetic peptide; note = XENP020273 vlCDR1
KSSQSLLHSDGETYLN

SEQ ID NO: 20983 - protein, 7 aa, synthetic construct
  source 1..7: note = Description of Artificial Sequence: Synthetic peptide; note = XENP020273 vlCDR2
LVSKRDS

SEQ ID NO: 20984 - protein, 9 aa, synthetic construct
  source 1..9: note = Description of Artificial Sequence: Synthetic peptide; note = XENP020273 vlCDR3
WQGIHFPQT

SEQ ID NO: 20985 - protein, 442 aa, synthetic construct
  source 1..442: note = Description of Artificial Sequence: Synthetic polypeptide; note = XENP020274 4C11A_H0L0_anti-BTLA_IgG1_PVA_/S267K Heavy Chain
QVQLQQSGAELVKPGASVKLSCKASGYTFTSYYMDWVKQRPGQGLEWIGEINPSNGDTKFNEKFKSKATLTVDKSSTTAYMQLSSLTSEDSAVYYCTRDYGYWGQGTTLTVSSASTKGPSVFPLAPSSKSTSGGTAALGCLVKDYFPEPVTVSWNSGALTSGVHTFPAVLQSSGLYSLSSVVTVPSSSLGTQTYICNVNHKPSNTKVDKKVEPKSCDKTHTCPPCPAPPVAGPSVFLFPPKPKDTLMISRTPEVTCVVVDVKHEDPEVKFNWYVDGVEVHNAKTKPREEQYNSTYRVVSVLTVLHQDWLNGKEYKCKVSNKALPAPIEKTISKAKGQPREPQVYTLPPSREEMTKNQVSLTCLVKGFYPSDIAVEWESNGQPENNYKTTPPVLDSDGSFFLYSKLTVDKSRWQQGNVFSCSVMHEALHNHYTQKSLSLSPGK

SEQ ID NO: 20986 - protein, 113 aa, synthetic construct
  source 1..113: note = Description of Artificial Sequence: Synthetic polypeptide; note = VH of XENP020274
QVQLQQSGAELVKPGASVKLSCKASGYTFTSYYMDWVKQRPGQGLEWIGEINPSNGDTKFNEKFKSKATLTVDKSSTTAYMQLSSLTSEDSAVYYCTRDYGYWGQGTTLTVSS

SEQ ID NO: 20987 - protein, 5 aa, synthetic construct
  source 1..5: note = Description of Artificial Sequence: Synthetic peptide; note = XENP020274 vhCDR1
SYYMD

SEQ ID NO: 20988 - protein, 17 aa, synthetic construct
  source 1..17: note = Description of Artificial Sequence: Synthetic peptide; note = XENP020274 vhCDR2
EINPSNGDTKFNEKFKS

SEQ ID NO: 20989 - protein, 4 aa, synthetic construct
  source 1..4: note = Description of Artificial Sequence: Synthetic peptide; note = XENP020274 vhCDR3
DYGY

SEQ ID NO: 20990 - protein, 214 aa, synthetic construct
  source 1..214: note = Description of Artificial Sequence: Synthetic polypeptide; note = XENP020274 4C11A_H0L0_anti-BTLA_IgG1_PVA_/S267K Light Chain
DIVMTQSPATLSVTPGDRVSLSCRASQSISDYLHWYQQKSHESPRLLIKYASQSISGIPSRFSGSGSGSDFTLNINGVEPEDVGVYYCQNGHSFPPTFGGGTKLEIKRTVAAPSVFIFPPSDEQLKSGTASVVCLLNNFYPREAKVQWKVDNALQSGNSQESVTEQDSKDSTYSLSSTLTLSKADYEKHKVYACEVTHQGLSSPVTKSFNRGEC

SEQ ID NO: 20991 - protein, 107 aa, synthetic construct
  source 1..107: note = Description of Artificial Sequence: Synthetic polypeptide; note = VL of XENP020274
DIVMTQSPATLSVTPGDRVSLSCRASQSISDYLHWYQQKSHESPRLLIKYASQSISGIPSRFSGSGSGSDFTLNINGVEPEDVGVYYCQNGHSFPPTFGGGTKLEIK

SEQ ID NO: 20992 - protein, 11 aa, synthetic construct
  source 1..11: note = Description of Artificial Sequence: Synthetic peptide; note = XENP020274 vlCDR1
RASQSISDYLH

SEQ ID NO: 20993 - protein, 7 aa, synthetic construct
  source 1..7: note = Description of Artificial Sequence: Synthetic peptide; note = XENP020274 vlCDR2
YASQSIS

SEQ ID NO: 20994 - protein, 9 aa, synthetic construct
  source 1..9: note = Description of Artificial Sequence: Synthetic peptide; note = XENP020274 vlCDR3
QNGHSFPPT

SEQ ID NO: 20995 - protein, 442 aa, synthetic construct; identical to SEQ ID NO: 20985
  source 1..442: note = Description of Artificial Sequence: Synthetic polypeptide; note = XENP020275 4C11B_H0L0_anti-BTLA_IgG1_PVA_/S267K Heavy Chain

SEQ ID NO: 20996 - protein, 113 aa, synthetic construct; identical to SEQ ID NO: 20986
  source 1..113: note = Description of Artificial Sequence: Synthetic polypeptide; note = VH of XENP020275

SEQ ID NO: 20997 - protein, 5 aa, synthetic construct
  source 1..5: note = Description of Artificial Sequence: Synthetic peptide; note = XENP020275 vhCDR1
SYYMD

SEQ ID NO: 20998 - protein, 17 aa, synthetic construct
  source 1..17: note = Description of Artificial Sequence: Synthetic peptide; note = XENP020275 vhCDR2
EINPSNGDTKFNEKFKS

SEQ ID NO: 20999 - protein, 4 aa, synthetic construct
  source 1..4: note = Description of Artificial Sequence: Synthetic peptide; note = XENP020275 vhCDR3
DYGY

SEQ ID NO: 21000 - protein, 213 aa, synthetic construct; identical to SEQ ID NO: 20940
  source 1..213: note = Description of Artificial Sequence: Synthetic polypeptide; note = XENP020275 4C11B_H0L0_anti-BTLA_IgG1_PVA_/S267K Light Chain

SEQ ID NO: 21001 - protein, 106 aa, synthetic construct; identical to SEQ ID NO: 20941
  source 1..106: note = Description of Artificial Sequence: Synthetic polypeptide; note = VL of XENP020275

SEQ ID NO: 21002 - protein, 11 aa, synthetic construct
  source 1..11: note = Description of Artificial Sequence: Synthetic peptide; note = XENP020275 vlCDR1
KASQSVSNDVA

SEQ ID NO: 21003 - protein, 7 aa, synthetic construct
  source 1..7: note = Description of Artificial Sequence: Synthetic peptide; note = XENP020275 vlCDR2
YASNRYT

SEQ ID NO: 21004 - protein, 8 aa, synthetic construct
  source 1..8: note = Description of Artificial Sequence: Synthetic peptide; note = XENP020275 vlCDR3
QQDYSSPT

SEQ ID NO: 21005 - protein, 449 aa, synthetic construct
  source 1..449: note = Description of Artificial Sequence: Synthetic polypeptide; note = XENP020276 7B10_H0L0_anti-BTLA_IgG1_PVA_/S267K Heavy Chain
QVTLKESGPGILQPSQTLSLTCSFSGFSLSTFGMGVNWIRQPSGKGLEWLAHIYWDDDKHYNPSLKSRLTISKDTSNNQVFLKITTVDTADTATYYCARYYRYDVPYIMDYWGQGTSVTVSSASTKGPSVFPLAPSSKSTSGGTAALGCLVKDYFPEPVTVSWNSGALTSGVHTFPAVLQSSGLYSLSSVVTVPSSSLGTQTYICNVNHKPSNTKVDKKVEPKSCDKTHTCPPCPAPPVAGPSVFLFPPKPKDTLMISRTPEVTCVVVDVKHEDPEVKFNWYVDGVEVHNAKTKPREEQYNSTYRVVSVLTVLHQDWLNGKEYKCKVSNKALPAPIEKTISKAKGQPREPQVYTLPPSREEMTKNQVSLTCLVKGFYPSDIAVEWESNGQPENNYKTTPPVLDSDGSFFLYSKLTVDKSRWQQGNVFSCSVMHEALHNHYTQKSLSLSP

SEQ ID NO: 21006 - protein, 122 aa, synthetic construct
  source 1..122: note = Description of Artificial Sequence: Synthetic polypeptide; note = VH of XENP020276
QVTLKESGPGILQPSQTLSLTCSFSGFSLSTFGMGVNWIRQPSGKGLEWLAHIYWDDDKHYNPSLKSRLTISKDTSNNQVFLKITTVDTADTATYYCARYYRYDVPYIMDYWGQGTSVTVSS

SEQ ID NO: 21007 - protein, 7 aa, synthetic construct
  source 1..7: note = Description of Artificial Sequence: Synthetic peptide; note = XENP020276 vhCDR1
TFGMGVN

SEQ ID NO: 21008 - protein, 16 aa, synthetic construct
  source 1..16: note = Description of Artificial Sequence: Synthetic peptide; note = XENP020276 vhCDR2
HIYWDDDKHYNPSLKS

SEQ ID NO: 21009 - protein, 12 aa, synthetic construct
  source 1..12: note = Description of Artificial Sequence: Synthetic peptide; note = XENP020276 vhCDR3
YYRYDVPYIMDY

SEQ ID NO: 21010 - protein, 219 aa, synthetic construct
  source 1..219: note = Description of Artificial Sequence: Synthetic polypeptide; note = XENP020276 7B10_H0L0_anti-BTLA_IgG1_PVA_/S267K Light Chain
DIVMSQSPSSLAVSVGEKVTMSCKSSQSLLYSSNQKNYLAWYQQKPGQSPKLLIYWASTRESGVPDRFTGSGSGTDFTLTISSVKAEDLAVYYCHQYYSYYTFGGGTKLEIKRTVAAPSVFIFPPSDEQLKSGTASVVCLLNNFYPREAKVQWKVDNALQSGNSQESVTEQDSKDSTYSLSSTLTLSKADYEKHKVYACEVTHQGLSSPVTKSFNRGEC

SEQ ID NO: 21011 - protein, 112 aa, synthetic construct
  source 1..112: note = Description of Artificial Sequence: Synthetic polypeptide; note = VL of XENP020276
DIVMSQSPSSLAVSVGEKVTMSCKSSQSLLYSSNQKNYLAWYQQKPGQSPKLLIYWASTRESGVPDRFTGSGSGTDFTLTISSVKAEDLAVYYCHQYYSYYTFGGGTKLEIK

SEQ ID NO: 21012 - protein, 17 aa, synthetic construct
  source 1..17: note = Description of Artificial Sequence: Synthetic peptide; note = XENP020276 vlCDR1
KSSQSLLYSSNQKNYLA

SEQ ID NO: 21013 - protein, 7 aa, synthetic construct
  source 1..7: note = Description of Artificial Sequence: Synthetic peptide; note = XENP020276 vlCDR2
WASTRES

SEQ ID NO: 21014 - protein, 8 aa, synthetic construct
  source 1..8: note = Description of Artificial Sequence: Synthetic peptide; note = XENP020276 vlCDR3
HQYYSYYT

SEQ ID NO: 21015 - protein, 449 aa, synthetic construct
  source 1..449: note = Description of Artificial Sequence: Synthetic polypeptide; note = XENP020277 8C1A_H0L0_anti-BTLA_IgG1_PVA_/S267K Heavy Chain
EVQLQESGPSLVKPSQTLSLTCSVTGDSVTSGYWNWIRKFPGNKLEYMGYINYSGSTYYNPSLKSRISITRDTSKNQYYLQLNSVTTEDTATYYCARSFIATVGYAMDYWGQGTSVTVSSASTKGPSVFPLAPSSKSTSGGTAALGCLVKDYFPEPVTVSWNSGALTSGVHTFPAVLQSSGLYSLSSVVTVPSSSLGTQTYICNVNHKPSNTKVDKKVEPKSCDKTHTCPPCPAPPVAGPSVFLFPPKPKDTLMISRTPEVTCVVVDVKHEDPEVKFNWYVDGVEVHNAKTKPREEQYNSTYRVVSVLTVLHQDWLNGKEYKCKVSNKALPAPIEKTISKAKGQPREPQVYTLPPSREEMTKNQVSLTCLVKGFYPSDIAVEWESNGQPENNYKTTPPVLDSDGSFFLYSKLTVDKSRWQQGNVFSCSVMHEALHNHYTQKSLSLSPGK

SEQ ID NO: 21016 - protein, 120 aa, synthetic construct
  source 1..120: note = Description of Artificial Sequence: Synthetic polypeptide; note = VH of XENP020277
EVQLQESGPSLVKPSQTLSLTCSVTGDSVTSGYWNWIRKFPGNKLEYMGYINYSGSTYYNPSLKSRISITRDTSKNQYYLQLNSVTTEDTATYYCARSFIATVGYAMDYWGQGTSVTVSS

SEQ ID NO: 21017 - protein, 5 aa, synthetic construct
  source 1..5: note = Description of Artificial Sequence: Synthetic peptide; note = XENP020277 vhCDR1
SGYWN

SEQ ID NO: 21018 - protein, 16 aa, synthetic construct
  source 1..16: note = Description of Artificial Sequence: Synthetic peptide; note = XENP020277 vhCDR2
YINYSGSTYYNPSLKS

SEQ ID NO: 21019 - protein, 12 aa, synthetic construct
  source 1..12: note = Description of Artificial Sequence: Synthetic peptide; note = XENP020277 vhCDR3
SFIATVGYAMDY

SEQ ID NO: 21020 - protein, 214 aa, synthetic construct
  source 1..214: note = Description of Artificial Sequence: Synthetic polypeptide; note = XENP020277 8C1A_H0L0_anti-BTLA_IgG1_PVA_/S267K Light Chain
SIVMTQTPKFLLVSAGDRVTITCKASQSVNNDVSWYQQKPGQSPKLLIYSASNRYTGVPDRFTGSGYGTDFTFTISTVQAEDLAVYFCQQDYSSPWTFGGGTKLEIKRTVAAPSVFIFPPSDEQLKSGTASVVCLLNNFYPREAKVQWKVDNALQSGNSQESVTEQDSKDSTYSLSSTLTLSKADYEKHKVYACEVTHQGLSSPVTKSFNRGEC

SEQ ID NO: 21021 - protein, 107 aa, synthetic construct
  source 1..107: note = Description of Artificial Sequence: Synthetic polypeptide; note = VL of XENP020277
SIVMTQTPKFLLVSAGDRVTITCKASQSVNNDVSWYQQKPGQSPKLLIYSASNRYTGVPDRFTGSGYGTDFTFTISTVQAEDLAVYFCQQDYSSPWTFGGGTKLEIK

SEQ ID NO: 21022 - protein, 11 aa, synthetic construct
  source 1..11: note = Description of Artificial Sequence: Synthetic peptide; note = XENP020277 vlCDR1
KASQSVNNDVS

SEQ ID NO: 21023 - protein, 7 aa, synthetic construct
  source 1..7: note = Description of Artificial Sequence: Synthetic peptide; note = XENP020277 vlCDR2
SASNRYT

SEQ ID NO: 21024 - protein, 9 aa, synthetic construct
  source 1..9: note = Description of Artificial Sequence: Synthetic peptide; note = XENP020277 vlCDR3
QQDYSSPWT

SEQ ID NO: 21025 - protein, 441 aa, synthetic construct
  source 1..441: note = Description of Artificial Sequence: Synthetic polypeptide; note = XENP020278 8C1B_H0L0_anti-BTLA_IgG1_PVA_/S267K Heavy Chain
QVQLQQPGAELVRPGASVRLSCKASGYTFTSYWIHWVKQRPGQGLEWIGNIYSSDSYTNYNQKFKDKATLTVDKSSSTAYIHLSSPTSEDSAVYYCTRVDYWGQGTTLTVSSASTKGPSVFPLAPSSKSTSGGTAALGCLVKDYFPEPVTVSWNSGALTSGVHTFPAVLQSSGLYSLSSVVTVPSSSLGTQTYICNVNHKPSNTKVDKKVEPKSCDKTHTCPPCPAPPVAGPSVFLFPPKPKDTLMISRTPEVTCVVVDVKHEDPEVKFNWYVDGVEVHNAKTKPREEQYNSTYRVVSVLTVLHQDWLNGKEYKCKVSNKALPAPIEKTISKAKGQPREPQVYTLPPSREEMTKNQVSLTCLVKGFYPSDIAVEWESNGQPENNYKTTPPVLDSDGSFFLYSKLTVDKSRWQQGNVFSCSVMHEALHNHYTQKSLSLSPGK

SEQ ID NO: 21026 - protein, 112 aa, synthetic construct
  source 1..112: note = Description of Artificial Sequence: Synthetic polypeptide; note = VH of XENP020278
QVQLQQPGAELVRPGASVRLSCKASGYTFTSYWIHWVKQRPGQGLEWIGNIYSSDSYTNYNQKFKDKATLTVDKSSSTAYIHLSSPTSEDSAVYYCTRVDYWGQGTTLTVSS

SEQ ID NO: 21027 - protein, 5 aa, synthetic construct
  source 1..5: note = Description of Artificial Sequence: Synthetic peptide; note = XENP020278 vhCDR1
SYWIH

SEQ ID NO: 21028 - protein, 17 aa, synthetic construct
  source 1..17: note = Description of Artificial Sequence: Synthetic peptide; note = XENP020278 vhCDR2
NIYSSDSYTNYNQKFKD

SEQ ID NO: 21029 - skipped

SEQ ID NO: 21030 - protein, 214 aa, synthetic construct; identical to SEQ ID NO: 21020
  source 1..214: note = Description of Artificial Sequence: Synthetic polypeptide; note = XENP020278 8C1B_H0L0_anti-BTLA_IgG1_PVA_/S267K Light Chain

SEQ ID NO: 21031 - protein, 107 aa, synthetic construct; identical to SEQ ID NO: 21021
  source 1..107: note = Description of Artificial Sequence: Synthetic polypeptide; note = VL of XENP020278

SEQ ID NO: 21032 - protein, 11 aa, synthetic construct
  source 1..11: note = Description of Artificial Sequence: Synthetic peptide; note = XENP020278 vlCDR1
KASQSVNNDVS

SEQ ID NO: 21033 - protein, 7 aa, synthetic construct
  source 1..7: note = Description of Artificial Sequence: Synthetic peptide; note = XENP020278 vlCDR2
SASNRYT

SEQ ID NO: 21034 - protein, 9 aa, synthetic construct
  source 1..9: note = Description of Artificial Sequence: Synthetic peptide; note = XENP020278 vlCDR3
QQDYSSPWT

SEQ ID NO: 21035 - protein, 447 aa, synthetic construct
  source 1..447: note = Description of Artificial Sequence: Synthetic polypeptide; note = XENP020279 10B6_H0L0_anti-BTLA_IgG1_PVA_/S267K Heavy Chain
QVQLKESGPGLVAPSQSLSITCTVSGFSLTGYGVNWVRQPPGKGLEWLGMIWIDGSTDYNSALKSRLSISKDNSKSQVFLKMNSLQTDDTARYYCARDRPDGRAMDYWGQGTSVTVSSASTKGPSVFPLAPSSKSTSGGTAALGCLVKDYFPEPVTVSWNSGALTSGVHTFPAVLQSSGLYSLSSVVTVPSSSLGTQTYICNVNHKPSNTKVDKKVEPKSCDKTHTCPPCPAPPVAGPSVFLFPPKPKDTLMISRTPEVTCVVVDVKHEDPEVKFNWYVDGVEVHNAKTKPREEQYNSTYRVVSVLTVLHQDWLNGKEYKCKVSNKALPAPIEKTISKAKGQPREPQVYTLPPSREEMTKNQVSLTCLVKGFYPSDIAVEWESNGQPENNYKTTPPVLDSDGSFFLYSKLTVDKSRWQQGNVFSCSVMHEALHNHYTQKSLSLSPGK

SEQ ID NO: 21036 - protein, 118 aa, synthetic construct
  source 1..118: note = Description of Artificial Sequence: Synthetic polypeptide; note = VH of XENP020279
QVQLKESGPGLVAPSQSLSITCTVSGFSLTGYGVNWVRQPPGKGLEWLGMIWIDGSTDYNSALKSRLSISKDNSKSQVFLKMNSLQTDDTARYYCARDRPDGRAMDYWGQGTSVTVSS

SEQ ID NO: 21037 - protein, 5 aa, synthetic construct
  source 1..5: note = Description of Artificial Sequence: Synthetic peptide; note = XENP020279 vhCDR1
GYGVN

SEQ ID NO: 21038 - protein, 16 aa, synthetic construct
  source 1..16: note = Description of Artificial Sequence: Synthetic peptide; note = XENP020279 vhCDR2
MIWIDGSTDYNSALKS

SEQ ID NO: 21039 - protein, 10 aa, synthetic construct
  source 1..10: note = Description of Artificial Sequence: Synthetic peptide; note = XENP020279 vhCDR3
DRPDGRAMDY

SEQ ID NO: 21040 - protein, 213 aa, synthetic construct
  source 1..213: note = Description of Artificial Sequence: Synthetic polypeptide; note = XENP020279 10B6_H0L0_anti-BTLA_IgG1_PVA_/S267K Light Chain
SIVMTQTPKFLLVSAGDRVTITCKASQTVSNDVTWYQQKPGQSPKLLIYYASNRYTGVPDRFTGSGYGTDFTFTISTVQAEDLAVYFCQQDYSSPTFGGGTKLEIKRTVAAPSVFIFPPSDEQLKSGTASVVCLLNNFYPREAKVQWKVDNALQSGNSQESVTEQDSKDSTYSLSSTLTLSKADYEKHKVYACEVTHQGLSSPVTKSFNRGEC

SEQ ID NO: 21041 - protein, 106 aa, synthetic construct
  source 1..106: note = Description of Artificial Sequence: Synthetic polypeptide; note = VL of XENP020279
SIVMTQTPKFLLVSAGDRVTITCKASQTVSNDVTWYQQKPGQSPKLLIYYASNRYTGVPDRFTGSGYGTDFTFTISTVQAEDLAVYFCQQDYSSPTFGGGTKLEIK

SEQ ID NO: 21042 - protein, 11 aa, synthetic construct
  source 1..11: note = Description of Artificial Sequence: Synthetic peptide; note = XENP020279 vlCDR1
KASQTVSNDVT

SEQ ID NO: 21043 - protein, 7 aa, synthetic construct
  source 1..7: note = Description of Artificial Sequence: Synthetic peptide; note = XENP020279 vlCDR2
YASNRYT

SEQ ID NO: 21044 - protein, 8 aa, synthetic construct
  source 1..8: note = Description of Artificial Sequence: Synthetic peptide; note = XENP020279 vlCDR3
QQDYSSPT

SEQ ID NO: 21045 - protein, 447 aa, synthetic construct; identical to SEQ ID NO: 20935
  source 1..447: note = Description of Artificial Sequence: Synthetic polypeptide; note = XENP020744 9C6_H0L1_anti-BTLA_IgG1_PVA_/S267K Heavy Chain

SEQ ID NO: 21046 - protein, 118 aa, synthetic construct; identical to SEQ ID NO: 20936
  source 1..118: note = Description of Artificial Sequence: Synthetic polypeptide; note = VH of XENP020744

SEQ ID NO: 21047 - protein, 5 aa, synthetic construct
  source 1..5: note = Description of Artificial Sequence: Synthetic peptide; note = XENP020744 vhCDR1
GYGVN

SEQ ID NO: 21048 - protein, 16 aa, synthetic construct
  source 1..16: note = Description of Artificial Sequence: Synthetic peptide; note = XENP020744 vhCDR2
MIWIDGSTDYNSALKS

SEQ ID NO: 21049 - protein, 10 aa, synthetic construct
  source 1..10: note = Description of Artificial Sequence: Synthetic peptide; note = XENP020744 vhCDR3
DRPDGRAMDY

SEQ ID NO: 21050 - protein, 213 aa, synthetic construct
  source 1..213: note = Description of Artificial Sequence: Synthetic polypeptide; note = XENP020744 9C6_H0L1_anti-BTLA_IgG1_PVA_/S267K Light Chain
SIVMTQSPDSLAVSLGERATINCKASQSVSNDVAWYQQKPGQSPKLLIYYASNRYTGVPDRFTGSGYGTDFTLTISSLQAEDVAVYFCQQDYSSPTFGGGTKLEIKRTVAAPSVFIFPPSDEQLKSGTASVVCLLNNFYPREAKVQWKVDNALQSGNSQESVTEQDSKDSTYSLSSTLTLSKADYEKHKVYACEVTHQGLSSPVTKSFNRGEC

SEQ ID NO: 21051 - protein, 106 aa, synthetic construct
  source 1..106: note = Description of Artificial Sequence: Synthetic polypeptide; note = VL of XENP020744
SIVMTQSPDSLAVSLGERATINCKASQSVSNDVAWYQQKPGQSPKLLIYYASNRYTGVPDRFTGSGYGTDFTLTISSLQAEDVAVYFCQQDYSSPTFGGGTKLEIK

SEQ ID NO: 21052 - protein, 11 aa, synthetic construct
  source 1..11: note = Description of Artificial Sequence: Synthetic peptide; note = XENP020744 vlCDR1
KASQSVSNDVA

SEQ ID NO: 21053 - protein, 7 aa, synthetic construct
  source 1..7: note = Description of Artificial Sequence: Synthetic peptide; note = XENP020744 vlCDR2
YASNRYT

SEQ ID NO: 21054 - protein, 8 aa, synthetic construct
  source 1..8: note = Description of Artificial Sequence: Synthetic peptide; note = XENP020744 vlCDR3
QQDYSSPT

SEQ ID NO: 21055 - protein, 447 aa, synthetic construct; identical to SEQ ID NO: 20935
  source 1..447: note = Description of Artificial Sequence: Synthetic polypeptide; note = XENP020745 9C6_H0L2_anti-BTLA_IgG1_PVA_/S267K Heavy Chain

SEQ ID NO: 21056 - protein, 118 aa, synthetic construct; identical to SEQ ID NO: 20936
  source 1..118: note = Description of Artificial Sequence: Synthetic polypeptide; note = VH of XENP020745

SEQ ID NO: 21057 - protein, 5 aa, synthetic construct
  source 1..5: note = Description of Artificial Sequence: Synthetic peptide; note = XENP020745 vhCDR1
GYGVN

SEQ ID NO: 21058 - protein, 16 aa, synthetic construct
  source 1..16: note = Description of Artificial Sequence: Synthetic peptide; note = XENP020745 vhCDR2
MIWIDGSTDYNSALKS

SEQ ID NO: 21059 - protein, 10 aa, synthetic construct
  source 1..10: note = Description of Artificial Sequence: Synthetic peptide; note = XENP020745 vhCDR3
DRPDGRAMDY

SEQ ID NO: 21060 - protein, 213 aa, synthetic construct
  source 1..213: note = Description of Artificial Sequence: Synthetic polypeptide; note = XENP020745 9C6_H0L2_anti-BTLA_IgG1_PVA_/S267K Light Chain
SIVMTQSPLSLPVTPGEPASISCRASQSVSNDVAWYLQKPGQSPQLLIYYASNRYTGVPDRFTGSGYGTDFTLKISRVEAEDVGVYFCQQDYSSPTFGGGTKLEIKRTVAAPSVFIFPPSDEQLKSGTASVVCLLNNFYPREAKVQWKVDNALQSGNSQESVTEQDSKDSTYSLSSTLTLSKADYEKHKVYACEVTHQGLSSPVTKSFNRGEC

SEQ ID NO: 21061 - protein, 106 aa, synthetic construct
  source 1..106: note = Description of Artificial Sequence: Synthetic polypeptide; note = VL of XENP020745
SIVMTQSPLSLPVTPGEPASISCRASQSVSNDVAWYLQKPGQSPQLLIYYASNRYTGVPDRFTGSGYGTDFTLKISRVEAEDVGVYFCQQDYSSPTFGGGTKLEIK

SEQ ID NO: 21062 - protein, 11 aa, synthetic construct
  source 1..11: note = Description of Artificial Sequence: Synthetic peptide; note = XENP020745 vlCDR1
RASQSVSNDVA

SEQ ID NO: 21063 - protein, 7 aa, synthetic construct
  source 1..7: note = Description of Artificial Sequence: Synthetic peptide; note = XENP020745 vlCDR2
YASNRYT

SEQ ID NO: 21064 - protein, 8 aa, synthetic construct
  source 1..8: note = Description of Artificial Sequence: Synthetic peptide; note = XENP020745 vlCDR3
QQDYSSPT

SEQ ID NO: 21065 - protein, 447 aa, synthetic construct
  source 1..447: note = Description of Artificial Sequence: Synthetic polypeptide; note = XENP020746 9C6_H1L0_anti-BTLA_IgG1_PVA_/S267K Heavy Chain
QVQLVQSGAEVKKPGASVKVSCKVSGFSLTGYGVNWVRQAPGQGLEWMGMIWIDGSTDYNSKFQGRVTMTKDNSKSTVYMELSSLRSEDTAVYYCARDRPDGRAMDYWGQGTMVTVSSASTKGPSVFPLAPSSKSTSGGTAALGCLVKDYFPEPVTVSWNSGALTSGVHTFPAVLQSSGLYSLSSVVTVPSSSLGTQTYICNVNHKPSNTKVDKKVEPKSCDKTHTCPPCPAPPVAGPSVFLFPPKPKDTLMISRTPEVTCVVVDVKHEDPEVKFNWYVDGVEVHNAKTKPREEQYNSTYRVVSVLTVLHQDWLNGKEYKCKVSNKALPAPIEKTISKAKGQPREPQVYTLPPSREEMTKNQVSLTCLVKGFYPSDIAVEWESNGQPENNYKTTPPVLDSDGSFFLYSKLTVDKSRWQQGNVFSCSVMHEALHNHYTQKSLSLSPGK

SEQ ID NO: 21066 - protein, 118 aa, synthetic construct
  source 1..118: note = Description of Artificial Sequence: Synthetic polypeptide; note = VH of XENP020746
QVQLVQSGAEVKKPGASVKVSCKVSGFSLTGYGVNWVRQAPGQGLEWMGMIWIDGSTDYNSKFQGRVTMTKDNSKSTVYMELSSLRSEDTAVYYCARDRPDGRAMDYWGQGTMVTVSS

SEQ ID NO: 21067 - protein, 5 aa, synthetic construct
  source 1..5: note = Description of Artificial Sequence: Synthetic peptide; note = XENP020746 vhCDR1
GYGVN

SEQ ID NO: 21068 - protein, 16 aa, synthetic construct
  source 1..16: note = Description of Artificial Sequence: Synthetic peptide; note = XENP020746 vhCDR2
MIWIDGSTDYNSKFQG

SEQ ID NO: 21069 - protein, 10 aa, synthetic construct
  source 1..10: note = Description of Artificial Sequence: Synthetic peptide; note = XENP020746 vhCDR3
DRPDGRAMDY

SEQ ID NO: 21070 - protein, 213 aa, synthetic construct; identical to SEQ ID NO: 20940
  source 1..213: note = Description of Artificial Sequence: Synthetic polypeptide; note = XENP020746 9C6_H1L0_anti-BTLA_IgG1_PVA_/S267K Light Chain

SEQ ID NO: 21071 - protein, 106 aa, synthetic construct; identical to SEQ ID NO: 20941
  source 1..106: note = Description of Artificial Sequence: Synthetic polypeptide; note = VL of XENP020746

SEQ ID NO: 21072 - protein, 11 aa, synthetic construct
  source 1..11: note = Description of Artificial Sequence: Synthetic peptide; note = XENP020746 vlCDR1
KASQSVSNDVA

SEQ ID NO: 21073 - protein, 7 aa, synthetic construct
  source 1..7: note = Description of Artificial Sequence: Synthetic peptide; note = XENP020746 vlCDR2
YASNRYT

SEQ ID NO: 21074 - protein, 8 aa, synthetic construct
  source 1..8: note = Description of Artificial Sequence: Synthetic peptide; note = XENP020746 vlCDR3
QQDYSSPT

SEQ ID NO: 21075 - protein, 447 aa, synthetic construct; identical to SEQ ID NO: 21065
  source 1..447: note = Description of Artificial Sequence: Synthetic polypeptide; note = XENP020747 9C6_H1L1_anti-BTLA_IgG1_PVA_/S267K Heavy Chain

SEQ ID NO: 21076 - protein, 118 aa, synthetic construct; identical to SEQ ID NO: 21066
  source 1..118: note = Description of Artificial Sequence: Synthetic polypeptide; note = VH of XENP020747

SEQ ID NO: 21077 - protein, 5 aa, synthetic construct
  source 1..5: note = Description of Artificial Sequence: Synthetic peptide; note = XENP020747 vhCDR1
GYGVN

SEQ ID NO: 21078 - protein, 16 aa, synthetic construct
  source 1..16: note = Description of Artificial Sequence: Synthetic peptide; note = XENP020747 vhCDR2
MIWIDGSTDYNSKFQG

SEQ ID NO: 21079 - protein, 10 aa, synthetic construct
  source 1..10: note = Description of Artificial Sequence: Synthetic peptide; note = XENP020747 vhCDR3
DRPDGRAMDY

SEQ ID NO: 21080 - protein, 213 aa, synthetic construct; identical to SEQ ID NO: 21050
  source 1..213: note = Description of Artificial Sequence: Synthetic polypeptide; note = XENP020747 9C6_H1L1_anti-BTLA_IgG1_PVA_/S267K Light Chain

SEQ ID NO: 21081 - protein, 106 aa, synthetic construct; identical to SEQ ID NO: 21051
  source 1..106: note = Description of Artificial Sequence: Synthetic polypeptide; note = VL of XENP020747

SEQ ID NO: 21082 - protein, 11 aa, synthetic construct
  source 1..11: note = Description of Artificial Sequence: Synthetic peptide; note = XENP020747 vlCDR1
KASQSVSNDVA

SEQ ID NO: 21083 - protein, 7 aa, synthetic construct
  source 1..7: note = Description of Artificial Sequence: Synthetic peptide; note = XENP020747 vlCDR2
YASNRYT

SEQ ID NO: 21084 - protein, 8 aa, synthetic construct
  source 1..8: note = Description of Artificial Sequence: Synthetic peptide; note = XENP020747 vlCDR3
QQDYSSPT

SEQ ID NO: 21085 - protein, 447 aa, synthetic construct; identical to SEQ ID NO: 21065
  source 1..447: note = Description of Artificial Sequence: Synthetic polypeptide; note = XENP020748 9C6_H1L2_anti-BTLA_IgG1_PVA_/S267K Heavy Chain

SEQ ID NO: 21086 - protein, 118 aa, synthetic construct; identical to SEQ ID NO: 21066
  source 1..118: note = Description of Artificial Sequence: Synthetic polypeptide; note = VH of XENP020748

SEQ ID NO: 21087 - protein, 5 aa, synthetic construct
  source 1..5: note = Description of Artificial Sequence: Synthetic peptide; note = XENP020748 vhCDR1
GYGVN

SEQ ID NO: 21088 - protein, 16 aa, synthetic construct
  source 1..16: note = Description of Artificial Sequence: Synthetic peptide; note = XENP020748 vhCDR2
MIWIDGSTDYNSKFQG

SEQ ID NO: 21089 - protein, 10 aa, synthetic construct
  source 1..10: note = Description of Artificial Sequence: Synthetic peptide; note = XENP020748 vhCDR3
DRPDGRAMDY

SEQ ID NO: 21090 - protein, 213 aa, synthetic construct; identical to SEQ ID NO: 21060
  source 1..213: note = Description of Artificial Sequence: Synthetic polypeptide; note = XENP020748 9C6_H1L2_anti-BTLA_IgG1_PVA_/S267K Light Chain

SEQ ID NO: 21091 - protein, 106 aa, synthetic construct; identical to SEQ ID NO: 21061
  source 1..106: note = Description of Artificial Sequence: Synthetic polypeptide; note = VL of XENP020748

SEQ ID NO: 21092 - protein, 11 aa, synthetic construct
  source 1..11: note = Description of Artificial Sequence: Synthetic peptide; note = XENP020748 vlCDR1
RASQSVSNDVA

SEQ ID NO: 21093 - protein, 7 aa, synthetic construct
  source 1..7: note = Description of Artificial Sequence: Synthetic peptide; note = XENP020748 vlCDR2
YASNRYT

SEQ ID NO: 21094 - protein, 8 aa, synthetic construct
  source 1..8: note = Description of Artificial Sequence: Synthetic peptide; note = XENP020748 vlCDR3
QQDYSSPT

SEQ ID NO: 21095 - protein, 447 aa, synthetic construct
  source 1..447: note = Description of Artificial Sequence: Synthetic polypeptide; note = XENP020749 9C6_H2L0_anti-BTLA_IgG1_PVA_/S267K Heavy Chain
EVQLVESGGGLVQPGGSLRLSCAVSGFSLTGYGVNWVRQAPGKGLEWVSMIWIDGSTDYNPSVKGRFTISKDNSKSTVYLQMNSLRAEDTAVYYCARDRPDGRAMDYWGQGTMVTVSSASTKGPSVFPLAPSSKSTSGGTAALGCLVKDYFPEPVTVSWNSGALTSGVHTFPAVLQSSGLYSLSSVVTVPSSSLGTQTYICNVNHKPSNTKVDKKVEPKSCDKTHTCPPCPAPPVAGPSVFLFPPKPKDTLMISRTPEVTCVVVDVKHEDPEVKFNWYVDGVEVHNAKTKPREEQYNSTYRVVSVLTVLHQDWLNGKEYKCKVSNKALPAPIEKTISKAKGQPREPQVYTLPPSREEMTKNQVSLTCLVKGFYPSDIAVEWESNGQPENNYKTTPPVLDSDGSFFLYSKLTVDKSRWQQGNVFSCSVMHEALHNHYTQKSLSLSPGK

SEQ ID NO: 21096 - protein, 118 aa, synthetic construct
  source 1..118: note = Description of Artificial Sequence: Synthetic polypeptide; note = VH of XENP020749
EVQLVESGGGLVQPGGSLRLSCAVSGFSLTGYGVNWVRQAPGKGLEWVSMIWIDGSTDYNPSVKGRFTISKDNSKSTVYLQMNSLRAEDTAVYYCARDRPDGRAMDYWGQGTMVTVSS

SEQ ID NO: 21097 - protein, 5 aa, synthetic construct
  source 1..5: note = Description of Artificial Sequence: Synthetic peptide; note = XENP020749 vhCDR1
GYGVN

SEQ ID NO: 21098 - protein, 16 aa, synthetic construct
  source 1..16: note = Description of Artificial Sequence: Synthetic peptide; note = XENP020749 vhCDR2
MIWIDGSTDYNPSVKG

SEQ ID NO: 21099 - protein, 10 aa, synthetic construct
  source 1..10: note = Description of Artificial Sequence: Synthetic peptide; note = XENP020749 vhCDR3
DRPDGRAMDY

SEQ ID NO: 21100 - protein, 213 aa, synthetic construct; identical to SEQ ID NO: 20940
  source 1..213: note = Description of Artificial Sequence: Synthetic polypeptide; note = XENP020749 9C6_H2L0_anti-BTLA_IgG1_PVA_/S267K Light Chain

SEQ ID NO: 21101 - protein, 106 aa, synthetic construct; identical to SEQ ID NO: 20941
  source 1..106: note = Description of Artificial Sequence: Synthetic polypeptide; note = VL of XENP020749

SEQ ID NO: 21102 - protein, 11 aa, synthetic construct
  source 1..11: note = Description of Artificial Sequence: Synthetic peptide; note = XENP020749 vlCDR1
KASQSVSNDVA

SEQ ID NO: 21103 - protein, 7 aa, synthetic construct
  source 1..7: note = Description of Artificial Sequence: Synthetic peptide; note = XENP020749 vlCDR2
YASNRYT

SEQ ID NO: 21104 - protein, 8 aa, synthetic construct
  source 1..8: note = Description of Artificial Sequence: Synthetic peptide; note = XENP020749 vlCDR3
QQDYSSPT

SEQ ID NO: 21105 - protein, 447 aa, synthetic construct; identical to SEQ ID NO: 21095
  source 1..447: note = Description of Artificial Sequence: Synthetic polypeptide; note = XENP020750 9C6_H2L1_anti-BTLA_IgG1_PVA_/S267K Heavy Chain

SEQ ID NO: 21106 - protein, 118 aa, synthetic construct; identical to SEQ ID NO: 21096
  source 1..118: note = Description of Artificial Sequence: Synthetic polypeptide; note = VH of XENP020750

SEQ ID NO: 21107 - protein, 5 aa, synthetic construct
  source 1..5: note = Description of Artificial Sequence: Synthetic peptide; note = XENP020750 vhCDR1
GYGVN

SEQ ID NO: 21108 - protein, 16 aa, synthetic construct
  source 1..16: note = Description of Artificial Sequence: Synthetic peptide; note = XENP020750 vhCDR2
MIWIDGSTDYNPSVKG

SEQ ID NO: 21109 - protein, 10 aa, synthetic construct
  source 1..10: note = Description of Artificial Sequence: Synthetic peptide; note = XENP020750 vhCDR3
DRPDGRAMDY

SEQ ID NO: 21110 - protein, 213 aa, synthetic construct; identical to SEQ ID NO: 21050
  source 1..213: note = Description of Artificial Sequence: Synthetic polypeptide; note = XENP020750 9C6_H2L1_anti-BTLA_IgG1_PVA_/S267K Light Chain

SEQ ID NO: 21111 - protein, 106 aa, synthetic construct; identical to SEQ ID NO: 21051
  source 1..106: note = Description of Artificial Sequence: Synthetic polypeptide; note = VL of XENP020750

SEQ ID NO: 21112 - protein, 11 aa, synthetic construct
  source 1..11: note = Description of Artificial Sequence: Synthetic peptide; note = XENP020750 vlCDR1
KASQSVSNDVA

SEQ ID NO: 21113 - protein, 7 aa, synthetic construct
  source 1..7: note = Description of Artificial Sequence: Synthetic peptide; note = XENP020750 vlCDR2
YASNRYT

SEQ ID NO: 21114 - protein, 8 aa, synthetic construct
  source 1..8: note = Description of Artificial Sequence: Synthetic peptide; note = XENP020750 vlCDR3
QQDYSSPT

SEQ ID NO: 21115 - protein, 447 aa, synthetic construct; identical to SEQ ID NO: 21095
  source 1..447: note = Description of Artificial Sequence: Synthetic polypeptide; note = XENP020751 9C6_H2L2_anti-BTLA_IgG1_PVA_/S267K Heavy Chain

SEQ ID NO: 21116 - protein, 118 aa, synthetic construct; identical to SEQ ID NO: 21096
  source 1..118: note = Description of Artificial Sequence: Synthetic polypeptide; note = VH of XENP020751

SEQ ID NO: 21117 - protein, 5 aa, synthetic construct
  source 1..5: note = Description of Artificial Sequence: Synthetic peptide; note = XENP020751 vhCDR1
GYGVN

SEQ ID NO: 21118 - protein, 16 aa, synthetic construct
  source 1..16: note = Description of Artificial Sequence: Synthetic peptide; note = XENP020751 vhCDR2
MIWIDGSTDYNPSVKG

SEQ ID NO: 21119 - protein, 10 aa, synthetic construct
  source 1..10: note = Description of Artificial Sequence: Synthetic peptide; note = XENP020751 vhCDR3
DRPDGRAMDY

SEQ ID NO: 21120 - protein, 213 aa, synthetic construct; identical to SEQ ID NO: 21060
  source 1..213: note = Description of Artificial Sequence: Synthetic polypeptide; note = XENP020751 9C6_H2L2_anti-BTLA_IgG1_PVA_/S267K Light Chain

SEQ ID NO: 21121 - protein, 106 aa, synthetic construct; identical to SEQ ID NO: 21061
  source 1..106: note = Description of Artificial Sequence: Synthetic polypeptide; note = VL of XENP020751

SEQ ID NO: 21122 - protein, 11 aa, synthetic construct
  source 1..11: note = Description of Artificial Sequence: Synthetic peptide; note = XENP020751 vlCDR1
RASQSVSNDVA

SEQ ID NO: 21123 - protein, 7 aa, synthetic construct
  source 1..7: note = Description of Artificial Sequence: Synthetic peptide; note = XENP020751 vlCDR2
YASNRYT

SEQ ID NO: 21124 - protein, 8 aa, synthetic construct
  source 1..8: note = Description of Artificial Sequence: Synthetic peptide; note = XENP020751 vlCDR3
QQDYSSPT

SEQ ID NO: 21125 - protein, 447 aa, synthetic construct
  source 1..447: note = Description of Artificial Sequence: Synthetic polypeptide; note = XENP020752 9C6_H3L0_anti-BTLA_IgG1_PVA_/S267K Heavy Chain
QVTLKESGPVLVKPTETLTLTCTVSGFSLTGYGVNWVRQPPGKGLEWLAMIWIDGSTDYNPSLKSRLTISKDNSKSQVVLTMTNMDPVDTATYYCARDRPDGRAMDYWGQGTMVTVSSASTKGPSVFPLAPSSKSTSGGTAALGCLVKDYFPEPVTVSWNSGALTSGVHTFPAVLQSSGLYSLSSVVTVPSSSLGTQTYICNVNHKPSNTKVDKKVEPKSCDKTHTCPPCPAPPVAGPSVFLFPPKPKDTLMISRTPEVTCVVVDVKHEDPEVKFNWYVDGVEVHNAKTKPREEQYNSTYRVVSVLTVLHQDWLNGKEYKCKVSNKALPAPIEKTISKAKGQPREPQVYTLPPSREEMTKNQVSLTCLVKGFYPSDIAVEWESNGQPENNYKTTPPVLDSDGSFFLYSKLTVDKSRWQQGNVFSCSVMHEALHNHYTQKSLSLSPGK

SEQ ID NO: 21126 - protein, 118 aa, synthetic construct
  source 1..118: note = Description of Artificial Sequence: Synthetic polypeptide; note = VH of XENP020752
QVTLKESGPVLVKPTETLTLTCTVSGFSLTGYGVNWVRQPPGKGLEWLAMIWIDGSTDYNPSLKSRLTISKDNSKSQVVLTMTNMDPVDTATYYCARDRPDGRAMDYWGQGTMVTVSS

SEQ ID NO: 21127 - protein, 5 aa, synthetic construct
  source 1..5: note = Description of Artificial Sequence: Synthetic peptide; note = XENP020752 vhCDR1
GYGVN

SEQ ID NO: 21128 - protein, 16 aa, synthetic construct
  source 1..16: note = Description of Artificial Sequence: Synthetic peptide; note = XENP020752 vhCDR2
MIWIDGSTDYNPSLKS

SEQ ID NO: 21129 - protein, 10 aa, synthetic construct
  source 1..10: note = Description of Artificial Sequence: Synthetic peptide; note = XENP020752 vhCDR3
DRPDGRAMDY

SEQ ID NO: 21130 - protein, 213 aa, synthetic construct; identical to SEQ ID NO: 20940
  source 1..213: note = Description of Artificial Sequence: Synthetic polypeptide; note = XENP020752 9C6_H3L0_anti-BTLA_IgG1_PVA_/S267K Light Chain

SEQ ID NO: 21131 - protein, 106 aa, synthetic construct; identical to SEQ ID NO: 20941
  source 1..106: note = Description of Artificial Sequence: Synthetic polypeptide; note = VL of XENP020752

SEQ ID NO: 21132 - protein, 11 aa, synthetic construct
  source 1..11: note = Description of Artificial Sequence: Synthetic peptide; note = XENP020752 vlCDR1
KASQSVSNDVA

SEQ ID NO: 21133 - protein, 7 aa, synthetic construct
  source 1..7: note = Description of Artificial Sequence: Synthetic peptide; note = XENP020752 vlCDR2
YASNRYT

SEQ ID NO: 21134 - protein, 8 aa, synthetic construct
  source 1..8: note = Description of Artificial Sequence: Synthetic peptide; note = XENP020752 vlCDR3
QQDYSSPT

SEQ ID NO: 21135 - protein, 447 aa, synthetic construct; identical to SEQ ID NO: 21125
  source 1..447: note = Description of Artificial Sequence: Synthetic polypeptide; note = XENP020753 9C6_H3L1_anti-BTLA_IgG1_PVA_/S267K Heavy Chain

SEQ ID NO: 21136 - protein, 118 aa, synthetic construct; identical to SEQ ID NO: 21126
  source 1..118: note = Description of Artificial Sequence: Synthetic polypeptide; note = VH of XENP020753

SEQ ID NO: 21137 - protein, 5 aa, synthetic construct
  source 1..5: note = Description of Artificial Sequence: Synthetic peptide; note = XENP020753 vhCDR1
GYGVN

SEQ ID NO: 21138 - protein, 16 aa, synthetic construct
  source 1..16: note = Description of Artificial Sequence: Synthetic peptide; note = XENP020753 vhCDR2
MIWIDGSTDYNPSLKS

SEQ ID NO: 21139 - protein, 10 aa, synthetic construct
  source 1..10: note = Description of Artificial Sequence: Synthetic peptide; note = XENP020753 vhCDR3
DRPDGRAMDY

SEQ ID NO: 21140 - protein, 213 aa, synthetic construct; identical to SEQ ID NO: 21050
  source 1..213: note = Description of Artificial Sequence: Synthetic polypeptide; note = XENP020753 9C6_H3L1_anti-BTLA_IgG1_PVA_/S267K Light Chain

SEQ ID NO: 21141 - protein, 106 aa, synthetic construct; identical to SEQ ID NO: 21051
  source 1..106: note = Description of Artificial Sequence: Synthetic polypeptide; note = VL of XENP020753

SEQ ID NO: 21142 - protein, 11 aa, synthetic construct
  source 1..11: note = Description of Artificial Sequence: Synthetic peptide; note = XENP020753 vlCDR1
KASQSVSNDVA

SEQ ID NO: 21143 - protein, 7 aa, synthetic construct
  source 1..7: note = Description of Artificial Sequence: Synthetic peptide; note = XENP020753 vlCDR2
YASNRYT

SEQ ID NO: 21144 - protein, 8 aa, synthetic construct
  source 1..8: note = Description of Artificial Sequence: Synthetic peptide; note = XENP020753 vlCDR3
QQDYSSPT

SEQ ID NO: 21145 - protein, 447 aa, synthetic construct; identical to SEQ ID NO: 21125
  source 1..447: note = Description of Artificial Sequence: Synthetic polypeptide; note = XENP020754 9C6_H3L2_anti-BTLA_IgG1_PVA_/S267K Heavy Chain

SEQ ID NO: 21146 - protein, 118 aa, synthetic construct; identical to SEQ ID NO: 21126
  source 1..118: note = Description of Artificial Sequence: Synthetic polypeptide; note = VH of XENP020754

SEQ ID NO: 21147 - protein, 5 aa, synthetic construct
  source 1..5: note = Description of Artificial Sequence: Synthetic peptide; note = XENP020754 vhCDR1
GYGVN

SEQ ID NO: 21148 - protein, 16 aa, synthetic construct
  source 1..16: note = Description of Artificial Sequence: Synthetic peptide; note = XENP020754 vhCDR2
MIWIDGSTDYNPSLKS

SEQ ID NO: 21149 - protein, 10 aa, synthetic construct
  source 1..10: note = Description of Artificial Sequence: Synthetic peptide; note = XENP020754 vhCDR3
DRPDGRAMDY

SEQ ID NO: 21150 - protein, 213 aa, synthetic construct; identical to SEQ ID NO: 21060
  source 1..213: note = Description of Artificial Sequence: Synthetic polypeptide; note = XENP020754 9C6_H3L2_anti-BTLA_IgG1_PVA_/S267K Light Chain

SEQ ID NO: 21151 - protein, 106 aa, synthetic construct; identical to SEQ ID NO: 21061
  source 1..106: note = Description of Artificial Sequence: Synthetic polypeptide; note = VL of XENP020754

SEQ ID NO: 21152 - protein, 11 aa, synthetic construct
  source 1..11: note = Description of Artificial Sequence: Synthetic peptide; note = XENP020754 vlCDR1
RASQSVSNDVA

SEQ ID NO: 21153 - protein, 7 aa, synthetic construct
  source 1..7: note = Description of Artificial Sequence: Synthetic peptide; note = XENP020754 vlCDR2
YASNRYT

SEQ ID NO: 21154 - protein, 8 aa, synthetic construct
  source 1..8: note = Description of Artificial Sequence: Synthetic peptide; note = XENP020754 vlCDR3
QQDYSSPT

SEQ ID NO: 21155 - protein, 443 aa, synthetic construct; identical to SEQ ID NO: 20975
  source 1..443: note = Description of Artificial Sequence: Synthetic polypeptide; note = XENP020758 12E6_H0L1_anti-BTLA_IgG1_PVA_/S267K Heavy Chain

SEQ ID NO: 21156 - protein, 5 aa, synthetic construct
  source 1..5: note = Description of Artificial Sequence: Synthetic peptide; note = XENP020758 vhCDR1
NYWIE

SEQ ID NO: 21157 - protein, 17 aa, synthetic construct
  source 1..17: note = Description of Artificial Sequence: Synthetic peptide; note = XENP020758 vhCDR2
EILPGSGGTNYNEKFKG

SEQ ID NO: 21158 - protein, 5 aa, synthetic construct
  source 1..5: note = Description of Artificial Sequence: Synthetic peptide; note = XENP020758 vhCDR3
PRYDL

SEQ ID NO: 21159 - protein, 219 aa, synthetic construct
  source 1..219: note = Description of Artificial Sequence: Synthetic polypeptide; note = XENP020758 12E6_H0L1_anti-BTLA_IgG1_PVA_/S267K Light Chain
DVVLTQSPLSLPVTLGQPASISCRSSQSLLHSDGETYLNYFQQRPGQSPRRLIYLVSKRDSGVPDRFTGSGSGTDFTLKISRVEAEDVGVYYCWQGIHFPQTFGRGTKLEIKRTVAAPSVFIFPPSDEQLKSGTASVVCLLNNFYPREAKVQWKVDNALQSGNSQESVTEQDSKDSTYSLSSTLTLSKADYEKHKVYACEVTHQGLSSPVTKSFNRGEC

SEQ ID NO: 21160 - protein, 112 aa, synthetic construct
  source 1..112: note = Description of Artificial Sequence: Synthetic polypeptide; note = VL of XENP020758
DVVLTQSPLSLPVTLGQPASISCRSSQSLLHSDGETYLNYFQQRPGQSPRRLIYLVSKRDSGVPDRFTGSGSGTDFTLKISRVEAEDVGVYYCWQGIHFPQTFGRGTKLEIK

SEQ ID NO: 21161 - protein, 16 aa, synthetic construct
  source 1..16: note = Description of Artificial Sequence: Synthetic peptide; note = XENP020758 vlCDR1
RSSQSLLHSDGETYLN

SEQ ID NO: 21162 - protein, 7 aa, synthetic construct
  source 1..7: note = Description of Artificial Sequence: Synthetic peptide; note = XENP020758 vlCDR2
LVSKRDS

SEQ ID NO: 21163 - protein, 9 aa, synthetic construct
  source 1..9: note = Description of Artificial Sequence: Synthetic peptide; note = XENP020758 vlCDR3
WQGIHFPQT

SEQ ID NO: 21164 - protein, 443 aa, synthetic construct
  source 1..443: note = Description of Artificial Sequence: Synthetic polypeptide; note = XENP020759 12E6_H1L0_anti-BTLA_IgG1_PVA_/S267K Heavy Chain
QVQLVQSGAEVKKPGASVKVSCKASGYTFSNYGIEWVRQAPGQGLEWMGEILPGSGGTNYNEKFQGRVTMTADTSINTAYMELSRLRSDDTAVYYCASPRYDLWGQGTLVTVSSASTKGPSVFPLAPSSKSTSGGTAALGCLVKDYFPEPVTVSWNSGALTSGVHTFPAVLQSSGLYSLSSVVTVPSSSLGTQTYICNVNHKPSNTKVDKKVEPKSCDKTHTCPPCPAPPVAGPSVFLFPPKPKDTLMISRTPEVTCVVVDVKHEDPEVKFNWYVDGVEVHNAKTKPREEQYNSTYRVVSVLTVLHQDWLNGKEYKCKVSNKALPAPIEKTISKAKGQPREPQVYTLPPSREEMTKNQVSLTCLVKGFYPSDIAVEWESNGQPENNYKTTPPVLDSDGSFFLYSKLTVDKSRWQQGNVFSCSVMHEALHNHYTQKSLSLSPGK

SEQ ID NO: 21165 - protein, 114 aa, synthetic construct
  source 1..114: note = Description of Artificial Sequence: Synthetic polypeptide; note = VH of XENP020759
QVQLVQSGAEVKKPGASVKVSCKASGYTFSNYGIEWVRQAPGQGLEWMGEILPGSGGTNYNEKFQGRVTMTADTSINTAYMELSRLRSDDTAVYYCASPRYDLWGQGTLVTVSS

SEQ ID NO: 21166 - protein, 5 aa, synthetic construct
  source 1..5: note = Description of Artificial Sequence: Synthetic peptide; note = XENP020759 vhCDR1
NYGIE

SEQ ID NO: 21167 - protein, 17 aa, synthetic construct
  source 1..17: note = Description of Artificial Sequence: Synthetic peptide; note = XENP020759 vhCDR2
EILPGSGGTNYNEKFQG

SEQ ID NO: 21168 - protein, 5 aa, synthetic construct
  source 1..5: note = Description of Artificial Sequence: Synthetic peptide; note = XENP020759 vhCDR3
PRYDL

SEQ ID NO: 21169 - protein, 219 aa, synthetic construct; identical to SEQ ID NO: 20980
  source 1..219: note = Description of Artificial Sequence: Synthetic polypeptide; note = XENP020759 12E6_H1L0_anti-BTLA_IgG1_PVA_/S267K Light Chain

SEQ ID NO: 21170 - protein, 112 aa, synthetic construct; identical to SEQ ID NO: 20981
  source 1..112: note = Description of Artificial Sequence: Synthetic polypeptide; note = VL of XENP020759

SEQ ID NO: 21171 - protein, 16 aa, synthetic construct
  source 1..16: note = Description of Artificial Sequence: Synthetic peptide; note = XENP020759 vlCDR1
KSSQSLLHSDGETYLN

SEQ ID NO: 21172 - protein, 7 aa, synthetic construct
  source 1..7: note = Description of Artificial Sequence: Synthetic peptide; note = XENP020759 vlCDR2
LVSKRDS

SEQ ID NO: 21173 - protein, 9 aa, synthetic construct
  source 1..9: note = Description of Artificial Sequence: Synthetic peptide; note = XENP020759 vlCDR3
WQGIHFPQT

SEQ ID NO: 21174 - protein, 443 aa, synthetic construct; identical to SEQ ID NO: 21164
  source 1..443: note = Description of Artificial Sequence: Synthetic polypeptide; note = XENP020760 12E6_H1L1_anti-BTLA_IgG1_PVA_/S267K Heavy Chain

SEQ ID NO: 21175 - protein, 114 aa, synthetic construct; identical to SEQ ID NO: 21165
  source 1..114: note = Description of Artificial Sequence: Synthetic polypeptide; note = VH of XENP020760

SEQ ID NO: 21176 - protein, 5 aa, synthetic construct
  source 1..5: note = Description of Artificial Sequence: Synthetic peptide; note = XENP020760 vhCDR1
NYGIE

SEQ ID NO: 21177 - protein, 17 aa, synthetic construct
  source 1..17: note = Description of Artificial Sequence: Synthetic peptide; note = XENP020760 vhCDR2
EILPGSGGTNYNEKFQG

SEQ ID NO: 21178 - protein, 5 aa, synthetic construct
  source 1..5: note = Description of Artificial Sequence: Synthetic peptide; note = XENP020760 vhCDR3
PRYDL

SEQ ID NO: 21179 - protein, 219 aa, synthetic construct; identical to SEQ ID NO: 21159
  source 1..219: note = Description of Artificial Sequence: Synthetic polypeptide; note = XENP020760 12E6_H1L1_anti-BTLA_IgG1_PVA_/S267K Light Chain

SEQ ID NO: 21180 - protein, 112 aa, synthetic construct; identical to SEQ ID NO: 21160
  source 1..112: note = Description of Artificial Sequence: Synthetic polypeptide; note = VL of XENP020760

SEQ ID NO: 21181 - protein, 16 aa, synthetic construct
  source 1..16: note = Description of Artificial Sequence: Synthetic peptide; note = XENP020760 vlCDR1
RSSQSLLHSDGETYLN

SEQ ID NO: 21182 - protein, 7 aa, synthetic construct
  source 1..7: note = Description of Artificial Sequence: Synthetic peptide; note = XENP020760 vlCDR2
LVSKRDS

SEQ ID NO: 21183 - protein, 9 aa, synthetic construct
  source 1..9: note = Description of Artificial Sequence: Synthetic peptide; note = XENP020760 vlCDR3
WQGIHFPQT

SEQ ID NO: 21184 - protein, 443 aa, synthetic construct
  source 1..443: note = Description of Artificial Sequence: Synthetic polypeptide; note = XENP020761 12E6_H2L0_anti-BTLA_IgG1_PVA_/S267K Heavy Chain
EVQLLESGGGLVQPGGSLRLSCAASGYTFSNYGIEWVRQAPGKGLEWVSEILPGSGGTNYNPSVKGRFTISADTSKNTAYLQMNSLRAEDTAVYYCASPRYDLWGQGTLVTVSSASTKGPSVFPLAPSSKSTSGGTAALGCLVKDYFPEPVTVSWNSGALTSGVHTFPAVLQSSGLYSLSSVVTVPSSSLGTQTYICNVNHKPSNTKVDKKVEPKSCDKTHTCPPCPAPPVAGPSVFLFPPKPKDTLMISRTPEVTCVVVDVKHEDPEVKFNWYVDGVEVHNAKTKPREEQYNSTYRVVSVLTVLHQDWLNGKEYKCKVSNKALPAPIEKTISKAKGQPREPQVYTLPPSREEMTKNQVSLTCLVKGFYPSDIAVEWESNGQPENNYKTTPPVLDSDGSFFLYSKLTVDKSRWQQGNVFSCSVMHEALHNHYTQKSLSLSPGK

SEQ ID NO: 21185 - protein, 114 aa, synthetic construct
  source 1..114: note = Description of Artificial Sequence: Synthetic polypeptide; note = VH of XENP020761
EVQLLESGGGLVQPGGSLRLSCAASGYTFSNYGIEWVRQAPGKGLEWVSEILPGSGGTNYNPSVKGRFTISADTSKNTAYLQMNSLRAEDTAVYYCASPRYDLWGQGTLVTVSS

SEQ ID NO: 21186 - protein, 5 aa, synthetic construct
  source 1..5: note = Description of Artificial Sequence: Synthetic peptide; note = XENP020761 vhCDR1
NYGIE

SEQ ID NO: 21187 - protein, 17 aa, synthetic construct
  source 1..17: note = Description of Artificial Sequence: Synthetic peptide; note = XENP020761 vhCDR2
EILPGSGGTNYNPSVKG

SEQ ID NO: 21188 - protein, 5 aa, synthetic construct
  source 1..5: note = Description of Artificial Sequence: Synthetic peptide; note = XENP020761 vhCDR3
PRYDL

SEQ ID NO: 21189 - protein, 219 aa, synthetic construct; identical to SEQ ID NO: 20980
  source 1..219: note = Description of Artificial Sequence: Synthetic polypeptide; note = XENP020761 12E6_H2L0_anti-BTLA_IgG1_PVA_/S267K Light Chain

SEQ ID NO: 21190 - protein, 112 aa, synthetic construct; identical to SEQ ID NO: 20981
  source 1..112: note = Description of Artificial Sequence: Synthetic polypeptide; note = VL of XENP020761

SEQ ID NO: 21191 - protein, 16 aa, synthetic construct
  source 1..16: note = Description of Artificial Sequence: Synthetic peptide; note = XENP020761 vlCDR1
KSSQSLLHSDGETYLN

SEQ ID NO: 21192 - protein, 7 aa, synthetic construct
  source 1..7: note = Description of Artificial Sequence: Synthetic peptide; note = XENP020761 vlCDR2
LVSKRDS

SEQ ID NO: 21193 - protein, 9 aa, synthetic construct
  source 1..9: note = Description of Artificial Sequence: Synthetic peptide; note = XENP020761 vlCDR3
WQGIHFPQT

SEQ ID NO: 21194 - protein, 443 aa, synthetic construct; identical to SEQ ID NO: 21184
  source 1..443: note = Description of Artificial Sequence: Synthetic polypeptide; note = XENP020762 12E6_H2L1_anti-BTLA_IgG1_PVA_/S267K Heavy Chain

SEQ ID NO: 21195 - protein, 114 aa, synthetic construct; identical to SEQ ID NO: 21185
  source 1..114: note = Description of Artificial Sequence: Synthetic polypeptide; note = VH of XENP020762

SEQ ID NO: 21196 - protein, 5 aa, synthetic construct
  source 1..5: note = Description of Artificial Sequence: Synthetic peptide; note = XENP020762 vhCDR1
NYGIE

SEQ ID NO: 21197 - protein, 17 aa, synthetic construct
  source 1..17: note = Description of Artificial Sequence: Synthetic peptide; note = XENP020762 vhCDR2
EILPGSGGTNYNPSVKG

SEQ ID NO: 21198 - protein, 5 aa, synthetic construct
  source 1..5: note = Description of Artificial Sequence: Synthetic peptide; note = XENP020762 vhCDR3
PRYDL

SEQ ID NO: 21199 - protein, 219 aa, synthetic construct; identical to SEQ ID NO: 21159
  source 1..219: note = Description of Artificial Sequence: Synthetic polypeptide; note = XENP020762 12E6_H2L1_anti-BTLA_IgG1_PVA_/S267K Light Chain

SEQ ID NO: 21200 - protein, 112 aa, synthetic construct; identical to SEQ ID NO: 21160
  source 1..112: note = Description of Artificial Sequence: Synthetic polypeptide; note = VL of XENP020762

SEQ ID NO: 21201 - protein, 16 aa, synthetic construct
  source 1..16: note = Description of Artificial Sequence: Synthetic peptide; note = XENP020762 vlCDR1
RSSQSLLHSDGETYLN

SEQ ID NO: 21202 - protein, 7 aa, synthetic construct
  source 1..7: note = Description of Artificial Sequence: Synthetic peptide; note = XENP020762 vlCDR2
LVSKRDS

SEQ ID NO: 21203 - protein, 9 aa, synthetic construct
  source 1..9: note = Description of Artificial Sequence: Synthetic peptide; note = XENP020762 vlCDR3
WQGIHFPQT

SEQ ID NO: 21204 - protein, 447 aa, synthetic construct
  source 1..447: note = Description of Artificial Sequence: Synthetic polypeptide; note = XENP020872 9C6_H1.1_L1_anti-BTLA_IgG1_PVA_/S267K Heavy Chain
QVQLKESGAEVKKPGASVKVSCKVSGFSLTGYGVNWVRQAPGQGLEWMGMIWIDGSTDYNSKFQGRVTMTKDNSKSTVYMELSSLRSEDTAVYYCARDRPDGRAMDYWGQGTMVTVSSASTKGPSVFPLAPSSKSTSGGTAALGCLVKDYFPEPVTVSWNSGALTSGVHTFPAVLQSSGLYSLSSVVTVPSSSLGTQTYICNVNHKPSNTKVDKKVEPKSCDKTHTCPPCPAPPVAGPSVFLFPPKPKDTLMISRTPEVTCVVVDVKHEDPEVKFNWYVDGVEVHNAKTKPREEQYNSTYRVVSVLTVLHQDWLNGKEYKCKVSNKALPAPIEKTISKAKGQPREPQVYTLPPSREEMTKNQVSLTCLVKGFYPSDIAVEWESNGQPENNYKTTPPVLDSDGSFFLYSKLTVDKSRWQQGNVFSCSVMHEALHNHYTQKSLSLSPGK

SEQ ID NO: 21205 - protein, 118 aa, synthetic construct
  source 1..118: note = Description of Artificial Sequence: Synthetic polypeptide; note = VH of XENP020872
QVQLKESGAEVKKPGASVKVSCKVSGFSLTGYGVNWVRQAPGQGLEWMGMIWIDGSTDYNSKFQGRVTMTKDNSKSTVYMELSSLRSEDTAVYYCARDRPDGRAMDYWGQGTMVTVSS

SEQ ID NO: 21206 - protein, 5 aa, synthetic construct
  source 1..5: note = Description of Artificial Sequence: Synthetic peptide; note = XENP020872 vhCDR1
GYGVN

SEQ ID NO: 21207 - protein, 16 aa, synthetic construct
  source 1..16: note = Description of Artificial Sequence: Synthetic peptide; note = XENP020872 vhCDR2
MIWIDGSTDYNSKFQG

SEQ ID NO: 21208 - protein, 10 aa, synthetic construct
  source 1..10: note = Description of Artificial Sequence: Synthetic peptide; note = XENP020872 vhCDR3
DRPDGRAMDY

SEQ ID NO: 21209 - protein, 213 aa, synthetic construct; identical to SEQ ID NO: 21050
  source 1..213: note = Description of Artificial Sequence: Synthetic polypeptide; note = XENP020872 9C6_H1.1_L1_anti-BTLA_IgG1_PVA_/S267K Light Chain

SEQ ID NO: 21210 - protein, 106 aa, synthetic construct; identical to SEQ ID NO: 21051
  source 1..106: note = Description of Artificial Sequence: Synthetic polypeptide; note = VL of XENP020872

SEQ ID NO: 21211 - protein, 11 aa, synthetic construct
  source 1..11: note = Description of Artificial Sequence: Synthetic peptide; note = XENP020872 vlCDR1
KASQSVSNDVA

SEQ ID NO: 21212 - protein, 7 aa, synthetic construct
  source 1..7: note = Description of Artificial Sequence: Synthetic peptide; note = XENP020872 vlCDR2
YASNRYT

SEQ ID NO: 21213 - protein, 8 aa, synthetic construct
  source 1..8: note = Description of Artificial Sequence: Synthetic peptide; note = XENP020872 vlCDR3
QQDYSSPT

SEQ ID NO: 21214 - protein, 447 aa, synthetic construct
  source 1..447: note = Description of Artificial Sequence: Synthetic polypeptide; note = XENP020873 9C6_H1.2_L1_anti-BTLA_IgG1_PVA_/S267K Heavy Chain
QVQLVQSGPGLVAPGASVKVSCKVSGFSLTGYGVNWVRQAPGQGLEWMGMIWIDGSTDYNSKFQGRVTMTKDNSKSTVYMELSSLRSEDTAVYYCARDRPDGRAMDYWGQGTMVTVSSASTKGPSVFPLAPSSKSTSGGTAALGCLVKDYFPEPVTVSWNSGALTSGVHTFPAVLQSSGLYSLSSVVTVPSSSLGTQTYICNVNHKPSNTKVDKKVEPKSCDKTHTCPPCPAPPVAGPSVFLFPPKPKDTLMISRTPEVTCVVVDVKHEDPEVKFNWYVDGVEVHNAKTKPREEQYNSTYRVVSVLTVLHQDWLNGKEYKCKVSNKALPAPIEKTISKAKGQPREPQVYTLPPSREEMTKNQVSLTCLVKGFYPSDIAVEWESNGQPENNYKTTPPVLDSDGSFFLYSKLTVDKSRWQQGNVFSCSVMHEALHNHYTQKSLSLSPGK

SEQ ID NO: 21215 - protein, 118 aa, synthetic construct
  source 1..118: note = Description of Artificial Sequence: Synthetic polypeptide; note = VH of XENP020873
QVQLVQSGPGLVAPGASVKVSCKVSGFSLTGYGVNWVRQAPGQGLEWMGMIWIDGSTDYNSKFQGRVTMTKDNSKSTVYMELSSLRSEDTAVYYCARDRPDGRAMDYWGQGTMVTVSS

SEQ ID NO: 21216 - protein, 5 aa, synthetic construct
  source 1..5: note = Description of Artificial Sequence: Synthetic peptide; note = XENP020873 vhCDR1
GYGVN

SEQ ID NO: 21217 - protein, 16 aa, synthetic construct
  source 1..16: note = Description of Artificial Sequence: Synthetic peptide; note = XENP020873 vhCDR2
MIWIDGSTDYNSKFQG

SEQ ID NO: 21218 - protein, 10 aa, synthetic construct
  source 1..10: note = Description of Artificial Sequence: Synthetic peptide; note = XENP020873 vhCDR3
DRPDGRAMDY

SEQ ID NO: 21219 - protein, 213 aa, synthetic construct; identical to SEQ ID NO: 21050
  source 1..213: note = Description of Artificial Sequence: Synthetic polypeptide; note = XENP020873 9C6_H1.2_L1_anti-BTLA_IgG1_PVA_/S267K Light Chain

SEQ ID NO: 21220 - protein, 106 aa, synthetic construct; identical to SEQ ID NO: 21051
  source 1..106: note = Description of Artificial Sequence: Synthetic polypeptide; note = VL of XENP020873

SEQ ID NO: 21221 - protein, 11 aa, synthetic construct
  source 1..11: note = Description of Artificial Sequence: Synthetic peptide; note = XENP020873 vlCDR1
KASQSVSNDVA

SEQ ID NO: 21222 - protein, 7 aa, synthetic construct
  source 1..7: note = Description of Artificial Sequence: Synthetic peptide; note = XENP020873 vlCDR2
YASNRYT

SEQ ID NO: 21223 - protein, 8 aa, synthetic construct
  source 1..8: note = Description of Artificial Sequence: Synthetic peptide; note = XENP020873 vlCDR3
QQDYSSPT

SEQ ID NO: 21224 - protein, 447 aa, synthetic construct
  source 1..447: note = Description of Artificial Sequence: Synthetic polypeptide; note = XENP020874 9C6_H1.3_L1_anti-BTLA_IgG1_PVA_/S267K Heavy Chain
QVQLVQSGAEVKKPSQSVKVSCKVSGFSLTGYGVNWVRQAPGQGLEWMGMIWIDGSTDYNSKFQGRVTMTKDNSKSTVYMELSSLRSEDTAVYYCARDRPDGRAMDYWGQGTMVTVSSASTKGPSVFPLAPSSKSTSGGTAALGCLVKDYFPEPVTVSWNSGALTSGVHTFPAVLQSSGLYSLSSVVTVPSSSLGTQTYICNVNHKPSNTKVDKKVEPKSCDKTHTCPPCPAPPVAGPSVFLFPPKPKDTLMISRTPEVTCVVVDVKHEDPEVKFNWYVDGVEVHNAKTKPREEQYNSTYRVVSVLTVLHQDWLNGKEYKCKVSNKALPAPIEKTISKAKGQPREPQVYTLPPSREEMTKNQVSLTCLVKGFYPSDIAVEWESNGQPENNYKTTPPVLDSDGSFFLYSKLTVDKSRWQQGNVFSCSVMHEALHNHYTQKSLSLSPGK

SEQ ID NO: 21225 - protein, 118 aa, synthetic construct
  source 1..118: note = Description of Artificial Sequence: Synthetic polypeptide; note = VH of XENP020874
QVQLVQSGAEVKKPSQSVKVSCKVSGFSLTGYGVNWVRQAPGQGLEWMGMIWIDGSTDYNSKFQGRVTMTKDNSKSTVYMELSSLRSEDTAVYYCARDRPDGRAMDYWGQGTMVTVSS

SEQ ID NO: 21226 - protein, 5 aa, synthetic construct
  source 1..5: note = Description of Artificial Sequence: Synthetic peptide; note = XENP020874 vhCDR1
GYGVN

SEQ ID NO: 21227 - protein, 16 aa, synthetic construct
  source 1..16: note = Description of Artificial Sequence: Synthetic peptide; note = XENP020874 vhCDR2
MIWIDGSTDYNSKFQG

SEQ ID NO: 21228 - protein, 10 aa, synthetic construct
  source 1..10: note = Description of Artificial Sequence: Synthetic peptide; note = XENP020874 vhCDR3
DRPDGRAMDY

SEQ ID NO: 21229 - protein, 213 aa, synthetic construct; identical to SEQ ID NO: 21050
  source 1..213: note = Description of Artificial Sequence: Synthetic polypeptide; note = XENP020874 9C6_H1.3_L1_anti-BTLA_IgG1_PVA_/S267K Light Chain

SEQ ID NO: 21230 - protein, 106 aa, synthetic construct; identical to SEQ ID NO: 21051
  source 1..106: note = Description of Artificial Sequence: Synthetic polypeptide; note = VL of XENP020874

SEQ ID NO: 21231 - protein, 11 aa, synthetic construct
  source 1..11: note = Description of Artificial Sequence: Synthetic peptide; note = XENP020874 vlCDR1
KASQSVSNDVA

SEQ ID NO: 21232 - protein, 7 aa, synthetic construct
  source 1..7: note = Description of Artificial Sequence: Synthetic peptide; note = XENP020874 vlCDR2
YASNRYT

SEQ ID NO: 21233 - protein, 8 aa, synthetic construct
  source 1..8: note = Description of Artificial Sequence: Synthetic peptide; note = XENP020874 vlCDR3
QQDYSSPT

SEQ ID NO: 21234 - protein, 447 aa, synthetic construct
  source 1..447: note = Description of Artificial Sequence: Synthetic polypeptide; note = XENP020875 9C6_H1.4_L1_anti-BTLA_IgG1_PVA_/S267K Heavy Chain
QVQLVQSGAEVKKPGASLSITCKVSGFSLTGYGVNWVRQAPGQGLEWMGMIWIDGSTDYNSKFQGRVTMTKDNSKSTVYMELSSLRSEDTAVYYCARDRPDGRAMDYWGQGTMVTVSSASTKGPSVFPLAPSSKSTSGGTAALGCLVKDYFPEPVTVSWNSGALTSGVHTFPAVLQSSGLYSLSSVVTVPSSSLGTQTYICNVNHKPSNTKVDKKVEPKSCDKTHTCPPCPAPPVAGPSVFLFPPKPKDTLMISRTPEVTCVVVDVKHEDPEVKFNWYVDGVEVHNAKTKPREEQYNSTYRVVSVLTVLHQDWLNGKEYKCKVSNKALPAPIEKTISKAKGQPREPQVYTLPPSREEMTKNQVSLTCLVKGFYPSDIAVEWESNGQPENNYKTTPPVLDSDGSFFLYSKLTVDKSRWQQGNVFSCSVMHEALHNHYTQKSLSLSPGK

SEQ ID NO: 21235 - protein, 118 aa, synthetic construct
  source 1..118: note = Description of Artificial Sequence: Synthetic polypeptide; note = VH of XENP020875
QVQLVQSGAEVKKPGASLSITCKVSGFSLTGYGVNWVRQAPGQGLEWMGMIWIDGSTDYNSKFQGRVTMTKDNSKSTVYMELSSLRSEDTAVYYCARDRPDGRAMDYWGQGTMVTVSS

SEQ ID NO: 21236 - protein, 5 aa, synthetic construct
  source 1..5: note = Description of Artificial Sequence: Synthetic peptide; note = XENP020875 vhCDR1
GYGVN

SEQ ID NO: 21237 - protein, 16 aa, synthetic construct
  source 1..16: note = Description of Artificial Sequence: Synthetic peptide; note = XENP020875 vhCDR2
MIWIDGSTDYNSKFQG

SEQ ID NO: 21238 - protein, 10 aa, synthetic construct
  source 1..10: note = Description of Artificial Sequence: Synthetic peptide; note = XENP020875 vhCDR3
DRPDGRAMDY

SEQ ID NO: 21239 - protein, 213 aa, synthetic construct; identical to SEQ ID NO: 21050
  source 1..213: note = Description of Artificial Sequence: Synthetic polypeptide; note = XENP020875 9C6_H1.4_L1_anti-BTLA_IgG1_PVA_/S267K Light Chain

SEQ ID NO: 21240 - protein, 106 aa, synthetic construct; identical to SEQ ID NO: 21051
  source 1..106: note = Description of Artificial Sequence: Synthetic polypeptide; note = VL of XENP020875

SEQ ID NO: 21241 - protein, 11 aa, synthetic construct
  source 1..11: note = Description of Artificial Sequence: Synthetic peptide; note = XENP020875 vlCDR1
KASQSVSNDVA

SEQ ID NO: 21242 - protein, 7 aa, synthetic construct
  source 1..7: note = Description of Artificial Sequence: Synthetic peptide; note = XENP020875 vlCDR2
YASNRYT

SEQ ID NO: 21243 - protein, 8 aa, synthetic construct
  source 1..8: note = Description of Artificial Sequence: Synthetic peptide; note = XENP020875 vlCDR3
QQDYSSPT

SEQ ID NO: 21244 - protein, 447 aa, synthetic construct
  source 1..447: note = Description of Artificial Sequence: Synthetic polypeptide; note = XENP020876 9C6_H1.5_L1_anti-BTLA_IgG1_PVA_/S267K Heavy Chain
QVQLVQSGAEVKKPGASVKVSCTVSGFSLTGYGVNWVRQAPGQGLEWMGMIWIDGSTDYNSKFQGRVTMTKDNSKSTVYMELSSLRSEDTAVYYCARDRPDGRAMDYWGQGTMVTVSSASTKGPSVFPLAPSSKSTSGGTAALGCLVKDYFPEPVTVSWNSGALTSGVHTFPAVLQSSGLYSLSSVVTVPSSSLGTQTYICNVNHKPSNTKVDKKVEPKSCDKTHTCPPCPAPPVAGPSVFLFPPKPKDTLMISRTPEVTCVVVDVKHEDPEVKFNWYVDGVEVHNAKTKPREEQYNSTYRVVSVLTVLHQDWLNGKEYKCKVSNKALPAPIEKTISKAKGQPREPQVYTLPPSREEMTKNQVSLTCLVKGFYPSDIAVEWESNGQPENNYKTTPPVLDSDGSFFLYSKLTVDKSRWQQGNVFSCSVMHEALHNHYTQKSLSLSPGK

SEQ ID NO: 21245 - protein, 118 aa, synthetic construct
  source 1..118: note = Description of Artificial Sequence: Synthetic polypeptide; note = VH of XENP020876
QVQLVQSGAEVKKPGASVKVSCTVSGFSLTGYGVNWVRQAPGQGLEWMGMIWIDGSTDYNSKFQGRVTMTKDNSKSTVYMELSSLRSEDTAVYYCARDRPDGRAMDYWGQGTMVTVSS

SEQ ID NO: 21246 - protein, 5 aa, synthetic construct
  source 1..5: note = Description of Artificial Sequence: Synthetic peptide; note = XENP020876 vhCDR1
GYGVN

SEQ ID NO: 21247 - protein, 16 aa, synthetic construct
  source 1..16: note = Description of Artificial Sequence: Synthetic peptide; note = XENP020876 vhCDR2
MIWIDGSTDYNSKFQG

SEQ ID NO: 21248 - protein, 10 aa, synthetic construct
  source 1..10: note = Description of Artificial Sequence: Synthetic peptide; note = XENP020876 vhCDR3
DRPDGRAMDY

SEQ ID NO: 21249 - protein, 213 aa, synthetic construct; identical to SEQ ID NO: 21050
  source 1..213: note = Description of Artificial Sequence: Synthetic polypeptide; note = XENP020876 9C6_H1.5_L1_anti-BTLA_IgG1_PVA_/S267K Light Chain

SEQ ID NO: 21250 - protein, 106 aa, synthetic construct; identical to SEQ ID NO: 21051
  source 1..106: note = Description of Artificial Sequence: Synthetic polypeptide; note = VL of XENP020876

SEQ ID NO: 21251 - protein, 11 aa, synthetic construct
  source 1..11: note = Description of Artificial Sequence: Synthetic peptide; note = XENP020876 vlCDR1
KASQSVSNDVA

SEQ ID NO: 21252 - protein, 7 aa, synthetic construct
  source 1..7: note = Description of Artificial Sequence: Synthetic peptide; note = XENP020876 vlCDR2
YASNRYT

SEQ ID NO: 21253 - protein, 8 aa, synthetic construct
  source 1..8: note = Description of Artificial Sequence: Synthetic peptide; note = XENP020876 vlCDR3
QQDYSSPT

SEQ ID NO: 21254 - protein, 447 aa, synthetic construct
  source 1..447: note = Description of Artificial Sequence: Synthetic polypeptide; note = XENP020877 9C6_H1.6_L1_anti-BTLA_IgG1_PVA_/S267K Heavy Chain
QVQLVQSGAEVKKPGASVKVSCKVSGFSLTGYGVNWVRQPPGKGLEWMGMIWIDGSTDYNSKFQGRVTMTKDNSKSTVYMELSSLRSEDTAVYYCARDRPDGRAMDYWGQGTMVTVSSASTKGPSVFPLAPSSKSTSGGTAALGCLVKDYFPEPVTVSWNSGALTSGVHTFPAVLQSSGLYSLSSVVTVPSSSLGTQTYICNVNHKPSNTKVDKKVEPKSCDKTHTCPPCPAPPVAGPSVFLFPPKPKDTLMISRTPEVTCVVVDVKHEDPEVKFNWYVDGVEVHNAKTKPREEQYNSTYRVVSVLTVLHQDWLNGKEYKCKVSNKALPAPIEKTISKAKGQPREPQVYTLPPSREEMTKNQVSLTCLVKGFYPSDIAVEWESNGQPENNYKTTPPVLDSDGSFFLYSKLTVDKSRWQQGNVFSCSVMHEALHNHYTQKSLSLSPGK

SEQ ID NO: 21255 - protein, 118 aa, synthetic construct
  source 1..118: note = Description of Artificial Sequence: Synthetic polypeptide; note = VH of XENP020877
QVQLVQSGAEVKKPGASVKVSCKVSGFSLTGYGVNWVRQPPGKGLEWMGMIWIDGSTDYNSKFQGRVTMTKDNSKSTVYMELSSLRSEDTAVYYCARDRPDGRAMDYWGQGTMVTVSS

SEQ ID NO: 21256 - protein, 5 aa, synthetic construct
  source 1..5: note = Description of Artificial Sequence: Synthetic peptide; note = XENP020877 vhCDR1
GYGVN

SEQ ID NO: 21257 - protein, 16 aa, synthetic construct
  source 1..16: note = Description of Artificial Sequence: Synthetic peptide; note = XENP020877 vhCDR2
MIWIDGSTDYNSKFQG

SEQ ID NO: 21258 - protein, 10 aa, synthetic construct
  source 1..10: note = Description of Artificial Sequence: Synthetic peptide; note = XENP020877 vhCDR3
DRPDGRAMDY

SEQ ID NO: 21259 - protein, 213 aa, synthetic construct; identical to SEQ ID NO: 21050
  source 1..213: note = Description of Artificial Sequence: Synthetic polypeptide; note = XENP020877 9C6_H1.6_L1_anti-BTLA_IgG1_PVA_/S267K Light Chain

SEQ ID NO: 21260 - protein, 106 aa, synthetic construct; identical to SEQ ID NO: 21051
  source 1..106: note = Description of Artificial Sequence: Synthetic polypeptide; note = VL of XENP020877

SEQ ID NO: 21261 - protein, 11 aa, synthetic construct
  source 1..11: note = Description of Artificial Sequence: Synthetic peptide; note = XENP020877 vlCDR1
KASQSVSNDVA

SEQ ID NO: 21262 - protein, 7 aa, synthetic construct
  source 1..7: note = Description of Artificial Sequence: Synthetic peptide; note = XENP020877 vlCDR2
YASNRYT

SEQ ID NO: 21263 - protein, 8 aa, synthetic construct
  source 1..8: note = Description of Artificial Sequence: Synthetic peptide; note = XENP020877 vlCDR3
QQDYSSPT

SEQ ID NO: 21264 - protein, 447 aa, synthetic construct
  source 1..447: note = Description of Artificial Sequence: Synthetic polypeptide; note = XENP020878 9C6_H1.7_L1_anti-BTLA_IgG1_PVA_/S267K Heavy Chain
QVQLVQSGAEVKKPGASVKVSCKVSGFSLTGYGVNWVRQAPGQGLEWLGMIWIDGSTDYNSKFQGRVTMTKDNSKSTVYMELSSLRSEDTAVYYCARDRPDGRAMDYWGQGTMVTVSSASTKGPSVFPLAPSSKSTSGGTAALGCLVKDYFPEPVTVSWNSGALTSGVHTFPAVLQSSGLYSLSSVVTVPSSSLGTQTYICNVNHKPSNTKVDKKVEPKSCDKTHTCPPCPAPPVAGPSVFLFPPKPKDTLMISRTPEVTCVVVDVKHEDPEVKFNWYVDGVEVHNAKTKPREEQYNSTYRVVSVLTVLHQDWLNGKEYKCKVSNKALPAPIEKTISKAKGQPREPQVYTLPPSREEMTKNQVSLTCLVKGFYPSDIAVEWESNGQPENNYKTTPPVLDSDGSFFLYSKLTVDKSRWQQGNVFSCSVMHEALHNHYTQKSLSLSPGK

SEQ ID NO: 21265 - protein, 118 aa, synthetic construct
  source 1..118: note = Description of Artificial Sequence: Synthetic polypeptide; note = VH of XENP020878
QVQLVQSGAEVKKPGASVKVSCKVSGFSLTGYGVNWVRQAPGQGLEWLGMIWIDGSTDYNSKFQGRVTMTKDNSKSTVYMELSSLRSEDTAVYYCARDRPDGRAMDYWGQGTMVTVSS

SEQ ID NO: 21266 - protein, 5 aa, synthetic construct
  source 1..5: note = Description of Artificial Sequence: Synthetic peptide; note = XENP020878 vhCDR1
GYGVN

SEQ ID NO: 21267 - protein, 16 aa, synthetic construct
  source 1..16: note = Description of Artificial Sequence: Synthetic peptide; note = XENP020878 vhCDR2
MIWIDGSTDYNSKFQG

SEQ ID NO: 21268 - protein, 10 aa, synthetic construct
  source 1..10: note = Description of Artificial Sequence: Synthetic peptide; note = XENP020878 vhCDR3
DRPDGRAMDY

SEQ ID NO: 21269 - protein, 213 aa, synthetic construct; identical to SEQ ID NO: 21050
  source 1..213: note = Description of Artificial Sequence: Synthetic polypeptide; note = XENP020878 9C6_H1.7_L1_anti-BTLA_IgG1_PVA_/S267K Light Chain

SEQ ID NO: 21270 - protein, 106 aa, synthetic construct; identical to SEQ ID NO: 21051
  source 1..106: note = Description of Artificial Sequence: Synthetic polypeptide; note = VL of XENP020878

SEQ ID NO: 21271 - protein, 11 aa, synthetic construct
  source 1..11: note = Description of Artificial Sequence: Synthetic peptide; note = XENP020878 vlCDR1
KASQSVSNDVA

SEQ ID NO: 21272 - protein, 7 aa, synthetic construct
  source 1..7: note = Description of Artificial Sequence: Synthetic peptide; note = XENP020878 vlCDR2
YASNRYT

SEQ ID NO: 21273 - protein, 8 aa, synthetic construct
  source 1..8: note = Description of Artificial Sequence: Synthetic peptide; note = XENP020878 vlCDR3
QQDYSSPT

SEQ ID NO: 21274 - protein, 447 aa, synthetic construct
  source 1..447: note = Description of Artificial Sequence: Synthetic polypeptide; note = XENP020879 9C6_H1.8_L1_anti-BTLA_IgG1_PVA_/S267K Heavy Chain
QVQLVQSGAEVKKPGASVKVSCKVSGFSLTGYGVNWVRQAPGQGLEWMGMIWIDGSTDYNSAFQGRVTMTKDNSKSTVYMELSSLRSEDTAVYYCARDRPDGRAMDYWGQGTMVTVSSASTKGPSVFPLAPSSKSTSGGTAALGCLVKDYFPEPVTVSWNSGALTSGVHTFPAVLQSSGLYSLSSVVTVPSSSLGTQTYICNVNHKPSNTKVDKKVEPKSCDKTHTCPPCPAPPVAGPSVFLFPPKPKDTLMISRTPEVTCVVVDVKHEDPEVKFNWYVDGVEVHNAKTKPREEQYNSTYRVVSVLTVLHQDWLNGKEYKCKVSNKALPAPIEKTISKAKGQPREPQVYTLPPSREEMTKNQVSLTCLVKGFYPSDIAVEWESNGQPENNYKTTPPVLDSDGSFFLYSKLTVDKSRWQQGNVFSCSVMHEALHNHYTQKSLSLSPGK

SEQ ID NO: 21275 - protein, 118 aa, synthetic construct
  source 1..118: note = Description of Artificial Sequence: Synthetic polypeptide; note = VH of XENP020879
QVQLVQSGAEVKKPGASVKVSCKVSGFSLTGYGVNWVRQAPGQGLEWMGMIWIDGSTDYNSAFQGRVTMTKDNSKSTVYMELSSLRSEDTAVYYCARDRPDGRAMDYWGQGTMVTVSS

SEQ ID NO: 21276 - protein, 5 aa, synthetic construct
  source 1..5: note = Description of Artificial Sequence: Synthetic peptide; note = XENP020879 vhCDR1
GYGVN

SEQ ID NO: 21277 - protein, 16 aa, synthetic construct
  source 1..16: note = Description of Artificial Sequence: Synthetic peptide; note = XENP020879 vhCDR2
MIWIDGSTDYNSAFQG

SEQ ID NO: 21278 - protein, 10 aa, synthetic construct
  source 1..10: note = Description of Artificial Sequence: Synthetic peptide; note = XENP020879 vhCDR3
DRPDGRAMDY

SEQ ID NO: 21279 - protein, 213 aa, synthetic construct; identical to SEQ ID NO: 21050
  source 1..213: note = Description of Artificial Sequence: Synthetic polypeptide; note = XENP020879 9C6_H1.8_L1_anti-BTLA_IgG1_PVA_/S267K Light Chain

SEQ ID NO: 21280 - protein, 106 aa, synthetic construct; identical to SEQ ID NO: 21051
  source 1..106: note = Description of Artificial Sequence: Synthetic polypeptide; note = VL of XENP020879

SEQ ID NO: 21281 - protein, 11 aa, synthetic construct
  source 1..11: note = Description of Artificial Sequence: Synthetic peptide; note = XENP020879 vlCDR1
KASQSVSNDVA

SEQ ID NO: 21282 - protein, 7 aa, synthetic construct
  source 1..7: note = Description of Artificial Sequence: Synthetic peptide; note = XENP020879 vlCDR2
YASNRYT

SEQ ID NO: 21283 - protein, 8 aa, synthetic construct
  source 1..8: note = Description of Artificial Sequence: Synthetic peptide; note = XENP020879 vlCDR3
QQDYSSPT

SEQ ID NO: 21284 - protein, 447 aa, synthetic construct
  source 1..447: note = Description of Artificial Sequence: Synthetic polypeptide; note = XENP020880 9C6_H1.9_L1_anti-BTLA_IgG1_PVA_/S267K Heavy Chain
QVQLVQSGAEVKKPGASVKVSCKVSGFSLTGYGVNWVRQAPGQGLEWMGMIWIDGSTDYNSALKSRVTMTKDNSKSTVYMELSSLRSEDTAVYYCARDRPDGRAMDYWGQGTMVTVSSASTKGPSVFPLAPSSKSTSGGTAALGCLVKDYFPEPVTVSWNSGALTSGVHTFPAVLQSSGLYSLSSVVTVPSSSLGTQTYICNVNHKPSNTKVDKKVEPKSCDKTHTCPPCPAPPVAGPSVFLFPPKPKDTLMISRTPEVTCVVVDVKHEDPEVKFNWYVDGVEVHNAKTKPREEQYNSTYRVVSVLTVLHQDWLNGKEYKCKVSNKALPAPIEKTISKAKGQPREPQVYTLPPSREEMTKNQVSLTCLVKGFYPSDIAVEWESNGQPENNYKTTPPVLDSDGSFFLYSKLTVDKSRWQQGNVFSCSVMHEALHNHYTQKSLSLSPGK

SEQ ID NO: 21285 - protein, 118 aa, synthetic construct
  source 1..118: note = Description of Artificial Sequence: Synthetic polypeptide; note = VH of XENP020880
QVQLVQSGAEVKKPGASVKVSCKVSGFSLTGYGVNWVRQAPGQGLEWMGMIWIDGSTDYNSALKSRVTMTKDNSKSTVYMELSSLRSEDTAVYYCARDRPDGRAMDYWGQGTMVTVSS

SEQ ID NO: 21286 - protein, 5 aa, synthetic construct
  source 1..5: note = Description of Artificial Sequence: Synthetic peptide; note = XENP020880 vhCDR1
GYGVN

SEQ ID NO: 21287 - protein, 16 aa, synthetic construct
  source 1..16: note = Description of Artificial Sequence: Synthetic peptide; note = XENP020880 vhCDR2
MIWIDGSTDYNSALKS

SEQ ID NO: 21288 - protein, 10 aa, synthetic construct
  source 1..10: note = Description of Artificial Sequence: Synthetic peptide; note = XENP020880 vhCDR3
DRPDGRAMDY

SEQ ID NO: 21289 - protein, 213 aa, synthetic construct; identical to SEQ ID NO: 21050
  source 1..213: note = Description of Artificial Sequence: Synthetic polypeptide; note = XENP020880 9C6_H1.9_L1_anti-BTLA_IgG1_PVA_/S267K Light Chain

SEQ ID NO: 21290 - protein, 106 aa, synthetic construct; identical to SEQ ID NO: 21051
  source 1..106: note = Description of Artificial Sequence: Synthetic polypeptide; note = VL of XENP020880

SEQ ID NO: 21291 - protein, 11 aa, synthetic construct
  source 1..11: note = Description of Artificial Sequence: Synthetic peptide; note = XENP020880 vlCDR1
KASQSVSNDVA

SEQ ID NO: 21292 - protein, 7 aa, synthetic construct
  source 1..7: note = Description of Artificial Sequence: Synthetic peptide; note = XENP020880 vlCDR2
YASNRYT

SEQ ID NO: 21293 - protein, 8 aa, synthetic construct
  source 1..8: note = Description of Artificial Sequence: Synthetic peptide; note = XENP020880 vlCDR3
QQDYSSPT

SEQ ID NO: 21294 - protein, 447 aa, synthetic construct
  source 1..447: note = Description of Artificial Sequence: Synthetic polypeptide; note = XENP020881 9C6_H1.10_L1_anti-BTLA_IgG1_PVA_/S267K Heavy Chain
QVQLVQSGAEVKKPGASVKVSCKVSGFSLTGYGVNWVRQAPGQGLEWMGMIWIDGSTDYNSKFKGRVTMTKDNSKSTVYMELSSLRSEDTAVYYCARDRPDGRAMDYWGQGTMVTVSSASTKGPSVFPLAPSSKSTSGGTAALGCLVKDYFPEPVTVSWNSGALTSGVHTFPAVLQSSGLYSLSSVVTVPSSSLGTQTYICNVNHKPSNTKVDKKVEPKSCDKTHTCPPCPAPPVAGPSVFLFPPKPKDTLMISRTPEVTCVVVDVKHEDPEVKFNWYVDGVEVHNAKTKPREEQYNSTYRVVSVLTVLHQDWLNGKEYKCKVSNKALPAPIEKTISKAKGQPREPQVYTLPPSREEMTKNQVSLTCLVKGFYPSDIAVEWESNGQPENNYKTTPPVLDSDGSFFLYSKLTVDKSRWQQGNVFSCSVMHEALHNHYTQKSLSLSPGK

SEQ ID NO: 21295 - protein, 118 aa, synthetic construct
  source 1..118: note = Description of Artificial Sequence: Synthetic polypeptide; note = VH of XENP020881
QVQLVQSGAEVKKPGASVKVSCKVSGFSLTGYGVNWVRQAPGQGLEWMGMIWIDGSTDYNSKFKGRVTMTKDNSKSTVYMELSSLRSEDTAVYYCARDRPDGRAMDYWGQGTMVTVSS

SEQ ID NO: 21296 - protein, 5 aa, synthetic construct
  source 1..5: note = Description of Artificial Sequence: Synthetic peptide; note = XENP020881 vhCDR1
GYGVN

SEQ ID NO: 21297 - protein, 16 aa, synthetic construct
  source 1..16: note = Description of Artificial Sequence: Synthetic peptide; note = XENP020881 vhCDR2
MIWIDGSTDYNSKFKG

SEQ ID NO: 21298 - protein, 10 aa, synthetic construct
  source 1..10: note = Description of Artificial Sequence: Synthetic peptide; note = XENP020881 vhCDR3
DRPDGRAMDY

SEQ ID NO: 21299 - protein, 213 aa, synthetic construct; identical to SEQ ID NO: 21050
  source 1..213: note = Description of Artificial Sequence: Synthetic polypeptide; note = XENP020881 9C6_H1.10_L1_anti-BTLA_IgG1_PVA_/S267K Light Chain

SEQ ID NO: 21300 - protein, 106 aa, synthetic construct; identical to SEQ ID NO: 21051
  source 1..106: note = Description of Artificial Sequence: Synthetic polypeptide; note = VL of XENP020881

SEQ ID NO: 21301 - protein, 11 aa, synthetic construct
  source 1..11: note = Description of Artificial Sequence: Synthetic peptide; note = XENP020881 vlCDR1
KASQSVSNDVA

SEQ ID NO: 21302 - protein, 7 aa, synthetic construct
  source 1..7: note = Description of Artificial Sequence: Synthetic peptide; note = XENP020881 vlCDR2
YASNRYT

SEQ ID NO: 21303 - protein, 8 aa, synthetic construct
  source 1..8: note = Description of Artificial Sequence: Synthetic peptide; note = XENP020881 vlCDR3
QQDYSSPT

SEQ ID NO: 21304 - protein, 447 aa, synthetic construct
  source 1..447: note = Description of Artificial Sequence: Synthetic polypeptide; note = XENP020882 9C6_H1.11_L1_anti-BTLA_IgG1_PVA_/S267K Heavy Chain
QVQLVQSGAEVKKPGASVKVSCKVSGFSLTGYGVNWVRQAPGQGLEWMGMIWIDGSTDYNSKFQGRLSINKDNSKSTVYMELSSLRSEDTAVYYCARDRPDGRAMDYWGQGTMVTVSSASTKGPSVFPLAPSSKSTSGGTAALGCLVKDYFPEPVTVSWNSGALTSGVHTFPAVLQSSGLYSLSSVVTVPSSSLGTQTYICNVNHKPSNTKVDKKVEPKSCDKTHTCPPCPAPPVAGPSVFLFPPKPKDTLMISRTPEVTCVVVDVKHEDPEVKFNWYVDGVEVHNAKTKPREEQYNSTYRVVSVLTVLHQDWLNGKEYKCKVSNKALPAPIEKTISKAKGQPREPQVYTLPPSREEMTKNQVSLTCLVKGFYPSDIAVEWESNGQPENNYKTTPPVLDSDGSFFLYSKLTVDKSRWQQGNVFSCSVMHEALHNHYTQKSLSLSPGK

SEQ ID NO: 21305 - protein, 118 aa, synthetic construct
  source 1..118: note = Description of Artificial Sequence: Synthetic polypeptide; note = VH of XENP020882
QVQLVQSGAEVKKPGASVKVSCKVSGFSLTGYGVNWVRQAPGQGLEWMGMIWIDGSTDYNSKFQGRLSINKDNSKSTVYMELSSLRSEDTAVYYCARDRPDGRAMDYWGQGTMVTVSS

SEQ ID NO: 21306 - protein, 5 aa, synthetic construct
  source 1..5: note = Description of Artificial Sequence: Synthetic peptide; note = XENP020882 vhCDR1
GYGVN

SEQ ID NO: 21307 - protein, 16 aa, synthetic construct
  source 1..16: note = Description of Artificial Sequence: Synthetic peptide; note = XENP020882 vhCDR2
MIWIDGSTDYNSKFQG

SEQ ID NO: 21308 - protein, 10 aa, synthetic construct
  source 1..10: note = Description of Artificial Sequence: Synthetic peptide; note = XENP020882 vhCDR3
DRPDGRAMDY

SEQ ID NO: 21309 - protein, 213 aa, synthetic construct; identical to SEQ ID NO: 21050
  source 1..213: note = Description of Artificial Sequence: Synthetic polypeptide; note = XENP020882 9C6_H1.11_L1_anti-BTLA_IgG1_PVA_/S267K Light Chain

SEQ ID NO: 21310 - protein, 106 aa, synthetic construct; identical to SEQ ID NO: 21051
  source 1..106: note = Description of Artificial Sequence: Synthetic polypeptide; note = VL of XENP020882

SEQ ID NO: 21311 - protein, 11 aa, synthetic construct
  source 1..11: note = Description of Artificial Sequence: Synthetic peptide; note = XENP020882 vlCDR1
KASQSVSNDVA

SEQ ID NO: 21312 - protein, 7 aa, synthetic construct
  source 1..7: note = Description of Artificial Sequence: Synthetic peptide; note = XENP020882 vlCDR2
YASNRYT

SEQ ID NO: 21313 - protein, 8 aa, synthetic construct
  source 1..8: note = Description of Artificial Sequence: Synthetic peptide; note = XENP020882 vlCDR3
QQDYSSPT

SEQ ID NO: 21314 - protein, 447 aa, synthetic construct
  source 1..447: note = Description of Artificial Sequence: Synthetic polypeptide; note = XENP020883 9C6_H1.12_L1_anti-BTLA_IgG1_PVA_/S267K Heavy Chain
QVQLVQSGAEVKKPGASVKVSCKVSGFSLTGYGVNWVRQAPGQGLEWMGMIWIDGSTDYNSKFQGRVTMTKDNSKSQVYMELSSLRSEDTAVYYCARDRPDGRAMDYWGQGTMVTVSSASTKGPSVFPLAPSSKSTSGGTAALGCLVKDYFPEPVTVSWNSGALTSGVHTFPAVLQSSGLYSLSSVVTVPSSSLGTQTYICNVNHKPSNTKVDKKVEPKSCDKTHTCPPCPAPPVAGPSVFLFPPKPKDTLMISRTPEVTCVVVDVKHEDPEVKFNWYVDGVEVHNAKTKPREEQYNSTYRVVSVLTVLHQDWLNGKEYKCKVSNKALPAPIEKTISKAKGQPREPQVYTLPPSREEMTKNQVSLTCLVKGFYPSDIAVEWESNGQPENNYKTTPPVLDSDGSFFLYSKLTVDKSRWQQGNVFSCSVMHEALHNHYTQKSLSLSPGK

SEQ ID NO: 21315 - protein, 118 aa, synthetic construct
  source 1..118: note = Description of Artificial Sequence: Synthetic polypeptide; note = VH of XENP020883
QVQLVQSGAEVKKPGASVKVSCKVSGFSLTGYGVNWVRQAPGQGLEWMGMIWIDGSTDYNSKFQGRVTMTKDNSKSQVYMELSSLRSEDTAVYYCARDRPDGRAMDYWGQGTMVTVSS

SEQ ID NO: 21316 - protein, 5 aa, synthetic construct
  source 1..5: note = Description of Artificial Sequence: Synthetic peptide; note = XENP020883 vhCDR1
GYGVN

SEQ ID NO: 21317 - protein, 16 aa, synthetic construct
  source 1..16: note = Description of Artificial Sequence: Synthetic peptide; note = XENP020883 vhCDR2
MIWIDGSTDYNSKFQG

SEQ ID NO: 21318 - protein, 10 aa, synthetic construct
  source 1..10: note = Description of Artificial Sequence: Synthetic peptide; note = XENP020883 vhCDR3
DRPDGRAMDY

SEQ ID NO: 21319 - protein, 213 aa, synthetic construct; identical to SEQ ID NO: 21050
  source 1..213: note = Description of Artificial Sequence: Synthetic polypeptide; note = XENP020883 9C6_H1.12_L1_anti-BTLA_IgG1_PVA_/S267K Light Chain

SEQ ID NO: 21320 - protein, 106 aa, synthetic construct; identical to SEQ ID NO: 21051
  source 1..106: note = Description of Artificial Sequence: Synthetic polypeptide; note = VL of XENP020883

SEQ ID NO: 21321 - protein, 11 aa, synthetic construct
  source 1..11: note = Description of Artificial Sequence: Synthetic peptide; note = XENP020883 vlCDR1
KASQSVSNDVA

SEQ ID NO: 21322 - protein, 7 aa, synthetic construct
  source 1..7: note = Description of Artificial Sequence: Synthetic peptide; note = XENP020883 vlCDR2
YASNRYT

SEQ ID NO: 21323 - protein, 8 aa, synthetic construct
  source 1..8: note = Description of Artificial Sequence: Synthetic peptide; note = XENP020883 vlCDR3
QQDYSSPT

SEQ ID NO: 21324 - protein, 447 aa, synthetic construct
  source 1..447: note = Description of Artificial Sequence: Synthetic polypeptide; note = XENP020884 9C6_H1.13_L1_anti-BTLA_IgG1_PVA_/S267K Heavy Chain
QVQLVQSGAEVKKPGASVKVSCKVSGFSLTGYGVNWVRQAPGQGLEWMGMIWIDGSTDYNSKFQGRVTMTKDNSKSTVFLKMNSLRSEDTAVYYCARDRPDGRAMDYWGQGTMVTVSSASTKGPSVFPLAPSSKSTSGGTAALGCLVKDYFPEPVTVSWNSGALTSGVHTFPAVLQSSGLYSLSSVVTVPSSSLGTQTYICNVNHKPSNTKVDKKVEPKSCDKTHTCPPCPAPPVAGPSVFLFPPKPKDTLMISRTPEVTCVVVDVKHEDPEVKFNWYVDGVEVHNAKTKPREEQYNSTYRVVSVLTVLHQDWLNGKEYKCKVSNKALPAPIEKTISKAKGQPREPQVYTLPPSREEMTKNQVSLTCLVKGFYPSDIAVEWESNGQPENNYKTTPPVLDSDGSFFLYSKLTVDKSRWQQGNVFSCSVMHEALHNHYTQKSLSLSPGK

SEQ ID NO: 21325 - protein, 118 aa, synthetic construct
  source 1..118: note = Description of Artificial Sequence: Synthetic polypeptide; note = VH of XENP020884
QVQLVQSGAEVKKPGASVKVSCKVSGFSLTGYGVNWVRQAPGQGLEWMGMIWIDGSTDYNSKFQGRVTMTKDNSKSTVFLKMNSLRSEDTAVYYCARDRPDGRAMDYWGQGTMVTVSS

SEQ ID NO: 21326 - protein, 5 aa, synthetic construct
  source 1..5: note = Description of Artificial Sequence: Synthetic peptide; note = XENP020884 vhCDR1
GYGVN

SEQ ID NO: 21327 - protein, 16 aa, synthetic construct
  source 1..16: note = Description of Artificial Sequence: Synthetic peptide; note = XENP020884 vhCDR2
MIWIDGSTDYNSKFQG

SEQ ID NO: 21328 - protein, 10 aa, synthetic construct
  source 1..10: note = Description of Artificial Sequence: Synthetic peptide; note = XENP020884 vhCDR3
DRPDGRAMDY

SEQ ID NO: 21329 - protein, 213 aa, synthetic construct; identical to SEQ ID NO: 21050
  source 1..213: note = Description of Artificial Sequence: Synthetic polypeptide; note = XENP020884 9C6_H1.13_L1_anti-BTLA_IgG1_PVA_/S267K Light Chain

SEQ ID NO: 21330 - protein, 106 aa, synthetic construct; identical to SEQ ID NO: 21051
  source 1..106: note = Description of Artificial Sequence: Synthetic polypeptide; note = VL of XENP020884

SEQ ID NO: 21331 - protein, 11 aa, synthetic construct
  source 1..11: note = Description of Artificial Sequence: Synthetic peptide; note = XENP020884 vlCDR1
KASQSVSNDVA

SEQ ID NO: 21332 - protein, 7 aa, synthetic construct
  source 1..7: note = Description of Artificial Sequence: Synthetic peptide; note = XENP020884 vlCDR2
YASNRYT

SEQ ID NO: 21333 - protein, 8 aa, synthetic construct
  source 1..8: note = Description of Artificial Sequence: Synthetic peptide; note = XENP020884 vlCDR3
QQDYSSPT

SEQ ID NO: 21334 - protein, 447 aa, synthetic construct
  source 1..447: note = Description of Artificial Sequence: Synthetic polypeptide; note = XENP020885 9C6_H1.14_L1_anti-BTLA_IgG1_PVA_/S267K Heavy Chain
QVQLVQSGAEVKKPGASVKVSCKVSGFSLTGYGVNWVRQAPGQGLEWMGMIWIDGSTDYNSKFQGRVTMTKDNSKSTVYMELSSLQTDDTAVYYCARDRPDGRAMDYWGQGTMVTVSSASTKGPSVFPLAPSSKSTSGGTAALGCLVKDYFPEPVTVSWNSGALTSGVHTFPAVLQSSGLYSLSSVVTVPSSSLGTQTYICNVNHKPSNTKVDKKVEPKSCDKTHTCPPCPAPPVAGPSVFLFPPKPKDTLMISRTPEVTCVVVDVKHEDPEVKFNWYVDGVEVHNAKTKPREEQYNSTYRVVSVLTVLHQDWLNGKEYKCKVSNKALPAPIEKTISKAKGQPREPQVYTLPPSREEMTKNQVSLTCLVKGFYPSDIAVEWESNGQPENNYKTTPPVLDSDGSFFLYSKLTVDKSRWQQGNVFSCSVMHEALHNHYTQKSLSLSPGK

SEQ ID NO: 21335 - protein, 118 aa, synthetic construct
  source 1..118: note = Description of Artificial Sequence: Synthetic polypeptide; note = VH of XENP020885
QVQLVQSGAEVKKPGASVKVSCKVSGFSLTGYGVNWVRQAPGQGLEWMGMIWIDGSTDYNSKFQGRVTMTKDNSKSTVYMELSSLQTDDTAVYYCARDRPDGRAMDYWGQGTMVTVSS

SEQ ID NO: 21336 - protein, 5 aa, synthetic construct
  source 1..5: note = Description of Artificial Sequence: Synthetic peptide; note = XENP020885 vhCDR1
GYGVN

SEQ ID NO: 21337 - protein, 16 aa, synthetic construct
  source 1..16: note = Description of Artificial Sequence: Synthetic peptide; note = XENP020885 vhCDR2
MIWIDGSTDYNSKFQG

SEQ ID NO: 21338 - protein, 10 aa, synthetic construct
  source 1..10: note = Description of Artificial Sequence: Synthetic peptide; note = XENP020885 vhCDR3
DRPDGRAMDY

SEQ ID NO: 21339 - protein, 213 aa, synthetic construct; identical to SEQ ID NO: 21050
  source 1..213: note = Description of Artificial Sequence: Synthetic polypeptide; note = XENP020885 9C6_H1.14_L1_anti-BTLA_IgG1_PVA_/S267K Light Chain

SEQ ID NO: 21340 - protein, 106 aa, synthetic construct; identical to SEQ ID NO: 21051
  source 1..106: note = Description of Artificial Sequence: Synthetic polypeptide; note = VL of XENP020885

SEQ ID NO: 21341 - protein, 11 aa, synthetic construct
  source 1..11: note = Description of Artificial Sequence: Synthetic peptide; note = XENP020885 vlCDR1
KASQSVSNDVA

SEQ ID NO: 21342 - protein, 7 aa, synthetic construct
  source 1..7: note = Description of Artificial Sequence: Synthetic peptide; note = XENP020885 vlCDR2
YASNRYT

SEQ ID NO: 21343 - protein, 8 aa, synthetic construct
  source 1..8: note = Description of Artificial Sequence: Synthetic peptide; note = XENP020885 vlCDR3
QQDYSSPT

SEQ ID NO: 21344 - protein, 447 aa, synthetic construct
  source 1..447: note = Description of Artificial Sequence: Synthetic polypeptide; note = XENP020886 9C6_H1.15_L1_anti-BTLA_IgG1_PVA_/S267K Heavy Chain
QVQLVQSGAEVKKPGASVKVSCKVSGFSLTGYGVNWVRQAPGQGLEWMGMIWIDGSTDYNSKFQGRVTMTKDNSKSTVYMELSSLRSEDTARYYCARDRPDGRAMDYWGQGTMVTVSSASTKGPSVFPLAPSSKSTSGGTAALGCLVKDYFPEPVTVSWNSGALTSGVHTFPAVLQSSGLYSLSSVVTVPSSSLGTQTYICNVNHKPSNTKVDKKVEPKSCDKTHTCPPCPAPPVAGPSVFLFPPKPKDTLMISRTPEVTCVVVDVKHEDPEVKFNWYVDGVEVHNAKTKPREEQYNSTYRVVSVLTVLHQDWLNGKEYKCKVSNKALPAPIEKTISKAKGQPREPQVYTLPPSREEMTKNQVSLTCLVKGFYPSDIAVEWESNGQPENNYKTTPPVLDSDGSFFLYSKLTVDKSRWQQGNVFSCSVMHEALHNHYTQKSLSLSPGK

SEQ ID NO: 21345 - protein, 118 aa, synthetic construct
  source 1..118: note = Description of Artificial Sequence: Synthetic polypeptide; note = VH of XENP020886
QVQLVQSGAEVKKPGASVKVSCKVSGFSLTGYGVNWVRQAPGQGLEWMGMIWIDGSTDYNSKFQGRVTMTKDNSKSTVYMELSSLRSEDTARYYCARDRPDGRAMDYWGQGTMVTVSS

SEQ ID NO: 21346 - protein, 5 aa, synthetic construct
  source 1..5: note = Description of Artificial Sequence: Synthetic peptide; note = XENP020886 vhCDR1
GYGVN

SEQ ID NO: 21347 - protein, 16 aa, synthetic construct
  source 1..16: note = Description of Artificial Sequence: Synthetic peptide; note = XENP020886 vhCDR2
MIWIDGSTDYNSKFQG

SEQ ID NO: 21348 - protein, 10 aa, synthetic construct
  source 1..10: note = Description of Artificial Sequence: Synthetic peptide; note = XENP020886 vhCDR3
DRPDGRAMDY

SEQ ID NO: 21349 - protein, 213 aa, synthetic construct; identical to SEQ ID NO: 21050
  source 1..213: note = Description of Artificial Sequence: Synthetic polypeptide; note = XENP020886 9C6_H1.15_L1_anti-BTLA_IgG1_PVA_/S267K Light Chain

SEQ ID NO: 21350 - protein, 106 aa, synthetic construct; identical to SEQ ID NO: 21051
  source 1..106: note = Description of Artificial Sequence: Synthetic polypeptide; note = VL of XENP020886

SEQ ID NO: 21351 - protein, 11 aa, synthetic construct
  source 1..11: note = Description of Artificial Sequence: Synthetic peptide; note = XENP020886 vlCDR1
KASQSVSNDVA

SEQ ID NO: 21352 - protein, 7 aa, synthetic construct
  source 1..7: note = Description of Artificial Sequence: Synthetic peptide; note = XENP020886 vlCDR2
YASNRYT

SEQ ID NO: 21353 - protein, 8 aa, synthetic construct
  source 1..8: note = Description of Artificial Sequence: Synthetic peptide; note = XENP020886 vlCDR3
QQDYSSPT

SEQ ID NO: 21354 - protein, 447 aa, synthetic construct
  source 1..447: note = Description of Artificial Sequence: Synthetic polypeptide; note = XENP020887 9C6_H1.16_L1_anti-BTLA_IgG1_PVA_/S267K Heavy Chain
QVQLVQSGAEVKKPGASVKVSCKVSGFSLTGYGVNWVRQAPGQGLEWMGMIWIDGSTDYNSKFQGRVTMTKDNSKSTVYMELSSLRSEDTAVYYCARDRPDGRAMDYWGQGTSVTVSSASTKGPSVFPLAPSSKSTSGGTAALGCLVKDYFPEPVTVSWNSGALTSGVHTFPAVLQSSGLYSLSSVVTVPSSSLGTQTYICNVNHKPSNTKVDKKVEPKSCDKTHTCPPCPAPPVAGPSVFLFPPKPKDTLMISRTPEVTCVVVDVKHEDPEVKFNWYVDGVEVHNAKTKPREEQYNSTYRVVSVLTVLHQDWLNGKEYKCKVSNKALPAPIEKTISKAKGQPREPQVYTLPPSREEMTKNQVSLTCLVKGFYPSDIAVEWESNGQPENNYKTTPPVLDSDGSFFLYSKLTVDKSRWQQGNVFSCSVMHEALHNHYTQKSLSLSPGK

SEQ ID NO: 21355 - protein, 118 aa, synthetic construct
  source 1..118: note = Description of Artificial Sequence: Synthetic polypeptide; note = VH of XENP020887
QVQLVQSGAEVKKPGASVKVSCKVSGFSLTGYGVNWVRQAPGQGLEWMGMIWIDGSTDYNSKFQGRVTMTKDNSKSTVYMELSSLRSEDTAVYYCARDRPDGRAMDYWGQGTSVTVSS

SEQ ID NO: 21356 - protein, 5 aa, synthetic construct
  source 1..5: note = Description of Artificial Sequence: Synthetic peptide; note = XENP020887 vhCDR1
GYGVN

SEQ ID NO: 21357 - protein, 16 aa, synthetic construct
  source 1..16: note = Description of Artificial Sequence: Synthetic peptide; note = XENP020887 vhCDR2
MIWIDGSTDYNSKFQG

SEQ ID NO: 21358 - protein, 10 aa, synthetic construct
  source 1..10: note = Description of Artificial Sequence: Synthetic peptide; note = XENP020887 vhCDR3
DRPDGRAMDY

SEQ ID NO: 21359 - protein, 213 aa, synthetic construct; identical to SEQ ID NO: 21050
  source 1..213: note = Description of Artificial Sequence: Synthetic polypeptide; note = XENP020887 9C6_H1.16_L1_anti-BTLA_IgG1_PVA_/S267K Light Chain

SEQ ID NO: 21360 - protein, 106 aa, synthetic construct; identical to SEQ ID NO: 21051
  source 1..106: note = Description of Artificial Sequence: Synthetic polypeptide; note = VL of XENP020887

SEQ ID NO: 21361 - protein, 11 aa, synthetic construct
  source 1..11: note = Description of Artificial Sequence: Synthetic peptide; note = XENP020887 vlCDR1
KASQSVSNDVA

SEQ ID NO: 21362 - protein, 7 aa, synthetic construct
  source 1..7: note = Description of Artificial Sequence: Synthetic peptide; note = XENP020887 vlCDR2
YASNRYT

SEQ ID NO: 21363 - protein, 8 aa, synthetic construct
  source 1..8: note = Description of Artificial Sequence: Synthetic peptide; note = XENP020887 vlCDR3
QQDYSSPT

SEQ ID NO: 21364 - protein, 447 aa, synthetic construct; identical to SEQ ID NO: 21065
  source 1..447: note = Description of Artificial Sequence: Synthetic polypeptide; note = XENP020888 9C6_H1_L1.1_anti-BTLA_IgG1_PVA_/S267K Heavy Chain

SEQ ID NO: 21365 - protein, 118 aa, synthetic construct; identical to SEQ ID NO: 21066
  source 1..118: note = Description of Artificial Sequence: Synthetic polypeptide; note = VH of XENP020888

SEQ ID NO: 21366 - protein, 5 aa, synthetic construct
  source 1..5: note = Description of Artificial Sequence: Synthetic peptide; note = XENP020888 vhCDR1
GYGVN

SEQ ID NO: 21367 - protein, 16 aa, synthetic construct
  source 1..16: note = Description of Artificial Sequence: Synthetic peptide; note = XENP020888 vhCDR2
MIWIDGSTDYNSKFQG

SEQ ID NO: 21368 - protein, 10 aa, synthetic construct
  source 1..10: note = Description of Artificial Sequence: Synthetic peptide; note = XENP020888 vhCDR3
DRPDGRAMDY

SEQ ID NO: 21369 - protein, 213 aa, synthetic construct
  source 1..213: note = Description of Artificial Sequence: Synthetic polypeptide; note = XENP020888 9C6_H1_L1.1_anti-BTLA_IgG1_PVA_/S267K Light Chain
SIVMTQTPDSLAVSLGERATINCKASQSVSNDVAWYQQKPGQSPKLLIYYASNRYTGVPDRFTGSGYGTDFTLTISSLQAEDVAVYFCQQDYSSPTFGGGTKLEIKRTVAAPSVFIFPPSDEQLKSGTASVVCLLNNFYPREAKVQWKVDNALQSGNSQESVTEQDSKDSTYSLSSTLTLSKADYEKHKVYACEVTHQGLSSPVTKSFNRGEC

SEQ ID NO: 21370 - protein, 106 aa, synthetic construct
  source 1..106: note = Description of Artificial Sequence: Synthetic polypeptide; note = VL of XENP020888
SIVMTQTPDSLAVSLGERATINCKASQSVSNDVAWYQQKPGQSPKLLIYYASNRYTGVPDRFTGSGYGTDFTLTISSLQAEDVAVYFCQQDYSSPTFGGGTKLEIK

SEQ ID NO: 21371 - protein, 11 aa, synthetic construct
  source 1..11: note = Description of Artificial Sequence: Synthetic peptide; note = XENP020888 vlCDR1
KASQSVSNDVA

SEQ ID NO: 21372 - protein, 7 aa, synthetic construct
  source 1..7: note = Description of Artificial Sequence: Synthetic peptide; note = XENP020888 vlCDR2
YASNRYT

SEQ ID NO: 21373 - protein, 8 aa, synthetic construct
  source 1..8: note = Description of Artificial Sequence: Synthetic peptide; note = XENP020888 vlCDR3
QQDYSSPT

SEQ ID NO: 21374 - protein, 447 aa, synthetic construct; identical to SEQ ID NO: 21065
  source 1..447: note = Description of Artificial Sequence: Synthetic polypeptide; note = XENP020889 9C6_H1_L1.2_anti-BTLA_IgG1_PVA_/S267K Heavy Chain

SEQ ID NO: 21375 - protein, 118 aa, synthetic construct; identical to SEQ ID NO: 21066
  source 1..118: note = Description of Artificial Sequence: Synthetic polypeptide; note = VH of XENP020889

SEQ ID NO: 21376 - protein, 5 aa, synthetic construct
  source 1..5: note = Description of Artificial Sequence: Synthetic peptide; note = XENP020889 vhCDR1
GYGVN

SEQ ID NO: 21377 - protein, 16 aa, synthetic construct
  source 1..16: note = Description of Artificial Sequence: Synthetic peptide; note = XENP020889 vhCDR2
MIWIDGSTDYNSKFQG

SEQ ID NO: 21378 - protein, 10 aa, synthetic construct
  source 1..10: note = Description of Artificial Sequence: Synthetic peptide; note = XENP020889 vhCDR3
DRPDGRAMDY

SEQ ID NO: 21379 - protein, 213 aa, synthetic construct
  source 1..213: note = Description of Artificial Sequence: Synthetic polypeptide; note = XENP020889 9C6_H1_L1.2_anti-BTLA_IgG1_PVA_/S267K Light Chain
SIVMTQTPKFLLVSLGERATINCKASQSVSNDVAWYQQKPGQSPKLLIYYASNRYTGVPDRFTGSGYGTDFTLTISSLQAEDVAVYFCQQDYSSPTFGGGTKLEIKRTVAAPSVFIFPPSDEQLKSGTASVVCLLNNFYPREAKVQWKVDNALQSGNSQESVTEQDSKDSTYSLSSTLTLSKADYEKHKVYACEVTHQGLSSPVTKSFNRGEC

SEQ ID NO: 21380 - protein, 106 aa, synthetic construct
  source 1..106: note = Description of Artificial Sequence: Synthetic polypeptide; note = VL of XENP020889
SIVMTQTPKFLLVSLGERATINCKASQSVSNDVAWYQQKPGQSPKLLIYYASNRYTGVPDRFTGSGYGTDFTLTISSLQAEDVAVYFCQQDYSSPTFGGGTKLEIK

SEQ ID NO: 21381 - protein, 11 aa, synthetic construct
  source 1..11: note = Description of Artificial Sequence: Synthetic peptide; note = XENP020889 vlCDR1
KASQSVSNDVA

SEQ ID NO: 21382 - protein, 7 aa, synthetic construct
  source 1..7: note = Description of Artificial Sequence: Synthetic peptide; note = XENP020889 vlCDR2
YASNRYT

SEQ ID NO: 21383 - protein, 8 aa, synthetic construct
  source 1..8: note = Description of Artificial Sequence: Synthetic peptide; note = XENP020889 vlCDR3
QQDYSSPT

SEQ ID NO: 21384 - protein, 447 aa, synthetic construct; identical to SEQ ID NO: 21065
  source 1..447: note = Description of Artificial Sequence: Synthetic polypeptide; note = XENP020890 9C6_H1_L1.3_anti-BTLA_IgG1_PVA_/S267K Heavy Chain

SEQ ID NO: 21385 - protein, 118 aa, synthetic construct; identical to SEQ ID NO: 21066
  source 1..118: note = Description of Artificial Sequence: Synthetic polypeptide; note = VH of XENP020890

SEQ ID NO: 21386 - protein, 5 aa, synthetic construct
  source 1..5: note = Description of Artificial Sequence: Synthetic peptide; note = XENP020890 vhCDR1
GYGVN

SEQ ID NO: 21387 - protein, 16 aa, synthetic construct
  source 1..16: note = Description of Artificial Sequence: Synthetic peptide; note = XENP020890 vhCDR2
MIWIDGSTDYNSKFQG

SEQ ID NO: 21388 - protein, 10 aa, synthetic construct
  source 1..10: note = Description of Artificial Sequence: Synthetic peptide; note = XENP020890 vhCDR3
DRPDGRAMDY

SEQ ID NO: 21389 - protein, 213 aa, synthetic construct
  source 1..213: note = Description of Artificial Sequence: Synthetic polypeptide; note = XENP020890 9C6_H1_L1.3_anti-BTLA_IgG1_PVA_/S267K Light Chain
SIVMTQSPDSLAVSAGDRVTINCKASQSVSNDVAWYQQKPGQSPKLLIYYASNRYTGVPDRFTGSGYGTDFTLTISSLQAEDVAVYFCQQDYSSPTFGGGTKLEIKRTVAAPSVFIFPPSDEQLKSGTASVVCLLNNFYPREAKVQWKVDNALQSGNSQESVTEQDSKDSTYSLSSTLTLSKADYEKHKVYACEVTHQGLSSPVTKSFNRGEC

SEQ ID NO: 21390 - protein, 106 aa, synthetic construct
  source 1..106: note = Description of Artificial Sequence: Synthetic polypeptide; note = VL of XENP020890
SIVMTQSPDSLAVSAGDRVTINCKASQSVSNDVAWYQQKPGQSPKLLIYYASNRYTGVPDRFTGSGYGTDFTLTISSLQAEDVAVYFCQQDYSSPTFGGGTKLEIK

SEQ ID NO: 21391 - protein, 11 aa, synthetic construct
  source 1..11: note = Description of Artificial Sequence: Synthetic peptide; note = XENP020890 vlCDR1
KASQSVSNDVA

SEQ ID NO: 21392 - protein, 7 aa, synthetic construct
  source 1..7: note = Description of Artificial Sequence: Synthetic peptide; note = XENP020890 vlCDR2
YASNRYT

SEQ ID NO: 21393 - protein, 8 aa, synthetic construct
  source 1..8: note = Description of Artificial Sequence: Synthetic peptide; note = XENP020890 vlCDR3
QQDYSSPT

SEQ ID NO: 21394 - protein, 447 aa, synthetic construct; identical to SEQ ID NO: 21065
  source 1..447: note = Description of Artificial Sequence: Synthetic polypeptide; note = XENP020891 9C6_H1_L1.4_anti-BTLA_IgG1_PVA_/S267K Heavy Chain

SEQ ID NO: 21395 - protein, 118 aa, synthetic construct; identical to SEQ ID NO: 21066
  source 1..118: note = Description of Artificial Sequence: Synthetic polypeptide; note = VH of XENP020891

SEQ ID NO: 21396 - protein, 5 aa, synthetic construct
  source 1..5: note = Description of Artificial Sequence: Synthetic peptide; note = XENP020891 vhCDR1
GYGVN

SEQ ID NO: 21397 - protein, 16 aa, synthetic construct
  source 1..16: note = Description of Artificial Sequence: Synthetic peptide; note = XENP020891 vhCDR2
MIWIDGSTDYNSKFQG

SEQ ID NO: 21398 - protein, 10 aa, synthetic construct
  source 1..10: note = Description of Artificial Sequence: Synthetic peptide; note = XENP020891 vhCDR3
DRPDGRAMDY

SEQ ID NO: 21399 - protein, 213 aa, synthetic construct
  source 1..213: note = Description of Artificial Sequence: Synthetic polypeptide; note = XENP020891 9C6_H1_L1.4_anti-BTLA_IgG1_PVA_/S267K Light Chain
SIVMTQSPDSLAVSLGERATITCKASQSVSNDVAWYQQKPGQSPKLLIYYASNRYTGVPDRFTGSGYGTDFTLTISSLQAEDVAVYFCQQDYSSPTFGGGTKLEIKRTVAAPSVFIFPPSDEQLKSGTASVVCLLNNFYPREAKVQWKVDNALQSGNSQESVTEQDSKDSTYSLSSTLTLSKADYEKHKVYACEVTHQGLSSPVTKSFNRGEC

SEQ ID NO: 21400 - protein, 106 aa, synthetic construct
  source 1..106: note = Description of Artificial Sequence: Synthetic polypeptide; note = VL of XENP020891
SIVMTQSPDSLAVSLGERATITCKASQSVSNDVAWYQQKPGQSPKLLIYYASNRYTGVPDRFTGSGYGTDFTLTISSLQAEDVAVYFCQQDYSSPTFGGGTKLEIK

SEQ ID NO: 21401 - protein, 11 aa, synthetic construct
  source 1..11: note = Description of Artificial Sequence: Synthetic peptide; note = XENP020891 vlCDR1
KASQSVSNDVA

SEQ ID NO: 21402 - protein, 7 aa, synthetic construct
  source 1..7: note = Description of Artificial Sequence: Synthetic peptide; note = XENP020891 vlCDR2
YASNRYT

SEQ ID NO: 21403 - protein, 8 aa, synthetic construct
  source 1..8: note = Description of Artificial Sequence: Synthetic peptide; note = XENP020891 vlCDR3
QQDYSSPT

SEQ ID NO: 21404 - protein, 447 aa, synthetic construct; identical to SEQ ID NO: 21065
  source 1..447: note = Description of Artificial Sequence: Synthetic polypeptide; note = XENP020892 9C6_H1_L1.5_anti-BTLA_IgG1_PVA_/S267K Heavy Chain

SEQ ID NO: 21405 - protein, 118 aa, synthetic construct; identical to SEQ ID NO: 21066
  source 1..118: note = Description of Artificial Sequence: Synthetic polypeptide; note = VH of XENP020892

SEQ ID NO: 21406 - protein, 5 aa, synthetic construct
  source 1..5: note = Description of Artificial Sequence: Synthetic peptide; note = XENP020892 vhCDR1
GYGVN

SEQ ID NO: 21407 - protein, 16 aa, synthetic construct
  source 1..16: note = Description of Artificial Sequence: Synthetic peptide; note = XENP020892 vhCDR2
MIWIDGSTDYNSKFQG

SEQ ID NO: 21408 - protein, 10 aa, synthetic construct
  source 1..10: note = Description of Artificial Sequence: Synthetic peptide; note = XENP020892 vhCDR3
DRPDGRAMDY

SEQ ID NO: 21409 - protein, 213 aa, synthetic construct
  source 1..213: note = Description of Artificial Sequence: Synthetic polypeptide; note = XENP020892 9C6_H1_L1.5_anti-BTLA_IgG1_PVA_/S267K Light Chain
SIVMTQSPDSLAVSLGERATINCKASQSVSNDVAWYQQKPGQSPKLLIYYASNRYTGVPDRFTGSGYGTDFTFTISSLQAEDVAVYFCQQDYSSPTFGGGTKLEIKRTVAAPSVFIFPPSDEQLKSGTASVVCLLNNFYPREAKVQWKVDNALQSGNSQESVTEQDSKDSTYSLSSTLTLSKADYEKHKVYACEVTHQGLSSPVTKSFNRGEC

SEQ ID NO: 21410 - protein, 106 aa, synthetic construct
  source 1..106: note = Description of Artificial Sequence: Synthetic polypeptide; note = VL of XENP020892
SIVMTQSPDSLAVSLGERATINCKASQSVSNDVAWYQQKPGQSPKLLIYYASNRYTGVPDRFTGSGYGTDFTFTISSLQAEDVAVYFCQQDYSSPTFGGGTKLEIK

SEQ ID NO: 21411 - protein, 11 aa, synthetic construct
  source 1..11: note = Description of Artificial Sequence: Synthetic peptide; note = XENP020892 vlCDR1
KASQSVSNDVA

SEQ ID NO: 21412 - protein, 7 aa, synthetic construct
  source 1..7: note = Description of Artificial Sequence: Synthetic peptide; note = XENP020892 vlCDR2
YASNRYT

SEQ ID NO: 21413 - protein, 8 aa, synthetic construct
  source 1..8: note = Description of Artificial Sequence: Synthetic peptide; note = XENP020892 vlCDR3
QQDYSSPT

SEQ ID NO: 21414 - protein, 447 aa, synthetic construct; identical to SEQ ID NO: 21065
  source 1..447: note = Description of Artificial Sequence: Synthetic polypeptide; note = XENP020893 9C6_H1_L1.6_anti-BTLA_IgG1_PVA_/S267K Heavy Chain

SEQ ID NO: 21415 - protein, 118 aa, synthetic construct; identical to SEQ ID NO: 21066
  source 1..118: note = Description of Artificial Sequence: Synthetic polypeptide; note = VH of XENP020893

SEQ ID NO: 21416 - protein, 5 aa, synthetic construct
  source 1..5: note = Description of Artificial Sequence: Synthetic peptide; note = XENP020893 vhCDR1
GYGVN

SEQ ID NO: 21417 - protein, 16 aa, synthetic construct
  source 1..16: note = Description of Artificial Sequence: Synthetic peptide; note = XENP020893 vhCDR2
MIWIDGSTDYNSKFQG

SEQ ID NO: 21418 - protein, 10 aa, synthetic construct
  source 1..10: note = Description of Artificial Sequence: Synthetic peptide; note = XENP020893 vhCDR3
DRPDGRAMDY

SEQ ID NO: 21419 - protein, 213 aa, synthetic construct
  source 1..213: note = Description of Artificial Sequence: Synthetic polypeptide; note = XENP020893 9C6_H1_L1.6_anti-BTLA_IgG1_PVA_/S267K Light Chain
SIVMTQSPDSLAVSLGERATINCKASQSVSNDVAWYQQKPGQSPKLLIYYASNRYTGVPDRFTGSGYGTDFTLTISTVQAEDVAVYFCQQDYSSPTFGGGTKLEIKRTVAAPSVFIFPPSDEQLKSGTASVVCLLNNFYPREAKVQWKVDNALQSGNSQESVTEQDSKDSTYSLSSTLTLSKADYEKHKVYACEVTHQGLSSPVTKSFNRGEC

SEQ ID NO: 21420 - protein, 106 aa, synthetic construct
  source 1..106: note = Description of Artificial Sequence: Synthetic polypeptide; note = VL of XENP020893
SIVMTQSPDSLAVSLGERATINCKASQSVSNDVAWYQQKPGQSPKLLIYYASNRYTGVPDRFTGSGYGTDFTLTISTVQAEDVAVYFCQQDYSSPTFGGGTKLEIK

SEQ ID NO: 21421 - protein, 11 aa, synthetic construct
  source 1..11: note = Description of Artificial Sequence: Synthetic peptide; note = XENP020893 vlCDR1
KASQSVSNDVA

SEQ ID NO: 21422 - protein, 7 aa, synthetic construct
  source 1..7: note = Description of Artificial Sequence: Synthetic peptide; note = XENP020893 vlCDR2
YASNRYT

SEQ ID NO: 21423 - protein, 8 aa, synthetic construct
  source 1..8: note = Description of Artificial Sequence: Synthetic peptide; note = XENP020893 vlCDR3
QQDYSSPT

SEQ ID NO: 21424 - protein, 447 aa, synthetic construct; identical to SEQ ID NO: 21065
  source 1..447: note = Description of Artificial Sequence: Synthetic polypeptide; note = XENP020894 9C6_H1_L1.7_anti-BTLA_IgG1_PVA_/S267K Heavy Chain

SEQ ID NO: 21425 - protein, 118 aa, synthetic construct; identical to SEQ ID NO: 21066
  source 1..118: note = Description of Artificial Sequence: Synthetic polypeptide; note = VH of XENP020894

SEQ ID NO: 21426 - protein, 5 aa, synthetic construct
  source 1..5: note = Description of Artificial Sequence: Synthetic peptide; note = XENP020894 vhCDR1
GYGVN

SEQ ID NO: 21427 - protein, 16 aa, synthetic construct
  source 1..16: note = Description of Artificial Sequence: Synthetic peptide; note = XENP020894 vhCDR2
MIWIDGSTDYNSKFQG

SEQ ID NO: 21428 - protein, 10 aa, synthetic construct
  source 1..10: note = Description of Artificial Sequence: Synthetic peptide; note = XENP020894 vhCDR3
DRPDGRAMDY

SEQ ID NO: 21429 - protein, 213 aa, synthetic construct
  source 1..213: note = Description of Artificial Sequence: Synthetic polypeptide; note = XENP020894 9C6_H1_L1.7_anti-BTLA_IgG1_PVA_/S267K Light Chain
SIVMTQSPDSLAVSLGERATINCKASQSVSNDVAWYQQKPGQSPKLLIYYASNRYTGVPDRFTGSGYGTDFTLTISSLQAEDLAVYFCQQDYSSPTFGGGTKLEIKRTVAAPSVFIFPPSDEQLKSGTASVVCLLNNFYPREAKVQWKVDNALQSGNSQESVTEQDSKDSTYSLSSTLTLSKADYEKHKVYACEVTHQGLSSPVTKSFNRGEC

SEQ ID NO: 21430 - protein, 106 aa, synthetic construct
  source 1..106: note = Description of Artificial Sequence: Synthetic polypeptide; note = VL of XENP020894
SIVMTQSPDSLAVSLGERATINCKASQSVSNDVAWYQQKPGQSPKLLIYYASNRYTGVPDRFTGSGYGTDFTLTISSLQAEDLAVYFCQQDYSSPTFGGGTKLEIK

SEQ ID NO: 21431 - protein, 11 aa, synthetic construct
  source 1..11: note = Description of Artificial Sequence: Synthetic peptide; note = XENP020894 vlCDR1
KASQSVSNDVA

SEQ ID NO: 21432 - protein, 7 aa, synthetic construct
  source 1..7: note = Description of Artificial Sequence: Synthetic peptide; note = XENP020894 vlCDR2
YASNRYT

SEQ ID NO: 21433 - protein, 8 aa, synthetic construct
  source 1..8: note = Description of Artificial Sequence: Synthetic peptide; note = XENP020894 vlCDR3
QQDYSSPT

SEQ ID NO: 21434 - protein, 449 aa, synthetic construct
  source 1..449: note = Description of Artificial Sequence: Synthetic polypeptide; note = XENP021208 3F6_H1L0_anti-BTLA_IgG1_PVA_/S267K Heavy Chain
QVQLQESGPGLVKPSQTLSLTCTVSGDSITSGYWNWIRKPPGKKLEYIGYLSYSGSTYYNPSLKSRVTISRDTSKNQYSLKLSSVTAADTAVYYCARYFYGSYYEAMDYWGQGTTVTVSSASTKGPSVFPLAPSSKSTSGGTAALGCLVKDYFPEPVTVSWNSGALTSGVHTFPAVLQSSGLYSLSSVVTVPSSSLGTQTYICNVNHKPSNTKVDKKVEPKSCDKTHTCPPCPAPPVAGPSVFLFPPKPKDTLMISRTPEVTCVVVDVKHEDPEVKFNWYVDGVEVHNAKTKPREEQYNSTYRVVSVLTVLHQDWLNGKEYKCKVSNKALPAPIEKTISKAKGQPREPQVYTLPPSREEMTKNQVSLTCLVKGFYPSDIAVEWESNGQPENNYKTTPPVLDSDGSFFLYSKLTVDKSRWQQGNVFSCSVMHEALHNHYTQKSLSLSPGK

SEQ ID NO: 21435 - protein, 120 aa, synthetic construct
  source 1..120: note = Description of Artificial Sequence: Synthetic polypeptide; note = VH of XENP021208
QVQLQESGPGLVKPSQTLSLTCTVSGDSITSGYWNWIRKPPGKKLEYIGYLSYSGSTYYNPSLKSRVTISRDTSKNQYSLKLSSVTAADTAVYYCARYFYGSYYEAMDYWGQGTTVTVSS

SEQ ID NO: 21436 - protein, 5 aa, synthetic construct
  source 1..5: note = Description of Artificial Sequence: Synthetic peptide; note = XENP021208 vhCDR1
SGYWN

SEQ ID NO: 21437 - protein, 16 aa, synthetic construct
  source 1..16: note = Description of Artificial Sequence: Synthetic peptide; note = XENP021208 vhCDR2
YLSYSGSTYYNPSLKS

SEQ ID NO: 21438 - protein, 12 aa, synthetic construct
  source 1..12: note = Description of Artificial Sequence: Synthetic peptide; note = XENP021208 vhCDR3
YFYGSYYEAMDY

SEQ ID NO: 21439 - protein, 214 aa, synthetic construct; identical to SEQ ID NO: 20920
  source 1..214: note = Description of Artificial Sequence: Synthetic polypeptide; note = XENP021208 3F6_H1L0_anti-BTLA_IgG1_PVA_/S267K Light Chain

SEQ ID NO: 21440 - protein, 107 aa, synthetic construct; identical to SEQ ID NO: 20921
  source 1..107: note = Description of Artificial Sequence: Synthetic polypeptide; note = VL of XENP021208

SEQ ID NO: 21441 - protein, 11 aa, synthetic construct
  source 1..11: note = Description of Artificial Sequence: Synthetic peptide; note = XENP021208 vlCDR1
RASKSISKYLA

SEQ ID NO: 21442 - protein, 7 aa, synthetic construct
  source 1..7: note = Description of Artificial Sequence: Synthetic peptide; note = XENP021208 vlCDR2
SGSTLQS

SEQ ID NO: 21443 - protein, 9 aa, synthetic construct
  source 1..9: note = Description of Artificial Sequence: Synthetic peptide; note = XENP021208 vlCDR3
QQHNEYPWT

SEQ ID NO: 21444 - protein, 449 aa, synthetic construct; identical to SEQ ID NO: 21434
  source 1..449: note = Description of Artificial Sequence: Synthetic polypeptide; note = XENP021209 3F6_H1L1_anti-BTLA_IgG1_PVA_/S267K Heavy Chain

SEQ ID NO: 21445 - protein, 120 aa, synthetic construct; identical to SEQ ID NO: 21435
  source 1..120: note = Description of Artificial Sequence: Synthetic polypeptide; note = VH of XENP021209

SEQ ID NO: 21446 - protein, 5 aa, synthetic construct
  source 1..5: note = Description of Artificial Sequence: Synthetic peptide; note = XENP021209 vhCDR1
SGYWN

SEQ ID NO: 21447 - protein, 16 aa, synthetic construct
  source 1..16: note = Description of Artificial Sequence: Synthetic peptide; note = XENP021209 vhCDR2
YLSYSGSTYYNPSLKS

SEQ ID NO: 21448 - protein, 12 aa, synthetic construct
  source 1..12: note = Description of Artificial Sequence: Synthetic peptide; note = XENP021209 vhCDR3
YFYGSYYEAMDY

SEQ ID NO: 21449 - protein, 214 aa, synthetic construct
  source 1..214: note = Description of Artificial Sequence: Synthetic polypeptide; note = XENP021209 3F6_H1L1_anti-BTLA_IgG1_PVA_/S267K Light Chain
DVQITQSPSFLSASVGDRVTITCRASKSISKYLAWYQEKPGKTNKLLIYSGSTLQSGIPSRFSGSGSGTEFTLTISSLQPEDFATYYCQQHNEYPWTFGGGTKVEIKRTVAAPSVFIFPPSDEQLKSGTASVVCLLNNFYPREAKVQWKVDNALQSGNSQESVTEQDSKDSTYSLSSTLTLSKADYEKHKVYACEVTHQGLSSPVTKSFNRGEC

SEQ ID NO: 21450 - protein, 107 aa, synthetic construct
  source 1..107: note = Description of Artificial Sequence: Synthetic polypeptide; note = VL of XENP021209
DVQITQSPSFLSASVGDRVTITCRASKSISKYLAWYQEKPGKTNKLLIYSGSTLQSGIPSRFSGSGSGTEFTLTISSLQPEDFATYYCQQHNEYPWTFGGGTKVEIK

SEQ ID NO: 21451 - protein, 11 aa, synthetic construct
  source 1..11: note = Description of Artificial Sequence: Synthetic peptide; note = XENP021209 vlCDR1
RASKSISKYLA

SEQ ID NO: 21452 - protein, 7 aa, synthetic construct
  source 1..7: note = Description of Artificial Sequence: Synthetic peptide; note = XENP021209 vlCDR2
SGSTLQS

SEQ ID NO: 21453 - protein, 9 aa, synthetic construct
  source 1..9: note = Description of Artificial Sequence: Synthetic peptide; note = XENP021209 vlCDR3
QQHNEYPWT

SEQ ID NO: 21454 - protein, 448 aa, synthetic construct; identical to SEQ ID NO: 20925
  source 1..448: note = Description of Artificial Sequence: Synthetic polypeptide; note = XENP021210 1A9_H0L1_anti-BTLA_IgG1_PVA_/S267K Heavy Chain

SEQ ID NO: 21455 - protein, 119 aa, synthetic construct; identical to SEQ ID NO: 20926
  source 1..119: note = Description of Artificial Sequence: Synthetic polypeptide; note = VH of XENP021210

SEQ ID NO: 21456 - protein, 5 aa, synthetic construct
  source 1..5: note = Description of Artificial Sequence: Synthetic peptide; note = XENP021210 vhCDR1
SFGMH

SEQ ID NO: 21457 - protein, 17 aa, synthetic construct
  source 1..17: note = Description of Artificial Sequence: Synthetic peptide; note = XENP021210 vhCDR2
YISSGISTIYYADTVKG

SEQ ID NO: 21458 - protein, 10 aa, synthetic construct
  source 1..10: note = Description of Artificial Sequence: Synthetic peptide; note = XENP021210 vhCDR3
DWLRGYAMDY

SEQ ID NO: 21459 - protein, 218 aa, synthetic construct
  source 1..218: note = Description of Artificial Sequence: Synthetic polypeptide; note = XENP021210 1A9_H0L1_anti-BTLA_IgG1_PVA_/S267K Light Chain
DIVLTQSPSSLSASVGDRVTITCRASQSIDYDGDSYMNWYQQKPGKPPKLLIYAASNLDFGIPARFSGSGSGTDFTLTISSLQPEDFATYYCQQSNEDPWTFGGGTKVEIKRTVAAPSVFIFPPSDEQLKSGTASVVCLLNNFYPREAKVQWKVDNALQSGNSQESVTEQDSKDSTYSLSSTLTLSKADYEKHKVYACEVTHQGLSSPVTKSFNRGEC

SEQ ID NO: 21460 - protein, 111 aa, synthetic construct
  source 1..111: note = Description of Artificial Sequence: Synthetic polypeptide; note = VL of XENP021210
DIVLTQSPSSLSASVGDRVTITCRASQSIDYDGDSYMNWYQQKPGKPPKLLIYAASNLDFGIPARFSGSGSGTDFTLTISSLQPEDFATYYCQQSNEDPWTFGGGTKVEIK

SEQ ID NO: 21461 - protein, 15 aa, synthetic construct
  source 1..15: note = Description of Artificial Sequence: Synthetic peptide; note = XENP021210 vlCDR1
RASQSIDYDGDSYMN

SEQ ID NO: 21462 - protein, 7 aa, synthetic construct
  source 1..7: note = Description of Artificial Sequence: Synthetic peptide; note = XENP021210 vlCDR2
AASNLDF

SEQ ID NO: 21463 - protein, 9 aa, synthetic construct
  source 1..9: note = Description of Artificial Sequence: Synthetic peptide; note = XENP021210 vlCDR3
QQSNEDPWT

SEQ ID NO: 21464 - protein, 448 aa, synthetic construct
  source 1..448: note = Description of Artificial Sequence: Synthetic polypeptide; note = XENP021211 1A9_H1L0_anti-BTLA_IgG1_PVA_/S267K Heavy Chain
EVQLVESGGGLVQPGGSLRLSCAASGFTFSSFGMHWVRQAPGKGLEWVSYISSGISTIYYADSVKGRFTISRDNSKNTLYLQMNSLRAEDTAVYYCARDWLRGYAMDYWGQGTTVTVSSASTKGPSVFPLAPSSKSTSGGTAALGCLVKDYFPEPVTVSWNSGALTSGVHTFPAVLQSSGLYSLSSVVTVPSSSLGTQTYICNVNHKPSNTKVDKKVEPKSCDKTHTCPPCPAPPVAGPSVFLFPPKPKDTLMISRTPEVTCVVVDVKHEDPEVKFNWYVDGVEVHNAKTKPREEQYNSTYRVVSVLTVLHQDWLNGKEYKCKVSNKALPAPIEKTISKAKGQPREPQVYTLPPSREEMTKNQVSLTCLVKGFYPSDIAVEWESNGQPENNYKTTPPVLDSDGSFFLYSKLTVDKSRWQQGNVFSCSVMHEALHNHYTQKSLSLSPGK

SEQ ID NO: 21465 - protein, 119 aa, synthetic construct
  source 1..119: note = Description of Artificial Sequence: Synthetic polypeptide; note = VH of XENP021211
EVQLVESGGGLVQPGGSLRLSCAASGFTFSSFGMHWVRQAPGKGLEWVSYISSGISTIYYADSVKGRFTISRDNSKNTLYLQMNSLRAEDTAVYYCARDWLRGYAMDYWGQGTTVTVSS

SEQ ID NO: 21466 - protein, 5 aa, synthetic construct
  source 1..5: note = Description of Artificial Sequence: Synthetic peptide; note = XENP021211 vhCDR1
SFGMH

SEQ ID NO: 21467 - protein, 17 aa, synthetic construct
  source 1..17: note = Description of Artificial Sequence: Synthetic peptide; note = XENP021211 vhCDR2
YISSGISTIYYADSVKG

SEQ ID NO: 21468 - protein, 10 aa, synthetic construct
  source 1..10: note = Description of Artificial Sequence: Synthetic peptide; note = XENP021211 vhCDR3
DWLRGYAMDY

SEQ ID NO: 21469 - protein, 218 aa, synthetic construct; identical to SEQ ID NO: 20930
  source 1..218: note = Description of Artificial Sequence: Synthetic polypeptide; note = XENP021211 1A9_H1L0_anti-BTLA_IgG1_PVA_/S267K Light Chain

SEQ ID NO: 21470 - protein, 111 aa, synthetic construct; identical to SEQ ID NO: 20931
  source 1..111: note = Description of Artificial Sequence: Synthetic polypeptide; note = VL of XENP021211

SEQ ID NO: 21471 - protein, 15 aa, synthetic construct
  source 1..15: note = Description of Artificial Sequence: Synthetic peptide; note = XENP021211 vlCDR1
KASQSIDYDGDSYMN

SEQ ID NO: 21472 - protein, 7 aa, synthetic construct
  source 1..7: note = Description of Artificial Sequence: Synthetic peptide; note = XENP021211 vlCDR2
AASNLDF

SEQ ID NO: 21473 - protein, 9 aa, synthetic construct
  source 1..9: note = Description of Artificial Sequence: Synthetic peptide; note = XENP021211 vlCDR3
QQSNEDPWT

SEQ ID NO: 21474 - protein, 448 aa, synthetic construct; identical to SEQ ID NO: 21464
  source 1..448: note = Description of Artificial Sequence: Synthetic polypeptide; note = XENP021212 1A9_H1L1_anti-BTLA_IgG1_PVA_/S267K Heavy Chain

SEQ ID NO: 21475 - protein, 119 aa, synthetic construct; identical to SEQ ID NO: 21465
  source 1..119: note = Description of Artificial Sequence: Synthetic polypeptide; note = VH of XENP021212

SEQ ID NO: 21476 - protein, 5 aa, synthetic construct
  source 1..5: note = Description of Artificial Sequence: Synthetic peptide; note = XENP021212 vhCDR1
SFGMH

SEQ ID NO: 21477 - protein, 17 aa, synthetic construct
  source 1..17: note = Description of Artificial Sequence: Synthetic peptide; note = XENP021212 vhCDR2
YISSGISTIYYADSVKG

SEQ ID NO: 21478 - protein, 10 aa, synthetic construct
  source 1..10: note = Description of Artificial Sequence: Synthetic peptide; note = XENP021212 vhCDR3
DWLRGYAMDY

SEQ ID NO: 21479 - protein, 218 aa, synthetic construct; identical to SEQ ID NO: 21459
  source 1..218: note = Description of Artificial Sequence: Synthetic polypeptide; note = XENP021212 1A9_H1L1_anti-BTLA_IgG1_PVA_/S267K Light Chain

SEQ ID NO: 21480 - protein, 111 aa, synthetic construct; identical to SEQ ID NO: 21460
  source 1..111: note = Description of Artificial Sequence: Synthetic polypeptide; note = VL of XENP021212

SEQ ID NO: 21481 - protein, 15 aa, synthetic construct
  source 1..15: note = Description of Artificial Sequence: Synthetic peptide; note = XENP021212 vlCDR1
RASQSIDYDGDSYMN

SEQ ID NO: 21482 - protein, 7 aa, synthetic construct
  source 1..7: note = Description of Artificial Sequence: Synthetic peptide; note = XENP021212 vlCDR2
AASNLDF

SEQ ID NO: 21483 - protein, 9 aa, synthetic construct
  source 1..9: note = Description of Artificial Sequence: Synthetic peptide; note = XENP021212 vlCDR3
QQSNEDPWT

SEQ ID NO: 21484 - protein, 448 aa, synthetic construct; identical to SEQ ID NO: 21464
  source 1..448: note = Description of Artificial Sequence: Synthetic polypeptide; note = XENP021213 1A9_H1L2_anti-BTLA_IgG1_PVA_/S267K Heavy Chain

SEQ ID NO: 21485 - protein, 119 aa, synthetic construct; identical to SEQ ID NO: 21465
  source 1..119: note = Description of Artificial Sequence: Synthetic polypeptide; note = VH of XENP021213

SEQ ID NO: 21486 - protein, 5 aa, synthetic construct
  source 1..5: note = Description of Artificial Sequence: Synthetic peptide; note = XENP021213 vhCDR1
SFGMH

SEQ ID NO: 21487 - protein, 17 aa, synthetic construct
  source 1..17: note = Description of Artificial Sequence: Synthetic peptide; note = XENP021213 vhCDR2
YISSGISTIYYADSVKG

SEQ ID NO: 21488 - protein, 10 aa, synthetic construct
  source 1..10: note = Description of Artificial Sequence: Synthetic peptide; note = XENP021213 vhCDR3
DWLRGYAMDY

SEQ ID NO: 21489 - protein, 218 aa, synthetic construct
  source 1..218: note = Description of Artificial Sequence: Synthetic polypeptide; note = XENP021213 1A9_H1L2_anti-BTLA_IgG1_PVA_/S267K Light Chain
DIVLTQSPATLSVSPGERATLSCRASQSIDYDGDSYMNWYQQKPGQPPRLLIYAASNLDFGIPARFSGSGSGTEFTLTISSLQSEDFAVYYCQQSNEDPWTFGGGTKVEIKRTVAAPSVFIFPPSDEQLKSGTASVVCLLNNFYPREAKVQWKVDNALQSGNSQESVTEQDSKDSTYSLSSTLTLSKADYEKHKVYACEVTHQGLSSPVTKSFNRGEC

SEQ ID NO: 21490 - protein, 111 aa, synthetic construct
  source 1..111: note = Description of Artificial Sequence: Synthetic polypeptide; note = VL of XENP021213
DIVLTQSPATLSVSPGERATLSCRASQSIDYDGDSYMNWYQQKPGQPPRLLIYAASNLDFGIPARFSGSGSGTEFTLTISSLQSEDFAVYYCQQSNEDPWTFGGGTKVEIK

SEQ ID NO: 21491 - protein, 15 aa, synthetic construct
  source 1..15: note = Description of Artificial Sequence: Synthetic peptide; note = XENP021213 vlCDR1
RASQSIDYDGDSYMN

SEQ ID NO: 21492 - protein, 7 aa, synthetic construct
  source 1..7: note = Description of Artificial Sequence: Synthetic peptide; note = XENP021213 vlCDR2
AASNLDF

SEQ ID NO: 21493 - protein, 9 aa, synthetic construct
  source 1..9: note = Description of Artificial Sequence: Synthetic peptide; note = XENP021213 vlCDR3
QQSNEDPWT

SEQ ID NO: 21494 - protein, 448 aa, synthetic construct
  source 1..448: note = Description of Artificial Sequence: Synthetic polypeptide; note = XENP021214 1A9_H2L1_anti-BTLA_IgG1_PVA_/S267K Heavy Chain
QVQLVQSGAEVKKPGASVKVSCKASGFTFSSFGMHWVRQAPGQGLEWMGYISSGISTIYYADKFQGRVTMTRDNSKNTLYMELSSLRSEDTAVYYCARDWLRGYAMDYWGQGTTVTVSSASTKGPSVFPLAPSSKSTSGGTAALGCLVKDYFPEPVTVSWNSGALTSGVHTFPAVLQSSGLYSLSSVVTVPSSSLGTQTYICNVNHKPSNTKVDKKVEPKSCDKTHTCPPCPAPPVAGPSVFLFPPKPKDTLMISRTPEVTCVVVDVKHEDPEVKFNWYVDGVEVHNAKTKPREEQYNSTYRVVSVLTVLHQDWLNGKEYKCKVSNKALPAPIEKTISKAKGQPREPQVYTLPPSREEMTKNQVSLTCLVKGFYPSDIAVEWESNGQPENNYKTTPPVLDSDGSFFLYSKLTVDKSRWQQGNVFSCSVMHEALHNHYTQKSLSLSPGK

SEQ ID NO: 21495 - protein, 119 aa, synthetic construct
  source 1..119: note = Description of Artificial Sequence: Synthetic polypeptide; note = VH of XENP021214
QVQLVQSGAEVKKPGASVKVSCKASGFTFSSFGMHWVRQAPGQGLEWMGYISSGISTIYYADKFQGRVTMTRDNSKNTLYMELSSLRSEDTAVYYCARDWLRGYAMDYWGQGTTVTVSS

SEQ ID NO: 21496 - protein, 5 aa, synthetic construct
  source 1..5: note = Description of Artificial Sequence: Synthetic peptide; note = XENP021214 vhCDR1
SFGMH

SEQ ID NO: 21497 - protein, 17 aa, synthetic construct
  source 1..17: note = Description of Artificial Sequence: Synthetic peptide; note = XENP021214 vhCDR2
YISSGISTIYYADKFQG

SEQ ID NO: 21498 - protein, 10 aa, synthetic construct
  source 1..10: note = Description of Artificial Sequence: Synthetic peptide; note = XENP021214 vhCDR3
DWLRGYAMDY

SEQ ID NO: 21499 - protein, 218 aa, synthetic construct; identical to SEQ ID NO: 21459
  source 1..218: note = Description of Artificial Sequence: Synthetic polypeptide; note = XENP021214 1A9_H2L1_anti-BTLA_IgG1_PVA_/S267K Light Chain

SEQ ID NO: 21500 - protein, 111 aa, synthetic construct; identical to SEQ ID NO: 21460
  source 1..111: note = Description of Artificial Sequence: Synthetic polypeptide; note = VL of XENP021214

SEQ ID NO: 21501 - protein, 15 aa, synthetic construct
  source 1..15: note = Description of Artificial Sequence: Synthetic peptide; note = XENP021214 vlCDR1
RASQSIDYDGDSYMN

SEQ ID NO: 21502 - protein, 7 aa, synthetic construct
  source 1..7: note = Description of Artificial Sequence: Synthetic peptide; note = XENP021214 vlCDR2
AASNLDF

SEQ ID NO: 21503 - protein, 9 aa, synthetic construct
  source 1..9: note = Description of Artificial Sequence: Synthetic peptide; note = XENP021214 vlCDR3
QQSNEDPWT

SEQ ID NO: 21504 - protein, 448 aa, synthetic construct
  source 1..448: note = Description of Artificial Sequence: Synthetic polypeptide; note = XENP019351 10A7_H0L0_IgG1_PVA_/S267K Heavy Chain
EVQLVESGGGLTQPGKSLKLSCEASGFTFSSFTMHWVRQSPGKGLEWVAFIRSGSGIVFYADAVRGRFTISRDNAKNLLFLQMNDLKSEDTAMYYCARRPLGHNTFDSWGQGTLVTVSSASTKGPSVFPLAPSSKSTSGGTAALGCLVKDYFPEPVTVSWNSGALTSGVHTFPAVLQSSGLYSLSSVVTVPSSSLGTQTYICNVNHKPSNTKVDKKVEPKSCDKTHTCPPCPAPPVAGPSVFLFPPKPKDTLMISRTPEVTCVVVDVKHEDPEVKFNWYVDGVEVHNAKTKPREEQYNSTYRVVSVLTVLHQDWLNGKEYKCKVSNKALPAPIEKTISKAKGQPREPQVYTLPPSREEMTKNQVSLTCLVKGFYPSDIAVEWESNGQPENNYKTTPPVLDSDGSFFLYSKLTVDKSRWQQGNVFSCSVMHEALHNHYTQKSLSLSPGK

SEQ ID NO: 21505 - protein, 119 aa, synthetic construct
  source 1..119: note = Description of Artificial Sequence: Synthetic polypeptide; note = VH of XENP019351
EVQLVESGGGLTQPGKSLKLSCEASGFTFSSFTMHWVRQSPGKGLEWVAFIRSGSGIVFYADAVRGRFTISRDNAKNLLFLQMNDLKSEDTAMYYCARRPLGHNTFDSWGQGTLVTVSS

SEQ ID NO: 21506 - protein, 5 aa, synthetic construct
  source 1..5: note = Description of Artificial Sequence: Synthetic peptide; note = XENP019351 vhCDR1
SFTMH

SEQ ID NO: 21507 - protein, 17 aa, synthetic construct
  source 1..17: note = Description of Artificial Sequence: Synthetic peptide; note = XENP019351 vhCDR2
FIRSGSGIVFYADAVRG

SEQ ID NO: 21508 - protein, 10 aa, synthetic construct
  source 1..10: note = Description of Artificial Sequence: Synthetic peptide; note = XENP019351 vhCDR3
RPLGHNTFDS

SEQ ID NO: 21509 - protein, 220 aa, synthetic construct
  source 1..220: note = Description of Artificial Sequence: Synthetic polypeptide; note = XENP019351 10A7_H0L0_IgG1_PVA_/S267K Light Chain
DIVMTQSPSSLAVSPGEKVTMTCKSSQSLYYSGVKENLLAWYQQKPGQSPKLLIYYASIRFTGVPDRFTGSGSGTDYTLTITSVQAEDMGQYFCQQGINNPLTFGDGTKLEIKRTVAAPSVFIFPPSDEQLKSGTASVVCLLNNFYPREAKVQWKVDNALQSGNSQESVTEQDSKDSTYSLSSTLTLSKADYEKHKVYACEVTHQGLSSPVTKSFNRGEC

SEQ ID NO: 21510 - protein, 113 aa, synthetic construct
  source 1..113: note = Description of Artificial Sequence: Synthetic polypeptide; note = VL of XENP019351
DIVMTQSPSSLAVSPGEKVTMTCKSSQSLYYSGVKENLLAWYQQKPGQSPKLLIYYASIRFTGVPDRFTGSGSGTDYTLTITSVQAEDMGQYFCQQGINNPLTFGDGTKLEIK

SEQ ID NO: 21511 - protein, 17 aa, synthetic construct
  source 1..17: note = Description of Artificial Sequence: Synthetic peptide; note = XENP019351 vlCDR1
KSSQSLYYSGVKENLLA

SEQ ID NO: 21512 - protein, 7 aa, synthetic construct
  source 1..7: note = Description of Artificial Sequence: Synthetic peptide; note = XENP019351 vlCDR2
YASIRFT

SEQ ID NO: 21513 - protein, 9 aa, synthetic construct
  source 1..9: note = Description of Artificial Sequence: Synthetic peptide; note = XENP019351 vlCDR3
QQGINNPLT

SEQ ID NO: 21514 - protein, 448 aa, synthetic construct
  source 1..448: note = Description of Artificial Sequence: Synthetic polypeptide; note = XENP019352 1F4_H0L0_IgG1_PVA_/S267K Heavy Chain
EVQLQQSGPELVKPGTSMKISCKASGYSFTGHLMNWVKQSHGKNLEWIGLIIPYNGGTSYNQKFKGKATLTVDKSSSTAYMELLSLTSDDSAVYFCSRGLRGFYAMDYWGQGTSVTVSSASTKGPSVFPLAPSSKSTSGGTAALGCLVKDYFPEPVTVSWNSGALTSGVHTFPAVLQSSGLYSLSSVVTVPSSSLGTQTYICNVNHKPSNTKVDKKVEPKSCDKTHTCPPCPAPPVAGPSVFLFPPKPKDTLMISRTPEVTCVVVDVKHEDPEVKFNWYVDGVEVHNAKTKPREEQYNSTYRVVSVLTVLHQDWLNGKEYKCKVSNKALPAPIEKTISKAKGQPREPQVYTLPPSREEMTKNQVSLTCLVKGFYPSDIAVEWESNGQPENNYKTTPPVLDSDGSFFLYSKLTVDKSRWQQGNVFSCSVMHEALHNHYTQKSLSLSPGK

SEQ ID NO: 21515 - protein, 119 aa, synthetic construct
  source 1..119: note = Description of Artificial Sequence: Synthetic polypeptide; note = VH of XENP019352
EVQLQQSGPELVKPGTSMKISCKASGYSFTGHLMNWVKQSHGKNLEWIGLIIPYNGGTSYNQKFKGKATLTVDKSSSTAYMELLSLTSDDSAVYFCSRGLRGFYAMDYWGQGTSVTVSS

SEQ ID NO: 21516 - protein, 5 aa, synthetic construct
  source 1..5: note = Description of Artificial Sequence: Synthetic peptide; note = XENP019352 vhCDR1
GHLMN

SEQ ID NO: 21517 - protein, 17 aa, synthetic construct
  source 1..17: note = Description of Artificial Sequence: Synthetic peptide; note = XENP019352 vhCDR2
LIIPYNGGTSYNQKFKG

SEQ ID NO: 21518 - protein, 10 aa, synthetic construct
  source 1..10: note = Description of Artificial Sequence: Synthetic peptide; note = XENP019352 vhCDR3
GLRGFYAMDY

SEQ ID NO: 21519 - protein, 219 aa, synthetic construct
  source 1..219: note = Description of Artificial Sequence: Synthetic polypeptide; note = XENP019352 1F4_H0L0_IgG1_PVA_/S267K Light Chain
DVVLTQTPLSLSVSFGDQVSISCRSSQSLVNSYGNTFLSWYLHKPGQSPQLLIFGISNRFSGVPDRFSGSGSGTDFTLKISTIKPEDLGMYYCLQGTHQPPTFGPGTKLEVKRTVAAPSVFIFPPSDEQLKSGTASVVCLLNNFYPREAKVQWKVDNALQSGNSQESVTEQDSKDSTYSLSSTLTLSKADYEKHKVYACEVTHQGLSSPVTKSFNRGEC

SEQ ID NO: 21520 - protein, 112 aa, synthetic construct
  source 1..112: note = Description of Artificial Sequence: Synthetic polypeptide; note = VL of XENP019352
DVVLTQTPLSLSVSFGDQVSISCRSSQSLVNSYGNTFLSWYLHKPGQSPQLLIFGISNRFSGVPDRFSGSGSGTDFTLKISTIKPEDLGMYYCLQGTHQPPTFGPGTKLEVK

SEQ ID NO: 21521 - protein, 16 aa, synthetic construct
  source 1..16: note = Description of Artificial Sequence: Synthetic peptide; note = XENP019352 vlCDR1
RSSQSLVNSYGNTFLS

SEQ ID NO: 21522 - protein, 7 aa, synthetic construct
  source 1..7: note = Description of Artificial Sequence: Synthetic peptide; note = XENP019352 vlCDR2
GISNRFS

SEQ ID NO: 21523 - protein, 9 aa, synthetic construct
  source 1..9: note = Description of Artificial Sequence: Synthetic peptide; note = XENP019352 vlCDR3
LQGTHQPPT

SEQ ID NO: 21524 - protein, 449 aa, synthetic construct
  source 1..449: note = Description of Artificial Sequence: Synthetic polypeptide; note = XENP016430 25F7_H0L0-ipilimumab_H0L0 Fab-Fc Heavy Chain
QVQLQQWGAGLLKPSETLSLTCAVYGGSFSDYYWNWIRQPPGKGLEWIGEINHNGNTNSNPSLKSRVTLSLDTSKNQFSLKLRSVTAADTAVYYCAFGYSDYEYNWFDPWGQGTLVTVSSASTKGPSVFPLAPSSKSTSGGTAALGCLVKDYFPEPVTVSWNSGALTSGVHTFPAVLQSSGLYSLSSVVTVPSSSLGTQTYICNVNHKPSDTKVDKKVEPKSCDKTHTCPPCPAPPVAGPSVFLFPPKPKDTLMISRTPEVTCVVVDVKHEDPEVKFNWYVDGVEVHNAKTKPREEEYNSTYRVVSVLTVLHQDWLNGKEYKCKVSNKALPAPIEKTISKAKGQPREPQVYTLPPSREEMTKNQVSLTCDVSGFYPSDIAVEWESDGQPENNYKTTPPVLDSDGSFFLYSKLTVDKSRWEQGDVFSCSVMHEALHNHYTQKSLSLSPGK

SEQ ID NO: 21525 - protein, 120 aa, synthetic construct; identical to SEQ ID NO: 17136
  source 1..120: note = Description of Artificial Sequence: Synthetic polypeptide; note = VH of XENP016430

SEQ ID NO: 21526 - protein, 5 aa, synthetic construct
  source 1..5: note = Description of Artificial Sequence: Synthetic peptide; note = XENP016430 vhCDR1
DYYWN

SEQ ID NO: 21527 - protein, 16 aa, synthetic construct
  source 1..16: note = Description of Artificial Sequence: Synthetic peptide; note = XENP016430 vhCDR2
EINHNGNTNSNPSLKS

SEQ ID NO: 21528 - protein, 12 aa, synthetic construct
  source 1..12: note = Description of Artificial Sequence: Synthetic peptide; note = XENP016430 vhCDR3
GYSDYEYNWFDP

SEQ ID NO: 21529 - protein, 477 aa, synthetic construct
  source 1..477: note = Description of Artificial Sequence: Synthetic polypeptide; note = XENP016430 25F7_H0L0-ipilimumab_H0L0 scFv-Fc Heavy Chain
QVQLVESGGGVVQPGRSLRLSCAASGFTFSSYTMHWVRQAPGKGLEWVTFISYDGNNKYYADSVKGRFTISRDNSKNTLYLQMNSLRAEDTAIYYCARTGWLGPFDYWGQGTLVTVSSGKPGSGKPGSGKPGSGKPGSEIVLTQSPGTLSLSPGERATLSCRASQSVGSSYLAWYQQKPGQAPRLLIYGAFSRATGIPDRFSGSGSGTDFTLTISRLEPEDFAVYYCQQYGSSPWTFGQGTKVEIKEPKSSDKTHTCPPCPAPPVAGPSVFLFPPKPKDTLMISRTPEVTCVVVDVKHEDPEVKFNWYVDGVEVHNAKTKPREEQYNSTYRVVSVLTVLHQDWLNGKEYKCKVSNKALPAPIEKTISKAKGQPREPQVYTLPPSREQMTKNQVKLTCLVKGFYPSDIAVEWESNGQPENNYKTTPPVLDSDGSFFLYSKLTVDKSRWQQGNVFSCSVMHEALHNHYTQKSLSLSPGK

SEQ ID NO: 21530 - protein, 118 aa, synthetic construct; identical to SEQ ID NO: 22
  source 1..118: note = Description of Artificial Sequence: Synthetic polypeptide; note = VH of XENP016430

SEQ ID NO: 21531 - protein, 108 aa, synthetic construct; identical to SEQ ID NO: 23
  source 1..108: note = Description of Artificial Sequence: Synthetic polypeptide; note = VL of XENP016430

SEQ ID NO: 21532 - protein, 231 aa, synthetic construct
  source 1..231: note = Description of Artificial Sequence: Synthetic polypeptide; note = Fc chain of XENP016430
EPKSSDKTHTCPPCPAPPVAGPSVFLFPPKPKDTLMISRTPEVTCVVVDVKHEDPEVKFNWYVDGVEVHNAKTKPREEQYNSTYRVVSVLTVLHQDWLNGKEYKCKVSNKALPAPIEKTISKAKGQPREPQVYTLPPSREQMTKNQVKLTCLVKGFYPSDIAVEWESNGQPENNYKTTPPVLDSDGSFFLYSKLTVDKSRWQQGNVFSCSVMHEALHNHYTQKSLSLSPGK

SEQ ID NO: 21533 - protein, 5 aa, synthetic construct
  source 1..5: note = Description of Artificial Sequence: Synthetic peptide; note = XENP016430 vhCDR1
SYTMH

SEQ ID NO: 21534 - protein, 17 aa, synthetic construct
  source 1..17: note = Description of Artificial Sequence: Synthetic peptide; note = XENP016430 vhCDR2
FISYDGNNKYYADSVKG

SEQ ID NO: 21535 - protein, 9 aa, synthetic construct
  source 1..9: note = Description of Artificial Sequence: Synthetic peptide; note = XENP016430 vhCDR3
TGWLGPFDY

SEQ ID NO: 21536 - protein, 12 aa, synthetic construct
  source 1..12: note = Description of Artificial Sequence: Synthetic peptide; note = XENP016430 vlCDR1
RASQSVGSSYLA

SEQ ID NO: 21537 - protein, 7 aa, synthetic construct
  source 1..7: note = Description of Artificial Sequence: Synthetic peptide; note = XENP016430 vlCDR2
GAFSRAT

SEQ ID NO: 21538 - protein, 9 aa, synthetic construct
  source 1..9: note = Description of Artificial Sequence: Synthetic peptide; note = XENP016430 vlCDR3
QQYGSSPWT

SEQ ID NO: 21539 - protein, 214 aa, synthetic construct; identical to SEQ ID NO: 17140
  source 1..214: note = Description of Artificial Sequence: Synthetic polypeptide; note = XENP016430 25F7_H0L0-ipilimumab_H0L0 Light Chain

SEQ ID NO: 21540 - protein, 107 aa, synthetic construct; identical to SEQ ID NO: 17141
  source 1..107: note = Description of Artificial Sequence: Synthetic polypeptide; note = VL of XENP016430

SEQ ID NO: 21541 - protein, 11 aa, synthetic construct
  source 1..11: note = Description of Artificial Sequence: Synthetic peptide; note = XENP016430 vlCDR1
RASQSISSYLA

SEQ ID NO: 21542 - protein, 7 aa, synthetic construct
  source 1..7: note = Description of Artificial Sequence: Synthetic peptide; note = XENP016430 vlCDR2
DASNRAT

SEQ ID NO: 21543 - protein, 9 aa, synthetic construct
  source 1..9: note = Description of Artificial Sequence: Synthetic peptide; note = XENP016430 vlCDR3
QQRSNWPLT

SEQ ID NO: 21544 - protein, 447 aa, synthetic construct; identical to SEQ ID NO: 17235
  source 1..447: note = Description of Artificial Sequence: Synthetic polypeptide; note = XENP020153 2A11_H1L2-ipilimumab_H3.4_L0.12 Fab-Fc Heavy Chain

SEQ ID NO: 21545 - protein, 118 aa, synthetic construct; identical to SEQ ID NO: 17236
  source 1..118: note = Description of Artificial Sequence: Synthetic polypeptide; note = VH of XENP020153

SEQ ID NO: 21546 - protein, 5 aa, synthetic construct
  source 1..5: note = Description of Artificial Sequence: Synthetic peptide; note = XENP020153 vhCDR1
DYYMH

SEQ ID NO: 21547 - protein, 17 aa, synthetic construct
  source 1..17: note = Description of Artificial Sequence: Synthetic peptide; note = XENP020153 vhCDR2
WIDPENGDTEYAPKFQG

SEQ ID NO: 21548 - protein, 9 aa, synthetic construct
  source 1..9: note = Description of Artificial Sequence: Synthetic peptide; note = XENP020153 vhCDR3
RGVRQALDY

SEQ ID NO: 21549 - protein, 477 aa, synthetic construct
  source 1..477: note = Description of Artificial Sequence: Synthetic polypeptide; note = XENP020153 2A11_H1L2-ipilimumab_H3.4_L0.12 scFv-Fc Heavy Chain
EVQLVESGGGLVKPGGSLRLSCAASGFTFSSYTMHWVRQAPGKGLEWVSFISYDGNHKYYADSVKGRFTISRDNAKNSLYLQMNSLRAEDTAVYYCARTGHLGPFDLWGQGTMVTVSSGKPGSGKPGSGKPGSGKPGSEIVLTQSPGTLSVSPGERATLSCRASQSVGSSYLAWYQQKPGQAPRLLIYGAFSRATGIPDRFSGSGSGTDFTLTISRLEPEDFAVYYCQQYGSSPWTFGQGTKVEIKEPKSSDKTHTCPPCPAPPVAGPSVFLFPPKPKDTLMISRTPEVTCVVVDVKHEDPEVKFNWYVDGVEVHNAKTKPREEQYNSTYRVVSVLTVLHQDWLNGKEYKCKVSNKALPAPIEKTISKAKGQPREPQVYTLPPSREQMTKNQVKLTCLVKGFYPSDIAVEWESNGQPENNYKTTPPVLDSDGSFFLYSKLTVDKSRWQQGNVFSCSVMHEALHNHYTQKSLSLSPGK

SEQ ID NO: 21550 - protein, 118 aa, synthetic construct; identical to SEQ ID NO: 2461
  source 1..118: note = Description of Artificial Sequence: Synthetic polypeptide; note = VH of XENP020153

SEQ ID NO: 21551 - protein, 108 aa, synthetic construct; identical to SEQ ID NO: 1517
  source 1..108: note = Description of Artificial Sequence: Synthetic polypeptide; note = VL of XENP020153

SEQ ID NO: 21552 - protein, 231 aa, synthetic construct; identical to SEQ ID NO: 21532
  source 1..231: note = Description of Artificial Sequence: Synthetic polypeptide; note = Fc chain of XENP020153

SEQ ID NO: 21553 - protein, 5 aa, synthetic construct
  source 1..5: note = Description of Artificial Sequence: Synthetic peptide; note = XENP020153 vhCDR1
SYTMH

SEQ ID NO: 21554 - protein, 17 aa, synthetic construct
  source 1..17: note = Description of Artificial Sequence: Synthetic peptide; note = XENP020153 vhCDR2
FISYDGNHKYYADSVKG

SEQ ID NO: 21555 - protein, 9 aa, synthetic construct
  source 1..9: note = Description of Artificial Sequence: Synthetic peptide; note = XENP020153 vhCDR3
TGHLGPFDL

SEQ ID NO: 21556 - protein, 12 aa, synthetic construct
  source 1..12: note = Description of Artificial Sequence: Synthetic peptide; note = XENP020153 vlCDR1
RASQSVGSSYLA

SEQ ID NO: 21557 - protein, 7 aa, synthetic construct
  source 1..7: note = Description of Artificial Sequence: Synthetic peptide; note = XENP020153 vlCDR2
GAFSRAT

SEQ ID NO: 21558 - protein, 9 aa, synthetic construct
  source 1..9: note = Description of Artificial Sequence: Synthetic peptide; note = XENP020153 vlCDR3
QQYGSSPWT

SEQ ID NO: 21559 - protein, 214 aa, synthetic construct; identical to SEQ ID NO: 17250
  source 1..214: note = Description of Artificial Sequence: Synthetic polypeptide; note = XENP020153 2A11_H1L2-ipilimumab_H3.4_L0.12 Light Chain

SEQ ID NO: 21560 - protein, 107 aa, synthetic construct; identical to SEQ ID NO: 17251
  source 1..107: note = Description of Artificial Sequence: Synthetic polypeptide; note = VL of XENP020153

SEQ ID NO: 21561 - protein, 11 aa, synthetic construct
  source 1..11: note = Description of Artificial Sequence: Synthetic peptide; note = XENP020153 vlCDR1
QASQDIGNYLN

SEQ ID NO: 21562 - protein, 7 aa, synthetic construct
  source 1..7: note = Description of Artificial Sequence: Synthetic peptide; note = XENP020153 vlCDR2
YTSRLHS

SEQ ID NO: 21563 - protein, 9 aa, synthetic construct
  source 1..9: note = Description of Artificial Sequence: Synthetic peptide; note = XENP020153 vlCDR3
QQGNTLPYT

SEQ ID NO: 21564 - protein, 447 aa, synthetic construct
  source 1..447: note = Description of Artificial Sequence: Synthetic polypeptide; note = XENP020721 2A11_H1L2-ipilimumab_H3.4_L0.12 Fab-Fc Heavy Chain
EVQLVQSGAEVKKPGATVKISCKASGFNIKDYYMHWVQQAPGKGLEWMGWIDPENGDTEYAPKFQGRVTITADTSTNTAYMELSSLRSEDTAVYYCYARGVRQALDYWGQGTLVTVSSASTKGPSVFPLAPSSKSTSGGTAALGCLVKDYFPEPVTVSWNSGALTSGVHTFPAVLQSSGLYSLSSVVTVPSSSLGTQTYICNVNHKPSDTKVDKKVEPKSCDKTHTCPPCPAPPVAGPSVFLFPPKPKDTLMISRTPEVTCVVVDVKHEDPEVKFNWYVDGVEVHNAKTKPREEEYNSTYRVVSVLTVLHQDWLNGKEYKCKVSNKALPAPIEKTISKAKGQPREPQVYTLPPSREEMTKNQVSLTCDVSGFYPSDIAVEWESDGQPENNYKTTPPVLDSDGSFFLYSKLTVDKSRWEQGDVFSCSVLHEALHSHYTQKSLSLSPGK

SEQ ID NO: 21565 - protein, 118 aa, synthetic construct; identical to SEQ ID NO: 17236
  source 1..118: note = Description of Artificial Sequence: Synthetic polypeptide; note = VH of XENP020721

SEQ ID NO: 21566 - protein, 5 aa, synthetic construct
  source 1..5: note = Description of Artificial Sequence: Synthetic peptide; note = XENP020721 vhCDR1
DYYMH

SEQ ID NO: 21567 - protein, 17 aa, synthetic construct
  source 1..17: note = Description of Artificial Sequence: Synthetic peptide; note = XENP020721 vhCDR2
WIDPENGDTEYAPKFQG

SEQ ID NO: 21568 - protein, 9 aa, synthetic construct
  source 1..9: note = Description of Artificial Sequence: Synthetic peptide; note = XENP020721 vhCDR3
RGVRQALDY

SEQ ID NO: 21569 - protein, 477 aa, synthetic construct
  source 1..477: note = Description of Artificial Sequence: Synthetic polypeptide; note = XENP020721 2A11_H1L2-ipilimumab_H3.4_L0.12 scFv-Fc Heavy Chain
EVQLVESGGGLVKPGGSLRLSCAASGFTFSSYTMHWVRQAPGKGLEWVSFISYDGNHKYYADSVKGRFTISRDNAKNSLYLQMNSLRAEDTAVYYCARTGHLGPFDLWGQGTMVTVSSGKPGSGKPGSGKPGSGKPGSEIVLTQSPGTLSVSPGERATLSCRASQSVGSSYLAWYQQKPGQAPRLLIYGAFSRATGIPDRFSGSGSGTDFTLTISRLEPEDFAVYYCQQYGSSPWTFGQGTKVEIKEPKSSDKTHTCPPCPAPPVAGPSVFLFPPKPKDTLMISRTPEVTCVVVDVKHEDPEVKFNWYVDGVEVHNAKTKPREEQYNSTYRVVSVLTVLHQDWLNGKEYKCKVSNKALPAPIEKTISKAKGQPREPQVYTLPPSREQMTKNQVKLTCLVKGFYPSDIAVEWESNGQPENNYKTTPPVLDSDGSFFLYSKLTVDKSRWQQGNVFSCSVLHEALHSHYTQKSLSLSPGK

SEQ ID NO: 21570 - protein, 118 aa, synthetic construct; identical to SEQ ID NO: 2461
  source 1..118: note = Description of Artificial Sequence: Synthetic polypeptide; note = VH of XENP020721

SEQ ID NO: 21571 - protein, 108 aa, synthetic construct; identical to SEQ ID NO: 1517
  source 1..108: note = Description of Artificial Sequence: Synthetic polypeptide; note = VL of XENP020721

SEQ ID NO: 21572 - protein, 231 aa, synthetic construct
  source 1..231: note = Description of Artificial Sequence: Synthetic polypeptide; note = Fc chain of XENP020721
EPKSSDKTHTCPPCPAPPVAGPSVFLFPPKPKDTLMISRTPEVTCVVVDVKHEDPEVKFNWYVDGVEVHNAKTKPREEQYNSTYRVVSVLTVLHQDWLNGKEYKCKVSNKALPAPIEKTISKAKGQPREPQVYTLPPSREQMTKNQVKLTCLVKGFYPSDIAVEWESNGQPENNYKTTPPVLDSDGSFFLYSKLTVDKSRWQQGNVFSCSVLHEALHSHYTQKSLSLSPGK

SEQ ID NO: 21573 - protein, 5 aa, synthetic construct
  source 1..5: note = Description of Artificial Sequence: Synthetic peptide; note = XENP020721 vhCDR1
SYTMH

SEQ ID NO: 21574 - protein, 17 aa, synthetic construct
  source 1..17: note = Description of Artificial Sequence: Synthetic peptide; note = XENP020721 vhCDR2
FISYDGNHKYYADSVKG

SEQ ID NO: 21575 - protein, 9 aa, synthetic construct
  source 1..9: note = Description of Artificial Sequence: Synthetic peptide; note = XENP020721 vhCDR3
TGHLGPFDL

SEQ ID NO: 21576 - protein, 12 aa, synthetic construct
  source 1..12: note = Description of Artificial Sequence: Synthetic peptide; note = XENP020721 vlCDR1
RASQSVGSSYLA

SEQ ID NO: 21577 - protein, 7 aa, synthetic construct
  source 1..7: note = Description of Artificial Sequence: Synthetic peptide; note = XENP020721 vlCDR2
GAFSRAT

SEQ ID NO: 21578 - protein, 9 aa, synthetic construct
  source 1..9: note = Description of Artificial Sequence: Synthetic peptide; note = XENP020721 vlCDR3
QQYGSSPWT

SEQ ID NO: 21579 - protein, 214 aa, synthetic construct; identical to SEQ ID NO: 17250
  source 1..214: note = Description of Artificial Sequence: Synthetic polypeptide; note = XENP020721 2A11_H1L2-ipilimumab_H3.4_L0.12 Light Chain

SEQ ID NO: 21580 - protein, 107 aa, synthetic construct; identical to SEQ ID NO: 17251
  source 1..107: note = Description of Artificial Sequence: Synthetic polypeptide; note = VL of XENP020721

SEQ ID NO: 21581 - protein, 11 aa, synthetic construct
  source 1..11: note = Description of Artificial Sequence: Synthetic peptide; note = XENP020721 vlCDR1
QASQDIGNYLN

SEQ ID NO: 21582 - protein, 7 aa, synthetic construct
  source 1..7: note = Description of Artificial Sequence: Synthetic peptide; note = XENP020721 vlCDR2
YTSRLHS

SEQ ID NO: 21583 - protein, 9 aa, synthetic construct
  source 1..9: note = Description of Artificial Sequence: Synthetic peptide; note = XENP020721 vlCDR3
QQGNTLPYT

SEQ ID NO: 21584 - protein, 447 aa, synthetic construct; identical to SEQ ID NO: 17235
  source 1..447: note = Description of Artificial Sequence: Synthetic polypeptide; note = XENP020440 2A11_H1L2-ipilimumab_H3.21_L0.124 Fab-Fc Heavy Chain

SEQ ID NO: 21585 - protein, 118 aa, synthetic construct; identical to SEQ ID NO: 17236
  source 1..118: note = Description of Artificial Sequence: Synthetic polypeptide; note = VH of XENP020440

SEQ ID NO: 21586 - protein, 5 aa, synthetic construct
  source 1..5: note = Description of Artificial Sequence: Synthetic peptide; note = XENP020440 vhCDR1
DYYMH

SEQ ID NO: 21587 - protein, 17 aa, synthetic construct
  source 1..17: note = Description of Artificial Sequence: Synthetic peptide; note = XENP020440 vhCDR2
WIDPENGDTEYAPKFQG

SEQ ID NO: 21588 - protein, 9 aa, synthetic construct
  source 1..9: note = Description of Artificial Sequence: Synthetic peptide; note = XENP020440 vhCDR3
RGVRQALDY

SEQ ID NO: 21589 - protein, 477 aa, synthetic construct
  source 1..477: note = Description of Artificial Sequence: Synthetic polypeptide; note = XENP020440 2A11_H1L2-ipilimumab_H3.21_L0.124 scFv-Fc Heavy Chain
EVQLVESGGGLVKPGGSLRLSCAASGFTFSSYTMHWVRQAPGKGLEWVSFISYDGNTKYYADSVKGRFTISRDNAKNSLYLQMNSLRAEDTAVYYCARGGLLGPFDLWGQGTMVTVSSGKPGSGKPGSGKPGSGKPGSEIVLTQSPATLSVSPGERATLSCRASQSVGSSYLAWYQQKPGQAPRLLIYGASSRATGIPDRFSGSGSGTDFTLTISRLEPEDFAVYYCQQYGSSPWTFGQGTKVEIKEPKSSDKTHTCPPCPAPPVAGPSVFLFPPKPKDTLMISRTPEVTCVVVDVKHEDPEVKFNWYVDGVEVHNAKTKPREEQYNSTYRVVSVLTVLHQDWLNGKEYKCKVSNKALPAPIEKTISKAKGQPREPQVYTLPPSREQMTKNQVKLTCLVKGFYPSDIAVEWESNGQPENNYKTTPPVLDSDGSFFLYSKLTVDKSRWQQGNVFSCSVMHEALHNHYTQKSLSLSPGK

SEQ ID NO: 21590 - protein, 118 aa, synthetic construct; identical to SEQ ID NO: 2614
  source 1..118: note = Description of Artificial Sequence: Synthetic polypeptide; note = VH of XENP020440

SEQ ID NO: 21591 - protein, 108 aa, synthetic construct; identical to SEQ ID NO: 2723
  source 1..108: note = Description of Artificial Sequence: Synthetic polypeptide; note = VL of XENP020440

SEQ ID NO: 21592 - protein, 231 aa, synthetic construct; identical to SEQ ID NO: 21532
  source 1..231: note = Description of Artificial Sequence: Synthetic polypeptide; note = Fc chain of XENP020440

SEQ ID NO: 21593 - protein, 5 aa, synthetic construct
  source 1..5: note = Description of Artificial Sequence: Synthetic peptide; note = XENP020440 vhCDR1
SYTMH

SEQ ID NO: 21594 - protein, 17 aa, synthetic construct
  source 1..17: note = Description of Artificial Sequence: Synthetic peptide; note = XENP020440 vhCDR2
FISYDGNTKYYADSVKG

SEQ ID NO: 21595 - protein, 9 aa, synthetic construct
  source 1..9: note = Description of Artificial Sequence: Synthetic peptide; note = XENP020440 vhCDR3
GGLLGPFDL

SEQ ID NO: 21596 - protein, 12 aa, synthetic construct
  source 1..12: note = Description of Artificial Sequence: Synthetic peptide; note = XENP020440 vlCDR1
RASQSVGSSYLA

SEQ ID NO: 21597 - protein, 7 aa, synthetic construct
  source 1..7: note = Description of Artificial Sequence: Synthetic peptide; note = XENP020440 vlCDR2
GASSRAT

SEQ ID NO: 21598 - protein, 9 aa, synthetic construct
  source 1..9: note = Description of Artificial Sequence: Synthetic peptide; note = XENP020440 vlCDR3
QQYGSSPWT

SEQ ID NO: 21599 - protein, 214 aa, synthetic construct; identical to SEQ ID NO: 17250
  source 1..214: note = Description of Artificial Sequence: Synthetic polypeptide; note = XENP020440 2A11_H1L2-ipilimumab_H3.21_L0.124 Light Chain

SEQ ID NO: 21600 - protein, 107 aa, synthetic construct; identical to SEQ ID NO: 17251
  source 1..107: note = Description of Artificial Sequence: Synthetic polypeptide; note = VL of XENP020440

SEQ ID NO: 21601 - protein, 11 aa, synthetic construct
  source 1..11: note = Description of Artificial Sequence: Synthetic peptide; note = XENP020440 vlCDR1
QASQDIGNYLN

SEQ ID NO: 21602 - protein, 7 aa, synthetic construct
  source 1..7: note = Description of Artificial Sequence: Synthetic peptide; note = XENP020440 vlCDR2
YTSRLHS

SEQ ID NO: 21603 - protein, 9 aa, synthetic construct
  source 1..9: note = Description of Artificial Sequence: Synthetic peptide; note = XENP020440 vlCDR3
QQGNTLPYT

SEQ ID NO: 21604 - protein, 447 aa, synthetic construct; identical to SEQ ID NO: 17235
  source 1..447: note = Description of Artificial Sequence: Synthetic polypeptide; note = XENP020441 2A11_H1L2-ipilimumab_H3.21_L0.129 Fab-Fc Heavy Chain

SEQ ID NO: 21605 - protein, 118 aa, synthetic construct; identical to SEQ ID NO: 17236
  source 1..118: note = Description of Artificial Sequence: Synthetic polypeptide; note = VH of XENP020441

SEQ ID NO: 21606 - protein, 5 aa, synthetic construct
  source 1..5: note = Description of Artificial Sequence: Synthetic peptide; note = XENP020441 vhCDR1
DYYMH

SEQ ID NO: 21607 - protein, 17 aa, synthetic construct
  source 1..17: note = Description of Artificial Sequence: Synthetic peptide; note = XENP020441 vhCDR2
WIDPENGDTEYAPKFQG

SEQ ID NO: 21608 - protein, 9 aa, synthetic construct
  source 1..9: note = Description of Artificial Sequence: Synthetic peptide; note = XENP020441 vhCDR3
RGVRQALDY

SEQ ID NO: 21609 - protein, 477 aa, synthetic construct
  source 1..477: note = Description of Artificial Sequence: Synthetic polypeptide; note = XENP020441 2A11_H1L2-ipilimumab_H3.21_L0.129 scFv-Fc Heavy Chain
EVQLVESGGGLVKPGGSLRLSCAASGFTFSSYTMHWVRQAPGKGLEWVSFISYDGNTKYYADSVKGRFTISRDNAKNSLYLQMNSLRAEDTAVYYCARGGLLGPFDLWGQGTMVTVSSGKPGSGKPGSGKPGSGKPGSEIVLTQSPATLSLSPGERATLSCRASQSVGSSYLAWYQQKPGQAPRLLIYGASSRATGIPDRFSGSGSGTDFTLTISRLEPEDFAVYYCQQYGSSPWTFGQGTKVEIKEPKSSDKTHTCPPCPAPPVAGPSVFLFPPKPKDTLMISRTPEVTCVVVDVKHEDPEVKFNWYVDGVEVHNAKTKPREEQYNSTYRVVSVLTVLHQDWLNGKEYKCKVSNKALPAPIEKTISKAKGQPREPQVYTLPPSREQMTKNQVKLTCLVKGFYPSDIAVEWESNGQPENNYKTTPPVLDSDGSFFLYSKLTVDKSRWQQGNVFSCSVMHEALHNHYTQKSLSLSPGK

SEQ ID NO: 21610 - protein, 118 aa, synthetic construct; identical to SEQ ID NO: 2614
  source 1..118: note = Description of Artificial Sequence: Synthetic polypeptide; note = VH of XENP020441

SEQ ID NO: 21611 - protein, 108 aa, synthetic construct; identical to SEQ ID NO: 2768
  source 1..108: note = Description of Artificial Sequence: Synthetic polypeptide; note = VL of XENP020441

SEQ ID NO: 21612 - protein, 231 aa, synthetic construct; identical to SEQ ID NO: 21532
  source 1..231: note = Description of Artificial Sequence: Synthetic polypeptide; note = Fc chain of XENP020441

SEQ ID NO: 21613 - protein, 5 aa, synthetic construct
  source 1..5: note = Description of Artificial Sequence: Synthetic peptide; note = XENP020441 vhCDR1
SYTMH

SEQ ID NO: 21614 - protein, 17 aa, synthetic construct
  source 1..17: note = Description of Artificial Sequence: Synthetic peptide; note = XENP020441 vhCDR2
FISYDGNTKYYADSVKG

SEQ ID NO: 21615 - protein, 9 aa, synthetic construct
  source 1..9: note = Description of Artificial Sequence: Synthetic peptide; note = XENP020441 vhCDR3
GGLLGPFDL

SEQ ID NO: 21616 - protein, 12 aa, synthetic construct
  source 1..12: note = Description of Artificial Sequence: Synthetic peptide; note = XENP020441 vlCDR1
RASQSVGSSYLA

SEQ ID NO: 21617 - protein, 7 aa, synthetic construct
  source 1..7: note = Description of Artificial Sequence: Synthetic peptide; note = XENP020441 vlCDR2
GASSRAT

SEQ ID NO: 21618 - protein, 9 aa, synthetic construct
  source 1..9: note = Description of Artificial Sequence: Synthetic peptide; note = XENP020441 vlCDR3
QQYGSSPWT

SEQ ID NO: 21619 - protein, 214 aa, synthetic construct; identical to SEQ ID NO: 17250
  source 1..214: note = Description of Artificial Sequence: Synthetic polypeptide; note = XENP020441 2A11_H1L2-ipilimumab_H3.21_L0.129 Light Chain

SEQ ID NO: 21620 - protein, 107 aa, synthetic construct; identical to SEQ ID NO: 17251
  source 1..107: note = Description of Artificial Sequence: Synthetic polypeptide; note = VL of XENP020441

SEQ ID NO: 21621 - protein, 11 aa, synthetic construct
  source 1..11: note = Description of Artificial Sequence: Synthetic peptide; note = XENP020441 vlCDR1
QASQDIGNYLN

SEQ ID NO: 21622 - protein, 7 aa, synthetic construct
  source 1..7: note = Description of Artificial Sequence: Synthetic peptide; note = XENP020441 vlCDR2
YTSRLHS

SEQ ID NO: 21623 - protein, 9 aa, synthetic construct
  source 1..9: note = Description of Artificial Sequence: Synthetic peptide; note = XENP020441 vlCDR3
QQGNTLPYT

SEQ ID NO: 21624 - protein, 447 aa, synthetic construct; identical to SEQ ID NO: 17235
  source 1..447: note = Description of Artificial Sequence: Synthetic polypeptide; note = XENP020442 2A11_H1L2-ipilimumab_H3.21_L0.132 Fab-Fc Heavy Chain

SEQ ID NO: 21625 - protein, 118 aa, synthetic construct; identical to SEQ ID NO: 17236
  source 1..118: note = Description of Artificial Sequence: Synthetic polypeptide; note = VH of XENP020442

SEQ ID NO: 21626 - protein, 5 aa, synthetic construct
  source 1..5: note = Description of Artificial Sequence: Synthetic peptide; note = XENP020442 vhCDR1
DYYMH

SEQ ID NO: 21627 - protein, 17 aa, synthetic construct
  source 1..17: note = Description of Artificial Sequence: Synthetic peptide; note = XENP020442 vhCDR2
WIDPENGDTEYAPKFQG

SEQ ID NO: 21628 - protein, 9 aa, synthetic construct
  source 1..9: note = Description of Artificial Sequence: Synthetic peptide; note = XENP020442 vhCDR3
RGVRQALDY

SEQ ID NO: 21629 - protein, 477 aa, synthetic construct
  source 1..477: note = Description of Artificial Sequence: Synthetic polypeptide; note = XENP020442 2A11_H1L2-ipilimumab_H3.21_L0.132 scFv-Fc Heavy Chain
EVQLVESGGGLVKPGGSLRLSCAASGFTFSSYTMHWVRQAPGKGLEWVSFISYDGNTKYYADSVKGRFTISRDNAKNSLYLQMNSLRAEDTAVYYCARGGLLGPFDLWGQGTMVTVSSGKPGSGKPGSGKPGSGKPGSEIVLTQSPATLSLSPGERATLSCRASQSVSSSYLAWYQQKPGQAPRLLIYGASSRATGIPDRFSGSGSGTDFTLTISRLEPEDFAVYYCQQYGSSPWTFGQGTKVEIKEPKSSDKTHTCPPCPAPPVAGPSVFLFPPKPKDTLMISRTPEVTCVVVDVKHEDPEVKFNWYVDGVEVHNAKTKPREEQYNSTYRVVSVLTVLHQDWLNGKEYKCKVSNKALPAPIEKTISKAKGQPREPQVYTLPPSREQMTKNQVKLTCLVKGFYPSDIAVEWESNGQPENNYKTTPPVLDSDGSFFLYSKLTVDKSRWQQGNVFSCSVMHEALHNHYTQKSLSLSPGK

SEQ ID NO: 21630 - protein, 118 aa, synthetic construct; identical to SEQ ID NO: 2614
  source 1..118: note = Description of Artificial Sequence: Synthetic polypeptide; note = VH of XENP020442

SEQ ID NO: 21631 - protein, 108 aa, synthetic construct; identical to SEQ ID NO: 2795
  source 1..108: note = Description of Artificial Sequence: Synthetic polypeptide; note = VL of XENP020442

SEQ ID NO: 21632 - protein, 231 aa, synthetic construct; identical to SEQ ID NO: 21532
  source 1..231: note = Description of Artificial Sequence: Synthetic polypeptide; note = Fc chain of XENP020442

SEQ ID NO: 21633 - protein, 5 aa, synthetic construct
  source 1..5: note = Description of Artificial Sequence: Synthetic peptide; note = XENP020442 vhCDR1
SYTMH

SEQ ID NO: 21634 - protein, 17 aa, synthetic construct
  source 1..17: note = Description of Artificial Sequence: Synthetic peptide; note = XENP020442 vhCDR2
FISYDGNTKYYADSVKG

SEQ ID NO: 21635 - protein, 9 aa, synthetic construct
  source 1..9: note = Description of Artificial Sequence: Synthetic peptide; note = XENP020442 vhCDR3
GGLLGPFDL

SEQ ID NO: 21636 - protein, 12 aa, synthetic construct
  source 1..12: note = Description of Artificial Sequence: Synthetic peptide; note = XENP020442 vlCDR1
RASQSVSSSYLA

SEQ ID NO: 21637 - protein, 7 aa, synthetic construct
  source 1..7: note = Description of Artificial Sequence: Synthetic peptide; note = XENP020442 vlCDR2
GASSRAT

SEQ ID NO: 21638 - protein, 9 aa, synthetic construct
  source 1..9: note = Description of Artificial Sequence: Synthetic peptide; note = XENP020442 vlCDR3
QQYGSSPWT

SEQ ID NO: 21639 - protein, 214 aa, synthetic construct; identical to SEQ ID NO: 17250
  source 1..214: note = Description of Artificial Sequence: Synthetic polypeptide; note = XENP020442 2A11_H1L2-ipilimumab_H3.21_L0.132 Light Chain

SEQ ID NO: 21640 - protein, 107 aa, synthetic construct; identical to SEQ ID NO: 17251
  source 1..107: note = Description of Artificial Sequence: Synthetic polypeptide; note = VL of XENP020442

SEQ ID NO: 21641 - protein, 11 aa, synthetic construct
  source 1..11: note = Description of Artificial Sequence: Synthetic peptide; note = XENP020442 vlCDR1
QASQDIGNYLN

SEQ ID NO: 21642 - protein, 7 aa, synthetic construct
  source 1..7: note = Description of Artificial Sequence: Synthetic peptide; note = XENP020442 vlCDR2
YTSRLHS

SEQ ID NO: 21643 - protein, 9 aa, synthetic construct
  source 1..9: note = Description of Artificial Sequence: Synthetic peptide; note = XENP020442 vlCDR3
QQGNTLPYT

SEQ ID NO: 21644 - protein, 447 aa, synthetic construct; identical to SEQ ID NO: 17235
  source 1..447: note = Description of Artificial Sequence: Synthetic polypeptide; note = XENP020443 2A11_H1L2-ipilimumab_H3.23_L0.124 Fab-Fc Heavy Chain

SEQ ID NO: 21645 - protein, 118 aa, synthetic construct; identical to SEQ ID NO: 17236
  source 1..118: note = Description of Artificial Sequence: Synthetic polypeptide; note = VH of XENP020443

SEQ ID NO: 21646 - protein, 5 aa, synthetic construct
  source 1..5: note = Description of Artificial Sequence: Synthetic peptide; note = XENP020443 vhCDR1
DYYMH

SEQ ID NO: 21647 - protein, 17 aa, synthetic construct
  source 1..17: note = Description of Artificial Sequence: Synthetic peptide; note = XENP020443 vhCDR2
WIDPENGDTEYAPKFQG

SEQ ID NO: 21648 - protein, 9 aa, synthetic construct
  source 1..9: note = Description of Artificial Sequence: Synthetic peptide; note = XENP020443 vhCDR3
RGVRQALDY

SEQ ID NO: 21649 - protein, 477 aa, synthetic construct
  source 1..477: note = Description of Artificial Sequence: Synthetic polypeptide; note = XENP020443 2A11_H1L2-ipilimumab_H3.23_L0.124 scFv-Fc Heavy Chain
EVQLVESGGGLVKPGGSLRLSCAASGFTFSSYTMHWVRQAPGKGLEWVSFISYDGNYKYYADSVKGRFTISRDNAKNSLYLQMNSLRAEDTAVYYCARGGHLGPFDLWGQGTMVTVSSGKPGSGKPGSGKPGSGKPGSEIVLTQSPATLSVSPGERATLSCRASQSVGSSYLAWYQQKPGQAPRLLIYGASSRATGIPDRFSGSGSGTDFTLTISRLEPEDFAVYYCQQYGSSPWTFGQGTKVEIKEPKSSDKTHTCPPCPAPPVAGPSVFLFPPKPKDTLMISRTPEVTCVVVDVKHEDPEVKFNWYVDGVEVHNAKTKPREEQYNSTYRVVSVLTVLHQDWLNGKEYKCKVSNKALPAPIEKTISKAKGQPREPQVYTLPPSREQMTKNQVKLTCLVKGFYPSDIAVEWESNGQPENNYKTTPPVLDSDGSFFLYSKLTVDKSRWQQGNVFSCSVMHEALHNHYTQKSLSLSPGK

SEQ ID NO: 21650 - protein, 118 aa, synthetic construct; identical to SEQ ID NO: 2632
  source 1..118: note = Description of Artificial Sequence: Synthetic polypeptide; note = VH of XENP020443

SEQ ID NO: 21651 - protein, 108 aa, synthetic construct; identical to SEQ ID NO: 2723
  source 1..108: note = Description of Artificial Sequence: Synthetic polypeptide; note = VL of XENP020443

SEQ ID NO: 21652 - protein, 231 aa, synthetic construct; identical to SEQ ID NO: 21532
  source 1..231: note = Description of Artificial Sequence: Synthetic polypeptide; note = Fc chain of XENP020443

SEQ ID NO: 21653 - protein, 5 aa, synthetic construct
  source 1..5: note = Description of Artificial Sequence: Synthetic peptide; note = XENP020443 vhCDR1
SYTMH

SEQ ID NO: 21654 - protein, 17 aa, synthetic construct
  source 1..17: note = Description of Artificial Sequence: Synthetic peptide; note = XENP020443 vhCDR2
FISYDGNYKYYADSVKG

SEQ ID NO: 21655 - protein, 9 aa, synthetic construct
  source 1..9: note = Description of Artificial Sequence: Synthetic peptide; note = XENP020443 vhCDR3
GGHLGPFDL

SEQ ID NO: 21656 - protein, 12 aa, synthetic construct
  source 1..12: note = Description of Artificial Sequence: Synthetic peptide; note = XENP020443 vlCDR1
RASQSVGSSYLA

SEQ ID NO: 21657 - protein, 7 aa, synthetic construct
  source 1..7: note = Description of Artificial Sequence: Synthetic peptide; note = XENP020443 vlCDR2
GASSRAT

SEQ ID NO: 21658 - protein, 9 aa, synthetic construct
  source 1..9: note = Description of Artificial Sequence: Synthetic peptide; note = XENP020443 vlCDR3
QQYGSSPWT

SEQ ID NO: 21659 - protein, 214 aa, synthetic construct; identical to SEQ ID NO: 17250
  source 1..214: note = Description of Artificial Sequence: Synthetic polypeptide; note = XENP020443 2A11_H1L2-ipilimumab_H3.23_L0.124 Light Chain

SEQ ID NO: 21660 - protein, 107 aa, synthetic construct; identical to SEQ ID NO: 17251
  source 1..107: note = Description of Artificial Sequence: Synthetic polypeptide; note = VL of XENP020443

SEQ ID NO: 21661 - protein, 11 aa, synthetic construct
  source 1..11: note = Description of Artificial Sequence: Synthetic peptide; note = XENP020443 vlCDR1
QASQDIGNYLN

SEQ ID NO: 21662 - protein, 7 aa, synthetic construct
  source 1..7: note = Description of Artificial Sequence: Synthetic peptide; note = XENP020443 vlCDR2
YTSRLHS

SEQ ID NO: 21663 - protein, 9 aa, synthetic construct
  source 1..9: note = Description of Artificial Sequence: Synthetic peptide; note = XENP020443 vlCDR3
QQGNTLPYT

SEQ ID NO: 21664 - protein, 447 aa, synthetic construct; identical to SEQ ID NO: 17235
  source 1..447: note = Description of Artificial Sequence: Synthetic polypeptide; note = XENP020444 2A11_H1L2-ipilimumab_H3.23_L0.129 Fab-Fc Heavy Chain

SEQ ID NO: 21665 - protein, 118 aa, synthetic construct; identical to SEQ ID NO: 17236
  source 1..118: note = Description of Artificial Sequence: Synthetic polypeptide; note = VH of XENP020444

SEQ ID NO: 21666 - protein, 5 aa, synthetic construct
  source 1..5: note = Description of Artificial Sequence: Synthetic peptide; note = XENP020444 vhCDR1
DYYMH

SEQ ID NO: 21667 - protein, 17 aa, synthetic construct
  source 1..17: note = Description of Artificial Sequence: Synthetic peptide; note = XENP020444 vhCDR2
WIDPENGDTEYAPKFQG

SEQ ID NO: 21668 - protein, 9 aa, synthetic construct
  source 1..9: note = Description of Artificial Sequence: Synthetic peptide; note = XENP020444 vhCDR3
RGVRQALDY

SEQ ID NO: 21669 - protein, 477 aa, synthetic construct
  source 1..477: note = Description of Artificial Sequence: Synthetic polypeptide; note = XENP020444 2A11_H1L2-ipilimumab_H3.23_L0.129 scFv-Fc Heavy Chain
EVQLVESGGGLVKPGGSLRLSCAASGFTFSSYTMHWVRQAPGKGLEWVSFISYDGNYKYYADSVKGRFTISRDNAKNSLYLQMNSLRAEDTAVYYCARGGHLGPFDLWGQGTMVTVSSGKPGSGKPGSGKPGSGKPGSEIVLTQSPATLSLSPGERATLSCRASQSVGSSYLAWYQQKPGQAPRLLIYGASSRATGIPDRFSGSGSGTDFTLTISRLEPEDFAVYYCQQYGSSPWTFGQGTKVEIKEPKSSDKTHTCPPCPAPPVAGPSVFLFPPKPKDTLMISRTPEVTCVVVDVKHEDPEVKFNWYVDGVEVHNAKTKPREEQYNSTYRVVSVLTVLHQDWLNGKEYKCKVSNKALPAPIEKTISKAKGQPREPQVYTLPPSREQMTKNQVKLTCLVKGFYPSDIAVEWESNGQPENNYKTTPPVLDSDGSFFLYSKLTVDKSRWQQGNVFSCSVMHEALHNHYTQKSLSLSPGK

SEQ ID NO: 21670 - protein, 118 aa, synthetic construct; identical to SEQ ID NO: 2632
  source 1..118: note = Description of Artificial Sequence: Synthetic polypeptide; note = VH of XENP020444

SEQ ID NO: 21671 - protein, 108 aa, synthetic construct; identical to SEQ ID NO: 2768
  source 1..108: note = Description of Artificial Sequence: Synthetic polypeptide; note = VL of XENP020444

SEQ ID NO: 21672 - protein, 231 aa, synthetic construct; identical to SEQ ID NO: 21532
  source 1..231: note = Description of Artificial Sequence: Synthetic polypeptide; note = Fc chain of XENP020444

SEQ ID NO: 21673 - protein, 5 aa, synthetic construct
  source 1..5: note = Description of Artificial Sequence: Synthetic peptide; note = XENP020444 vhCDR1
SYTMH

SEQ ID NO: 21674 - protein, 17 aa, synthetic construct
  source 1..17: note = Description of Artificial Sequence: Synthetic peptide; note = XENP020444 vhCDR2
FISYDGNYKYYADSVKG

SEQ ID NO: 21675 - protein, 9 aa, synthetic construct
  source 1..9: note = Description of Artificial Sequence: Synthetic peptide; note = XENP020444 vhCDR3
GGHLGPFDL

SEQ ID NO: 21676 - protein, 12 aa, synthetic construct
  source 1..12: note = Description of Artificial Sequence: Synthetic peptide; note = XENP020444 vlCDR1
RASQSVGSSYLA

SEQ ID NO: 21677 - protein, 7 aa, synthetic construct
  source 1..7: note = Description of Artificial Sequence: Synthetic peptide; note = XENP020444 vlCDR2
GASSRAT

SEQ ID NO: 21678 - protein, 9 aa, synthetic construct
  source 1..9: note = Description of Artificial Sequence: Synthetic peptide; note = XENP020444 vlCDR3
QQYGSSPWT

SEQ ID NO: 21679 - protein, 214 aa, synthetic construct; identical to SEQ ID NO: 17250
  source 1..214: note = Description of Artificial Sequence: Synthetic polypeptide; note = XENP020444 2A11_H1L2-ipilimumab_H3.23_L0.129 Light Chain

SEQ ID NO: 21680 - protein, 107 aa, synthetic construct; identical to SEQ ID NO: 17251
  source 1..107: note = Description of Artificial Sequence: Synthetic polypeptide; note = VL of XENP020444

SEQ ID NO: 21681 - protein, 11 aa, synthetic construct
  source 1..11: note = Description of Artificial Sequence: Synthetic peptide; note = XENP020444 vlCDR1
QASQDIGNYLN

SEQ ID NO: 21682 - protein, 7 aa, synthetic construct
  source 1..7: note = Description of Artificial Sequence: Synthetic peptide; note = XENP020444 vlCDR2
YTSRLHS

SEQ ID NO: 21683 - protein, 9 aa, synthetic construct
  source 1..9: note = Description of Artificial Sequence: Synthetic peptide; note = XENP020444 vlCDR3
QQGNTLPYT

SEQ ID NO: 21684 - protein, 447 aa, synthetic construct; identical to SEQ ID NO: 17235
  source 1..447: note = Description of Artificial Sequence: Synthetic polypeptide; note = XENP020445 2A11_H1L2-ipilimumab_H3.23_L0.132 Fab-Fc Heavy Chain

SEQ ID NO: 21685 - protein, 118 aa, synthetic construct; identical to SEQ ID NO: 17236
  source 1..118: note = Description of Artificial Sequence: Synthetic polypeptide; note = VH of XENP020445

SEQ ID NO: 21686 - protein, 5 aa, synthetic construct
  source 1..5: note = Description of Artificial Sequence: Synthetic peptide; note = XENP020445 vhCDR1
DYYMH

SEQ ID NO: 21687 - protein, 17 aa, synthetic construct
  source 1..17: note = Description of Artificial Sequence: Synthetic peptide; note = XENP020445 vhCDR2
WIDPENGDTEYAPKFQG

SEQ ID NO: 21688 - protein, 9 aa, synthetic construct
  source 1..9: note = Description of Artificial Sequence: Synthetic peptide; note = XENP020445 vhCDR3
RGVRQALDY

SEQ ID NO: 21689 - protein, 477 aa, synthetic construct
  source 1..477: note = Description of Artificial Sequence: Synthetic polypeptide; note = XENP020445 2A11_H1L2-ipilimumab_H3.23_L0.132 scFv-Fc Heavy Chain
EVQLVESGGGLVKPGGSLRLSCAASGFTFSSYTMHWVRQAPGKGLEWVSFISYDGNYKYYADSVKGRFTISRDNAKNSLYLQMNSLRAEDTAVYYCARGGHLGPFDLWGQGTMVTVSSGKPGSGKPGSGKPGSGKPGSEIVLTQSPATLSLSPGERATLSCRASQSVSSSYLAWYQQKPGQAPRLLIYGASSRATGIPDRFSGSGSGTDFTLTISRLEPEDFAVYYCQQYGSSPWTFGQGTKVEIKEPKSSDKTHTCPPCPAPPVAGPSVFLFPPKPKDTLMISRTPEVTCVVVDVKHEDPEVKFNWYVDGVEVHNAKTKPREEQYNSTYRVVSVLTVLHQDWLNGKEYKCKVSNKALPAPIEKTISKAKGQPREPQVYTLPPSREQMTKNQVKLTCLVKGFYPSDIAVEWESNGQPENNYKTTPPVLDSDGSFFLYSKLTVDKSRWQQGNVFSCSVMHEALHNHYTQKSLSLSPGK

SEQ ID NO: 21690 - protein, 118 aa, synthetic construct; identical to SEQ ID NO: 2632
  source 1..118: note = Description of Artificial Sequence: Synthetic polypeptide; note = VH of XENP020445

SEQ ID NO: 21691 - protein, 108 aa, synthetic construct; identical to SEQ ID NO: 2795
  source 1..108: note = Description of Artificial Sequence: Synthetic polypeptide; note = VL of XENP020445

SEQ ID NO: 21692 - protein, 231 aa, synthetic construct; identical to SEQ ID NO: 21532
  source 1..231: note = Description of Artificial Sequence: Synthetic polypeptide; note = Fc chain of XENP020445

SEQ ID NO: 21693 - protein, 5 aa, synthetic construct
  source 1..5: note = Description of Artificial Sequence: Synthetic peptide; note = XENP020445 vhCDR1
SYTMH

SEQ ID NO: 21694 - protein, 17 aa, synthetic construct
  source 1..17: note = Description of Artificial Sequence: Synthetic peptide; note = XENP020445 vhCDR2
FISYDGNYKYYADSVKG

SEQ ID NO: 21695 - protein, 9 aa, synthetic construct
  source 1..9: note = Description of Artificial Sequence: Synthetic peptide; note = XENP020445 vhCDR3
GGHLGPFDL

SEQ ID NO: 21696 - protein, 12 aa, synthetic construct
  source 1..12: note = Description of Artificial Sequence: Synthetic peptide; note = XENP020445 vlCDR1
RASQSVSSSYLA

SEQ ID NO: 21697 - protein, 7 aa, synthetic construct
  source 1..7: note = Description of Artificial Sequence: Synthetic peptide; note = XENP020445 vlCDR2
GASSRAT

SEQ ID NO: 21698 - protein, 9 aa, synthetic construct
  source 1..9: note = Description of Artificial Sequence: Synthetic peptide; note = XENP020445 vlCDR3
QQYGSSPWT

SEQ ID NO: 21699 - protein, 214 aa, synthetic construct; identical to SEQ ID NO: 17250
  source 1..214: note = Description of Artificial Sequence: Synthetic polypeptide; note = XENP020445 2A11_H1L2-ipilimumab_H3.23_L0.132 Light Chain

SEQ ID NO: 21700 - protein, 107 aa, synthetic construct; identical to SEQ ID NO: 17251
  source 1..107: note = Description of Artificial Sequence: Synthetic polypeptide; note = VL of XENP020445

SEQ ID NO: 21701 - protein, 11 aa, synthetic construct
  source 1..11: note = Description of Artificial Sequence: Synthetic peptide; note = XENP020445 vlCDR1
QASQDIGNYLN

SEQ ID NO: 21702 - protein, 7 aa, synthetic construct
  source 1..7: note = Description of Artificial Sequence: Synthetic peptide; note = XENP020445 vlCDR2
YTSRLHS

SEQ ID NO: 21703 - protein, 9 aa, synthetic construct
  source 1..9: note = Description of Artificial Sequence: Synthetic peptide; note = XENP020445 vlCDR3
QQGNTLPYT

SEQ ID NO: 21704 - protein, 447 aa, synthetic construct; identical to SEQ ID NO: 17235
  source 1..447: note = Description of Artificial Sequence: Synthetic polypeptide; note = XENP020446 2A11_H1L2-ipilimumab_H3.25_L0.124 Fab-Fc Heavy Chain

SEQ ID NO: 21705 - protein, 118 aa, synthetic construct; identical to SEQ ID NO: 17236
  source 1..118: note = Description of Artificial Sequence: Synthetic polypeptide; note = VH of XENP020446

SEQ ID NO: 21706 - protein, 5 aa, synthetic construct
  source 1..5: note = Description of Artificial Sequence: Synthetic peptide; note = XENP020446 vhCDR1
DYYMH

SEQ ID NO: 21707 - protein, 17 aa, synthetic construct
  source 1..17: note = Description of Artificial Sequence: Synthetic peptide; note = XENP020446 vhCDR2
WIDPENGDTEYAPKFQG

SEQ ID NO: 21708 - protein, 9 aa, synthetic construct
  source 1..9: note = Description of Artificial Sequence: Synthetic peptide; note = XENP020446 vhCDR3
RGVRQALDY

SEQ ID NO: 21709 - protein, 477 aa, synthetic construct
  source 1..477: note = Description of Artificial Sequence: Synthetic polypeptide; note = XENP020446 2A11_H1L2-ipilimumab_H3.25_L0.124 scFv-Fc Heavy Chain
EVQLVESGGGLVKPGGSLRLSCAASGFTFSSYTMHWVRQAPGKGLEWVSFISYDGNYKYYADSVKGRFTISRDNAKNSLYLQMNSLRAEDTAVYYCARGGLLGPFDLWGQGTMVTVSSGKPGSGKPGSGKPGSGKPGSEIVLTQSPATLSVSPGERATLSCRASQSVGSSYLAWYQQKPGQAPRLLIYGASSRATGIPDRFSGSGSGTDFTLTISRLEPEDFAVYYCQQYGSSPWTFGQGTKVEIKEPKSSDKTHTCPPCPAPPVAGPSVFLFPPKPKDTLMISRTPEVTCVVVDVKHEDPEVKFNWYVDGVEVHNAKTKPREEQYNSTYRVVSVLTVLHQDWLNGKEYKCKVSNKALPAPIEKTISKAKGQPREPQVYTLPPSREQMTKNQVKLTCLVKGFYPSDIAVEWESNGQPENNYKTTPPVLDSDGSFFLYSKLTVDKSRWQQGNVFSCSVMHEALHNHYTQKSLSLSPGK

SEQ ID NO: 21710 - protein, 118 aa, synthetic construct; identical to SEQ ID NO: 2650
  source 1..118: note = Description of Artificial Sequence: Synthetic polypeptide; note = VH of XENP020446

SEQ ID NO: 21711 - protein, 108 aa, synthetic construct; identical to SEQ ID NO: 2723
  source 1..108: note = Description of Artificial Sequence: Synthetic polypeptide; note = VL of XENP020446

SEQ ID NO: 21712 - protein, 231 aa, synthetic construct; identical to SEQ ID NO: 21532
  source 1..231: note = Description of Artificial Sequence: Synthetic polypeptide; note = Fc chain of XENP020446

SEQ ID NO: 21713 - protein, 5 aa, synthetic construct
  source 1..5: note = Description of Artificial Sequence: Synthetic peptide; note = XENP020446 vhCDR1
SYTMH

SEQ ID NO: 21714 - protein, 17 aa, synthetic construct
  source 1..17: note = Description of Artificial Sequence: Synthetic peptide; note = XENP020446 vhCDR2
FISYDGNYKYYADSVKG

SEQ ID NO: 21715 - protein, 9 aa, synthetic construct
  source 1..9: note = Description of Artificial Sequence: Synthetic peptide; note = XENP020446 vhCDR3
GGLLGPFDL

SEQ ID NO: 21716 - protein, 12 aa, synthetic construct
  source 1..12: note = Description of Artificial Sequence: Synthetic peptide; note = XENP020446 vlCDR1
RASQSVGSSYLA

SEQ ID NO: 21717 - protein, 7 aa, synthetic construct
  source 1..7: note = Description of Artificial Sequence: Synthetic peptide; note = XENP020446 vlCDR2
GASSRAT

SEQ ID NO: 21718 - protein, 9 aa, synthetic construct
  source 1..9: note = Description of Artificial Sequence: Synthetic peptide; note = XENP020446 vlCDR3
QQYGSSPWT

SEQ ID NO: 21719 - protein, 214 aa, synthetic construct; identical to SEQ ID NO: 17250
  source 1..214: note = Description of Artificial Sequence: Synthetic polypeptide; note = XENP020446 2A11_H1L2-ipilimumab_H3.25_L0.124 Light Chain

SEQ ID NO: 21720 - protein, 107 aa, synthetic construct; identical to SEQ ID NO: 17251
  source 1..107: note = Description of Artificial Sequence: Synthetic polypeptide; note = VL of XENP020446

SEQ ID NO: 21721 - protein, 11 aa, synthetic construct
  source 1..11: note = Description of Artificial Sequence: Synthetic peptide; note = XENP020446 vlCDR1
QASQDIGNYLN

SEQ ID NO: 21722 - protein, 7 aa, synthetic construct
  source 1..7: note = Description of Artificial Sequence: Synthetic peptide; note = XENP020446 vlCDR2
YTSRLHS

SEQ ID NO: 21723 - protein, 9 aa, synthetic construct
  source 1..9: note = Description of Artificial Sequence: Synthetic peptide; note = XENP020446 vlCDR3
QQGNTLPYT

SEQ ID NO: 21724 - protein, 447 aa, synthetic construct; identical to SEQ ID NO: 17235
  source 1..447: note = Description of Artificial Sequence: Synthetic polypeptide; note = XENP020447 2A11_H1L2-ipilimumab_H3.25_L0.129 Fab-Fc Heavy Chain

SEQ ID NO: 21725 - protein, 118 aa, synthetic construct; identical to SEQ ID NO: 17236
  source 1..118: note = Description of Artificial Sequence: Synthetic polypeptide; note = VH of XENP020447

SEQ ID NO: 21726 - protein, 5 aa, synthetic construct
  source 1..5: note = Description of Artificial Sequence: Synthetic peptide; note = XENP020447 vhCDR1
DYYMH

SEQ ID NO: 21727 - protein, 17 aa, synthetic construct
  source 1..17: note = Description of Artificial Sequence: Synthetic peptide; note = XENP020447 vhCDR2
WIDPENGDTEYAPKFQG

SEQ ID NO: 21728 - protein, 9 aa, synthetic construct
  source 1..9: note = Description of Artificial Sequence: Synthetic peptide; note = XENP020447 vhCDR3
RGVRQALDY

SEQ ID NO: 21729 - protein, 477 aa, synthetic construct
  source 1..477: note = Description of Artificial Sequence: Synthetic polypeptide; note = XENP020447 2A11_H1L2-ipilimumab_H3.25_L0.129 scFv-Fc Heavy Chain
EVQLVESGGGLVKPGGSLRLSCAASGFTFSSYTMHWVRQAPGKGLEWVSFISYDGNYKYYADSVKGRFTISRDNAKNSLYLQMNSLRAEDTAVYYCARGGLLGPFDLWGQGTMVTVSSGKPGSGKPGSGKPGSGKPGSEIVLTQSPATLSLSPGERATLSCRASQSVGSSYLAWYQQKPGQAPRLLIYGASSRATGIPDRFSGSGSGTDFTLTISRLEPEDFAVYYCQQYGSSPWTFGQGTKVEIKEPKSSDKTHTCPPCPAPPVAGPSVFLFPPKPKDTLMISRTPEVTCVVVDVKHEDPEVKFNWYVDGVEVHNAKTKPREEQYNSTYRVVSVLTVLHQDWLNGKEYKCKVSNKALPAPIEKTISKAKGQPREPQVYTLPPSREQMTKNQVKLTCLVKGFYPSDIAVEWESNGQPENNYKTTPPVLDSDGSFFLYSKLTVDKSRWQQGNVFSCSVMHEALHNHYTQKSLSLSPGK

SEQ ID NO: 21730 - protein, 118 aa, synthetic construct; identical to SEQ ID NO: 2650
  source 1..118: note = Description of Artificial Sequence: Synthetic polypeptide; note = VH of XENP020447

SEQ ID NO: 21731 - protein, 108 aa, synthetic construct; identical to SEQ ID NO: 2768
  source 1..108: note = Description of Artificial Sequence: Synthetic polypeptide; note = VL of XENP020447

SEQ ID NO: 21732 - protein, 231 aa, synthetic construct; identical to SEQ ID NO: 21532
  source 1..231: note = Description of Artificial Sequence: Synthetic polypeptide; note = Fc chain of XENP020447

SEQ ID NO: 21733 - protein, 5 aa, synthetic construct
  source 1..5: note = Description of Artificial Sequence: Synthetic peptide; note = XENP020447 vhCDR1
SYTMH

SEQ ID NO: 21734 - protein, 17 aa, synthetic construct
  source 1..17: note = Description of Artificial Sequence: Synthetic peptide; note = XENP020447 vhCDR2
FISYDGNYKYYADSVKG

SEQ ID NO: 21735 - protein, 9 aa, synthetic construct
  source 1..9: note = Description of Artificial Sequence: Synthetic peptide; note = XENP020447 vhCDR3
GGLLGPFDL

SEQ ID NO: 21736 - protein, 12 aa, synthetic construct
  source 1..12: note = Description of Artificial Sequence: Synthetic peptide; note = XENP020447 vlCDR1
RASQSVGSSYLA

SEQ ID NO: 21737 - protein, 7 aa, synthetic construct
  source 1..7: note = Description of Artificial Sequence: Synthetic peptide; note = XENP020447 vlCDR2
GASSRAT

SEQ ID NO: 21738 - protein, 9 aa, synthetic construct
  source 1..9: note = Description of Artificial Sequence: Synthetic peptide; note = XENP020447 vlCDR3
QQYGSSPWT

SEQ ID NO: 21739 - protein, 214 aa, synthetic construct; identical to SEQ ID NO: 17250
  source 1..214: note = Description of Artificial Sequence: Synthetic polypeptide; note = XENP020447 2A11_H1L2-ipilimumab_H3.25_L0.129 Light Chain

SEQ ID NO: 21740 - protein, 107 aa, synthetic construct; identical to SEQ ID NO: 17251
  source 1..107: note = Description of Artificial Sequence: Synthetic polypeptide; note = VL of XENP020447

SEQ ID NO: 21741 - protein, 11 aa, synthetic construct
  source 1..11: note = Description of Artificial Sequence: Synthetic peptide; note = XENP020447 vlCDR1
QASQDIGNYLN

SEQ ID NO: 21742 - protein, 7 aa, synthetic construct
  source 1..7: note = Description of Artificial Sequence: Synthetic peptide; note = XENP020447 vlCDR2
YTSRLHS

SEQ ID NO: 21743 - protein, 9 aa, synthetic construct
  source 1..9: note = Description of Artificial Sequence: Synthetic peptide; note = XENP020447 vlCDR3
QQGNTLPYT

SEQ ID NO: 21744 - protein, 447 aa, synthetic construct; identical to SEQ ID NO: 17235
  source 1..447: note = Description of Artificial Sequence: Synthetic polypeptide; note = XENP020448 2A11_H1L2-ipilimumab_H3.25_L0.132 Fab-Fc Heavy Chain

SEQ ID NO: 21745 - protein, 118 aa, synthetic construct; identical to SEQ ID NO: 17236
  source 1..118: note = Description of Artificial Sequence: Synthetic polypeptide; note = VH of XENP020448

SEQ ID NO: 21746 - protein, 5 aa, synthetic construct
  source 1..5: note = Description of Artificial Sequence: Synthetic peptide; note = XENP020448 vhCDR1
DYYMH

SEQ ID NO: 21747 - protein, 17 aa, synthetic construct
  source 1..17: note = Description of Artificial Sequence: Synthetic peptide; note = XENP020448 vhCDR2
WIDPENGDTEYAPKFQG

SEQ ID NO: 21748 - protein, 9 aa, synthetic construct
  source 1..9: note = Description of Artificial Sequence: Synthetic peptide; note = XENP020448 vhCDR3
RGVRQALDY

SEQ ID NO: 21749 - protein, 477 aa, synthetic construct
  source 1..477: note = Description of Artificial Sequence: Synthetic polypeptide; note = XENP020448 2A11_H1L2-ipilimumab_H3.25_L0.132 scFv-Fc Heavy Chain
EVQLVESGGGLVKPGGSLRLSCAASGFTFSSYTMHWVRQAPGKGLEWVSFISYDGNYKYYADSVKGRFTISRDNAKNSLYLQMNSLRAEDTAVYYCARGGLLGPFDLWGQGTMVTVSSGKPGSGKPGSGKPGSGKPGSEIVLTQSPATLSLSPGERATLSCRASQSVSSSYLAWYQQKPGQAPRLLIYGASSRATGIPDRFSGSGSGTDFTLTISRLEPEDFAVYYCQQYGSSPWTFGQGTKVEIKEPKSSDKTHTCPPCPAPPVAGPSVFLFPPKPKDTLMISRTPEVTCVVVDVKHEDPEVKFNWYVDGVEVHNAKTKPREEQYNSTYRVVSVLTVLHQDWLNGKEYKCKVSNKALPAPIEKTISKAKGQPREPQVYTLPPSREQMTKNQVKLTCLVKGFYPSDIAVEWESNGQPENNYKTTPPVLDSDGSFFLYSKLTVDKSRWQQGNVFSCSVMHEALHNHYTQKSLSLSPGK

SEQ ID NO: 21750 - protein, 118 aa, synthetic construct; identical to SEQ ID NO: 2650
  source 1..118: note = Description of Artificial Sequence: Synthetic polypeptide; note = VH of XENP020448

SEQ ID NO: 21751 - protein, 108 aa, synthetic construct; identical to SEQ ID NO: 2795
  source 1..108: note = Description of Artificial Sequence: Synthetic polypeptide; note = VL of XENP020448

SEQ ID NO: 21752 - protein, 231 aa, synthetic construct; identical to SEQ ID NO: 21532
  source 1..231: note = Description of Artificial Sequence: Synthetic polypeptide; note = Fc chain of XENP020448

SEQ ID NO: 21753 - protein, 5 aa, synthetic construct
  source 1..5: note = Description of Artificial Sequence: Synthetic peptide; note = XENP020448 vhCDR1
SYTMH

SEQ ID NO: 21754 - protein, 17 aa, synthetic construct
  source 1..17: note = Description of Artificial Sequence: Synthetic peptide; note = XENP020448 vhCDR2
FISYDGNYKYYADSVKG

SEQ ID NO: 21755 - protein, 9 aa, synthetic construct
  source 1..9: note = Description of Artificial Sequence: Synthetic peptide; note = XENP020448 vhCDR3
GGLLGPFDL

SEQ ID NO: 21756 - protein, 12 aa, synthetic construct
  source 1..12: note = Description of Artificial Sequence: Synthetic peptide; note = XENP020448 vlCDR1
RASQSVSSSYLA

SEQ ID NO: 21757 - protein, 7 aa, synthetic construct
  source 1..7: note = Description of Artificial Sequence: Synthetic peptide; note = XENP020448 vlCDR2
GASSRAT

SEQ ID NO: 21758 - protein, 9 aa, synthetic construct
  source 1..9: note = Description of Artificial Sequence: Synthetic peptide; note = XENP020448 vlCDR3
QQYGSSPWT

SEQ ID NO: 21759 - protein, 214 aa, synthetic construct; identical to SEQ ID NO: 17250
  source 1..214: note = Description of Artificial Sequence: Synthetic polypeptide; note = XENP020448 2A11_H1L2-ipilimumab_H3.25_L0.132 Light Chain

SEQ ID NO: 21760 - protein, 107 aa, synthetic construct; identical to SEQ ID NO: 17251
  source 1..107: note = Description of Artificial Sequence: Synthetic polypeptide; note = VL of XENP020448

SEQ ID NO: 21761 - protein, 11 aa, synthetic construct
  source 1..11: note = Description of Artificial Sequence: Synthetic peptide; note = XENP020448 vlCDR1
QASQDIGNYLN

SEQ ID NO: 21762 - protein, 7 aa, synthetic construct
  source 1..7: note = Description of Artificial Sequence: Synthetic peptide; note = XENP020448 vlCDR2
YTSRLHS

SEQ ID NO: 21763 - protein, 9 aa, synthetic construct
  source 1..9: note = Description of Artificial Sequence: Synthetic peptide; note = XENP020448 vlCDR3
QQGNTLPYT

SEQ ID NO: 21764 - protein, 447 aa, synthetic construct; identical to SEQ ID NO: 17235
  source 1..447: note = Description of Artificial Sequence: Synthetic polypeptide; note = XENP020041 2A11_H1L2_Fab-ipilimumab_H3L0 Fab-Fc Heavy Chain

SEQ ID NO: 21765 - protein, 118 aa, synthetic construct; identical to SEQ ID NO: 17236
  source 1..118: note = Description of Artificial Sequence: Synthetic polypeptide; note = VH of XENP020041

SEQ ID NO: 21766 - protein, 5 aa, synthetic construct
  source 1..5: note = Description of Artificial Sequence: Synthetic peptide; note = XENP020041 vhCDR1
DYYMH

SEQ ID NO: 21767 - protein, 17 aa, synthetic construct
  source 1..17: note = Description of Artificial Sequence: Synthetic peptide; note = XENP020041 vhCDR2
WIDPENGDTEYAPKFQG

SEQ ID NO: 21768 - protein, 9 aa, synthetic construct
  source 1..9: note = Description of Artificial Sequence: Synthetic peptide; note = XENP020041 vhCDR3
RGVRQALDY

SEQ ID NO: 21769 - protein, 477 aa, synthetic construct
  source 1..477: note = Description of Artificial Sequence: Synthetic polypeptide; note = XENP020041 2A11_H1L2_Fab-ipilimumab_H3L0 scFv-Fc Heavy Chain
EVQLVESGGGLVKPGGSLRLSCAASGFTFSSYTMHWVRQAPGKGLEWVSFISYDGNNKYYADSVKGRFTISRDNAKNSLYLQMNSLRAEDTAVYYCARTGWLGPFDYWGQGTLVTVSSGKPGSGKPGSGKPGSGKPGSEIVLTQSPGTLSLSPGERATLSCRASQSVGSSYLAWYQQKPGQAPRLLIYGAFSRATGIPDRFSGSGSGTDFTLTISRLEPEDFAVYYCQQYGSSPWTFGQGTKVEIKEPKSSDKTHTCPPCPAPPVAGPSVFLFPPKPKDTLMISRTPEVTCVVVDVKHEDPEVKFNWYVDGVEVHNAKTKPREEQYNSTYRVVSVLTVLHQDWLNGKEYKCKVSNKALPAPIEKTISKAKGQPREPQVYTLPPSREQMTKNQVKLTCLVKGFYPSDIAVEWESNGQPENNYKTTPPVLDSDGSFFLYSKLTVDKSRWQQGNVFSCSVMHEALHNHYTQKSLSLSPGK

SEQ ID NO: 21770 - protein, 118 aa, synthetic construct; identical to SEQ ID NO: 139
  source 1..118: note = Description of Artificial Sequence: Synthetic polypeptide; note = VH of XENP020041

SEQ ID NO: 21771 - protein, 108 aa, synthetic construct; identical to SEQ ID NO: 23
  source 1..108: note = Description of Artificial Sequence: Synthetic polypeptide; note = VL of XENP020041

SEQ ID NO: 21772 - protein, 231 aa, synthetic construct; identical to SEQ ID NO: 21532
  source 1..231: note = Description of Artificial Sequence: Synthetic polypeptide; note = Fc chain of XENP020041

SEQ ID NO: 21773 - protein, 5 aa, synthetic construct
  source 1..5: note = Description of Artificial Sequence: Synthetic peptide; note = XENP020041 vhCDR1
SYTMH

SEQ ID NO: 21774 - protein, 17 aa, synthetic construct
  source 1..17: note = Description of Artificial Sequence: Synthetic peptide; note = XENP020041 vhCDR2
FISYDGNNKYYADSVKG

SEQ ID NO: 21775 - protein, 9 aa, synthetic construct
  source 1..9: note = Description of Artificial Sequence: Synthetic peptide; note = XENP020041 vhCDR3
TGWLGPFDY

SEQ ID NO: 21776 - protein, 12 aa, synthetic construct
  source 1..12: note = Description of Artificial Sequence: Synthetic peptide; note = XENP020041 vlCDR1
RASQSVGSSYLA

SEQ ID NO: 21777 - protein, 7 aa, synthetic construct
  source 1..7: note = Description of Artificial Sequence: Synthetic peptide; note = XENP020041 vlCDR2
GAFSRAT

SEQ ID NO: 21778 - protein, 9 aa, synthetic construct
  source 1..9: note = Description of Artificial Sequence: Synthetic peptide; note = XENP020041 vlCDR3
QQYGSSPWT

SEQ ID NO: 21779 - protein, 214 aa, synthetic construct; identical to SEQ ID NO: 17250
  source 1..214: note = Description of Artificial Sequence: Synthetic polypeptide; note = XENP020041 2A11_H1L2_Fab-ipilimumab_H3L0 Light Chain

SEQ ID NO: 21780 - protein, 107 aa, synthetic construct; identical to SEQ ID NO: 17251
  source 1..107: note = Description of Artificial Sequence: Synthetic polypeptide; note = VL of XENP020041

SEQ ID NO: 21781 - protein, 11 aa, synthetic construct
  source 1..11: note = Description of Artificial Sequence: Synthetic peptide; note = XENP020041 vlCDR1
QASQDIGNYLN

SEQ ID NO: 21782 - protein, 7 aa, synthetic construct
  source 1..7: note = Description of Artificial Sequence: Synthetic peptide; note = XENP020041 vlCDR2
YTSRLHS

SEQ ID NO: 21783 - protein, 9 aa, synthetic construct
  source 1..9: note = Description of Artificial Sequence: Synthetic peptide; note = XENP020041 vlCDR3
QQGNTLPYT

SEQ ID NO: 21784 - protein, 447 aa, synthetic construct; identical to SEQ ID NO: 17235
  source 1..447: note = Description of Artificial Sequence: Synthetic polypeptide; note = XENP020152 2A11_H1L2_Fab-ipilimumab_H3.3_L0.12 Fab-Fc Heavy Chain

SEQ ID NO: 21785 - protein, 118 aa, synthetic construct; identical to SEQ ID NO: 17236
  source 1..118: note = Description of Artificial Sequence: Synthetic polypeptide; note = VH of XENP020152

SEQ ID NO: 21786 - protein, 5 aa, synthetic construct
  source 1..5: note = Description of Artificial Sequence: Synthetic peptide; note = XENP020152 vhCDR1
DYYMH

SEQ ID NO: 21787 - protein, 17 aa, synthetic construct
  source 1..17: note = Description of Artificial Sequence: Synthetic peptide; note = XENP020152 vhCDR2
WIDPENGDTEYAPKFQG

SEQ ID NO: 21788 - protein, 9 aa, synthetic construct
  source 1..9: note = Description of Artificial Sequence: Synthetic peptide; note = XENP020152 vhCDR3
RGVRQALDY

SEQ ID NO: 21789 - protein, 477 aa, synthetic construct
  source 1..477: note = Description of Artificial Sequence: Synthetic polypeptide; note = XENP020152 2A11_H1L2_Fab-ipilimumab_H3.3_L0.12 scFv-Fc Heavy Chain
EVQLVESGGGLVKPGGSLRLSCAASGFTFSSYTMHWVRQAPGKGLEWVSFISYDGNQKYYADSVKGRFTISRDNAKNSLYLQMNSLRAEDTAVYYCARTGLLGPFDLWGQGTMVTVSSGKPGSGKPGSGKPGSGKPGSEIVLTQSPGTLSVSPGERATLSCRASQSVGSSYLAWYQQKPGQAPRLLIYGAFSRATGIPDRFSGSGSGTDFTLTISRLEPEDFAVYYCQQYGSSPWTFGQGTKVEIKEPKSSDKTHTCPPCPAPPVAGPSVFLFPPKPKDTLMISRTPEVTCVVVDVKHEDPEVKFNWYVDGVEVHNAKTKPREEQYNSTYRVVSVLTVLHQDWLNGKEYKCKVSNKALPAPIEKTISKAKGQPREPQVYTLPPSREQMTKNQVKLTCLVKGFYPSDIAVEWESNGQPENNYKTTPPVLDSDGSFFLYSKLTVDKSRWQQGNVFSCSVMHEALHNHYTQKSLSLSPGK

SEQ ID NO: 21790 - protein, 118 aa, synthetic construct; identical to SEQ ID NO: 2452
  source 1..118: note = Description of Artificial Sequence: Synthetic polypeptide; note = VH of XENP020152

SEQ ID NO: 21791 - protein, 108 aa, synthetic construct; identical to SEQ ID NO: 1517
  source 1..108: note = Description of Artificial Sequence: Synthetic polypeptide; note = VL of XENP020152

SEQ ID NO: 21792 - protein, 231 aa, synthetic construct; identical to SEQ ID NO: 21532
  source 1..231: note = Description of Artificial Sequence: Synthetic polypeptide; note = Fc chain of XENP020152

SEQ ID NO: 21793 - protein, 5 aa, synthetic construct
  source 1..5: note = Description of Artificial Sequence: Synthetic peptide; note = XENP020152 vhCDR1
SYTMH

SEQ ID NO: 21794 - protein, 17 aa, synthetic construct
  source 1..17: note = Description of Artificial Sequence: Synthetic peptide; note = XENP020152 vhCDR2
FISYDGNQKYYADSVKG

SEQ ID NO: 21795 - protein, 9 aa, synthetic construct
  source 1..9: note = Description of Artificial Sequence: Synthetic peptide; note = XENP020152 vhCDR3
TGLLGPFDL

SEQ ID NO: 21796 - protein, 12 aa, synthetic construct
  source 1..12: note = Description of Artificial Sequence: Synthetic peptide; note = XENP020152 vlCDR1
RASQSVGSSYLA

SEQ ID NO: 21797 - protein, 7 aa, synthetic construct
  source 1..7: note = Description of Artificial Sequence: Synthetic peptide; note = XENP020152 vlCDR2
GAFSRAT

SEQ ID NO: 21798 - protein, 9 aa, synthetic construct
  source 1..9: note = Description of Artificial Sequence: Synthetic peptide; note = XENP020152 vlCDR3
QQYGSSPWT

SEQ ID NO: 21799 - protein, 214 aa, synthetic construct; identical to SEQ ID NO: 17250
  source 1..214: note = Description of Artificial Sequence: Synthetic polypeptide; note = XENP020152 2A11_H1L2_Fab-ipilimumab_H3.3_L0.12 Light Chain

SEQ ID NO: 21800 - protein, 107 aa, synthetic construct; identical to SEQ ID NO: 17251
  source 1..107: note = Description of Artificial Sequence: Synthetic polypeptide; note = VL of XENP020152

SEQ ID NO: 21801 - protein, 11 aa, synthetic construct
  source 1..11: note = Description of Artificial Sequence: Synthetic peptide; note = XENP020152 vlCDR1
QASQDIGNYLN

SEQ ID NO: 21802 - protein, 7 aa, synthetic construct
  source 1..7: note = Description of Artificial Sequence: Synthetic peptide; note = XENP020152 vlCDR2
YTSRLHS

SEQ ID NO: 21803 - protein, 9 aa, synthetic construct
  source 1..9: note = Description of Artificial Sequence: Synthetic peptide; note = XENP020152 vlCDR3
QQGNTLPYT

SEQ ID NO: 21804 - protein, 447 aa, synthetic construct; identical to SEQ ID NO: 17235
  source 1..447: note = Description of Artificial Sequence: Synthetic polypeptide; note = XENP020153 2A11_H1L2_Fab-ipilimumab_H3.4_L0.12 Fab-Fc Heavy Chain

SEQ ID NO: 21805 - protein, 118 aa, synthetic construct; identical to SEQ ID NO: 17236
  source 1..118: note = Description of Artificial Sequence: Synthetic polypeptide; note = VH of XENP020153

SEQ ID NO: 21806 - protein, 5 aa, synthetic construct
  source 1..5: note = Description of Artificial Sequence: Synthetic peptide; note = XENP020153 vhCDR1
DYYMH

SEQ ID NO: 21807 - protein, 17 aa, synthetic construct
  source 1..17: note = Description of Artificial Sequence: Synthetic peptide; note = XENP020153 vhCDR2
WIDPENGDTEYAPKFQG

SEQ ID NO: 21808 - protein, 9 aa, synthetic construct
  source 1..9: note = Description of Artificial Sequence: Synthetic peptide; note = XENP020153 vhCDR3
RGVRQALDY

SEQ ID NO: 21809 - protein, 477 aa, synthetic construct; identical to SEQ ID NO: 21549
  source 1..477: note = Description of Artificial Sequence: Synthetic polypeptide; note = XENP020153 2A11_H1L2_Fab-ipilimumab_H3.4_L0.12 scFv-Fc Heavy Chain

SEQ ID NO: 21810 - protein, 118 aa, synthetic construct; identical to SEQ ID NO: 2461
  source 1..118: note = Description of Artificial Sequence: Synthetic polypeptide; note = VH of XENP020153

SEQ ID NO: 21811 - protein, 108 aa, synthetic construct; identical to SEQ ID NO: 1517
  source 1..108: note = Description of Artificial Sequence: Synthetic polypeptide; note = VL of XENP020153

SEQ ID NO: 21812 - protein, 231 aa, synthetic construct; identical to SEQ ID NO: 21532
  source 1..231: note = Description of Artificial Sequence: Synthetic polypeptide; note = Fc chain of XENP020153

SEQ ID NO: 21813 - protein, 5 aa, synthetic construct
  source 1..5: note = Description of Artificial Sequence: Synthetic peptide; note = XENP020153 vhCDR1
SYTMH

SEQ ID NO: 21814 - protein, 17 aa, synthetic construct
  source 1..17: note = Description of Artificial Sequence: Synthetic peptide; note = XENP020153 vhCDR2
FISYDGNHKYYADSVKG

SEQ ID NO: 21815 - protein, 9 aa, synthetic construct
  source 1..9: note = Description of Artificial Sequence: Synthetic peptide; note = XENP020153 vhCDR3
TGHLGPFDL

SEQ ID NO: 21816 - protein, 12 aa, synthetic construct
  source 1..12: note = Description of Artificial Sequence: Synthetic peptide; note = XENP020153 vlCDR1
RASQSVGSSYLA

SEQ ID NO: 21817 - protein, 7 aa, synthetic construct
  source 1..7: note = Description of Artificial Sequence: Synthetic peptide; note = XENP020153 vlCDR2
GAFSRAT

SEQ ID NO: 21818 - protein, 9 aa, synthetic construct
  source 1..9: note = Description of Artificial Sequence: Synthetic peptide; note = XENP020153 vlCDR3
QQYGSSPWT

SEQ ID NO: 21819 - protein, 214 aa, synthetic construct; identical to SEQ ID NO: 17250
  source 1..214: note = Description of Artificial Sequence: Synthetic polypeptide; note = XENP020153 2A11_H1L2_Fab-ipilimumab_H3.4_L0.12 Light Chain

SEQ ID NO: 21820 - protein, 107 aa, synthetic construct; identical to SEQ ID NO: 17251
  source 1..107: note = Description of Artificial Sequence: Synthetic polypeptide; note = VL of XENP020153

SEQ ID NO: 21821 - protein, 11 aa, synthetic construct
  source 1..11: note = Description of Artificial Sequence: Synthetic peptide; note = XENP020153 vlCDR1
QASQDIGNYLN

SEQ ID NO: 21822 - protein, 7 aa, synthetic construct
  source 1..7: note = Description of Artificial Sequence: Synthetic peptide; note = XENP020153 vlCDR2
YTSRLHS

SEQ ID NO: 21823 - protein, 9 aa, synthetic construct
  source 1..9: note = Description of Artificial Sequence: Synthetic peptide; note = XENP020153 vlCDR3
QQGNTLPYT

SEQ ID NO: 21824 - protein, 447 aa, synthetic construct; identical to SEQ ID NO: 17235
  source 1..447: note = Description of Artificial Sequence: Synthetic polypeptide; note = XENP020440 2A11_H1L2_Fab-ipilimumab_H3.21_L0.124 Fab-Fc Heavy Chain

SEQ ID NO: 21825 - protein, 118 aa, synthetic construct; identical to SEQ ID NO: 17236
  source 1..118: note = Description of Artificial Sequence: Synthetic polypeptide; note = VH of XENP020440

SEQ ID NO: 21826 - protein, 5 aa, synthetic construct
  source 1..5: note = Description of Artificial Sequence: Synthetic peptide; note = XENP020440 vhCDR1
DYYMH

SEQ ID NO: 21827 - protein, 17 aa, synthetic construct
  source 1..17: note = Description of Artificial Sequence: Synthetic peptide; note = XENP020440 vhCDR2
WIDPENGDTEYAPKFQG

SEQ ID NO: 21828 - protein, 9 aa, synthetic construct
  source 1..9: note = Description of Artificial Sequence: Synthetic peptide; note = XENP020440 vhCDR3
RGVRQALDY

SEQ ID NO: 21829 - protein, 477 aa, synthetic construct; identical to SEQ ID NO: 21589
  source 1..477: note = Description of Artificial Sequence: Synthetic polypeptide; note = XENP020440 2A11_H1L2_Fab-ipilimumab_H3.21_L0.124 scFv-Fc Heavy Chain

SEQ ID NO: 21830 - protein, 118 aa, synthetic construct; identical to SEQ ID NO: 2614
  source 1..118: note = Description of Artificial Sequence: Synthetic polypeptide; note = VH of XENP020440

SEQ ID NO: 21831 - protein, 108 aa, synthetic construct; identical to SEQ ID NO: 2723
  source 1..108: note = Description of Artificial Sequence: Synthetic polypeptide; note = VL of XENP020440

SEQ ID NO: 21832 - protein, 231 aa, synthetic construct; identical to SEQ ID NO: 21532
  source 1..231: note = Description of Artificial Sequence: Synthetic polypeptide; note = Fc chain of XENP020440

SEQ ID NO: 21833 - protein, 5 aa, synthetic construct
  source 1..5: note = Description of Artificial Sequence: Synthetic peptide; note = XENP020440 vhCDR1
SYTMH

SEQ ID NO: 21834 - protein, 17 aa, synthetic construct
  source 1..17: note = Description of Artificial Sequence: Synthetic peptide; note = XENP020440 vhCDR2
FISYDGNTKYYADSVKG

SEQ ID NO: 21835 - protein, 9 aa, synthetic construct
  source 1..9: note = Description of Artificial Sequence: Synthetic peptide; note = XENP020440 vhCDR3
GGLLGPFDL

SEQ ID NO: 21836 - protein, 12 aa, synthetic construct
  source 1..12: note = Description of Artificial Sequence: Synthetic peptide; note = XENP020440 vlCDR1
RASQSVGSSYLA

SEQ ID NO: 21837 - protein, 7 aa, synthetic construct
  source 1..7: note = Description of Artificial Sequence: Synthetic peptide; note = XENP020440 vlCDR2
GASSRAT

SEQ ID NO: 21838 - protein, 9 aa, synthetic construct
  source 1..9: note = Description of Artificial Sequence: Synthetic peptide; note = XENP020440 vlCDR3
QQYGSSPWT

SEQ ID NO: 21839 - protein, 214 aa, synthetic construct; identical to SEQ ID NO: 17250
  source 1..214: note = Description of Artificial Sequence: Synthetic polypeptide; note = XENP020440 2A11_H1L2_Fab-ipilimumab_H3.21_L0.124 Light Chain

SEQ ID NO: 21840 - protein, 107 aa, synthetic construct; identical to SEQ ID NO: 17251
  source 1..107: note = Description of Artificial Sequence: Synthetic polypeptide; note = VL of XENP020440

SEQ ID NO: 21841 - protein, 11 aa, synthetic construct
  source 1..11: note = Description of Artificial Sequence: Synthetic peptide; note = XENP020440 vlCDR1
QASQDIGNYLN

SEQ ID NO: 21842 - protein, 7 aa, synthetic construct
  source 1..7: note = Description of Artificial Sequence: Synthetic peptide; note = XENP020440 vlCDR2
YTSRLHS

SEQ ID NO: 21843 - protein, 9 aa, synthetic construct
  source 1..9: note = Description of Artificial Sequence: Synthetic peptide; note = XENP020440 vlCDR3
QQGNTLPYT

SEQ ID NO: 21844 - protein, 447 aa, synthetic construct; identical to SEQ ID NO: 17235
  source 1..447: note = Description of Artificial Sequence: Synthetic polypeptide; note = XENP020441 2A11_H1L2_Fab-ipilimumab_H3.21_L0.129 Fab-Fc Heavy Chain

SEQ ID NO: 21845 - protein, 118 aa, synthetic construct; identical to SEQ ID NO: 17236
  source 1..118: note = Description of Artificial Sequence: Synthetic polypeptide; note = VH of XENP020441

SEQ ID NO: 21846 - protein, 5 aa, synthetic construct
  source 1..5: note = Description of Artificial Sequence: Synthetic peptide; note = XENP020441 vhCDR1
DYYMH

SEQ ID NO: 21847 - protein, 17 aa, synthetic construct
  source 1..17: note = Description of Artificial Sequence: Synthetic peptide; note = XENP020441 vhCDR2
WIDPENGDTEYAPKFQG

SEQ ID NO: 21848 - protein, 9 aa, synthetic construct
  source 1..9: note = Description of Artificial Sequence: Synthetic peptide; note = XENP020441 vhCDR3
RGVRQALDY

SEQ ID NO: 21849 - protein, 477 aa, synthetic construct; identical to SEQ ID NO: 21609
  source 1..477: note = Description of Artificial Sequence: Synthetic polypeptide; note = XENP020441 2A11_H1L2_Fab-ipilimumab_H3.21_L0.129 scFv-Fc Heavy Chain

SEQ ID NO: 21850 - protein, 118 aa, synthetic construct; identical to SEQ ID NO: 2614
  source 1..118: note = Description of Artificial Sequence: Synthetic polypeptide; note = VH of XENP020441

SEQ ID NO: 21851 - protein, 108 aa, synthetic construct; identical to SEQ ID NO: 2768
  source 1..108: note = Description of Artificial Sequence: Synthetic polypeptide; note = VL of XENP020441

SEQ ID NO: 21852 - protein, 231 aa, synthetic construct; identical to SEQ ID NO: 21532
  source 1..231: note = Description of Artificial Sequence: Synthetic polypeptide; note = Fc chain of XENP020441

SEQ ID NO: 21853 - protein, 5 aa, synthetic construct
  source 1..5: note = Description of Artificial Sequence: Synthetic peptide; note = XENP020441 vhCDR1
SYTMH

SEQ ID NO: 21854 - protein, 17 aa, synthetic construct
  source 1..17: note = Description of Artificial Sequence: Synthetic peptide; note = XENP020441 vhCDR2
FISYDGNTKYYADSVKG

SEQ ID NO: 21855 - protein, 9 aa, synthetic construct
  source 1..9: note = Description of Artificial Sequence: Synthetic peptide; note = XENP020441 vhCDR3
GGLLGPFDL

SEQ ID NO: 21856 - protein, 12 aa, synthetic construct
  source 1..12: note = Description of Artificial Sequence: Synthetic peptide; note = XENP020441 vlCDR1
RASQSVGSSYLA

SEQ ID NO: 21857 - protein, 7 aa, synthetic construct
  source 1..7: note = Description of Artificial Sequence: Synthetic peptide; note = XENP020441 vlCDR2
GASSRAT

SEQ ID NO: 21858 - protein, 9 aa, synthetic construct
  source 1..9: note = Description of Artificial Sequence: Synthetic peptide; note = XENP020441 vlCDR3
QQYGSSPWT

SEQ ID NO: 21859 - protein, 214 aa, synthetic construct; identical to SEQ ID NO: 17250
  source 1..214: note = Description of Artificial Sequence: Synthetic polypeptide; note = XENP020441 2A11_H1L2_Fab-ipilimumab_H3.21_L0.129 Light Chain

SEQ ID NO: 21860 - protein, 107 aa, synthetic construct; identical to SEQ ID NO: 17251
  source 1..107: note = Description of Artificial Sequence: Synthetic polypeptide; note = VL of XENP020441

SEQ ID NO: 21861 - protein, 11 aa, synthetic construct
  source 1..11: note = Description of Artificial Sequence: Synthetic peptide; note = XENP020441 vlCDR1
QASQDIGNYLN

SEQ ID NO: 21862 - protein, 7 aa, synthetic construct
  source 1..7: note = Description of Artificial Sequence: Synthetic peptide; note = XENP020441 vlCDR2
YTSRLHS

SEQ ID NO: 21863 - protein, 9 aa, synthetic construct
  source 1..9: note = Description of Artificial Sequence: Synthetic peptide; note = XENP020441 vlCDR3
QQGNTLPYT

SEQ ID NO: 21864 - protein, 447 aa, synthetic construct; identical to SEQ ID NO: 17235
  source 1..447: note = Description of Artificial Sequence: Synthetic polypeptide; note = XENP020442 2A11_H1L2_Fab-ipilimumab_H3.21_L0.132 Fab-Fc Heavy Chain

SEQ ID NO: 21865 - protein, 118 aa, synthetic construct; identical to SEQ ID NO: 17236
  source 1..118: note = Description of Artificial Sequence: Synthetic polypeptide; note = VH of XENP020442

SEQ ID NO: 21866 - protein, 5 aa, synthetic construct
  source 1..5: note = Description of Artificial Sequence: Synthetic peptide; note = XENP020442 vhCDR1
DYYMH

SEQ ID NO: 21867 - protein, 17 aa, synthetic construct
  source 1..17: note = Description of Artificial Sequence: Synthetic peptide; note = XENP020442 vhCDR2
WIDPENGDTEYAPKFQG

SEQ ID NO: 21868 - protein, 9 aa, synthetic construct
  source 1..9: note = Description of Artificial Sequence: Synthetic peptide; note = XENP020442 vhCDR3
RGVRQALDY

SEQ ID NO: 21869 - protein, 477 aa, synthetic construct; identical to SEQ ID NO: 21629
  source 1..477: note = Description of Artificial Sequence: Synthetic polypeptide; note = XENP020442 2A11_H1L2_Fab-ipilimumab_H3.21_L0.132 scFv-Fc Heavy Chain

SEQ ID NO: 21870 - protein, 118 aa, synthetic construct; identical to SEQ ID NO: 2614
  source 1..118: note = Description of Artificial Sequence: Synthetic polypeptide; note = VH of XENP020442

SEQ ID NO: 21871 - protein, 108 aa, synthetic construct; identical to SEQ ID NO: 2795
  source 1..108: note = Description of Artificial Sequence: Synthetic polypeptide; note = VL of XENP020442

SEQ ID NO: 21872 - protein, 231 aa, synthetic construct; identical to SEQ ID NO: 21532
  source 1..231: note = Description of Artificial Sequence: Synthetic polypeptide; note = Fc chain of XENP020442

SEQ ID NO: 21873 - protein, 5 aa, synthetic construct
  source 1..5: note = Description of Artificial Sequence: Synthetic peptide; note = XENP020442 vhCDR1
SYTMH

SEQ ID NO: 21874 - protein, 17 aa, synthetic construct
  source 1..17: note = Description of Artificial Sequence: Synthetic peptide; note = XENP020442 vhCDR2
FISYDGNTKYYADSVKG

SEQ ID NO: 21875 - protein, 9 aa, synthetic construct
  source 1..9: note = Description of Artificial Sequence: Synthetic peptide; note = XENP020442 vhCDR3
GGLLGPFDL

SEQ ID NO: 21876 - protein, 12 aa, synthetic construct
  source 1..12: note = Description of Artificial Sequence: Synthetic peptide; note = XENP020442 vlCDR1
RASQSVSSSYLA

SEQ ID NO: 21877 - protein, 7 aa, synthetic construct
  source 1..7: note = Description of Artificial Sequence: Synthetic peptide; note = XENP020442 vlCDR2
GASSRAT

SEQ ID NO: 21878 - protein, 9 aa, synthetic construct
  source 1..9: note = Description of Artificial Sequence: Synthetic peptide; note = XENP020442 vlCDR3
QQYGSSPWT

SEQ ID NO: 21879 - protein, 214 aa, synthetic construct; identical to SEQ ID NO: 17250
  source 1..214: note = Description of Artificial Sequence: Synthetic polypeptide; note = XENP020442 2A11_H1L2_Fab-ipilimumab_H3.21_L0.132 Light Chain

SEQ ID NO: 21880 - protein, 107 aa, synthetic construct; identical to SEQ ID NO: 17251
  source 1..107: note = Description of Artificial Sequence: Synthetic polypeptide; note = VL of XENP020442

SEQ ID NO: 21881 - protein, 11 aa, synthetic construct
  source 1..11: note = Description of Artificial Sequence: Synthetic peptide; note = XENP020442 vlCDR1
QASQDIGNYLN

SEQ ID NO: 21882 - protein, 7 aa, synthetic construct
  source 1..7: note = Description of Artificial Sequence: Synthetic peptide; note = XENP020442 vlCDR2
YTSRLHS

SEQ ID NO: 21883 - protein, 9 aa, synthetic construct
  source 1..9: note = Description of Artificial Sequence: Synthetic peptide; note = XENP020442 vlCDR3
QQGNTLPYT

SEQ ID NO: 21884 - protein, 447 aa, synthetic construct; identical to SEQ ID NO: 17235
  source 1..447: note = Description of Artificial Sequence: Synthetic polypeptide; note = XENP020443 2A11_H1L2_Fab-ipilimumab_H3.23_L0.124 Fab-Fc Heavy Chain

SEQ ID NO: 21885 - protein, 118 aa, synthetic construct; identical to SEQ ID NO: 17236
  source 1..118: note = Description of Artificial Sequence: Synthetic polypeptide; note = VH of XENP020443

SEQ ID NO: 21886 - protein, 5 aa, synthetic construct
  source 1..5: note = Description of Artificial Sequence: Synthetic peptide; note = XENP020443 vhCDR1
DYYMH

SEQ ID NO: 21887 - protein, 17 aa, synthetic construct
  source 1..17: note = Description of Artificial Sequence: Synthetic peptide; note = XENP020443 vhCDR2
WIDPENGDTEYAPKFQG

SEQ ID NO: 21888 - protein, 9 aa, synthetic construct
  source 1..9: note = Description of Artificial Sequence: Synthetic peptide; note = XENP020443 vhCDR3
RGVRQALDY

SEQ ID NO: 21889 - protein, 477 aa, synthetic construct; identical to SEQ ID NO: 21649
  source 1..477: note = Description of Artificial Sequence: Synthetic polypeptide; note = XENP020443 2A11_H1L2_Fab-ipilimumab_H3.23_L0.124 scFv-Fc Heavy Chain

SEQ ID NO: 21890 - protein, 118 aa, synthetic construct; identical to SEQ ID NO: 2632
  source 1..118: note = Description of Artificial Sequence: Synthetic polypeptide; note = VH of XENP020443

SEQ ID NO: 21891 - protein, 108 aa, synthetic construct; identical to SEQ ID NO: 2723
  source 1..108: note = Description of Artificial Sequence: Synthetic polypeptide; note = VL of XENP020443

SEQ ID NO: 21892 - protein, 231 aa, synthetic construct; identical to SEQ ID NO: 21532
  source 1..231: note = Description of Artificial Sequence: Synthetic polypeptide; note = Fc chain of XENP020443

SEQ ID NO: 21893 - protein, 5 aa, synthetic construct
  source 1..5: note = Description of Artificial Sequence: Synthetic peptide; note = XENP020443 vhCDR1
SYTMH

SEQ ID NO: 21894 - protein, 17 aa, synthetic construct
  source 1..17: note = Description of Artificial Sequence: Synthetic peptide; note = XENP020443 vhCDR2
FISYDGNYKYYADSVKG

SEQ ID NO: 21895 - protein, 9 aa, synthetic construct
  source 1..9: note = Description of Artificial Sequence: Synthetic peptide; note = XENP020443 vhCDR3
GGHLGPFDL

SEQ ID NO: 21896 - protein, 12 aa, synthetic construct
  source 1..12: note = Description of Artificial Sequence: Synthetic peptide; note = XENP020443 vlCDR1
RASQSVGSSYLA

SEQ ID NO: 21897 - protein, 7 aa, synthetic construct
  source 1..7: note = Description of Artificial Sequence: Synthetic peptide; note = XENP020443 vlCDR2
GASSRAT

SEQ ID NO: 21898 - protein, 9 aa, synthetic construct
  source 1..9: note = Description of Artificial Sequence: Synthetic peptide; note = XENP020443 vlCDR3
QQYGSSPWT

SEQ ID NO: 21899 - protein, 214 aa, synthetic construct; identical to SEQ ID NO: 17250
  source 1..214: note = Description of Artificial Sequence: Synthetic polypeptide; note = XENP020443 2A11_H1L2_Fab-ipilimumab_H3.23_L0.124 Light Chain

SEQ ID NO: 21900 - protein, 107 aa, synthetic construct; identical to SEQ ID NO: 17251
  source 1..107: note = Description of Artificial Sequence: Synthetic polypeptide; note = VL of XENP020443

SEQ ID NO: 21901 - protein, 11 aa, synthetic construct
  source 1..11: note = Description of Artificial Sequence: Synthetic peptide; note = XENP020443 vlCDR1
QASQDIGNYLN

SEQ ID NO: 21902 - protein, 7 aa, synthetic construct
  source 1..7: note = Description of Artificial Sequence: Synthetic peptide; note = XENP020443 vlCDR2
YTSRLHS

SEQ ID NO: 21903 - protein, 9 aa, synthetic construct
  source 1..9: note = Description of Artificial Sequence: Synthetic peptide; note = XENP020443 vlCDR3
QQGNTLPYT

SEQ ID NO: 21904 - protein, 447 aa, synthetic construct; identical to SEQ ID NO: 17235
  source 1..447: note = Description of Artificial Sequence: Synthetic polypeptide; note = XENP020444 2A11_H1L2_Fab-ipilimumab_H3.23_L0.129 Fab-Fc Heavy Chain

SEQ ID NO: 21905 - protein, 118 aa, synthetic construct; identical to SEQ ID NO: 17236
  source 1..118: note = Description of Artificial Sequence: Synthetic polypeptide; note = VH of XENP020444

SEQ ID NO: 21906 - protein, 5 aa, synthetic construct
  source 1..5: note = Description of Artificial Sequence: Synthetic peptide; note = XENP020444 vhCDR1
DYYMH

SEQ ID NO: 21907 - protein, 17 aa, synthetic construct
  source 1..17: note = Description of Artificial Sequence: Synthetic peptide; note = XENP020444 vhCDR2
WIDPENGDTEYAPKFQG

SEQ ID NO: 21908 - protein, 9 aa, synthetic construct
  source 1..9: note = Description of Artificial Sequence: Synthetic peptide; note = XENP020444 vhCDR3
RGVRQALDY

SEQ ID NO: 21909 - protein, 477 aa, synthetic construct; identical to SEQ ID NO: 21669
  source 1..477: note = Description of Artificial Sequence: Synthetic polypeptide; note = XENP020444 2A11_H1L2_Fab-ipilimumab_H3.23_L0.129 scFv-Fc Heavy Chain

SEQ ID NO: 21910 - protein, 118 aa, synthetic construct; identical to SEQ ID NO: 2632
  source 1..118: note = Description of Artificial Sequence: Synthetic polypeptide; note = VH of XENP020444

SEQ ID NO: 21911 - protein, 108 aa, synthetic construct; identical to SEQ ID NO: 2768
  source 1..108: note = Description of Artificial Sequence: Synthetic polypeptide; note = VL of XENP020444

SEQ ID NO: 21912 - protein, 231 aa, synthetic construct; identical to SEQ ID NO: 21532
  source 1..231: note = Description of Artificial Sequence: Synthetic polypeptide; note = Fc chain of XENP020444

SEQ ID NO: 21913 - protein, 5 aa, synthetic construct
  source 1..5: note = Description of Artificial Sequence: Synthetic peptide; note = XENP020444 vhCDR1
SYTMH

SEQ ID NO: 21914 - protein, 17 aa, synthetic construct
  source 1..17: note = Description of Artificial Sequence: Synthetic peptide; note = XENP020444 vhCDR2
FISYDGNYKYYADSVKG

SEQ ID NO: 21915 - protein, 9 aa, synthetic construct
  source 1..9: note = Description of Artificial Sequence: Synthetic peptide; note = XENP020444 vhCDR3
GGHLGPFDL

SEQ ID NO: 21916 - protein, 12 aa, synthetic construct
  source 1..12: note = Description of Artificial Sequence: Synthetic peptide; note = XENP020444 vlCDR1
RASQSVGSSYLA

SEQ ID NO: 21917 - protein, 7 aa, synthetic construct
  source 1..7: note = Description of Artificial Sequence: Synthetic peptide; note = XENP020444 vlCDR2
GASSRAT

SEQ ID NO: 21918 - protein, 9 aa, synthetic construct
  source 1..9: note = Description of Artificial Sequence: Synthetic peptide; note = XENP020444 vlCDR3
QQYGSSPWT

SEQ ID NO: 21919 - protein, 214 aa, synthetic construct; identical to SEQ ID NO: 17250
  source 1..214: note = Description of Artificial Sequence: Synthetic polypeptide; note = XENP020444 2A11_H1L2_Fab-ipilimumab_H3.23_L0.129 Light Chain

SEQ ID NO: 21920 - protein, 107 aa, synthetic construct; identical to SEQ ID NO: 17251
  source 1..107: note = Description of Artificial Sequence: Synthetic polypeptide; note = VL of XENP020444

SEQ ID NO: 21921 - protein, 11 aa, synthetic construct
  source 1..11: note = Description of Artificial Sequence: Synthetic peptide; note = XENP020444 vlCDR1
QASQDIGNYLN

SEQ ID NO: 21922 - protein, 7 aa, synthetic construct
  source 1..7: note = Description of Artificial Sequence: Synthetic peptide; note = XENP020444 vlCDR2
YTSRLHS

SEQ ID NO: 21923 - protein, 9 aa, synthetic construct
  source 1..9: note = Description of Artificial Sequence: Synthetic peptide; note = XENP020444 vlCDR3
QQGNTLPYT

SEQ ID NO: 21924 - protein, 447 aa, synthetic construct; identical to SEQ ID NO: 17235
  source 1..447: note = Description of Artificial Sequence: Synthetic polypeptide; note = XENP020445 2A11_H1L2_Fab-ipilimumab_H3.23_L0.132 Fab-Fc Heavy Chain

SEQ ID NO: 21925 - protein, 118 aa, synthetic construct; identical to SEQ ID NO: 17236
  source 1..118: note = Description of Artificial Sequence: Synthetic polypeptide; note = VH of XENP020445

SEQ ID NO: 21926 - protein, 5 aa, synthetic construct
  source 1..5: note = Description of Artificial Sequence: Synthetic peptide; note = XENP020445 vhCDR1
DYYMH

SEQ ID NO: 21927 - protein, 17 aa, synthetic construct
  source 1..17: note = Description of Artificial Sequence: Synthetic peptide; note = XENP020445 vhCDR2
WIDPENGDTEYAPKFQG

SEQ ID NO: 21928 - protein, 9 aa, synthetic construct
  source 1..9: note = Description of Artificial Sequence: Synthetic peptide; note = XENP020445 vhCDR3
RGVRQALDY

SEQ ID NO: 21929 - protein, 477 aa, synthetic construct; identical to SEQ ID NO: 21689
  source 1..477: note = Description of Artificial Sequence: Synthetic polypeptide; note = XENP020445 2A11_H1L2_Fab-ipilimumab_H3.23_L0.132 scFv-Fc Heavy Chain

SEQ ID NO: 21930 - protein, 118 aa, synthetic construct; identical to SEQ ID NO: 2632
  source 1..118: note = Description of Artificial Sequence: Synthetic polypeptide; note = VH of XENP020445

SEQ ID NO: 21931 - protein, 108 aa, synthetic construct; identical to SEQ ID NO: 2795
  source 1..108: note = Description of Artificial Sequence: Synthetic polypeptide; note = VL of XENP020445

SEQ ID NO: 21932 - protein, 231 aa, synthetic construct; identical to SEQ ID NO: 21532
  source 1..231: note = Description of Artificial Sequence: Synthetic polypeptide; note = Fc chain of XENP020445

SEQ ID NO: 21933 - protein, 5 aa, synthetic construct
  source 1..5: note = Description of Artificial Sequence: Synthetic peptide; note = XENP020445 vhCDR1
SYTMH

SEQ ID NO: 21934 - protein, 17 aa, synthetic construct
  source 1..17: note = Description of Artificial Sequence: Synthetic peptide; note = XENP020445 vhCDR2
FISYDGNYKYYADSVKG

SEQ ID NO: 21935 - protein, 9 aa, synthetic construct
  source 1..9: note = Description of Artificial Sequence: Synthetic peptide; note = XENP020445 vhCDR3
GGHLGPFDL

SEQ ID NO: 21936 - protein, 12 aa, synthetic construct
  source 1..12: note = Description of Artificial Sequence: Synthetic peptide; note = XENP020445 vlCDR1
RASQSVSSSYLA

SEQ ID NO: 21937 - protein, 7 aa, synthetic construct
  source 1..7: note = Description of Artificial Sequence: Synthetic peptide; note = XENP020445 vlCDR2
GASSRAT

SEQ ID NO: 21938 - protein, 9 aa, synthetic construct
  source 1..9: note = Description of Artificial Sequence: Synthetic peptide; note = XENP020445 vlCDR3
QQYGSSPWT

SEQ ID NO: 21939 - protein, 214 aa, synthetic construct; identical to SEQ ID NO: 17250
  source 1..214: note = Description of Artificial Sequence: Synthetic polypeptide; note = XENP020445 2A11_H1L2_Fab-ipilimumab_H3.23_L0.132 Light Chain

SEQ ID NO: 21940 - protein, 107 aa, synthetic construct; identical to SEQ ID NO: 17251
  source 1..107: note = Description of Artificial Sequence: Synthetic polypeptide; note = VL of XENP020445

SEQ ID NO: 21941 - protein, 11 aa, synthetic construct
  source 1..11: note = Description of Artificial Sequence: Synthetic peptide; note = XENP020445 vlCDR1
QASQDIGNYLN

SEQ ID NO: 21942 - protein, 7 aa, synthetic construct
  source 1..7: note = Description of Artificial Sequence: Synthetic peptide; note = XENP020445 vlCDR2
YTSRLHS

SEQ ID NO: 21943 - protein, 9 aa, synthetic construct
  source 1..9: note = Description of Artificial Sequence: Synthetic peptide; note = XENP020445 vlCDR3
QQGNTLPYT

SEQ ID NO: 21944 - protein, 447 aa, synthetic construct; identical to SEQ ID NO: 17235
  source 1..447: note = Description of Artificial Sequence: Synthetic polypeptide; note = XENP020446 2A11_H1L2_Fab-ipilimumab_H3.25_L0.124 Fab-Fc Heavy Chain

SEQ ID NO: 21945 - protein, 118 aa, synthetic construct; identical to SEQ ID NO: 17236
  source 1..118: note = Description of Artificial Sequence: Synthetic polypeptide; note = VH of XENP020446

SEQ ID NO: 21946 - protein, 5 aa, synthetic construct
  source 1..5: note = Description of Artificial Sequence: Synthetic peptide; note = XENP020446 vhCDR1
DYYMH

SEQ ID NO: 21947 - protein, 17 aa, synthetic construct
  source 1..17: note = Description of Artificial Sequence: Synthetic peptide; note = XENP020446 vhCDR2
WIDPENGDTEYAPKFQG

SEQ ID NO: 21948 - protein, 9 aa, synthetic construct
  source 1..9: note = Description of Artificial Sequence: Synthetic peptide; note = XENP020446 vhCDR3
RGVRQALDY

SEQ ID NO: 21949 - protein, 477 aa, synthetic construct; identical to SEQ ID NO: 21709
  source 1..477: note = Description of Artificial Sequence: Synthetic polypeptide; note = XENP020446 2A11_H1L2_Fab-ipilimumab_H3.25_L0.124 scFv-Fc Heavy Chain

SEQ ID NO: 21950 - protein, 118 aa, synthetic construct; identical to SEQ ID NO: 2650
  source 1..118: note = Description of Artificial Sequence: Synthetic polypeptide; note = VH of XENP020446

SEQ ID NO: 21951 - protein, 108 aa, synthetic construct; identical to SEQ ID NO: 2723
  source 1..108: note = Description of Artificial Sequence: Synthetic polypeptide; note = VL of XENP020446

SEQ ID NO: 21952 - protein, 231 aa, synthetic construct; identical to SEQ ID NO: 21532
  source 1..231: note = Description of Artificial Sequence: Synthetic polypeptide; note = Fc chain of XENP020446

SEQ ID NO: 21953 - protein, 5 aa, synthetic construct
  source 1..5: note = Description of Artificial Sequence: Synthetic peptide; note = XENP020446 vhCDR1
SYTMH

SEQ ID NO: 21954 - protein, 17 aa, synthetic construct
  source 1..17: note = Description of Artificial Sequence: Synthetic peptide; note = XENP020446 vhCDR2
FISYDGNYKYYADSVKG

SEQ ID NO: 21955 - protein, 9 aa, synthetic construct
  source 1..9: note = Description of Artificial Sequence: Synthetic peptide; note = XENP020446 vhCDR3
GGLLGPFDL

SEQ ID NO: 21956 - protein, 12 aa, synthetic construct
  source 1..12: note = Description of Artificial Sequence: Synthetic peptide; note = XENP020446 vlCDR1
RASQSVGSSYLA

SEQ ID NO: 21957 - protein, 7 aa, synthetic construct
  source 1..7: note = Description of Artificial Sequence: Synthetic peptide; note = XENP020446 vlCDR2
GASSRAT

SEQ ID NO: 21958 - protein, 9 aa, synthetic construct
  source 1..9: note = Description of Artificial Sequence: Synthetic peptide; note = XENP020446 vlCDR3
QQYGSSPWT

SEQ ID NO: 21959 - protein, 214 aa, synthetic construct; identical to SEQ ID NO: 17250
  source 1..214: note = Description of Artificial Sequence: Synthetic polypeptide; note = XENP020446 2A11_H1L2_Fab-ipilimumab_H3.25_L0.124 Light Chain

SEQ ID NO: 21960 - protein, 107 aa, synthetic construct; identical to SEQ ID NO: 17251
  source 1..107: note = Description of Artificial Sequence: Synthetic polypeptide; note = VL of XENP020446

SEQ ID NO: 21961 - protein, 11 aa, synthetic construct
  source 1..11: note = Description of Artificial Sequence: Synthetic peptide; note = XENP020446 vlCDR1
QASQDIGNYLN

SEQ ID NO: 21962 - protein, 7 aa, synthetic construct
  source 1..7: note = Description of Artificial Sequence: Synthetic peptide; note = XENP020446 vlCDR2
YTSRLHS

SEQ ID NO: 21963 - protein, 9 aa, synthetic construct
  source 1..9: note = Description of Artificial Sequence: Synthetic peptide; note = XENP020446 vlCDR3
QQGNTLPYT

SEQ ID NO: 21964 - protein, 447 aa, synthetic construct; identical to SEQ ID NO: 17235
  source 1..447: note = Description of Artificial Sequence: Synthetic polypeptide; note = XENP020447 2A11_H1L2_Fab-ipilimumab_H3.25_L0.129 Fab-Fc Heavy Chain

SEQ ID NO: 21965 - protein, 118 aa, synthetic construct; identical to SEQ ID NO: 17236
  source 1..118: note = Description of Artificial Sequence: Synthetic polypeptide; note = VH of XENP020447

SEQ ID NO: 21966 - protein, 5 aa, synthetic construct
  source 1..5: note = Description of Artificial Sequence: Synthetic peptide; note = XENP020447 vhCDR1
DYYMH

SEQ ID NO: 21967 - protein, 17 aa, synthetic construct
  source 1..17: note = Description of Artificial Sequence: Synthetic peptide; note = XENP020447 vhCDR2
WIDPENGDTEYAPKFQG

SEQ ID NO: 21968 - protein, 9 aa, synthetic construct
  source 1..9: note = Description of Artificial Sequence: Synthetic peptide; note = XENP020447 vhCDR3
RGVRQALDY

SEQ ID NO: 21969 - protein, 477 aa, synthetic construct; identical to SEQ ID NO: 21729
  source 1..477: note = Description of Artificial Sequence: Synthetic polypeptide; note = XENP020447 2A11_H1L2_Fab-ipilimumab_H3.25_L0.129 scFv-Fc Heavy Chain

SEQ ID NO: 21970 - protein, 118 aa, synthetic construct; identical to SEQ ID NO: 2650
  source 1..118: note = Description of Artificial Sequence: Synthetic polypeptide; note = VH of XENP020447

SEQ ID NO: 21971 - protein, 108 aa, synthetic construct; identical to SEQ ID NO: 2768
  source 1..108: note = Description of Artificial Sequence: Synthetic polypeptide; note = VL of XENP020447

SEQ ID NO: 21972 - protein, 231 aa, synthetic construct; identical to SEQ ID NO: 21532
  source 1..231: note = Description of Artificial Sequence: Synthetic polypeptide; note = Fc chain of XENP020447

SEQ ID NO: 21973 - protein, 5 aa, synthetic construct
  source 1..5: note = Description of Artificial Sequence: Synthetic peptide; note = XENP020447 vhCDR1
SYTMH

SEQ ID NO: 21974 - protein, 17 aa, synthetic construct
  source 1..17: note = Description of Artificial Sequence: Synthetic peptide; note = XENP020447 vhCDR2
FISYDGNYKYYADSVKG

SEQ ID NO: 21975 - protein, 9 aa, synthetic construct
  source 1..9: note = Description of Artificial Sequence: Synthetic peptide; note = XENP020447 vhCDR3
GGLLGPFDL

SEQ ID NO: 21976 - protein, 12 aa, synthetic construct
  source 1..12: note = Description of Artificial Sequence: Synthetic peptide; note = XENP020447 vlCDR1
RASQSVGSSYLA

SEQ ID NO: 21977 - protein, 7 aa, synthetic construct
  source 1..7: note = Description of Artificial Sequence: Synthetic peptide; note = XENP020447 vlCDR2
GASSRAT

SEQ ID NO: 21978 - protein, 9 aa, synthetic construct
  source 1..9: note = Description of Artificial Sequence: Synthetic peptide; note = XENP020447 vlCDR3
QQYGSSPWT

SEQ ID NO: 21979 - protein, 214 aa, synthetic construct; identical to SEQ ID NO: 17250
  source 1..214: note = Description of Artificial Sequence: Synthetic polypeptide; note = XENP020447 2A11_H1L2_Fab-ipilimumab_H3.25_L0.129 Light Chain

SEQ ID NO: 21980 - protein, 107 aa, synthetic construct; identical to SEQ ID NO: 17251
  source 1..107: note = Description of Artificial Sequence: Synthetic polypeptide; note = VL of XENP020447

SEQ ID NO: 21981 - protein, 11 aa, synthetic construct
  source 1..11: note = Description of Artificial Sequence: Synthetic peptide; note = XENP020447 vlCDR1
QASQDIGNYLN

SEQ ID NO: 21982 - protein, 7 aa, synthetic construct
  source 1..7: note = Description of Artificial Sequence: Synthetic peptide; note = XENP020447 vlCDR2
YTSRLHS

SEQ ID NO: 21983 - protein, 9 aa, synthetic construct
  source 1..9: note = Description of Artificial Sequence: Synthetic peptide; note = XENP020447 vlCDR3
QQGNTLPYT

SEQ ID NO: 21984 - protein, 447 aa, synthetic construct; identical to SEQ ID NO: 17235
  source 1..447: note = Description of Artificial Sequence: Synthetic polypeptide; note = XENP020448 2A11_H1L2_Fab-ipilimumab_H3.25_L0.132 Fab-Fc Heavy Chain

SEQ ID NO: 21985 - protein, 118 aa, synthetic construct; identical to SEQ ID NO: 17236
  source 1..118: note = Description of Artificial Sequence: Synthetic polypeptide; note = VH of XENP020448

SEQ ID NO: 21986 - protein, 5 aa, synthetic construct
  source 1..5: note = Description of Artificial Sequence: Synthetic peptide; note = XENP020448 vhCDR1
DYYMH

SEQ ID NO: 21987 - protein, 17 aa, synthetic construct
  source 1..17: note = Description of Artificial Sequence: Synthetic peptide; note = XENP020448 vhCDR2
WIDPENGDTEYAPKFQG

SEQ ID NO: 21988 - protein, 9 aa, synthetic construct
  source 1..9: note = Description of Artificial Sequence: Synthetic peptide; note = XENP020448 vhCDR3
RGVRQALDY

SEQ ID NO: 21989 - protein, 477 aa, synthetic construct; identical to SEQ ID NO: 21749
  source 1..477: note = Description of Artificial Sequence: Synthetic polypeptide; note = XENP020448 2A11_H1L2_Fab-ipilimumab_H3.25_L0.132 scFv-Fc Heavy Chain

SEQ ID NO: 21990 - protein, 118 aa, synthetic construct; identical to SEQ ID NO: 2650
  source 1..118: note = Description of Artificial Sequence: Synthetic polypeptide; note = VH of XENP020448

SEQ ID NO: 21991 - protein, 108 aa, synthetic construct; identical to SEQ ID NO: 2795
  source 1..108: note = Description of Artificial Sequence: Synthetic polypeptide; note = VL of XENP020448

SEQ ID NO: 21992 - protein, 231 aa, synthetic construct; identical to SEQ ID NO: 21532
  source 1..231: note = Description of Artificial Sequence: Synthetic polypeptide; note = Fc chain of XENP020448

SEQ ID NO: 21993 - protein, 5 aa, synthetic construct
  source 1..5: note = Description of Artificial Sequence: Synthetic peptide; note = XENP020448 vhCDR1
SYTMH

SEQ ID NO: 21994 - protein, 17 aa, synthetic construct
  source 1..17: note = Description of Artificial Sequence: Synthetic peptide; note = XENP020448 vhCDR2
FISYDGNYKYYADSVKG

SEQ ID NO: 21995 - protein, 9 aa, synthetic construct
  source 1..9: note = Description of Artificial Sequence: Synthetic peptide; note = XENP020448 vhCDR3
GGLLGPFDL

SEQ ID NO: 21996 - protein, 12 aa, synthetic construct
  source 1..12: note = Description of Artificial Sequence: Synthetic peptide; note = XENP020448 vlCDR1
RASQSVSSSYLA

SEQ ID NO: 21997 - protein, 7 aa, synthetic construct
  source 1..7: note = Description of Artificial Sequence: Synthetic peptide; note = XENP020448 vlCDR2
GASSRAT

SEQ ID NO: 21998 - protein, 9 aa, synthetic construct
  source 1..9: note = Description of Artificial Sequence: Synthetic peptide; note = XENP020448 vlCDR3
QQYGSSPWT

SEQ ID NO: 21999 - protein, 214 aa, synthetic construct; identical to SEQ ID NO: 17250
  source 1..214: note = Description of Artificial Sequence: Synthetic polypeptide; note = XENP020448 2A11_H1L2_Fab-ipilimumab_H3.25_L0.132 Light Chain

SEQ ID NO: 22000 - protein, 107 aa, synthetic construct; identical to SEQ ID NO: 17251
  source 1..107: note = Description of Artificial Sequence: Synthetic polypeptide; note = VL of XENP020448

SEQ ID NO: 22001 - protein, 11 aa, synthetic construct
  source 1..11: note = Description of Artificial Sequence: Synthetic peptide; note = XENP020448 vlCDR1
QASQDIGNYLN

SEQ ID NO: 22002 - protein, 7 aa, synthetic construct
  source 1..7: note = Description of Artificial Sequence: Synthetic peptide; note = XENP020448 vlCDR2
YTSRLHS

SEQ ID NO: 22003 - protein, 9 aa, synthetic construct
  source 1..9: note = Description of Artificial Sequence: Synthetic peptide; note = XENP020448 vlCDR3
QQGNTLPYT

SEQ ID NO: 22004 - protein, 447 aa, synthetic construct; identical to SEQ ID NO: 21564
  source 1..447: note = Description of Artificial Sequence: Synthetic polypeptide; note = XENP020721 2A11_H1L2_Fab-ipilimumab_H3.4_L0.12 Fab-Fc Heavy Chain

SEQ ID NO: 22005 - protein, 118 aa, synthetic construct; identical to SEQ ID NO: 17236
  source 1..118: note = Description of Artificial Sequence: Synthetic polypeptide; note = VH of XENP020721

SEQ ID NO: 22006 - protein, 5 aa, synthetic construct
  source 1..5: note = Description of Artificial Sequence: Synthetic peptide; note = XENP020721 vhCDR1
DYYMH

SEQ ID NO: 22007 - protein, 17 aa, synthetic construct
  source 1..17: note = Description of Artificial Sequence: Synthetic peptide; note = XENP020721 vhCDR2
WIDPENGDTEYAPKFQG

SEQ ID NO: 22008 - protein, 9 aa, synthetic construct
  source 1..9: note = Description of Artificial Sequence: Synthetic peptide; note = XENP020721 vhCDR3
RGVRQALDY

SEQ ID NO: 22009 - protein, 477 aa, synthetic construct; identical to SEQ ID NO: 21569
  source 1..477: note = Description of Artificial Sequence: Synthetic polypeptide; note = XENP020721 2A11_H1L2_Fab-ipilimumab_H3.4_L0.12 scFv-Fc Heavy Chain

SEQ ID NO: 22010 - protein, 118 aa, synthetic construct; identical to SEQ ID NO: 2461
  source 1..118: note = Description of Artificial Sequence: Synthetic polypeptide; note = VH of XENP020721

SEQ ID NO: 22011 - protein, 108 aa, synthetic construct; identical to SEQ ID NO: 1517
  source 1..108: note = Description of Artificial Sequence: Synthetic polypeptide; note = VL of XENP020721

SEQ ID NO: 22012 - protein, 231 aa, synthetic construct; identical to SEQ ID NO: 21572
  source 1..231: note = Description of Artificial Sequence: Synthetic polypeptide; note = Fc chain of XENP020721

SEQ ID NO: 22013 - protein, 5 aa, synthetic construct
  source 1..5: note = Description of Artificial Sequence: Synthetic peptide; note = XENP020721 vhCDR1
SYTMH

SEQ ID NO: 22014 - protein, 17 aa, synthetic construct
  source 1..17: note = Description of Artificial Sequence: Synthetic peptide; note = XENP020721 vhCDR2
FISYDGNHKYYADSVKG

SEQ ID NO: 22015 - protein, 9 aa, synthetic construct
  source 1..9: note = Description of Artificial Sequence: Synthetic peptide; note = XENP020721 vhCDR3
TGHLGPFDL

SEQ ID NO: 22016 - protein, 12 aa, synthetic construct
  source 1..12: note = Description of Artificial Sequence: Synthetic peptide; note = XENP020721 vlCDR1
RASQSVGSSYLA

SEQ ID NO: 22017 - protein, 7 aa, synthetic construct
  source 1..7: note = Description of Artificial Sequence: Synthetic peptide; note = XENP020721 vlCDR2
GAFSRAT

SEQ ID NO: 22018 - protein, 9 aa, synthetic construct
  source 1..9: note = Description of Artificial Sequence: Synthetic peptide; note = XENP020721 vlCDR3
QQYGSSPWT

SEQ ID NO: 22019 - protein, 214 aa, synthetic construct; identical to SEQ ID NO: 17250
  source 1..214: note = Description of Artificial Sequence: Synthetic polypeptide; note = XENP020721 2A11_H1L2_Fab-ipilimumab_H3.4_L0.12 Light Chain

SEQ ID NO: 22020 - protein, 107 aa, synthetic construct; identical to SEQ ID NO: 17251
  source 1..107: note = Description of Artificial Sequence: Synthetic polypeptide; note = VL of XENP020721

SEQ ID NO: 22021 - protein, 11 aa, synthetic construct
  source 1..11: note = Description of Artificial Sequence: Synthetic peptide; note = XENP020721 vlCDR1
QASQDIGNYLN

SEQ ID NO: 22022 - protein, 7 aa, synthetic construct
  source 1..7: note = Description of Artificial Sequence: Synthetic peptide; note = XENP020721 vlCDR2
YTSRLHS

SEQ ID NO: 22023 - protein, 9 aa, synthetic construct
  source 1..9: note = Description of Artificial Sequence: Synthetic peptide; note = XENP020721 vlCDR3
QQGNTLPYT

SEQ ID NO: 22024 - protein, 447 aa, synthetic construct; identical to SEQ ID NO: 17235
  source 1..447: note = Description of Artificial Sequence: Synthetic polypeptide; note = XENP021859 2A11_H1_L2.47_Fab-ipilimumab_H3.23_L0.129 Fab-Fc  Heavy Chain

SEQ ID NO: 22025 - protein, 118 aa, synthetic construct; identical to SEQ ID NO: 17236
  source 1..118: note = Description of Artificial Sequence: Synthetic polypeptide; note = VH of XENP021859

SEQ ID NO: 22026 - protein, 5 aa, synthetic construct
  source 1..5: note = Description of Artificial Sequence: Synthetic peptide; note = XENP021859 vhCDR1
DYYMH

SEQ ID NO: 22027 - protein, 17 aa, synthetic construct
  source 1..17: note = Description of Artificial Sequence: Synthetic peptide; note = XENP021859 vhCDR2
WIDPENGDTEYAPKFQG

SEQ ID NO: 22028 - protein, 9 aa, synthetic construct
  source 1..9: note = Description of Artificial Sequence: Synthetic peptide; note = XENP021859 vhCDR3
RGVRQALDY

SEQ ID NO: 22029 - protein, 477 aa, synthetic construct; identical to SEQ ID NO: 21669
  source 1..477: note = Description of Artificial Sequence: Synthetic polypeptide; note = XENP021859 2A11_H1_L2.47_Fab-ipilimumab_H3.23_L0.129 scFv-Fc Heavy Chain

SEQ ID NO: 22030 - protein, 118 aa, synthetic construct; identical to SEQ ID NO: 2632
  source 1..118: note = Description of Artificial Sequence: Synthetic polypeptide; note = VH of XENP021859

SEQ ID NO: 22031 - protein, 108 aa, synthetic construct; identical to SEQ ID NO: 2768
  source 1..108: note = Description of Artificial Sequence: Synthetic polypeptide; note = VL of XENP021859

SEQ ID NO: 22032 - protein, 231 aa, synthetic construct; identical to SEQ ID NO: 21532
  source 1..231: note = Description of Artificial Sequence: Synthetic polypeptide; note = Fc chain of XENP021859

SEQ ID NO: 22033 - protein, 5 aa, synthetic construct
  source 1..5: note = Description of Artificial Sequence: Synthetic peptide; note = XENP021859 vhCDR1
SYTMH

SEQ ID NO: 22034 - protein, 17 aa, synthetic construct
  source 1..17: note = Description of Artificial Sequence: Synthetic peptide; note = XENP021859 vhCDR2
FISYDGNYKYYADSVKG

SEQ ID NO: 22035 - protein, 9 aa, synthetic construct
  source 1..9: note = Description of Artificial Sequence: Synthetic peptide; note = XENP021859 vhCDR3
GGHLGPFDL

SEQ ID NO: 22036 - protein, 12 aa, synthetic construct
  source 1..12: note = Description of Artificial Sequence: Synthetic peptide; note = XENP021859 vlCDR1
RASQSVGSSYLA

SEQ ID NO: 22037 - protein, 7 aa, synthetic construct
  source 1..7: note = Description of Artificial Sequence: Synthetic peptide; note = XENP021859 vlCDR2
GASSRAT

SEQ ID NO: 22038 - protein, 9 aa, synthetic construct
  source 1..9: note = Description of Artificial Sequence: Synthetic peptide; note = XENP021859 vlCDR3
QQYGSSPWT

SEQ ID NO: 22039 - protein, 214 aa, synthetic construct
  source 1..214: note = Description of Artificial Sequence: Synthetic polypeptide; note = XENP021859 2A11_H1_L2.47_Fab-ipilimumab_H3.23_L0.129 Light Chain
DIQMTQSPAFLSVTPGEKVTITCQASQDIGNYLNWFQQKPDQTVKLLIYYTSHLHSGVPSRFSGSGSGTDYTFTISSLEAEDAATYFCQQGNTLPYTFGGGTKVEIKRTVAAPSVFIFPPSDEQLKSGTASVVCLLNNFYPREAKVQWKVDNALQSGNSQESVTEQDSKDSTYSLSSTLTLSKADYEKHKVYACEVTHQGLSSPVTKSFNRGEC

SEQ ID NO: 22040 - protein, 107 aa, synthetic construct
  source 1..107: note = Description of Artificial Sequence: Synthetic polypeptide; note = VL of XENP021859
DIQMTQSPAFLSVTPGEKVTITCQASQDIGNYLNWFQQKPDQTVKLLIYYTSHLHSGVPSRFSGSGSGTDYTFTISSLEAEDAATYFCQQGNTLPYTFGGGTKVEIK

SEQ ID NO: 22041 - protein, 11 aa, synthetic construct
  source 1..11: note = Description of Artificial Sequence: Synthetic peptide; note = XENP021859 vlCDR1
QASQDIGNYLN

SEQ ID NO: 22042 - protein, 7 aa, synthetic construct
  source 1..7: note = Description of Artificial Sequence: Synthetic peptide; note = XENP021859 vlCDR2
YTSHLHS

SEQ ID NO: 22043 - protein, 9 aa, synthetic construct
  source 1..9: note = Description of Artificial Sequence: Synthetic peptide; note = XENP021859 vlCDR3
QQGNTLPYT

SEQ ID NO: 22044 - protein, 447 aa, synthetic construct; identical to SEQ ID NO: 17235
  source 1..447: note = Description of Artificial Sequence: Synthetic polypeptide; note = XENP021860 2A11_H1_L2.50_Fab-ipilimumab_H3.23_L0.129 Fab-Fc  Heavy Chain

SEQ ID NO: 22045 - protein, 118 aa, synthetic construct; identical to SEQ ID NO: 17236
  source 1..118: note = Description of Artificial Sequence: Synthetic polypeptide; note = VH of XENP021860

SEQ ID NO: 22046 - protein, 5 aa, synthetic construct
  source 1..5: note = Description of Artificial Sequence: Synthetic peptide; note = XENP021860 vhCDR1
DYYMH

SEQ ID NO: 22047 - protein, 17 aa, synthetic construct
  source 1..17: note = Description of Artificial Sequence: Synthetic peptide; note = XENP021860 vhCDR2
WIDPENGDTEYAPKFQG

SEQ ID NO: 22048 - protein, 9 aa, synthetic construct
  source 1..9: note = Description of Artificial Sequence: Synthetic peptide; note = XENP021860 vhCDR3
RGVRQALDY

SEQ ID NO: 22049 - protein, 477 aa, synthetic construct; identical to SEQ ID NO: 21669
  source 1..477: note = Description of Artificial Sequence: Synthetic polypeptide; note = XENP021860 2A11_H1_L2.50_Fab-ipilimumab_H3.23_L0.129 scFv-Fc Heavy Chain

SEQ ID NO: 22050 - protein, 118 aa, synthetic construct; identical to SEQ ID NO: 2632
  source 1..118: note = Description of Artificial Sequence: Synthetic polypeptide; note = VH of XENP021860

SEQ ID NO: 22051 - protein, 108 aa, synthetic construct; identical to SEQ ID NO: 2768
  source 1..108: note = Description of Artificial Sequence: Synthetic polypeptide; note = VL of XENP021860

SEQ ID NO: 22052 - protein, 231 aa, synthetic construct; identical to SEQ ID NO: 21532
  source 1..231: note = Description of Artificial Sequence: Synthetic polypeptide; note = Fc chain of XENP021860

SEQ ID NO: 22053 - protein, 5 aa, synthetic construct
  source 1..5: note = Description of Artificial Sequence: Synthetic peptide; note = XENP021860 vhCDR1
SYTMH

SEQ ID NO: 22054 - protein, 17 aa, synthetic construct
  source 1..17: note = Description of Artificial Sequence: Synthetic peptide; note = XENP021860 vhCDR2
FISYDGNYKYYADSVKG

SEQ ID NO: 22055 - protein, 9 aa, synthetic construct
  source 1..9: note = Description of Artificial Sequence: Synthetic peptide; note = XENP021860 vhCDR3
GGHLGPFDL

SEQ ID NO: 22056 - protein, 12 aa, synthetic construct
  source 1..12: note = Description of Artificial Sequence: Synthetic peptide; note = XENP021860 vlCDR1
RASQSVGSSYLA

SEQ ID NO: 22057 - protein, 7 aa, synthetic construct
  source 1..7: note = Description of Artificial Sequence: Synthetic peptide; note = XENP021860 vlCDR2
GASSRAT

SEQ ID NO: 22058 - protein, 9 aa, synthetic construct
  source 1..9: note = Description of Artificial Sequence: Synthetic peptide; note = XENP021860 vlCDR3
QQYGSSPWT

SEQ ID NO: 22059 - protein, 214 aa, synthetic construct
  source 1..214: note = Description of Artificial Sequence: Synthetic polypeptide; note = XENP021860 2A11_H1_L2.50_Fab-ipilimumab_H3.23_L0.129 Light Chain
DIQMTQSPAFLSVTPGEKVTITCQASQDIGNYLNWFQQKPDQTVKLLIYYTSYLHSGVPSRFSGSGSGTDYTFTISSLEAEDAATYFCQQGNTLPYTFGGGTKVEIKRTVAAPSVFIFPPSDEQLKSGTASVVCLLNNFYPREAKVQWKVDNALQSGNSQESVTEQDSKDSTYSLSSTLTLSKADYEKHKVYACEVTHQGLSSPVTKSFNRGEC

SEQ ID NO: 22060 - protein, 107 aa, synthetic construct
  source 1..107: note = Description of Artificial Sequence: Synthetic polypeptide; note = VL of XENP021860
DIQMTQSPAFLSVTPGEKVTITCQASQDIGNYLNWFQQKPDQTVKLLIYYTSYLHSGVPSRFSGSGSGTDYTFTISSLEAEDAATYFCQQGNTLPYTFGGGTKVEIK

SEQ ID NO: 22061 - protein, 11 aa, synthetic construct
  source 1..11: note = Description of Artificial Sequence: Synthetic peptide; note = XENP021860 vlCDR1
QASQDIGNYLN

SEQ ID NO: 22062 - protein, 7 aa, synthetic construct
  source 1..7: note = Description of Artificial Sequence: Synthetic peptide; note = XENP021860 vlCDR2
YTSYLHS

SEQ ID NO: 22063 - protein, 9 aa, synthetic construct
  source 1..9: note = Description of Artificial Sequence: Synthetic peptide; note = XENP021860 vlCDR3
QQGNTLPYT

SEQ ID NO: 22064 - protein, 447 aa, synthetic construct
  source 1..447: note = Description of Artificial Sequence: Synthetic polypeptide; note = XENP022505 2A11_H1.125_L2.113_Fab-ipilimumab_H3.23_L0.129 Fab -Fc Heavy Chain
EVQLVQSGAEVKKPGATVKISCKASGFNIKHYFMHWVQQAPGKGLEWMGWIDPYLGDTEYAPKFQGRVTITADTSTNTAYMELSSLRSEDTAVYYCYARGVYQALDYWGQGTLVTVSSASTKGPSVFPLAPSSKSTSGGTAALGCLVKDYFPEPVTVSWNSGALTSGVHTFPAVLQSSGLYSLSSVVTVPSSSLGTQTYICNVNHKPSDTKVDKKVEPKSCDKTHTCPPCPAPPVAGPSVFLFPPKPKDTLMISRTPEVTCVVVDVKHEDPEVKFNWYVDGVEVHNAKTKPREEEYNSTYRVVSVLTVLHQDWLNGKEYKCKVSNKALPAPIEKTISKAKGQPREPQVYTLPPSREEMTKNQVSLTCDVSGFYPSDIAVEWESDGQPENNYKTTPPVLDSDGSFFLYSKLTVDKSRWEQGDVFSCSVMHEALHNHYTQKSLSLSPGK

SEQ ID NO: 22065 - protein, 118 aa, synthetic construct
  source 1..118: note = Description of Artificial Sequence: Synthetic polypeptide; note = VH of XENP022505
EVQLVQSGAEVKKPGATVKISCKASGFNIKHYFMHWVQQAPGKGLEWMGWIDPYLGDTEYAPKFQGRVTITADTSTNTAYMELSSLRSEDTAVYYCYARGVYQALDYWGQGTLVTVSS

SEQ ID NO: 22066 - protein, 5 aa, synthetic construct
  source 1..5: note = Description of Artificial Sequence: Synthetic peptide; note = XENP022505 vhCDR1
HYFMH

SEQ ID NO: 22067 - protein, 17 aa, synthetic construct
  source 1..17: note = Description of Artificial Sequence: Synthetic peptide; note = XENP022505 vhCDR2
WIDPYLGDTEYAPKFQG

SEQ ID NO: 22068 - protein, 9 aa, synthetic construct
  source 1..9: note = Description of Artificial Sequence: Synthetic peptide; note = XENP022505 vhCDR3
RGVYQALDY

SEQ ID NO: 22069 - protein, 477 aa, synthetic construct; identical to SEQ ID NO: 21669
  source 1..477: note = Description of Artificial Sequence: Synthetic polypeptide; note = XENP022505 2A11_H1.125_L2.113_Fab-ipilimumab_H3.23_L0.129  scFv-Fc Heavy Chain

SEQ ID NO: 22070 - protein, 118 aa, synthetic construct; identical to SEQ ID NO: 2632
  source 1..118: note = Description of Artificial Sequence: Synthetic polypeptide; note = VH of XENP022505

SEQ ID NO: 22071 - protein, 108 aa, synthetic construct; identical to SEQ ID NO: 2768
  source 1..108: note = Description of Artificial Sequence: Synthetic polypeptide; note = VL of XENP022505

SEQ ID NO: 22072 - protein, 231 aa, synthetic construct; identical to SEQ ID NO: 21532
  source 1..231: note = Description of Artificial Sequence: Synthetic polypeptide; note = Fc chain of XENP022505

SEQ ID NO: 22073 - protein, 5 aa, synthetic construct
  source 1..5: note = Description of Artificial Sequence: Synthetic peptide; note = XENP022505 vhCDR1
SYTMH

SEQ ID NO: 22074 - protein, 17 aa, synthetic construct
  source 1..17: note = Description of Artificial Sequence: Synthetic peptide; note = XENP022505 vhCDR2
FISYDGNYKYYADSVKG

SEQ ID NO: 22075 - protein, 9 aa, synthetic construct
  source 1..9: note = Description of Artificial Sequence: Synthetic peptide; note = XENP022505 vhCDR3
GGHLGPFDL

SEQ ID NO: 22076 - protein, 12 aa, synthetic construct
  source 1..12: note = Description of Artificial Sequence: Synthetic peptide; note = XENP022505 vlCDR1
RASQSVGSSYLA

SEQ ID NO: 22077 - protein, 7 aa, synthetic construct
  source 1..7: note = Description of Artificial Sequence: Synthetic peptide; note = XENP022505 vlCDR2
GASSRAT

SEQ ID NO: 22078 - protein, 9 aa, synthetic construct
  source 1..9: note = Description of Artificial Sequence: Synthetic peptide; note = XENP022505 vlCDR3
QQYGSSPWT

SEQ ID NO: 22079 - protein, 214 aa, synthetic construct
  source 1..214: note = Description of Artificial Sequence: Synthetic polypeptide; note = XENP022505 2A11_H1.125_L2.113_Fab-ipilimumab_H3.23_L0.129 Light Chain
DIQMTQSPAFLSVTPGEKVTITCQASQDIGNYLNWFQQKPDQTVKLLIYFTSYLHSGVPSRFSGSGSGTDYTFTISSLEAEDAATYFCQQGNTLPYTFGGGTKVEIKRTVAAPSVFIFPPSDEQLKSGTASVVCLLNNFYPREAKVQWKVDNALQSGNSQESVTEQDSKDSTYSLSSTLTLSKADYEKHKVYACEVTHQGLSSPVTKSFNRGEC

SEQ ID NO: 22080 - protein, 107 aa, synthetic construct
  source 1..107: note = Description of Artificial Sequence: Synthetic polypeptide; note = VL of XENP022505
DIQMTQSPAFLSVTPGEKVTITCQASQDIGNYLNWFQQKPDQTVKLLIYFTSYLHSGVPSRFSGSGSGTDYTFTISSLEAEDAATYFCQQGNTLPYTFGGGTKVEIK

SEQ ID NO: 22081 - protein, 11 aa, synthetic construct
  source 1..11: note = Description of Artificial Sequence: Synthetic peptide; note = XENP022505 vlCDR1
QASQDIGNYLN

SEQ ID NO: 22082 - protein, 7 aa, synthetic construct
  source 1..7: note = Description of Artificial Sequence: Synthetic peptide; note = XENP022505 vlCDR2
FTSYLHS

SEQ ID NO: 22083 - protein, 9 aa, synthetic construct
  source 1..9: note = Description of Artificial Sequence: Synthetic peptide; note = XENP022505 vlCDR3
QQGNTLPYT

SEQ ID NO: 22084 - protein, 447 aa, synthetic construct
  source 1..447: note = Description of Artificial Sequence: Synthetic polypeptide; note = XENP022506 2A11_H1.144_L2.113_Fab-ipilimumab_H3.23_L0.129  Fab-Fc Heavy Chain
EVQLVQSGAEVKKPGATVKISCKASGFNIKDYFMHWVQQAPGKGLEWMGWIDPELGDTEYAPKFQGRVTITADTSTNTAYMELSSLRSEDTAVYYCYARGVYQALDYWGQGTLVTVSSASTKGPSVFPLAPSSKSTSGGTAALGCLVKDYFPEPVTVSWNSGALTSGVHTFPAVLQSSGLYSLSSVVTVPSSSLGTQTYICNVNHKPSDTKVDKKVEPKSCDKTHTCPPCPAPPVAGPSVFLFPPKPKDTLMISRTPEVTCVVVDVKHEDPEVKFNWYVDGVEVHNAKTKPREEEYNSTYRVVSVLTVLHQDWLNGKEYKCKVSNKALPAPIEKTISKAKGQPREPQVYTLPPSREEMTKNQVSLTCDVSGFYPSDIAVEWESDGQPENNYKTTPPVLDSDGSFFLYSKLTVDKSRWEQGDVFSCSVMHEALHNHYTQKSLSLSPGK

SEQ ID NO: 22085 - protein, 118 aa, synthetic construct
  source 1..118: note = Description of Artificial Sequence: Synthetic polypeptide; note = VH of XENP022506
EVQLVQSGAEVKKPGATVKISCKASGFNIKDYFMHWVQQAPGKGLEWMGWIDPELGDTEYAPKFQGRVTITADTSTNTAYMELSSLRSEDTAVYYCYARGVYQALDYWGQGTLVTVSS

SEQ ID NO: 22086 - protein, 5 aa, synthetic construct
  source 1..5: note = Description of Artificial Sequence: Synthetic peptide; note = XENP022506 vhCDR1
DYFMH

SEQ ID NO: 22087 - protein, 17 aa, synthetic construct
  source 1..17: note = Description of Artificial Sequence: Synthetic peptide; note = XENP022506 vhCDR2
WIDPELGDTEYAPKFQG

SEQ ID NO: 22088 - protein, 9 aa, synthetic construct
  source 1..9: note = Description of Artificial Sequence: Synthetic peptide; note = XENP022506 vhCDR3
RGVYQALDY

SEQ ID NO: 22089 - protein, 477 aa, synthetic construct; identical to SEQ ID NO: 21669
  source 1..477: note = Description of Artificial Sequence: Synthetic polypeptide; note = XENP022506 2A11_H1.144_L2.113_Fab-ipilimumab_H3.23_L0.129  scFv-Fc Heavy Chain

SEQ ID NO: 22090 - protein, 118 aa, synthetic construct; identical to SEQ ID NO: 2632
  source 1..118: note = Description of Artificial Sequence: Synthetic polypeptide; note = VH of XENP022506

SEQ ID NO: 22091 - protein, 108 aa, synthetic construct; identical to SEQ ID NO: 2768
  source 1..108: note = Description of Artificial Sequence: Synthetic polypeptide; note = VL of XENP022506

SEQ ID NO: 22092 - protein, 231 aa, synthetic construct; identical to SEQ ID NO: 21532
  source 1..231: note = Description of Artificial Sequence: Synthetic polypeptide; note = Fc chain of XENP022506

SEQ ID NO: 22093 - protein, 5 aa, synthetic construct
  source 1..5: note = Description of Artificial Sequence: Synthetic peptide; note = XENP022506 vhCDR1
SYTMH

SEQ ID NO: 22094 - protein, 17 aa, synthetic construct
  source 1..17: note = Description of Artificial Sequence: Synthetic peptide; note = XENP022506 vhCDR2
FISYDGNYKYYADSVKG

SEQ ID NO: 22095 - protein, 9 aa, synthetic construct
  source 1..9: note = Description of Artificial Sequence: Synthetic peptide; note = XENP022506 vhCDR3
GGHLGPFDL

SEQ ID NO: 22096 - protein, 12 aa, synthetic construct
  source 1..12: note = Description of Artificial Sequence: Synthetic peptide; note = XENP022506 vlCDR1
RASQSVGSSYLA

SEQ ID NO: 22097 - protein, 7 aa, synthetic construct
  source 1..7: note = Description of Artificial Sequence: Synthetic peptide; note = XENP022506 vlCDR2
GASSRAT

SEQ ID NO: 22098 - protein, 9 aa, synthetic construct
  source 1..9: note = Description of Artificial Sequence: Synthetic peptide; note = XENP022506 vlCDR3
QQYGSSPWT

SEQ ID NO: 22099 - protein, 214 aa, synthetic construct; identical to SEQ ID NO: 22079
  source 1..214: note = Description of Artificial Sequence: Synthetic polypeptide; note = XENP022506 2A11_H1.144_L2.113_Fab-ipilimumab_H3.23_L0.129 Light Chain

SEQ ID NO: 22100 - protein, 107 aa, synthetic construct; identical to SEQ ID NO: 22080
  source 1..107: note = Description of Artificial Sequence: Synthetic polypeptide; note = VL of XENP022506

SEQ ID NO: 22101 - protein, 11 aa, synthetic construct
  source 1..11: note = Description of Artificial Sequence: Synthetic peptide; note = XENP022506 vlCDR1
QASQDIGNYLN

SEQ ID NO: 22102 - protein, 7 aa, synthetic construct
  source 1..7: note = Description of Artificial Sequence: Synthetic peptide; note = XENP022506 vlCDR2
FTSYLHS

SEQ ID NO: 22103 - protein, 9 aa, synthetic construct
  source 1..9: note = Description of Artificial Sequence: Synthetic peptide; note = XENP022506 vlCDR3
QQGNTLPYT

SEQ ID NO: 22104 - protein, 447 aa, synthetic construct
  source 1..447: note = Description of Artificial Sequence: Synthetic polypeptide; note = XENP022507 2A11_H1.117_L2.116_Fab-ipilimumab_H3.23_L0.129  Fab-Fc Heavy Chain
EVQLVQSGAEVKKPGATVKISCKASGFNIKHYFMHWVQQAPGKGLEWMGWIDPYLGDTEYAPKFQGRVTITADTSTNTAYMELSSLRSEDTAVYYCYARGVRQALDYWGQGTLVTVSSASTKGPSVFPLAPSSKSTSGGTAALGCLVKDYFPEPVTVSWNSGALTSGVHTFPAVLQSSGLYSLSSVVTVPSSSLGTQTYICNVNHKPSDTKVDKKVEPKSCDKTHTCPPCPAPPVAGPSVFLFPPKPKDTLMISRTPEVTCVVVDVKHEDPEVKFNWYVDGVEVHNAKTKPREEEYNSTYRVVSVLTVLHQDWLNGKEYKCKVSNKALPAPIEKTISKAKGQPREPQVYTLPPSREEMTKNQVSLTCDVSGFYPSDIAVEWESDGQPENNYKTTPPVLDSDGSFFLYSKLTVDKSRWEQGDVFSCSVMHEALHNHYTQKSLSLSPGK

SEQ ID NO: 22105 - protein, 118 aa, synthetic construct
  source 1..118: note = Description of Artificial Sequence: Synthetic polypeptide; note = VH of XENP022507
EVQLVQSGAEVKKPGATVKISCKASGFNIKHYFMHWVQQAPGKGLEWMGWIDPYLGDTEYAPKFQGRVTITADTSTNTAYMELSSLRSEDTAVYYCYARGVRQALDYWGQGTLVTVSS

SEQ ID NO: 22106 - protein, 5 aa, synthetic construct
  source 1..5: note = Description of Artificial Sequence: Synthetic peptide; note = XENP022507 vhCDR1
HYFMH

SEQ ID NO: 22107 - protein, 17 aa, synthetic construct
  source 1..17: note = Description of Artificial Sequence: Synthetic peptide; note = XENP022507 vhCDR2
WIDPYLGDTEYAPKFQG

SEQ ID NO: 22108 - protein, 9 aa, synthetic construct
  source 1..9: note = Description of Artificial Sequence: Synthetic peptide; note = XENP022507 vhCDR3
RGVRQALDY

SEQ ID NO: 22109 - protein, 477 aa, synthetic construct; identical to SEQ ID NO: 21669
  source 1..477: note = Description of Artificial Sequence: Synthetic polypeptide; note = XENP022507 2A11_H1.117_L2.116_Fab-ipilimumab_H3.23_L0.129  scFv-Fc Heavy Chain

SEQ ID NO: 22110 - protein, 118 aa, synthetic construct; identical to SEQ ID NO: 2632
  source 1..118: note = Description of Artificial Sequence: Synthetic polypeptide; note = VH of XENP022507

SEQ ID NO: 22111 - protein, 108 aa, synthetic construct; identical to SEQ ID NO: 2768
  source 1..108: note = Description of Artificial Sequence: Synthetic polypeptide; note = VL of XENP022507

SEQ ID NO: 22112 - protein, 231 aa, synthetic construct; identical to SEQ ID NO: 21532
  source 1..231: note = Description of Artificial Sequence: Synthetic polypeptide; note = Fc chain of XENP022507

SEQ ID NO: 22113 - protein, 5 aa, synthetic construct
  source 1..5: note = Description of Artificial Sequence: Synthetic peptide; note = XENP022507 vhCDR1
SYTMH

SEQ ID NO: 22114 - protein, 17 aa, synthetic construct
  source 1..17: note = Description of Artificial Sequence: Synthetic peptide; note = XENP022507 vhCDR2
FISYDGNYKYYADSVKG

SEQ ID NO: 22115 - protein, 9 aa, synthetic construct
  source 1..9: note = Description of Artificial Sequence: Synthetic peptide; note = XENP022507 vhCDR3
GGHLGPFDL

SEQ ID NO: 22116 - protein, 12 aa, synthetic construct
  source 1..12: note = Description of Artificial Sequence: Synthetic peptide; note = XENP022507 vlCDR1
RASQSVGSSYLA

SEQ ID NO: 22117 - protein, 7 aa, synthetic construct
  source 1..7: note = Description of Artificial Sequence: Synthetic peptide; note = XENP022507 vlCDR2
GASSRAT

SEQ ID NO: 22118 - protein, 9 aa, synthetic construct
  source 1..9: note = Description of Artificial Sequence: Synthetic peptide; note = XENP022507 vlCDR3
QQYGSSPWT

SEQ ID NO: 22119 - protein, 214 aa, synthetic construct
  source 1..214: note = Description of Artificial Sequence: Synthetic polypeptide; note = XENP022507 2A11_H1.117_L2.116_Fab-ipilimumab_H3.23_L0.129 Light Chain
DIQMTQSPAFLSVTPGEKVTITCQASQDIGNYLNWFQQKPDQTVKLLIYFTSHLHSGVPSRFSGSGSGTDYTFTISSLEAEDAATYFCQQGHQLPYTFGGGTKVEIKRTVAAPSVFIFPPSDEQLKSGTASVVCLLNNFYPREAKVQWKVDNALQSGNSQESVTEQDSKDSTYSLSSTLTLSKADYEKHKVYACEVTHQGLSSPVTKSFNRGEC

SEQ ID NO: 22120 - protein, 107 aa, synthetic construct
  source 1..107: note = Description of Artificial Sequence: Synthetic polypeptide; note = VL of XENP022507
DIQMTQSPAFLSVTPGEKVTITCQASQDIGNYLNWFQQKPDQTVKLLIYFTSHLHSGVPSRFSGSGSGTDYTFTISSLEAEDAATYFCQQGHQLPYTFGGGTKVEIK

SEQ ID NO: 22121 - protein, 11 aa, synthetic construct
  source 1..11: note = Description of Artificial Sequence: Synthetic peptide; note = XENP022507 vlCDR1
QASQDIGNYLN

SEQ ID NO: 22122 - protein, 7 aa, synthetic construct
  source 1..7: note = Description of Artificial Sequence: Synthetic peptide; note = XENP022507 vlCDR2
FTSHLHS

SEQ ID NO: 22123 - protein, 9 aa, synthetic construct
  source 1..9: note = Description of Artificial Sequence: Synthetic peptide; note = XENP022507 vlCDR3
QQGHQLPYT

SEQ ID NO: 22124 - protein, 447 aa, synthetic construct; identical to SEQ ID NO: 22084
  source 1..447: note = Description of Artificial Sequence: Synthetic polypeptide; note = XENP022508 2A11_H1.144_L2_Fab-ipilimumab_H3.23_L0.129 Fab- Fc Heavy Chain

SEQ ID NO: 22125 - protein, 118 aa, synthetic construct; identical to SEQ ID NO: 22085
  source 1..118: note = Description of Artificial Sequence: Synthetic polypeptide; note = VH of XENP022508

SEQ ID NO: 22126 - protein, 5 aa, synthetic construct
  source 1..5: note = Description of Artificial Sequence: Synthetic peptide; note = XENP022508 vhCDR1
DYFMH

SEQ ID NO: 22127 - protein, 17 aa, synthetic construct
  source 1..17: note = Description of Artificial Sequence: Synthetic peptide; note = XENP022508 vhCDR2
WIDPELGDTEYAPKFQG

SEQ ID NO: 22128 - protein, 9 aa, synthetic construct
  source 1..9: note = Description of Artificial Sequence: Synthetic peptide; note = XENP022508 vhCDR3
RGVYQALDY

SEQ ID NO: 22129 - protein, 477 aa, synthetic construct; identical to SEQ ID NO: 21669
  source 1..477: note = Description of Artificial Sequence: Synthetic polypeptide; note = XENP022508 2A11_H1.144_L2_Fab-ipilimumab_H3.23_L0.129 scFv -Fc Heavy Chain

SEQ ID NO: 22130 - protein, 118 aa, synthetic construct; identical to SEQ ID NO: 2632
  source 1..118: note = Description of Artificial Sequence: Synthetic polypeptide; note = VH of XENP022508

SEQ ID NO: 22131 - protein, 108 aa, synthetic construct; identical to SEQ ID NO: 2768
  source 1..108: note = Description of Artificial Sequence: Synthetic polypeptide; note = VL of XENP022508

SEQ ID NO: 22132 - protein, 231 aa, synthetic construct; identical to SEQ ID NO: 21532
  source 1..231: note = Description of Artificial Sequence: Synthetic polypeptide; note = Fc chain of XENP022508

SEQ ID NO: 22133 - protein, 5 aa, synthetic construct
  source 1..5: note = Description of Artificial Sequence: Synthetic peptide; note = XENP022508 vhCDR1
SYTMH

SEQ ID NO: 22134 - protein, 17 aa, synthetic construct
  source 1..17: note = Description of Artificial Sequence: Synthetic peptide; note = XENP022508 vhCDR2
FISYDGNYKYYADSVKG

SEQ ID NO: 22135 - protein, 9 aa, synthetic construct
  source 1..9: note = Description of Artificial Sequence: Synthetic peptide; note = XENP022508 vhCDR3
GGHLGPFDL

SEQ ID NO: 22136 - protein, 12 aa, synthetic construct
  source 1..12: note = Description of Artificial Sequence: Synthetic peptide; note = XENP022508 vlCDR1
RASQSVGSSYLA

SEQ ID NO: 22137 - protein, 7 aa, synthetic construct
  source 1..7: note = Description of Artificial Sequence: Synthetic peptide; note = XENP022508 vlCDR2
GASSRAT

SEQ ID NO: 22138 - protein, 9 aa, synthetic construct
  source 1..9: note = Description of Artificial Sequence: Synthetic peptide; note = XENP022508 vlCDR3
QQYGSSPWT

SEQ ID NO: 22139 - protein, 214 aa, synthetic construct; identical to SEQ ID NO: 17250
  source 1..214: note = Description of Artificial Sequence: Synthetic polypeptide; note = XENP022508 2A11_H1.144_L2_Fab-ipilimumab_H3.23_L0.129  Light Chain

SEQ ID NO: 22140 - protein, 107 aa, synthetic construct; identical to SEQ ID NO: 17251
  source 1..107: note = Description of Artificial Sequence: Synthetic polypeptide; note = VL of XENP022508

SEQ ID NO: 22141 - protein, 11 aa, synthetic construct
  source 1..11: note = Description of Artificial Sequence: Synthetic peptide; note = XENP022508 vlCDR1
QASQDIGNYLN

SEQ ID NO: 22142 - protein, 7 aa, synthetic construct
  source 1..7: note = Description of Artificial Sequence: Synthetic peptide; note = XENP022508 vlCDR2
YTSRLHS

SEQ ID NO: 22143 - protein, 9 aa, synthetic construct
  source 1..9: note = Description of Artificial Sequence: Synthetic peptide; note = XENP022508 vlCDR3
QQGNTLPYT

SEQ ID NO: 22144 - protein, 447 aa, synthetic construct; identical to SEQ ID NO: 17235
  source 1..447: note = Description of Artificial Sequence: Synthetic polypeptide; note = XENP022509 2A11_H1_L2.113_Fab-ipilimumab_H3.23_L0.129 Fab- Fc Heavy Chain

SEQ ID NO: 22145 - protein, 118 aa, synthetic construct; identical to SEQ ID NO: 17236
  source 1..118: note = Description of Artificial Sequence: Synthetic polypeptide; note = VH of XENP022509

SEQ ID NO: 22146 - protein, 5 aa, synthetic construct
  source 1..5: note = Description of Artificial Sequence: Synthetic peptide; note = XENP022509 vhCDR1
DYYMH

SEQ ID NO: 22147 - protein, 17 aa, synthetic construct
  source 1..17: note = Description of Artificial Sequence: Synthetic peptide; note = XENP022509 vhCDR2
WIDPENGDTEYAPKFQG

SEQ ID NO: 22148 - protein, 9 aa, synthetic construct
  source 1..9: note = Description of Artificial Sequence: Synthetic peptide; note = XENP022509 vhCDR3
RGVRQALDY

SEQ ID NO: 22149 - protein, 477 aa, synthetic construct; identical to SEQ ID NO: 21669
  source 1..477: note = Description of Artificial Sequence: Synthetic polypeptide; note = XENP022509 2A11_H1_L2.113_Fab-ipilimumab_H3.23_L0.129 scFv- Fc Heavy Chain

SEQ ID NO: 22150 - protein, 118 aa, synthetic construct; identical to SEQ ID NO: 2632
  source 1..118: note = Description of Artificial Sequence: Synthetic polypeptide; note = VH of XENP022509

SEQ ID NO: 22151 - protein, 108 aa, synthetic construct; identical to SEQ ID NO: 2768
  source 1..108: note = Description of Artificial Sequence: Synthetic polypeptide; note = VL of XENP022509

SEQ ID NO: 22152 - protein, 231 aa, synthetic construct; identical to SEQ ID NO: 21532
  source 1..231: note = Description of Artificial Sequence: Synthetic polypeptide; note = Fc chain of XENP022509

SEQ ID NO: 22153 - protein, 5 aa, synthetic construct
  source 1..5: note = Description of Artificial Sequence: Synthetic peptide; note = XENP022509 vhCDR1
SYTMH

SEQ ID NO: 22154 - protein, 17 aa, synthetic construct
  source 1..17: note = Description of Artificial Sequence: Synthetic peptide; note = XENP022509 vhCDR2
FISYDGNYKYYADSVKG

SEQ ID NO: 22155 - protein, 9 aa, synthetic construct
  source 1..9: note = Description of Artificial Sequence: Synthetic peptide; note = XENP022509 vhCDR3
GGHLGPFDL

SEQ ID NO: 22156 - protein, 12 aa, synthetic construct
  source 1..12: note = Description of Artificial Sequence: Synthetic peptide; note = XENP022509 vlCDR1
RASQSVGSSYLA

SEQ ID NO: 22157 - protein, 7 aa, synthetic construct
  source 1..7: note = Description of Artificial Sequence: Synthetic peptide; note = XENP022509 vlCDR2
GASSRAT

SEQ ID NO: 22158 - protein, 9 aa, synthetic construct
  source 1..9: note = Description of Artificial Sequence: Synthetic peptide; note = XENP022509 vlCDR3
QQYGSSPWT

SEQ ID NO: 22159 - protein, 214 aa, synthetic construct; identical to SEQ ID NO: 22079
  source 1..214: note = Description of Artificial Sequence: Synthetic polypeptide; note = XENP022509 2A11_H1_L2.113_Fab-ipilimumab_H3.23_L0.129 Light Chain

SEQ ID NO: 22160 - protein, 107 aa, synthetic construct; identical to SEQ ID NO: 22080
  source 1..107: note = Description of Artificial Sequence: Synthetic polypeptide; note = VL of XENP022509

SEQ ID NO: 22161 - protein, 11 aa, synthetic construct
  source 1..11: note = Description of Artificial Sequence: Synthetic peptide; note = XENP022509 vlCDR1
QASQDIGNYLN

SEQ ID NO: 22162 - protein, 7 aa, synthetic construct
  source 1..7: note = Description of Artificial Sequence: Synthetic peptide; note = XENP022509 vlCDR2
FTSYLHS

SEQ ID NO: 22163 - protein, 9 aa, synthetic construct
  source 1..9: note = Description of Artificial Sequence: Synthetic peptide; note = XENP022509 vlCDR3
QQGNTLPYT

SEQ ID NO: 22164 - protein, 447 aa, synthetic construct; identical to SEQ ID NO: 17235
  source 1..447: note = Description of Artificial Sequence: Synthetic polypeptide; note = XENP022510 2A11_H1_L2.25_Fab-ipilimumab_H3.23_L0.129 Fab-Fc Heavy Chain

SEQ ID NO: 22165 - protein, 118 aa, synthetic construct; identical to SEQ ID NO: 17236
  source 1..118: note = Description of Artificial Sequence: Synthetic polypeptide; note = VH of XENP022510

SEQ ID NO: 22166 - protein, 5 aa, synthetic construct
  source 1..5: note = Description of Artificial Sequence: Synthetic peptide; note = XENP022510 vhCDR1
DYYMH

SEQ ID NO: 22167 - protein, 17 aa, synthetic construct
  source 1..17: note = Description of Artificial Sequence: Synthetic peptide; note = XENP022510 vhCDR2
WIDPENGDTEYAPKFQG

SEQ ID NO: 22168 - protein, 9 aa, synthetic construct
  source 1..9: note = Description of Artificial Sequence: Synthetic peptide; note = XENP022510 vhCDR3
RGVRQALDY

SEQ ID NO: 22169 - protein, 477 aa, synthetic construct; identical to SEQ ID NO: 21669
  source 1..477: note = Description of Artificial Sequence: Synthetic polypeptide; note = XENP022510 2A11_H1_L2.25_Fab-ipilimumab_H3.23_L0.129 scFv-Fc Heavy Chain

SEQ ID NO: 22170 - protein, 118 aa, synthetic construct; identical to SEQ ID NO: 2632
  source 1..118: note = Description of Artificial Sequence: Synthetic polypeptide; note = VH of XENP022510

SEQ ID NO: 22171 - protein, 108 aa, synthetic construct; identical to SEQ ID NO: 2768
  source 1..108: note = Description of Artificial Sequence: Synthetic polypeptide; note = VL of XENP022510

SEQ ID NO: 22172 - protein, 231 aa, synthetic construct; identical to SEQ ID NO: 21532
  source 1..231: note = Description of Artificial Sequence: Synthetic polypeptide; note = Fc chain of XENP022510

SEQ ID NO: 22173 - protein, 5 aa, synthetic construct
  source 1..5: note = Description of Artificial Sequence: Synthetic peptide; note = XENP022510 vhCDR1
SYTMH

SEQ ID NO: 22174 - protein, 17 aa, synthetic construct
  source 1..17: note = Description of Artificial Sequence: Synthetic peptide; note = XENP022510 vhCDR2
FISYDGNYKYYADSVKG

SEQ ID NO: 22175 - protein, 9 aa, synthetic construct
  source 1..9: note = Description of Artificial Sequence: Synthetic peptide; note = XENP022510 vhCDR3
GGHLGPFDL

SEQ ID NO: 22176 - protein, 12 aa, synthetic construct
  source 1..12: note = Description of Artificial Sequence: Synthetic peptide; note = XENP022510 vlCDR1
RASQSVGSSYLA

SEQ ID NO: 22177 - protein, 7 aa, synthetic construct
  source 1..7: note = Description of Artificial Sequence: Synthetic peptide; note = XENP022510 vlCDR2
GASSRAT

SEQ ID NO: 22178 - protein, 9 aa, synthetic construct
  source 1..9: note = Description of Artificial Sequence: Synthetic peptide; note = XENP022510 vlCDR3
QQYGSSPWT

SEQ ID NO: 22179 - protein, 214 aa, synthetic construct
  source 1..214: note = Description of Artificial Sequence: Synthetic polypeptide; note = XENP022510 2A11_H1_L2.25_Fab-ipilimumab_H3.23_L0.129 Light  Chain
DIQMTQSPAFLSVTPGEKVTITCQASQDIGNHLNWFQQKPDQTVKLLIYYTSRLHSGVPSRFSGSGSGTDYTFTISSLEAEDAATYFCQQGNTLPYTFGGGTKVEIKRTVAAPSVFIFPPSDEQLKSGTASVVCLLNNFYPREAKVQWKVDNALQSGNSQESVTEQDSKDSTYSLSSTLTLSKADYEKHKVYACEVTHQGLSSPVTKSFNRGEC

SEQ ID NO: 22180 - protein, 107 aa, synthetic construct
  source 1..107: note = Description of Artificial Sequence: Synthetic polypeptide; note = VL of XENP022510
DIQMTQSPAFLSVTPGEKVTITCQASQDIGNHLNWFQQKPDQTVKLLIYYTSRLHSGVPSRFSGSGSGTDYTFTISSLEAEDAATYFCQQGNTLPYTFGGGTKVEIK

SEQ ID NO: 22181 - protein, 11 aa, synthetic construct
  source 1..11: note = Description of Artificial Sequence: Synthetic peptide; note = XENP022510 vlCDR1
QASQDIGNHLN

SEQ ID NO: 22182 - protein, 7 aa, synthetic construct
  source 1..7: note = Description of Artificial Sequence: Synthetic peptide; note = XENP022510 vlCDR2
YTSRLHS

SEQ ID NO: 22183 - protein, 9 aa, synthetic construct
  source 1..9: note = Description of Artificial Sequence: Synthetic peptide; note = XENP022510 vlCDR3
QQGNTLPYT

SEQ ID NO: 22184 - protein, 447 aa, synthetic construct; identical to SEQ ID NO: 22084
  source 1..447: note = Description of Artificial Sequence: Synthetic polypeptide; note = XENP022518 2A11_H1.144_L2.133_Fab-ipilimumab_H3.23_L0.129  Fab-Fc Heavy Chain

SEQ ID NO: 22185 - protein, 118 aa, synthetic construct; identical to SEQ ID NO: 22085
  source 1..118: note = Description of Artificial Sequence: Synthetic polypeptide; note = VH of XENP022518

SEQ ID NO: 22186 - protein, 5 aa, synthetic construct
  source 1..5: note = Description of Artificial Sequence: Synthetic peptide; note = XENP022518 vhCDR1
DYFMH

SEQ ID NO: 22187 - protein, 17 aa, synthetic construct
  source 1..17: note = Description of Artificial Sequence: Synthetic peptide; note = XENP022518 vhCDR2
WIDPELGDTEYAPKFQG

SEQ ID NO: 22188 - protein, 9 aa, synthetic construct
  source 1..9: note = Description of Artificial Sequence: Synthetic peptide; note = XENP022518 vhCDR3
RGVYQALDY

SEQ ID NO: 22189 - protein, 477 aa, synthetic construct; identical to SEQ ID NO: 21669
  source 1..477: note = Description of Artificial Sequence: Synthetic polypeptide; note = XENP022518 2A11_H1.144_L2.133_Fab-ipilimumab_H3.23_L0.129  scFv-Fc Heavy Chain

SEQ ID NO: 22190 - protein, 118 aa, synthetic construct; identical to SEQ ID NO: 2632
  source 1..118: note = Description of Artificial Sequence: Synthetic polypeptide; note = VH of XENP022518

SEQ ID NO: 22191 - protein, 108 aa, synthetic construct; identical to SEQ ID NO: 2768
  source 1..108: note = Description of Artificial Sequence: Synthetic polypeptide; note = VL of XENP022518

SEQ ID NO: 22192 - protein, 231 aa, synthetic construct; identical to SEQ ID NO: 21532
  source 1..231: note = Description of Artificial Sequence: Synthetic polypeptide; note = Fc chain of XENP022518

SEQ ID NO: 22193 - protein, 5 aa, synthetic construct
  source 1..5: note = Description of Artificial Sequence: Synthetic peptide; note = XENP022518 vhCDR1
SYTMH

SEQ ID NO: 22194 - protein, 17 aa, synthetic construct
  source 1..17: note = Description of Artificial Sequence: Synthetic peptide; note = XENP022518 vhCDR2
FISYDGNYKYYADSVKG

SEQ ID NO: 22195 - protein, 9 aa, synthetic construct
  source 1..9: note = Description of Artificial Sequence: Synthetic peptide; note = XENP022518 vhCDR3
GGHLGPFDL

SEQ ID NO: 22196 - protein, 12 aa, synthetic construct
  source 1..12: note = Description of Artificial Sequence: Synthetic peptide; note = XENP022518 vlCDR1
RASQSVGSSYLA

SEQ ID NO: 22197 - protein, 7 aa, synthetic construct
  source 1..7: note = Description of Artificial Sequence: Synthetic peptide; note = XENP022518 vlCDR2
GASSRAT

SEQ ID NO: 22198 - protein, 9 aa, synthetic construct
  source 1..9: note = Description of Artificial Sequence: Synthetic peptide; note = XENP022518 vlCDR3
QQYGSSPWT

SEQ ID NO: 22199 - protein, 214 aa, synthetic construct
  source 1..214: note = Description of Artificial Sequence: Synthetic polypeptide; note = XENP022518 2A11_H1.144_L2.133_Fab-ipilimumab_H3.23_L0.129  Light Chain
DIQMTQSPAFLSVTPGEKVTITCQASQDIGNYLNWFQQKPDQTPKLLIYFTSYLHSGVPSRFSGSGSGTDYTFTISSLEAEDAATYFCQEGNTLPYTFGGGTKVEIKRTVAAPSVFIFPPSDEQLKSGTASVVCLLNNFYPREAKVQWKVDNALQSGNSQESVTEQDSKDSTYSLSSTLTLSKADYEKHKVYACEVTHQGLSSPVTKSFNRGEC

SEQ ID NO: 22200 - protein, 107 aa, synthetic construct
  source 1..107: note = Description of Artificial Sequence: Synthetic polypeptide; note = VL of XENP022518
DIQMTQSPAFLSVTPGEKVTITCQASQDIGNYLNWFQQKPDQTPKLLIYFTSYLHSGVPSRFSGSGSGTDYTFTISSLEAEDAATYFCQEGNTLPYTFGGGTKVEIK

SEQ ID NO: 22201 - protein, 11 aa, synthetic construct
  source 1..11: note = Description of Artificial Sequence: Synthetic peptide; note = XENP022518 vlCDR1
QASQDIGNYLN

SEQ ID NO: 22202 - protein, 7 aa, synthetic construct
  source 1..7: note = Description of Artificial Sequence: Synthetic peptide; note = XENP022518 vlCDR2
FTSYLHS

SEQ ID NO: 22203 - protein, 9 aa, synthetic construct
  source 1..9: note = Description of Artificial Sequence: Synthetic peptide; note = XENP022518 vlCDR3
QEGNTLPYT

SEQ ID NO: 22204 - protein, 447 aa, synthetic construct; identical to SEQ ID NO: 22064
  source 1..447: note = Description of Artificial Sequence: Synthetic polypeptide; note = XENP022625 2A11_H1.125_L2.132_Fab-ipilimumab_H3.23_L0.129  Fab-Fc Heavy Chain

SEQ ID NO: 22205 - protein, 118 aa, synthetic construct; identical to SEQ ID NO: 22065
  source 1..118: note = Description of Artificial Sequence: Synthetic polypeptide; note = VH of XENP022625

SEQ ID NO: 22206 - protein, 5 aa, synthetic construct
  source 1..5: note = Description of Artificial Sequence: Synthetic peptide; note = XENP022625 vhCDR1
HYFMH

SEQ ID NO: 22207 - protein, 17 aa, synthetic construct
  source 1..17: note = Description of Artificial Sequence: Synthetic peptide; note = XENP022625 vhCDR2
WIDPYLGDTEYAPKFQG

SEQ ID NO: 22208 - protein, 9 aa, synthetic construct
  source 1..9: note = Description of Artificial Sequence: Synthetic peptide; note = XENP022625 vhCDR3
RGVYQALDY

SEQ ID NO: 22209 - protein, 477 aa, synthetic construct; identical to SEQ ID NO: 21669
  source 1..477: note = Description of Artificial Sequence: Synthetic polypeptide; note = XENP022625 2A11_H1.125_L2.132_Fab-ipilimumab_H3.23_L0.129  scFv-Fc Heavy Chain

SEQ ID NO: 22210 - protein, 118 aa, synthetic construct; identical to SEQ ID NO: 2632
  source 1..118: note = Description of Artificial Sequence: Synthetic polypeptide; note = VH of XENP022625

SEQ ID NO: 22211 - protein, 108 aa, synthetic construct; identical to SEQ ID NO: 2768
  source 1..108: note = Description of Artificial Sequence: Synthetic polypeptide; note = VL of XENP022625

SEQ ID NO: 22212 - protein, 231 aa, synthetic construct; identical to SEQ ID NO: 21532
  source 1..231: note = Description of Artificial Sequence: Synthetic polypeptide; note = Fc chain of XENP022625

SEQ ID NO: 22213 - protein, 5 aa, synthetic construct
  source 1..5: note = Description of Artificial Sequence: Synthetic peptide; note = XENP022625 vhCDR1
SYTMH

SEQ ID NO: 22214 - protein, 17 aa, synthetic construct
  source 1..17: note = Description of Artificial Sequence: Synthetic peptide; note = XENP022625 vhCDR2
FISYDGNYKYYADSVKG

SEQ ID NO: 22215 - protein, 9 aa, synthetic construct
  source 1..9: note = Description of Artificial Sequence: Synthetic peptide; note = XENP022625 vhCDR3
GGHLGPFDL

SEQ ID NO: 22216 - protein, 12 aa, synthetic construct
  source 1..12: note = Description of Artificial Sequence: Synthetic peptide; note = XENP022625 vlCDR1
RASQSVGSSYLA

SEQ ID NO: 22217 - protein, 7 aa, synthetic construct
  source 1..7: note = Description of Artificial Sequence: Synthetic peptide; note = XENP022625 vlCDR2
GASSRAT

SEQ ID NO: 22218 - protein, 9 aa, synthetic construct
  source 1..9: note = Description of Artificial Sequence: Synthetic peptide; note = XENP022625 vlCDR3
QQYGSSPWT

SEQ ID NO: 22219 - protein, 214 aa, synthetic construct
  source 1..214: note = Description of Artificial Sequence: Synthetic polypeptide; note = XENP022625 2A11_H1.125_L2.132_Fab-ipilimumab_H3.23_L0.129  Light Chain
DIQMTQSPAFLSVTPGEKVTITCQASQDIGNYLNWFQQKPGQTVKLLIYFTSYLHSGVPSRFSGSGSGTDYTFTISSLEAEDAATYFCQEGNTLPYTFGGGTKVEIKRTVAAPSVFIFPPSDEQLKSGTASVVCLLNNFYPREAKVQWKVDNALQSGNSQESVTEQDSKDSTYSLSSTLTLSKADYEKHKVYACEVTHQGLSSPVTKSFNRGEC

SEQ ID NO: 22220 - protein, 107 aa, synthetic construct
  source 1..107: note = Description of Artificial Sequence: Synthetic polypeptide; note = VL of XENP022625
DIQMTQSPAFLSVTPGEKVTITCQASQDIGNYLNWFQQKPGQTVKLLIYFTSYLHSGVPSRFSGSGSGTDYTFTISSLEAEDAATYFCQEGNTLPYTFGGGTKVEIK

SEQ ID NO: 22221 - protein, 11 aa, synthetic construct
  source 1..11: note = Description of Artificial Sequence: Synthetic peptide; note = XENP022625 vlCDR1
QASQDIGNYLN

SEQ ID NO: 22222 - protein, 7 aa, synthetic construct
  source 1..7: note = Description of Artificial Sequence: Synthetic peptide; note = XENP022625 vlCDR2
FTSYLHS

SEQ ID NO: 22223 - protein, 9 aa, synthetic construct
  source 1..9: note = Description of Artificial Sequence: Synthetic peptide; note = XENP022625 vlCDR3
QEGNTLPYT

SEQ ID NO: 22224 - protein, 447 aa, synthetic construct; identical to SEQ ID NO: 22084
  source 1..447: note = Description of Artificial Sequence: Synthetic polypeptide; note = XENP022630 2A11_H1.144_L2.137_Fab-ipilimumab_H3.23_L0.129  Fab-Fc Heavy Chain

SEQ ID NO: 22225 - protein, 118 aa, synthetic construct; identical to SEQ ID NO: 22085
  source 1..118: note = Description of Artificial Sequence: Synthetic polypeptide; note = VH of XENP022630

SEQ ID NO: 22226 - protein, 5 aa, synthetic construct
  source 1..5: note = Description of Artificial Sequence: Synthetic peptide; note = XENP022630 vhCDR1
DYFMH

SEQ ID NO: 22227 - protein, 17 aa, synthetic construct
  source 1..17: note = Description of Artificial Sequence: Synthetic peptide; note = XENP022630 vhCDR2
WIDPELGDTEYAPKFQG

SEQ ID NO: 22228 - protein, 9 aa, synthetic construct
  source 1..9: note = Description of Artificial Sequence: Synthetic peptide; note = XENP022630 vhCDR3
RGVYQALDY

SEQ ID NO: 22229 - protein, 477 aa, synthetic construct; identical to SEQ ID NO: 21669
  source 1..477: note = Description of Artificial Sequence: Synthetic polypeptide; note = XENP022630 2A11_H1.144_L2.137_Fab-ipilimumab_H3.23_L0.129  scFv-Fc Heavy Chain

SEQ ID NO: 22230 - protein, 118 aa, synthetic construct; identical to SEQ ID NO: 2632
  source 1..118: note = Description of Artificial Sequence: Synthetic polypeptide; note = VH of XENP022630

SEQ ID NO: 22231 - protein, 108 aa, synthetic construct; identical to SEQ ID NO: 2768
  source 1..108: note = Description of Artificial Sequence: Synthetic polypeptide; note = VL of XENP022630

SEQ ID NO: 22232 - protein, 231 aa, synthetic construct; identical to SEQ ID NO: 21532
  source 1..231: note = Description of Artificial Sequence: Synthetic polypeptide; note = Fc chain of XENP022630

SEQ ID NO: 22233 - protein, 5 aa, synthetic construct
  source 1..5: note = Description of Artificial Sequence: Synthetic peptide; note = XENP022630 vhCDR1
SYTMH

SEQ ID NO: 22234 - protein, 17 aa, synthetic construct
  source 1..17: note = Description of Artificial Sequence: Synthetic peptide; note = XENP022630 vhCDR2
FISYDGNYKYYADSVKG

SEQ ID NO: 22235 - protein, 9 aa, synthetic construct
  source 1..9: note = Description of Artificial Sequence: Synthetic peptide; note = XENP022630 vhCDR3
GGHLGPFDL

SEQ ID NO: 22236 - protein, 12 aa, synthetic construct
  source 1..12: note = Description of Artificial Sequence: Synthetic peptide; note = XENP022630 vlCDR1
RASQSVGSSYLA

SEQ ID NO: 22237 - protein, 7 aa, synthetic construct
  source 1..7: note = Description of Artificial Sequence: Synthetic peptide; note = XENP022630 vlCDR2
GASSRAT

SEQ ID NO: 22238 - protein, 9 aa, synthetic construct
  source 1..9: note = Description of Artificial Sequence: Synthetic peptide; note = XENP022630 vlCDR3
QQYGSSPWT

SEQ ID NO: 22239 - protein, 214 aa, synthetic construct
  source 1..214: note = Description of Artificial Sequence: Synthetic polypeptide; note = XENP022630 2A11_H1.144_L2.137_Fab-ipilimumab_H3.23_L0.129  Light Chain
DIQMTQSPAFLSVTPGEKVTITCQASQDIGNYLNWFQQKPGKVPKLLIYFTSYLHSGVPSRFSGSGSGTDYTFTISSLEAEDAATYFCQEGNTLPYTFGGGTKVEIKRTVAAPSVFIFPPSDEQLKSGTASVVCLLNNFYPREAKVQWKVDNALQSGNSQESVTEQDSKDSTYSLSSTLTLSKADYEKHKVYACEVTHQGLSSPVTKSFNRGEC

SEQ ID NO: 22240 - protein, 107 aa, synthetic construct
  source 1..107: note = Description of Artificial Sequence: Synthetic polypeptide; note = VL of XENP022630
DIQMTQSPAFLSVTPGEKVTITCQASQDIGNYLNWFQQKPGKVPKLLIYFTSYLHSGVPSRFSGSGSGTDYTFTISSLEAEDAATYFCQEGNTLPYTFGGGTKVEIK

SEQ ID NO: 22241 - protein, 11 aa, synthetic construct
  source 1..11: note = Description of Artificial Sequence: Synthetic peptide; note = XENP022630 vlCDR1
QASQDIGNYLN

SEQ ID NO: 22242 - protein, 7 aa, synthetic construct
  source 1..7: note = Description of Artificial Sequence: Synthetic peptide; note = XENP022630 vlCDR2
FTSYLHS

SEQ ID NO: 22243 - protein, 9 aa, synthetic construct
  source 1..9: note = Description of Artificial Sequence: Synthetic peptide; note = XENP022630 vlCDR3
QEGNTLPYT

SEQ ID NO: 22244 - protein, 447 aa, synthetic construct; identical to SEQ ID NO: 22064
  source 1..447: note = Description of Artificial Sequence: Synthetic polypeptide; note = XENP022673 2A11_H1.125_L2.126_Fab-ipilimumab_H3.23_L0.129  Fab-Fc Heavy Chain

SEQ ID NO: 22245 - protein, 118 aa, synthetic construct; identical to SEQ ID NO: 22065
  source 1..118: note = Description of Artificial Sequence: Synthetic polypeptide; note = VH of XENP022673

SEQ ID NO: 22246 - protein, 5 aa, synthetic construct
  source 1..5: note = Description of Artificial Sequence: Synthetic peptide; note = XENP022673 vhCDR1
HYFMH

SEQ ID NO: 22247 - protein, 17 aa, synthetic construct
  source 1..17: note = Description of Artificial Sequence: Synthetic peptide; note = XENP022673 vhCDR2
WIDPYLGDTEYAPKFQG

SEQ ID NO: 22248 - protein, 9 aa, synthetic construct
  source 1..9: note = Description of Artificial Sequence: Synthetic peptide; note = XENP022673 vhCDR3
RGVYQALDY

SEQ ID NO: 22249 - protein, 477 aa, synthetic construct; identical to SEQ ID NO: 21669
  source 1..477: note = Description of Artificial Sequence: Synthetic polypeptide; note = XENP022673 2A11_H1.125_L2.126_Fab-ipilimumab_H3.23_L0.129  scFv-Fc Heavy Chain

SEQ ID NO: 22250 - protein, 118 aa, synthetic construct; identical to SEQ ID NO: 2632
  source 1..118: note = Description of Artificial Sequence: Synthetic polypeptide; note = VH of XENP022673

SEQ ID NO: 22251 - protein, 108 aa, synthetic construct; identical to SEQ ID NO: 2768
  source 1..108: note = Description of Artificial Sequence: Synthetic polypeptide; note = VL of XENP022673

SEQ ID NO: 22252 - protein, 231 aa, synthetic construct; identical to SEQ ID NO: 21532
  source 1..231: note = Description of Artificial Sequence: Synthetic polypeptide; note = Fc chain of XENP022673

SEQ ID NO: 22253 - protein, 5 aa, synthetic construct
  source 1..5: note = Description of Artificial Sequence: Synthetic peptide; note = XENP022673 vhCDR1
SYTMH

SEQ ID NO: 22254 - protein, 17 aa, synthetic construct
  source 1..17: note = Description of Artificial Sequence: Synthetic peptide; note = XENP022673 vhCDR2
FISYDGNYKYYADSVKG

SEQ ID NO: 22255 - protein, 9 aa, synthetic construct
  source 1..9: note = Description of Artificial Sequence: Synthetic peptide; note = XENP022673 vhCDR3
GGHLGPFDL

SEQ ID NO: 22256 - protein, 12 aa, synthetic construct
  source 1..12: note = Description of Artificial Sequence: Synthetic peptide; note = XENP022673 vlCDR1
RASQSVGSSYLA

SEQ ID NO: 22257 - protein, 7 aa, synthetic construct
  source 1..7: note = Description of Artificial Sequence: Synthetic peptide; note = XENP022673 vlCDR2
GASSRAT

SEQ ID NO: 22258 - protein, 9 aa, synthetic construct
  source 1..9: note = Description of Artificial Sequence: Synthetic peptide; note = XENP022673 vlCDR3
QQYGSSPWT

SEQ ID NO: 22259 - protein, 214 aa, synthetic construct
  source 1..214: note = Description of Artificial Sequence: Synthetic polypeptide; note = XENP022673 2A11_H1.125_L2.126_Fab-ipilimumab_H3.23_L0.129  Light Chain
DIQMTQSPAFLSVTPGEKVTITCQASQDIGNYLNWFQQKPDQTVKLLIYFTSYLHSGVPSRFSGSGSGTDYTFTISSLEAEDAATYFCQEGNTLPYTFGGGTKVEIKRTVAAPSVFIFPPSDEQLKSGTASVVCLLNNFYPREAKVQWKVDNALQSGNSQESVTEQDSKDSTYSLSSTLTLSKADYEKHKVYACEVTHQGLSSPVTKSFNRGEC

SEQ ID NO: 22260 - protein, 107 aa, synthetic construct
  source 1..107: note = Description of Artificial Sequence: Synthetic polypeptide; note = VL of XENP022673
DIQMTQSPAFLSVTPGEKVTITCQASQDIGNYLNWFQQKPDQTVKLLIYFTSYLHSGVPSRFSGSGSGTDYTFTISSLEAEDAATYFCQEGNTLPYTFGGGTKVEIK

SEQ ID NO: 22261 - protein, 11 aa, synthetic construct
  source 1..11: note = Description of Artificial Sequence: Synthetic peptide; note = XENP022673 vlCDR1
QASQDIGNYLN

SEQ ID NO: 22262 - protein, 7 aa, synthetic construct
  source 1..7: note = Description of Artificial Sequence: Synthetic peptide; note = XENP022673 vlCDR2
FTSYLHS

SEQ ID NO: 22263 - protein, 9 aa, synthetic construct
  source 1..9: note = Description of Artificial Sequence: Synthetic peptide; note = XENP022673 vlCDR3
QEGNTLPYT

SEQ ID NO: 22264 - protein, 447 aa, synthetic construct; identical to SEQ ID NO: 22084
  source 1..447: note = Description of Artificial Sequence: Synthetic polypeptide; note = XENP022675 2A11_H1.144_L2.142_Fab-ipilimumab_H3.23_L0.129  Fab-Fc Heavy Chain

SEQ ID NO: 22265 - protein, 118 aa, synthetic construct; identical to SEQ ID NO: 22085
  source 1..118: note = Description of Artificial Sequence: Synthetic polypeptide; note = VH of XENP022675

SEQ ID NO: 22266 - protein, 5 aa, synthetic construct
  source 1..5: note = Description of Artificial Sequence: Synthetic peptide; note = XENP022675 vhCDR1
DYFMH

SEQ ID NO: 22267 - protein, 17 aa, synthetic construct
  source 1..17: note = Description of Artificial Sequence: Synthetic peptide; note = XENP022675 vhCDR2
WIDPELGDTEYAPKFQG

SEQ ID NO: 22268 - protein, 9 aa, synthetic construct
  source 1..9: note = Description of Artificial Sequence: Synthetic peptide; note = XENP022675 vhCDR3
RGVYQALDY

SEQ ID NO: 22269 - protein, 477 aa, synthetic construct; identical to SEQ ID NO: 21669
  source 1..477: note = Description of Artificial Sequence: Synthetic polypeptide; note = XENP022675 2A11_H1.144_L2.142_Fab-ipilimumab_H3.23_L0.129  scFv-Fc Heavy Chain

SEQ ID NO: 22270 - protein, 118 aa, synthetic construct; identical to SEQ ID NO: 2632
  source 1..118: note = Description of Artificial Sequence: Synthetic polypeptide; note = VH of XENP022675

SEQ ID NO: 22271 - protein, 108 aa, synthetic construct; identical to SEQ ID NO: 2768
  source 1..108: note = Description of Artificial Sequence: Synthetic polypeptide; note = VL of XENP022675

SEQ ID NO: 22272 - protein, 231 aa, synthetic construct; identical to SEQ ID NO: 21532
  source 1..231: note = Description of Artificial Sequence: Synthetic polypeptide; note = Fc chain of XENP022675

SEQ ID NO: 22273 - protein, 5 aa, synthetic construct
  source 1..5: note = Description of Artificial Sequence: Synthetic peptide; note = XENP022675 vhCDR1
SYTMH

SEQ ID NO: 22274 - protein, 17 aa, synthetic construct
  source 1..17: note = Description of Artificial Sequence: Synthetic peptide; note = XENP022675 vhCDR2
FISYDGNYKYYADSVKG

SEQ ID NO: 22275 - protein, 9 aa, synthetic construct
  source 1..9: note = Description of Artificial Sequence: Synthetic peptide; note = XENP022675 vhCDR3
GGHLGPFDL

SEQ ID NO: 22276 - protein, 12 aa, synthetic construct
  source 1..12: note = Description of Artificial Sequence: Synthetic peptide; note = XENP022675 vlCDR1
RASQSVGSSYLA

SEQ ID NO: 22277 - protein, 7 aa, synthetic construct
  source 1..7: note = Description of Artificial Sequence: Synthetic peptide; note = XENP022675 vlCDR2
GASSRAT

SEQ ID NO: 22278 - protein, 9 aa, synthetic construct
  source 1..9: note = Description of Artificial Sequence: Synthetic peptide; note = XENP022675 vlCDR3
QQYGSSPWT

SEQ ID NO: 22279 - protein, 214 aa, synthetic construct
  source 1..214: note = Description of Artificial Sequence: Synthetic polypeptide; note = XENP022675 2A11_H1.144_L2.142_Fab-ipilimumab_H3.23_L0.129  Light Chain
DIQMTQSPAFLSVTPGEKVTITCQASQDIGNYLNWFQQKPGQTVKLLIYFTSYLHSGVPSRFSGSGSGTDYTFTISSLEAEDAATYFCQQGNTLPYTFGGGTKVEIKRTVAAPSVFIFPPSDEQLKSGTASVVCLLNNFYPREAKVQWKVDNALQSGNSQESVTEQDSKDSTYSLSSTLTLSKADYEKHKVYACEVTHQGLSSPVTKSFNRGEC

SEQ ID NO: 22280 - protein, 107 aa, synthetic construct
  source 1..107: note = Description of Artificial Sequence: Synthetic polypeptide; note = VL of XENP022675
DIQMTQSPAFLSVTPGEKVTITCQASQDIGNYLNWFQQKPGQTVKLLIYFTSYLHSGVPSRFSGSGSGTDYTFTISSLEAEDAATYFCQQGNTLPYTFGGGTKVEIK

SEQ ID NO: 22281 - protein, 11 aa, synthetic construct
  source 1..11: note = Description of Artificial Sequence: Synthetic peptide; note = XENP022675 vlCDR1
QASQDIGNYLN

SEQ ID NO: 22282 - protein, 7 aa, synthetic construct
  source 1..7: note = Description of Artificial Sequence: Synthetic peptide; note = XENP022675 vlCDR2
FTSYLHS

SEQ ID NO: 22283 - protein, 9 aa, synthetic construct
  source 1..9: note = Description of Artificial Sequence: Synthetic peptide; note = XENP022675 vlCDR3
QQGNTLPYT

SEQ ID NO: 22284 - protein, 450 aa, synthetic construct; identical to SEQ ID NO: 17625
  source 1..450: note = Description of Artificial Sequence: Synthetic polypeptide; note = XENP020045 7G8_H2L2_Fab-ipilimumab_H3L0 Fab-Fc Heavy Chain

SEQ ID NO: 22285 - protein, 121 aa, synthetic construct; identical to SEQ ID NO: 17626
  source 1..121: note = Description of Artificial Sequence: Synthetic polypeptide; note = VH of XENP020045

SEQ ID NO: 22286 - protein, 5 aa, synthetic construct
  source 1..5: note = Description of Artificial Sequence: Synthetic peptide; note = XENP020045 vhCDR1
DAWMD

SEQ ID NO: 22287 - protein, 19 aa, synthetic construct
  source 1..19: note = Description of Artificial Sequence: Synthetic peptide; note = XENP020045 vhCDR2
EIRTKANNHATYYAESVKG

SEQ ID NO: 22288 - protein, 10 aa, synthetic construct
  source 1..10: note = Description of Artificial Sequence: Synthetic peptide; note = XENP020045 vhCDR3
LANWDWYFDV

SEQ ID NO: 22289 - protein, 477 aa, synthetic construct; identical to SEQ ID NO: 21769
  source 1..477: note = Description of Artificial Sequence: Synthetic polypeptide; note = XENP020045 7G8_H2L2_Fab-ipilimumab_H3L0 scFv-Fc Heavy Chain

SEQ ID NO: 22290 - protein, 118 aa, synthetic construct; identical to SEQ ID NO: 139
  source 1..118: note = Description of Artificial Sequence: Synthetic polypeptide; note = VH of XENP020045

SEQ ID NO: 22291 - protein, 108 aa, synthetic construct; identical to SEQ ID NO: 23
  source 1..108: note = Description of Artificial Sequence: Synthetic polypeptide; note = VL of XENP020045

SEQ ID NO: 22292 - protein, 231 aa, synthetic construct; identical to SEQ ID NO: 21532
  source 1..231: note = Description of Artificial Sequence: Synthetic polypeptide; note = Fc chain of XENP020045

SEQ ID NO: 22293 - protein, 5 aa, synthetic construct
  source 1..5: note = Description of Artificial Sequence: Synthetic peptide; note = XENP020045 vhCDR1
SYTMH

SEQ ID NO: 22294 - protein, 17 aa, synthetic construct
  source 1..17: note = Description of Artificial Sequence: Synthetic peptide; note = XENP020045 vhCDR2
FISYDGNNKYYADSVKG

SEQ ID NO: 22295 - protein, 9 aa, synthetic construct
  source 1..9: note = Description of Artificial Sequence: Synthetic peptide; note = XENP020045 vhCDR3
TGWLGPFDY

SEQ ID NO: 22296 - protein, 12 aa, synthetic construct
  source 1..12: note = Description of Artificial Sequence: Synthetic peptide; note = XENP020045 vlCDR1
RASQSVGSSYLA

SEQ ID NO: 22297 - protein, 7 aa, synthetic construct
  source 1..7: note = Description of Artificial Sequence: Synthetic peptide; note = XENP020045 vlCDR2
GAFSRAT

SEQ ID NO: 22298 - protein, 9 aa, synthetic construct
  source 1..9: note = Description of Artificial Sequence: Synthetic peptide; note = XENP020045 vlCDR3
QQYGSSPWT

SEQ ID NO: 22299 - protein, 218 aa, synthetic construct; identical to SEQ ID NO: 17610
  source 1..218: note = Description of Artificial Sequence: Synthetic polypeptide; note = XENP020045 7G8_H2L2_Fab-ipilimumab_H3L0 Light Chain

SEQ ID NO: 22300 - protein, 111 aa, synthetic construct; identical to SEQ ID NO: 17611
  source 1..111: note = Description of Artificial Sequence: Synthetic polypeptide; note = VL of XENP020045

SEQ ID NO: 22301 - protein, 15 aa, synthetic construct
  source 1..15: note = Description of Artificial Sequence: Synthetic peptide; note = XENP020045 vlCDR1
RASQSVDYDGDSYMN

SEQ ID NO: 22302 - protein, 7 aa, synthetic construct
  source 1..7: note = Description of Artificial Sequence: Synthetic peptide; note = XENP020045 vlCDR2
AASNLES

SEQ ID NO: 22303 - protein, 9 aa, synthetic construct
  source 1..9: note = Description of Artificial Sequence: Synthetic peptide; note = XENP020045 vlCDR3
QQSNEDPFT

SEQ ID NO: 22304 - protein, 450 aa, synthetic construct
  source 1..450: note = Description of Artificial Sequence: Synthetic polypeptide; note = XENP020833 7G8_H3L1_Fab-ipilimumab_H3.23_L0.129 Fab-Fc Heavy Chain
EVQLVESGGGLVQPGGSLRLSCAASGFTFSDAWMDWVRQAPGKGLEWVAEIRTKANNHATYYAESVKGRFTISRDDSKSSVYLQMNSLRAEDTAVYYCTRLANWDWYFDVWGQGTTVTVSSASTKGPSVFPLAPSSKSTSGGTAALGCLVKDYFPEPVTVSWNSGALTSGVHTFPAVLQSSGLYSLSSVVTVPSSSLGTQTYICNVNHKPSDTKVDKKVEPKSCDKTHTCPPCPAPPVAGPSVFLFPPKPKDTLMISRTPEVTCVVVDVKHEDPEVKFNWYVDGVEVHNAKTKPREEEYNSTYRVVSVLTVLHQDWLNGKEYKCKVSNKALPAPIEKTISKAKGQPREPQVYTLPPSREEMTKNQVSLTCDVSGFYPSDIAVEWESDGQPENNYKTTPPVLDSDGSFFLYSKLTVDKSRWEQGDVFSCSVMHEALHNHYTQKSLSLSPGK

SEQ ID NO: 22305 - protein, 121 aa, synthetic construct; identical to SEQ ID NO: 17806
  source 1..121: note = Description of Artificial Sequence: Synthetic polypeptide; note = VH of XENP020833

SEQ ID NO: 22306 - protein, 5 aa, synthetic construct
  source 1..5: note = Description of Artificial Sequence: Synthetic peptide; note = XENP020833 vhCDR1
DAWMD

SEQ ID NO: 22307 - protein, 19 aa, synthetic construct
  source 1..19: note = Description of Artificial Sequence: Synthetic peptide; note = XENP020833 vhCDR2
EIRTKANNHATYYAESVKG

SEQ ID NO: 22308 - protein, 10 aa, synthetic construct
  source 1..10: note = Description of Artificial Sequence: Synthetic peptide; note = XENP020833 vhCDR3
LANWDWYFDV

SEQ ID NO: 22309 - protein, 477 aa, synthetic construct; identical to SEQ ID NO: 21669
  source 1..477: note = Description of Artificial Sequence: Synthetic polypeptide; note = XENP020833 7G8_H3L1_Fab-ipilimumab_H3.23_L0.129 scFv-Fc  Heavy Chain

SEQ ID NO: 22310 - protein, 118 aa, synthetic construct; identical to SEQ ID NO: 2632
  source 1..118: note = Description of Artificial Sequence: Synthetic polypeptide; note = VH of XENP020833

SEQ ID NO: 22311 - protein, 108 aa, synthetic construct; identical to SEQ ID NO: 2768
  source 1..108: note = Description of Artificial Sequence: Synthetic polypeptide; note = VL of XENP020833

SEQ ID NO: 22312 - protein, 231 aa, synthetic construct; identical to SEQ ID NO: 21532
  source 1..231: note = Description of Artificial Sequence: Synthetic polypeptide; note = Fc chain of XENP020833

SEQ ID NO: 22313 - protein, 5 aa, synthetic construct
  source 1..5: note = Description of Artificial Sequence: Synthetic peptide; note = XENP020833 vhCDR1
SYTMH

SEQ ID NO: 22314 - protein, 17 aa, synthetic construct
  source 1..17: note = Description of Artificial Sequence: Synthetic peptide; note = XENP020833 vhCDR2
FISYDGNYKYYADSVKG

SEQ ID NO: 22315 - protein, 9 aa, synthetic construct
  source 1..9: note = Description of Artificial Sequence: Synthetic peptide; note = XENP020833 vhCDR3
GGHLGPFDL

SEQ ID NO: 22316 - protein, 12 aa, synthetic construct
  source 1..12: note = Description of Artificial Sequence: Synthetic peptide; note = XENP020833 vlCDR1
RASQSVGSSYLA

SEQ ID NO: 22317 - protein, 7 aa, synthetic construct
  source 1..7: note = Description of Artificial Sequence: Synthetic peptide; note = XENP020833 vlCDR2
GASSRAT

SEQ ID NO: 22318 - protein, 9 aa, synthetic construct
  source 1..9: note = Description of Artificial Sequence: Synthetic peptide; note = XENP020833 vlCDR3
QQYGSSPWT

SEQ ID NO: 22319 - protein, 218 aa, synthetic construct; identical to SEQ ID NO: 17600
  source 1..218: note = Description of Artificial Sequence: Synthetic polypeptide; note = XENP020833 7G8_H3L1_Fab-ipilimumab_H3.23_L0.129 Light Chain

SEQ ID NO: 22320 - protein, 111 aa, synthetic construct; identical to SEQ ID NO: 17601
  source 1..111: note = Description of Artificial Sequence: Synthetic polypeptide; note = VL of XENP020833

SEQ ID NO: 22321 - protein, 15 aa, synthetic construct
  source 1..15: note = Description of Artificial Sequence: Synthetic peptide; note = XENP020833 vlCDR1
RASQSVDYDGDSYMN

SEQ ID NO: 22322 - protein, 7 aa, synthetic construct
  source 1..7: note = Description of Artificial Sequence: Synthetic peptide; note = XENP020833 vlCDR2
AASNLES

SEQ ID NO: 22323 - protein, 9 aa, synthetic construct
  source 1..9: note = Description of Artificial Sequence: Synthetic peptide; note = XENP020833 vlCDR3
QQSNEDPFT

SEQ ID NO: 22324 - protein, 450 aa, synthetic construct
  source 1..450: note = Description of Artificial Sequence: Synthetic polypeptide; note = XENP021895 7G8_H3.18_L1-ipilimumab_H3.23_L0.129 Fab-Fc Heavy Chain
EVQLVESGGGLVQPGGSLRLSCAASGFTFDDAWMDWVRQAPGKGLEWVAEISTKANNHATYYAESVKGRFTISRDDSKSSVYLQMNSLRAEDTAVYYCTRLATWDWYFDVWGQGTTVTVSSASTKGPSVFPLAPSSKSTSGGTAALGCLVKDYFPEPVTVSWNSGALTSGVHTFPAVLQSSGLYSLSSVVTVPSSSLGTQTYICNVNHKPSDTKVDKKVEPKSCDKTHTCPPCPAPPVAGPSVFLFPPKPKDTLMISRTPEVTCVVVDVKHEDPEVKFNWYVDGVEVHNAKTKPREEEYNSTYRVVSVLTVLHQDWLNGKEYKCKVSNKALPAPIEKTISKAKGQPREPQVYTLPPSREEMTKNQVSLTCDVSGFYPSDIAVEWESDGQPENNYKTTPPVLDSDGSFFLYSKLTVDKSRWEQGDVFSCSVMHEALHNHYTQKSLSLSPGK

SEQ ID NO: 22325 - protein, 121 aa, synthetic construct
  source 1..121: note = Description of Artificial Sequence: Synthetic polypeptide; note = VH of XENP021895
EVQLVESGGGLVQPGGSLRLSCAASGFTFDDAWMDWVRQAPGKGLEWVAEISTKANNHATYYAESVKGRFTISRDDSKSSVYLQMNSLRAEDTAVYYCTRLATWDWYFDVWGQGTTVTVSS

SEQ ID NO: 22326 - protein, 5 aa, synthetic construct
  source 1..5: note = Description of Artificial Sequence: Synthetic peptide; note = XENP021895 vhCDR1
DAWMD

SEQ ID NO: 22327 - protein, 19 aa, synthetic construct
  source 1..19: note = Description of Artificial Sequence: Synthetic peptide; note = XENP021895 vhCDR2
EISTKANNHATYYAESVKG

SEQ ID NO: 22328 - protein, 10 aa, synthetic construct
  source 1..10: note = Description of Artificial Sequence: Synthetic peptide; note = XENP021895 vhCDR3
LATWDWYFDV

SEQ ID NO: 22329 - protein, 477 aa, synthetic construct; identical to SEQ ID NO: 21669
  source 1..477: note = Description of Artificial Sequence: Synthetic polypeptide; note = XENP021895 7G8_H3.18_L1-ipilimumab_H3.23_L0.129 scFv-Fc Heavy Chain

SEQ ID NO: 22330 - protein, 118 aa, synthetic construct; identical to SEQ ID NO: 2632
  source 1..118: note = Description of Artificial Sequence: Synthetic polypeptide; note = VH of XENP021895

SEQ ID NO: 22331 - protein, 108 aa, synthetic construct; identical to SEQ ID NO: 2768
  source 1..108: note = Description of Artificial Sequence: Synthetic polypeptide; note = VL of XENP021895

SEQ ID NO: 22332 - protein, 231 aa, synthetic construct; identical to SEQ ID NO: 21532
  source 1..231: note = Description of Artificial Sequence: Synthetic polypeptide; note = Fc chain of XENP021895

SEQ ID NO: 22333 - protein, 5 aa, synthetic construct
  source 1..5: note = Description of Artificial Sequence: Synthetic peptide; note = XENP021895 vhCDR1
SYTMH

SEQ ID NO: 22334 - protein, 17 aa, synthetic construct
  source 1..17: note = Description of Artificial Sequence: Synthetic peptide; note = XENP021895 vhCDR2
FISYDGNYKYYADSVKG

SEQ ID NO: 22335 - protein, 9 aa, synthetic construct
  source 1..9: note = Description of Artificial Sequence: Synthetic peptide; note = XENP021895 vhCDR3
GGHLGPFDL

SEQ ID NO: 22336 - protein, 12 aa, synthetic construct
  source 1..12: note = Description of Artificial Sequence: Synthetic peptide; note = XENP021895 vlCDR1
RASQSVGSSYLA

SEQ ID NO: 22337 - protein, 7 aa, synthetic construct
  source 1..7: note = Description of Artificial Sequence: Synthetic peptide; note = XENP021895 vlCDR2
GASSRAT

SEQ ID NO: 22338 - protein, 9 aa, synthetic construct
  source 1..9: note = Description of Artificial Sequence: Synthetic peptide; note = XENP021895 vlCDR3
QQYGSSPWT

SEQ ID NO: 22339 - protein, 218 aa, synthetic construct; identical to SEQ ID NO: 17600
  source 1..218: note = Description of Artificial Sequence: Synthetic polypeptide; note = XENP021895 7G8_H3.18_L1-ipilimumab_H3.23_L0.129 Light Chain

SEQ ID NO: 22340 - protein, 111 aa, synthetic construct; identical to SEQ ID NO: 17601
  source 1..111: note = Description of Artificial Sequence: Synthetic polypeptide; note = VL of XENP021895

SEQ ID NO: 22341 - protein, 15 aa, synthetic construct
  source 1..15: note = Description of Artificial Sequence: Synthetic peptide; note = XENP021895 vlCDR1
RASQSVDYDGDSYMN

SEQ ID NO: 22342 - protein, 7 aa, synthetic construct
  source 1..7: note = Description of Artificial Sequence: Synthetic peptide; note = XENP021895 vlCDR2
AASNLES

SEQ ID NO: 22343 - protein, 9 aa, synthetic construct
  source 1..9: note = Description of Artificial Sequence: Synthetic peptide; note = XENP021895 vlCDR3
QQSNEDPFT

SEQ ID NO: 22344 - protein, 450 aa, synthetic construct; identical to SEQ ID NO: 22324
  source 1..450: note = Description of Artificial Sequence: Synthetic polypeptide; note = XENP021896 7G8_H3.18_L1.11-ipilimumab_H3.23_L0.129 Fab-Fc Heavy Chain

SEQ ID NO: 22345 - protein, 121 aa, synthetic construct; identical to SEQ ID NO: 22325
  source 1..121: note = Description of Artificial Sequence: Synthetic polypeptide; note = VH of XENP021896

SEQ ID NO: 22346 - protein, 5 aa, synthetic construct
  source 1..5: note = Description of Artificial Sequence: Synthetic peptide; note = XENP021896 vhCDR1
DAWMD

SEQ ID NO: 22347 - protein, 19 aa, synthetic construct
  source 1..19: note = Description of Artificial Sequence: Synthetic peptide; note = XENP021896 vhCDR2
EISTKANNHATYYAESVKG

SEQ ID NO: 22348 - protein, 10 aa, synthetic construct
  source 1..10: note = Description of Artificial Sequence: Synthetic peptide; note = XENP021896 vhCDR3
LATWDWYFDV

SEQ ID NO: 22349 - protein, 477 aa, synthetic construct; identical to SEQ ID NO: 21669
  source 1..477: note = Description of Artificial Sequence: Synthetic polypeptide; note = XENP021896 7G8_H3.18_L1.11-ipilimumab_H3.23_L0.129 scFv-Fc Heavy Chain

SEQ ID NO: 22350 - protein, 118 aa, synthetic construct; identical to SEQ ID NO: 2632
  source 1..118: note = Description of Artificial Sequence: Synthetic polypeptide; note = VH of XENP021896

SEQ ID NO: 22351 - protein, 108 aa, synthetic construct; identical to SEQ ID NO: 2768
  source 1..108: note = Description of Artificial Sequence: Synthetic polypeptide; note = VL of XENP021896

SEQ ID NO: 22352 - protein, 231 aa, synthetic construct; identical to SEQ ID NO: 21532
  source 1..231: note = Description of Artificial Sequence: Synthetic polypeptide; note = Fc chain of XENP021896

SEQ ID NO: 22353 - protein, 5 aa, synthetic construct
  source 1..5: note = Description of Artificial Sequence: Synthetic peptide; note = XENP021896 vhCDR1
SYTMH

SEQ ID NO: 22354 - protein, 17 aa, synthetic construct
  source 1..17: note = Description of Artificial Sequence: Synthetic peptide; note = XENP021896 vhCDR2
FISYDGNYKYYADSVKG

SEQ ID NO: 22355 - protein, 9 aa, synthetic construct
  source 1..9: note = Description of Artificial Sequence: Synthetic peptide; note = XENP021896 vhCDR3
GGHLGPFDL

SEQ ID NO: 22356 - protein, 12 aa, synthetic construct
  source 1..12: note = Description of Artificial Sequence: Synthetic peptide; note = XENP021896 vlCDR1
RASQSVGSSYLA

SEQ ID NO: 22357 - protein, 7 aa, synthetic construct
  source 1..7: note = Description of Artificial Sequence: Synthetic peptide; note = XENP021896 vlCDR2
GASSRAT

SEQ ID NO: 22358 - protein, 9 aa, synthetic construct
  source 1..9: note = Description of Artificial Sequence: Synthetic peptide; note = XENP021896 vlCDR3
QQYGSSPWT

SEQ ID NO: 22359 - protein, 218 aa, synthetic construct
  source 1..218: note = Description of Artificial Sequence: Synthetic polypeptide; note = XENP021896 7G8_H3.18_L1.11-ipilimumab_H3.23_L0.129 Light Chain
DTVLTQSPSSLSASVGDRVTITCRASQSVDYDGDSYMNWYQQKPGKPPKLLIYAASELESGIPARLSGSGSGTDFTLTISSLQPEDFATYYCQQSNEDPFTFGSGTKLEIKRTVAAPSVFIFPPSDEQLKSGTASVVCLLNNFYPREAKVQWKVDNALQSGNSQESVTEQDSKDSTYSLSSTLTLSKADYEKHKVYACEVTHQGLSSPVTKSFNRGEC

SEQ ID NO: 22360 - protein, 111 aa, synthetic construct
  source 1..111: note = Description of Artificial Sequence: Synthetic polypeptide; note = VL of XENP021896
DTVLTQSPSSLSASVGDRVTITCRASQSVDYDGDSYMNWYQQKPGKPPKLLIYAASELESGIPARLSGSGSGTDFTLTISSLQPEDFATYYCQQSNEDPFTFGSGTKLEIK

SEQ ID NO: 22361 - protein, 15 aa, synthetic construct
  source 1..15: note = Description of Artificial Sequence: Synthetic peptide; note = XENP021896 vlCDR1
RASQSVDYDGDSYMN

SEQ ID NO: 22362 - protein, 7 aa, synthetic construct
  source 1..7: note = Description of Artificial Sequence: Synthetic peptide; note = XENP021896 vlCDR2
AASELES

SEQ ID NO: 22363 - protein, 9 aa, synthetic construct
  source 1..9: note = Description of Artificial Sequence: Synthetic peptide; note = XENP021896 vlCDR3
QQSNEDPFT

SEQ ID NO: 22364 - protein, 450 aa, synthetic construct
  source 1..450: note = Description of Artificial Sequence: Synthetic polypeptide; note = XENP021901 7G8_H3.15_L1.11-ipilimumab_H3.23_L0.129 Fab-Fc Heavy Chain
EVQLVESGGGLVQPGGSLRLSCAASGDTFDDAWMDWVRQAPGKGLEWVAEISTKANNHATYYAESVKGRFTISRDDSKSSVYLQMNSLRAEDTAVYYCTRLATWDWYFDVWGQGTTVTVSSASTKGPSVFPLAPSSKSTSGGTAALGCLVKDYFPEPVTVSWNSGALTSGVHTFPAVLQSSGLYSLSSVVTVPSSSLGTQTYICNVNHKPSDTKVDKKVEPKSCDKTHTCPPCPAPPVAGPSVFLFPPKPKDTLMISRTPEVTCVVVDVKHEDPEVKFNWYVDGVEVHNAKTKPREEEYNSTYRVVSVLTVLHQDWLNGKEYKCKVSNKALPAPIEKTISKAKGQPREPQVYTLPPSREEMTKNQVSLTCDVSGFYPSDIAVEWESDGQPENNYKTTPPVLDSDGSFFLYSKLTVDKSRWEQGDVFSCSVMHEALHNHYTQKSLSLSPGK

SEQ ID NO: 22365 - protein, 121 aa, synthetic construct
  source 1..121: note = Description of Artificial Sequence: Synthetic polypeptide; note = VH of XENP021901
EVQLVESGGGLVQPGGSLRLSCAASGDTFDDAWMDWVRQAPGKGLEWVAEISTKANNHATYYAESVKGRFTISRDDSKSSVYLQMNSLRAEDTAVYYCTRLATWDWYFDVWGQGTTVTVSS

SEQ ID NO: 22366 - protein, 5 aa, synthetic construct
  source 1..5: note = Description of Artificial Sequence: Synthetic peptide; note = XENP021901 vhCDR1
DAWMD

SEQ ID NO: 22367 - protein, 19 aa, synthetic construct
  source 1..19: note = Description of Artificial Sequence: Synthetic peptide; note = XENP021901 vhCDR2
EISTKANNHATYYAESVKG

SEQ ID NO: 22368 - protein, 10 aa, synthetic construct
  source 1..10: note = Description of Artificial Sequence: Synthetic peptide; note = XENP021901 vhCDR3
LATWDWYFDV

SEQ ID NO: 22369 - protein, 477 aa, synthetic construct; identical to SEQ ID NO: 21669
  source 1..477: note = Description of Artificial Sequence: Synthetic polypeptide; note = XENP021901 7G8_H3.15_L1.11-ipilimumab_H3.23_L0.129 scFv-Fc Heavy Chain

SEQ ID NO: 22370 - protein, 118 aa, synthetic construct; identical to SEQ ID NO: 2632
  source 1..118: note = Description of Artificial Sequence: Synthetic polypeptide; note = VH of XENP021901

SEQ ID NO: 22371 - protein, 108 aa, synthetic construct; identical to SEQ ID NO: 2768
  source 1..108: note = Description of Artificial Sequence: Synthetic polypeptide; note = VL of XENP021901

SEQ ID NO: 22372 - protein, 231 aa, synthetic construct; identical to SEQ ID NO: 21532
  source 1..231: note = Description of Artificial Sequence: Synthetic polypeptide; note = Fc chain of XENP021901

SEQ ID NO: 22373 - protein, 5 aa, synthetic construct
  source 1..5: note = Description of Artificial Sequence: Synthetic peptide; note = XENP021901 vhCDR1
SYTMH

SEQ ID NO: 22374 - protein, 17 aa, synthetic construct
  source 1..17: note = Description of Artificial Sequence: Synthetic peptide; note = XENP021901 vhCDR2
FISYDGNYKYYADSVKG

SEQ ID NO: 22375 - protein, 9 aa, synthetic construct
  source 1..9: note = Description of Artificial Sequence: Synthetic peptide; note = XENP021901 vhCDR3
GGHLGPFDL

SEQ ID NO: 22376 - protein, 12 aa, synthetic construct
  source 1..12: note = Description of Artificial Sequence: Synthetic peptide; note = XENP021901 vlCDR1
RASQSVGSSYLA

SEQ ID NO: 22377 - protein, 7 aa, synthetic construct
  source 1..7: note = Description of Artificial Sequence: Synthetic peptide; note = XENP021901 vlCDR2
GASSRAT

SEQ ID NO: 22378 - protein, 9 aa, synthetic construct
  source 1..9: note = Description of Artificial Sequence: Synthetic peptide; note = XENP021901 vlCDR3
QQYGSSPWT

SEQ ID NO: 22379 - protein, 218 aa, synthetic construct; identical to SEQ ID NO: 22359
  source 1..218: note = Description of Artificial Sequence: Synthetic polypeptide; note = XENP021901 7G8_H3.15_L1.11-ipilimumab_H3.23_L0.129 Light Chain

SEQ ID NO: 22380 - protein, 111 aa, synthetic construct; identical to SEQ ID NO: 22360
  source 1..111: note = Description of Artificial Sequence: Synthetic polypeptide; note = VL of XENP021901

SEQ ID NO: 22381 - protein, 15 aa, synthetic construct
  source 1..15: note = Description of Artificial Sequence: Synthetic peptide; note = XENP021901 vlCDR1
RASQSVDYDGDSYMN

SEQ ID NO: 22382 - protein, 7 aa, synthetic construct
  source 1..7: note = Description of Artificial Sequence: Synthetic peptide; note = XENP021901 vlCDR2
AASELES

SEQ ID NO: 22383 - protein, 9 aa, synthetic construct
  source 1..9: note = Description of Artificial Sequence: Synthetic peptide; note = XENP021901 vlCDR3
QQSNEDPFT

SEQ ID NO: 22384 - protein, 450 aa, synthetic construct
  source 1..450: note = Description of Artificial Sequence: Synthetic polypeptide; note = XENP021902 7G8_H3.23_L1.11-ipilimumab_H3.23_L0.129 Fab-Fc Heavy Chain
EVQLVESGGGLVQPGGSLRLSCAASGFTFSDAWMDWVRQAPGKGLEWVAEISTKANNHATYYAESVKGRFTISRDDSKSSVYLQMNSLRAEDTAVYYCTRLATWDWYFDVWGQGTTVTVSSASTKGPSVFPLAPSSKSTSGGTAALGCLVKDYFPEPVTVSWNSGALTSGVHTFPAVLQSSGLYSLSSVVTVPSSSLGTQTYICNVNHKPSDTKVDKKVEPKSCDKTHTCPPCPAPPVAGPSVFLFPPKPKDTLMISRTPEVTCVVVDVKHEDPEVKFNWYVDGVEVHNAKTKPREEEYNSTYRVVSVLTVLHQDWLNGKEYKCKVSNKALPAPIEKTISKAKGQPREPQVYTLPPSREEMTKNQVSLTCDVSGFYPSDIAVEWESDGQPENNYKTTPPVLDSDGSFFLYSKLTVDKSRWEQGDVFSCSVMHEALHNHYTQKSLSLSPGK

SEQ ID NO: 22385 - protein, 121 aa, synthetic construct
  source 1..121: note = Description of Artificial Sequence: Synthetic polypeptide; note = VH of XENP021902
EVQLVESGGGLVQPGGSLRLSCAASGFTFSDAWMDWVRQAPGKGLEWVAEISTKANNHATYYAESVKGRFTISRDDSKSSVYLQMNSLRAEDTAVYYCTRLATWDWYFDVWGQGTTVTVSS

SEQ ID NO: 22386 - protein, 5 aa, synthetic construct
  source 1..5: note = Description of Artificial Sequence: Synthetic peptide; note = XENP021902 vhCDR1
DAWMD

SEQ ID NO: 22387 - protein, 19 aa, synthetic construct
  source 1..19: note = Description of Artificial Sequence: Synthetic peptide; note = XENP021902 vhCDR2
EISTKANNHATYYAESVKG

SEQ ID NO: 22388 - protein, 10 aa, synthetic construct
  source 1..10: note = Description of Artificial Sequence: Synthetic peptide; note = XENP021902 vhCDR3
LATWDWYFDV

SEQ ID NO: 22389 - protein, 477 aa, synthetic construct; identical to SEQ ID NO: 21669
  source 1..477: note = Description of Artificial Sequence: Synthetic polypeptide; note = XENP021902 7G8_H3.23_L1.11-ipilimumab_H3.23_L0.129 scFv-Fc Heavy Chain

SEQ ID NO: 22390 - protein, 118 aa, synthetic construct; identical to SEQ ID NO: 2632
  source 1..118: note = Description of Artificial Sequence: Synthetic polypeptide; note = VH of XENP021902

SEQ ID NO: 22391 - protein, 108 aa, synthetic construct; identical to SEQ ID NO: 2768
  source 1..108: note = Description of Artificial Sequence: Synthetic polypeptide; note = VL of XENP021902

SEQ ID NO: 22392 - protein, 231 aa, synthetic construct; identical to SEQ ID NO: 21532
  source 1..231: note = Description of Artificial Sequence: Synthetic polypeptide; note = Fc chain of XENP021902

SEQ ID NO: 22393 - protein, 5 aa, synthetic construct
  source 1..5: note = Description of Artificial Sequence: Synthetic peptide; note = XENP021902 vhCDR1
SYTMH

SEQ ID NO: 22394 - protein, 17 aa, synthetic construct
  source 1..17: note = Description of Artificial Sequence: Synthetic peptide; note = XENP021902 vhCDR2
FISYDGNYKYYADSVKG

SEQ ID NO: 22395 - protein, 9 aa, synthetic construct
  source 1..9: note = Description of Artificial Sequence: Synthetic peptide; note = XENP021902 vhCDR3
GGHLGPFDL

SEQ ID NO: 22396 - protein, 12 aa, synthetic construct
  source 1..12: note = Description of Artificial Sequence: Synthetic peptide; note = XENP021902 vlCDR1
RASQSVGSSYLA

SEQ ID NO: 22397 - protein, 7 aa, synthetic construct
  source 1..7: note = Description of Artificial Sequence: Synthetic peptide; note = XENP021902 vlCDR2
GASSRAT

SEQ ID NO: 22398 - protein, 9 aa, synthetic construct
  source 1..9: note = Description of Artificial Sequence: Synthetic peptide; note = XENP021902 vlCDR3
QQYGSSPWT

SEQ ID NO: 22399 - protein, 218 aa, synthetic construct; identical to SEQ ID NO: 22359
  source 1..218: note = Description of Artificial Sequence: Synthetic polypeptide; note = XENP021902 7G8_H3.23_L1.11-ipilimumab_H3.23_L0.129 Light Chain

SEQ ID NO: 22400 - protein, 111 aa, synthetic construct; identical to SEQ ID NO: 22360
  source 1..111: note = Description of Artificial Sequence: Synthetic polypeptide; note = VL of XENP021902

SEQ ID NO: 22401 - protein, 15 aa, synthetic construct
  source 1..15: note = Description of Artificial Sequence: Synthetic peptide; note = XENP021902 vlCDR1
RASQSVDYDGDSYMN

SEQ ID NO: 22402 - protein, 7 aa, synthetic construct
  source 1..7: note = Description of Artificial Sequence: Synthetic peptide; note = XENP021902 vlCDR2
AASELES

SEQ ID NO: 22403 - protein, 9 aa, synthetic construct
  source 1..9: note = Description of Artificial Sequence: Synthetic peptide; note = XENP021902 vlCDR3
QQSNEDPFT

SEQ ID NO: 22404 - protein, 450 aa, synthetic construct; identical to SEQ ID NO: 22324
  source 1..450: note = Description of Artificial Sequence: Synthetic polypeptide; note = XENP021903 7G8_H3.18_L1.13-ipilimumab_H3.23_L0.129 Fab-Fc Heavy Chain

SEQ ID NO: 22405 - protein, 121 aa, synthetic construct; identical to SEQ ID NO: 22325
  source 1..121: note = Description of Artificial Sequence: Synthetic polypeptide; note = VH of XENP021903

SEQ ID NO: 22406 - protein, 5 aa, synthetic construct
  source 1..5: note = Description of Artificial Sequence: Synthetic peptide; note = XENP021903 vhCDR1
DAWMD

SEQ ID NO: 22407 - protein, 19 aa, synthetic construct
  source 1..19: note = Description of Artificial Sequence: Synthetic peptide; note = XENP021903 vhCDR2
EISTKANNHATYYAESVKG

SEQ ID NO: 22408 - protein, 10 aa, synthetic construct
  source 1..10: note = Description of Artificial Sequence: Synthetic peptide; note = XENP021903 vhCDR3
LATWDWYFDV

SEQ ID NO: 22409 - protein, 477 aa, synthetic construct; identical to SEQ ID NO: 21669
  source 1..477: note = Description of Artificial Sequence: Synthetic polypeptide; note = XENP021903 7G8_H3.18_L1.13-ipilimumab_H3.23_L0.129 scFv-Fc Heavy Chain

SEQ ID NO: 22410 - protein, 118 aa, synthetic construct; identical to SEQ ID NO: 2632
  source 1..118: note = Description of Artificial Sequence: Synthetic polypeptide; note = VH of XENP021903

SEQ ID NO: 22411 - protein, 108 aa, synthetic construct; identical to SEQ ID NO: 2768
  source 1..108: note = Description of Artificial Sequence: Synthetic polypeptide; note = VL of XENP021903

SEQ ID NO: 22412 - protein, 231 aa, synthetic construct; identical to SEQ ID NO: 21532
  source 1..231: note = Description of Artificial Sequence: Synthetic polypeptide; note = Fc chain of XENP021903

SEQ ID NO: 22413 - protein, 5 aa, synthetic construct
  source 1..5: note = Description of Artificial Sequence: Synthetic peptide; note = XENP021903 vhCDR1
SYTMH

SEQ ID NO: 22414 - protein, 17 aa, synthetic construct
  source 1..17: note = Description of Artificial Sequence: Synthetic peptide; note = XENP021903 vhCDR2
FISYDGNYKYYADSVKG

SEQ ID NO: 22415 - protein, 9 aa, synthetic construct
  source 1..9: note = Description of Artificial Sequence: Synthetic peptide; note = XENP021903 vhCDR3
GGHLGPFDL

SEQ ID NO: 22416 - protein, 12 aa, synthetic construct
  source 1..12: note = Description of Artificial Sequence: Synthetic peptide; note = XENP021903 vlCDR1
RASQSVGSSYLA

SEQ ID NO: 22417 - protein, 7 aa, synthetic construct
  source 1..7: note = Description of Artificial Sequence: Synthetic peptide; note = XENP021903 vlCDR2
GASSRAT

SEQ ID NO: 22418 - protein, 9 aa, synthetic construct
  source 1..9: note = Description of Artificial Sequence: Synthetic peptide; note = XENP021903 vlCDR3
QQYGSSPWT

SEQ ID NO: 22419 - protein, 218 aa, synthetic construct
  source 1..218: note = Description of Artificial Sequence: Synthetic polypeptide; note = XENP021903 7G8_H3.18_L1.13-ipilimumab_H3.23_L0.129 Light Chain
DTVLTQSPSSLSASVGDRVTITCRASQSVDHDGDSYMNWYQQKPGKPPKLLIYAASELESGIPARLSGSGSGTDFTLTISSLQPEDFATYYCQQSNEDPFTFGSGTKLEIKRTVAAPSVFIFPPSDEQLKSGTASVVCLLNNFYPREAKVQWKVDNALQSGNSQESVTEQDSKDSTYSLSSTLTLSKADYEKHKVYACEVTHQGLSSPVTKSFNRGEC

SEQ ID NO: 22420 - protein, 111 aa, synthetic construct
  source 1..111: note = Description of Artificial Sequence: Synthetic polypeptide; note = VL of XENP021903
DTVLTQSPSSLSASVGDRVTITCRASQSVDHDGDSYMNWYQQKPGKPPKLLIYAASELESGIPARLSGSGSGTDFTLTISSLQPEDFATYYCQQSNEDPFTFGSGTKLEIK

SEQ ID NO: 22421 - protein, 15 aa, synthetic construct
  source 1..15: note = Description of Artificial Sequence: Synthetic peptide; note = XENP021903 vlCDR1
RASQSVDHDGDSYMN

SEQ ID NO: 22422 - protein, 7 aa, synthetic construct
  source 1..7: note = Description of Artificial Sequence: Synthetic peptide; note = XENP021903 vlCDR2
AASELES

SEQ ID NO: 22423 - protein, 9 aa, synthetic construct
  source 1..9: note = Description of Artificial Sequence: Synthetic peptide; note = XENP021903 vlCDR3
QQSNEDPFT

SEQ ID NO: 22424 - protein, 450 aa, synthetic construct
  source 1..450: note = Description of Artificial Sequence: Synthetic polypeptide; note = XENP021904 7G8_H3.28_L1-ipilimumab_H3.23_L0.129 Fab-Fc  Heavy Chain
EVQLVESGGGLVQPGGSLRLSCAASGFTFDDAWMDWVRQAPGKGLEWVAEISTKAYNHATYYAESVKGRFTISRDDSKSSVYLQMNSLRAEDTAVYYCTRLATWDWYFDVWGQGTTVTVSSASTKGPSVFPLAPSSKSTSGGTAALGCLVKDYFPEPVTVSWNSGALTSGVHTFPAVLQSSGLYSLSSVVTVPSSSLGTQTYICNVNHKPSDTKVDKKVEPKSCDKTHTCPPCPAPPVAGPSVFLFPPKPKDTLMISRTPEVTCVVVDVKHEDPEVKFNWYVDGVEVHNAKTKPREEEYNSTYRVVSVLTVLHQDWLNGKEYKCKVSNKALPAPIEKTISKAKGQPREPQVYTLPPSREEMTKNQVSLTCDVSGFYPSDIAVEWESDGQPENNYKTTPPVLDSDGSFFLYSKLTVDKSRWEQGDVFSCSVMHEALHNHYTQKSLSLSPGK

SEQ ID NO: 22425 - protein, 121 aa, synthetic construct
  source 1..121: note = Description of Artificial Sequence: Synthetic polypeptide; note = VH of XENP021904
EVQLVESGGGLVQPGGSLRLSCAASGFTFDDAWMDWVRQAPGKGLEWVAEISTKAYNHATYYAESVKGRFTISRDDSKSSVYLQMNSLRAEDTAVYYCTRLATWDWYFDVWGQGTTVTVSS

SEQ ID NO: 22426 - protein, 5 aa, synthetic construct
  source 1..5: note = Description of Artificial Sequence: Synthetic peptide; note = XENP021904 vhCDR1
DAWMD

SEQ ID NO: 22427 - protein, 19 aa, synthetic construct
  source 1..19: note = Description of Artificial Sequence: Synthetic peptide; note = XENP021904 vhCDR2
EISTKAYNHATYYAESVKG

SEQ ID NO: 22428 - protein, 10 aa, synthetic construct
  source 1..10: note = Description of Artificial Sequence: Synthetic peptide; note = XENP021904 vhCDR3
LATWDWYFDV

SEQ ID NO: 22429 - protein, 477 aa, synthetic construct; identical to SEQ ID NO: 21669
  source 1..477: note = Description of Artificial Sequence: Synthetic polypeptide; note = XENP021904 7G8_H3.28_L1-ipilimumab_H3.23_L0.129 scFv-Fc Heavy Chain

SEQ ID NO: 22430 - protein, 118 aa, synthetic construct; identical to SEQ ID NO: 2632
  source 1..118: note = Description of Artificial Sequence: Synthetic polypeptide; note = VH of XENP021904

SEQ ID NO: 22431 - protein, 108 aa, synthetic construct; identical to SEQ ID NO: 2768
  source 1..108: note = Description of Artificial Sequence: Synthetic polypeptide; note = VL of XENP021904

SEQ ID NO: 22432 - protein, 231 aa, synthetic construct; identical to SEQ ID NO: 21532
  source 1..231: note = Description of Artificial Sequence: Synthetic polypeptide; note = Fc chain of XENP021904

SEQ ID NO: 22433 - protein, 5 aa, synthetic construct
  source 1..5: note = Description of Artificial Sequence: Synthetic peptide; note = XENP021904 vhCDR1
SYTMH

SEQ ID NO: 22434 - protein, 17 aa, synthetic construct
  source 1..17: note = Description of Artificial Sequence: Synthetic peptide; note = XENP021904 vhCDR2
FISYDGNYKYYADSVKG

SEQ ID NO: 22435 - protein, 9 aa, synthetic construct
  source 1..9: note = Description of Artificial Sequence: Synthetic peptide; note = XENP021904 vhCDR3
GGHLGPFDL

SEQ ID NO: 22436 - protein, 12 aa, synthetic construct
  source 1..12: note = Description of Artificial Sequence: Synthetic peptide; note = XENP021904 vlCDR1
RASQSVGSSYLA

SEQ ID NO: 22437 - protein, 7 aa, synthetic construct
  source 1..7: note = Description of Artificial Sequence: Synthetic peptide; note = XENP021904 vlCDR2
GASSRAT

SEQ ID NO: 22438 - protein, 9 aa, synthetic construct
  source 1..9: note = Description of Artificial Sequence: Synthetic peptide; note = XENP021904 vlCDR3
QQYGSSPWT

SEQ ID NO: 22439 - protein, 218 aa, synthetic construct; identical to SEQ ID NO: 17600
  source 1..218: note = Description of Artificial Sequence: Synthetic polypeptide; note = XENP021904 7G8_H3.28_L1-ipilimumab_H3.23_L0.129 Light Chain

SEQ ID NO: 22440 - protein, 111 aa, synthetic construct; identical to SEQ ID NO: 17601
  source 1..111: note = Description of Artificial Sequence: Synthetic polypeptide; note = VL of XENP021904

SEQ ID NO: 22441 - protein, 15 aa, synthetic construct
  source 1..15: note = Description of Artificial Sequence: Synthetic peptide; note = XENP021904 vlCDR1
RASQSVDYDGDSYMN

SEQ ID NO: 22442 - protein, 7 aa, synthetic construct
  source 1..7: note = Description of Artificial Sequence: Synthetic peptide; note = XENP021904 vlCDR2
AASNLES

SEQ ID NO: 22443 - protein, 9 aa, synthetic construct
  source 1..9: note = Description of Artificial Sequence: Synthetic peptide; note = XENP021904 vlCDR3
QQSNEDPFT

SEQ ID NO: 22444 - protein, 450 aa, synthetic construct; identical to SEQ ID NO: 22424
  source 1..450: note = Description of Artificial Sequence: Synthetic polypeptide; note = XENP021905 7G8_H3.28_L1.11-ipilimumab_H3.23_L0.129 Fab-Fc Heavy Chain

SEQ ID NO: 22445 - protein, 121 aa, synthetic construct; identical to SEQ ID NO: 22425
  source 1..121: note = Description of Artificial Sequence: Synthetic polypeptide; note = VH of XENP021905

SEQ ID NO: 22446 - protein, 5 aa, synthetic construct
  source 1..5: note = Description of Artificial Sequence: Synthetic peptide; note = XENP021905 vhCDR1
DAWMD

SEQ ID NO: 22447 - protein, 19 aa, synthetic construct
  source 1..19: note = Description of Artificial Sequence: Synthetic peptide; note = XENP021905 vhCDR2
EISTKAYNHATYYAESVKG

SEQ ID NO: 22448 - protein, 10 aa, synthetic construct
  source 1..10: note = Description of Artificial Sequence: Synthetic peptide; note = XENP021905 vhCDR3
LATWDWYFDV

SEQ ID NO: 22449 - protein, 477 aa, synthetic construct; identical to SEQ ID NO: 21669
  source 1..477: note = Description of Artificial Sequence: Synthetic polypeptide; note = XENP021905 7G8_H3.28_L1.11-ipilimumab_H3.23_L0.129 scFv-Fc Heavy Chain

SEQ ID NO: 22450 - protein, 118 aa, synthetic construct; identical to SEQ ID NO: 2632
  source 1..118: note = Description of Artificial Sequence: Synthetic polypeptide; note = VH of XENP021905

SEQ ID NO: 22451 - protein, 108 aa, synthetic construct; identical to SEQ ID NO: 2768
  source 1..108: note = Description of Artificial Sequence: Synthetic polypeptide; note = VL of XENP021905

SEQ ID NO: 22452 - protein, 231 aa, synthetic construct; identical to SEQ ID NO: 21532
  source 1..231: note = Description of Artificial Sequence: Synthetic polypeptide; note = Fc chain of XENP021905

SEQ ID NO: 22453 - protein, 5 aa, synthetic construct
  source 1..5: note = Description of Artificial Sequence: Synthetic peptide; note = XENP021905 vhCDR1
SYTMH

SEQ ID NO: 22454 - protein, 17 aa, synthetic construct
  source 1..17: note = Description of Artificial Sequence: Synthetic peptide; note = XENP021905 vhCDR2
FISYDGNYKYYADSVKG

SEQ ID NO: 22455 - protein, 9 aa, synthetic construct
  source 1..9: note = Description of Artificial Sequence: Synthetic peptide; note = XENP021905 vhCDR3
GGHLGPFDL

SEQ ID NO: 22456 - protein, 12 aa, synthetic construct
  source 1..12: note = Description of Artificial Sequence: Synthetic peptide; note = XENP021905 vlCDR1
RASQSVGSSYLA

SEQ ID NO: 22457 - protein, 7 aa, synthetic construct
  source 1..7: note = Description of Artificial Sequence: Synthetic peptide; note = XENP021905 vlCDR2
GASSRAT

SEQ ID NO: 22458 - protein, 9 aa, synthetic construct
  source 1..9: note = Description of Artificial Sequence: Synthetic peptide; note = XENP021905 vlCDR3
QQYGSSPWT

SEQ ID NO: 22459 - protein, 218 aa, synthetic construct; identical to SEQ ID NO: 22359
  source 1..218: note = Description of Artificial Sequence: Synthetic polypeptide; note = XENP021905 7G8_H3.28_L1.11-ipilimumab_H3.23_L0.129 Light Chain

SEQ ID NO: 22460 - protein, 111 aa, synthetic construct; identical to SEQ ID NO: 22360
  source 1..111: note = Description of Artificial Sequence: Synthetic polypeptide; note = VL of XENP021905

SEQ ID NO: 22461 - protein, 15 aa, synthetic construct
  source 1..15: note = Description of Artificial Sequence: Synthetic peptide; note = XENP021905 vlCDR1
RASQSVDYDGDSYMN

SEQ ID NO: 22462 - protein, 7 aa, synthetic construct
  source 1..7: note = Description of Artificial Sequence: Synthetic peptide; note = XENP021905 vlCDR2
AASELES

SEQ ID NO: 22463 - protein, 9 aa, synthetic construct
  source 1..9: note = Description of Artificial Sequence: Synthetic peptide; note = XENP021905 vlCDR3
QQSNEDPFT

SEQ ID NO: 22464 - protein, 450 aa, synthetic construct; identical to SEQ ID NO: 22424
  source 1..450: note = Description of Artificial Sequence: Synthetic polypeptide; note = XENP021906 7G8_H3.28_L1.13-ipilimumab_H3.23_L0.129 Fab-Fc Heavy Chain

SEQ ID NO: 22465 - protein, 121 aa, synthetic construct; identical to SEQ ID NO: 22425
  source 1..121: note = Description of Artificial Sequence: Synthetic polypeptide; note = VH of XENP021906

SEQ ID NO: 22466 - protein, 5 aa, synthetic construct
  source 1..5: note = Description of Artificial Sequence: Synthetic peptide; note = XENP021906 vhCDR1
DAWMD

SEQ ID NO: 22467 - protein, 19 aa, synthetic construct
  source 1..19: note = Description of Artificial Sequence: Synthetic peptide; note = XENP021906 vhCDR2
EISTKAYNHATYYAESVKG

SEQ ID NO: 22468 - protein, 10 aa, synthetic construct
  source 1..10: note = Description of Artificial Sequence: Synthetic peptide; note = XENP021906 vhCDR3
LATWDWYFDV

SEQ ID NO: 22469 - protein, 477 aa, synthetic construct; identical to SEQ ID NO: 21669
  source 1..477: note = Description of Artificial Sequence: Synthetic polypeptide; note = XENP021906 7G8_H3.28_L1.13-ipilimumab_H3.23_L0.129 scFv-Fc Heavy Chain

SEQ ID NO: 22470 - protein, 118 aa, synthetic construct; identical to SEQ ID NO: 2632
  source 1..118: note = Description of Artificial Sequence: Synthetic polypeptide; note = VH of XENP021906

SEQ ID NO: 22471 - protein, 108 aa, synthetic construct; identical to SEQ ID NO: 2768
  source 1..108: note = Description of Artificial Sequence: Synthetic polypeptide; note = VL of XENP021906

SEQ ID NO: 22472 - protein, 231 aa, synthetic construct; identical to SEQ ID NO: 21532
  source 1..231: note = Description of Artificial Sequence: Synthetic polypeptide; note = Fc chain of XENP021906

SEQ ID NO: 22473 - protein, 5 aa, synthetic construct
  source 1..5: note = Description of Artificial Sequence: Synthetic peptide; note = XENP021906 vhCDR1
SYTMH

SEQ ID NO: 22474 - protein, 17 aa, synthetic construct
  source 1..17: note = Description of Artificial Sequence: Synthetic peptide; note = XENP021906 vhCDR2
FISYDGNYKYYADSVKG

SEQ ID NO: 22475 - protein, 9 aa, synthetic construct
  source 1..9: note = Description of Artificial Sequence: Synthetic peptide; note = XENP021906 vhCDR3
GGHLGPFDL

SEQ ID NO: 22476 - protein, 12 aa, synthetic construct
  source 1..12: note = Description of Artificial Sequence: Synthetic peptide; note = XENP021906 vlCDR1
RASQSVGSSYLA

SEQ ID NO: 22477 - protein, 7 aa, synthetic construct
  source 1..7: note = Description of Artificial Sequence: Synthetic peptide; note = XENP021906 vlCDR2
GASSRAT

SEQ ID NO: 22478 - protein, 9 aa, synthetic construct
  source 1..9: note = Description of Artificial Sequence: Synthetic peptide; note = XENP021906 vlCDR3
QQYGSSPWT

SEQ ID NO: 22479 - protein, 218 aa, synthetic construct; identical to SEQ ID NO: 22419
  source 1..218: note = Description of Artificial Sequence: Synthetic polypeptide; note = XENP021906 7G8_H3.28_L1.13-ipilimumab_H3.23_L0.129 Light Chain

SEQ ID NO: 22480 - protein, 111 aa, synthetic construct; identical to SEQ ID NO: 22420
  source 1..111: note = Description of Artificial Sequence: Synthetic polypeptide; note = VL of XENP021906

SEQ ID NO: 22481 - protein, 15 aa, synthetic construct
  source 1..15: note = Description of Artificial Sequence: Synthetic peptide; note = XENP021906 vlCDR1
RASQSVDHDGDSYMN

SEQ ID NO: 22482 - protein, 7 aa, synthetic construct
  source 1..7: note = Description of Artificial Sequence: Synthetic peptide; note = XENP021906 vlCDR2
AASELES

SEQ ID NO: 22483 - protein, 9 aa, synthetic construct
  source 1..9: note = Description of Artificial Sequence: Synthetic peptide; note = XENP021906 vlCDR3
QQSNEDPFT

SEQ ID NO: 22484 - protein, 450 aa, synthetic construct
  source 1..450: note = Description of Artificial Sequence: Synthetic polypeptide; note = XENP022555 7G8_H3.30_L1.11-ipilimumab_H3.23_L0.129 Fab-Fc Heavy Chain
EVQLVESGGGLVQPGGSLRLSCAASGFTFDDAWMSWVRQAPGKGLEWVAEISTKANNHATYYAESVKGRFTISRDDSKSSVYLQMNSLRAEDTAVYYCTRLATWDWYFDVWGQGTTVTVSSASTKGPSVFPLAPSSKSTSGGTAALGCLVKDYFPEPVTVSWNSGALTSGVHTFPAVLQSSGLYSLSSVVTVPSSSLGTQTYICNVNHKPSDTKVDKKVEPKSCDKTHTCPPCPAPPVAGPSVFLFPPKPKDTLMISRTPEVTCVVVDVKHEDPEVKFNWYVDGVEVHNAKTKPREEEYNSTYRVVSVLTVLHQDWLNGKEYKCKVSNKALPAPIEKTISKAKGQPREPQVYTLPPSREEMTKNQVSLTCDVSGFYPSDIAVEWESDGQPENNYKTTPPVLDSDGSFFLYSKLTVDKSRWEQGDVFSCSVMHEALHNHYTQKSLSLSPGK

SEQ ID NO: 22485 - protein, 121 aa, synthetic construct
  source 1..121: note = Description of Artificial Sequence: Synthetic polypeptide; note = VH of XENP022555
EVQLVESGGGLVQPGGSLRLSCAASGFTFDDAWMSWVRQAPGKGLEWVAEISTKANNHATYYAESVKGRFTISRDDSKSSVYLQMNSLRAEDTAVYYCTRLATWDWYFDVWGQGTTVTVSS

SEQ ID NO: 22486 - protein, 5 aa, synthetic construct
  source 1..5: note = Description of Artificial Sequence: Synthetic peptide; note = XENP022555 vhCDR1
DAWMS

SEQ ID NO: 22487 - protein, 19 aa, synthetic construct
  source 1..19: note = Description of Artificial Sequence: Synthetic peptide; note = XENP022555 vhCDR2
EISTKANNHATYYAESVKG

SEQ ID NO: 22488 - protein, 10 aa, synthetic construct
  source 1..10: note = Description of Artificial Sequence: Synthetic peptide; note = XENP022555 vhCDR3
LATWDWYFDV

SEQ ID NO: 22489 - protein, 477 aa, synthetic construct; identical to SEQ ID NO: 21669
  source 1..477: note = Description of Artificial Sequence: Synthetic polypeptide; note = XENP022555 7G8_H3.30_L1.11-ipilimumab_H3.23_L0.129 scFv-Fc Heavy Chain

SEQ ID NO: 22490 - protein, 118 aa, synthetic construct; identical to SEQ ID NO: 2632
  source 1..118: note = Description of Artificial Sequence: Synthetic polypeptide; note = VH of XENP022555

SEQ ID NO: 22491 - protein, 108 aa, synthetic construct; identical to SEQ ID NO: 2768
  source 1..108: note = Description of Artificial Sequence: Synthetic polypeptide; note = VL of XENP022555

SEQ ID NO: 22492 - protein, 231 aa, synthetic construct; identical to SEQ ID NO: 21532
  source 1..231: note = Description of Artificial Sequence: Synthetic polypeptide; note = Fc chain of XENP022555

SEQ ID NO: 22493 - protein, 5 aa, synthetic construct
  source 1..5: note = Description of Artificial Sequence: Synthetic peptide; note = XENP022555 vhCDR1
SYTMH

SEQ ID NO: 22494 - protein, 17 aa, synthetic construct
  source 1..17: note = Description of Artificial Sequence: Synthetic peptide; note = XENP022555 vhCDR2
FISYDGNYKYYADSVKG

SEQ ID NO: 22495 - protein, 9 aa, synthetic construct
  source 1..9: note = Description of Artificial Sequence: Synthetic peptide; note = XENP022555 vhCDR3
GGHLGPFDL

SEQ ID NO: 22496 - protein, 12 aa, synthetic construct
  source 1..12: note = Description of Artificial Sequence: Synthetic peptide; note = XENP022555 vlCDR1
RASQSVGSSYLA

SEQ ID NO: 22497 - protein, 7 aa, synthetic construct
  source 1..7: note = Description of Artificial Sequence: Synthetic peptide; note = XENP022555 vlCDR2
GASSRAT

SEQ ID NO: 22498 - protein, 9 aa, synthetic construct
  source 1..9: note = Description of Artificial Sequence: Synthetic peptide; note = XENP022555 vlCDR3
QQYGSSPWT

SEQ ID NO: 22499 - protein, 218 aa, synthetic construct; identical to SEQ ID NO: 22359
  source 1..218: note = Description of Artificial Sequence: Synthetic polypeptide; note = XENP022555 7G8_H3.30_L1.11-ipilimumab_H3.23_L0.129 Light Chain

SEQ ID NO: 22500 - protein, 111 aa, synthetic construct; identical to SEQ ID NO: 22360
  source 1..111: note = Description of Artificial Sequence: Synthetic polypeptide; note = VL of XENP022555

SEQ ID NO: 22501 - protein, 15 aa, synthetic construct
  source 1..15: note = Description of Artificial Sequence: Synthetic peptide; note = XENP022555 vlCDR1
RASQSVDYDGDSYMN

SEQ ID NO: 22502 - protein, 7 aa, synthetic construct
  source 1..7: note = Description of Artificial Sequence: Synthetic peptide; note = XENP022555 vlCDR2
AASELES

SEQ ID NO: 22503 - protein, 9 aa, synthetic construct
  source 1..9: note = Description of Artificial Sequence: Synthetic peptide; note = XENP022555 vlCDR3
QQSNEDPFT

SEQ ID NO: 22504 - protein, 450 aa, synthetic construct
  source 1..450: note = Description of Artificial Sequence: Synthetic polypeptide; note = XENP022556 7G8_H3.33_L1.11-ipilimumab_H3.23_L0.129 Fab-Fc Heavy Chain
EVQLVESGGGLVQPGGSLRLSCAASGFTFDDAWMGWVRQAPGKGLEWVAEISTKANNHATYYAESVKGRFTISRDDSKSSVYLQMNSLRAEDTAVYYCTRLATWDWYFDVWGQGTTVTVSSASTKGPSVFPLAPSSKSTSGGTAALGCLVKDYFPEPVTVSWNSGALTSGVHTFPAVLQSSGLYSLSSVVTVPSSSLGTQTYICNVNHKPSDTKVDKKVEPKSCDKTHTCPPCPAPPVAGPSVFLFPPKPKDTLMISRTPEVTCVVVDVKHEDPEVKFNWYVDGVEVHNAKTKPREEEYNSTYRVVSVLTVLHQDWLNGKEYKCKVSNKALPAPIEKTISKAKGQPREPQVYTLPPSREEMTKNQVSLTCDVSGFYPSDIAVEWESDGQPENNYKTTPPVLDSDGSFFLYSKLTVDKSRWEQGDVFSCSVMHEALHNHYTQKSLSLSPGK

SEQ ID NO: 22505 - protein, 121 aa, synthetic construct
  source 1..121: note = Description of Artificial Sequence: Synthetic polypeptide; note = VH of XENP022556
EVQLVESGGGLVQPGGSLRLSCAASGFTFDDAWMGWVRQAPGKGLEWVAEISTKANNHATYYAESVKGRFTISRDDSKSSVYLQMNSLRAEDTAVYYCTRLATWDWYFDVWGQGTTVTVSS

SEQ ID NO: 22506 - protein, 5 aa, synthetic construct
  source 1..5: note = Description of Artificial Sequence: Synthetic peptide; note = XENP022556 vhCDR1
DAWMG

SEQ ID NO: 22507 - protein, 19 aa, synthetic construct
  source 1..19: note = Description of Artificial Sequence: Synthetic peptide; note = XENP022556 vhCDR2
EISTKANNHATYYAESVKG

SEQ ID NO: 22508 - protein, 10 aa, synthetic construct
  source 1..10: note = Description of Artificial Sequence: Synthetic peptide; note = XENP022556 vhCDR3
LATWDWYFDV

SEQ ID NO: 22509 - protein, 477 aa, synthetic construct; identical to SEQ ID NO: 21669
  source 1..477: note = Description of Artificial Sequence: Synthetic polypeptide; note = XENP022556 7G8_H3.33_L1.11-ipilimumab_H3.23_L0.129 scFv-Fc Heavy Chain

SEQ ID NO: 22510 - protein, 118 aa, synthetic construct; identical to SEQ ID NO: 2632
  source 1..118: note = Description of Artificial Sequence: Synthetic polypeptide; note = VH of XENP022556

SEQ ID NO: 22511 - protein, 108 aa, synthetic construct; identical to SEQ ID NO: 2768
  source 1..108: note = Description of Artificial Sequence: Synthetic polypeptide; note = VL of XENP022556

SEQ ID NO: 22512 - protein, 231 aa, synthetic construct; identical to SEQ ID NO: 21532
  source 1..231: note = Description of Artificial Sequence: Synthetic polypeptide; note = Fc chain of XENP022556

SEQ ID NO: 22513 - protein, 5 aa, synthetic construct
  source 1..5: note = Description of Artificial Sequence: Synthetic peptide; note = XENP022556 vhCDR1
SYTMH

SEQ ID NO: 22514 - protein, 17 aa, synthetic construct
  source 1..17: note = Description of Artificial Sequence: Synthetic peptide; note = XENP022556 vhCDR2
FISYDGNYKYYADSVKG

SEQ ID NO: 22515 - protein, 9 aa, synthetic construct
  source 1..9: note = Description of Artificial Sequence: Synthetic peptide; note = XENP022556 vhCDR3
GGHLGPFDL

SEQ ID NO: 22516 - protein, 12 aa, synthetic construct
  source 1..12: note = Description of Artificial Sequence: Synthetic peptide; note = XENP022556 vlCDR1
RASQSVGSSYLA

SEQ ID NO: 22517 - protein, 7 aa, synthetic construct
  source 1..7: note = Description of Artificial Sequence: Synthetic peptide; note = XENP022556 vlCDR2
GASSRAT

SEQ ID NO: 22518 - protein, 9 aa, synthetic construct
  source 1..9: note = Description of Artificial Sequence: Synthetic peptide; note = XENP022556 vlCDR3
QQYGSSPWT

SEQ ID NO: 22519 - protein, 218 aa, synthetic construct; identical to SEQ ID NO: 22359
  source 1..218: note = Description of Artificial Sequence: Synthetic polypeptide; note = XENP022556 7G8_H3.33_L1.11-ipilimumab_H3.23_L0.129 Light Chain

SEQ ID NO: 22520 - protein, 111 aa, synthetic construct; identical to SEQ ID NO: 22360
  source 1..111: note = Description of Artificial Sequence: Synthetic polypeptide; note = VL of XENP022556

SEQ ID NO: 22521 - protein, 15 aa, synthetic construct
  source 1..15: note = Description of Artificial Sequence: Synthetic peptide; note = XENP022556 vlCDR1
RASQSVDYDGDSYMN

SEQ ID NO: 22522 - protein, 7 aa, synthetic construct
  source 1..7: note = Description of Artificial Sequence: Synthetic peptide; note = XENP022556 vlCDR2
AASELES

SEQ ID NO: 22523 - protein, 9 aa, synthetic construct
  source 1..9: note = Description of Artificial Sequence: Synthetic peptide; note = XENP022556 vlCDR3
QQSNEDPFT

SEQ ID NO: 22524 - protein, 450 aa, synthetic construct; identical to SEQ ID NO: 22324
  source 1..450: note = Description of Artificial Sequence: Synthetic polypeptide; note = XENP022557 7G8_H3.18_L1.30-ipilimumab_H3.23_L0.129 Fab-Fc Heavy Chain

SEQ ID NO: 22525 - protein, 121 aa, synthetic construct; identical to SEQ ID NO: 22325
  source 1..121: note = Description of Artificial Sequence: Synthetic polypeptide; note = VH of XENP022557

SEQ ID NO: 22526 - protein, 5 aa, synthetic construct
  source 1..5: note = Description of Artificial Sequence: Synthetic peptide; note = XENP022557 vhCDR1
DAWMD

SEQ ID NO: 22527 - protein, 19 aa, synthetic construct
  source 1..19: note = Description of Artificial Sequence: Synthetic peptide; note = XENP022557 vhCDR2
EISTKANNHATYYAESVKG

SEQ ID NO: 22528 - protein, 10 aa, synthetic construct
  source 1..10: note = Description of Artificial Sequence: Synthetic peptide; note = XENP022557 vhCDR3
LATWDWYFDV

SEQ ID NO: 22529 - protein, 477 aa, synthetic construct; identical to SEQ ID NO: 21669
  source 1..477: note = Description of Artificial Sequence: Synthetic polypeptide; note = XENP022557 7G8_H3.18_L1.30-ipilimumab_H3.23_L0.129 scFv-Fc Heavy Chain

SEQ ID NO: 22530 - protein, 118 aa, synthetic construct; identical to SEQ ID NO: 2632
  source 1..118: note = Description of Artificial Sequence: Synthetic polypeptide; note = VH of XENP022557

SEQ ID NO: 22531 - protein, 108 aa, synthetic construct; identical to SEQ ID NO: 2768
  source 1..108: note = Description of Artificial Sequence: Synthetic polypeptide; note = VL of XENP022557

SEQ ID NO: 22532 - protein, 231 aa, synthetic construct; identical to SEQ ID NO: 21532
  source 1..231: note = Description of Artificial Sequence: Synthetic polypeptide; note = Fc chain of XENP022557

SEQ ID NO: 22533 - protein, 5 aa, synthetic construct
  source 1..5: note = Description of Artificial Sequence: Synthetic peptide; note = XENP022557 vhCDR1
SYTMH

SEQ ID NO: 22534 - protein, 17 aa, synthetic construct
  source 1..17: note = Description of Artificial Sequence: Synthetic peptide; note = XENP022557 vhCDR2
FISYDGNYKYYADSVKG

SEQ ID NO: 22535 - protein, 9 aa, synthetic construct
  source 1..9: note = Description of Artificial Sequence: Synthetic peptide; note = XENP022557 vhCDR3
GGHLGPFDL

SEQ ID NO: 22536 - protein, 12 aa, synthetic construct
  source 1..12: note = Description of Artificial Sequence: Synthetic peptide; note = XENP022557 vlCDR1
RASQSVGSSYLA

SEQ ID NO: 22537 - protein, 7 aa, synthetic construct
  source 1..7: note = Description of Artificial Sequence: Synthetic peptide; note = XENP022557 vlCDR2
GASSRAT

SEQ ID NO: 22538 - protein, 9 aa, synthetic construct
  source 1..9: note = Description of Artificial Sequence: Synthetic peptide; note = XENP022557 vlCDR3
QQYGSSPWT

SEQ ID NO: 22539 - protein, 218 aa, synthetic construct
  source 1..218: note = Description of Artificial Sequence: Synthetic polypeptide; note = XENP022557 7G8_H3.18_L1.30-ipilimumab_H3.23_L0.129 Light Chain
DTVLTQSPSSLSASVGDRVTITCRASQSVDYDGDSYMNWYQQKPGKPPKLLIYAASELESGIPARFSGSGSGTDFTLTISSLQPEDFATYYCQQSNEDPFTFGSGTKLEIKRTVAAPSVFIFPPSDEQLKSGTASVVCLLNNFYPREAKVQWKVDNALQSGNSQESVTEQDSKDSTYSLSSTLTLSKADYEKHKVYACEVTHQGLSSPVTKSFNRGEC

SEQ ID NO: 22540 - protein, 111 aa, synthetic construct
  source 1..111: note = Description of Artificial Sequence: Synthetic polypeptide; note = VL of XENP022557
DTVLTQSPSSLSASVGDRVTITCRASQSVDYDGDSYMNWYQQKPGKPPKLLIYAASELESGIPARFSGSGSGTDFTLTISSLQPEDFATYYCQQSNEDPFTFGSGTKLEIK

SEQ ID NO: 22541 - protein, 15 aa, synthetic construct
  source 1..15: note = Description of Artificial Sequence: Synthetic peptide; note = XENP022557 vlCDR1
RASQSVDYDGDSYMN

SEQ ID NO: 22542 - protein, 7 aa, synthetic construct
  source 1..7: note = Description of Artificial Sequence: Synthetic peptide; note = XENP022557 vlCDR2
AASELES

SEQ ID NO: 22543 - protein, 9 aa, synthetic construct
  source 1..9: note = Description of Artificial Sequence: Synthetic peptide; note = XENP022557 vlCDR3
QQSNEDPFT

SEQ ID NO: 22544 - protein, 450 aa, synthetic construct; identical to SEQ ID NO: 22484
  source 1..450: note = Description of Artificial Sequence: Synthetic polypeptide; note = XENP022558 7G8_H3.30_L1.30-ipilimumab_H3.23_L0.129 Fab-Fc Heavy Chain

SEQ ID NO: 22545 - protein, 121 aa, synthetic construct; identical to SEQ ID NO: 22485
  source 1..121: note = Description of Artificial Sequence: Synthetic polypeptide; note = VH of XENP022558

SEQ ID NO: 22546 - protein, 5 aa, synthetic construct
  source 1..5: note = Description of Artificial Sequence: Synthetic peptide; note = XENP022558 vhCDR1
DAWMS

SEQ ID NO: 22547 - protein, 19 aa, synthetic construct
  source 1..19: note = Description of Artificial Sequence: Synthetic peptide; note = XENP022558 vhCDR2
EISTKANNHATYYAESVKG

SEQ ID NO: 22548 - protein, 10 aa, synthetic construct
  source 1..10: note = Description of Artificial Sequence: Synthetic peptide; note = XENP022558 vhCDR3
LATWDWYFDV

SEQ ID NO: 22549 - protein, 477 aa, synthetic construct; identical to SEQ ID NO: 21669
  source 1..477: note = Description of Artificial Sequence: Synthetic polypeptide; note = XENP022558 7G8_H3.30_L1.30-ipilimumab_H3.23_L0.129 scFv-Fc Heavy Chain

SEQ ID NO: 22550 - protein, 118 aa, synthetic construct; identical to SEQ ID NO: 2632
  source 1..118: note = Description of Artificial Sequence: Synthetic polypeptide; note = VH of XENP022558

SEQ ID NO: 22551 - protein, 108 aa, synthetic construct; identical to SEQ ID NO: 2768
  source 1..108: note = Description of Artificial Sequence: Synthetic polypeptide; note = VL of XENP022558

SEQ ID NO: 22552 - protein, 231 aa, synthetic construct; identical to SEQ ID NO: 21532
  source 1..231: note = Description of Artificial Sequence: Synthetic polypeptide; note = Fc chain of XENP022558

SEQ ID NO: 22553 - protein, 5 aa, synthetic construct
  source 1..5: note = Description of Artificial Sequence: Synthetic peptide; note = XENP022558 vhCDR1
SYTMH

SEQ ID NO: 22554 - protein, 17 aa, synthetic construct
  source 1..17: note = Description of Artificial Sequence: Synthetic peptide; note = XENP022558 vhCDR2
FISYDGNYKYYADSVKG

SEQ ID NO: 22555 - protein, 9 aa, synthetic construct
  source 1..9: note = Description of Artificial Sequence: Synthetic peptide; note = XENP022558 vhCDR3
GGHLGPFDL

SEQ ID NO: 22556 - protein, 12 aa, synthetic construct
  source 1..12: note = Description of Artificial Sequence: Synthetic peptide; note = XENP022558 vlCDR1
RASQSVGSSYLA

SEQ ID NO: 22557 - protein, 7 aa, synthetic construct
  source 1..7: note = Description of Artificial Sequence: Synthetic peptide; note = XENP022558 vlCDR2
GASSRAT

SEQ ID NO: 22558 - protein, 9 aa, synthetic construct
  source 1..9: note = Description of Artificial Sequence: Synthetic peptide; note = XENP022558 vlCDR3
QQYGSSPWT

SEQ ID NO: 22559 - protein, 218 aa, synthetic construct; identical to SEQ ID NO: 22539
  source 1..218: note = Description of Artificial Sequence: Synthetic polypeptide; note = XENP022558 7G8_H3.30_L1.30-ipilimumab_H3.23_L0.129 Light Chain

SEQ ID NO: 22560 - protein, 111 aa, synthetic construct; identical to SEQ ID NO: 22540
  source 1..111: note = Description of Artificial Sequence: Synthetic polypeptide; note = VL of XENP022558

SEQ ID NO: 22561 - protein, 15 aa, synthetic construct
  source 1..15: note = Description of Artificial Sequence: Synthetic peptide; note = XENP022558 vlCDR1
RASQSVDYDGDSYMN

SEQ ID NO: 22562 - protein, 7 aa, synthetic construct
  source 1..7: note = Description of Artificial Sequence: Synthetic peptide; note = XENP022558 vlCDR2
AASELES

SEQ ID NO: 22563 - protein, 9 aa, synthetic construct
  source 1..9: note = Description of Artificial Sequence: Synthetic peptide; note = XENP022558 vlCDR3
QQSNEDPFT

SEQ ID NO: 22564 - protein, 450 aa, synthetic construct; identical to SEQ ID NO: 22504
  source 1..450: note = Description of Artificial Sequence: Synthetic polypeptide; note = XENP022559 7G8_H3.33_L1.30-ipilimumab_H3.23_L0.129 Fab-Fc Heavy Chain

SEQ ID NO: 22565 - protein, 121 aa, synthetic construct; identical to SEQ ID NO: 22505
  source 1..121: note = Description of Artificial Sequence: Synthetic polypeptide; note = VH of XENP022559

SEQ ID NO: 22566 - protein, 5 aa, synthetic construct
  source 1..5: note = Description of Artificial Sequence: Synthetic peptide; note = XENP022559 vhCDR1
DAWMG

SEQ ID NO: 22567 - protein, 19 aa, synthetic construct
  source 1..19: note = Description of Artificial Sequence: Synthetic peptide; note = XENP022559 vhCDR2
EISTKANNHATYYAESVKG

SEQ ID NO: 22568 - protein, 10 aa, synthetic construct
  source 1..10: note = Description of Artificial Sequence: Synthetic peptide; note = XENP022559 vhCDR3
LATWDWYFDV

SEQ ID NO: 22569 - protein, 477 aa, synthetic construct; identical to SEQ ID NO: 21669
  source 1..477: note = Description of Artificial Sequence: Synthetic polypeptide; note = XENP022559 7G8_H3.33_L1.30-ipilimumab_H3.23_L0.129 scFv-Fc Heavy Chain

SEQ ID NO: 22570 - protein, 118 aa, synthetic construct; identical to SEQ ID NO: 2632
  source 1..118: note = Description of Artificial Sequence: Synthetic polypeptide; note = VH of XENP022559

SEQ ID NO: 22571 - protein, 108 aa, synthetic construct; identical to SEQ ID NO: 2768
  source 1..108: note = Description of Artificial Sequence: Synthetic polypeptide; note = VL of XENP022559

SEQ ID NO: 22572 - protein, 231 aa, synthetic construct; identical to SEQ ID NO: 21532
  source 1..231: note = Description of Artificial Sequence: Synthetic polypeptide; note = Fc chain of XENP022559

SEQ ID NO: 22573 - protein, 5 aa, synthetic construct
  source 1..5: note = Description of Artificial Sequence: Synthetic peptide; note = XENP022559 vhCDR1
SYTMH

SEQ ID NO: 22574 - protein, 17 aa, synthetic construct
  source 1..17: note = Description of Artificial Sequence: Synthetic peptide; note = XENP022559 vhCDR2
FISYDGNYKYYADSVKG

SEQ ID NO: 22575 - protein, 9 aa, synthetic construct
  source 1..9: note = Description of Artificial Sequence: Synthetic peptide; note = XENP022559 vhCDR3
GGHLGPFDL

SEQ ID NO: 22576 - protein, 12 aa, synthetic construct
  source 1..12: note = Description of Artificial Sequence: Synthetic peptide; note = XENP022559 vlCDR1
RASQSVGSSYLA

SEQ ID NO: 22577 - protein, 7 aa, synthetic construct
  source 1..7: note = Description of Artificial Sequence: Synthetic peptide; note = XENP022559 vlCDR2
GASSRAT

SEQ ID NO: 22578 - protein, 9 aa, synthetic construct
  source 1..9: note = Description of Artificial Sequence: Synthetic peptide; note = XENP022559 vlCDR3
QQYGSSPWT

SEQ ID NO: 22579 - protein, 218 aa, synthetic construct; identical to SEQ ID NO: 22539
  source 1..218: note = Description of Artificial Sequence: Synthetic polypeptide; note = XENP022559 7G8_H3.33_L1.30-ipilimumab_H3.23_L0.129 Light Chain

SEQ ID NO: 22580 - protein, 111 aa, synthetic construct; identical to SEQ ID NO: 22540
  source 1..111: note = Description of Artificial Sequence: Synthetic polypeptide; note = VL of XENP022559

SEQ ID NO: 22581 - protein, 15 aa, synthetic construct
  source 1..15: note = Description of Artificial Sequence: Synthetic peptide; note = XENP022559 vlCDR1
RASQSVDYDGDSYMN

SEQ ID NO: 22582 - protein, 7 aa, synthetic construct
  source 1..7: note = Description of Artificial Sequence: Synthetic peptide; note = XENP022559 vlCDR2
AASELES

SEQ ID NO: 22583 - protein, 9 aa, synthetic construct
  source 1..9: note = Description of Artificial Sequence: Synthetic peptide; note = XENP022559 vlCDR3
QQSNEDPFT

SEQ ID NO: 22584 - protein, 450 aa, synthetic construct; identical to SEQ ID NO: 22484
  source 1..450: note = Description of Artificial Sequence: Synthetic polypeptide; note = XENP022602 7G8_H3.30_L1.34-ipilimumab_H3.23_L0.129 Fab-Fc Heavy Chain

SEQ ID NO: 22585 - protein, 121 aa, synthetic construct; identical to SEQ ID NO: 22485
  source 1..121: note = Description of Artificial Sequence: Synthetic polypeptide; note = VH of XENP022602

SEQ ID NO: 22586 - protein, 5 aa, synthetic construct
  source 1..5: note = Description of Artificial Sequence: Synthetic peptide; note = XENP022602 vhCDR1
DAWMS

SEQ ID NO: 22587 - protein, 19 aa, synthetic construct
  source 1..19: note = Description of Artificial Sequence: Synthetic peptide; note = XENP022602 vhCDR2
EISTKANNHATYYAESVKG

SEQ ID NO: 22588 - protein, 10 aa, synthetic construct
  source 1..10: note = Description of Artificial Sequence: Synthetic peptide; note = XENP022602 vhCDR3
LATWDWYFDV

SEQ ID NO: 22589 - protein, 477 aa, synthetic construct; identical to SEQ ID NO: 21669
  source 1..477: note = Description of Artificial Sequence: Synthetic polypeptide; note = XENP022602 7G8_H3.30_L1.34-ipilimumab_H3.23_L0.129 scFv-Fc Heavy Chain

SEQ ID NO: 22590 - protein, 118 aa, synthetic construct; identical to SEQ ID NO: 2632
  source 1..118: note = Description of Artificial Sequence: Synthetic polypeptide; note = VH of XENP022602

SEQ ID NO: 22591 - protein, 108 aa, synthetic construct; identical to SEQ ID NO: 2768
  source 1..108: note = Description of Artificial Sequence: Synthetic polypeptide; note = VL of XENP022602

SEQ ID NO: 22592 - protein, 231 aa, synthetic construct; identical to SEQ ID NO: 21532
  source 1..231: note = Description of Artificial Sequence: Synthetic polypeptide; note = Fc chain of XENP022602

SEQ ID NO: 22593 - protein, 5 aa, synthetic construct
  source 1..5: note = Description of Artificial Sequence: Synthetic peptide; note = XENP022602 vhCDR1
SYTMH

SEQ ID NO: 22594 - protein, 17 aa, synthetic construct
  source 1..17: note = Description of Artificial Sequence: Synthetic peptide; note = XENP022602 vhCDR2
FISYDGNYKYYADSVKG

SEQ ID NO: 22595 - protein, 9 aa, synthetic construct
  source 1..9: note = Description of Artificial Sequence: Synthetic peptide; note = XENP022602 vhCDR3
GGHLGPFDL

SEQ ID NO: 22596 - protein, 12 aa, synthetic construct
  source 1..12: note = Description of Artificial Sequence: Synthetic peptide; note = XENP022602 vlCDR1
RASQSVGSSYLA

SEQ ID NO: 22597 - protein, 7 aa, synthetic construct
  source 1..7: note = Description of Artificial Sequence: Synthetic peptide; note = XENP022602 vlCDR2
GASSRAT

SEQ ID NO: 22598 - protein, 9 aa, synthetic construct
  source 1..9: note = Description of Artificial Sequence: Synthetic peptide; note = XENP022602 vlCDR3
QQYGSSPWT

SEQ ID NO: 22599 - protein, 218 aa, synthetic construct
  source 1..218: note = Description of Artificial Sequence: Synthetic polypeptide; note = XENP022602 7G8_H3.30_L1.34-ipilimumab_H3.23_L0.129 Light Chain
DIVLTQSPSSLSASVGDRVTITCRASQSVDYDGDSYMNWYQQKPGKPPKLLIYAASELESGIPARFSGSGSGTDFTLTISSLQPEDFATYYCQQSNEDPFTFGSGTKLEIKRTVAAPSVFIFPPSDEQLKSGTASVVCLLNNFYPREAKVQWKVDNALQSGNSQESVTEQDSKDSTYSLSSTLTLSKADYEKHKVYACEVTHQGLSSPVTKSFNRGEC

SEQ ID NO: 22600 - protein, 111 aa, synthetic construct
  source 1..111: note = Description of Artificial Sequence: Synthetic polypeptide; note = VL of XENP022602
DIVLTQSPSSLSASVGDRVTITCRASQSVDYDGDSYMNWYQQKPGKPPKLLIYAASELESGIPARFSGSGSGTDFTLTISSLQPEDFATYYCQQSNEDPFTFGSGTKLEIK

SEQ ID NO: 22601 - protein, 15 aa, synthetic construct
  source 1..15: note = Description of Artificial Sequence: Synthetic peptide; note = XENP022602 vlCDR1
RASQSVDYDGDSYMN

SEQ ID NO: 22602 - protein, 7 aa, synthetic construct
  source 1..7: note = Description of Artificial Sequence: Synthetic peptide; note = XENP022602 vlCDR2
AASELES

SEQ ID NO: 22603 - protein, 9 aa, synthetic construct
  source 1..9: note = Description of Artificial Sequence: Synthetic peptide; note = XENP022602 vlCDR3
QQSNEDPFT

SEQ ID NO: 22604 - protein, 450 aa, synthetic construct; identical to SEQ ID NO: 22484
  source 1..450: note = Description of Artificial Sequence: Synthetic polypeptide; note = XENP022603 7G8_H3.30_L1.36-ipilimumab_H3.23_L0.129 Fab-Fc Heavy Chain

SEQ ID NO: 22605 - protein, 121 aa, synthetic construct; identical to SEQ ID NO: 22485
  source 1..121: note = Description of Artificial Sequence: Synthetic polypeptide; note = VH of XENP022603

SEQ ID NO: 22606 - protein, 5 aa, synthetic construct
  source 1..5: note = Description of Artificial Sequence: Synthetic peptide; note = XENP022603 vhCDR1
DAWMS

SEQ ID NO: 22607 - protein, 19 aa, synthetic construct
  source 1..19: note = Description of Artificial Sequence: Synthetic peptide; note = XENP022603 vhCDR2
EISTKANNHATYYAESVKG

SEQ ID NO: 22608 - protein, 10 aa, synthetic construct
  source 1..10: note = Description of Artificial Sequence: Synthetic peptide; note = XENP022603 vhCDR3
LATWDWYFDV

SEQ ID NO: 22609 - protein, 477 aa, synthetic construct; identical to SEQ ID NO: 21669
  source 1..477: note = Description of Artificial Sequence: Synthetic polypeptide; note = XENP022603 7G8_H3.30_L1.36-ipilimumab_H3.23_L0.129 scFv-Fc Heavy Chain

SEQ ID NO: 22610 - protein, 118 aa, synthetic construct; identical to SEQ ID NO: 2632
  source 1..118: note = Description of Artificial Sequence: Synthetic polypeptide; note = VH of XENP022603

SEQ ID NO: 22611 - protein, 108 aa, synthetic construct; identical to SEQ ID NO: 2768
  source 1..108: note = Description of Artificial Sequence: Synthetic polypeptide; note = VL of XENP022603

SEQ ID NO: 22612 - protein, 231 aa, synthetic construct; identical to SEQ ID NO: 21532
  source 1..231: note = Description of Artificial Sequence: Synthetic polypeptide; note = Fc chain of XENP022603

SEQ ID NO: 22613 - protein, 5 aa, synthetic construct
  source 1..5: note = Description of Artificial Sequence: Synthetic peptide; note = XENP022603 vhCDR1
SYTMH

SEQ ID NO: 22614 - protein, 17 aa, synthetic construct
  source 1..17: note = Description of Artificial Sequence: Synthetic peptide; note = XENP022603 vhCDR2
FISYDGNYKYYADSVKG

SEQ ID NO: 22615 - protein, 9 aa, synthetic construct
  source 1..9: note = Description of Artificial Sequence: Synthetic peptide; note = XENP022603 vhCDR3
GGHLGPFDL

SEQ ID NO: 22616 - protein, 12 aa, synthetic construct
  source 1..12: note = Description of Artificial Sequence: Synthetic peptide; note = XENP022603 vlCDR1
RASQSVGSSYLA

SEQ ID NO: 22617 - protein, 7 aa, synthetic construct
  source 1..7: note = Description of Artificial Sequence: Synthetic peptide; note = XENP022603 vlCDR2
GASSRAT

SEQ ID NO: 22618 - protein, 9 aa, synthetic construct
  source 1..9: note = Description of Artificial Sequence: Synthetic peptide; note = XENP022603 vlCDR3
QQYGSSPWT

SEQ ID NO: 22619 - protein, 218 aa, synthetic construct
  source 1..218: note = Description of Artificial Sequence: Synthetic polypeptide; note = XENP022603 7G8_H3.30_L1.36-ipilimumab_H3.23_L0.129 Light Chain
DIVLTQSPSSLSASVGDRVTITCRASQSVDHDGDSYMNWYQQKPGKPPKLLIYAASELESGIPARFSGSGSGTDFTLTISSLQPEDFATYYCQQSNEDPFTFGSGTKLEIKRTVAAPSVFIFPPSDEQLKSGTASVVCLLNNFYPREAKVQWKVDNALQSGNSQESVTEQDSKDSTYSLSSTLTLSKADYEKHKVYACEVTHQGLSSPVTKSFNRGEC

SEQ ID NO: 22620 - protein, 111 aa, synthetic construct
  source 1..111: note = Description of Artificial Sequence: Synthetic polypeptide; note = VL of XENP022603
DIVLTQSPSSLSASVGDRVTITCRASQSVDHDGDSYMNWYQQKPGKPPKLLIYAASELESGIPARFSGSGSGTDFTLTISSLQPEDFATYYCQQSNEDPFTFGSGTKLEIK

SEQ ID NO: 22621 - protein, 15 aa, synthetic construct
  source 1..15: note = Description of Artificial Sequence: Synthetic peptide; note = XENP022603 vlCDR1
RASQSVDHDGDSYMN

SEQ ID NO: 22622 - protein, 7 aa, synthetic construct
  source 1..7: note = Description of Artificial Sequence: Synthetic peptide; note = XENP022603 vlCDR2
AASELES

SEQ ID NO: 22623 - protein, 9 aa, synthetic construct
  source 1..9: note = Description of Artificial Sequence: Synthetic peptide; note = XENP022603 vlCDR3
QQSNEDPFT

SEQ ID NO: 22624 - protein, 448 aa, synthetic construct
  source 1..448: note = Description of Artificial Sequence: Synthetic polypeptide; note = XENP017979 4C7_H0L0-ipilimumab_H0L0 Fab-Fc Heavy Chain
QVQLQESGPGLVKPSETLSLTCTVHGGSINHYYWSWIRQPPGKGLEWIGYIYYSGSTKYNPSLKSRVSISVDTSKNQFSLKLTSVTAADTAVYYCAREWPYYYYEMDVWGQGTTVTVSSASTKGPSVFPLAPSSKSTSGGTAALGCLVKDYFPEPVTVSWNSGALTSGVHTFPAVLQSSGLYSLSSVVTVPSSSLGTQTYICNVNHKPSDTKVDKKVEPKSCDKTHTCPPCPAPPVAGPSVFLFPPKPKDTLMISRTPEVTCVVVDVKHEDPEVKFNWYVDGVEVHNAKTKPREEEYNSTYRVVSVLTVLHQDWLNGKEYKCKVSNKALPAPIEKTISKAKGQPREPQVYTLPPSREEMTKNQVSLTCDVSGFYPSDIAVEWESDGQPENNYKTTPPVLDSDGSFFLYSKLTVDKSRWEQGDVFSCSVMHEALHNHYTQKSLSLSPGK

SEQ ID NO: 22625 - protein, 119 aa, synthetic construct; identical to SEQ ID NO: 20886
  source 1..119: note = Description of Artificial Sequence: Synthetic polypeptide; note = VH of XENP017979

SEQ ID NO: 22626 - protein, 5 aa, synthetic construct
  source 1..5: note = Description of Artificial Sequence: Synthetic peptide; note = XENP017979 vhCDR1
HYYWS

SEQ ID NO: 22627 - protein, 16 aa, synthetic construct
  source 1..16: note = Description of Artificial Sequence: Synthetic peptide; note = XENP017979 vhCDR2
YIYYSGSTKYNPSLKS

SEQ ID NO: 22628 - protein, 11 aa, synthetic construct
  source 1..11: note = Description of Artificial Sequence: Synthetic peptide; note = XENP017979 vhCDR3
EWPYYYYEMDV

SEQ ID NO: 22629 - protein, 477 aa, synthetic construct; identical to SEQ ID NO: 21529
  source 1..477: note = Description of Artificial Sequence: Synthetic polypeptide; note = XENP017979 4C7_H0L0-ipilimumab_H0L0 scFv-Fc Heavy Chain

SEQ ID NO: 22630 - protein, 118 aa, synthetic construct; identical to SEQ ID NO: 22
  source 1..118: note = Description of Artificial Sequence: Synthetic polypeptide; note = VH of XENP017979

SEQ ID NO: 22631 - protein, 108 aa, synthetic construct; identical to SEQ ID NO: 23
  source 1..108: note = Description of Artificial Sequence: Synthetic polypeptide; note = VL of XENP017979

SEQ ID NO: 22632 - protein, 231 aa, synthetic construct; identical to SEQ ID NO: 21532
  source 1..231: note = Description of Artificial Sequence: Synthetic polypeptide; note = Fc chain of XENP017979

SEQ ID NO: 22633 - protein, 5 aa, synthetic construct
  source 1..5: note = Description of Artificial Sequence: Synthetic peptide; note = XENP017979 vhCDR1
SYTMH

SEQ ID NO: 22634 - protein, 17 aa, synthetic construct
  source 1..17: note = Description of Artificial Sequence: Synthetic peptide; note = XENP017979 vhCDR2
FISYDGNNKYYADSVKG

SEQ ID NO: 22635 - protein, 9 aa, synthetic construct
  source 1..9: note = Description of Artificial Sequence: Synthetic peptide; note = XENP017979 vhCDR3
TGWLGPFDY

SEQ ID NO: 22636 - protein, 12 aa, synthetic construct
  source 1..12: note = Description of Artificial Sequence: Synthetic peptide; note = XENP017979 vlCDR1
RASQSVGSSYLA

SEQ ID NO: 22637 - protein, 7 aa, synthetic construct
  source 1..7: note = Description of Artificial Sequence: Synthetic peptide; note = XENP017979 vlCDR2
GAFSRAT

SEQ ID NO: 22638 - protein, 9 aa, synthetic construct
  source 1..9: note = Description of Artificial Sequence: Synthetic peptide; note = XENP017979 vlCDR3
QQYGSSPWT

SEQ ID NO: 22639 - protein, 215 aa, synthetic construct; identical to SEQ ID NO: 20890
  source 1..215: note = Description of Artificial Sequence: Synthetic polypeptide; note = XENP017979 4C7_H0L0-ipilimumab_H0L0 Light Chain

SEQ ID NO: 22640 - protein, 108 aa, synthetic construct; identical to SEQ ID NO: 20891
  source 1..108: note = Description of Artificial Sequence: Synthetic polypeptide; note = VL of XENP017979

SEQ ID NO: 22641 - protein, 12 aa, synthetic construct
  source 1..12: note = Description of Artificial Sequence: Synthetic peptide; note = XENP017979 vlCDR1
RASQSVSSSYLA

SEQ ID NO: 22642 - protein, 7 aa, synthetic construct
  source 1..7: note = Description of Artificial Sequence: Synthetic peptide; note = XENP017979 vlCDR2
GASSRAT

SEQ ID NO: 22643 - protein, 9 aa, synthetic construct
  source 1..9: note = Description of Artificial Sequence: Synthetic peptide; note = XENP017979 vlCDR3
QQYGSSFRT

SEQ ID NO: 22644 - protein, 450 aa, synthetic construct
  source 1..450: note = Description of Artificial Sequence: Synthetic polypeptide; note = XENP017980 8D5_H0L0-ipilimumab_H0L0 Fab-Fc Heavy Chain
EVQLVESGGGLVQPGGSLRLSCAASGFTISSYDMHWVRQATGKGLEWVSVIGPAGDTYYPGSVKGRFTISRENAKNSLYLQMNSLRAGDTAVYYCAREGMAAHNYYGMDVWGQGTTVTVSSASTKGPSVFPLAPSSKSTSGGTAALGCLVKDYFPEPVTVSWNSGALTSGVHTFPAVLQSSGLYSLSSVVTVPSSSLGTQTYICNVNHKPSDTKVDKKVEPKSCDKTHTCPPCPAPPVAGPSVFLFPPKPKDTLMISRTPEVTCVVVDVKHEDPEVKFNWYVDGVEVHNAKTKPREEEYNSTYRVVSVLTVLHQDWLNGKEYKCKVSNKALPAPIEKTISKAKGQPREPQVYTLPPSREEMTKNQVSLTCDVSGFYPSDIAVEWESDGQPENNYKTTPPVLDSDGSFFLYSKLTVDKSRWEQGDVFSCSVMHEALHNHYTQKSLSLSPGK

SEQ ID NO: 22645 - protein, 121 aa, synthetic construct; identical to SEQ ID NO: 20896
  source 1..121: note = Description of Artificial Sequence: Synthetic polypeptide; note = VH of XENP017980

SEQ ID NO: 22646 - protein, 5 aa, synthetic construct
  source 1..5: note = Description of Artificial Sequence: Synthetic peptide; note = XENP017980 vhCDR1
SYDMH

SEQ ID NO: 22647 - protein, 16 aa, synthetic construct
  source 1..16: note = Description of Artificial Sequence: Synthetic peptide; note = XENP017980 vhCDR2
VIGPAGDTYYPGSVKG

SEQ ID NO: 22648 - protein, 13 aa, synthetic construct
  source 1..13: note = Description of Artificial Sequence: Synthetic peptide; note = XENP017980 vhCDR3
EGMAAHNYYGMDV

SEQ ID NO: 22649 - protein, 477 aa, synthetic construct; identical to SEQ ID NO: 21529
  source 1..477: note = Description of Artificial Sequence: Synthetic polypeptide; note = XENP017980 8D5_H0L0-ipilimumab_H0L0 scFv-Fc Heavy Chain

SEQ ID NO: 22650 - protein, 118 aa, synthetic construct; identical to SEQ ID NO: 22
  source 1..118: note = Description of Artificial Sequence: Synthetic polypeptide; note = VH of XENP017980

SEQ ID NO: 22651 - protein, 108 aa, synthetic construct; identical to SEQ ID NO: 23
  source 1..108: note = Description of Artificial Sequence: Synthetic polypeptide; note = VL of XENP017980

SEQ ID NO: 22652 - protein, 231 aa, synthetic construct; identical to SEQ ID NO: 21532
  source 1..231: note = Description of Artificial Sequence: Synthetic polypeptide; note = Fc chain of XENP017980

SEQ ID NO: 22653 - protein, 5 aa, synthetic construct
  source 1..5: note = Description of Artificial Sequence: Synthetic peptide; note = XENP017980 vhCDR1
SYTMH

SEQ ID NO: 22654 - protein, 17 aa, synthetic construct
  source 1..17: note = Description of Artificial Sequence: Synthetic peptide; note = XENP017980 vhCDR2
FISYDGNNKYYADSVKG

SEQ ID NO: 22655 - protein, 9 aa, synthetic construct
  source 1..9: note = Description of Artificial Sequence: Synthetic peptide; note = XENP017980 vhCDR3
TGWLGPFDY

SEQ ID NO: 22656 - protein, 12 aa, synthetic construct
  source 1..12: note = Description of Artificial Sequence: Synthetic peptide; note = XENP017980 vlCDR1
RASQSVGSSYLA

SEQ ID NO: 22657 - protein, 7 aa, synthetic construct
  source 1..7: note = Description of Artificial Sequence: Synthetic peptide; note = XENP017980 vlCDR2
GAFSRAT

SEQ ID NO: 22658 - protein, 9 aa, synthetic construct
  source 1..9: note = Description of Artificial Sequence: Synthetic peptide; note = XENP017980 vlCDR3
QQYGSSPWT

SEQ ID NO: 22659 - protein, 215 aa, synthetic construct; identical to SEQ ID NO: 20900
  source 1..215: note = Description of Artificial Sequence: Synthetic polypeptide; note = XENP017980 8D5_H0L0-ipilimumab_H0L0 Light Chain

SEQ ID NO: 22660 - protein, 108 aa, synthetic construct; identical to SEQ ID NO: 20901
  source 1..108: note = Description of Artificial Sequence: Synthetic polypeptide; note = VL of XENP017980

SEQ ID NO: 22661 - protein, 11 aa, synthetic construct
  source 1..11: note = Description of Artificial Sequence: Synthetic peptide; note = XENP017980 vlCDR1
RASQSVSSYLA

SEQ ID NO: 22662 - protein, 7 aa, synthetic construct
  source 1..7: note = Description of Artificial Sequence: Synthetic peptide; note = XENP017980 vlCDR2
DASNRAT

SEQ ID NO: 22663 - protein, 10 aa, synthetic construct
  source 1..10: note = Description of Artificial Sequence: Synthetic peptide; note = XENP017980 vlCDR3
QQRSNWPPIT

SEQ ID NO: 22664 - protein, 457 aa, synthetic construct
  source 1..457: note = Description of Artificial Sequence: Synthetic polypeptide; note = XENP017981 E8D9_H0L0-ipilimumab_H0L0 Fab-Fc Heavy Chain
QITLKESGPTLVKPTQTLTLTCTFSGFSLSTSGVGVGWIRQPPGKALEWLALIYWDDDKRYSPSLKSRLTITKDTSKNQVVLTMTNMDPVDTATYYCAHTSITEVRGAIIYYYGMDVWGQGTTVTVSSASTKGPSVFPLAPSSKSTSGGTAALGCLVKDYFPEPVTVSWNSGALTSGVHTFPAVLQSSGLYSLSSVVTVPSSSLGTQTYICNVNHKPSDTKVDKKVEPKSCDKTHTCPPCPAPPVAGPSVFLFPPKPKDTLMISRTPEVTCVVVDVKHEDPEVKFNWYVDGVEVHNAKTKPREEEYNSTYRVVSVLTVLHQDWLNGKEYKCKVSNKALPAPIEKTISKAKGQPREPQVYTLPPSREEMTKNQVSLTCDVSGFYPSDIAVEWESDGQPENNYKTTPPVLDSDGSFFLYSKLTVDKSRWEQGDVFSCSVMHEALHNHYTQKSLSLSPGK

SEQ ID NO: 22665 - protein, 128 aa, synthetic construct; identical to SEQ ID NO: 20906
  source 1..128: note = Description of Artificial Sequence: Synthetic polypeptide; note = VH of XENP017981

SEQ ID NO: 22666 - protein, 7 aa, synthetic construct
  source 1..7: note = Description of Artificial Sequence: Synthetic peptide; note = XENP017981 vhCDR1
TSGVGVG

SEQ ID NO: 22667 - protein, 16 aa, synthetic construct
  source 1..16: note = Description of Artificial Sequence: Synthetic peptide; note = XENP017981 vhCDR2
LIYWDDDKRYSPSLKS

SEQ ID NO: 22668 - protein, 18 aa, synthetic construct
  source 1..18: note = Description of Artificial Sequence: Synthetic peptide; note = XENP017981 vhCDR3
TSITEVRGAIIYYYGMDV

SEQ ID NO: 22669 - protein, 477 aa, synthetic construct; identical to SEQ ID NO: 21529
  source 1..477: note = Description of Artificial Sequence: Synthetic polypeptide; note = XENP017981 E8D9_H0L0-ipilimumab_H0L0 scFv-Fc Heavy Chain

SEQ ID NO: 22670 - protein, 118 aa, synthetic construct; identical to SEQ ID NO: 22
  source 1..118: note = Description of Artificial Sequence: Synthetic polypeptide; note = VH of XENP017981

SEQ ID NO: 22671 - protein, 108 aa, synthetic construct; identical to SEQ ID NO: 23
  source 1..108: note = Description of Artificial Sequence: Synthetic polypeptide; note = VL of XENP017981

SEQ ID NO: 22672 - protein, 231 aa, synthetic construct; identical to SEQ ID NO: 21532
  source 1..231: note = Description of Artificial Sequence: Synthetic polypeptide; note = Fc chain of XENP017981

SEQ ID NO: 22673 - protein, 5 aa, synthetic construct
  source 1..5: note = Description of Artificial Sequence: Synthetic peptide; note = XENP017981 vhCDR1
SYTMH

SEQ ID NO: 22674 - protein, 17 aa, synthetic construct
  source 1..17: note = Description of Artificial Sequence: Synthetic peptide; note = XENP017981 vhCDR2
FISYDGNNKYYADSVKG

SEQ ID NO: 22675 - protein, 9 aa, synthetic construct
  source 1..9: note = Description of Artificial Sequence: Synthetic peptide; note = XENP017981 vhCDR3
TGWLGPFDY

SEQ ID NO: 22676 - protein, 12 aa, synthetic construct
  source 1..12: note = Description of Artificial Sequence: Synthetic peptide; note = XENP017981 vlCDR1
RASQSVGSSYLA

SEQ ID NO: 22677 - protein, 7 aa, synthetic construct
  source 1..7: note = Description of Artificial Sequence: Synthetic peptide; note = XENP017981 vlCDR2
GAFSRAT

SEQ ID NO: 22678 - protein, 9 aa, synthetic construct
  source 1..9: note = Description of Artificial Sequence: Synthetic peptide; note = XENP017981 vlCDR3
QQYGSSPWT

SEQ ID NO: 22679 - protein, 214 aa, synthetic construct; identical to SEQ ID NO: 20910
  source 1..214: note = Description of Artificial Sequence: Synthetic polypeptide; note = XENP017981 E8D9_H0L0-ipilimumab_H0L0 Light Chain

SEQ ID NO: 22680 - protein, 107 aa, synthetic construct; identical to SEQ ID NO: 20911
  source 1..107: note = Description of Artificial Sequence: Synthetic polypeptide; note = VL of XENP017981

SEQ ID NO: 22681 - protein, 12 aa, synthetic construct
  source 1..12: note = Description of Artificial Sequence: Synthetic peptide; note = XENP017981 vlCDR1
RASQSVSSSYLA

SEQ ID NO: 22682 - protein, 7 aa, synthetic construct
  source 1..7: note = Description of Artificial Sequence: Synthetic peptide; note = XENP017981 vlCDR2
GASSRAT

SEQ ID NO: 22683 - protein, 8 aa, synthetic construct
  source 1..8: note = Description of Artificial Sequence: Synthetic peptide; note = XENP017981 vlCDR3
QQYGHSLT

SEQ ID NO: 22684 - protein, 448 aa, synthetic construct; identical to SEQ ID NO: 22624
  source 1..448: note = Description of Artificial Sequence: Synthetic polypeptide; note = XENP017982 4C7_H0L0-Tremelimumab_H0L0 Fab-Fc Heavy Chain

SEQ ID NO: 22685 - protein, 119 aa, synthetic construct; identical to SEQ ID NO: 20886
  source 1..119: note = Description of Artificial Sequence: Synthetic polypeptide; note = VH of XENP017982

SEQ ID NO: 22686 - protein, 5 aa, synthetic construct
  source 1..5: note = Description of Artificial Sequence: Synthetic peptide; note = XENP017982 vhCDR1
HYYWS

SEQ ID NO: 22687 - protein, 16 aa, synthetic construct
  source 1..16: note = Description of Artificial Sequence: Synthetic peptide; note = XENP017982 vhCDR2
YIYYSGSTKYNPSLKS

SEQ ID NO: 22688 - protein, 11 aa, synthetic construct
  source 1..11: note = Description of Artificial Sequence: Synthetic peptide; note = XENP017982 vhCDR3
EWPYYYYEMDV

SEQ ID NO: 22689 - protein, 483 aa, synthetic construct
  source 1..483: note = Description of Artificial Sequence: Synthetic polypeptide; note = XENP017982 4C7_H0L0-Tremelimumab_H0L0 scFv-Fc Heavy Chain
QVQLVESGGGVVQPGRSLRLSCAASGFTFSSYGMHWVRQAPGKGLEWVAVIWYDGSNKYYADSVKGRFTISRDNSKNTLYLQMNSLRAEDTAVYYCARDPRGATLYYYYYGMDVWGQGTTVTVSSGKPGSGKPGSGKPGSGKPGSDIQMTQSPSSLSASVGDRVTITCRASQSINSYLDWYQQKPGKAPKLLIYAASSLQSGVPSRFSGSGSGTDFTLTISSLQPEDFATYYCQQYYSTPFTFGPGTKVEIKEPKSSDKTHTCPPCPAPPVAGPSVFLFPPKPKDTLMISRTPEVTCVVVDVKHEDPEVKFNWYVDGVEVHNAKTKPREEQYNSTYRVVSVLTVLHQDWLNGKEYKCKVSNKALPAPIEKTISKAKGQPREPQVYTLPPSREQMTKNQVKLTCLVKGFYPSDIAVEWESNGQPENNYKTTPPVLDSDGSFFLYSKLTVDKSRWQQGNVFSCSVMHEALHNHYTQKSLSLSPGK

SEQ ID NO: 22690 - protein, 125 aa, synthetic construct
  source 1..125: note = Description of Artificial Sequence: Synthetic polypeptide; note = VH of XENP017982
QVQLVESGGGVVQPGRSLRLSCAASGFTFSSYGMHWVRQAPGKGLEWVAVIWYDGSNKYYADSVKGRFTISRDNSKNTLYLQMNSLRAEDTAVYYCARDPRGATLYYYYYGMDVWGQGTTVTVSS

SEQ ID NO: 22691 - protein, 107 aa, synthetic construct
  source 1..107: note = Description of Artificial Sequence: Synthetic polypeptide; note = VL of XENP017982
DIQMTQSPSSLSASVGDRVTITCRASQSINSYLDWYQQKPGKAPKLLIYAASSLQSGVPSRFSGSGSGTDFTLTISSLQPEDFATYYCQQYYSTPFTFGPGTKVEIK

SEQ ID NO: 22692 - protein, 231 aa, synthetic construct; identical to SEQ ID NO: 21532
  source 1..231: note = Description of Artificial Sequence: Synthetic polypeptide; note = Fc chain of XENP017982

SEQ ID NO: 22693 - protein, 5 aa, synthetic construct
  source 1..5: note = Description of Artificial Sequence: Synthetic peptide; note = XENP017982 vhCDR1
SYGMH

SEQ ID NO: 22694 - protein, 17 aa, synthetic construct
  source 1..17: note = Description of Artificial Sequence: Synthetic peptide; note = XENP017982 vhCDR2
VIWYDGSNKYYADSVKG

SEQ ID NO: 22695 - protein, 16 aa, synthetic construct
  source 1..16: note = Description of Artificial Sequence: Synthetic peptide; note = XENP017982 vhCDR3
DPRGATLYYYYYGMDV

SEQ ID NO: 22696 - protein, 11 aa, synthetic construct
  source 1..11: note = Description of Artificial Sequence: Synthetic peptide; note = XENP017982 vlCDR1
RASQSINSYLD

SEQ ID NO: 22697 - protein, 7 aa, synthetic construct
  source 1..7: note = Description of Artificial Sequence: Synthetic peptide; note = XENP017982 vlCDR2
AASSLQS

SEQ ID NO: 22698 - protein, 9 aa, synthetic construct
  source 1..9: note = Description of Artificial Sequence: Synthetic peptide; note = XENP017982 vlCDR3
QQYYSTPFT

SEQ ID NO: 22699 - protein, 215 aa, synthetic construct; identical to SEQ ID NO: 20890
  source 1..215: note = Description of Artificial Sequence: Synthetic polypeptide; note = XENP017982 4C7_H0L0-Tremelimumab_H0L0 Light Chain

SEQ ID NO: 22700 - protein, 108 aa, synthetic construct; identical to SEQ ID NO: 20891
  source 1..108: note = Description of Artificial Sequence: Synthetic polypeptide; note = VL of XENP017982

SEQ ID NO: 22701 - protein, 12 aa, synthetic construct
  source 1..12: note = Description of Artificial Sequence: Synthetic peptide; note = XENP017982 vlCDR1
RASQSVSSSYLA

SEQ ID NO: 22702 - protein, 7 aa, synthetic construct
  source 1..7: note = Description of Artificial Sequence: Synthetic peptide; note = XENP017982 vlCDR2
GASSRAT

SEQ ID NO: 22703 - protein, 9 aa, synthetic construct
  source 1..9: note = Description of Artificial Sequence: Synthetic peptide; note = XENP017982 vlCDR3
QQYGSSFRT

SEQ ID NO: 22704 - protein, 450 aa, synthetic construct; identical to SEQ ID NO: 22644
  source 1..450: note = Description of Artificial Sequence: Synthetic polypeptide; note = XENP017983 8D5_H0L0-Tremelimumab_H0L0 Fab-Fc Heavy Chain

SEQ ID NO: 22705 - protein, 121 aa, synthetic construct; identical to SEQ ID NO: 20896
  source 1..121: note = Description of Artificial Sequence: Synthetic polypeptide; note = VH of XENP017983

SEQ ID NO: 22706 - protein, 5 aa, synthetic construct
  source 1..5: note = Description of Artificial Sequence: Synthetic peptide; note = XENP017983 vhCDR1
SYDMH

SEQ ID NO: 22707 - protein, 16 aa, synthetic construct
  source 1..16: note = Description of Artificial Sequence: Synthetic peptide; note = XENP017983 vhCDR2
VIGPAGDTYYPGSVKG

SEQ ID NO: 22708 - protein, 13 aa, synthetic construct
  source 1..13: note = Description of Artificial Sequence: Synthetic peptide; note = XENP017983 vhCDR3
EGMAAHNYYGMDV

SEQ ID NO: 22709 - protein, 483 aa, synthetic construct; identical to SEQ ID NO: 22689
  source 1..483: note = Description of Artificial Sequence: Synthetic polypeptide; note = XENP017983 8D5_H0L0-Tremelimumab_H0L0 scFv-Fc Heavy Chain

SEQ ID NO: 22710 - protein, 125 aa, synthetic construct; identical to SEQ ID NO: 22690
  source 1..125: note = Description of Artificial Sequence: Synthetic polypeptide; note = VH of XENP017983

SEQ ID NO: 22711 - protein, 107 aa, synthetic construct; identical to SEQ ID NO: 22691
  source 1..107: note = Description of Artificial Sequence: Synthetic polypeptide; note = VL of XENP017983

SEQ ID NO: 22712 - protein, 231 aa, synthetic construct; identical to SEQ ID NO: 21532
  source 1..231: note = Description of Artificial Sequence: Synthetic polypeptide; note = Fc chain of XENP017983

SEQ ID NO: 22713 - protein, 5 aa, synthetic construct
  source 1..5: note = Description of Artificial Sequence: Synthetic peptide; note = XENP017983 vhCDR1
SYGMH

SEQ ID NO: 22714 - protein, 17 aa, synthetic construct
  source 1..17: note = Description of Artificial Sequence: Synthetic peptide; note = XENP017983 vhCDR2
VIWYDGSNKYYADSVKG

SEQ ID NO: 22715 - protein, 16 aa, synthetic construct
  source 1..16: note = Description of Artificial Sequence: Synthetic peptide; note = XENP017983 vhCDR3
DPRGATLYYYYYGMDV

SEQ ID NO: 22716 - protein, 11 aa, synthetic construct
  source 1..11: note = Description of Artificial Sequence: Synthetic peptide; note = XENP017983 vlCDR1
RASQSINSYLD

SEQ ID NO: 22717 - protein, 7 aa, synthetic construct
  source 1..7: note = Description of Artificial Sequence: Synthetic peptide; note = XENP017983 vlCDR2
AASSLQS

SEQ ID NO: 22718 - protein, 9 aa, synthetic construct
  source 1..9: note = Description of Artificial Sequence: Synthetic peptide; note = XENP017983 vlCDR3
QQYYSTPFT

SEQ ID NO: 22719 - protein, 215 aa, synthetic construct; identical to SEQ ID NO: 20900
  source 1..215: note = Description of Artificial Sequence: Synthetic polypeptide; note = XENP017983 8D5_H0L0-Tremelimumab_H0L0 Light Chain

SEQ ID NO: 22720 - protein, 108 aa, synthetic construct; identical to SEQ ID NO: 20901
  source 1..108: note = Description of Artificial Sequence: Synthetic polypeptide; note = VL of XENP017983

SEQ ID NO: 22721 - protein, 11 aa, synthetic construct
  source 1..11: note = Description of Artificial Sequence: Synthetic peptide; note = XENP017983 vlCDR1
RASQSVSSYLA

SEQ ID NO: 22722 - protein, 7 aa, synthetic construct
  source 1..7: note = Description of Artificial Sequence: Synthetic peptide; note = XENP017983 vlCDR2
DASNRAT

SEQ ID NO: 22723 - protein, 10 aa, synthetic construct
  source 1..10: note = Description of Artificial Sequence: Synthetic peptide; note = XENP017983 vlCDR3
QQRSNWPPIT

SEQ ID NO: 22724 - protein, 457 aa, synthetic construct; identical to SEQ ID NO: 22664
  source 1..457: note = Description of Artificial Sequence: Synthetic polypeptide; note = XENP017984 E8D9_H0L0-Tremelimumab_H0L0 Fab-Fc Heavy Chain

SEQ ID NO: 22725 - protein, 128 aa, synthetic construct; identical to SEQ ID NO: 20906
  source 1..128: note = Description of Artificial Sequence: Synthetic polypeptide; note = VH of XENP017984

SEQ ID NO: 22726 - protein, 7 aa, synthetic construct
  source 1..7: note = Description of Artificial Sequence: Synthetic peptide; note = XENP017984 vhCDR1
TSGVGVG

SEQ ID NO: 22727 - protein, 16 aa, synthetic construct
  source 1..16: note = Description of Artificial Sequence: Synthetic peptide; note = XENP017984 vhCDR2
LIYWDDDKRYSPSLKS

SEQ ID NO: 22728 - protein, 18 aa, synthetic construct
  source 1..18: note = Description of Artificial Sequence: Synthetic peptide; note = XENP017984 vhCDR3
TSITEVRGAIIYYYGMDV

SEQ ID NO: 22729 - protein, 483 aa, synthetic construct; identical to SEQ ID NO: 22689
  source 1..483: note = Description of Artificial Sequence: Synthetic polypeptide; note = XENP017984 E8D9_H0L0-Tremelimumab_H0L0 scFv-Fc Heavy Chain

SEQ ID NO: 22730 - protein, 125 aa, synthetic construct; identical to SEQ ID NO: 22690
  source 1..125: note = Description of Artificial Sequence: Synthetic polypeptide; note = VH of XENP017984

SEQ ID NO: 22731 - protein, 107 aa, synthetic construct; identical to SEQ ID NO: 22691
  source 1..107: note = Description of Artificial Sequence: Synthetic polypeptide; note = VL of XENP017984

SEQ ID NO: 22732 - protein, 231 aa, synthetic construct; identical to SEQ ID NO: 21532
  source 1..231: note = Description of Artificial Sequence: Synthetic polypeptide; note = Fc chain of XENP017984

SEQ ID NO: 22733 - protein, 5 aa, synthetic construct
  source 1..5: note = Description of Artificial Sequence: Synthetic peptide; note = XENP017984 vhCDR1
SYGMH

SEQ ID NO: 22734 - protein, 17 aa, synthetic construct
  source 1..17: note = Description of Artificial Sequence: Synthetic peptide; note = XENP017984 vhCDR2
VIWYDGSNKYYADSVKG

SEQ ID NO: 22735 - protein, 16 aa, synthetic construct
  source 1..16: note = Description of Artificial Sequence: Synthetic peptide; note = XENP017984 vhCDR3
DPRGATLYYYYYGMDV

SEQ ID NO: 22736 - protein, 11 aa, synthetic construct
  source 1..11: note = Description of Artificial Sequence: Synthetic peptide; note = XENP017984 vlCDR1
RASQSINSYLD

SEQ ID NO: 22737 - protein, 7 aa, synthetic construct
  source 1..7: note = Description of Artificial Sequence: Synthetic peptide; note = XENP017984 vlCDR2
AASSLQS

SEQ ID NO: 22738 - protein, 9 aa, synthetic construct
  source 1..9: note = Description of Artificial Sequence: Synthetic peptide; note = XENP017984 vlCDR3
QQYYSTPFT

SEQ ID NO: 22739 - protein, 214 aa, synthetic construct; identical to SEQ ID NO: 20910
  source 1..214: note = Description of Artificial Sequence: Synthetic polypeptide; note = XENP017984 E8D9_H0L0-Tremelimumab_H0L0 Light Chain

SEQ ID NO: 22740 - protein, 107 aa, synthetic construct; identical to SEQ ID NO: 20911
  source 1..107: note = Description of Artificial Sequence: Synthetic polypeptide; note = VL of XENP017984

SEQ ID NO: 22741 - protein, 12 aa, synthetic construct
  source 1..12: note = Description of Artificial Sequence: Synthetic peptide; note = XENP017984 vlCDR1
RASQSVSSSYLA

SEQ ID NO: 22742 - protein, 7 aa, synthetic construct
  source 1..7: note = Description of Artificial Sequence: Synthetic peptide; note = XENP017984 vlCDR2
GASSRAT

SEQ ID NO: 22743 - protein, 8 aa, synthetic construct
  source 1..8: note = Description of Artificial Sequence: Synthetic peptide; note = XENP017984 vlCDR3
QQYGHSLT

SEQ ID NO: 22744 - protein, 448 aa, synthetic construct; identical to SEQ ID NO: 22624
  source 1..448: note = Description of Artificial Sequence: Synthetic polypeptide; note = XENP017886 4C7_H0L0-nivolumab_H0.1_L0 Fab-Fc Heavy Chain

SEQ ID NO: 22745 - protein, 119 aa, synthetic construct; identical to SEQ ID NO: 20886
  source 1..119: note = Description of Artificial Sequence: Synthetic polypeptide; note = VH of XENP017886

SEQ ID NO: 22746 - protein, 5 aa, synthetic construct
  source 1..5: note = Description of Artificial Sequence: Synthetic peptide; note = XENP017886 vhCDR1
HYYWS

SEQ ID NO: 22747 - protein, 16 aa, synthetic construct
  source 1..16: note = Description of Artificial Sequence: Synthetic peptide; note = XENP017886 vhCDR2
YIYYSGSTKYNPSLKS

SEQ ID NO: 22748 - protein, 11 aa, synthetic construct
  source 1..11: note = Description of Artificial Sequence: Synthetic peptide; note = XENP017886 vhCDR3
EWPYYYYEMDV

SEQ ID NO: 22749 - protein, 471 aa, synthetic construct
  source 1..471: note = Description of Artificial Sequence: Synthetic polypeptide; note = XENP017886 4C7_H0L0-nivolumab_H0.1_L0 scFv-Fc Heavy Chain
QVQLVESGGGVVQPGRSLRLSCKASGITFSNSGMHWVRQAPGKGLEWVAVIWYDGSKRYYADSVKGRFTISRDNSKNTLFLQMNSLRAEDTAVYYCATNDDYWGQGTLVTVSSGKPGSGKPGSGKPGSGKPGSEIVLTQSPATLSLSPGERATLSCRASQSVSSYLAWYQQKPGQAPRLLIYDASNRATGIPARFSGSGSGTDFTLTISSLEPEDFAVYYCQQSSNWPRTFGQGTKVEIKEPKSSDKTHTCPPCPAPPVAGPSVFLFPPKPKDTLMISRTPEVTCVVVDVKHEDPEVKFNWYVDGVEVHNAKTKPREEQYNSTYRVVSVLTVLHQDWLNGKEYKCKVSNKALPAPIEKTISKAKGQPREPQVYTLPPSREQMTKNQVKLTCLVKGFYPSDIAVEWESNGQPENNYKTTPPVLDSDGSFFLYSKLTVDKSRWQQGNVFSCSVMHEALHNHYTQKSLSLSPGK

SEQ ID NO: 22750 - protein, 113 aa, synthetic construct; identical to SEQ ID NO: 6210
  source 1..113: note = Description of Artificial Sequence: Synthetic polypeptide; note = VH of XENP017886

SEQ ID NO: 22751 - protein, 107 aa, synthetic construct [sequence omitted]

SEQ ID NO: 22752 - protein, 231 aa, synthetic construct; identical to SEQ ID NO: 21532
  source 1..231: note = Description of Artificial Sequence: Synthetic polypeptide; note = Fc chain of XENP017886

SEQ ID NO: 22753 - protein, 5 aa, synthetic construct
  source 1..5: note = Description of Artificial Sequence: Synthetic peptide; note = XENP017886 vhCDR1
NSGMH

SEQ ID NO: 22754 - protein, 17 aa, synthetic construct
  source 1..17: note = Description of Artificial Sequence: Synthetic peptide; note = XENP017886 vhCDR2
VIWYDGSKRYYADSVKG

SEQ ID NO: 22755 - protein, 4 aa, synthetic construct
  source 1..4: note = Description of Artificial Sequence: Synthetic peptide; note = XENP017886 vhCDR3
NDDY

SEQ ID NO: 22756 - protein, 11 aa, synthetic construct
  source 1..11: note = Description of Artificial Sequence: Synthetic peptide; note = XENP017886 vlCDR1
RASQSVSSYLA

SEQ ID NO: 22757 - protein, 7 aa, synthetic construct
  source 1..7: note = Description of Artificial Sequence: Synthetic peptide; note = XENP017886 vlCDR2
DASNRAT

SEQ ID NO: 22758 - protein, 9 aa, synthetic construct
  source 1..9: note = Description of Artificial Sequence: Synthetic peptide; note = XENP017886 vlCDR3
QQSSNWPRT

SEQ ID NO: 22759 - protein, 215 aa, synthetic construct; identical to SEQ ID NO: 20890
  source 1..215: note = Description of Artificial Sequence: Synthetic polypeptide; note = XENP017886 4C7_H0L0-nivolumab_H0.1_L0 Light Chain

SEQ ID NO: 22760 - protein, 108 aa, synthetic construct; identical to SEQ ID NO: 20891
  source 1..108: note = Description of Artificial Sequence: Synthetic polypeptide; note = VL of XENP017886

SEQ ID NO: 22761 - protein, 12 aa, synthetic construct
  source 1..12: note = Description of Artificial Sequence: Synthetic peptide; note = XENP017886 vlCDR1
RASQSVSSSYLA

SEQ ID NO: 22762 - protein, 7 aa, synthetic construct
  source 1..7: note = Description of Artificial Sequence: Synthetic peptide; note = XENP017886 vlCDR2
GASSRAT

SEQ ID NO: 22763 - protein, 9 aa, synthetic construct
  source 1..9: note = Description of Artificial Sequence: Synthetic peptide; note = XENP017886 vlCDR3
QQYGSSFRT

SEQ ID NO: 22764 - protein, 450 aa, synthetic construct; identical to SEQ ID NO: 22644
  source 1..450: note = Description of Artificial Sequence: Synthetic polypeptide; note = XENP017887 8D5_H0L0-nivolumab_H0.1_L0 Fab-Fc Heavy Chain

SEQ ID NO: 22765 - protein, 121 aa, synthetic construct; identical to SEQ ID NO: 20896
  source 1..121: note = Description of Artificial Sequence: Synthetic polypeptide; note = VH of XENP017887

SEQ ID NO: 22766 - protein, 5 aa, synthetic construct
  source 1..5: note = Description of Artificial Sequence: Synthetic peptide; note = XENP017887 vhCDR1
SYDMH

SEQ ID NO: 22767 - protein, 16 aa, synthetic construct
  source 1..16: note = Description of Artificial Sequence: Synthetic peptide; note = XENP017887 vhCDR2
VIGPAGDTYYPGSVKG

SEQ ID NO: 22768 - protein, 13 aa, synthetic construct
  source 1..13: note = Description of Artificial Sequence: Synthetic peptide; note = XENP017887 vhCDR3
EGMAAHNYYGMDV

SEQ ID NO: 22769 - protein, 471 aa, synthetic construct; identical to SEQ ID NO: 22749
  source 1..471: note = Description of Artificial Sequence: Synthetic polypeptide; note = XENP017887 8D5_H0L0-nivolumab_H0.1_L0 scFv-Fc Heavy Chain

SEQ ID NO: 22770 - protein, 113 aa, synthetic construct; identical to SEQ ID NO: 6210
  source 1..113: note = Description of Artificial Sequence: Synthetic polypeptide; note = VH of XENP017887

SEQ ID NO: 22771 - protein, 107 aa, synthetic construct [sequence omitted]

SEQ ID NO: 22772 - protein, 231 aa, synthetic construct; identical to SEQ ID NO: 21532
  source 1..231: note = Description of Artificial Sequence: Synthetic polypeptide; note = Fc chain of XENP017887

SEQ ID NO: 22773 - protein, 5 aa, synthetic construct
  source 1..5: note = Description of Artificial Sequence: Synthetic peptide; note = XENP017887 vhCDR1
NSGMH

SEQ ID NO: 22774 - protein, 17 aa, synthetic construct
  source 1..17: note = Description of Artificial Sequence: Synthetic peptide; note = XENP017887 vhCDR2
VIWYDGSKRYYADSVKG

SEQ ID NO: 22775 - protein, 4 aa, synthetic construct
  source 1..4: note = Description of Artificial Sequence: Synthetic peptide; note = XENP017887 vhCDR3
NDDY

SEQ ID NO: 22776 - protein, 11 aa, synthetic construct
  source 1..11: note = Description of Artificial Sequence: Synthetic peptide; note = XENP017887 vlCDR1
RASQSVSSYLA

SEQ ID NO: 22777 - protein, 7 aa, synthetic construct
  source 1..7: note = Description of Artificial Sequence: Synthetic peptide; note = XENP017887 vlCDR2
DASNRAT

SEQ ID NO: 22778 - protein, 9 aa, synthetic construct
  source 1..9: note = Description of Artificial Sequence: Synthetic peptide; note = XENP017887 vlCDR3
QQSSNWPRT

SEQ ID NO: 22779 - protein, 215 aa, synthetic construct; identical to SEQ ID NO: 20900
  source 1..215: note = Description of Artificial Sequence: Synthetic polypeptide; note = XENP017887 8D5_H0L0-nivolumab_H0.1_L0 Light Chain

SEQ ID NO: 22780 - protein, 108 aa, synthetic construct; identical to SEQ ID NO: 20901
  source 1..108: note = Description of Artificial Sequence: Synthetic polypeptide; note = VL of XENP017887

SEQ ID NO: 22781 - protein, 11 aa, synthetic construct
  source 1..11: note = Description of Artificial Sequence: Synthetic peptide; note = XENP017887 vlCDR1
RASQSVSSYLA

SEQ ID NO: 22782 - protein, 7 aa, synthetic construct
  source 1..7: note = Description of Artificial Sequence: Synthetic peptide; note = XENP017887 vlCDR2
DASNRAT

SEQ ID NO: 22783 - protein, 10 aa, synthetic construct
  source 1..10: note = Description of Artificial Sequence: Synthetic peptide; note = XENP017887 vlCDR3
QQRSNWPPIT

SEQ ID NO: 22784 - protein, 457 aa, synthetic construct; identical to SEQ ID NO: 22664
  source 1..457: note = Description of Artificial Sequence: Synthetic polypeptide; note = XENP017888 E8D9_H0L0-nivolumab_H0.1_L0 Fab-Fc Heavy Chain

SEQ ID NO: 22785 - protein, 128 aa, synthetic construct; identical to SEQ ID NO: 20906
  source 1..128: note = Description of Artificial Sequence: Synthetic polypeptide; note = VH of XENP017888

SEQ ID NO: 22786 - protein, 7 aa, synthetic construct
  source 1..7: note = Description of Artificial Sequence: Synthetic peptide; note = XENP017888 vhCDR1
TSGVGVG

SEQ ID NO: 22787 - protein, 16 aa, synthetic construct
  source 1..16: note = Description of Artificial Sequence: Synthetic peptide; note = XENP017888 vhCDR2
LIYWDDDKRYSPSLKS

SEQ ID NO: 22788 - protein, 18 aa, synthetic construct
  source 1..18: note = Description of Artificial Sequence: Synthetic peptide; note = XENP017888 vhCDR3
TSITEVRGAIIYYYGMDV

SEQ ID NO: 22789 - protein, 471 aa, synthetic construct; identical to SEQ ID NO: 22749
  source 1..471: note = Description of Artificial Sequence: Synthetic polypeptide; note = XENP017888 E8D9_H0L0-nivolumab_H0.1_L0 scFv-Fc Heavy Chain

SEQ ID NO: 22790 - protein, 113 aa, synthetic construct; identical to SEQ ID NO: 6210
  source 1..113: note = Description of Artificial Sequence: Synthetic polypeptide; note = VH of XENP017888

SEQ ID NO: 22791 - protein, 107 aa, synthetic construct [sequence omitted]

SEQ ID NO: 22792 - protein, 231 aa, synthetic construct; identical to SEQ ID NO: 21532
  source 1..231: note = Description of Artificial Sequence: Synthetic polypeptide; note = Fc chain of XENP017888

SEQ ID NO: 22793 - protein, 5 aa, synthetic construct
  source 1..5: note = Description of Artificial Sequence: Synthetic peptide; note = XENP017888 vhCDR1
NSGMH

SEQ ID NO: 22794 - protein, 17 aa, synthetic construct
  source 1..17: note = Description of Artificial Sequence: Synthetic peptide; note = XENP017888 vhCDR2
VIWYDGSKRYYADSVKG

SEQ ID NO: 22795 - protein, 4 aa, synthetic construct
  source 1..4: note = Description of Artificial Sequence: Synthetic peptide; note = XENP017888 vhCDR3
NDDY

SEQ ID NO: 22796 - protein, 11 aa, synthetic construct
  source 1..11: note = Description of Artificial Sequence: Synthetic peptide; note = XENP017888 vlCDR1
RASQSVSSYLA

SEQ ID NO: 22797 - protein, 7 aa, synthetic construct
  source 1..7: note = Description of Artificial Sequence: Synthetic peptide; note = XENP017888 vlCDR2
DASNRAT

SEQ ID NO: 22798 - protein, 9 aa, synthetic construct
  source 1..9: note = Description of Artificial Sequence: Synthetic peptide; note = XENP017888 vlCDR3
QQSSNWPRT

SEQ ID NO: 22799 - protein, 214 aa, synthetic construct; identical to SEQ ID NO: 20910
  source 1..214: note = Description of Artificial Sequence: Synthetic polypeptide; note = XENP017888 E8D9_H0L0-nivolumab_H0.1_L0 Light Chain

SEQ ID NO: 22800 - protein, 107 aa, synthetic construct; identical to SEQ ID NO: 20911
  source 1..107: note = Description of Artificial Sequence: Synthetic polypeptide; note = VL of XENP017888

SEQ ID NO: 22801 - protein, 12 aa, synthetic construct
  source 1..12: note = Description of Artificial Sequence: Synthetic peptide; note = XENP017888 vlCDR1
RASQSVSSSYLA

SEQ ID NO: 22802 - protein, 7 aa, synthetic construct
  source 1..7: note = Description of Artificial Sequence: Synthetic peptide; note = XENP017888 vlCDR2
GASSRAT

SEQ ID NO: 22803 - protein, 8 aa, synthetic construct
  source 1..8: note = Description of Artificial Sequence: Synthetic peptide; note = XENP017888 vlCDR3
QQYGHSLT

SEQ ID NO: 22804 - protein, 449 aa, synthetic construct
  source 1..449: note = Description of Artificial Sequence: Synthetic polypeptide; note = XENP020280 3F6_H0L0_anti-BTLA-1G6_H1.280_L1.224 Fab-Fc Heavy Chain
EVQLQESGPSLVKPSQTLSLTCSVTGDSITSGYWNWIRKFPGNKLEYMGYLSYSGSTYYNPSLKSRISITRDTSKNQYYLQLNSVTTEDTATYYCARYFYGSYYEAMDYWGQGTSVTVSSASTKGPSVFPLAPSSKSTSGGTAALGCLVKDYFPEPVTVSWNSGALTSGVHTFPAVLQSSGLYSLSSVVTVPSSSLGTQTYICNVNHKPSDTKVDKKVEPKSCDKTHTCPPCPAPPVAGPSVFLFPPKPKDTLMISRTPEVTCVVVDVKHEDPEVKFNWYVDGVEVHNAKTKPREEEYNSTYRVVSVLTVLHQDWLNGKEYKCKVSNKALPAPIEKTISKAKGQPREPQVYTLPPSREEMTKNQVSLTCDVSGFYPSDIAVEWESDGQPENNYKTTPPVLDSDGSFFLYSKLTVDKSRWEQGDVFSCSVMHEALHNHYTQKSLSLSPGK

SEQ ID NO: 22805 - protein, 120 aa, synthetic construct; identical to SEQ ID NO: 20916
  source 1..120: note = Description of Artificial Sequence: Synthetic polypeptide; note = VH of XENP020280

SEQ ID NO: 22806 - protein, 5 aa, synthetic construct
  source 1..5: note = Description of Artificial Sequence: Synthetic peptide; note = XENP020280 vhCDR1
SGYWN

SEQ ID NO: 22807 - protein, 16 aa, synthetic construct
  source 1..16: note = Description of Artificial Sequence: Synthetic peptide; note = XENP020280 vhCDR2
YLSYSGSTYYNPSLKS

SEQ ID NO: 22808 - protein, 12 aa, synthetic construct
  source 1..12: note = Description of Artificial Sequence: Synthetic peptide; note = XENP020280 vhCDR3
YFYGSYYEAMDY

SEQ ID NO: 22809 - protein, 480 aa, synthetic construct
  source 1..480: note = Description of Artificial Sequence: Synthetic polypeptide; note = XENP020280 3F6_H0L0_anti-BTLA-1G6_H1.280_L1.224 scFv-Fc Heavy Chain
EVQLVESGGGLVKPGGSLRLTCVASGFTFSNYWMNWVRQAPGKGLEWVAEIRLYSNNYATHYAESVKGRFTISRDDSKSTLYLQMNNLKTEDTGVYYCTRYYGNYGGYFDVWGRGTLVTVSSGKPGSGKPGSGKPGSGKPGSEIVLTQSPATLSVSPGERVTLTCRASQSVGNDVAWYQQKPGQAPRLLINYASHRYTSVPDRFTGSGYGTEFTLTISSVQSEDFAVYYCQQDWSSPRTFGGGTKVEIKEPKSSDKTHTCPPCPAPPVAGPSVFLFPPKPKDTLMISRTPEVTCVVVDVKHEDPEVKFNWYVDGVEVHNAKTKPREEQYNSTYRVVSVLTVLHQDWLNGKEYKCKVSNKALPAPIEKTISKAKGQPREPQVYTLPPSREQMTKNQVKLTCLVKGFYPSDIAVEWESNGQPENNYKTTPPVLDSDGSFFLYSKLTVDKSRWQQGNVFSCSVMHEALHNHYTQKSLSLSPGK

SEQ ID NO: 22810 - protein, 122 aa, synthetic construct; identical to SEQ ID NO: 10917
  source 1..122: note = Description of Artificial Sequence: Synthetic polypeptide; note = VH of XENP020280

SEQ ID NO: 22811 - protein, 107 aa, synthetic construct
  source 1..107: note = Description of Artificial Sequence: Synthetic polypeptide; note = VL of XENP020280
EIVLTQSPATLSVSPGERVTLTCRASQSVGNDVAWYQQKPGQAPRLLINYASHRYTSVPDRFTGSGYGTEFTLTISSVQSEDFAVYYCQQDWSSPRTFGGGTKVEIK

SEQ ID NO: 22812 - protein, 231 aa, synthetic construct; identical to SEQ ID NO: 21532
  source 1..231: note = Description of Artificial Sequence: Synthetic polypeptide; note = Fc chain of XENP020280

SEQ ID NO: 22813 - protein, 5 aa, synthetic construct
  source 1..5: note = Description of Artificial Sequence: Synthetic peptide; note = XENP020280 vhCDR1
NYWMN

SEQ ID NO: 22814 - protein, 19 aa, synthetic construct
  source 1..19: note = Description of Artificial Sequence: Synthetic peptide; note = XENP020280 vhCDR2
EIRLYSNNYATHYAESVKG

SEQ ID NO: 22815 - protein, 11 aa, synthetic construct
  source 1..11: note = Description of Artificial Sequence: Synthetic peptide; note = XENP020280 vhCDR3
YYGNYGGYFDV

SEQ ID NO: 22816 - protein, 11 aa, synthetic construct
  source 1..11: note = Description of Artificial Sequence: Synthetic peptide; note = XENP020280 vlCDR1
RASQSVGNDVA

SEQ ID NO: 22817 - protein, 7 aa, synthetic construct
  source 1..7: note = Description of Artificial Sequence: Synthetic peptide; note = XENP020280 vlCDR2
YASHRYT

SEQ ID NO: 22818 - protein, 9 aa, synthetic construct
  source 1..9: note = Description of Artificial Sequence: Synthetic peptide; note = XENP020280 vlCDR3
QQDWSSPRT

SEQ ID NO: 22819 - protein, 214 aa, synthetic construct; identical to SEQ ID NO: 20920
  source 1..214: note = Description of Artificial Sequence: Synthetic polypeptide; note = XENP020280 3F6_H0L0_anti-BTLA-1G6_H1.280_L1.224 Light Chain

SEQ ID NO: 22820 - protein, 107 aa, synthetic construct; identical to SEQ ID NO: 20921
  source 1..107: note = Description of Artificial Sequence: Synthetic polypeptide; note = VL of XENP020280

SEQ ID NO: 22821 - protein, 11 aa, synthetic construct
  source 1..11: note = Description of Artificial Sequence: Synthetic peptide; note = XENP020280 vlCDR1
RASKSISKYLA

SEQ ID NO: 22822 - protein, 7 aa, synthetic construct
  source 1..7: note = Description of Artificial Sequence: Synthetic peptide; note = XENP020280 vlCDR2
SGSTLQS

SEQ ID NO: 22823 - protein, 9 aa, synthetic construct
  source 1..9: note = Description of Artificial Sequence: Synthetic peptide; note = XENP020280 vlCDR3
QQHNEYPWT

SEQ ID NO: 22824 - protein, 448 aa, synthetic construct
  source 1..448: note = Description of Artificial Sequence: Synthetic polypeptide; note = XENP020281 1A9_H0L0_anti-BTLA-1G6_H1.280_L1.224 Fab-Fc Heavy Chain
DVQLVESGGGLVQPGGSRKLSCAASGFTFSSFGMHWVRQAPEKGLEWVAYISSGISTIYYADTVKGRFTISRDNPKNTLFLQMTSLRSEDTAMYYCARDWLRGYAMDYWGQGTSVTVSSASTKGPSVFPLAPSSKSTSGGTAALGCLVKDYFPEPVTVSWNSGALTSGVHTFPAVLQSSGLYSLSSVVTVPSSSLGTQTYICNVNHKPSDTKVDKKVEPKSCDKTHTCPPCPAPPVAGPSVFLFPPKPKDTLMISRTPEVTCVVVDVKHEDPEVKFNWYVDGVEVHNAKTKPREEEYNSTYRVVSVLTVLHQDWLNGKEYKCKVSNKALPAPIEKTISKAKGQPREPQVYTLPPSREEMTKNQVSLTCDVSGFYPSDIAVEWESDGQPENNYKTTPPVLDSDGSFFLYSKLTVDKSRWEQGDVFSCSVMHEALHNHYTQKSLSLSPGK

SEQ ID NO: 22825 - protein, 119 aa, synthetic construct; identical to SEQ ID NO: 20926
  source 1..119: note = Description of Artificial Sequence: Synthetic polypeptide; note = VH of XENP020281

SEQ ID NO: 22826 - protein, 5 aa, synthetic construct
  source 1..5: note = Description of Artificial Sequence: Synthetic peptide; note = XENP020281 vhCDR1
SFGMH

SEQ ID NO: 22827 - protein, 17 aa, synthetic construct
  source 1..17: note = Description of Artificial Sequence: Synthetic peptide; note = XENP020281 vhCDR2
YISSGISTIYYADTVKG

SEQ ID NO: 22828 - protein, 10 aa, synthetic construct
  source 1..10: note = Description of Artificial Sequence: Synthetic peptide; note = XENP020281 vhCDR3
DWLRGYAMDY

SEQ ID NO: 22829 - protein, 480 aa, synthetic construct; identical to SEQ ID NO: 22809
  source 1..480: note = Description of Artificial Sequence: Synthetic polypeptide; note = XENP020281 1A9_H0L0_anti-BTLA-1G6_H1.280_L1.224 scFv-Fc Heavy Chain

SEQ ID NO: 22830 - protein, 122 aa, synthetic construct; identical to SEQ ID NO: 10917
  source 1..122: note = Description of Artificial Sequence: Synthetic polypeptide; note = VH of XENP020281

SEQ ID NO: 22831 - protein, 107 aa, synthetic construct; identical to SEQ ID NO: 22811
  source 1..107: note = Description of Artificial Sequence: Synthetic polypeptide; note = VL of XENP020281

SEQ ID NO: 22832 - protein, 231 aa, synthetic construct; identical to SEQ ID NO: 21532
  source 1..231: note = Description of Artificial Sequence: Synthetic polypeptide; note = Fc chain of XENP020281

SEQ ID NO: 22833 - protein, 5 aa, synthetic construct
  source 1..5: note = Description of Artificial Sequence: Synthetic peptide; note = XENP020281 vhCDR1
NYWMN

SEQ ID NO: 22834 - protein, 19 aa, synthetic construct
  source 1..19: note = Description of Artificial Sequence: Synthetic peptide; note = XENP020281 vhCDR2
EIRLYSNNYATHYAESVKG

SEQ ID NO: 22835 - protein, 11 aa, synthetic construct
  source 1..11: note = Description of Artificial Sequence: Synthetic peptide; note = XENP020281 vhCDR3
YYGNYGGYFDV

SEQ ID NO: 22836 - protein, 11 aa, synthetic construct
  source 1..11: note = Description of Artificial Sequence: Synthetic peptide; note = XENP020281 vlCDR1
RASQSVGNDVA

SEQ ID NO: 22837 - protein, 7 aa, synthetic construct
  source 1..7: note = Description of Artificial Sequence: Synthetic peptide; note = XENP020281 vlCDR2
YASHRYT

SEQ ID NO: 22838 - protein, 9 aa, synthetic construct
  source 1..9: note = Description of Artificial Sequence: Synthetic peptide; note = XENP020281 vlCDR3
QQDWSSPRT

SEQ ID NO: 22839 - protein, 218 aa, synthetic construct; identical to SEQ ID NO: 20930
  source 1..218: note = Description of Artificial Sequence: Synthetic polypeptide; note = XENP020281 1A9_H0L0_anti-BTLA-1G6_H1.280_L1.224 Light Chain

SEQ ID NO: 22840 - protein, 111 aa, synthetic construct; identical to SEQ ID NO: 20931
  source 1..111: note = Description of Artificial Sequence: Synthetic polypeptide; note = VL of XENP020281

SEQ ID NO: 22841 - protein, 15 aa, synthetic construct
  source 1..15: note = Description of Artificial Sequence: Synthetic peptide; note = XENP020281 vlCDR1
KASQSIDYDGDSYMN

SEQ ID NO: 22842 - protein, 7 aa, synthetic construct
  source 1..7: note = Description of Artificial Sequence: Synthetic peptide; note = XENP020281 vlCDR2
AASNLDF

SEQ ID NO: 22843 - protein, 9 aa, synthetic construct
  source 1..9: note = Description of Artificial Sequence: Synthetic peptide; note = XENP020281 vlCDR3
QQSNEDPWT

SEQ ID NO: 22844 - protein, 447 aa, synthetic construct
  source 1..447: note = Description of Artificial Sequence: Synthetic polypeptide; note = XENP020282 9C6_H0L0_anti-BTLA-1G6_H1.280_L1.224 Fab-Fc Heavy Chain
QVQLKESGPGLVAPSQSLSITCTVSGFSLTGYGVNWVRQPPGKGLEWLGMIWIDGSTDYNSALKSRLSINKDNSKSQVFLKMNSLQTDDTARYYCARDRPDGRAMDYWGQGTSVTVSSASTKGPSVFPLAPSSKSTSGGTAALGCLVKDYFPEPVTVSWNSGALTSGVHTFPAVLQSSGLYSLSSVVTVPSSSLGTQTYICNVNHKPSDTKVDKKVEPKSCDKTHTCPPCPAPPVAGPSVFLFPPKPKDTLMISRTPEVTCVVVDVKHEDPEVKFNWYVDGVEVHNAKTKPREEEYNSTYRVVSVLTVLHQDWLNGKEYKCKVSNKALPAPIEKTISKAKGQPREPQVYTLPPSREEMTKNQVSLTCDVSGFYPSDIAVEWESDGQPENNYKTTPPVLDSDGSFFLYSKLTVDKSRWEQGDVFSCSVMHEALHNHYTQKSLSLSPGK

SEQ ID NO: 22845 - protein, 118 aa, synthetic construct; identical to SEQ ID NO: 20936
  source 1..118: note = Description of Artificial Sequence: Synthetic polypeptide; note = VH of XENP020282

SEQ ID NO: 22846 - protein, 5 aa, synthetic construct
  source 1..5: note = Description of Artificial Sequence: Synthetic peptide; note = XENP020282 vhCDR1
GYGVN

SEQ ID NO: 22847 - protein, 16 aa, synthetic construct
  source 1..16: note = Description of Artificial Sequence: Synthetic peptide; note = XENP020282 vhCDR2
MIWIDGSTDYNSALKS

SEQ ID NO: 22848 - protein, 10 aa, synthetic construct
  source 1..10: note = Description of Artificial Sequence: Synthetic peptide; note = XENP020282 vhCDR3
DRPDGRAMDY

SEQ ID NO: 22849 - protein, 480 aa, synthetic construct; identical to SEQ ID NO: 22809
  source 1..480: note = Description of Artificial Sequence: Synthetic polypeptide; note = XENP020282 9C6_H0L0_anti-BTLA-1G6_H1.280_L1.224 scFv-Fc Heavy Chain

SEQ ID NO: 22850 - protein, 122 aa, synthetic construct; identical to SEQ ID NO: 10917
  source 1..122: note = Description of Artificial Sequence: Synthetic polypeptide; note = VH of XENP020282

SEQ ID NO: 22851 - protein, 107 aa, synthetic construct; identical to SEQ ID NO: 22811
  source 1..107: note = Description of Artificial Sequence: Synthetic polypeptide; note = VL of XENP020282

SEQ ID NO: 22852 - protein, 231 aa, synthetic construct; identical to SEQ ID NO: 21532
  source 1..231: note = Description of Artificial Sequence: Synthetic polypeptide; note = Fc chain of XENP020282

SEQ ID NO: 22853 - protein, 5 aa, synthetic construct
  source 1..5: note = Description of Artificial Sequence: Synthetic peptide; note = XENP020282 vhCDR1
NYWMN

SEQ ID NO: 22854 - protein, 19 aa, synthetic construct
  source 1..19: note = Description of Artificial Sequence: Synthetic peptide; note = XENP020282 vhCDR2
EIRLYSNNYATHYAESVKG

SEQ ID NO: 22855 - protein, 11 aa, synthetic construct
  source 1..11: note = Description of Artificial Sequence: Synthetic peptide; note = XENP020282 vhCDR3
YYGNYGGYFDV

SEQ ID NO: 22856 - protein, 11 aa, synthetic construct
  source 1..11: note = Description of Artificial Sequence: Synthetic peptide; note = XENP020282 vlCDR1
RASQSVGNDVA

SEQ ID NO: 22857 - protein, 7 aa, synthetic construct
  source 1..7: note = Description of Artificial Sequence: Synthetic peptide; note = XENP020282 vlCDR2
YASHRYT

SEQ ID NO: 22858 - protein, 9 aa, synthetic construct
  source 1..9: note = Description of Artificial Sequence: Synthetic peptide; note = XENP020282 vlCDR3
QQDWSSPRT

SEQ ID NO: 22859 - protein, 213 aa, synthetic construct; identical to SEQ ID NO: 20940
  source 1..213: note = Description of Artificial Sequence: Synthetic polypeptide; note = XENP020282 9C6_H0L0_anti-BTLA-1G6_H1.280_L1.224 Light Chain

SEQ ID NO: 22860 - protein, 106 aa, synthetic construct; identical to SEQ ID NO: 20941
  source 1..106: note = Description of Artificial Sequence: Synthetic polypeptide; note = VL of XENP020282

SEQ ID NO: 22861 - protein, 11 aa, synthetic construct
  source 1..11: note = Description of Artificial Sequence: Synthetic peptide; note = XENP020282 vlCDR1
KASQSVSNDVA

SEQ ID NO: 22862 - protein, 7 aa, synthetic construct
  source 1..7: note = Description of Artificial Sequence: Synthetic peptide; note = XENP020282 vlCDR2
YASNRYT

SEQ ID NO: 22863 - protein, 8 aa, synthetic construct
  source 1..8: note = Description of Artificial Sequence: Synthetic peptide; note = XENP020282 vlCDR3
QQDYSSPT

SEQ ID NO: 22864 - protein, 447 aa, synthetic construct; identical to SEQ ID NO: 22844
  source 1..447: note = Description of Artificial Sequence: Synthetic polypeptide; note = XENP020283 7H2_H0L0_anti-BTLA-1G6_H1.280_L1.224 Fab-Fc Heavy Chain

SEQ ID NO: 22865 - protein, 118 aa, synthetic construct; identical to SEQ ID NO: 20936
  source 1..118: note = Description of Artificial Sequence: Synthetic polypeptide; note = VH of XENP020283

SEQ ID NO: 22866 - protein, 5 aa, synthetic construct
  source 1..5: note = Description of Artificial Sequence: Synthetic peptide; note = XENP020283 vhCDR1
GYGVN

SEQ ID NO: 22867 - protein, 16 aa, synthetic construct
  source 1..16: note = Description of Artificial Sequence: Synthetic peptide; note = XENP020283 vhCDR2
MIWIDGSTDYNSALKS

SEQ ID NO: 22868 - protein, 10 aa, synthetic construct
  source 1..10: note = Description of Artificial Sequence: Synthetic peptide; note = XENP020283 vhCDR3
DRPDGRAMDY

SEQ ID NO: 22869 - protein, 480 aa, synthetic construct; identical to SEQ ID NO: 22809
  source 1..480: note = Description of Artificial Sequence: Synthetic polypeptide; note = XENP020283 7H2_H0L0_anti-BTLA-1G6_H1.280_L1.224 scFv-Fc Heavy Chain

SEQ ID NO: 22870 - protein, 122 aa, synthetic construct; identical to SEQ ID NO: 10917
  source 1..122: note = Description of Artificial Sequence: Synthetic polypeptide; note = VH of XENP020283

SEQ ID NO: 22871 - protein, 107 aa, synthetic construct; identical to SEQ ID NO: 22811
  source 1..107: note = Description of Artificial Sequence: Synthetic polypeptide; note = VL of XENP020283

SEQ ID NO: 22872 - protein, 231 aa, synthetic construct; identical to SEQ ID NO: 21532
  source 1..231: note = Description of Artificial Sequence: Synthetic polypeptide; note = Fc chain of XENP020283

SEQ ID NO: 22873 - protein, 5 aa, synthetic construct
  source 1..5: note = Description of Artificial Sequence: Synthetic peptide; note = XENP020283 vhCDR1
NYWMN

SEQ ID NO: 22874 - protein, 19 aa, synthetic construct
  source 1..19: note = Description of Artificial Sequence: Synthetic peptide; note = XENP020283 vhCDR2
EIRLYSNNYATHYAESVKG

SEQ ID NO: 22875 - protein, 11 aa, synthetic construct
  source 1..11: note = Description of Artificial Sequence: Synthetic peptide; note = XENP020283 vhCDR3
YYGNYGGYFDV

SEQ ID NO: 22876 - protein, 11 aa, synthetic construct
  source 1..11: note = Description of Artificial Sequence: Synthetic peptide; note = XENP020283 vlCDR1
RASQSVGNDVA

SEQ ID NO: 22877 - protein, 7 aa, synthetic construct
  source 1..7: note = Description of Artificial Sequence: Synthetic peptide; note = XENP020283 vlCDR2
YASHRYT

SEQ ID NO: 22878 - protein, 9 aa, synthetic construct
  source 1..9: note = Description of Artificial Sequence: Synthetic peptide; note = XENP020283 vlCDR3
QQDWSSPRT

SEQ ID NO: 22879 - protein, 213 aa, synthetic construct; identical to SEQ ID NO: 20950
  source 1..213: note = Description of Artificial Sequence: Synthetic polypeptide; note = XENP020283 7H2_H0L0_anti-BTLA-1G6_H1.280_L1.224 Light Chain

SEQ ID NO: 22880 - protein, 106 aa, synthetic construct; identical to SEQ ID NO: 20951
  source 1..106: note = Description of Artificial Sequence: Synthetic polypeptide; note = VL of XENP020283

SEQ ID NO: 22881 - protein, 11 aa, synthetic construct
  source 1..11: note = Description of Artificial Sequence: Synthetic peptide; note = XENP020283 vlCDR1
KASQSVSNDVA

SEQ ID NO: 22882 - protein, 7 aa, synthetic construct
  source 1..7: note = Description of Artificial Sequence: Synthetic peptide; note = XENP020283 vlCDR2
YASNRYT

SEQ ID NO: 22883 - protein, 8 aa, synthetic construct
  source 1..8: note = Description of Artificial Sequence: Synthetic peptide; note = XENP020283 vlCDR3
QQDYNSPT

SEQ ID NO: 22884 - protein, 447 aa, synthetic construct
  source 1..447: note = Description of Artificial Sequence: Synthetic polypeptide; note = XENP020284 6C3_H0L0_anti-BTLA-1G6_H1.280_L1.224 Fab-Fc Heavy Chain
EVQLQQSGAELVRSGASVKLSCTASGFNIKDYYMHWVKQRPEQGLEWIGWLDPENGDTVYVPKFQGKATMTADTSSNTAYLQLTSLTSEDSAVYYCNAGDYGSSFNYWGQGTTLTVSSASTKGPSVFPLAPSSKSTSGGTAALGCLVKDYFPEPVTVSWNSGALTSGVHTFPAVLQSSGLYSLSSVVTVPSSSLGTQTYICNVNHKPSDTKVDKKVEPKSCDKTHTCPPCPAPPVAGPSVFLFPPKPKDTLMISRTPEVTCVVVDVKHEDPEVKFNWYVDGVEVHNAKTKPREEEYNSTYRVVSVLTVLHQDWLNGKEYKCKVSNKALPAPIEKTISKAKGQPREPQVYTLPPSREEMTKNQVSLTCDVSGFYPSDIAVEWESDGQPENNYKTTPPVLDSDGSFFLYSKLTVDKSRWEQGDVFSCSVMHEALHNHYTQKSLSLSPGK

SEQ ID NO: 22885 - protein, 118 aa, synthetic construct; identical to SEQ ID NO: 20956
  source 1..118: note = Description of Artificial Sequence: Synthetic polypeptide; note = VH of XENP020284

SEQ ID NO: 22886 - protein, 5 aa, synthetic construct
  source 1..5: note = Description of Artificial Sequence: Synthetic peptide; note = XENP020284 vhCDR1
DYYMH

SEQ ID NO: 22887 - protein, 17 aa, synthetic construct
  source 1..17: note = Description of Artificial Sequence: Synthetic peptide; note = XENP020284 vhCDR2
WLDPENGDTVYVPKFQG

SEQ ID NO: 22888 - protein, 9 aa, synthetic construct
  source 1..9: note = Description of Artificial Sequence: Synthetic peptide; note = XENP020284 vhCDR3
GDYGSSFNY

SEQ ID NO: 22889 - protein, 480 aa, synthetic construct; identical to SEQ ID NO: 22809
  source 1..480: note = Description of Artificial Sequence: Synthetic polypeptide; note = XENP020284 6C3_H0L0_anti-BTLA-1G6_H1.280_L1.224 scFv-Fc Heavy Chain

SEQ ID NO: 22890 - protein, 122 aa, synthetic construct; identical to SEQ ID NO: 10917
  source 1..122: note = Description of Artificial Sequence: Synthetic polypeptide; note = VH of XENP020284

SEQ ID NO: 22891 - protein, 107 aa, synthetic construct; identical to SEQ ID NO: 22811
  source 1..107: note = Description of Artificial Sequence: Synthetic polypeptide; note = VL of XENP020284

SEQ ID NO: 22892 - protein, 231 aa, synthetic construct; identical to SEQ ID NO: 21532
  source 1..231: note = Description of Artificial Sequence: Synthetic polypeptide; note = Fc chain of XENP020284

SEQ ID NO: 22893 - protein, 5 aa, synthetic construct
  source 1..5: note = Description of Artificial Sequence: Synthetic peptide; note = XENP020284 vhCDR1
NYWMN

SEQ ID NO: 22894 - protein, 19 aa, synthetic construct
  source 1..19: note = Description of Artificial Sequence: Synthetic peptide; note = XENP020284 vhCDR2
EIRLYSNNYATHYAESVKG

SEQ ID NO: 22895 - protein, 11 aa, synthetic construct
  source 1..11: note = Description of Artificial Sequence: Synthetic peptide; note = XENP020284 vhCDR3
YYGNYGGYFDV

SEQ ID NO: 22896 - protein, 11 aa, synthetic construct
  source 1..11: note = Description of Artificial Sequence: Synthetic peptide; note = XENP020284 vlCDR1
RASQSVGNDVA

SEQ ID NO: 22897 - protein, 7 aa, synthetic construct
  source 1..7: note = Description of Artificial Sequence: Synthetic peptide; note = XENP020284 vlCDR2
YASHRYT

SEQ ID NO: 22898 - protein, 9 aa, synthetic construct
  source 1..9: note = Description of Artificial Sequence: Synthetic peptide; note = XENP020284 vlCDR3
QQDWSSPRT

SEQ ID NO: 22899 - protein, 219 aa, synthetic construct; identical to SEQ ID NO: 20960
  source 1..219: note = Description of Artificial Sequence: Synthetic polypeptide; note = XENP020284 6C3_H0L0_anti-BTLA-1G6_H1.280_L1.224 Light Chain

SEQ ID NO: 22900 - protein, 112 aa, synthetic construct; identical to SEQ ID NO: 20961
  source 1..112: note = Description of Artificial Sequence: Synthetic polypeptide; note = VL of XENP020284

SEQ ID NO: 22901 - protein, 17 aa, synthetic construct
  source 1..17: note = Description of Artificial Sequence: Synthetic peptide; note = XENP020284 vlCDR1
KSSQSLLYSGNQKNYLA

SEQ ID NO: 22902 - protein, 7 aa, synthetic construct
  source 1..7: note = Description of Artificial Sequence: Synthetic peptide; note = XENP020284 vlCDR2
WASTRES

SEQ ID NO: 22903 - protein, 8 aa, synthetic construct
  source 1..8: note = Description of Artificial Sequence: Synthetic peptide; note = XENP020284 vlCDR3
QQYYTYHT

SEQ ID NO: 22904 - protein, 449 aa, synthetic construct
  source 1..449: note = Description of Artificial Sequence: Synthetic polypeptide; note = XENP020285 9C10_H0L0_anti-BTLA-1G6_H1.280_L1.224 Fab-Fc Heavy Chain
EVQLQESGPSLVKPSQTLSLTCSVTGDSITSGYWNWIRKFPGNKLEYMGYISYSGSTYYNPSLKSRISITRDTSKNQYYLQLNSVTTEDTATYYCARYYYGSYYEAMDYWGQGTSVTVSSASTKGPSVFPLAPSSKSTSGGTAALGCLVKDYFPEPVTVSWNSGALTSGVHTFPAVLQSSGLYSLSSVVTVPSSSLGTQTYICNVNHKPSDTKVDKKVEPKSCDKTHTCPPCPAPPVAGPSVFLFPPKPKDTLMISRTPEVTCVVVDVKHEDPEVKFNWYVDGVEVHNAKTKPREEEYNSTYRVVSVLTVLHQDWLNGKEYKCKVSNKALPAPIEKTISKAKGQPREPQVYTLPPSREEMTKNQVSLTCDVSGFYPSDIAVEWESDGQPENNYKTTPPVLDSDGSFFLYSKLTVDKSRWEQGDVFSCSVMHEALHNHYTQKSLSLSPGK

SEQ ID NO: 22905 - protein, 120 aa, synthetic construct; identical to SEQ ID NO: 20966
  source 1..120: note = Description of Artificial Sequence: Synthetic polypeptide; note = VH of XENP020285

SEQ ID NO: 22906 - protein, 5 aa, synthetic construct
  source 1..5: note = Description of Artificial Sequence: Synthetic peptide; note = XENP020285 vhCDR1
SGYWN

SEQ ID NO: 22907 - protein, 16 aa, synthetic construct
  source 1..16: note = Description of Artificial Sequence: Synthetic peptide; note = XENP020285 vhCDR2
YISYSGSTYYNPSLKS

SEQ ID NO: 22908 - protein, 12 aa, synthetic construct
  source 1..12: note = Description of Artificial Sequence: Synthetic peptide; note = XENP020285 vhCDR3
YYYGSYYEAMDY

SEQ ID NO: 22909 - protein, 480 aa, synthetic construct; identical to SEQ ID NO: 22809
  source 1..480: note = Description of Artificial Sequence: Synthetic polypeptide; note = XENP020285 9C10_H0L0_anti-BTLA-1G6_H1.280_L1.224 scFv-Fc Heavy Chain

SEQ ID NO: 22910 - protein, 122 aa, synthetic construct; identical to SEQ ID NO: 10917
  source 1..122: note = Description of Artificial Sequence: Synthetic polypeptide; note = VH of XENP020285

SEQ ID NO: 22911 - protein, 107 aa, synthetic construct; identical to SEQ ID NO: 22811
  source 1..107: note = Description of Artificial Sequence: Synthetic polypeptide; note = VL of XENP020285

SEQ ID NO: 22912 - protein, 231 aa, synthetic construct; identical to SEQ ID NO: 21532
  source 1..231: note = Description of Artificial Sequence: Synthetic polypeptide; note = Fc chain of XENP020285

SEQ ID NO: 22913 - protein, 5 aa, synthetic construct
  source 1..5: note = Description of Artificial Sequence: Synthetic peptide; note = XENP020285 vhCDR1
NYWMN

SEQ ID NO: 22914 - protein, 19 aa, synthetic construct
  source 1..19: note = Description of Artificial Sequence: Synthetic peptide; note = XENP020285 vhCDR2
EIRLYSNNYATHYAESVKG

SEQ ID NO: 22915 - protein, 11 aa, synthetic construct
  source 1..11: note = Description of Artificial Sequence: Synthetic peptide; note = XENP020285 vhCDR3
YYGNYGGYFDV

SEQ ID NO: 22916 - protein, 11 aa, synthetic construct
  source 1..11: note = Description of Artificial Sequence: Synthetic peptide; note = XENP020285 vlCDR1
RASQSVGNDVA

SEQ ID NO: 22917 - protein, 7 aa, synthetic construct
  source 1..7: note = Description of Artificial Sequence: Synthetic peptide; note = XENP020285 vlCDR2
YASHRYT

SEQ ID NO: 22918 - protein, 9 aa, synthetic construct
  source 1..9: note = Description of Artificial Sequence: Synthetic peptide; note = XENP020285 vlCDR3
QQDWSSPRT

SEQ ID NO: 22919 - protein, 214 aa, synthetic construct; identical to SEQ ID NO: 20970
  source 1..214: note = Description of Artificial Sequence: Synthetic polypeptide; note = XENP020285 9C10_H0L0_anti-BTLA-1G6_H1.280_L1.224 Light Chain

SEQ ID NO: 22920 - protein, 107 aa, synthetic construct; identical to SEQ ID NO: 20971
  source 1..107: note = Description of Artificial Sequence: Synthetic polypeptide; note = VL of XENP020285

SEQ ID NO: 22921 - protein, 11 aa, synthetic construct
  source 1..11: note = Description of Artificial Sequence: Synthetic peptide; note = XENP020285 vlCDR1
RASKSISKYLA

SEQ ID NO: 22922 - protein, 7 aa, synthetic construct
  source 1..7: note = Description of Artificial Sequence: Synthetic peptide; note = XENP020285 vlCDR2
SGSTLQS

SEQ ID NO: 22923 - protein, 9 aa, synthetic construct
  source 1..9: note = Description of Artificial Sequence: Synthetic peptide; note = XENP020285 vlCDR3
QQHNEYPWT

SEQ ID NO: 22924 - protein, 443 aa, synthetic construct
  source 1..443: note = Description of Artificial Sequence: Synthetic polypeptide; note = XENP020286 12E6_H0L0_anti-BTLA-1G6_H1.280_L1.224 Fab-Fc Heavy Chain
QVQLQQSGAELMKPGASVKISCKATGYTFSNYWIEWVKQRPGHGLEWIGEILPGSGGTNYNEKFKGKATFTADTSSNTAYMQLSGLTSEDSAVYYCASPRYDLWGQGTSVTASSASTKGPSVFPLAPSSKSTSGGTAALGCLVKDYFPEPVTVSWNSGALTSGVHTFPAVLQSSGLYSLSSVVTVPSSSLGTQTYICNVNHKPSDTKVDKKVEPKSCDKTHTCPPCPAPPVAGPSVFLFPPKPKDTLMISRTPEVTCVVVDVKHEDPEVKFNWYVDGVEVHNAKTKPREEEYNSTYRVVSVLTVLHQDWLNGKEYKCKVSNKALPAPIEKTISKAKGQPREPQVYTLPPSREEMTKNQVSLTCDVSGFYPSDIAVEWESDGQPENNYKTTPPVLDSDGSFFLYSKLTVDKSRWEQGDVFSCSVMHEALHNHYTQKSLSLSPGK

SEQ ID NO: 22925 - protein, 114 aa, synthetic construct; identical to SEQ ID NO: 20976
  source 1..114: note = Description of Artificial Sequence: Synthetic polypeptide; note = VH of XENP020286

SEQ ID NO: 22926 - protein, 5 aa, synthetic construct
  source 1..5: note = Description of Artificial Sequence: Synthetic peptide; note = XENP020286 vhCDR1
NYWIE

SEQ ID NO: 22927 - protein, 17 aa, synthetic construct
  source 1..17: note = Description of Artificial Sequence: Synthetic peptide; note = XENP020286 vhCDR2
EILPGSGGTNYNEKFKG

SEQ ID NO: 22928 - protein, 5 aa, synthetic construct
  source 1..5: note = Description of Artificial Sequence: Synthetic peptide; note = XENP020286 vhCDR3
PRYDL

SEQ ID NO: 22929 - protein, 480 aa, synthetic construct; identical to SEQ ID NO: 22809
  source 1..480: note = Description of Artificial Sequence: Synthetic polypeptide; note = XENP020286 12E6_H0L0_anti-BTLA-1G6_H1.280_L1.224 scFv-Fc Heavy Chain

SEQ ID NO: 22930 - protein, 122 aa, synthetic construct; identical to SEQ ID NO: 10917
  source 1..122: note = Description of Artificial Sequence: Synthetic polypeptide; note = VH of XENP020286

SEQ ID NO: 22931 - protein, 107 aa, synthetic construct; identical to SEQ ID NO: 22811
  source 1..107: note = Description of Artificial Sequence: Synthetic polypeptide; note = VL of XENP020286

SEQ ID NO: 22932 - protein, 231 aa, synthetic construct; identical to SEQ ID NO: 21532
  source 1..231: note = Description of Artificial Sequence: Synthetic polypeptide; note = Fc chain of XENP020286

SEQ ID NO: 22933 - protein, 5 aa, synthetic construct
  source 1..5: note = Description of Artificial Sequence: Synthetic peptide; note = XENP020286 vhCDR1
NYWMN

SEQ ID NO: 22934 - protein, 19 aa, synthetic construct
  source 1..19: note = Description of Artificial Sequence: Synthetic peptide; note = XENP020286 vhCDR2
EIRLYSNNYATHYAESVKG

SEQ ID NO: 22935 - protein, 11 aa, synthetic construct
  source 1..11: note = Description of Artificial Sequence: Synthetic peptide; note = XENP020286 vhCDR3
YYGNYGGYFDV

SEQ ID NO: 22936 - protein, 11 aa, synthetic construct
  source 1..11: note = Description of Artificial Sequence: Synthetic peptide; note = XENP020286 vlCDR1
RASQSVGNDVA

SEQ ID NO: 22937 - protein, 7 aa, synthetic construct
  source 1..7: note = Description of Artificial Sequence: Synthetic peptide; note = XENP020286 vlCDR2
YASHRYT

SEQ ID NO: 22938 - protein, 9 aa, synthetic construct
  source 1..9: note = Description of Artificial Sequence: Synthetic peptide; note = XENP020286 vlCDR3
QQDWSSPRT

SEQ ID NO: 22939 - protein, 219 aa, synthetic construct; identical to SEQ ID NO: 20980
  source 1..219: note = Description of Artificial Sequence: Synthetic polypeptide; note = XENP020286 12E6_H0L0_anti-BTLA-1G6_H1.280_L1.224 Light Chain

SEQ ID NO: 22940 - protein, 112 aa, synthetic construct; identical to SEQ ID NO: 20981
  source 1..112: note = Description of Artificial Sequence: Synthetic polypeptide; note = VL of XENP020286

SEQ ID NO: 22941 - protein, 16 aa, synthetic construct
  source 1..16: note = Description of Artificial Sequence: Synthetic peptide; note = XENP020286 vlCDR1
KSSQSLLHSDGETYLN

SEQ ID NO: 22942 - protein, 7 aa, synthetic construct
  source 1..7: note = Description of Artificial Sequence: Synthetic peptide; note = XENP020286 vlCDR2
LVSKRDS

SEQ ID NO: 22943 - protein, 9 aa, synthetic construct
  source 1..9: note = Description of Artificial Sequence: Synthetic peptide; note = XENP020286 vlCDR3
WQGIHFPQT

SEQ ID NO: 22944 - protein, 442 aa, synthetic construct
  source 1..442: note = Description of Artificial Sequence: Synthetic polypeptide; note = XENP020287 4C11A_H0L0_anti-BTLA-1G6_H1.280_L1.224 Fab-Fc Heavy Chain
QVQLQQSGAELVKPGASVKLSCKASGYTFTSYYMDWVKQRPGQGLEWIGEINPSNGDTKFNEKFKSKATLTVDKSSTTAYMQLSSLTSEDSAVYYCTRDYGYWGQGTTLTVSSASTKGPSVFPLAPSSKSTSGGTAALGCLVKDYFPEPVTVSWNSGALTSGVHTFPAVLQSSGLYSLSSVVTVPSSSLGTQTYICNVNHKPSDTKVDKKVEPKSCDKTHTCPPCPAPPVAGPSVFLFPPKPKDTLMISRTPEVTCVVVDVKHEDPEVKFNWYVDGVEVHNAKTKPREEEYNSTYRVVSVLTVLHQDWLNGKEYKCKVSNKALPAPIEKTISKAKGQPREPQVYTLPPSREEMTKNQVSLTCDVSGFYPSDIAVEWESDGQPENNYKTTPPVLDSDGSFFLYSKLTVDKSRWEQGDVFSCSVMHEALHNHYTQKSLSLSPGK

SEQ ID NO: 22945 - protein, 113 aa, synthetic construct; identical to SEQ ID NO: 20986
  source 1..113: note = Description of Artificial Sequence: Synthetic polypeptide; note = VH of XENP020287

SEQ ID NO: 22946 - protein, 5 aa, synthetic construct
  source 1..5: note = Description of Artificial Sequence: Synthetic peptide; note = XENP020287 vhCDR1
SYYMD

SEQ ID NO: 22947 - protein, 17 aa, synthetic construct
  source 1..17: note = Description of Artificial Sequence: Synthetic peptide; note = XENP020287 vhCDR2
EINPSNGDTKFNEKFKS

SEQ ID NO: 22948 - protein, 4 aa, synthetic construct
  source 1..4: note = Description of Artificial Sequence: Synthetic peptide; note = XENP020287 vhCDR3
DYGY

SEQ ID NO: 22949 - protein, 480 aa, synthetic construct; identical to SEQ ID NO: 22809
  source 1..480: note = Description of Artificial Sequence: Synthetic polypeptide; note = XENP020287 4C11A_H0L0_anti-BTLA-1G6_H1.280_L1.224 scFv-Fc Heavy Chain

SEQ ID NO: 22950 - protein, 122 aa, synthetic construct; identical to SEQ ID NO: 10917
  source 1..122: note = Description of Artificial Sequence: Synthetic polypeptide; note = VH of XENP020287

SEQ ID NO: 22951 - protein, 107 aa, synthetic construct; identical to SEQ ID NO: 22811
  source 1..107: note = Description of Artificial Sequence: Synthetic polypeptide; note = VL of XENP020287

SEQ ID NO: 22952 - protein, 231 aa, synthetic construct; identical to SEQ ID NO: 21532
  source 1..231: note = Description of Artificial Sequence: Synthetic polypeptide; note = Fc chain of XENP020287

SEQ ID NO: 22953 - protein, 5 aa, synthetic construct
  source 1..5: note = Description of Artificial Sequence: Synthetic peptide; note = XENP020287 vhCDR1
NYWMN

SEQ ID NO: 22954 - protein, 19 aa, synthetic construct
  source 1..19: note = Description of Artificial Sequence: Synthetic peptide; note = XENP020287 vhCDR2
EIRLYSNNYATHYAESVKG

SEQ ID NO: 22955 - protein, 11 aa, synthetic construct
  source 1..11: note = Description of Artificial Sequence: Synthetic peptide; note = XENP020287 vhCDR3
YYGNYGGYFDV

SEQ ID NO: 22956 - protein, 11 aa, synthetic construct
  source 1..11: note = Description of Artificial Sequence: Synthetic peptide; note = XENP020287 vlCDR1
RASQSVGNDVA

SEQ ID NO: 22957 - protein, 7 aa, synthetic construct
  source 1..7: note = Description of Artificial Sequence: Synthetic peptide; note = XENP020287 vlCDR2
YASHRYT

SEQ ID NO: 22958 - protein, 9 aa, synthetic construct
  source 1..9: note = Description of Artificial Sequence: Synthetic peptide; note = XENP020287 vlCDR3
QQDWSSPRT

SEQ ID NO: 22959 - protein, 214 aa, synthetic construct; identical to SEQ ID NO: 20990
  source 1..214: note = Description of Artificial Sequence: Synthetic polypeptide; note = XENP020287 4C11A_H0L0_anti-BTLA-1G6_H1.280_L1.224 Light Chain

SEQ ID NO: 22960 - protein, 107 aa, synthetic construct; identical to SEQ ID NO: 20991
  source 1..107: note = Description of Artificial Sequence: Synthetic polypeptide; note = VL of XENP020287

SEQ ID NO: 22961 - protein, 11 aa, synthetic construct
  source 1..11: note = Description of Artificial Sequence: Synthetic peptide; note = XENP020287 vlCDR1
RASQSISDYLH

SEQ ID NO: 22962 - protein, 7 aa, synthetic construct
  source 1..7: note = Description of Artificial Sequence: Synthetic peptide; note = XENP020287 vlCDR2
YASQSIS

SEQ ID NO: 22963 - protein, 9 aa, synthetic construct
  source 1..9: note = Description of Artificial Sequence: Synthetic peptide; note = XENP020287 vlCDR3
QNGHSFPPT

SEQ ID NO: 22964 - protein, 442 aa, synthetic construct; identical to SEQ ID NO: 22944
  source 1..442: note = Description of Artificial Sequence: Synthetic polypeptide; note = XENP020288 4C11B_H0L0_anti-BTLA-1G6_H1.280_L1.224 Fab-Fc Heavy Chain

SEQ ID NO: 22965 - protein, 113 aa, synthetic construct; identical to SEQ ID NO: 20986
  source 1..113: note = Description of Artificial Sequence: Synthetic polypeptide; note = VH of XENP020288

SEQ ID NO: 22966 - protein, 5 aa, synthetic construct
  source 1..5: note = Description of Artificial Sequence: Synthetic peptide; note = XENP020288 vhCDR1
SYYMD

SEQ ID NO: 22967 - protein, 17 aa, synthetic construct
  source 1..17: note = Description of Artificial Sequence: Synthetic peptide; note = XENP020288 vhCDR2
EINPSNGDTKFNEKFKS

SEQ ID NO: 22968 - protein, 4 aa, synthetic construct
  source 1..4: note = Description of Artificial Sequence: Synthetic peptide; note = XENP020288 vhCDR3
DYGY

SEQ ID NO: 22969 - protein, 480 aa, synthetic construct; identical to SEQ ID NO: 22809
  source 1..480: note = Description of Artificial Sequence: Synthetic polypeptide; note = XENP020288 4C11B_H0L0_anti-BTLA-1G6_H1.280_L1.224 scFv-Fc Heavy Chain

SEQ ID NO: 22970 - protein, 122 aa, synthetic construct; identical to SEQ ID NO: 10917
  source 1..122: note = Description of Artificial Sequence: Synthetic polypeptide; note = VH of XENP020288

SEQ ID NO: 22971 - protein, 107 aa, synthetic construct; identical to SEQ ID NO: 22811
  source 1..107: note = Description of Artificial Sequence: Synthetic polypeptide; note = VL of XENP020288

SEQ ID NO: 22972 - protein, 231 aa, synthetic construct; identical to SEQ ID NO: 21532
  source 1..231: note = Description of Artificial Sequence: Synthetic polypeptide; note = Fc chain of XENP020288

SEQ ID NO: 22973 - protein, 5 aa, synthetic construct
  source 1..5: note = Description of Artificial Sequence: Synthetic peptide; note = XENP020288 vhCDR1
NYWMN

SEQ ID NO: 22974 - protein, 19 aa, synthetic construct
  source 1..19: note = Description of Artificial Sequence: Synthetic peptide; note = XENP020288 vhCDR2
EIRLYSNNYATHYAESVKG

SEQ ID NO: 22975 - protein, 11 aa, synthetic construct
  source 1..11: note = Description of Artificial Sequence: Synthetic peptide; note = XENP020288 vhCDR3
YYGNYGGYFDV

SEQ ID NO: 22976 - protein, 11 aa, synthetic construct
  source 1..11: note = Description of Artificial Sequence: Synthetic peptide; note = XENP020288 vlCDR1
RASQSVGNDVA

SEQ ID NO: 22977 - protein, 7 aa, synthetic construct
  source 1..7: note = Description of Artificial Sequence: Synthetic peptide; note = XENP020288 vlCDR2
YASHRYT

SEQ ID NO: 22978 - protein, 9 aa, synthetic construct
  source 1..9: note = Description of Artificial Sequence: Synthetic peptide; note = XENP020288 vlCDR3
QQDWSSPRT

SEQ ID NO: 22979 - protein, 213 aa, synthetic construct; identical to SEQ ID NO: 20940
  source 1..213: note = Description of Artificial Sequence: Synthetic polypeptide; note = XENP020288 4C11B_H0L0_anti-BTLA-1G6_H1.280_L1.224 Light Chain

SEQ ID NO: 22980 - protein, 106 aa, synthetic construct; identical to SEQ ID NO: 20941
  source 1..106: note = Description of Artificial Sequence: Synthetic polypeptide; note = VL of XENP020288

SEQ ID NO: 22981 - protein, 11 aa, synthetic construct
  source 1..11: note = Description of Artificial Sequence: Synthetic peptide; note = XENP020288 vlCDR1
KASQSVSNDVA

SEQ ID NO: 22982 - protein, 7 aa, synthetic construct
  source 1..7: note = Description of Artificial Sequence: Synthetic peptide; note = XENP020288 vlCDR2
YASNRYT

SEQ ID NO: 22983 - protein, 8 aa, synthetic construct
  source 1..8: note = Description of Artificial Sequence: Synthetic peptide; note = XENP020288 vlCDR3
QQDYSSPT

SEQ ID NO: 22984 - protein, 449 aa, synthetic construct
  source 1..449: note = Description of Artificial Sequence: Synthetic polypeptide; note = XENP020289 7B10_H0L0_anti-BTLA-1G6_H1.280_L1.224 Fab-Fc Heavy Chain
QVTLKESGPGILQPSQTLSLTCSFSGFSLSTFGMGVNWIRQPSGKGLEWLAHIYWDDDKHYNPSLKSRLTISKDTSNNQVFLKITTVDTADTATYYCARYYRYDVPYIMDYWGQGTSVTVSSASTKGPSVFPLAPSSKSTSGGTAALGCLVKDYFPEPVTVSWNSGALTSGVHTFPAVLQSSGLYSLSSVVTVPSSSLGTQTYICNVNHKPSDTKVDKKVEPKSCDKTHTCPPCPAPPVAGPSVFLFPPKPKDTLMISRTPEVTCVVVDVKHEDPEVKFNWYVDGVEVHNAKTKPREEEYNSTYRVVSVLTVLHQDWLNGKEYKCKVSNKALPAPIEKTISKAKGQPREPQVYTLPPSREEMTKNQVSLTCDVSGFYPSDIAVEWESDGQPENNYKTTPPVLDSDGSFFLYSKLTVDKSRWEQGDVFSCSVMHEALHNHYTQKSLSLSP

SEQ ID NO: 22985 - protein, 122 aa, synthetic construct; identical to SEQ ID NO: 21006
  source 1..122: note = Description of Artificial Sequence: Synthetic polypeptide; note = VH of XENP020289

SEQ ID NO: 22986 - protein, 7 aa, synthetic construct
  source 1..7: note = Description of Artificial Sequence: Synthetic peptide; note = XENP020289 vhCDR1
TFGMGVN

SEQ ID NO: 22987 - protein, 16 aa, synthetic construct
  source 1..16: note = Description of Artificial Sequence: Synthetic peptide; note = XENP020289 vhCDR2
HIYWDDDKHYNPSLKS

SEQ ID NO: 22988 - protein, 12 aa, synthetic construct
  source 1..12: note = Description of Artificial Sequence: Synthetic peptide; note = XENP020289 vhCDR3
YYRYDVPYIMDY

SEQ ID NO: 22989 - protein, 480 aa, synthetic construct; identical to SEQ ID NO: 22809
  source 1..480: note = Description of Artificial Sequence: Synthetic polypeptide; note = XENP020289 7B10_H0L0_anti-BTLA-1G6_H1.280_L1.224 scFv-Fc Heavy Chain

SEQ ID NO: 22990 - protein, 122 aa, synthetic construct; identical to SEQ ID NO: 10917
  source 1..122: note = Description of Artificial Sequence: Synthetic polypeptide; note = VH of XENP020289

SEQ ID NO: 22991 - protein, 107 aa, synthetic construct; identical to SEQ ID NO: 22811
  source 1..107: note = Description of Artificial Sequence: Synthetic polypeptide; note = VL of XENP020289

SEQ ID NO: 22992 - protein, 231 aa, synthetic construct; identical to SEQ ID NO: 21532
  source 1..231: note = Description of Artificial Sequence: Synthetic polypeptide; note = Fc chain of XENP020289

SEQ ID NO: 22993 - protein, 5 aa, synthetic construct
  source 1..5: note = Description of Artificial Sequence: Synthetic peptide; note = XENP020289 vhCDR1
NYWMN

SEQ ID NO: 22994 - protein, 19 aa, synthetic construct
  source 1..19: note = Description of Artificial Sequence: Synthetic peptide; note = XENP020289 vhCDR2
EIRLYSNNYATHYAESVKG

SEQ ID NO: 22995 - protein, 11 aa, synthetic construct
  source 1..11: note = Description of Artificial Sequence: Synthetic peptide; note = XENP020289 vhCDR3
YYGNYGGYFDV

SEQ ID NO: 22996 - protein, 11 aa, synthetic construct
  source 1..11: note = Description of Artificial Sequence: Synthetic peptide; note = XENP020289 vlCDR1
RASQSVGNDVA

SEQ ID NO: 22997 - protein, 7 aa, synthetic construct
  source 1..7: note = Description of Artificial Sequence: Synthetic peptide; note = XENP020289 vlCDR2
YASHRYT

SEQ ID NO: 22998 - protein, 9 aa, synthetic construct
  source 1..9: note = Description of Artificial Sequence: Synthetic peptide; note = XENP020289 vlCDR3
QQDWSSPRT

SEQ ID NO: 22999 - protein, 219 aa, synthetic construct; identical to SEQ ID NO: 21010
  source 1..219: note = Description of Artificial Sequence: Synthetic polypeptide; note = XENP020289 7B10_H0L0_anti-BTLA-1G6_H1.280_L1.224 Light Chain

SEQ ID NO: 23000 - protein, 112 aa, synthetic construct; identical to SEQ ID NO: 21011
  source 1..112: note = Description of Artificial Sequence: Synthetic polypeptide; note = VL of XENP020289

SEQ ID NO: 23001 - protein, 17 aa, synthetic construct
  source 1..17: note = Description of Artificial Sequence: Synthetic peptide; note = XENP020289 vlCDR1
KSSQSLLYSSNQKNYLA

SEQ ID NO: 23002 - protein, 7 aa, synthetic construct
  source 1..7: note = Description of Artificial Sequence: Synthetic peptide; note = XENP020289 vlCDR2
WASTRES

SEQ ID NO: 23003 - protein, 8 aa, synthetic construct
  source 1..8: note = Description of Artificial Sequence: Synthetic peptide; note = XENP020289 vlCDR3
HQYYSYYT

SEQ ID NO: 23004 - protein, 449 aa, synthetic construct
  source 1..449: note = Description of Artificial Sequence: Synthetic polypeptide; note = XENP020290 8C1A_H0L0_anti-BTLA-1G6_H1.280_L1.224 Fab-Fc Heavy Chain
EVQLQESGPSLVKPSQTLSLTCSVTGDSVTSGYWNWIRKFPGNKLEYMGYINYSGSTYYNPSLKSRISITRDTSKNQYYLQLNSVTTEDTATYYCARSFIATVGYAMDYWGQGTSVTVSSASTKGPSVFPLAPSSKSTSGGTAALGCLVKDYFPEPVTVSWNSGALTSGVHTFPAVLQSSGLYSLSSVVTVPSSSLGTQTYICNVNHKPSDTKVDKKVEPKSCDKTHTCPPCPAPPVAGPSVFLFPPKPKDTLMISRTPEVTCVVVDVKHEDPEVKFNWYVDGVEVHNAKTKPREEEYNSTYRVVSVLTVLHQDWLNGKEYKCKVSNKALPAPIEKTISKAKGQPREPQVYTLPPSREEMTKNQVSLTCDVSGFYPSDIAVEWESDGQPENNYKTTPPVLDSDGSFFLYSKLTVDKSRWEQGDVFSCSVMHEALHNHYTQKSLSLSPGK

SEQ ID NO: 23005 - protein, 120 aa, synthetic construct; identical to SEQ ID NO: 21016
  source 1..120: note = Description of Artificial Sequence: Synthetic polypeptide; note = VH of XENP020290

SEQ ID NO: 23006 - protein, 5 aa, synthetic construct
  source 1..5: note = Description of Artificial Sequence: Synthetic peptide; note = XENP020290 vhCDR1
SGYWN

SEQ ID NO: 23007 - protein, 16 aa, synthetic construct
  source 1..16: note = Description of Artificial Sequence: Synthetic peptide; note = XENP020290 vhCDR2
YINYSGSTYYNPSLKS

SEQ ID NO: 23008 - protein, 12 aa, synthetic construct
  source 1..12: note = Description of Artificial Sequence: Synthetic peptide; note = XENP020290 vhCDR3
SFIATVGYAMDY

SEQ ID NO: 23009 - protein, 480 aa, synthetic construct; identical to SEQ ID NO: 22809
  source 1..480: note = Description of Artificial Sequence: Synthetic polypeptide; note = XENP020290 8C1A_H0L0_anti-BTLA-1G6_H1.280_L1.224 scFv-Fc Heavy Chain

SEQ ID NO: 23010 - protein, 122 aa, synthetic construct; identical to SEQ ID NO: 10917
  source 1..122: note = Description of Artificial Sequence: Synthetic polypeptide; note = VH of XENP020290

SEQ ID NO: 23011 - protein, 107 aa, synthetic construct; identical to SEQ ID NO: 22811
  source 1..107: note = Description of Artificial Sequence: Synthetic polypeptide; note = VL of XENP020290

SEQ ID NO: 23012 - protein, 231 aa, synthetic construct; identical to SEQ ID NO: 21532
  source 1..231: note = Description of Artificial Sequence: Synthetic polypeptide; note = Fc chain of XENP020290

SEQ ID NO: 23013 - protein, 5 aa, synthetic construct
  source 1..5: note = Description of Artificial Sequence: Synthetic peptide; note = XENP020290 vhCDR1
NYWMN

SEQ ID NO: 23014 - protein, 19 aa, synthetic construct
  source 1..19: note = Description of Artificial Sequence: Synthetic peptide; note = XENP020290 vhCDR2
EIRLYSNNYATHYAESVKG

SEQ ID NO: 23015 - protein, 11 aa, synthetic construct
  source 1..11: note = Description of Artificial Sequence: Synthetic peptide; note = XENP020290 vhCDR3
YYGNYGGYFDV

SEQ ID NO: 23016 - protein, 11 aa, synthetic construct
  source 1..11: note = Description of Artificial Sequence: Synthetic peptide; note = XENP020290 vlCDR1
RASQSVGNDVA

SEQ ID NO: 23017 - protein, 7 aa, synthetic construct
  source 1..7: note = Description of Artificial Sequence: Synthetic peptide; note = XENP020290 vlCDR2
YASHRYT

SEQ ID NO: 23018 - protein, 9 aa, synthetic construct
  source 1..9: note = Description of Artificial Sequence: Synthetic peptide; note = XENP020290 vlCDR3
QQDWSSPRT

SEQ ID NO: 23019 - protein, 214 aa, synthetic construct; identical to SEQ ID NO: 21020
  source 1..214: note = Description of Artificial Sequence: Synthetic polypeptide; note = XENP020290 8C1A_H0L0_anti-BTLA-1G6_H1.280_L1.224 Light Chain

SEQ ID NO: 23020 - protein, 107 aa, synthetic construct; identical to SEQ ID NO: 21021
  source 1..107: note = Description of Artificial Sequence: Synthetic polypeptide; note = VL of XENP020290

SEQ ID NO: 23021 - protein, 11 aa, synthetic construct
  source 1..11: note = Description of Artificial Sequence: Synthetic peptide; note = XENP020290 vlCDR1
KASQSVNNDVS

SEQ ID NO: 23022 - protein, 7 aa, synthetic construct
  source 1..7: note = Description of Artificial Sequence: Synthetic peptide; note = XENP020290 vlCDR2
SASNRYT

SEQ ID NO: 23023 - protein, 9 aa, synthetic construct
  source 1..9: note = Description of Artificial Sequence: Synthetic peptide; note = XENP020290 vlCDR3
QQDYSSPWT

SEQ ID NO: 23024 - protein, 441 aa, synthetic construct
  source 1..441: note = Description of Artificial Sequence: Synthetic polypeptide; note = XENP020291 8C1B_H0L0_anti-BTLA-1G6_H1.280_L1.224 Fab-Fc Heavy Chain
QVQLQQPGAELVRPGASVRLSCKASGYTFTSYWIHWVKQRPGQGLEWIGNIYSSDSYTNYNQKFKDKATLTVDKSSSTAYIHLSSPTSEDSAVYYCTRVDYWGQGTTLTVSSASTKGPSVFPLAPSSKSTSGGTAALGCLVKDYFPEPVTVSWNSGALTSGVHTFPAVLQSSGLYSLSSVVTVPSSSLGTQTYICNVNHKPSDTKVDKKVEPKSCDKTHTCPPCPAPPVAGPSVFLFPPKPKDTLMISRTPEVTCVVVDVKHEDPEVKFNWYVDGVEVHNAKTKPREEEYNSTYRVVSVLTVLHQDWLNGKEYKCKVSNKALPAPIEKTISKAKGQPREPQVYTLPPSREEMTKNQVSLTCDVSGFYPSDIAVEWESDGQPENNYKTTPPVLDSDGSFFLYSKLTVDKSRWEQGDVFSCSVMHEALHNHYTQKSLSLSPGK

SEQ ID NO: 23025 - protein, 112 aa, synthetic construct; identical to SEQ ID NO: 21026
  source 1..112: note = Description of Artificial Sequence: Synthetic polypeptide; note = VH of XENP020291

SEQ ID NO: 23026 - protein, 5 aa, synthetic construct
  source 1..5: note = Description of Artificial Sequence: Synthetic peptide; note = XENP020291 vhCDR1
SYWIH

SEQ ID NO: 23027 - protein, 17 aa, synthetic construct
  source 1..17: note = Description of Artificial Sequence: Synthetic peptide; note = XENP020291 vhCDR2
NIYSSDSYTNYNQKFKD

SEQ ID NO: 23028 - skipped

SEQ ID NO: 23029 - protein, 480 aa, synthetic construct; identical to SEQ ID NO: 22809
  source 1..480: note = Description of Artificial Sequence: Synthetic polypeptide; note = XENP020291 8C1B_H0L0_anti-BTLA-1G6_H1.280_L1.224 scFv-Fc Heavy  Chain

SEQ ID NO: 23030 - protein, 122 aa, synthetic construct; identical to SEQ ID NO: 10917
  source 1..122: note = Description of Artificial Sequence: Synthetic polypeptide; note = VH of XENP020291

SEQ ID NO: 23031 - protein, 107 aa, synthetic construct; identical to SEQ ID NO: 22811
  source 1..107: note = Description of Artificial Sequence: Synthetic polypeptide; note = VL of XENP020291

SEQ ID NO: 23032 - protein, 231 aa, synthetic construct; identical to SEQ ID NO: 21532
  source 1..231: note = Description of Artificial Sequence: Synthetic polypeptide; note = Fc chain of XENP020291

SEQ ID NO: 23033 - protein, 5 aa, synthetic construct
  source 1..5: note = Description of Artificial Sequence: Synthetic peptide; note = XENP020291 vhCDR1
NYWMN

SEQ ID NO: 23034 - protein, 19 aa, synthetic construct
  source 1..19: note = Description of Artificial Sequence: Synthetic peptide; note = XENP020291 vhCDR2
EIRLYSNNYATHYAESVKG

SEQ ID NO: 23035 - protein, 11 aa, synthetic construct
  source 1..11: note = Description of Artificial Sequence: Synthetic peptide; note = XENP020291 vhCDR3
YYGNYGGYFDV

SEQ ID NO: 23036 - protein, 11 aa, synthetic construct
  source 1..11: note = Description of Artificial Sequence: Synthetic peptide; note = XENP020291 vlCDR1
RASQSVGNDVA

SEQ ID NO: 23037 - protein, 7 aa, synthetic construct
  source 1..7: note = Description of Artificial Sequence: Synthetic peptide; note = XENP020291 vlCDR2
YASHRYT

SEQ ID NO: 23038 - protein, 9 aa, synthetic construct
  source 1..9: note = Description of Artificial Sequence: Synthetic peptide; note = XENP020291 vlCDR3
QQDWSSPRT

SEQ ID NO: 23039 - protein, 214 aa, synthetic construct; identical to SEQ ID NO: 21020
  source 1..214: note = Description of Artificial Sequence: Synthetic polypeptide; note = XENP020291 8C1B_H0L0_anti-BTLA-1G6_H1.280_L1.224 Light Chain

SEQ ID NO: 23040 - protein, 107 aa, synthetic construct; identical to SEQ ID NO: 21021
  source 1..107: note = Description of Artificial Sequence: Synthetic polypeptide; note = VL of XENP020291

SEQ ID NO: 23041 - protein, 11 aa, synthetic construct
  source 1..11: note = Description of Artificial Sequence: Synthetic peptide; note = XENP020291 vlCDR1
KASQSVNNDVS

SEQ ID NO: 23042 - protein, 7 aa, synthetic construct
  source 1..7: note = Description of Artificial Sequence: Synthetic peptide; note = XENP020291 vlCDR2
SASNRYT

SEQ ID NO: 23043 - protein, 9 aa, synthetic construct
  source 1..9: note = Description of Artificial Sequence: Synthetic peptide; note = XENP020291 vlCDR3
QQDYSSPWT

SEQ ID NO: 23044 - protein, 447 aa, synthetic construct
  source 1..447: note = Description of Artificial Sequence: Synthetic polypeptide; note = XENP020292 10B6_H0L0_anti-BTLA-1G6_H1.280_L1.224 Fab-Fc Heavy Chain
QVQLKESGPGLVAPSQSLSITCTVSGFSLTGYGVNWVRQPPGKGLEWLGMIWIDGSTDYNSALKSRLSISKDNSKSQVFLKMNSLQTDDTARYYCARDRPDGRAMDYWGQGTSVTVSSASTKGPSVFPLAPSSKSTSGGTAALGCLVKDYFPEPVTVSWNSGALTSGVHTFPAVLQSSGLYSLSSVVTVPSSSLGTQTYICNVNHKPSDTKVDKKVEPKSCDKTHTCPPCPAPPVAGPSVFLFPPKPKDTLMISRTPEVTCVVVDVKHEDPEVKFNWYVDGVEVHNAKTKPREEEYNSTYRVVSVLTVLHQDWLNGKEYKCKVSNKALPAPIEKTISKAKGQPREPQVYTLPPSREEMTKNQVSLTCDVSGFYPSDIAVEWESDGQPENNYKTTPPVLDSDGSFFLYSKLTVDKSRWEQGDVFSCSVMHEALHNHYTQKSLSLSPGK

SEQ ID NO: 23045 - protein, 118 aa, synthetic construct; identical to SEQ ID NO: 21036
  source 1..118: note = Description of Artificial Sequence: Synthetic polypeptide; note = VH of XENP020292

SEQ ID NO: 23046 - protein, 5 aa, synthetic construct
  source 1..5: note = Description of Artificial Sequence: Synthetic peptide; note = XENP020292 vhCDR1
GYGVN

SEQ ID NO: 23047 - protein, 16 aa, synthetic construct
  source 1..16: note = Description of Artificial Sequence: Synthetic peptide; note = XENP020292 vhCDR2
MIWIDGSTDYNSALKS

SEQ ID NO: 23048 - protein, 10 aa, synthetic construct
  source 1..10: note = Description of Artificial Sequence: Synthetic peptide; note = XENP020292 vhCDR3
DRPDGRAMDY

SEQ ID NO: 23049 - protein, 480 aa, synthetic construct; identical to SEQ ID NO: 22809
  source 1..480: note = Description of Artificial Sequence: Synthetic polypeptide; note = XENP020292 10B6_H0L0_anti-BTLA-1G6_H1.280_L1.224 scFv-Fc Heavy Chain

SEQ ID NO: 23050 - protein, 122 aa, synthetic construct; identical to SEQ ID NO: 10917
  source 1..122: note = Description of Artificial Sequence: Synthetic polypeptide; note = VH of XENP020292

SEQ ID NO: 23051 - protein, 107 aa, synthetic construct; identical to SEQ ID NO: 22811
  source 1..107: note = Description of Artificial Sequence: Synthetic polypeptide; note = VL of XENP020292

SEQ ID NO: 23052 - protein, 231 aa, synthetic construct; identical to SEQ ID NO: 21532
  source 1..231: note = Description of Artificial Sequence: Synthetic polypeptide; note = Fc chain of XENP020292

SEQ ID NO: 23053 - protein, 5 aa, synthetic construct
  source 1..5: note = Description of Artificial Sequence: Synthetic peptide; note = XENP020292 vhCDR1
NYWMN

SEQ ID NO: 23054 - protein, 19 aa, synthetic construct
  source 1..19: note = Description of Artificial Sequence: Synthetic peptide; note = XENP020292 vhCDR2
EIRLYSNNYATHYAESVKG

SEQ ID NO: 23055 - protein, 11 aa, synthetic construct
  source 1..11: note = Description of Artificial Sequence: Synthetic peptide; note = XENP020292 vhCDR3
YYGNYGGYFDV

SEQ ID NO: 23056 - protein, 11 aa, synthetic construct
  source 1..11: note = Description of Artificial Sequence: Synthetic peptide; note = XENP020292 vlCDR1
RASQSVGNDVA

SEQ ID NO: 23057 - protein, 7 aa, synthetic construct
  source 1..7: note = Description of Artificial Sequence: Synthetic peptide; note = XENP020292 vlCDR2
YASHRYT

SEQ ID NO: 23058 - protein, 9 aa, synthetic construct
  source 1..9: note = Description of Artificial Sequence: Synthetic peptide; note = XENP020292 vlCDR3
QQDWSSPRT

SEQ ID NO: 23059 - protein, 213 aa, synthetic construct; identical to SEQ ID NO: 21040
  source 1..213: note = Description of Artificial Sequence: Synthetic polypeptide; note = XENP020292 10B6_H0L0_anti-BTLA-1G6_H1.280_L1.224 Light Chain

SEQ ID NO: 23060 - protein, 106 aa, synthetic construct; identical to SEQ ID NO: 21041
  source 1..106: note = Description of Artificial Sequence: Synthetic polypeptide; note = VL of XENP020292

SEQ ID NO: 23061 - protein, 11 aa, synthetic construct
  source 1..11: note = Description of Artificial Sequence: Synthetic peptide; note = XENP020292 vlCDR1
KASQTVSNDVT

SEQ ID NO: 23062 - protein, 7 aa, synthetic construct
  source 1..7: note = Description of Artificial Sequence: Synthetic peptide; note = XENP020292 vlCDR2
YASNRYT

SEQ ID NO: 23063 - protein, 8 aa, synthetic construct
  source 1..8: note = Description of Artificial Sequence: Synthetic peptide; note = XENP020292 vlCDR3
QQDYSSPT

SEQ ID NO: 23064 - protein, 448 aa, synthetic construct; identical to SEQ ID NO: 22624
  source 1..448: note = Description of Artificial Sequence: Synthetic polypeptide; note = XENP017886 4C7_H0L0-nivolumab_H0.1_L0 Fab-Fc Heavy Chain

SEQ ID NO: 23065 - protein, 119 aa, synthetic construct; identical to SEQ ID NO: 20886
  source 1..119: note = Description of Artificial Sequence: Synthetic polypeptide; note = VH of XENP017886

SEQ ID NO: 23066 - protein, 5 aa, synthetic construct
  source 1..5: note = Description of Artificial Sequence: Synthetic peptide; note = XENP017886 vhCDR1
HYYWS

SEQ ID NO: 23067 - protein, 16 aa, synthetic construct
  source 1..16: note = Description of Artificial Sequence: Synthetic peptide; note = XENP017886 vhCDR2
YIYYSGSTKYNPSLKS

SEQ ID NO: 23068 - protein, 11 aa, synthetic construct
  source 1..11: note = Description of Artificial Sequence: Synthetic peptide; note = XENP017886 vhCDR3
EWPYYYYEMDV

SEQ ID NO: 23069 - protein, 471 aa, synthetic construct; identical to SEQ ID NO: 22749
  source 1..471: note = Description of Artificial Sequence: Synthetic polypeptide; note = XENP017886 4C7_H0L0-nivolumab_H0.1_L0 scFv-Fc Heavy Chain

SEQ ID NO: 23070 - protein, 113 aa, synthetic construct; identical to SEQ ID NO: 6210
  source 1..113: note = Description of Artificial Sequence: Synthetic polypeptide; note = VH of XENP017886

SEQ ID NO: 23071 - protein, 107 aa, synthetic construct [sequence omitted]

SEQ ID NO: 23072 - protein, 231 aa, synthetic construct; identical to SEQ ID NO: 21532
  source 1..231: note = Description of Artificial Sequence: Synthetic polypeptide; note = Fc chain of XENP017886

SEQ ID NO: 23073 - protein, 5 aa, synthetic construct
  source 1..5: note = Description of Artificial Sequence: Synthetic peptide; note = XENP017886 vhCDR1
NSGMH

SEQ ID NO: 23074 - protein, 17 aa, synthetic construct
  source 1..17: note = Description of Artificial Sequence: Synthetic peptide; note = XENP017886 vhCDR2
VIWYDGSKRYYADSVKG

SEQ ID NO: 23075 - protein, 4 aa, synthetic construct
  source 1..4: note = Description of Artificial Sequence: Synthetic peptide; note = XENP017886 vhCDR3
NDDY

SEQ ID NO: 23076 - protein, 11 aa, synthetic construct
  source 1..11: note = Description of Artificial Sequence: Synthetic peptide; note = XENP017886 vlCDR1
RASQSVSSYLA

SEQ ID NO: 23077 - protein, 7 aa, synthetic construct
  source 1..7: note = Description of Artificial Sequence: Synthetic peptide; note = XENP017886 vlCDR2
DASNRAT

SEQ ID NO: 23078 - protein, 9 aa, synthetic construct
  source 1..9: note = Description of Artificial Sequence: Synthetic peptide; note = XENP017886 vlCDR3
QQSSNWPRT

SEQ ID NO: 23079 - protein, 215 aa, synthetic construct; identical to SEQ ID NO: 20890
  source 1..215: note = Description of Artificial Sequence: Synthetic polypeptide; note = XENP017886 4C7_H0L0-nivolumab_H0.1_L0 Light Chain

SEQ ID NO: 23080 - protein, 108 aa, synthetic construct; identical to SEQ ID NO: 20891
  source 1..108: note = Description of Artificial Sequence: Synthetic polypeptide; note = VL of XENP017886

SEQ ID NO: 23081 - protein, 12 aa, synthetic construct
  source 1..12: note = Description of Artificial Sequence: Synthetic peptide; note = XENP017886 vlCDR1
RASQSVSSSYLA

SEQ ID NO: 23082 - protein, 7 aa, synthetic construct
  source 1..7: note = Description of Artificial Sequence: Synthetic peptide; note = XENP017886 vlCDR2
GASSRAT

SEQ ID NO: 23083 - protein, 9 aa, synthetic construct
  source 1..9: note = Description of Artificial Sequence: Synthetic peptide; note = XENP017886 vlCDR3
QQYGSSFRT

SEQ ID NO: 23084 - protein, 450 aa, synthetic construct; identical to SEQ ID NO: 22644
  source 1..450: note = Description of Artificial Sequence: Synthetic polypeptide; note = XENP017887 8D5_H0L0-nivolumab_H0.1_L0 Fab-Fc Heavy Chain

SEQ ID NO: 23085 - protein, 121 aa, synthetic construct; identical to SEQ ID NO: 20896
  source 1..121: note = Description of Artificial Sequence: Synthetic polypeptide; note = VH of XENP017887

SEQ ID NO: 23086 - protein, 5 aa, synthetic construct
  source 1..5: note = Description of Artificial Sequence: Synthetic peptide; note = XENP017887 vhCDR1
SYDMH

SEQ ID NO: 23087 - protein, 16 aa, synthetic construct
  source 1..16: note = Description of Artificial Sequence: Synthetic peptide; note = XENP017887 vhCDR2
VIGPAGDTYYPGSVKG

SEQ ID NO: 23088 - protein, 13 aa, synthetic construct
  source 1..13: note = Description of Artificial Sequence: Synthetic peptide; note = XENP017887 vhCDR3
EGMAAHNYYGMDV

SEQ ID NO: 23089 - protein, 471 aa, synthetic construct; identical to SEQ ID NO: 22749
  source 1..471: note = Description of Artificial Sequence: Synthetic polypeptide; note = XENP017887 8D5_H0L0-nivolumab_H0.1_L0 scFv-Fc Heavy Chain

SEQ ID NO: 23090 - protein, 113 aa, synthetic construct; identical to SEQ ID NO: 6210
  source 1..113: note = Description of Artificial Sequence: Synthetic polypeptide; note = VH of XENP017887

SEQ ID NO: 23091 - protein, 107 aa, synthetic construct [sequence omitted]

SEQ ID NO: 23092 - protein, 231 aa, synthetic construct; identical to SEQ ID NO: 21532
  source 1..231: note = Description of Artificial Sequence: Synthetic polypeptide; note = Fc chain of XENP017887

SEQ ID NO: 23093 - protein, 5 aa, synthetic construct
  source 1..5: note = Description of Artificial Sequence: Synthetic peptide; note = XENP017887 vhCDR1
NSGMH

SEQ ID NO: 23094 - protein, 17 aa, synthetic construct
  source 1..17: note = Description of Artificial Sequence: Synthetic peptide; note = XENP017887 vhCDR2
VIWYDGSKRYYADSVKG

SEQ ID NO: 23095 - protein, 4 aa, synthetic construct
  source 1..4: note = Description of Artificial Sequence: Synthetic peptide; note = XENP017887 vhCDR3
NDDY

SEQ ID NO: 23096 - protein, 11 aa, synthetic construct
  source 1..11: note = Description of Artificial Sequence: Synthetic peptide; note = XENP017887 vlCDR1
RASQSVSSYLA

SEQ ID NO: 23097 - protein, 7 aa, synthetic construct
  source 1..7: note = Description of Artificial Sequence: Synthetic peptide; note = XENP017887 vlCDR2
DASNRAT

SEQ ID NO: 23098 - protein, 9 aa, synthetic construct
  source 1..9: note = Description of Artificial Sequence: Synthetic peptide; note = XENP017887 vlCDR3
QQSSNWPRT

SEQ ID NO: 23099 - protein, 215 aa, synthetic construct; identical to SEQ ID NO: 20900
  source 1..215: note = Description of Artificial Sequence: Synthetic polypeptide; note = XENP017887 8D5_H0L0-nivolumab_H0.1_L0 Light Chain

SEQ ID NO: 23100 - protein, 108 aa, synthetic construct; identical to SEQ ID NO: 20901
  source 1..108: note = Description of Artificial Sequence: Synthetic polypeptide; note = VL of XENP017887

SEQ ID NO: 23101 - protein, 11 aa, synthetic construct
  source 1..11: note = Description of Artificial Sequence: Synthetic peptide; note = XENP017887 vlCDR1
RASQSVSSYLA

SEQ ID NO: 23102 - protein, 7 aa, synthetic construct
  source 1..7: note = Description of Artificial Sequence: Synthetic peptide; note = XENP017887 vlCDR2
DASNRAT

SEQ ID NO: 23103 - protein, 10 aa, synthetic construct
  source 1..10: note = Description of Artificial Sequence: Synthetic peptide; note = XENP017887 vlCDR3
QQRSNWPPIT

SEQ ID NO: 23104 - protein, 457 aa, synthetic construct; identical to SEQ ID NO: 22664
  source 1..457: note = Description of Artificial Sequence: Synthetic polypeptide; note = XENP017888 E8D9_H0L0-nivolumab_H0.1_L0 Fab-Fc Heavy Chain

SEQ ID NO: 23105 - protein, 128 aa, synthetic construct; identical to SEQ ID NO: 20906
  source 1..128: note = Description of Artificial Sequence: Synthetic polypeptide; note = VH of XENP017888

SEQ ID NO: 23106 - protein, 7 aa, synthetic construct
  source 1..7: note = Description of Artificial Sequence: Synthetic peptide; note = XENP017888 vhCDR1
TSGVGVG

SEQ ID NO: 23107 - protein, 16 aa, synthetic construct
  source 1..16: note = Description of Artificial Sequence: Synthetic peptide; note = XENP017888 vhCDR2
LIYWDDDKRYSPSLKS

SEQ ID NO: 23108 - protein, 18 aa, synthetic construct
  source 1..18: note = Description of Artificial Sequence: Synthetic peptide; note = XENP017888 vhCDR3
TSITEVRGAIIYYYGMDV

SEQ ID NO: 23109 - protein, 471 aa, synthetic construct; identical to SEQ ID NO: 22749
  source 1..471: note = Description of Artificial Sequence: Synthetic polypeptide; note = XENP017888 E8D9_H0L0-nivolumab_H0.1_L0 scFv-Fc Heavy Chain

SEQ ID NO: 23110 - protein, 113 aa, synthetic construct; identical to SEQ ID NO: 6210
  source 1..113: note = Description of Artificial Sequence: Synthetic polypeptide; note = VH of XENP017888

SEQ ID NO: 23111 - protein, 107 aa, synthetic construct [sequence omitted]

SEQ ID NO: 23112 - protein, 231 aa, synthetic construct; identical to SEQ ID NO: 21532
  source 1..231: note = Description of Artificial Sequence: Synthetic polypeptide; note = Fc chain of XENP017888

SEQ ID NO: 23113 - protein, 5 aa, synthetic construct
  source 1..5: note = Description of Artificial Sequence: Synthetic peptide; note = XENP017888 vhCDR1
NSGMH

SEQ ID NO: 23114 - protein, 17 aa, synthetic construct
  source 1..17: note = Description of Artificial Sequence: Synthetic peptide; note = XENP017888 vhCDR2
VIWYDGSKRYYADSVKG

SEQ ID NO: 23115 - protein, 4 aa, synthetic construct
  source 1..4: note = Description of Artificial Sequence: Synthetic peptide; note = XENP017888 vhCDR3
NDDY

SEQ ID NO: 23116 - protein, 11 aa, synthetic construct
  source 1..11: note = Description of Artificial Sequence: Synthetic peptide; note = XENP017888 vlCDR1
RASQSVSSYLA

SEQ ID NO: 23117 - protein, 7 aa, synthetic construct
  source 1..7: note = Description of Artificial Sequence: Synthetic peptide; note = XENP017888 vlCDR2
DASNRAT

SEQ ID NO: 23118 - protein, 9 aa, synthetic construct
  source 1..9: note = Description of Artificial Sequence: Synthetic peptide; note = XENP017888 vlCDR3
QQSSNWPRT

SEQ ID NO: 23119 - protein, 214 aa, synthetic construct; identical to SEQ ID NO: 20910
  source 1..214: note = Description of Artificial Sequence: Synthetic polypeptide; note = XENP017888 E8D9_H0L0-nivolumab_H0.1_L0 Light Chain

SEQ ID NO: 23120 - protein, 107 aa, synthetic construct; identical to SEQ ID NO: 20911
  source 1..107: note = Description of Artificial Sequence: Synthetic polypeptide; note = VL of XENP017888

SEQ ID NO: 23121 - protein, 12 aa, synthetic construct
  source 1..12: note = Description of Artificial Sequence: Synthetic peptide; note = XENP017888 vlCDR1
RASQSVSSSYLA

SEQ ID NO: 23122 - protein, 7 aa, synthetic construct
  source 1..7: note = Description of Artificial Sequence: Synthetic peptide; note = XENP017888 vlCDR2
GASSRAT

SEQ ID NO: 23123 - protein, 8 aa, synthetic construct
  source 1..8: note = Description of Artificial Sequence: Synthetic peptide; note = XENP017888 vlCDR3
QQYGHSLT

SEQ ID NO: 23124 - protein, 448 aa, synthetic construct; identical to SEQ ID NO: 22624
  source 1..448: note = Description of Artificial Sequence: Synthetic polypeptide; note = XENP017889 4C7_H0L0-one-arm Fab-Fc Heavy Chain

SEQ ID NO: 23125 - protein, 119 aa, synthetic construct; identical to SEQ ID NO: 20886
  source 1..119: note = Description of Artificial Sequence: Synthetic polypeptide; note = VH of XENP017889

SEQ ID NO: 23126 - protein, 5 aa, synthetic construct
  source 1..5: note = Description of Artificial Sequence: Synthetic peptide; note = XENP017889 vhCDR1
HYYWS

SEQ ID NO: 23127 - protein, 16 aa, synthetic construct
  source 1..16: note = Description of Artificial Sequence: Synthetic peptide; note = XENP017889 vhCDR2
YIYYSGSTKYNPSLKS

SEQ ID NO: 23128 - protein, 11 aa, synthetic construct
  source 1..11: note = Description of Artificial Sequence: Synthetic peptide; note = XENP017889 vhCDR3
EWPYYYYEMDV

SEQ ID NO: 23129 - protein, 231 aa, synthetic construct; identical to SEQ ID NO: 21532
  source 1..231: note = Description of Artificial Sequence: Synthetic polypeptide; note = XENP017889 4C7_H0L0-one-arm Fab-Fc only Heavy Chain

SEQ ID NO: 23130 - protein, 215 aa, synthetic construct; identical to SEQ ID NO: 20890
  source 1..215: note = Description of Artificial Sequence: Synthetic polypeptide; note = XENP017889 4C7_H0L0-one-arm Light Chain

SEQ ID NO: 23131 - protein, 108 aa, synthetic construct; identical to SEQ ID NO: 20891
  source 1..108: note = Description of Artificial Sequence: Synthetic polypeptide; note = VL of XENP017889

SEQ ID NO: 23132 - protein, 12 aa, synthetic construct
  source 1..12: note = Description of Artificial Sequence: Synthetic peptide; note = XENP017889 vlCDR1
RASQSVSSSYLA

SEQ ID NO: 23133 - protein, 7 aa, synthetic construct
  source 1..7: note = Description of Artificial Sequence: Synthetic peptide; note = XENP017889 vlCDR2
GASSRAT

SEQ ID NO: 23134 - protein, 9 aa, synthetic construct
  source 1..9: note = Description of Artificial Sequence: Synthetic peptide; note = XENP017889 vlCDR3
QQYGSSFRT

SEQ ID NO: 23135 - protein, 450 aa, synthetic construct; identical to SEQ ID NO: 22644
  source 1..450: note = Description of Artificial Sequence: Synthetic polypeptide; note = XENP017890 8D5_H0L0-one-arm Fab-Fc Heavy Chain

SEQ ID NO: 23136 - protein, 121 aa, synthetic construct; identical to SEQ ID NO: 20896
  source 1..121: note = Description of Artificial Sequence: Synthetic polypeptide; note = VH of XENP017890

SEQ ID NO: 23137 - protein, 5 aa, synthetic construct
  source 1..5: note = Description of Artificial Sequence: Synthetic peptide; note = XENP017890 vhCDR1
SYDMH

SEQ ID NO: 23138 - protein, 16 aa, synthetic construct
  source 1..16: note = Description of Artificial Sequence: Synthetic peptide; note = XENP017890 vhCDR2
VIGPAGDTYYPGSVKG

SEQ ID NO: 23139 - protein, 13 aa, synthetic construct
  source 1..13: note = Description of Artificial Sequence: Synthetic peptide; note = XENP017890 vhCDR3
EGMAAHNYYGMDV

SEQ ID NO: 23140 - protein, 231 aa, synthetic construct; identical to SEQ ID NO: 21532
  source 1..231: note = Description of Artificial Sequence: Synthetic polypeptide; note = XENP017890 8D5_H0L0-one-arm Fab-Fc only Heavy Chain

SEQ ID NO: 23141 - protein, 215 aa, synthetic construct; identical to SEQ ID NO: 20900
  source 1..215: note = Description of Artificial Sequence: Synthetic polypeptide; note = XENP017890 8D5_H0L0-one-arm Light Chain

SEQ ID NO: 23142 - protein, 108 aa, synthetic construct; identical to SEQ ID NO: 20901
  source 1..108: note = Description of Artificial Sequence: Synthetic polypeptide; note = VL of XENP017890

SEQ ID NO: 23143 - protein, 11 aa, synthetic construct
  source 1..11: note = Description of Artificial Sequence: Synthetic peptide; note = XENP017890 vlCDR1
RASQSVSSYLA

SEQ ID NO: 23144 - protein, 7 aa, synthetic construct
  source 1..7: note = Description of Artificial Sequence: Synthetic peptide; note = XENP017890 vlCDR2
DASNRAT

SEQ ID NO: 23145 - protein, 10 aa, synthetic construct
  source 1..10: note = Description of Artificial Sequence: Synthetic peptide; note = XENP017890 vlCDR3
QQRSNWPPIT

SEQ ID NO: 23146 - protein, 457 aa, synthetic construct; identical to SEQ ID NO: 22664
  source 1..457: note = Description of Artificial Sequence: Synthetic polypeptide; note = XENP017891 E8D9_H0L0-one-arm Fab-Fc Heavy Chain

SEQ ID NO: 23147 - protein, 128 aa, synthetic construct; identical to SEQ ID NO: 20906
  source 1..128: note = Description of Artificial Sequence: Synthetic polypeptide; note = VH of XENP017891

SEQ ID NO: 23148 - protein, 7 aa, synthetic construct
  source 1..7: note = Description of Artificial Sequence: Synthetic peptide; note = XENP017891 vhCDR1
TSGVGVG

SEQ ID NO: 23149 - protein, 16 aa, synthetic construct
  source 1..16: note = Description of Artificial Sequence: Synthetic peptide; note = XENP017891 vhCDR2
LIYWDDDKRYSPSLKS

SEQ ID NO: 23150 - protein, 18 aa, synthetic construct
  source 1..18: note = Description of Artificial Sequence: Synthetic peptide; note = XENP017891 vhCDR3
TSITEVRGAIIYYYGMDV

SEQ ID NO: 23151 - protein, 231 aa, synthetic construct; identical to SEQ ID NO: 21532
  source 1..231: note = Description of Artificial Sequence: Synthetic polypeptide; note = XENP017891 E8D9_H0L0-one-arm Fab-Fc only Heavy Chain

SEQ ID NO: 23152 - protein, 214 aa, synthetic construct; identical to SEQ ID NO: 20910
  source 1..214: note = Description of Artificial Sequence: Synthetic polypeptide; note = XENP017891 E8D9-one-arm_H0L0 Light Chain

SEQ ID NO: 23153 - protein, 107 aa, synthetic construct; identical to SEQ ID NO: 20911
  source 1..107: note = Description of Artificial Sequence: Synthetic polypeptide; note = VL of XENP017891

SEQ ID NO: 23154 - protein, 12 aa, synthetic construct
  source 1..12: note = Description of Artificial Sequence: Synthetic peptide; note = XENP017891 vlCDR1
RASQSVSSSYLA

SEQ ID NO: 23155 - protein, 7 aa, synthetic construct
  source 1..7: note = Description of Artificial Sequence: Synthetic peptide; note = XENP017891 vlCDR2
GASSRAT

SEQ ID NO: 23156 - protein, 8 aa, synthetic construct
  source 1..8: note = Description of Artificial Sequence: Synthetic peptide; note = XENP017891 vlCDR3
QQYGHSLT

SEQ ID NO: 23157 - protein, 447 aa, synthetic construct; identical to SEQ ID NO: 22844
  source 1..447: note = Description of Artificial Sequence: Synthetic polypeptide; note = XENP020282 9C6_H0L0-1G6_H1.280_L1.224 Fab-Fc Heavy Chain

SEQ ID NO: 23158 - protein, 118 aa, synthetic construct; identical to SEQ ID NO: 20936
  source 1..118: note = Description of Artificial Sequence: Synthetic polypeptide; note = VH of XENP020282

SEQ ID NO: 23159 - protein, 5 aa, synthetic construct
  source 1..5: note = Description of Artificial Sequence: Synthetic peptide; note = XENP020282 vhCDR1
GYGVN

SEQ ID NO: 23160 - protein, 16 aa, synthetic construct
  source 1..16: note = Description of Artificial Sequence: Synthetic peptide; note = XENP020282 vhCDR2
MIWIDGSTDYNSALKS

SEQ ID NO: 23161 - protein, 10 aa, synthetic construct
  source 1..10: note = Description of Artificial Sequence: Synthetic peptide; note = XENP020282 vhCDR3
DRPDGRAMDY

SEQ ID NO: 23162 - protein, 480 aa, synthetic construct; identical to SEQ ID NO: 22809
  source 1..480: note = Description of Artificial Sequence: Synthetic polypeptide; note = XENP020282 9C6_H0L0-1G6_H1.280_L1.224 scFv-Fc Heavy Chain

SEQ ID NO: 23163 - protein, 122 aa, synthetic construct; identical to SEQ ID NO: 10917
  source 1..122: note = Description of Artificial Sequence: Synthetic polypeptide; note = VH of XENP020282

SEQ ID NO: 23164 - protein, 107 aa, synthetic construct; identical to SEQ ID NO: 22811
  source 1..107: note = Description of Artificial Sequence: Synthetic polypeptide; note = VL of XENP020282

SEQ ID NO: 23165 - protein, 231 aa, synthetic construct; identical to SEQ ID NO: 21532
  source 1..231: note = Description of Artificial Sequence: Synthetic polypeptide; note = Fc chain of XENP020282

SEQ ID NO: 23166 - protein, 5 aa, synthetic construct
  source 1..5: note = Description of Artificial Sequence: Synthetic peptide; note = XENP020282 vhCDR1
NYWMN

SEQ ID NO: 23167 - protein, 19 aa, synthetic construct
  source 1..19: note = Description of Artificial Sequence: Synthetic peptide; note = XENP020282 vhCDR2
EIRLYSNNYATHYAESVKG

SEQ ID NO: 23168 - protein, 11 aa, synthetic construct
  source 1..11: note = Description of Artificial Sequence: Synthetic peptide; note = XENP020282 vhCDR3
YYGNYGGYFDV

SEQ ID NO: 23169 - protein, 11 aa, synthetic construct
  source 1..11: note = Description of Artificial Sequence: Synthetic peptide; note = XENP020282 vlCDR1
RASQSVGNDVA

SEQ ID NO: 23170 - protein, 7 aa, synthetic construct
  source 1..7: note = Description of Artificial Sequence: Synthetic peptide; note = XENP020282 vlCDR2
YASHRYT

SEQ ID NO: 23171 - protein, 9 aa, synthetic construct
  source 1..9: note = Description of Artificial Sequence: Synthetic peptide; note = XENP020282 vlCDR3
QQDWSSPRT

SEQ ID NO: 23172 - protein, 213 aa, synthetic construct; identical to SEQ ID NO: 20940
  source 1..213: note = Description of Artificial Sequence: Synthetic polypeptide; note = XENP020282 9C6_H0L0-1G6_H1.280_L1.224 Light Chain

SEQ ID NO: 23173 - protein, 106 aa, synthetic construct; identical to SEQ ID NO: 20941
  source 1..106: note = Description of Artificial Sequence: Synthetic polypeptide; note = VL of XENP020282

SEQ ID NO: 23174 - protein, 11 aa, synthetic construct
  source 1..11: note = Description of Artificial Sequence: Synthetic peptide; note = XENP020282 vlCDR1
KASQSVSNDVA

SEQ ID NO: 23175 - protein, 7 aa, synthetic construct
  source 1..7: note = Description of Artificial Sequence: Synthetic peptide; note = XENP020282 vlCDR2
YASNRYT

SEQ ID NO: 23176 - protein, 8 aa, synthetic construct
  source 1..8: note = Description of Artificial Sequence: Synthetic peptide; note = XENP020282 vlCDR3
QQDYSSPT

SEQ ID NO: 23177 - protein, 447 aa, synthetic construct
  source 1..447: note = Description of Artificial Sequence: Synthetic polypeptide; note = XENP020808 9C6_H1L1-1G6_H1.280_L1.224 Fab-Fc Heavy Chain
QVQLVQSGAEVKKPGASVKVSCKVSGFSLTGYGVNWVRQAPGQGLEWMGMIWIDGSTDYNSKFQGRVTMTKDNSKSTVYMELSSLRSEDTAVYYCARDRPDGRAMDYWGQGTMVTVSSASTKGPSVFPLAPSSKSTSGGTAALGCLVKDYFPEPVTVSWNSGALTSGVHTFPAVLQSSGLYSLSSVVTVPSSSLGTQTYICNVNHKPSDTKVDKKVEPKSCDKTHTCPPCPAPPVAGPSVFLFPPKPKDTLMISRTPEVTCVVVDVKHEDPEVKFNWYVDGVEVHNAKTKPREEEYNSTYRVVSVLTVLHQDWLNGKEYKCKVSNKALPAPIEKTISKAKGQPREPQVYTLPPSREEMTKNQVSLTCDVSGFYPSDIAVEWESDGQPENNYKTTPPVLDSDGSFFLYSKLTVDKSRWEQGDVFSCSVMHEALHNHYTQKSLSLSPGK

SEQ ID NO: 23178 - protein, 118 aa, synthetic construct; identical to SEQ ID NO: 21066
  source 1..118: note = Description of Artificial Sequence: Synthetic polypeptide; note = VH of XENP020808

SEQ ID NO: 23179 - protein, 5 aa, synthetic construct
  source 1..5: note = Description of Artificial Sequence: Synthetic peptide; note = XENP020808 vhCDR1
GYGVN

SEQ ID NO: 23180 - protein, 16 aa, synthetic construct
  source 1..16: note = Description of Artificial Sequence: Synthetic peptide; note = XENP020808 vhCDR2
MIWIDGSTDYNSKFQG

SEQ ID NO: 23181 - protein, 10 aa, synthetic construct
  source 1..10: note = Description of Artificial Sequence: Synthetic peptide; note = XENP020808 vhCDR3
DRPDGRAMDY

SEQ ID NO: 23182 - protein, 480 aa, synthetic construct; identical to SEQ ID NO: 22809
  source 1..480: note = Description of Artificial Sequence: Synthetic polypeptide; note = XENP020808 9C6_H1L1-1G6_H1.280_L1.224 scFv-Fc Heavy Chain

SEQ ID NO: 23183 - protein, 122 aa, synthetic construct; identical to SEQ ID NO: 10917
  source 1..122: note = Description of Artificial Sequence: Synthetic polypeptide; note = VH of XENP020808

SEQ ID NO: 23184 - protein, 107 aa, synthetic construct; identical to SEQ ID NO: 22811
  source 1..107: note = Description of Artificial Sequence: Synthetic polypeptide; note = VL of XENP020808

SEQ ID NO: 23185 - protein, 231 aa, synthetic construct; identical to SEQ ID NO: 21532
  source 1..231: note = Description of Artificial Sequence: Synthetic polypeptide; note = Fc chain of XENP020808

SEQ ID NO: 23186 - protein, 5 aa, synthetic construct
  source 1..5: note = Description of Artificial Sequence: Synthetic peptide; note = XENP020808 vhCDR1
NYWMN

SEQ ID NO: 23187 - protein, 19 aa, synthetic construct
  source 1..19: note = Description of Artificial Sequence: Synthetic peptide; note = XENP020808 vhCDR2
EIRLYSNNYATHYAESVKG

SEQ ID NO: 23188 - protein, 11 aa, synthetic construct
  source 1..11: note = Description of Artificial Sequence: Synthetic peptide; note = XENP020808 vhCDR3
YYGNYGGYFDV

SEQ ID NO: 23189 - protein, 11 aa, synthetic construct
  source 1..11: note = Description of Artificial Sequence: Synthetic peptide; note = XENP020808 vlCDR1
RASQSVGNDVA

SEQ ID NO: 23190 - protein, 7 aa, synthetic construct
  source 1..7: note = Description of Artificial Sequence: Synthetic peptide; note = XENP020808 vlCDR2
YASHRYT

SEQ ID NO: 23191 - protein, 9 aa, synthetic construct
  source 1..9: note = Description of Artificial Sequence: Synthetic peptide; note = XENP020808 vlCDR3
QQDWSSPRT

SEQ ID NO: 23192 - protein, 213 aa, synthetic construct; identical to SEQ ID NO: 21050
  source 1..213: note = Description of Artificial Sequence: Synthetic polypeptide; note = XENP020808 9C6_H1L1-1G6_H1.280_L1.224 Light Chain

SEQ ID NO: 23193 - protein, 11 aa, synthetic construct
  source 1..11: note = Description of Artificial Sequence: Synthetic peptide; note = XENP020808 vlCDR1
KASQSVSNDVA

SEQ ID NO: 23194 - protein, 7 aa, synthetic construct
  source 1..7: note = Description of Artificial Sequence: Synthetic peptide; note = XENP020808 vlCDR2
YASNRYT

SEQ ID NO: 23195 - protein, 8 aa, synthetic construct
  source 1..8: note = Description of Artificial Sequence: Synthetic peptide; note = XENP020808 vlCDR3
QQDYSSPT

SEQ ID NO: 23196 - protein, 447 aa, synthetic construct; identical to SEQ ID NO: 23177
  source 1..447: note = Description of Artificial Sequence: Synthetic polypeptide; note = XENP020809 9C6_H1L2-1G6_H1.280_L1.224 Fab-Fc Heavy Chain

SEQ ID NO: 23197 - protein, 118 aa, synthetic construct; identical to SEQ ID NO: 21066
  source 1..118: note = Description of Artificial Sequence: Synthetic polypeptide; note = VH of XENP020809

SEQ ID NO: 23198 - protein, 5 aa, synthetic construct
  source 1..5: note = Description of Artificial Sequence: Synthetic peptide; note = XENP020809 vhCDR1
GYGVN

SEQ ID NO: 23199 - protein, 16 aa, synthetic construct
  source 1..16: note = Description of Artificial Sequence: Synthetic peptide; note = XENP020809 vhCDR2
MIWIDGSTDYNSKFQG

SEQ ID NO: 23200 - protein, 10 aa, synthetic construct
  source 1..10: note = Description of Artificial Sequence: Synthetic peptide; note = XENP020809 vhCDR3
DRPDGRAMDY

SEQ ID NO: 23201 - protein, 480 aa, synthetic construct; identical to SEQ ID NO: 22809
  source 1..480: note = Description of Artificial Sequence: Synthetic polypeptide; note = XENP020809 9C6_H1L2-1G6_H1.280_L1.224 scFv-Fc Heavy Chain

SEQ ID NO: 23202 - protein, 122 aa, synthetic construct; identical to SEQ ID NO: 10917
  source 1..122: note = Description of Artificial Sequence: Synthetic polypeptide; note = VH of XENP020809

SEQ ID NO: 23203 - protein, 107 aa, synthetic construct; identical to SEQ ID NO: 22811
  source 1..107: note = Description of Artificial Sequence: Synthetic polypeptide; note = VL of XENP020809

SEQ ID NO: 23204 - protein, 231 aa, synthetic construct; identical to SEQ ID NO: 21532
  source 1..231: note = Description of Artificial Sequence: Synthetic polypeptide; note = Fc chain of XENP020809

SEQ ID NO: 23205 - protein, 5 aa, synthetic construct
  source 1..5: note = Description of Artificial Sequence: Synthetic peptide; note = XENP020809 vhCDR1
NYWMN

SEQ ID NO: 23206 - protein, 19 aa, synthetic construct
  source 1..19: note = Description of Artificial Sequence: Synthetic peptide; note = XENP020809 vhCDR2
EIRLYSNNYATHYAESVKG

SEQ ID NO: 23207 - protein, 11 aa, synthetic construct
  source 1..11: note = Description of Artificial Sequence: Synthetic peptide; note = XENP020809 vhCDR3
YYGNYGGYFDV

SEQ ID NO: 23208 - protein, 11 aa, synthetic construct
  source 1..11: note = Description of Artificial Sequence: Synthetic peptide; note = XENP020809 vlCDR1
RASQSVGNDVA

SEQ ID NO: 23209 - protein, 7 aa, synthetic construct
  source 1..7: note = Description of Artificial Sequence: Synthetic peptide; note = XENP020809 vlCDR2
YASHRYT

SEQ ID NO: 23210 - protein, 9 aa, synthetic construct
  source 1..9: note = Description of Artificial Sequence: Synthetic peptide; note = XENP020809 vlCDR3
QQDWSSPRT

SEQ ID NO: 23211 - protein, 213 aa, synthetic construct; identical to SEQ ID NO: 21060
  source 1..213: note = Description of Artificial Sequence: Synthetic polypeptide; note = XENP020809 9C6_H1L2-1G6_H1.280_L1.224 Light Chain

SEQ ID NO: 23212 - protein, 106 aa, synthetic construct; identical to SEQ ID NO: 21061
  source 1..106: note = Description of Artificial Sequence: Synthetic polypeptide; note = VL of XENP020809

SEQ ID NO: 23213 - protein, 11 aa, synthetic construct
  source 1..11: note = Description of Artificial Sequence: Synthetic peptide; note = XENP020809 vlCDR1
RASQSVSNDVA

SEQ ID NO: 23214 - protein, 7 aa, synthetic construct
  source 1..7: note = Description of Artificial Sequence: Synthetic peptide; note = XENP020809 vlCDR2
YASNRYT

SEQ ID NO: 23215 - protein, 8 aa, synthetic construct
  source 1..8: note = Description of Artificial Sequence: Synthetic peptide; note = XENP020809 vlCDR3
QQDYSSPT

SEQ ID NO: 23216 - protein, 447 aa, synthetic construct; identical to SEQ ID NO: 22844
  source 1..447: note = Description of Artificial Sequence: Synthetic polypeptide; note = XENP020895 9C6_H0L0-1G6_L1.194_H1.279 Fab-Fc Heavy Chain

SEQ ID NO: 23217 - protein, 118 aa, synthetic construct; identical to SEQ ID NO: 20936
  source 1..118: note = Description of Artificial Sequence: Synthetic polypeptide; note = VH of XENP020895

SEQ ID NO: 23218 - protein, 5 aa, synthetic construct
  source 1..5: note = Description of Artificial Sequence: Synthetic peptide; note = XENP020895 vhCDR1
GYGVN

SEQ ID NO: 23219 - protein, 16 aa, synthetic construct
  source 1..16: note = Description of Artificial Sequence: Synthetic peptide; note = XENP020895 vhCDR2
MIWIDGSTDYNSALKS

SEQ ID NO: 23220 - protein, 10 aa, synthetic construct
  source 1..10: note = Description of Artificial Sequence: Synthetic peptide; note = XENP020895 vhCDR3
DRPDGRAMDY

SEQ ID NO: 23221 - protein, 480 aa, synthetic construct
  source 1..480: note = Description of Artificial Sequence: Synthetic polypeptide; note = XENP020895 9C6_H0L0-1G6_L1.194_H1.279 scFv-Fc Heavy Chain
EIVLTQSPATLSASPGERVTLTCRASQSVGNDVAWYQQKPGQAPRLLINYASHRYTGVPDRFTGSGYGTEFTLTISSVQSEDFGVYYCQQDFSSPRTFGGGTKVEIKGKPGSGKPGSGKPGSGKPGSEVQLVESGGGLVKPGGSLRLSCVASGFTFSNYWMNWVRQAPGKGLEWVAEIRLYSNNYATHYAESVKGRFTISRDDSKSTLYLQMNNLKTEDTGVYYCTRYYGNYGGYFDVWGRGTLVTVSSEPKSSDKTHTCPPCPAPPVAGPSVFLFPPKPKDTLMISRTPEVTCVVVDVKHEDPEVKFNWYVDGVEVHNAKTKPREEQYNSTYRVVSVLTVLHQDWLNGKEYKCKVSNKALPAPIEKTISKAKGQPREPQVYTLPPSREQMTKNQVKLTCLVKGFYPSDIAVEWESNGQPENNYKTTPPVLDSDGSFFLYSKLTVDKSRWQQGNVFSCSVMHEALHNHYTQKSLSLSPGK

SEQ ID NO: 23222 - protein, 107 aa, synthetic construct; identical to SEQ ID NO: 10999
  source 1..107: note = Description of Artificial Sequence: Synthetic polypeptide; note = VH of XENP020895

SEQ ID NO: 23223 - protein, 122 aa, synthetic construct; identical to SEQ ID NO: 10908
  source 1..122: note = Description of Artificial Sequence: Synthetic polypeptide; note = VL of XENP020895

SEQ ID NO: 23224 - protein, 231 aa, synthetic construct; identical to SEQ ID NO: 21532
  source 1..231: note = Description of Artificial Sequence: Synthetic polypeptide; note = Fc chain of XENP020895

SEQ ID NO: 23225 - protein, 11 aa, synthetic construct
  source 1..11: note = Description of Artificial Sequence: Synthetic peptide; note = XENP020895 vhCDR1
RASQSVGNDVA

SEQ ID NO: 23226 - protein, 7 aa, synthetic construct
  source 1..7: note = Description of Artificial Sequence: Synthetic peptide; note = XENP020895 vhCDR2
YASHRYT

SEQ ID NO: 23227 - protein, 9 aa, synthetic construct
  source 1..9: note = Description of Artificial Sequence: Synthetic peptide; note = XENP020895 vhCDR3
QQDFSSPRT

SEQ ID NO: 23228 - protein, 5 aa, synthetic construct
  source 1..5: note = Description of Artificial Sequence: Synthetic peptide; note = XENP020895 vlCDR1
NYWMN

SEQ ID NO: 23229 - protein, 19 aa, synthetic construct
  source 1..19: note = Description of Artificial Sequence: Synthetic peptide; note = XENP020895 vlCDR2
EIRLYSNNYATHYAESVKG

SEQ ID NO: 23230 - protein, 11 aa, synthetic construct
  source 1..11: note = Description of Artificial Sequence: Synthetic peptide; note = XENP020895 vlCDR3
YYGNYGGYFDV

SEQ ID NO: 23231 - protein, 213 aa, synthetic construct; identical to SEQ ID NO: 20940
  source 1..213: note = Description of Artificial Sequence: Synthetic polypeptide; note = XENP020895 9C6_H0L0-1G6_L1.194_H1.279 Light Chain

SEQ ID NO: 23232 - protein, 106 aa, synthetic construct; identical to SEQ ID NO: 20941
  source 1..106: note = Description of Artificial Sequence: Synthetic polypeptide; note = VL of XENP020895

SEQ ID NO: 23233 - protein, 11 aa, synthetic construct
  source 1..11: note = Description of Artificial Sequence: Synthetic peptide; note = XENP020895 vlCDR1
KASQSVSNDVA

SEQ ID NO: 23234 - protein, 7 aa, synthetic construct
  source 1..7: note = Description of Artificial Sequence: Synthetic peptide; note = XENP020895 vlCDR2
YASNRYT

SEQ ID NO: 23235 - protein, 8 aa, synthetic construct
  source 1..8: note = Description of Artificial Sequence: Synthetic peptide; note = XENP020895 vlCDR3
QQDYSSPT

SEQ ID NO: 23236 - protein, 447 aa, synthetic construct
  source 1..447: note = Description of Artificial Sequence: Synthetic polypeptide; note = XENP021218 9C6_H1.1_L1-1G6_H1.280_L1.224 Fab-Fc Heavy Chain
QVQLKESGAEVKKPGASVKVSCKVSGFSLTGYGVNWVRQAPGQGLEWMGMIWIDGSTDYNSKFQGRVTMTKDNSKSTVYMELSSLRSEDTAVYYCARDRPDGRAMDYWGQGTMVTVSSASTKGPSVFPLAPSSKSTSGGTAALGCLVKDYFPEPVTVSWNSGALTSGVHTFPAVLQSSGLYSLSSVVTVPSSSLGTQTYICNVNHKPSDTKVDKKVEPKSCDKTHTCPPCPAPPVAGPSVFLFPPKPKDTLMISRTPEVTCVVVDVKHEDPEVKFNWYVDGVEVHNAKTKPREEEYNSTYRVVSVLTVLHQDWLNGKEYKCKVSNKALPAPIEKTISKAKGQPREPQVYTLPPSREEMTKNQVSLTCDVSGFYPSDIAVEWESDGQPENNYKTTPPVLDSDGSFFLYSKLTVDKSRWEQGDVFSCSVMHEALHNHYTQKSLSLSPGK

SEQ ID NO: 23237 - protein, 118 aa, synthetic construct; identical to SEQ ID NO: 21205
  source 1..118: note = Description of Artificial Sequence: Synthetic polypeptide; note = VH of XENP021218

SEQ ID NO: 23238 - protein, 5 aa, synthetic construct
  source 1..5: note = Description of Artificial Sequence: Synthetic peptide; note = XENP021218 vhCDR1
GYGVN

SEQ ID NO: 23239 - protein, 16 aa, synthetic construct
  source 1..16: note = Description of Artificial Sequence: Synthetic peptide; note = XENP021218 vhCDR2
MIWIDGSTDYNSKFQG

SEQ ID NO: 23240 - protein, 10 aa, synthetic construct
  source 1..10: note = Description of Artificial Sequence: Synthetic peptide; note = XENP021218 vhCDR3
DRPDGRAMDY

SEQ ID NO: 23241 - protein, 480 aa, synthetic construct; identical to SEQ ID NO: 22809
  source 1..480: note = Description of Artificial Sequence: Synthetic polypeptide; note = XENP021218 9C6_H1.1_L1-1G6_H1.280_L1.224 scFv-Fc Heavy Chain

SEQ ID NO: 23242 - protein, 122 aa, synthetic construct; identical to SEQ ID NO: 10917
  source 1..122: note = Description of Artificial Sequence: Synthetic polypeptide; note = VH of XENP021218

SEQ ID NO: 23243 - protein, 107 aa, synthetic construct; identical to SEQ ID NO: 22811
  source 1..107: note = Description of Artificial Sequence: Synthetic polypeptide; note = VL of XENP021218

SEQ ID NO: 23244 - protein, 231 aa, synthetic construct; identical to SEQ ID NO: 21532
  source 1..231: note = Description of Artificial Sequence: Synthetic polypeptide; note = Fc chain of XENP021218

SEQ ID NO: 23245 - protein, 5 aa, synthetic construct
  source 1..5: note = Description of Artificial Sequence: Synthetic peptide; note = XENP021218 vhCDR1
NYWMN

SEQ ID NO: 23246 - protein, 19 aa, synthetic construct
  source 1..19: note = Description of Artificial Sequence: Synthetic peptide; note = XENP021218 vhCDR2
EIRLYSNNYATHYAESVKG

SEQ ID NO: 23247 - protein, 11 aa, synthetic construct
  source 1..11: note = Description of Artificial Sequence: Synthetic peptide; note = XENP021218 vhCDR3
YYGNYGGYFDV

SEQ ID NO: 23248 - protein, 11 aa, synthetic construct
  source 1..11: note = Description of Artificial Sequence: Synthetic peptide; note = XENP021218 vlCDR1
RASQSVGNDVA

SEQ ID NO: 23249 - protein, 7 aa, synthetic construct
  source 1..7: note = Description of Artificial Sequence: Synthetic peptide; note = XENP021218 vlCDR2
YASHRYT

SEQ ID NO: 23250 - protein, 9 aa, synthetic construct
  source 1..9: note = Description of Artificial Sequence: Synthetic peptide; note = XENP021218 vlCDR3
QQDWSSPRT

SEQ ID NO: 23251 - protein, 213 aa, synthetic construct; identical to SEQ ID NO: 21050
  source 1..213: note = Description of Artificial Sequence: Synthetic polypeptide; note = XENP021218 9C6_H1.1_L1-1G6_H1.280_L1.224 Light Chain

SEQ ID NO: 23252 - protein, 106 aa, synthetic construct; identical to SEQ ID NO: 21051
  source 1..106: note = Description of Artificial Sequence: Synthetic polypeptide; note = VL of XENP021218

SEQ ID NO: 23253 - protein, 11 aa, synthetic construct
  source 1..11: note = Description of Artificial Sequence: Synthetic peptide; note = XENP021218 vlCDR1
KASQSVSNDVA

SEQ ID NO: 23254 - protein, 7 aa, synthetic construct
  source 1..7: note = Description of Artificial Sequence: Synthetic peptide; note = XENP021218 vlCDR2
YASNRYT

SEQ ID NO: 23255 - protein, 8 aa, synthetic construct
  source 1..8: note = Description of Artificial Sequence: Synthetic peptide; note = XENP021218 vlCDR3
QQDYSSPT

SEQ ID NO: 23256 - protein, 447 aa, synthetic construct
  source 1..447: note = Description of Artificial Sequence: Synthetic polypeptide; note = XENP021219 9C6_H1.11_L1-1G6_H1.280_L1.224 Fab-Fc Heavy Chain
QVQLVQSGAEVKKPGASVKVSCKVSGFSLTGYGVNWVRQAPGQGLEWMGMIWIDGSTDYNSKFQGRLSINKDNSKSTVYMELSSLRSEDTAVYYCARDRPDGRAMDYWGQGTMVTVSSASTKGPSVFPLAPSSKSTSGGTAALGCLVKDYFPEPVTVSWNSGALTSGVHTFPAVLQSSGLYSLSSVVTVPSSSLGTQTYICNVNHKPSDTKVDKKVEPKSCDKTHTCPPCPAPPVAGPSVFLFPPKPKDTLMISRTPEVTCVVVDVKHEDPEVKFNWYVDGVEVHNAKTKPREEEYNSTYRVVSVLTVLHQDWLNGKEYKCKVSNKALPAPIEKTISKAKGQPREPQVYTLPPSREEMTKNQVSLTCDVSGFYPSDIAVEWESDGQPENNYKTTPPVLDSDGSFFLYSKLTVDKSRWEQGDVFSCSVMHEALHNHYTQKSLSLSPGK

SEQ ID NO: 23257 - protein, 118 aa, synthetic construct; identical to SEQ ID NO: 21305
  source 1..118: note = Description of Artificial Sequence: Synthetic polypeptide; note = VH of XENP021219

SEQ ID NO: 23258 - protein, 5 aa, synthetic construct
  source 1..5: note = Description of Artificial Sequence: Synthetic peptide; note = XENP021219 vhCDR1
GYGVN

SEQ ID NO: 23259 - protein, 16 aa, synthetic construct
  source 1..16: note = Description of Artificial Sequence: Synthetic peptide; note = XENP021219 vhCDR2
MIWIDGSTDYNSKFQG

SEQ ID NO: 23260 - protein, 10 aa, synthetic construct
  source 1..10: note = Description of Artificial Sequence: Synthetic peptide; note = XENP021219 vhCDR3
DRPDGRAMDY

SEQ ID NO: 23261 - protein, 480 aa, synthetic construct; identical to SEQ ID NO: 22809
  source 1..480: note = Description of Artificial Sequence: Synthetic polypeptide; note = XENP021219 9C6_H1.11_L1-1G6_H1.280_L1.224 scFv-Fc Heavy Chain

SEQ ID NO: 23262 - protein, 122 aa, synthetic construct; identical to SEQ ID NO: 10917
  source 1..122: note = Description of Artificial Sequence: Synthetic polypeptide; note = VH of XENP021219

SEQ ID NO: 23263 - protein, 107 aa, synthetic construct; identical to SEQ ID NO: 22811
  source 1..107: note = Description of Artificial Sequence: Synthetic polypeptide; note = VL of XENP021219

SEQ ID NO: 23264 - protein, 231 aa, synthetic construct; identical to SEQ ID NO: 21532
  source 1..231: note = Description of Artificial Sequence: Synthetic polypeptide; note = Fc chain of XENP021219

SEQ ID NO: 23265 - protein, 5 aa, synthetic construct
  source 1..5: note = Description of Artificial Sequence: Synthetic peptide; note = XENP021219 vhCDR1
NYWMN

SEQ ID NO: 23266 - protein, 19 aa, synthetic construct
  source 1..19: note = Description of Artificial Sequence: Synthetic peptide; note = XENP021219 vhCDR2
EIRLYSNNYATHYAESVKG

SEQ ID NO: 23267 - protein, 11 aa, synthetic construct
  source 1..11: note = Description of Artificial Sequence: Synthetic peptide; note = XENP021219 vhCDR3
YYGNYGGYFDV

SEQ ID NO: 23268 - protein, 11 aa, synthetic construct
  source 1..11: note = Description of Artificial Sequence: Synthetic peptide; note = XENP021219 vlCDR1
RASQSVGNDVA

SEQ ID NO: 23269 - protein, 7 aa, synthetic construct
  source 1..7: note = Description of Artificial Sequence: Synthetic peptide; note = XENP021219 vlCDR2
YASHRYT

SEQ ID NO: 23270 - protein, 9 aa, synthetic construct
  source 1..9: note = Description of Artificial Sequence: Synthetic peptide; note = XENP021219 vlCDR3
QQDWSSPRT

SEQ ID NO: 23271 - protein, 213 aa, synthetic construct; identical to SEQ ID NO: 21050
  source 1..213: note = Description of Artificial Sequence: Synthetic polypeptide; note = XENP021219 9C6_H1.11_L1-1G6_H1.280_L1.224 Light Chain

SEQ ID NO: 23272 - protein, 106 aa, synthetic construct; identical to SEQ ID NO: 21051
  source 1..106: note = Description of Artificial Sequence: Synthetic polypeptide; note = VL of XENP021219

SEQ ID NO: 23273 - protein, 11 aa, synthetic construct
  source 1..11: note = Description of Artificial Sequence: Synthetic peptide; note = XENP021219 vlCDR1
KASQSVSNDVA

SEQ ID NO: 23274 - protein, 7 aa, synthetic construct
  source 1..7: note = Description of Artificial Sequence: Synthetic peptide; note = XENP021219 vlCDR2
YASNRYT

SEQ ID NO: 23275 - protein, 8 aa, synthetic construct
  source 1..8: note = Description of Artificial Sequence: Synthetic peptide; note = XENP021219 vlCDR3
QQDYSSPT

SEQ ID NO: 23276 - protein, 447 aa, synthetic construct; identical to SEQ ID NO: 23236
  source 1..447: note = Description of Artificial Sequence: Synthetic polypeptide; note = XENP021220 9C6_H1.1_L1-1G6_L1.194_H1.279 Fab-Fc Heavy Chain

SEQ ID NO: 23277 - protein, 118 aa, synthetic construct; identical to SEQ ID NO: 21205
  source 1..118: note = Description of Artificial Sequence: Synthetic polypeptide; note = VH of XENP021220

SEQ ID NO: 23278 - protein, 5 aa, synthetic construct
  source 1..5: note = Description of Artificial Sequence: Synthetic peptide; note = XENP021220 vhCDR1
GYGVN

SEQ ID NO: 23279 - protein, 16 aa, synthetic construct
  source 1..16: note = Description of Artificial Sequence: Synthetic peptide; note = XENP021220 vhCDR2
MIWIDGSTDYNSKFQG

SEQ ID NO: 23280 - protein, 10 aa, synthetic construct
  source 1..10: note = Description of Artificial Sequence: Synthetic peptide; note = XENP021220 vhCDR3
DRPDGRAMDY

SEQ ID NO: 23281 - protein, 480 aa, synthetic construct; identical to SEQ ID NO: 23221
  source 1..480: note = Description of Artificial Sequence: Synthetic polypeptide; note = XENP021220 9C6_H1.1_L1-1G6_L1.194_H1.279 scFv-Fc Heavy Chain

SEQ ID NO: 23282 - protein, 107 aa, synthetic construct; identical to SEQ ID NO: 10999
  source 1..107: note = Description of Artificial Sequence: Synthetic polypeptide; note = VH of XENP021220

SEQ ID NO: 23283 - protein, 122 aa, synthetic construct; identical to SEQ ID NO: 10908
  source 1..122: note = Description of Artificial Sequence: Synthetic polypeptide; note = VL of XENP021220

SEQ ID NO: 23284 - protein, 231 aa, synthetic construct; identical to SEQ ID NO: 21532
  source 1..231: note = Description of Artificial Sequence: Synthetic polypeptide; note = Fc chain of XENP021220

SEQ ID NO: 23285 - protein, 11 aa, synthetic construct
  source 1..11: note = Description of Artificial Sequence: Synthetic peptide; note = XENP021220 vhCDR1
RASQSVGNDVA

SEQ ID NO: 23286 - protein, 7 aa, synthetic construct
  source 1..7: note = Description of Artificial Sequence: Synthetic peptide; note = XENP021220 vhCDR2
YASHRYT

SEQ ID NO: 23287 - protein, 9 aa, synthetic construct
  source 1..9: note = Description of Artificial Sequence: Synthetic peptide; note = XENP021220 vhCDR3
QQDFSSPRT

SEQ ID NO: 23288 - protein, 5 aa, synthetic construct
  source 1..5: note = Description of Artificial Sequence: Synthetic peptide; note = XENP021220 vlCDR1
NYWMN

SEQ ID NO: 23289 - protein, 19 aa, synthetic construct
  source 1..19: note = Description of Artificial Sequence: Synthetic peptide; note = XENP021220 vlCDR2
EIRLYSNNYATHYAESVKG

SEQ ID NO: 23290 - protein, 11 aa, synthetic construct
  source 1..11: note = Description of Artificial Sequence: Synthetic peptide; note = XENP021220 vlCDR3
YYGNYGGYFDV

SEQ ID NO: 23291 - protein, 213 aa, synthetic construct; identical to SEQ ID NO: 21050
  source 1..213: note = Description of Artificial Sequence: Synthetic polypeptide; note = XENP021220 9C6_H1.1_L1-1G6_L1.194_H1.279 Light Chain

SEQ ID NO: 23292 - protein, 106 aa, synthetic construct; identical to SEQ ID NO: 21051
  source 1..106: note = Description of Artificial Sequence: Synthetic polypeptide; note = VL of XENP021220

SEQ ID NO: 23293 - protein, 11 aa, synthetic construct
  source 1..11: note = Description of Artificial Sequence: Synthetic peptide; note = XENP021220 vlCDR1
KASQSVSNDVA

SEQ ID NO: 23294 - protein, 7 aa, synthetic construct
  source 1..7: note = Description of Artificial Sequence: Synthetic peptide; note = XENP021220 vlCDR2
YASNRYT

SEQ ID NO: 23295 - protein, 8 aa, synthetic construct
  source 1..8: note = Description of Artificial Sequence: Synthetic peptide; note = XENP021220 vlCDR3
QQDYSSPT

SEQ ID NO: 23296 - protein, 447 aa, synthetic construct; identical to SEQ ID NO: 23256
  source 1..447: note = Description of Artificial Sequence: Synthetic polypeptide; note = XENP021221 9C6_H1.11_L1-1G6_L1.194_H1.279 Fab-Fc Heavy Chain

SEQ ID NO: 23297 - protein, 118 aa, synthetic construct; identical to SEQ ID NO: 21305
  source 1..118: note = Description of Artificial Sequence: Synthetic polypeptide; note = VH of XENP021221

SEQ ID NO: 23298 - protein, 5 aa, synthetic construct
  source 1..5: note = Description of Artificial Sequence: Synthetic peptide; note = XENP021221 vhCDR1
GYGVN

SEQ ID NO: 23299 - protein, 16 aa, synthetic construct
  source 1..16: note = Description of Artificial Sequence: Synthetic peptide; note = XENP021221 vhCDR2
MIWIDGSTDYNSKFQG

SEQ ID NO: 23300 - protein, 10 aa, synthetic construct
  source 1..10: note = Description of Artificial Sequence: Synthetic peptide; note = XENP021221 vhCDR3
DRPDGRAMDY

SEQ ID NO: 23301 - protein, 480 aa, synthetic construct; identical to SEQ ID NO: 23221
  source 1..480: note = Description of Artificial Sequence: Synthetic polypeptide; note = XENP021221 9C6_H1.11_L1-1G6_L1.194_H1.279 scFv-Fc Heavy Chain

SEQ ID NO: 23302 - protein, 107 aa, synthetic construct; identical to SEQ ID NO: 10999
  source 1..107: note = Description of Artificial Sequence: Synthetic polypeptide; note = VH of XENP021221

SEQ ID NO: 23303 - protein, 122 aa, synthetic construct; identical to SEQ ID NO: 10908
  source 1..122: note = Description of Artificial Sequence: Synthetic polypeptide; note = VL of XENP021221

SEQ ID NO: 23304 - protein, 231 aa, synthetic construct; identical to SEQ ID NO: 21532
  source 1..231: note = Description of Artificial Sequence: Synthetic polypeptide; note = Fc chain of XENP021221

SEQ ID NO: 23305 - protein, 11 aa, synthetic construct
  source 1..11: note = Description of Artificial Sequence: Synthetic peptide; note = XENP021221 vhCDR1
RASQSVGNDVA

SEQ ID NO: 23306 - protein, 7 aa, synthetic construct
  source 1..7: note = Description of Artificial Sequence: Synthetic peptide; note = XENP021221 vhCDR2
YASHRYT

SEQ ID NO: 23307 - protein, 9 aa, synthetic construct
  source 1..9: note = Description of Artificial Sequence: Synthetic peptide; note = XENP021221 vhCDR3
QQDFSSPRT

SEQ ID NO: 23308 - protein, 5 aa, synthetic construct
  source 1..5: note = Description of Artificial Sequence: Synthetic peptide; note = XENP021221 vlCDR1
NYWMN

SEQ ID NO: 23309 - protein, 19 aa, synthetic construct
  source 1..19: note = Description of Artificial Sequence: Synthetic peptide; note = XENP021221 vlCDR2
EIRLYSNNYATHYAESVKG

SEQ ID NO: 23310 - protein, 11 aa, synthetic construct
  source 1..11: note = Description of Artificial Sequence: Synthetic peptide; note = XENP021221 vlCDR3
YYGNYGGYFDV

SEQ ID NO: 23311 - protein, 213 aa, synthetic construct; identical to SEQ ID NO: 21050
  source 1..213: note = Description of Artificial Sequence: Synthetic polypeptide; note = XENP021221 9C6_H1.11_L1-1G6_L1.194_H1.279 Light Chain

SEQ ID NO: 23312 - protein, 106 aa, synthetic construct; identical to SEQ ID NO: 21051
  source 1..106: note = Description of Artificial Sequence: Synthetic polypeptide; note = VL of XENP021221

SEQ ID NO: 23313 - protein, 11 aa, synthetic construct
  source 1..11: note = Description of Artificial Sequence: Synthetic peptide; note = XENP021221 vlCDR1
KASQSVSNDVA

SEQ ID NO: 23314 - protein, 7 aa, synthetic construct
  source 1..7: note = Description of Artificial Sequence: Synthetic peptide; note = XENP021221 vlCDR2
YASNRYT

SEQ ID NO: 23315 - protein, 8 aa, synthetic construct
  source 1..8: note = Description of Artificial Sequence: Synthetic peptide; note = XENP021221 vlCDR3
QQDYSSPT

SEQ ID NO: 23316 - protein, 447 aa, synthetic construct
  source 1..447: note = Description of Artificial Sequence: Synthetic polypeptide; note = XENP016004 ipilimumab_H0L0-nivolumab_H0.1_L0 Fab-Fc Heavy Chain
QVQLVESGGGVVQPGRSLRLSCAASGFTFSSYTMHWVRQAPGKGLEWVTFISYDGNNKYYADSVKGRFTISRDNSKNTLYLQMNSLRAEDTAIYYCARTGWLGPFDYWGQGTLVTVSSASTKGPSVFPLAPSSKSTSGGTAALGCLVKDYFPEPVTVSWNSGALTSGVHTFPAVLQSSGLYSLSSVVTVPSSSLGTQTYICNVNHKPSDTKVDKKVEPKSCDKTHTCPPCPAPPVAGPSVFLFPPKPKDTLMISRTPEVTCVVVDVKHEDPEVKFNWYVDGVEVHNAKTKPREEEYNSTYRVVSVLTVLHQDWLNGKEYKCKVSNKALPAPIEKTISKAKGQPREPQVYTLPPSREEMTKNQVSLTCDVSGFYPSDIAVEWESDGQPENNYKTTPPVLDSDGSFFLYSKLTVDKSRWEQGDVFSCSVMHEALHNHYTQKSLSLSPGK

SEQ ID NO: 23317 - protein, 118 aa, synthetic construct; identical to SEQ ID NO: 22
  source 1..118: note = Description of Artificial Sequence: Synthetic polypeptide; note = VH of XENP016004

SEQ ID NO: 23318 - protein, 5 aa, synthetic construct
  source 1..5: note = Description of Artificial Sequence: Synthetic peptide; note = XENP016004 vhCDR1
SYTMH

SEQ ID NO: 23319 - protein, 17 aa, synthetic construct
  source 1..17: note = Description of Artificial Sequence: Synthetic peptide; note = XENP016004 vhCDR2
FISYDGNNKYYADSVKG

SEQ ID NO: 23320 - protein, 9 aa, synthetic construct
  source 1..9: note = Description of Artificial Sequence: Synthetic peptide; note = XENP016004 vhCDR3
TGWLGPFDY

SEQ ID NO: 23321 - protein, 471 aa, synthetic construct; identical to SEQ ID NO: 22749
  source 1..471: note = Description of Artificial Sequence: Synthetic polypeptide; note = XENP016004 ipilimumab_H0L0-nivolumab_H0.1_L0 scFv-Fc Heavy Chain

SEQ ID NO: 23322 - protein, 113 aa, synthetic construct; identical to SEQ ID NO: 6210
  source 1..113: note = Description of Artificial Sequence: Synthetic polypeptide; note = VH of XENP016004

SEQ ID NO: 23323 - protein, 107 aa, synthetic construct [sequence omitted]

SEQ ID NO: 23324 - protein, 231 aa, synthetic construct; identical to SEQ ID NO: 21532
  source 1..231: note = Description of Artificial Sequence: Synthetic polypeptide; note = Fc chain of XENP016004

SEQ ID NO: 23325 - protein, 5 aa, synthetic construct
  source 1..5: note = Description of Artificial Sequence: Synthetic peptide; note = XENP016004 vhCDR1
NSGMH

SEQ ID NO: 23326 - protein, 17 aa, synthetic construct
  source 1..17: note = Description of Artificial Sequence: Synthetic peptide; note = XENP016004 vhCDR2
VIWYDGSKRYYADSVKG

SEQ ID NO: 23327 - protein, 4 aa, synthetic construct
  source 1..4: note = Description of Artificial Sequence: Synthetic peptide; note = XENP016004 vhCDR3
NDDY

SEQ ID NO: 23328 - protein, 11 aa, synthetic construct
  source 1..11: note = Description of Artificial Sequence: Synthetic peptide; note = XENP016004 vlCDR1
RASQSVSSYLA

SEQ ID NO: 23329 - protein, 7 aa, synthetic construct
  source 1..7: note = Description of Artificial Sequence: Synthetic peptide; note = XENP016004 vlCDR2
DASNRAT

SEQ ID NO: 23330 - protein, 9 aa, synthetic construct
  source 1..9: note = Description of Artificial Sequence: Synthetic peptide; note = XENP016004 vlCDR3
QQSSNWPRT

SEQ ID NO: 23331 - protein, 215 aa, synthetic construct; identical to SEQ ID NO: 2924
  source 1..215: note = Description of Artificial Sequence: Synthetic polypeptide; note = XENP016004 ipilimumab_H0L0-nivolumab_H0.1_L0 Light Chain

SEQ ID NO: 23332 - protein, 108 aa, synthetic construct; identical to SEQ ID NO: 23
  source 1..108: note = Description of Artificial Sequence: Synthetic polypeptide; note = VL of XENP016004

SEQ ID NO: 23333 - protein, 12 aa, synthetic construct
  source 1..12: note = Description of Artificial Sequence: Synthetic peptide; note = XENP016004 vlCDR1
RASQSVGSSYLA

SEQ ID NO: 23334 - protein, 7 aa, synthetic construct
  source 1..7: note = Description of Artificial Sequence: Synthetic peptide; note = XENP016004 vlCDR2
GAFSRAT

SEQ ID NO: 23335 - protein, 9 aa, synthetic construct
  source 1..9: note = Description of Artificial Sequence: Synthetic peptide; note = XENP016004 vlCDR3
QQYGSSPWT

SEQ ID NO: 23336 - protein, 447 aa, synthetic construct; identical to SEQ ID NO: 23316
  source 1..447: note = Description of Artificial Sequence: Synthetic polypeptide; note = XENP018067 Ipilimumab_H0L0-1G6_H1L1 Fab-Fc Heavy Chain

SEQ ID NO: 23337 - protein, 118 aa, synthetic construct; identical to SEQ ID NO: 22
  source 1..118: note = Description of Artificial Sequence: Synthetic polypeptide; note = VH of XENP018067

SEQ ID NO: 23338 - protein, 5 aa, synthetic construct
  source 1..5: note = Description of Artificial Sequence: Synthetic peptide; note = XENP018067 vhCDR1
SYTMH

SEQ ID NO: 23339 - protein, 17 aa, synthetic construct
  source 1..17: note = Description of Artificial Sequence: Synthetic peptide; note = XENP018067 vhCDR2
FISYDGNNKYYADSVKG

SEQ ID NO: 23340 - protein, 9 aa, synthetic construct
  source 1..9: note = Description of Artificial Sequence: Synthetic peptide; note = XENP018067 vhCDR3
TGWLGPFDY

SEQ ID NO: 23341 - protein, 480 aa, synthetic construct
  source 1..480: note = Description of Artificial Sequence: Synthetic polypeptide; note = XENP018067 Ipilimumab_H0L0-1G6_H1L1 scFv-Fc Heavy Chain
EVQLVESGGGLVKPGGSLRLSCAASGFTFSNYWMNWVRQAPGKGLEWVGEIRLKSNNYATHYAEPVKGRFTISRDDSKSTVYLQMNSLKTEDTAVYYCTRYYGNYGGYFDVWGAGTLVTVSSGKPGSGKPGSGKPGSGKPGSSIVMTQSPATLSVSPGERATLSCRASQSVSNDVAWYQQKPGQSPRLLINYASHRYTGVPDRFTGSGYGTEFTLTISSLQSEDFAVYFCQQDYSSPRTFGGGTKVEIKEPKSSDKTHTCPPCPAPPVAGPSVFLFPPKPKDTLMISRTPEVTCVVVDVKHEDPEVKFNWYVDGVEVHNAKTKPREEQYNSTYRVVSVLTVLHQDWLNGKEYKCKVSNKALPAPIEKTISKAKGQPREPQVYTLPPSREQMTKNQVKLTCLVKGFYPSDIAVEWESNGQPENNYKTTPPVLDSDGSFFLYSKLTVDKSRWQQGNVFSCSVMHEALHNHYTQKSLSLSPGK

SEQ ID NO: 23342 - protein, 122 aa, synthetic construct; identical to SEQ ID NO: 6246
  source 1..122: note = Description of Artificial Sequence: Synthetic polypeptide; note = VH of XENP018067

SEQ ID NO: 23343 - protein, 107 aa, synthetic construct; identical to SEQ ID NO: 6247
  source 1..107: note = Description of Artificial Sequence: Synthetic polypeptide; note = VL of XENP018067

SEQ ID NO: 23344 - protein, 231 aa, synthetic construct; identical to SEQ ID NO: 21532
  source 1..231: note = Description of Artificial Sequence: Synthetic polypeptide; note = Fc chain of XENP018067

SEQ ID NO: 23345 - protein, 5 aa, synthetic construct
  source 1..5: note = Description of Artificial Sequence: Synthetic peptide; note = XENP018067 vhCDR1
NYWMN

SEQ ID NO: 23346 - protein, 19 aa, synthetic construct
  source 1..19: note = Description of Artificial Sequence: Synthetic peptide; note = XENP018067 vhCDR2
EIRLKSNNYATHYAEPVKG

SEQ ID NO: 23347 - protein, 11 aa, synthetic construct
  source 1..11: note = Description of Artificial Sequence: Synthetic peptide; note = XENP018067 vhCDR3
YYGNYGGYFDV

SEQ ID NO: 23348 - protein, 11 aa, synthetic construct
  source 1..11: note = Description of Artificial Sequence: Synthetic peptide; note = XENP018067 vlCDR1
RASQSVSNDVA

SEQ ID NO: 23349 - protein, 7 aa, synthetic construct
  source 1..7: note = Description of Artificial Sequence: Synthetic peptide; note = XENP018067 vlCDR2
YASHRYT

SEQ ID NO: 23350 - protein, 9 aa, synthetic construct
  source 1..9: note = Description of Artificial Sequence: Synthetic peptide; note = XENP018067 vlCDR3
QQDYSSPRT

SEQ ID NO: 23351 - protein, 215 aa, synthetic construct; identical to SEQ ID NO: 2924
  source 1..215: note = Description of Artificial Sequence: Synthetic polypeptide; note = XENP018067 Ipilimumab_H0L0-1G6_H1L1 Light Chain

SEQ ID NO: 23352 - protein, 108 aa, synthetic construct; identical to SEQ ID NO: 23
  source 1..108: note = Description of Artificial Sequence: Synthetic polypeptide; note = VL of XENP018067

SEQ ID NO: 23353 - protein, 12 aa, synthetic construct
  source 1..12: note = Description of Artificial Sequence: Synthetic peptide; note = XENP018067 vlCDR1
RASQSVGSSYLA

SEQ ID NO: 23354 - protein, 7 aa, synthetic construct
  source 1..7: note = Description of Artificial Sequence: Synthetic peptide; note = XENP018067 vlCDR2
GAFSRAT

SEQ ID NO: 23355 - protein, 9 aa, synthetic construct
  source 1..9: note = Description of Artificial Sequence: Synthetic peptide; note = XENP018067 vlCDR3
QQYGSSPWT

SEQ ID NO: 23356 - protein, 447 aa, synthetic construct
  source 1..447: note = Description of Artificial Sequence: Synthetic polypeptide; note = XENP019734 ipilimumab_H3L0-nivolumab_H0.1_L0 Fab-Fc Heavy Chain
EVQLVESGGGLVKPGGSLRLSCAASGFTFSSYTMHWVRQAPGKGLEWVSFISYDGNNKYYADSVKGRFTISRDNAKNSLYLQMNSLRAEDTAVYYCARTGWLGPFDYWGQGTLVTVSSASTKGPSVFPLAPSSKSTSGGTAALGCLVKDYFPEPVTVSWNSGALTSGVHTFPAVLQSSGLYSLSSVVTVPSSSLGTQTYICNVNHKPSDTKVDKKVEPKSCDKTHTCPPCPAPPVAGPSVFLFPPKPKDTLMISRTPEVTCVVVDVKHEDPEVKFNWYVDGVEVHNAKTKPREEEYNSTYRVVSVLTVLHQDWLNGKEYKCKVSNKALPAPIEKTISKAKGQPREPQVYTLPPSREEMTKNQVSLTCDVSGFYPSDIAVEWESDGQPENNYKTTPPVLDSDGSFFLYSKLTVDKSRWEQGDVFSCSVMHEALHNHYTQKSLSLSPGK

SEQ ID NO: 23357 - protein, 118 aa, synthetic construct; identical to SEQ ID NO: 139
  source 1..118: note = Description of Artificial Sequence: Synthetic polypeptide; note = VH of XENP019734

SEQ ID NO: 23358 - protein, 5 aa, synthetic construct
  source 1..5: note = Description of Artificial Sequence: Synthetic peptide; note = XENP019734 vhCDR1
SYTMH

SEQ ID NO: 23359 - protein, 17 aa, synthetic construct
  source 1..17: note = Description of Artificial Sequence: Synthetic peptide; note = XENP019734 vhCDR2
FISYDGNNKYYADSVKG

SEQ ID NO: 23360 - protein, 9 aa, synthetic construct
  source 1..9: note = Description of Artificial Sequence: Synthetic peptide; note = XENP019734 vhCDR3
TGWLGPFDY

SEQ ID NO: 23361 - protein, 471 aa, synthetic construct; identical to SEQ ID NO: 22749
  source 1..471: note = Description of Artificial Sequence: Synthetic polypeptide; note = XENP019734 ipilimumab_H3L0-nivolumab_H0.1_L0 scFv-Fc Heavy Chain

SEQ ID NO: 23362 - protein, 113 aa, synthetic construct; identical to SEQ ID NO: 6210
  source 1..113: note = Description of Artificial Sequence: Synthetic polypeptide; note = VH of XENP019734

SEQ ID NO: 23363 - protein, 107 aa, synthetic construct [sequence omitted]

SEQ ID NO: 23364 - protein, 231 aa, synthetic construct; identical to SEQ ID NO: 21532
  source 1..231: note = Description of Artificial Sequence: Synthetic polypeptide; note = Fc chain of XENP019734

SEQ ID NO: 23365 - protein, 5 aa, synthetic construct
  source 1..5: note = Description of Artificial Sequence: Synthetic peptide; note = XENP019734 vhCDR1
NSGMH

SEQ ID NO: 23366 - protein, 17 aa, synthetic construct
  source 1..17: note = Description of Artificial Sequence: Synthetic peptide; note = XENP019734 vhCDR2
VIWYDGSKRYYADSVKG

SEQ ID NO: 23367 - protein, 4 aa, synthetic construct
  source 1..4: note = Description of Artificial Sequence: Synthetic peptide; note = XENP019734 vhCDR3
NDDY

SEQ ID NO: 23368 - protein, 11 aa, synthetic construct
  source 1..11: note = Description of Artificial Sequence: Synthetic peptide; note = XENP019734 vlCDR1
RASQSVSSYLA

SEQ ID NO: 23369 - protein, 7 aa, synthetic construct
  source 1..7: note = Description of Artificial Sequence: Synthetic peptide; note = XENP019734 vlCDR2
DASNRAT

SEQ ID NO: 23370 - protein, 9 aa, synthetic construct
  source 1..9: note = Description of Artificial Sequence: Synthetic peptide; note = XENP019734 vlCDR3
QQSSNWPRT

SEQ ID NO: 23371 - protein, 215 aa, synthetic construct; identical to SEQ ID NO: 2924
  source 1..215: note = Description of Artificial Sequence: Synthetic polypeptide; note = XENP019734 ipilimumab_H3L0-nivolumab_H0.1_L0 Light Chain

SEQ ID NO: 23372 - protein, 108 aa, synthetic construct; identical to SEQ ID NO: 23
  source 1..108: note = Description of Artificial Sequence: Synthetic polypeptide; note = VL of XENP019734

SEQ ID NO: 23373 - protein, 12 aa, synthetic construct
  source 1..12: note = Description of Artificial Sequence: Synthetic peptide; note = XENP019734 vlCDR1
RASQSVGSSYLA

SEQ ID NO: 23374 - protein, 7 aa, synthetic construct
  source 1..7: note = Description of Artificial Sequence: Synthetic peptide; note = XENP019734 vlCDR2
GAFSRAT

SEQ ID NO: 23375 - protein, 9 aa, synthetic construct
  source 1..9: note = Description of Artificial Sequence: Synthetic peptide; note = XENP019734 vlCDR3
QQYGSSPWT

SEQ ID NO: 23376 - protein, 447 aa, synthetic construct; identical to SEQ ID NO: 23356
  source 1..447: note = Description of Artificial Sequence: Synthetic polypeptide; note = XENP019738 ipilimumab_H3L0-1G6_L1.210_H1.288 Fab-Fc Heavy Chain

SEQ ID NO: 23377 - protein, 118 aa, synthetic construct; identical to SEQ ID NO: 139
  source 1..118: note = Description of Artificial Sequence: Synthetic polypeptide; note = VH of XENP019738

SEQ ID NO: 23378 - protein, 5 aa, synthetic construct
  source 1..5: note = Description of Artificial Sequence: Synthetic peptide; note = XENP019738 vhCDR1
SYTMH

SEQ ID NO: 23379 - protein, 17 aa, synthetic construct
  source 1..17: note = Description of Artificial Sequence: Synthetic peptide; note = XENP019738 vhCDR2
FISYDGNNKYYADSVKG

SEQ ID NO: 23380 - protein, 9 aa, synthetic construct
  source 1..9: note = Description of Artificial Sequence: Synthetic peptide; note = XENP019738 vhCDR3
TGWLGPFDY

SEQ ID NO: 23381 - protein, 480 aa, synthetic construct
  source 1..480: note = Description of Artificial Sequence: Synthetic polypeptide; note = XENP019738 ipilimumab_H3L0-1G6_L1.210_H1.288 scFv-Fc Heavy Chain
EIVLTQSPATLSASPGERVTLTCRASQSVGNDVAWYQQKPGQAPRLLINYASHRYTGVPDRFTGSGYGTEFTLTISSVQSEDFGVYYCQQDFSSPRTFGCGTKVEIKGKPGSGKPGSGKPGSGKPGSEVQLVESGGGLVKPGGSLRLSCVASGFTFSNYWMNWVRQAPGKCLEWVAEIRLYSNNYATHYAESVKGRFTISRDDSKSTLYLQMNNLKTEDTGVYYCTRYYGNYGGYFDVWGRGTLVTVSSEPKSSDKTHTCPPCPAPPVAGPSVFLFPPKPKDTLMISRTPEVTCVVVDVKHEDPEVKFNWYVDGVEVHNAKTKPREEQYNSTYRVVSVLTVLHQDWLNGKEYKCKVSNKALPAPIEKTISKAKGQPREPQVYTLPPSREQMTKNQVKLTCLVKGFYPSDIAVEWESNGQPENNYKTTPPVLDSDGSFFLYSKLTVDKSRWQQGNVFSCSVMHEALHNHYTQKSLSLSPGK

SEQ ID NO: 23382 - protein, 107 aa, synthetic construct; identical to SEQ ID NO: 11359
  source 1..107: note = Description of Artificial Sequence: Synthetic polypeptide; note = VH of XENP019738

SEQ ID NO: 23383 - protein, 122 aa, synthetic construct; identical to SEQ ID NO: 11358
  source 1..122: note = Description of Artificial Sequence: Synthetic polypeptide; note = VL of XENP019738

SEQ ID NO: 23384 - protein, 231 aa, synthetic construct; identical to SEQ ID NO: 21532
  source 1..231: note = Description of Artificial Sequence: Synthetic polypeptide; note = Fc chain of XENP019738

SEQ ID NO: 23385 - protein, 11 aa, synthetic construct
  source 1..11: note = Description of Artificial Sequence: Synthetic peptide; note = XENP019738 vhCDR1
RASQSVGNDVA

SEQ ID NO: 23386 - protein, 7 aa, synthetic construct
  source 1..7: note = Description of Artificial Sequence: Synthetic peptide; note = XENP019738 vhCDR2
YASHRYT

SEQ ID NO: 23387 - protein, 9 aa, synthetic construct
  source 1..9: note = Description of Artificial Sequence: Synthetic peptide; note = XENP019738 vhCDR3
QQDFSSPRT

SEQ ID NO: 23388 - protein, 5 aa, synthetic construct
  source 1..5: note = Description of Artificial Sequence: Synthetic peptide; note = XENP019738 vlCDR1
NYWMN

SEQ ID NO: 23389 - protein, 19 aa, synthetic construct
  source 1..19: note = Description of Artificial Sequence: Synthetic peptide; note = XENP019738 vlCDR2
EIRLYSNNYATHYAESVKG

SEQ ID NO: 23390 - protein, 11 aa, synthetic construct
  source 1..11: note = Description of Artificial Sequence: Synthetic peptide; note = XENP019738 vlCDR3
YYGNYGGYFDV

SEQ ID NO: 23391 - protein, 215 aa, synthetic construct; identical to SEQ ID NO: 2924
  source 1..215: note = Description of Artificial Sequence: Synthetic polypeptide; note = XENP019738 ipilimumab_H3L0-1G6_L1.210_H1.288 Light Chain

SEQ ID NO: 23392 - protein, 108 aa, synthetic construct; identical to SEQ ID NO: 23
  source 1..108: note = Description of Artificial Sequence: Synthetic polypeptide; note = VL of XENP019738

SEQ ID NO: 23393 - protein, 12 aa, synthetic construct
  source 1..12: note = Description of Artificial Sequence: Synthetic peptide; note = XENP019738 vlCDR1
RASQSVGSSYLA

SEQ ID NO: 23394 - protein, 7 aa, synthetic construct
  source 1..7: note = Description of Artificial Sequence: Synthetic peptide; note = XENP019738 vlCDR2
GAFSRAT

SEQ ID NO: 23395 - protein, 9 aa, synthetic construct
  source 1..9: note = Description of Artificial Sequence: Synthetic peptide; note = XENP019738 vlCDR3
QQYGSSPWT

SEQ ID NO: 23396 - protein, 447 aa, synthetic construct; identical to SEQ ID NO: 23356
  source 1..447: note = Description of Artificial Sequence: Synthetic polypeptide; note = XENP019739 ipilimumab_H3L0-1G6_H1.279_L1.194 Fab-Fc Heavy Chain

SEQ ID NO: 23397 - protein, 118 aa, synthetic construct; identical to SEQ ID NO: 139
  source 1..118: note = Description of Artificial Sequence: Synthetic polypeptide; note = VH of XENP019739

SEQ ID NO: 23398 - protein, 5 aa, synthetic construct
  source 1..5: note = Description of Artificial Sequence: Synthetic peptide; note = XENP019739 vhCDR1
SYTMH

SEQ ID NO: 23399 - protein, 17 aa, synthetic construct
  source 1..17: note = Description of Artificial Sequence: Synthetic peptide; note = XENP019739 vhCDR2
FISYDGNNKYYADSVKG

SEQ ID NO: 23400 - protein, 9 aa, synthetic construct
  source 1..9: note = Description of Artificial Sequence: Synthetic peptide; note = XENP019739 vhCDR3
TGWLGPFDY

SEQ ID NO: 23401 - protein, 480 aa, synthetic construct
  source 1..480: note = Description of Artificial Sequence: Synthetic polypeptide; note = XENP019739 ipilimumab_H3L0-1G6_H1.279_L1.194 scFv-Fc Heavy Chain
EVQLVESGGGLVKPGGSLRLSCVASGFTFSNYWMNWVRQAPGKGLEWVAEIRLYSNNYATHYAESVKGRFTISRDDSKSTLYLQMNNLKTEDTGVYYCTRYYGNYGGYFDVWGRGTLVTVSSGKPGSGKPGSGKPGSGKPGSEIVLTQSPATLSASPGERVTLTCRASQSVGNDVAWYQQKPGQAPRLLINYASHRYTGVPDRFTGSGYGTEFTLTISSVQSEDFGVYYCQQDFSSPRTFGGGTKVEIKEPKSSDKTHTCPPCPAPPVAGPSVFLFPPKPKDTLMISRTPEVTCVVVDVKHEDPEVKFNWYVDGVEVHNAKTKPREEQYNSTYRVVSVLTVLHQDWLNGKEYKCKVSNKALPAPIEKTISKAKGQPREPQVYTLPPSREQMTKNQVKLTCLVKGFYPSDIAVEWESNGQPENNYKTTPPVLDSDGSFFLYSKLTVDKSRWQQGNVFSCSVMHEALHNHYTQKSLSLSPGK

SEQ ID NO: 23402 - protein, 122 aa, synthetic construct; identical to SEQ ID NO: 10908
  source 1..122: note = Description of Artificial Sequence: Synthetic polypeptide; note = VH of XENP019739

SEQ ID NO: 23403 - protein, 107 aa, synthetic construct; identical to SEQ ID NO: 10999
  source 1..107: note = Description of Artificial Sequence: Synthetic polypeptide; note = VL of XENP019739

SEQ ID NO: 23404 - protein, 231 aa, synthetic construct; identical to SEQ ID NO: 21532
  source 1..231: note = Description of Artificial Sequence: Synthetic polypeptide; note = Fc chain of XENP019739

SEQ ID NO: 23405 - protein, 5 aa, synthetic construct
  source 1..5: note = Description of Artificial Sequence: Synthetic peptide; note = XENP019739 vhCDR1
NYWMN

SEQ ID NO: 23406 - protein, 19 aa, synthetic construct
  source 1..19: note = Description of Artificial Sequence: Synthetic peptide; note = XENP019739 vhCDR2
EIRLYSNNYATHYAESVKG

SEQ ID NO: 23407 - protein, 11 aa, synthetic construct
  source 1..11: note = Description of Artificial Sequence: Synthetic peptide; note = XENP019739 vhCDR3
YYGNYGGYFDV

SEQ ID NO: 23408 - protein, 11 aa, synthetic construct
  source 1..11: note = Description of Artificial Sequence: Synthetic peptide; note = XENP019739 vlCDR1
RASQSVGNDVA

SEQ ID NO: 23409 - protein, 7 aa, synthetic construct
  source 1..7: note = Description of Artificial Sequence: Synthetic peptide; note = XENP019739 vlCDR2
YASHRYT

SEQ ID NO: 23410 - protein, 9 aa, synthetic construct
  source 1..9: note = Description of Artificial Sequence: Synthetic peptide; note = XENP019739 vlCDR3
QQDFSSPRT

SEQ ID NO: 23411 - protein, 215 aa, synthetic construct; identical to SEQ ID NO: 2924
  source 1..215: note = Description of Artificial Sequence: Synthetic polypeptide; note = XENP019739 ipilimumab_H3L0-1G6_H1.279_L1.194 Light Chain

SEQ ID NO: 23412 - protein, 108 aa, synthetic construct; identical to SEQ ID NO: 23
  source 1..108: note = Description of Artificial Sequence: Synthetic polypeptide; note = VL of XENP019739

SEQ ID NO: 23413 - protein, 12 aa, synthetic construct
  source 1..12: note = Description of Artificial Sequence: Synthetic peptide; note = XENP019739 vlCDR1
RASQSVGSSYLA

SEQ ID NO: 23414 - protein, 7 aa, synthetic construct
  source 1..7: note = Description of Artificial Sequence: Synthetic peptide; note = XENP019739 vlCDR2
GAFSRAT

SEQ ID NO: 23415 - protein, 9 aa, synthetic construct
  source 1..9: note = Description of Artificial Sequence: Synthetic peptide; note = XENP019739 vlCDR3
QQYGSSPWT

SEQ ID NO: 23416 - protein, 447 aa, synthetic construct; identical to SEQ ID NO: 23356
  source 1..447: note = Description of Artificial Sequence: Synthetic polypeptide; note = XENP019741 ipilimumab_H3L0-1G6_L1.194_H1.279 Fab-Fc Heavy Chain

SEQ ID NO: 23417 - protein, 118 aa, synthetic construct; identical to SEQ ID NO: 139
  source 1..118: note = Description of Artificial Sequence: Synthetic polypeptide; note = VH of XENP019741

SEQ ID NO: 23418 - protein, 5 aa, synthetic construct
  source 1..5: note = Description of Artificial Sequence: Synthetic peptide; note = XENP019741 vhCDR1
SYTMH

SEQ ID NO: 23419 - protein, 17 aa, synthetic construct
  source 1..17: note = Description of Artificial Sequence: Synthetic peptide; note = XENP019741 vhCDR2
FISYDGNNKYYADSVKG

SEQ ID NO: 23420 - protein, 9 aa, synthetic construct
  source 1..9: note = Description of Artificial Sequence: Synthetic peptide; note = XENP019741 vhCDR3
TGWLGPFDY

SEQ ID NO: 23421 - protein, 480 aa, synthetic construct; identical to SEQ ID NO: 23221
  source 1..480: note = Description of Artificial Sequence: Synthetic polypeptide; note = XENP019741 ipilimumab_H3L0-1G6_L1.194_H1.279 scFv-Fc Heavy Chain

SEQ ID NO: 23422 - protein, 107 aa, synthetic construct; identical to SEQ ID NO: 10999
  source 1..107: note = Description of Artificial Sequence: Synthetic polypeptide; note = VH of XENP019741

SEQ ID NO: 23423 - protein, 122 aa, synthetic construct; identical to SEQ ID NO: 10908
  source 1..122: note = Description of Artificial Sequence: Synthetic polypeptide; note = VL of XENP019741

SEQ ID NO: 23424 - protein, 231 aa, synthetic construct; identical to SEQ ID NO: 21532
  source 1..231: note = Description of Artificial Sequence: Synthetic polypeptide; note = Fc chain of XENP019741

SEQ ID NO: 23425 - protein, 11 aa, synthetic construct
  source 1..11: note = Description of Artificial Sequence: Synthetic peptide; note = XENP019741 vhCDR1
RASQSVGNDVA

SEQ ID NO: 23426 - protein, 7 aa, synthetic construct
  source 1..7: note = Description of Artificial Sequence: Synthetic peptide; note = XENP019741 vhCDR2
YASHRYT

SEQ ID NO: 23427 - protein, 9 aa, synthetic construct
  source 1..9: note = Description of Artificial Sequence: Synthetic peptide; note = XENP019741 vhCDR3
QQDFSSPRT

SEQ ID NO: 23428 - protein, 5 aa, synthetic construct
  source 1..5: note = Description of Artificial Sequence: Synthetic peptide; note = XENP019741 vlCDR1
NYWMN

SEQ ID NO: 23429 - protein, 19 aa, synthetic construct
  source 1..19: note = Description of Artificial Sequence: Synthetic peptide; note = XENP019741 vlCDR2
EIRLYSNNYATHYAESVKG

SEQ ID NO: 23430 - protein, 11 aa, synthetic construct
  source 1..11: note = Description of Artificial Sequence: Synthetic peptide; note = XENP019741 vlCDR3
YYGNYGGYFDV

SEQ ID NO: 23431 - protein, 215 aa, synthetic construct; identical to SEQ ID NO: 2924
  source 1..215: note = Description of Artificial Sequence: Synthetic polypeptide; note = XENP019741 ipilimumab_H3L0-1G6_L1.194_H1.279 Light Chain

SEQ ID NO: 23432 - protein, 108 aa, synthetic construct; identical to SEQ ID NO: 23
  source 1..108: note = Description of Artificial Sequence: Synthetic polypeptide; note = VL of XENP019741

SEQ ID NO: 23433 - protein, 12 aa, synthetic construct
  source 1..12: note = Description of Artificial Sequence: Synthetic peptide; note = XENP019741 vlCDR1
RASQSVGSSYLA

SEQ ID NO: 23434 - protein, 7 aa, synthetic construct
  source 1..7: note = Description of Artificial Sequence: Synthetic peptide; note = XENP019741 vlCDR2
GAFSRAT

SEQ ID NO: 23435 - protein, 9 aa, synthetic construct
  source 1..9: note = Description of Artificial Sequence: Synthetic peptide; note = XENP019741 vlCDR3
QQYGSSPWT

SEQ ID NO: 23436 - protein, 447 aa, synthetic construct; identical to SEQ ID NO: 23356
  source 1..447: note = Description of Artificial Sequence: Synthetic polypeptide; note = XENP020053 ipilimumab_H3L0.22-1G6_L1.194_H1.279 Fab-Fc Heavy Chain

SEQ ID NO: 23437 - protein, 118 aa, synthetic construct; identical to SEQ ID NO: 139
  source 1..118: note = Description of Artificial Sequence: Synthetic polypeptide; note = VH of XENP020053

SEQ ID NO: 23438 - protein, 5 aa, synthetic construct
  source 1..5: note = Description of Artificial Sequence: Synthetic peptide; note = XENP020053 vhCDR1
SYTMH

SEQ ID NO: 23439 - protein, 17 aa, synthetic construct
  source 1..17: note = Description of Artificial Sequence: Synthetic peptide; note = XENP020053 vhCDR2
FISYDGNNKYYADSVKG

SEQ ID NO: 23440 - protein, 9 aa, synthetic construct
  source 1..9: note = Description of Artificial Sequence: Synthetic peptide; note = XENP020053 vhCDR3
TGWLGPFDY

SEQ ID NO: 23441 - protein, 480 aa, synthetic construct; identical to SEQ ID NO: 23221
  source 1..480: note = Description of Artificial Sequence: Synthetic polypeptide; note = XENP020053 ipilimumab_H3L0.22-1G6_L1.194_H1.279 scFv-Fc Heavy Chain

SEQ ID NO: 23442 - protein, 107 aa, synthetic construct; identical to SEQ ID NO: 10999
  source 1..107: note = Description of Artificial Sequence: Synthetic polypeptide; note = VH of XENP020053

SEQ ID NO: 23443 - protein, 122 aa, synthetic construct; identical to SEQ ID NO: 10908
  source 1..122: note = Description of Artificial Sequence: Synthetic polypeptide; note = VL of XENP020053

SEQ ID NO: 23444 - protein, 231 aa, synthetic construct; identical to SEQ ID NO: 21532
  source 1..231: note = Description of Artificial Sequence: Synthetic polypeptide; note = Fc chain of XENP020053

SEQ ID NO: 23445 - protein, 11 aa, synthetic construct
  source 1..11: note = Description of Artificial Sequence: Synthetic peptide; note = XENP020053 vhCDR1
RASQSVGNDVA

SEQ ID NO: 23446 - protein, 7 aa, synthetic construct
  source 1..7: note = Description of Artificial Sequence: Synthetic peptide; note = XENP020053 vhCDR2
YASHRYT

SEQ ID NO: 23447 - protein, 9 aa, synthetic construct
  source 1..9: note = Description of Artificial Sequence: Synthetic peptide; note = XENP020053 vhCDR3
QQDFSSPRT

SEQ ID NO: 23448 - protein, 5 aa, synthetic construct
  source 1..5: note = Description of Artificial Sequence: Synthetic peptide; note = XENP020053 vlCDR1
NYWMN

SEQ ID NO: 23449 - protein, 19 aa, synthetic construct
  source 1..19: note = Description of Artificial Sequence: Synthetic peptide; note = XENP020053 vlCDR2
EIRLYSNNYATHYAESVKG

SEQ ID NO: 23450 - protein, 11 aa, synthetic construct
  source 1..11: note = Description of Artificial Sequence: Synthetic peptide; note = XENP020053 vlCDR3
YYGNYGGYFDV

SEQ ID NO: 23451 - protein, 215 aa, synthetic construct; identical to SEQ ID NO: 4504
  source 1..215: note = Description of Artificial Sequence: Synthetic polypeptide; note = XENP020053 ipilimumab_H3L0.22-1G6_L1.194_H1.279 Light Chain

SEQ ID NO: 23452 - protein, 108 aa, synthetic construct; identical to SEQ ID NO: 1607
  source 1..108: note = Description of Artificial Sequence: Synthetic polypeptide; note = VL of XENP020053

SEQ ID NO: 23453 - protein, 12 aa, synthetic construct
  source 1..12: note = Description of Artificial Sequence: Synthetic peptide; note = XENP020053 vlCDR1
RASQSVSSSYLA

SEQ ID NO: 23454 - protein, 7 aa, synthetic construct
  source 1..7: note = Description of Artificial Sequence: Synthetic peptide; note = XENP020053 vlCDR2
GAFSRAT

SEQ ID NO: 23455 - protein, 9 aa, synthetic construct
  source 1..9: note = Description of Artificial Sequence: Synthetic peptide; note = XENP020053 vlCDR3
QQYGSSPWT

SEQ ID NO: 23456 - protein, 447 aa, synthetic construct; identical to SEQ ID NO: 23356
  source 1..447: note = Description of Artificial Sequence: Synthetic polypeptide; note = XENP020066 ipilimumab_H3_L0.22-1G6_H1.279_L1.194 Fab-Fc Heavy Chain

SEQ ID NO: 23457 - protein, 118 aa, synthetic construct; identical to SEQ ID NO: 139
  source 1..118: note = Description of Artificial Sequence: Synthetic polypeptide; note = VH of XENP020066

SEQ ID NO: 23458 - protein, 5 aa, synthetic construct
  source 1..5: note = Description of Artificial Sequence: Synthetic peptide; note = XENP020066 vhCDR1
SYTMH

SEQ ID NO: 23459 - protein, 17 aa, synthetic construct
  source 1..17: note = Description of Artificial Sequence: Synthetic peptide; note = XENP020066 vhCDR2
FISYDGNNKYYADSVKG

SEQ ID NO: 23460 - protein, 9 aa, synthetic construct
  source 1..9: note = Description of Artificial Sequence: Synthetic peptide; note = XENP020066 vhCDR3
TGWLGPFDY

SEQ ID NO: 23461 - protein, 480 aa, synthetic construct; identical to SEQ ID NO: 23401
  source 1..480: note = Description of Artificial Sequence: Synthetic polypeptide; note = XENP020066 ipilimumab_H3_L0.22-1G6_H1.279_L1.194 scFv-Fc Heavy Chain

SEQ ID NO: 23462 - protein, 122 aa, synthetic construct; identical to SEQ ID NO: 10908
  source 1..122: note = Description of Artificial Sequence: Synthetic polypeptide; note = VH of XENP020066

SEQ ID NO: 23463 - protein, 107 aa, synthetic construct; identical to SEQ ID NO: 10999
  source 1..107: note = Description of Artificial Sequence: Synthetic polypeptide; note = VL of XENP020066

SEQ ID NO: 23464 - protein, 231 aa, synthetic construct; identical to SEQ ID NO: 21532
  source 1..231: note = Description of Artificial Sequence: Synthetic polypeptide; note = Fc chain of XENP020066

SEQ ID NO: 23465 - protein, 5 aa, synthetic construct
  source 1..5: note = Description of Artificial Sequence: Synthetic peptide; note = XENP020066 vhCDR1
NYWMN

SEQ ID NO: 23466 - protein, 19 aa, synthetic construct
  source 1..19: note = Description of Artificial Sequence: Synthetic peptide; note = XENP020066 vhCDR2
EIRLYSNNYATHYAESVKG

SEQ ID NO: 23467 - protein, 11 aa, synthetic construct
  source 1..11: note = Description of Artificial Sequence: Synthetic peptide; note = XENP020066 vhCDR3
YYGNYGGYFDV

SEQ ID NO: 23468 - protein, 11 aa, synthetic construct
  source 1..11: note = Description of Artificial Sequence: Synthetic peptide; note = XENP020066 vlCDR1
RASQSVGNDVA

SEQ ID NO: 23469 - protein, 7 aa, synthetic construct
  source 1..7: note = Description of Artificial Sequence: Synthetic peptide; note = XENP020066 vlCDR2
YASHRYT

SEQ ID NO: 23470 - protein, 9 aa, synthetic construct
  source 1..9: note = Description of Artificial Sequence: Synthetic peptide; note = XENP020066 vlCDR3
QQDFSSPRT

SEQ ID NO: 23471 - protein, 215 aa, synthetic construct; identical to SEQ ID NO: 4504
  source 1..215: note = Description of Artificial Sequence: Synthetic polypeptide; note = XENP020066 ipilimumab_H3_L0.22-1G6_H1.279_L1.194 Light Chain

SEQ ID NO: 23472 - protein, 108 aa, synthetic construct; identical to SEQ ID NO: 1607
  source 1..108: note = Description of Artificial Sequence: Synthetic polypeptide; note = VL of XENP020066

SEQ ID NO: 23473 - protein, 12 aa, synthetic construct
  source 1..12: note = Description of Artificial Sequence: Synthetic peptide; note = XENP020066 vlCDR1
RASQSVSSSYLA

SEQ ID NO: 23474 - protein, 7 aa, synthetic construct
  source 1..7: note = Description of Artificial Sequence: Synthetic peptide; note = XENP020066 vlCDR2
GAFSRAT

SEQ ID NO: 23475 - protein, 9 aa, synthetic construct
  source 1..9: note = Description of Artificial Sequence: Synthetic peptide; note = XENP020066 vlCDR3
QQYGSSPWT

SEQ ID NO: 23476 - protein, 447 aa, synthetic construct; identical to SEQ ID NO: 23356
  source 1..447: note = Description of Artificial Sequence: Synthetic polypeptide; note = XENP020130 ipilimumab_H3_L0.22-1G6_L1.210_H1.288 Fab-Fc Heavy Chain

SEQ ID NO: 23477 - protein, 118 aa, synthetic construct; identical to SEQ ID NO: 139
  source 1..118: note = Description of Artificial Sequence: Synthetic polypeptide; note = VH of XENP020130

SEQ ID NO: 23478 - protein, 5 aa, synthetic construct
  source 1..5: note = Description of Artificial Sequence: Synthetic peptide; note = XENP020130 vhCDR1
SYTMH

SEQ ID NO: 23479 - protein, 17 aa, synthetic construct
  source 1..17: note = Description of Artificial Sequence: Synthetic peptide; note = XENP020130 vhCDR2
FISYDGNNKYYADSVKG

SEQ ID NO: 23480 - protein, 9 aa, synthetic construct
  source 1..9: note = Description of Artificial Sequence: Synthetic peptide; note = XENP020130 vhCDR3
TGWLGPFDY

SEQ ID NO: 23481 - protein, 480 aa, synthetic construct; identical to SEQ ID NO: 23381
  source 1..480: note = Description of Artificial Sequence: Synthetic polypeptide; note = XENP020130 ipilimumab_H3_L0.22-1G6_L1.210_H1.288 scFv-Fc Heavy Chain

SEQ ID NO: 23482 - protein, 107 aa, synthetic construct; identical to SEQ ID NO: 11359
  source 1..107: note = Description of Artificial Sequence: Synthetic polypeptide; note = VH of XENP020130

SEQ ID NO: 23483 - protein, 122 aa, synthetic construct; identical to SEQ ID NO: 11358
  source 1..122: note = Description of Artificial Sequence: Synthetic polypeptide; note = VL of XENP020130

SEQ ID NO: 23484 - protein, 231 aa, synthetic construct; identical to SEQ ID NO: 21532
  source 1..231: note = Description of Artificial Sequence: Synthetic polypeptide; note = Fc chain of XENP020130

SEQ ID NO: 23485 - protein, 11 aa, synthetic construct
  source 1..11: note = Description of Artificial Sequence: Synthetic peptide; note = XENP020130 vhCDR1
RASQSVGNDVA

SEQ ID NO: 23486 - protein, 7 aa, synthetic construct
  source 1..7: note = Description of Artificial Sequence: Synthetic peptide; note = XENP020130 vhCDR2
YASHRYT

SEQ ID NO: 23487 - protein, 9 aa, synthetic construct
  source 1..9: note = Description of Artificial Sequence: Synthetic peptide; note = XENP020130 vhCDR3
QQDFSSPRT

SEQ ID NO: 23488 - protein, 5 aa, synthetic construct
  source 1..5: note = Description of Artificial Sequence: Synthetic peptide; note = XENP020130 vlCDR1
NYWMN

SEQ ID NO: 23489 - protein, 19 aa, synthetic construct
  source 1..19: note = Description of Artificial Sequence: Synthetic peptide; note = XENP020130 vlCDR2
EIRLYSNNYATHYAESVKG

SEQ ID NO: 23490 - protein, 11 aa, synthetic construct
  source 1..11: note = Description of Artificial Sequence: Synthetic peptide; note = XENP020130 vlCDR3
YYGNYGGYFDV

SEQ ID NO: 23491 - protein, 215 aa, synthetic construct; identical to SEQ ID NO: 4504
  source 1..215: note = Description of Artificial Sequence: Synthetic polypeptide; note = XENP020130 ipilimumab_H3_L0.22-1G6_L1.210_H1.288 Light Chain

SEQ ID NO: 23492 - protein, 108 aa, synthetic construct; identical to SEQ ID NO: 1607
  source 1..108: note = Description of Artificial Sequence: Synthetic polypeptide; note = VL of XENP020130

SEQ ID NO: 23493 - protein, 12 aa, synthetic construct
  source 1..12: note = Description of Artificial Sequence: Synthetic peptide; note = XENP020130 vlCDR1
RASQSVSSSYLA

SEQ ID NO: 23494 - protein, 7 aa, synthetic construct
  source 1..7: note = Description of Artificial Sequence: Synthetic peptide; note = XENP020130 vlCDR2
GAFSRAT

SEQ ID NO: 23495 - protein, 9 aa, synthetic construct
  source 1..9: note = Description of Artificial Sequence: Synthetic peptide; note = XENP020130 vlCDR3
QQYGSSPWT

SEQ ID NO: 23496 - protein, 447 aa, synthetic construct; identical to SEQ ID NO: 23356
  source 1..447: note = Description of Artificial Sequence: Synthetic polypeptide; note = XENP020146 ipilimumab_H3_L0.22-1G6_H1.280_L1.224 Fab-Fc Heavy Chain

SEQ ID NO: 23497 - protein, 118 aa, synthetic construct; identical to SEQ ID NO: 139
  source 1..118: note = Description of Artificial Sequence: Synthetic polypeptide; note = VH of XENP020146

SEQ ID NO: 23498 - protein, 5 aa, synthetic construct
  source 1..5: note = Description of Artificial Sequence: Synthetic peptide; note = XENP020146 vhCDR1
SYTMH

SEQ ID NO: 23499 - protein, 17 aa, synthetic construct
  source 1..17: note = Description of Artificial Sequence: Synthetic peptide; note = XENP020146 vhCDR2
FISYDGNNKYYADSVKG

SEQ ID NO: 23500 - protein, 9 aa, synthetic construct
  source 1..9: note = Description of Artificial Sequence: Synthetic peptide; note = XENP020146 vhCDR3
TGWLGPFDY

SEQ ID NO: 23501 - protein, 480 aa, synthetic construct; identical to SEQ ID NO: 22809
  source 1..480: note = Description of Artificial Sequence: Synthetic polypeptide; note = XENP020146 ipilimumab_H3_L0.22-1G6_H1.280_L1.224 scFv-Fc Heavy Chain

SEQ ID NO: 23502 - protein, 122 aa, synthetic construct; identical to SEQ ID NO: 10917
  source 1..122: note = Description of Artificial Sequence: Synthetic polypeptide; note = VH of XENP020146

SEQ ID NO: 23503 - protein, 107 aa, synthetic construct; identical to SEQ ID NO: 22811
  source 1..107: note = Description of Artificial Sequence: Synthetic polypeptide; note = VL of XENP020146

SEQ ID NO: 23504 - protein, 231 aa, synthetic construct; identical to SEQ ID NO: 21532
  source 1..231: note = Description of Artificial Sequence: Synthetic polypeptide; note = Fc chain of XENP020146

SEQ ID NO: 23505 - protein, 5 aa, synthetic construct
  source 1..5: note = Description of Artificial Sequence: Synthetic peptide; note = XENP020146 vhCDR1
NYWMN

SEQ ID NO: 23506 - protein, 19 aa, synthetic construct
  source 1..19: note = Description of Artificial Sequence: Synthetic peptide; note = XENP020146 vhCDR2
EIRLYSNNYATHYAESVKG

SEQ ID NO: 23507 - protein, 11 aa, synthetic construct
  source 1..11: note = Description of Artificial Sequence: Synthetic peptide; note = XENP020146 vhCDR3
YYGNYGGYFDV

SEQ ID NO: 23508 - protein, 11 aa, synthetic construct
  source 1..11: note = Description of Artificial Sequence: Synthetic peptide; note = XENP020146 vlCDR1
RASQSVGNDVA

SEQ ID NO: 23509 - protein, 7 aa, synthetic construct
  source 1..7: note = Description of Artificial Sequence: Synthetic peptide; note = XENP020146 vlCDR2
YASHRYT

SEQ ID NO: 23510 - protein, 9 aa, synthetic construct
  source 1..9: note = Description of Artificial Sequence: Synthetic peptide; note = XENP020146 vlCDR3
QQDWSSPRT

SEQ ID NO: 23511 - protein, 215 aa, synthetic construct; identical to SEQ ID NO: 4504
  source 1..215: note = Description of Artificial Sequence: Synthetic polypeptide; note = XENP020146 ipilimumab_H3_L0.22-1G6_H1.280_L1.224 Light Chain

SEQ ID NO: 23512 - protein, 108 aa, synthetic construct; identical to SEQ ID NO: 1607
  source 1..108: note = Description of Artificial Sequence: Synthetic polypeptide; note = VL of XENP020146

SEQ ID NO: 23513 - protein, 12 aa, synthetic construct
  source 1..12: note = Description of Artificial Sequence: Synthetic peptide; note = XENP020146 vlCDR1
RASQSVSSSYLA

SEQ ID NO: 23514 - protein, 7 aa, synthetic construct
  source 1..7: note = Description of Artificial Sequence: Synthetic peptide; note = XENP020146 vlCDR2
GAFSRAT

SEQ ID NO: 23515 - protein, 9 aa, synthetic construct
  source 1..9: note = Description of Artificial Sequence: Synthetic peptide; note = XENP020146 vlCDR3
QQYGSSPWT

SEQ ID NO: 23516 - protein, 451 aa, synthetic construct
  source 1..451: note = Description of Artificial Sequence: Synthetic polypeptide; note = XENP020155 1G6_H1.278_L1.188-ipilimumab_H3.4_L0.12 Fab-Fc Heavy Chain
EVQLVESGGGLVKPGGSLRLSCVASGFTFSNYWMNWVRQAPGKGLEWVAEIRLYSNNYATHYAESVKGRFTISRDDSKSTLYLQMNNLKTEDTGVYYCTRYYGNYGGYFDVWGQGTLVTVSSASTKGPSVFPLAPSSKSTSGGTAALGCLVKDYFPEPVTVSWNSGALTSGVHTFPAVLQSSGLYSLSSVVTVPSSSLGTQTYICNVNHKPSDTKVDKKVEPKSCDKTHTCPPCPAPPVAGPSVFLFPPKPKDTLMISRTPEVTCVVVDVKHEDPEVKFNWYVDGVEVHNAKTKPREEEYNSTYRVVSVLTVLHQDWLNGKEYKCKVSNKALPAPIEKTISKAKGQPREPQVYTLPPSREEMTKNQVSLTCDVSGFYPSDIAVEWESDGQPENNYKTTPPVLDSDGSFFLYSKLTVDKSRWEQGDVFSCSVMHEALHNHYTQKSLSLSPGK

SEQ ID NO: 23517 - protein, 122 aa, synthetic construct; identical to SEQ ID NO: 10845
  source 1..122: note = Description of Artificial Sequence: Synthetic polypeptide; note = VH of XENP020155

SEQ ID NO: 23518 - protein, 5 aa, synthetic construct
  source 1..5: note = Description of Artificial Sequence: Synthetic peptide; note = XENP020155 vhCDR1
NYWMN

SEQ ID NO: 23519 - protein, 19 aa, synthetic construct
  source 1..19: note = Description of Artificial Sequence: Synthetic peptide; note = XENP020155 vhCDR2
EIRLYSNNYATHYAESVKG

SEQ ID NO: 23520 - protein, 11 aa, synthetic construct
  source 1..11: note = Description of Artificial Sequence: Synthetic peptide; note = XENP020155 vhCDR3
YYGNYGGYFDV

SEQ ID NO: 23521 - protein, 477 aa, synthetic construct; identical to SEQ ID NO: 21549
  source 1..477: note = Description of Artificial Sequence: Synthetic polypeptide; note = XENP020155 1G6_H1.278_L1.188-ipilimumab_H3.4_L0.12 scFv-Fc Heavy Chain

SEQ ID NO: 23522 - protein, 118 aa, synthetic construct; identical to SEQ ID NO: 2461
  source 1..118: note = Description of Artificial Sequence: Synthetic polypeptide; note = VH of XENP020155

SEQ ID NO: 23523 - protein, 108 aa, synthetic construct; identical to SEQ ID NO: 1517
  source 1..108: note = Description of Artificial Sequence: Synthetic polypeptide; note = VL of XENP020155

SEQ ID NO: 23524 - protein, 231 aa, synthetic construct; identical to SEQ ID NO: 21532
  source 1..231: note = Description of Artificial Sequence: Synthetic polypeptide; note = Fc chain of XENP020155

SEQ ID NO: 23525 - protein, 5 aa, synthetic construct
  source 1..5: note = Description of Artificial Sequence: Synthetic peptide; note = XENP020155 vhCDR1
SYTMH

SEQ ID NO: 23526 - protein, 17 aa, synthetic construct
  source 1..17: note = Description of Artificial Sequence: Synthetic peptide; note = XENP020155 vhCDR2
FISYDGNHKYYADSVKG

SEQ ID NO: 23527 - protein, 9 aa, synthetic construct
  source 1..9: note = Description of Artificial Sequence: Synthetic peptide; note = XENP020155 vhCDR3
TGHLGPFDL

SEQ ID NO: 23528 - protein, 12 aa, synthetic construct
  source 1..12: note = Description of Artificial Sequence: Synthetic peptide; note = XENP020155 vlCDR1
RASQSVGSSYLA

SEQ ID NO: 23529 - protein, 7 aa, synthetic construct
  source 1..7: note = Description of Artificial Sequence: Synthetic peptide; note = XENP020155 vlCDR2
GAFSRAT

SEQ ID NO: 23530 - protein, 9 aa, synthetic construct
  source 1..9: note = Description of Artificial Sequence: Synthetic peptide; note = XENP020155 vlCDR3
QQYGSSPWT

SEQ ID NO: 23531 - protein, 214 aa, synthetic construct; identical to SEQ ID NO: 16660
  source 1..214: note = Description of Artificial Sequence: Synthetic polypeptide; note = XENP020155 1G6_H1.278_L1.188-ipilimumab_H3.4_L0.12 Light Chain

SEQ ID NO: 23532 - protein, 107 aa, synthetic construct; identical to SEQ ID NO: 10855
  source 1..107: note = Description of Artificial Sequence: Synthetic polypeptide; note = VL of XENP020155

SEQ ID NO: 23533 - protein, 11 aa, synthetic construct
  source 1..11: note = Description of Artificial Sequence: Synthetic peptide; note = XENP020155 vlCDR1
RASQSVGNDVA

SEQ ID NO: 23534 - protein, 7 aa, synthetic construct
  source 1..7: note = Description of Artificial Sequence: Synthetic peptide; note = XENP020155 vlCDR2
YASHRYT

SEQ ID NO: 23535 - protein, 9 aa, synthetic construct
  source 1..9: note = Description of Artificial Sequence: Synthetic peptide; note = XENP020155 vlCDR3
QQDFSSPRT

SEQ ID NO: 23536 - protein, 447 aa, synthetic construct; identical to SEQ ID NO: 23356
  source 1..447: note = Description of Artificial Sequence: Synthetic polypeptide; note = XENP020264 ipilimumab_H3_L0-1G6_H1.280_L1.224 Fab-Fc Heavy Chain

SEQ ID NO: 23537 - protein, 118 aa, synthetic construct; identical to SEQ ID NO: 139
  source 1..118: note = Description of Artificial Sequence: Synthetic polypeptide; note = VH of XENP020264

SEQ ID NO: 23538 - protein, 5 aa, synthetic construct
  source 1..5: note = Description of Artificial Sequence: Synthetic peptide; note = XENP020264 vhCDR1
SYTMH

SEQ ID NO: 23539 - protein, 17 aa, synthetic construct
  source 1..17: note = Description of Artificial Sequence: Synthetic peptide; note = XENP020264 vhCDR2
FISYDGNNKYYADSVKG

SEQ ID NO: 23540 - protein, 9 aa, synthetic construct
  source 1..9: note = Description of Artificial Sequence: Synthetic peptide; note = XENP020264 vhCDR3
TGWLGPFDY

SEQ ID NO: 23541 - protein, 480 aa, synthetic construct; identical to SEQ ID NO: 22809
  source 1..480: note = Description of Artificial Sequence: Synthetic polypeptide; note = XENP020264 ipilimumab_H3_L0-1G6_H1.280_L1.224 scFv-Fc Heavy Chain

SEQ ID NO: 23542 - protein, 122 aa, synthetic construct; identical to SEQ ID NO: 10917
  source 1..122: note = Description of Artificial Sequence: Synthetic polypeptide; note = VH of XENP020264

SEQ ID NO: 23543 - protein, 107 aa, synthetic construct; identical to SEQ ID NO: 22811
  source 1..107: note = Description of Artificial Sequence: Synthetic polypeptide; note = VL of XENP020264

SEQ ID NO: 23544 - protein, 231 aa, synthetic construct; identical to SEQ ID NO: 21532
  source 1..231: note = Description of Artificial Sequence: Synthetic polypeptide; note = Fc chain of XENP020264

SEQ ID NO: 23545 - protein, 5 aa, synthetic construct
  source 1..5: note = Description of Artificial Sequence: Synthetic peptide; note = XENP020264 vhCDR1
NYWMN

SEQ ID NO: 23546 - protein, 19 aa, synthetic construct
  source 1..19: note = Description of Artificial Sequence: Synthetic peptide; note = XENP020264 vhCDR2
EIRLYSNNYATHYAESVKG

SEQ ID NO: 23547 - protein, 11 aa, synthetic construct
  source 1..11: note = Description of Artificial Sequence: Synthetic peptide; note = XENP020264 vhCDR3
YYGNYGGYFDV

SEQ ID NO: 23548 - protein, 11 aa, synthetic construct
  source 1..11: note = Description of Artificial Sequence: Synthetic peptide; note = XENP020264 vlCDR1
RASQSVGNDVA

SEQ ID NO: 23549 - protein, 7 aa, synthetic construct
  source 1..7: note = Description of Artificial Sequence: Synthetic peptide; note = XENP020264 vlCDR2
YASHRYT

SEQ ID NO: 23550 - protein, 9 aa, synthetic construct
  source 1..9: note = Description of Artificial Sequence: Synthetic peptide; note = XENP020264 vlCDR3
QQDWSSPRT

SEQ ID NO: 23551 - protein, 215 aa, synthetic construct; identical to SEQ ID NO: 2924
  source 1..215: note = Description of Artificial Sequence: Synthetic polypeptide; note = XENP020264 ipilimumab_H3_L0-1G6_H1.280_L1.224 Light Chain

SEQ ID NO: 23552 - protein, 108 aa, synthetic construct; identical to SEQ ID NO: 23
  source 1..108: note = Description of Artificial Sequence: Synthetic polypeptide; note = VL of XENP020264

SEQ ID NO: 23553 - protein, 12 aa, synthetic construct
  source 1..12: note = Description of Artificial Sequence: Synthetic peptide; note = XENP020264 vlCDR1
RASQSVGSSYLA

SEQ ID NO: 23554 - protein, 7 aa, synthetic construct
  source 1..7: note = Description of Artificial Sequence: Synthetic peptide; note = XENP020264 vlCDR2
GAFSRAT

SEQ ID NO: 23555 - protein, 9 aa, synthetic construct
  source 1..9: note = Description of Artificial Sequence: Synthetic peptide; note = XENP020264 vlCDR3
QQYGSSPWT

SEQ ID NO: 23556 - protein, 447 aa, synthetic construct
  source 1..447: note = Description of Artificial Sequence: Synthetic polypeptide; note = XENP020716 ipilimumab_H3_L0.22-1G6_L1.210_H1.288 M428L/N434S  Fab-Fc Heavy Chain
EVQLVESGGGLVKPGGSLRLSCAASGFTFSSYTMHWVRQAPGKGLEWVSFISYDGNNKYYADSVKGRFTISRDNAKNSLYLQMNSLRAEDTAVYYCARTGWLGPFDYWGQGTLVTVSSASTKGPSVFPLAPSSKSTSGGTAALGCLVKDYFPEPVTVSWNSGALTSGVHTFPAVLQSSGLYSLSSVVTVPSSSLGTQTYICNVNHKPSDTKVDKKVEPKSCDKTHTCPPCPAPPVAGPSVFLFPPKPKDTLMISRTPEVTCVVVDVKHEDPEVKFNWYVDGVEVHNAKTKPREEEYNSTYRVVSVLTVLHQDWLNGKEYKCKVSNKALPAPIEKTISKAKGQPREPQVYTLPPSREEMTKNQVSLTCDVSGFYPSDIAVEWESDGQPENNYKTTPPVLDSDGSFFLYSKLTVDKSRWEQGDVFSCSVLHEALHSHYTQKSLSLSPGK

SEQ ID NO: 23557 - protein, 118 aa, synthetic construct; identical to SEQ ID NO: 139
  source 1..118: note = Description of Artificial Sequence: Synthetic polypeptide; note = VH of XENP020716

SEQ ID NO: 23558 - protein, 5 aa, synthetic construct
  source 1..5: note = Description of Artificial Sequence: Synthetic peptide; note = XENP020716 vhCDR1
SYTMH

SEQ ID NO: 23559 - protein, 17 aa, synthetic construct
  source 1..17: note = Description of Artificial Sequence: Synthetic peptide; note = XENP020716 vhCDR2
FISYDGNNKYYADSVKG

SEQ ID NO: 23560 - protein, 9 aa, synthetic construct
  source 1..9: note = Description of Artificial Sequence: Synthetic peptide; note = XENP020716 vhCDR3
TGWLGPFDY

SEQ ID NO: 23561 - protein, 480 aa, synthetic construct
  source 1..480: note = Description of Artificial Sequence: Synthetic polypeptide; note = XENP020716 ipilimumab_H3_L0.22-1G6_L1.210_H1.288 M428L/N434S scFv-Fc Heavy Chain
EIVLTQSPATLSASPGERVTLTCRASQSVGNDVAWYQQKPGQAPRLLINYASHRYTGVPDRFTGSGYGTEFTLTISSVQSEDFGVYYCQQDFSSPRTFGCGTKVEIKGKPGSGKPGSGKPGSGKPGSEVQLVESGGGLVKPGGSLRLSCVASGFTFSNYWMNWVRQAPGKCLEWVAEIRLYSNNYATHYAESVKGRFTISRDDSKSTLYLQMNNLKTEDTGVYYCTRYYGNYGGYFDVWGRGTLVTVSSEPKSSDKTHTCPPCPAPPVAGPSVFLFPPKPKDTLMISRTPEVTCVVVDVKHEDPEVKFNWYVDGVEVHNAKTKPREEQYNSTYRVVSVLTVLHQDWLNGKEYKCKVSNKALPAPIEKTISKAKGQPREPQVYTLPPSREQMTKNQVKLTCLVKGFYPSDIAVEWESNGQPENNYKTTPPVLDSDGSFFLYSKLTVDKSRWQQGNVFSCSVLHEALHSHYTQKSLSLSPGK

SEQ ID NO: 23562 - protein, 107 aa, synthetic construct; identical to SEQ ID NO: 11359
  source 1..107: note = Description of Artificial Sequence: Synthetic polypeptide; note = VH of XENP020716

SEQ ID NO: 23563 - protein, 122 aa, synthetic construct; identical to SEQ ID NO: 11358
  source 1..122: note = Description of Artificial Sequence: Synthetic polypeptide; note = VL of XENP020716

SEQ ID NO: 23564 - protein, 231 aa, synthetic construct; identical to SEQ ID NO: 21572
  source 1..231: note = Description of Artificial Sequence: Synthetic polypeptide; note = Fc chain of XENP020716

SEQ ID NO: 23565 - protein, 11 aa, synthetic construct
  source 1..11: note = Description of Artificial Sequence: Synthetic peptide; note = XENP020716 vhCDR1
RASQSVGNDVA

SEQ ID NO: 23566 - protein, 7 aa, synthetic construct
  source 1..7: note = Description of Artificial Sequence: Synthetic peptide; note = XENP020716 vhCDR2
YASHRYT

SEQ ID NO: 23567 - protein, 9 aa, synthetic construct
  source 1..9: note = Description of Artificial Sequence: Synthetic peptide; note = XENP020716 vhCDR3
QQDFSSPRT

SEQ ID NO: 23568 - protein, 5 aa, synthetic construct
  source 1..5: note = Description of Artificial Sequence: Synthetic peptide; note = XENP020716 vlCDR1
NYWMN

SEQ ID NO: 23569 - protein, 19 aa, synthetic construct
  source 1..19: note = Description of Artificial Sequence: Synthetic peptide; note = XENP020716 vlCDR2
EIRLYSNNYATHYAESVKG

SEQ ID NO: 23570 - protein, 11 aa, synthetic construct
  source 1..11: note = Description of Artificial Sequence: Synthetic peptide; note = XENP020716 vlCDR3
YYGNYGGYFDV

SEQ ID NO: 23571 - protein, 215 aa, synthetic construct; identical to SEQ ID NO: 4504
  source 1..215: note = Description of Artificial Sequence: Synthetic polypeptide; note = XENP020716 ipilimumab_H3_L0.22-1G6_L1.210_H1.288 M428L/N434S Light Chain

SEQ ID NO: 23572 - protein, 108 aa, synthetic construct; identical to SEQ ID NO: 1607
  source 1..108: note = Description of Artificial Sequence: Synthetic polypeptide; note = VL of XENP020716

SEQ ID NO: 23573 - protein, 12 aa, synthetic construct
  source 1..12: note = Description of Artificial Sequence: Synthetic peptide; note = XENP020716 vlCDR1
RASQSVSSSYLA

SEQ ID NO: 23574 - protein, 7 aa, synthetic construct
  source 1..7: note = Description of Artificial Sequence: Synthetic peptide; note = XENP020716 vlCDR2
GAFSRAT

SEQ ID NO: 23575 - protein, 9 aa, synthetic construct
  source 1..9: note = Description of Artificial Sequence: Synthetic peptide; note = XENP020716 vlCDR3
QQYGSSPWT

SEQ ID NO: 23576 - protein, 447 aa, synthetic construct; identical to SEQ ID NO: 23556
  source 1..447: note = Description of Artificial Sequence: Synthetic polypeptide; note = XENP020717 ipilimumab_H3_L0.22-1G6_L1.194_H1.279 M428L/N434S Fab-Fc Heavy Chain

SEQ ID NO: 23577 - protein, 118 aa, synthetic construct; identical to SEQ ID NO: 139
  source 1..118: note = Description of Artificial Sequence: Synthetic polypeptide; note = VH of XENP020717

SEQ ID NO: 23578 - protein, 5 aa, synthetic construct
  source 1..5: note = Description of Artificial Sequence: Synthetic peptide; note = XENP020717 vhCDR1
SYTMH

SEQ ID NO: 23579 - protein, 17 aa, synthetic construct
  source 1..17: note = Description of Artificial Sequence: Synthetic peptide; note = XENP020717 vhCDR2
FISYDGNNKYYADSVKG

SEQ ID NO: 23580 - protein, 9 aa, synthetic construct
  source 1..9: note = Description of Artificial Sequence: Synthetic peptide; note = XENP020717 vhCDR3
TGWLGPFDY

SEQ ID NO: 23581 - protein, 480 aa, synthetic construct
  source 1..480: note = Description of Artificial Sequence: Synthetic polypeptide; note = XENP020717 ipilimumab_H3_L0.22-1G6_L1.194_H1.279 M428L/N434S scFv-Fc Heavy Chain
EIVLTQSPATLSASPGERVTLTCRASQSVGNDVAWYQQKPGQAPRLLINYASHRYTGVPDRFTGSGYGTEFTLTISSVQSEDFGVYYCQQDFSSPRTFGGGTKVEIKGKPGSGKPGSGKPGSGKPGSEVQLVESGGGLVKPGGSLRLSCVASGFTFSNYWMNWVRQAPGKGLEWVAEIRLYSNNYATHYAESVKGRFTISRDDSKSTLYLQMNNLKTEDTGVYYCTRYYGNYGGYFDVWGRGTLVTVSSEPKSSDKTHTCPPCPAPPVAGPSVFLFPPKPKDTLMISRTPEVTCVVVDVKHEDPEVKFNWYVDGVEVHNAKTKPREEQYNSTYRVVSVLTVLHQDWLNGKEYKCKVSNKALPAPIEKTISKAKGQPREPQVYTLPPSREQMTKNQVKLTCLVKGFYPSDIAVEWESNGQPENNYKTTPPVLDSDGSFFLYSKLTVDKSRWQQGNVFSCSVLHEALHSHYTQKSLSLSPGK

SEQ ID NO: 23582 - protein, 107 aa, synthetic construct; identical to SEQ ID NO: 10999
  source 1..107: note = Description of Artificial Sequence: Synthetic polypeptide; note = VH of XENP020717

SEQ ID NO: 23583 - protein, 122 aa, synthetic construct; identical to SEQ ID NO: 10908
  source 1..122: note = Description of Artificial Sequence: Synthetic polypeptide; note = VL of XENP020717

SEQ ID NO: 23584 - protein, 231 aa, synthetic construct; identical to SEQ ID NO: 21572
  source 1..231: note = Description of Artificial Sequence: Synthetic polypeptide; note = Fc chain of XENP020717

SEQ ID NO: 23585 - protein, 11 aa, synthetic construct
  source 1..11: note = Description of Artificial Sequence: Synthetic peptide; note = XENP020717 vhCDR1
RASQSVGNDVA

SEQ ID NO: 23586 - protein, 7 aa, synthetic construct
  source 1..7: note = Description of Artificial Sequence: Synthetic peptide; note = XENP020717 vhCDR2
YASHRYT

SEQ ID NO: 23587 - protein, 9 aa, synthetic construct
  source 1..9: note = Description of Artificial Sequence: Synthetic peptide; note = XENP020717 vhCDR3
QQDFSSPRT

SEQ ID NO: 23588 - protein, 5 aa, synthetic construct
  source 1..5: note = Description of Artificial Sequence: Synthetic peptide; note = XENP020717 vlCDR1
NYWMN

SEQ ID NO: 23589 - protein, 19 aa, synthetic construct
  source 1..19: note = Description of Artificial Sequence: Synthetic peptide; note = XENP020717 vlCDR2
EIRLYSNNYATHYAESVKG

SEQ ID NO: 23590 - protein, 11 aa, synthetic construct
  source 1..11: note = Description of Artificial Sequence: Synthetic peptide; note = XENP020717 vlCDR3
YYGNYGGYFDV

SEQ ID NO: 23591 - protein, 215 aa, synthetic construct; identical to SEQ ID NO: 4504
  source 1..215: note = Description of Artificial Sequence: Synthetic polypeptide; note = XENP020717 ipilimumab_H3_L0.22-1G6_L1.194_H1.279 M428L/N434S Light Chain

SEQ ID NO: 23592 - protein, 108 aa, synthetic construct; identical to SEQ ID NO: 1607
  source 1..108: note = Description of Artificial Sequence: Synthetic polypeptide; note = VL of XENP020717

SEQ ID NO: 23593 - protein, 12 aa, synthetic construct
  source 1..12: note = Description of Artificial Sequence: Synthetic peptide; note = XENP020717 vlCDR1
RASQSVSSSYLA

SEQ ID NO: 23594 - protein, 7 aa, synthetic construct
  source 1..7: note = Description of Artificial Sequence: Synthetic peptide; note = XENP020717 vlCDR2
GAFSRAT

SEQ ID NO: 23595 - protein, 9 aa, synthetic construct
  source 1..9: note = Description of Artificial Sequence: Synthetic peptide; note = XENP020717 vlCDR3
QQYGSSPWT

SEQ ID NO: 23596 - protein, 447 aa, synthetic construct; identical to SEQ ID NO: 23556
  source 1..447: note = Description of Artificial Sequence: Synthetic polypeptide; note = XENP020718 ipilimumab_H3_L0.22-1G6_H1.279_L1.194 M428L/N434S Fab-Fc Heavy Chain

SEQ ID NO: 23597 - protein, 118 aa, synthetic construct; identical to SEQ ID NO: 139
  source 1..118: note = Description of Artificial Sequence: Synthetic polypeptide; note = VH of XENP020718

SEQ ID NO: 23598 - protein, 5 aa, synthetic construct
  source 1..5: note = Description of Artificial Sequence: Synthetic peptide; note = XENP020718 vhCDR1
SYTMH

SEQ ID NO: 23599 - protein, 17 aa, synthetic construct
  source 1..17: note = Description of Artificial Sequence: Synthetic peptide; note = XENP020718 vhCDR2
FISYDGNNKYYADSVKG

SEQ ID NO: 23600 - protein, 9 aa, synthetic construct
  source 1..9: note = Description of Artificial Sequence: Synthetic peptide; note = XENP020718 vhCDR3
TGWLGPFDY

SEQ ID NO: 23601 - protein, 480 aa, synthetic construct
  source 1..480: note = Description of Artificial Sequence: Synthetic polypeptide; note = XENP020718 ipilimumab_H3_L0.22-1G6_H1.279_L1.194 M428L/N434S scFv-Fc Heavy Chain
EVQLVESGGGLVKPGGSLRLSCVASGFTFSNYWMNWVRQAPGKGLEWVAEIRLYSNNYATHYAESVKGRFTISRDDSKSTLYLQMNNLKTEDTGVYYCTRYYGNYGGYFDVWGRGTLVTVSSGKPGSGKPGSGKPGSGKPGSEIVLTQSPATLSASPGERVTLTCRASQSVGNDVAWYQQKPGQAPRLLINYASHRYTGVPDRFTGSGYGTEFTLTISSVQSEDFGVYYCQQDFSSPRTFGGGTKVEIKEPKSSDKTHTCPPCPAPPVAGPSVFLFPPKPKDTLMISRTPEVTCVVVDVKHEDPEVKFNWYVDGVEVHNAKTKPREEQYNSTYRVVSVLTVLHQDWLNGKEYKCKVSNKALPAPIEKTISKAKGQPREPQVYTLPPSREQMTKNQVKLTCLVKGFYPSDIAVEWESNGQPENNYKTTPPVLDSDGSFFLYSKLTVDKSRWQQGNVFSCSVLHEALHSHYTQKSLSLSPGK

SEQ ID NO: 23602 - protein, 122 aa, synthetic construct; identical to SEQ ID NO: 10908
  source 1..122: note = Description of Artificial Sequence: Synthetic polypeptide; note = VH of XENP020718

SEQ ID NO: 23603 - protein, 107 aa, synthetic construct; identical to SEQ ID NO: 10999
  source 1..107: note = Description of Artificial Sequence: Synthetic polypeptide; note = VL of XENP020718

SEQ ID NO: 23604 - protein, 231 aa, synthetic construct; identical to SEQ ID NO: 21572
  source 1..231: note = Description of Artificial Sequence: Synthetic polypeptide; note = Fc chain of XENP020718

SEQ ID NO: 23605 - protein, 5 aa, synthetic construct
  source 1..5: note = Description of Artificial Sequence: Synthetic peptide; note = XENP020718 vhCDR1
NYWMN

SEQ ID NO: 23606 - protein, 19 aa, synthetic construct
  source 1..19: note = Description of Artificial Sequence: Synthetic peptide; note = XENP020718 vhCDR2
EIRLYSNNYATHYAESVKG

SEQ ID NO: 23607 - protein, 11 aa, synthetic construct
  source 1..11: note = Description of Artificial Sequence: Synthetic peptide; note = XENP020718 vhCDR3
YYGNYGGYFDV

SEQ ID NO: 23608 - protein, 11 aa, synthetic construct
  source 1..11: note = Description of Artificial Sequence: Synthetic peptide; note = XENP020718 vlCDR1
RASQSVGNDVA

SEQ ID NO: 23609 - protein, 7 aa, synthetic construct
  source 1..7: note = Description of Artificial Sequence: Synthetic peptide; note = XENP020718 vlCDR2
YASHRYT

SEQ ID NO: 23610 - protein, 9 aa, synthetic construct
  source 1..9: note = Description of Artificial Sequence: Synthetic peptide; note = XENP020718 vlCDR3
QQDFSSPRT

SEQ ID NO: 23611 - protein, 215 aa, synthetic construct; identical to SEQ ID NO: 4504
  source 1..215: note = Description of Artificial Sequence: Synthetic polypeptide; note = XENP020718 ipilimumab_H3_L0.22-1G6_H1.279_L1.194 M428L/N434S Light Chain

SEQ ID NO: 23612 - protein, 108 aa, synthetic construct; identical to SEQ ID NO: 1607
  source 1..108: note = Description of Artificial Sequence: Synthetic polypeptide; note = VL of XENP020718

SEQ ID NO: 23613 - protein, 12 aa, synthetic construct
  source 1..12: note = Description of Artificial Sequence: Synthetic peptide; note = XENP020718 vlCDR1
RASQSVSSSYLA

SEQ ID NO: 23614 - protein, 7 aa, synthetic construct
  source 1..7: note = Description of Artificial Sequence: Synthetic peptide; note = XENP020718 vlCDR2
GAFSRAT

SEQ ID NO: 23615 - protein, 9 aa, synthetic construct
  source 1..9: note = Description of Artificial Sequence: Synthetic peptide; note = XENP020718 vlCDR3
QQYGSSPWT

SEQ ID NO: 23616 - protein, 447 aa, synthetic construct; identical to SEQ ID NO: 23556
  source 1..447: note = Description of Artificial Sequence: Synthetic polypeptide; note = XENP020719 ipilimumab_H3_L0.22-1G6_H1.280_L1.224 M428L/N434S Fab-Fc Heavy Chain

SEQ ID NO: 23617 - protein, 118 aa, synthetic construct; identical to SEQ ID NO: 139
  source 1..118: note = Description of Artificial Sequence: Synthetic polypeptide; note = VH of XENP020719

SEQ ID NO: 23618 - protein, 5 aa, synthetic construct
  source 1..5: note = Description of Artificial Sequence: Synthetic peptide; note = XENP020719 vhCDR1
SYTMH

SEQ ID NO: 23619 - protein, 17 aa, synthetic construct
  source 1..17: note = Description of Artificial Sequence: Synthetic peptide; note = XENP020719 vhCDR2
FISYDGNNKYYADSVKG

SEQ ID NO: 23620 - protein, 9 aa, synthetic construct
  source 1..9: note = Description of Artificial Sequence: Synthetic peptide; note = XENP020719 vhCDR3
TGWLGPFDY

SEQ ID NO: 23621 - protein, 480 aa, synthetic construct
  source 1..480: note = Description of Artificial Sequence: Synthetic polypeptide; note = XENP020719 ipilimumab_H3_L0.22-1G6_H1.280_L1.224 M428L/N434S scFv-Fc Heavy Chain
EVQLVESGGGLVKPGGSLRLTCVASGFTFSNYWMNWVRQAPGKGLEWVAEIRLYSNNYATHYAESVKGRFTISRDDSKSTLYLQMNNLKTEDTGVYYCTRYYGNYGGYFDVWGRGTLVTVSSGKPGSGKPGSGKPGSGKPGSEIVLTQSPATLSVSPGERVTLTCRASQSVGNDVAWYQQKPGQAPRLLINYASHRYTSVPDRFTGSGYGTEFTLTISSVQSEDFAVYYCQQDWSSPRTFGGGTKVEIKEPKSSDKTHTCPPCPAPPVAGPSVFLFPPKPKDTLMISRTPEVTCVVVDVKHEDPEVKFNWYVDGVEVHNAKTKPREEQYNSTYRVVSVLTVLHQDWLNGKEYKCKVSNKALPAPIEKTISKAKGQPREPQVYTLPPSREQMTKNQVKLTCLVKGFYPSDIAVEWESNGQPENNYKTTPPVLDSDGSFFLYSKLTVDKSRWQQGNVFSCSVLHEALHSHYTQKSLSLSPGK

SEQ ID NO: 23622 - protein, 122 aa, synthetic construct; identical to SEQ ID NO: 10917
  source 1..122: note = Description of Artificial Sequence: Synthetic polypeptide; note = VH of XENP020719

SEQ ID NO: 23623 - protein, 107 aa, synthetic construct; identical to SEQ ID NO: 22811
  source 1..107: note = Description of Artificial Sequence: Synthetic polypeptide; note = VL of XENP020719

SEQ ID NO: 23624 - protein, 231 aa, synthetic construct; identical to SEQ ID NO: 21572
  source 1..231: note = Description of Artificial Sequence: Synthetic polypeptide; note = Fc chain of XENP020719

SEQ ID NO: 23625 - protein, 5 aa, synthetic construct
  source 1..5: note = Description of Artificial Sequence: Synthetic peptide; note = XENP020719 vhCDR1
NYWMN

SEQ ID NO: 23626 - protein, 19 aa, synthetic construct
  source 1..19: note = Description of Artificial Sequence: Synthetic peptide; note = XENP020719 vhCDR2
EIRLYSNNYATHYAESVKG

SEQ ID NO: 23627 - protein, 11 aa, synthetic construct
  source 1..11: note = Description of Artificial Sequence: Synthetic peptide; note = XENP020719 vhCDR3
YYGNYGGYFDV

SEQ ID NO: 23628 - protein, 11 aa, synthetic construct
  source 1..11: note = Description of Artificial Sequence: Synthetic peptide; note = XENP020719 vlCDR1
RASQSVGNDVA

SEQ ID NO: 23629 - protein, 7 aa, synthetic construct
  source 1..7: note = Description of Artificial Sequence: Synthetic peptide; note = XENP020719 vlCDR2
YASHRYT

SEQ ID NO: 23630 - protein, 9 aa, synthetic construct
  source 1..9: note = Description of Artificial Sequence: Synthetic peptide; note = XENP020719 vlCDR3
QQDWSSPRT

SEQ ID NO: 23631 - protein, 215 aa, synthetic construct; identical to SEQ ID NO: 4504
  source 1..215: note = Description of Artificial Sequence: Synthetic polypeptide; note = XENP020719 ipilimumab_H3_L0.22-1G6_H1.280_L1.224 M428L/N434S Light Chain

SEQ ID NO: 23632 - protein, 108 aa, synthetic construct; identical to SEQ ID NO: 1607
  source 1..108: note = Description of Artificial Sequence: Synthetic polypeptide; note = VL of XENP020719

SEQ ID NO: 23633 - protein, 12 aa, synthetic construct
  source 1..12: note = Description of Artificial Sequence: Synthetic peptide; note = XENP020719 vlCDR1
RASQSVSSSYLA

SEQ ID NO: 23634 - protein, 7 aa, synthetic construct
  source 1..7: note = Description of Artificial Sequence: Synthetic peptide; note = XENP020719 vlCDR2
GAFSRAT

SEQ ID NO: 23635 - protein, 9 aa, synthetic construct
  source 1..9: note = Description of Artificial Sequence: Synthetic peptide; note = XENP020719 vlCDR3
QQYGSSPWT

SEQ ID NO: 23636 - protein, 451 aa, synthetic construct
  source 1..451: note = Description of Artificial Sequence: Synthetic polypeptide; note = XENP020720 1G6_H1.278_L1.188-ipilimumab_H3.4_L0.12 M428L/N434S Fab-Fc Heavy Chain
EVQLVESGGGLVKPGGSLRLSCVASGFTFSNYWMNWVRQAPGKGLEWVAEIRLYSNNYATHYAESVKGRFTISRDDSKSTLYLQMNNLKTEDTGVYYCTRYYGNYGGYFDVWGQGTLVTVSSASTKGPSVFPLAPSSKSTSGGTAALGCLVKDYFPEPVTVSWNSGALTSGVHTFPAVLQSSGLYSLSSVVTVPSSSLGTQTYICNVNHKPSDTKVDKKVEPKSCDKTHTCPPCPAPPVAGPSVFLFPPKPKDTLMISRTPEVTCVVVDVKHEDPEVKFNWYVDGVEVHNAKTKPREEEYNSTYRVVSVLTVLHQDWLNGKEYKCKVSNKALPAPIEKTISKAKGQPREPQVYTLPPSREEMTKNQVSLTCDVSGFYPSDIAVEWESDGQPENNYKTTPPVLDSDGSFFLYSKLTVDKSRWEQGDVFSCSVLHEALHSHYTQKSLSLSPGK

SEQ ID NO: 23637 - protein, 122 aa, synthetic construct; identical to SEQ ID NO: 10845
  source 1..122: note = Description of Artificial Sequence: Synthetic polypeptide; note = VH of XENP020720

SEQ ID NO: 23638 - protein, 5 aa, synthetic construct
  source 1..5: note = Description of Artificial Sequence: Synthetic peptide; note = XENP020720 vhCDR1
NYWMN

SEQ ID NO: 23639 - protein, 19 aa, synthetic construct
  source 1..19: note = Description of Artificial Sequence: Synthetic peptide; note = XENP020720 vhCDR2
EIRLYSNNYATHYAESVKG

SEQ ID NO: 23640 - protein, 11 aa, synthetic construct
  source 1..11: note = Description of Artificial Sequence: Synthetic peptide; note = XENP020720 vhCDR3
YYGNYGGYFDV

SEQ ID NO: 23641 - protein, 477 aa, synthetic construct; identical to SEQ ID NO: 21569
  source 1..477: note = Description of Artificial Sequence: Synthetic polypeptide; note = XENP020720 1G6_H1.278_L1.188-ipilimumab_H3.4_L0.12 M428L/N434S scFv-Fc Heavy Chain

SEQ ID NO: 23642 - protein, 118 aa, synthetic construct; identical to SEQ ID NO: 2461
  source 1..118: note = Description of Artificial Sequence: Synthetic polypeptide; note = VH of XENP020720

SEQ ID NO: 23643 - protein, 108 aa, synthetic construct; identical to SEQ ID NO: 1517
  source 1..108: note = Description of Artificial Sequence: Synthetic polypeptide; note = VL of XENP020720

SEQ ID NO: 23644 - protein, 231 aa, synthetic construct; identical to SEQ ID NO: 21572
  source 1..231: note = Description of Artificial Sequence: Synthetic polypeptide; note = Fc chain of XENP020720

SEQ ID NO: 23645 - protein, 5 aa, synthetic construct
  source 1..5: note = Description of Artificial Sequence: Synthetic peptide; note = XENP020720 vhCDR1
SYTMH

SEQ ID NO: 23646 - protein, 17 aa, synthetic construct
  source 1..17: note = Description of Artificial Sequence: Synthetic peptide; note = XENP020720 vhCDR2
FISYDGNHKYYADSVKG

SEQ ID NO: 23647 - protein, 9 aa, synthetic construct
  source 1..9: note = Description of Artificial Sequence: Synthetic peptide; note = XENP020720 vhCDR3
TGHLGPFDL

SEQ ID NO: 23648 - protein, 12 aa, synthetic construct
  source 1..12: note = Description of Artificial Sequence: Synthetic peptide; note = XENP020720 vlCDR1
RASQSVGSSYLA

SEQ ID NO: 23649 - protein, 7 aa, synthetic construct
  source 1..7: note = Description of Artificial Sequence: Synthetic peptide; note = XENP020720 vlCDR2
GAFSRAT

SEQ ID NO: 23650 - protein, 9 aa, synthetic construct
  source 1..9: note = Description of Artificial Sequence: Synthetic peptide; note = XENP020720 vlCDR3
QQYGSSPWT

SEQ ID NO: 23651 - protein, 214 aa, synthetic construct; identical to SEQ ID NO: 16660
  source 1..214: note = Description of Artificial Sequence: Synthetic polypeptide; note = XENP020720 1G6_H1.278_L1.188-ipilimumab_H3.4_L0.12 M428L/N434S Light Chain

SEQ ID NO: 23652 - protein, 107 aa, synthetic construct; identical to SEQ ID NO: 10855
  source 1..107: note = Description of Artificial Sequence: Synthetic polypeptide; note = VL of XENP020720

SEQ ID NO: 23653 - protein, 11 aa, synthetic construct
  source 1..11: note = Description of Artificial Sequence: Synthetic peptide; note = XENP020720 vlCDR1
RASQSVGNDVA

SEQ ID NO: 23654 - protein, 7 aa, synthetic construct
  source 1..7: note = Description of Artificial Sequence: Synthetic peptide; note = XENP020720 vlCDR2
YASHRYT

SEQ ID NO: 23655 - protein, 9 aa, synthetic construct
  source 1..9: note = Description of Artificial Sequence: Synthetic peptide; note = XENP020720 vlCDR3
QQDFSSPRT

SEQ ID NO: 23656 - protein, 447 aa, synthetic construct; identical to SEQ ID NO: 23356
  source 1..447: note = Description of Artificial Sequence: Synthetic polypeptide; note = XENP020726 ipilimumab_H3_L0.22-1G6_L1.224_H1.280 Fab-Fc Heavy Chain

SEQ ID NO: 23657 - protein, 118 aa, synthetic construct; identical to SEQ ID NO: 139
  source 1..118: note = Description of Artificial Sequence: Synthetic polypeptide; note = VH of XENP020726

SEQ ID NO: 23658 - protein, 5 aa, synthetic construct
  source 1..5: note = Description of Artificial Sequence: Synthetic peptide; note = XENP020726 vhCDR1
SYTMH

SEQ ID NO: 23659 - protein, 17 aa, synthetic construct
  source 1..17: note = Description of Artificial Sequence: Synthetic peptide; note = XENP020726 vhCDR2
FISYDGNNKYYADSVKG

SEQ ID NO: 23660 - protein, 9 aa, synthetic construct
  source 1..9: note = Description of Artificial Sequence: Synthetic peptide; note = XENP020726 vhCDR3
TGWLGPFDY

SEQ ID NO: 23661 - protein, 480 aa, synthetic construct
  source 1..480: note = Description of Artificial Sequence: Synthetic polypeptide; note = XENP020726 ipilimumab_H3_L0.22-1G6_L1.224_H1.280 scFv-Fc Heavy Chain
EIVLTQSPATLSVSPGERVTLTCRASQSVGNDVAWYQQKPGQAPRLLINYASHRYTSVPDRFTGSGYGTEFTLTISSVQSEDFAVYYCQQDWSSPRTFGGGTKVEIKGKPGSGKPGSGKPGSGKPGSEVQLVESGGGLVKPGGSLRLTCVASGFTFSNYWMNWVRQAPGKGLEWVAEIRLYSNNYATHYAESVKGRFTISRDDSKSTLYLQMNNLKTEDTGVYYCTRYYGNYGGYFDVWGRGTLVTVSSEPKSSDKTHTCPPCPAPPVAGPSVFLFPPKPKDTLMISRTPEVTCVVVDVKHEDPEVKFNWYVDGVEVHNAKTKPREEQYNSTYRVVSVLTVLHQDWLNGKEYKCKVSNKALPAPIEKTISKAKGQPREPQVYTLPPSREQMTKNQVKLTCLVKGFYPSDIAVEWESNGQPENNYKTTPPVLDSDGSFFLYSKLTVDKSRWQQGNVFSCSVMHEALHNHYTQKSLSLSPGK

SEQ ID NO: 23662 - protein, 107 aa, synthetic construct; identical to SEQ ID NO: 22811
  source 1..107: note = Description of Artificial Sequence: Synthetic polypeptide; note = VH of XENP020726

SEQ ID NO: 23663 - protein, 122 aa, synthetic construct; identical to SEQ ID NO: 10917
  source 1..122: note = Description of Artificial Sequence: Synthetic polypeptide; note = VL of XENP020726

SEQ ID NO: 23664 - protein, 231 aa, synthetic construct; identical to SEQ ID NO: 21532
  source 1..231: note = Description of Artificial Sequence: Synthetic polypeptide; note = Fc chain of XENP020726

SEQ ID NO: 23665 - protein, 11 aa, synthetic construct
  source 1..11: note = Description of Artificial Sequence: Synthetic peptide; note = XENP020726 vhCDR1
RASQSVGNDVA

SEQ ID NO: 23666 - protein, 7 aa, synthetic construct
  source 1..7: note = Description of Artificial Sequence: Synthetic peptide; note = XENP020726 vhCDR2
YASHRYT

SEQ ID NO: 23667 - protein, 9 aa, synthetic construct
  source 1..9: note = Description of Artificial Sequence: Synthetic peptide; note = XENP020726 vhCDR3
QQDWSSPRT

SEQ ID NO: 23668 - protein, 5 aa, synthetic construct
  source 1..5: note = Description of Artificial Sequence: Synthetic peptide; note = XENP020726 vlCDR1
NYWMN

SEQ ID NO: 23669 - protein, 19 aa, synthetic construct
  source 1..19: note = Description of Artificial Sequence: Synthetic peptide; note = XENP020726 vlCDR2
EIRLYSNNYATHYAESVKG

SEQ ID NO: 23670 - protein, 11 aa, synthetic construct
  source 1..11: note = Description of Artificial Sequence: Synthetic peptide; note = XENP020726 vlCDR3
YYGNYGGYFDV

SEQ ID NO: 23671 - protein, 215 aa, synthetic construct; identical to SEQ ID NO: 4504
  source 1..215: note = Description of Artificial Sequence: Synthetic polypeptide; note = XENP020726 ipilimumab_H3_L0.22-1G6_L1.224_H1.280 Light Chain

SEQ ID NO: 23672 - protein, 108 aa, synthetic construct; identical to SEQ ID NO: 1607
  source 1..108: note = Description of Artificial Sequence: Synthetic polypeptide; note = VL of XENP020726

SEQ ID NO: 23673 - protein, 12 aa, synthetic construct
  source 1..12: note = Description of Artificial Sequence: Synthetic peptide; note = XENP020726 vlCDR1
RASQSVSSSYLA

SEQ ID NO: 23674 - protein, 7 aa, synthetic construct
  source 1..7: note = Description of Artificial Sequence: Synthetic peptide; note = XENP020726 vlCDR2
GAFSRAT

SEQ ID NO: 23675 - protein, 9 aa, synthetic construct
  source 1..9: note = Description of Artificial Sequence: Synthetic peptide; note = XENP020726 vlCDR3
QQYGSSPWT

SEQ ID NO: 23676 - protein, 447 aa, synthetic construct; identical to SEQ ID NO: 23356
  source 1..447: note = Description of Artificial Sequence: Synthetic polypeptide; note = XENP020727 ipilimumab_H3_L0.22-1G6_L1.226_H1.292 Fab-Fc Heavy Chain

SEQ ID NO: 23677 - protein, 118 aa, synthetic construct; identical to SEQ ID NO: 139
  source 1..118: note = Description of Artificial Sequence: Synthetic polypeptide; note = VH of XENP020727

SEQ ID NO: 23678 - protein, 5 aa, synthetic construct
  source 1..5: note = Description of Artificial Sequence: Synthetic peptide; note = XENP020727 vhCDR1
SYTMH

SEQ ID NO: 23679 - protein, 17 aa, synthetic construct
  source 1..17: note = Description of Artificial Sequence: Synthetic peptide; note = XENP020727 vhCDR2
FISYDGNNKYYADSVKG

SEQ ID NO: 23680 - protein, 9 aa, synthetic construct
  source 1..9: note = Description of Artificial Sequence: Synthetic peptide; note = XENP020727 vhCDR3
TGWLGPFDY

SEQ ID NO: 23681 - protein, 480 aa, synthetic construct
  source 1..480: note = Description of Artificial Sequence: Synthetic polypeptide; note = XENP020727 ipilimumab_H3_L0.22-1G6_L1.226_H1.292 scFv-Fc Heavy Chain
EIVLTQSPATLSVSPGERVTLTCRASQSVGNDVAWYQQKPGQAPRLLINYASHRYTSVPDRFTGSGYGTEFTLTISSVQSEDFAVYYCQQDWSSPRTFGCGTKVEIKGKPGSGKPGSGKPGSGKPGSEVQLVESGGGLVKPGGSLRLTCVASGFTFSNYWMNWVRQAPGKCLEWVAEIRLYSNNYATHYAESVKGRFTISRDDSKSTLYLQMNNLKTEDTGVYYCTRYYGNYGGYFDVWGRGTLVTVSSEPKSSDKTHTCPPCPAPPVAGPSVFLFPPKPKDTLMISRTPEVTCVVVDVKHEDPEVKFNWYVDGVEVHNAKTKPREEQYNSTYRVVSVLTVLHQDWLNGKEYKCKVSNKALPAPIEKTISKAKGQPREPQVYTLPPSREQMTKNQVKLTCLVKGFYPSDIAVEWESNGQPENNYKTTPPVLDSDGSFFLYSKLTVDKSRWQQGNVFSCSVMHEALHNHYTQKSLSLSPGK

SEQ ID NO: 23682 - protein, 107 aa, synthetic construct
  source 1..107: note = Description of Artificial Sequence: Synthetic polypeptide; note = VH of XENP020727
EIVLTQSPATLSVSPGERVTLTCRASQSVGNDVAWYQQKPGQAPRLLINYASHRYTSVPDRFTGSGYGTEFTLTISSVQSEDFAVYYCQQDWSSPRTFGCGTKVEIK

SEQ ID NO: 23683 - protein, 122 aa, synthetic construct
  source 1..122: note = Description of Artificial Sequence: Synthetic polypeptide; note = VL of XENP020727
EVQLVESGGGLVKPGGSLRLTCVASGFTFSNYWMNWVRQAPGKCLEWVAEIRLYSNNYATHYAESVKGRFTISRDDSKSTLYLQMNNLKTEDTGVYYCTRYYGNYGGYFDVWGRGTLVTVSS

SEQ ID NO: 23684 - protein, 231 aa, synthetic construct; identical to SEQ ID NO: 21532
  source 1..231: note = Description of Artificial Sequence: Synthetic polypeptide; note = Fc chain of XENP020727

SEQ ID NO: 23685 - protein, 11 aa, synthetic construct
  source 1..11: note = Description of Artificial Sequence: Synthetic peptide; note = XENP020727 vhCDR1
RASQSVGNDVA

SEQ ID NO: 23686 - protein, 7 aa, synthetic construct
  source 1..7: note = Description of Artificial Sequence: Synthetic peptide; note = XENP020727 vhCDR2
YASHRYT

SEQ ID NO: 23687 - protein, 9 aa, synthetic construct
  source 1..9: note = Description of Artificial Sequence: Synthetic peptide; note = XENP020727 vhCDR3
QQDWSSPRT

SEQ ID NO: 23688 - protein, 5 aa, synthetic construct
  source 1..5: note = Description of Artificial Sequence: Synthetic peptide; note = XENP020727 vlCDR1
NYWMN

SEQ ID NO: 23689 - protein, 19 aa, synthetic construct
  source 1..19: note = Description of Artificial Sequence: Synthetic peptide; note = XENP020727 vlCDR2
EIRLYSNNYATHYAESVKG

SEQ ID NO: 23690 - protein, 11 aa, synthetic construct
  source 1..11: note = Description of Artificial Sequence: Synthetic peptide; note = XENP020727 vlCDR3
YYGNYGGYFDV

SEQ ID NO: 23691 - protein, 215 aa, synthetic construct; identical to SEQ ID NO: 4504
  source 1..215: note = Description of Artificial Sequence: Synthetic polypeptide; note = XENP020727 ipilimumab_H3_L0.22-1G6_L1.226_H1.292 Light Chain

SEQ ID NO: 23692 - protein, 108 aa, synthetic construct; identical to SEQ ID NO: 1607
  source 1..108: note = Description of Artificial Sequence: Synthetic polypeptide; note = VL of XENP020727

SEQ ID NO: 23693 - protein, 12 aa, synthetic construct
  source 1..12: note = Description of Artificial Sequence: Synthetic peptide; note = XENP020727 vlCDR1
RASQSVSSSYLA

SEQ ID NO: 23694 - protein, 7 aa, synthetic construct
  source 1..7: note = Description of Artificial Sequence: Synthetic peptide; note = XENP020727 vlCDR2
GAFSRAT

SEQ ID NO: 23695 - protein, 9 aa, synthetic construct
  source 1..9: note = Description of Artificial Sequence: Synthetic peptide; note = XENP020727 vlCDR3
QQYGSSPWT

SEQ ID NO: 23696 - protein, 447 aa, synthetic construct; identical to SEQ ID NO: 23556
  source 1..447: note = Description of Artificial Sequence: Synthetic polypeptide; note = XENP020728 ipilimumab_H3_L0.22-1G6_L1.224_H1.280 M428L/N434S Fab-Fc Heavy Chain

SEQ ID NO: 23697 - protein, 118 aa, synthetic construct; identical to SEQ ID NO: 139
  source 1..118: note = Description of Artificial Sequence: Synthetic polypeptide; note = VH of XENP020728

SEQ ID NO: 23698 - protein, 5 aa, synthetic construct
  source 1..5: note = Description of Artificial Sequence: Synthetic peptide; note = XENP020728 vhCDR1
SYTMH

SEQ ID NO: 23699 - protein, 17 aa, synthetic construct
  source 1..17: note = Description of Artificial Sequence: Synthetic peptide; note = XENP020728 vhCDR2
FISYDGNNKYYADSVKG

SEQ ID NO: 23700 - protein, 9 aa, synthetic construct
  source 1..9: note = Description of Artificial Sequence: Synthetic peptide; note = XENP020728 vhCDR3
TGWLGPFDY

SEQ ID NO: 23701 - protein, 480 aa, synthetic construct
  source 1..480: note = Description of Artificial Sequence: Synthetic polypeptide; note = XENP020728 ipilimumab_H3_L0.22-1G6_L1.224_H1.280 M428L/N434S scFv-Fc Heavy Chain
EIVLTQSPATLSVSPGERVTLTCRASQSVGNDVAWYQQKPGQAPRLLINYASHRYTSVPDRFTGSGYGTEFTLTISSVQSEDFAVYYCQQDWSSPRTFGGGTKVEIKGKPGSGKPGSGKPGSGKPGSEVQLVESGGGLVKPGGSLRLTCVASGFTFSNYWMNWVRQAPGKGLEWVAEIRLYSNNYATHYAESVKGRFTISRDDSKSTLYLQMNNLKTEDTGVYYCTRYYGNYGGYFDVWGRGTLVTVSSEPKSSDKTHTCPPCPAPPVAGPSVFLFPPKPKDTLMISRTPEVTCVVVDVKHEDPEVKFNWYVDGVEVHNAKTKPREEQYNSTYRVVSVLTVLHQDWLNGKEYKCKVSNKALPAPIEKTISKAKGQPREPQVYTLPPSREQMTKNQVKLTCLVKGFYPSDIAVEWESNGQPENNYKTTPPVLDSDGSFFLYSKLTVDKSRWQQGNVFSCSVLHEALHSHYTQKSLSLSPGK

SEQ ID NO: 23702 - protein, 107 aa, synthetic construct; identical to SEQ ID NO: 22811
  source 1..107: note = Description of Artificial Sequence: Synthetic polypeptide; note = VH of XENP020728

SEQ ID NO: 23703 - protein, 122 aa, synthetic construct; identical to SEQ ID NO: 10917
  source 1..122: note = Description of Artificial Sequence: Synthetic polypeptide; note = VL of XENP020728

SEQ ID NO: 23704 - protein, 231 aa, synthetic construct; identical to SEQ ID NO: 21572
  source 1..231: note = Description of Artificial Sequence: Synthetic polypeptide; note = Fc chain of XENP020728

SEQ ID NO: 23705 - protein, 11 aa, synthetic construct
  source 1..11: note = Description of Artificial Sequence: Synthetic peptide; note = XENP020728 vhCDR1
RASQSVGNDVA

SEQ ID NO: 23706 - protein, 7 aa, synthetic construct
  source 1..7: note = Description of Artificial Sequence: Synthetic peptide; note = XENP020728 vhCDR2
YASHRYT

SEQ ID NO: 23707 - protein, 9 aa, synthetic construct
  source 1..9: note = Description of Artificial Sequence: Synthetic peptide; note = XENP020728 vhCDR3
QQDWSSPRT

SEQ ID NO: 23708 - protein, 5 aa, synthetic construct
  source 1..5: note = Description of Artificial Sequence: Synthetic peptide; note = XENP020728 vlCDR1
NYWMN

SEQ ID NO: 23709 - protein, 19 aa, synthetic construct
  source 1..19: note = Description of Artificial Sequence: Synthetic peptide; note = XENP020728 vlCDR2
EIRLYSNNYATHYAESVKG

SEQ ID NO: 23710 - protein, 11 aa, synthetic construct
  source 1..11: note = Description of Artificial Sequence: Synthetic peptide; note = XENP020728 vlCDR3
YYGNYGGYFDV

SEQ ID NO: 23711 - protein, 215 aa, synthetic construct; identical to SEQ ID NO: 4504
  source 1..215: note = Description of Artificial Sequence: Synthetic polypeptide; note = XENP020728 ipilimumab_H3_L0.22-1G6_L1.224_H1.280 M428L/N434S Light Chain

SEQ ID NO: 23712 - protein, 108 aa, synthetic construct; identical to SEQ ID NO: 1607
  source 1..108: note = Description of Artificial Sequence: Synthetic polypeptide; note = VL of XENP020728

SEQ ID NO: 23713 - protein, 12 aa, synthetic construct
  source 1..12: note = Description of Artificial Sequence: Synthetic peptide; note = XENP020728 vlCDR1
RASQSVSSSYLA

SEQ ID NO: 23714 - protein, 7 aa, synthetic construct
  source 1..7: note = Description of Artificial Sequence: Synthetic peptide; note = XENP020728 vlCDR2
GAFSRAT

SEQ ID NO: 23715 - protein, 9 aa, synthetic construct
  source 1..9: note = Description of Artificial Sequence: Synthetic peptide; note = XENP020728 vlCDR3
QQYGSSPWT

SEQ ID NO: 23716 - protein, 447 aa, synthetic construct; identical to SEQ ID NO: 23556
  source 1..447: note = Description of Artificial Sequence: Synthetic polypeptide; note = XENP020729 ipilimumab_H3_L0.22-1G6_L1.226_H1.292 M428L/N434S Fab-Fc Heavy Chain

SEQ ID NO: 23717 - protein, 118 aa, synthetic construct; identical to SEQ ID NO: 139
  source 1..118: note = Description of Artificial Sequence: Synthetic polypeptide; note = VH of XENP020729

SEQ ID NO: 23718 - protein, 5 aa, synthetic construct
  source 1..5: note = Description of Artificial Sequence: Synthetic peptide; note = XENP020729 vhCDR1
SYTMH

SEQ ID NO: 23719 - protein, 17 aa, synthetic construct
  source 1..17: note = Description of Artificial Sequence: Synthetic peptide; note = XENP020729 vhCDR2
FISYDGNNKYYADSVKG

SEQ ID NO: 23720 - protein, 9 aa, synthetic construct
  source 1..9: note = Description of Artificial Sequence: Synthetic peptide; note = XENP020729 vhCDR3
TGWLGPFDY

SEQ ID NO: 23721 - protein, 480 aa, synthetic construct
  source 1..480: note = Description of Artificial Sequence: Synthetic polypeptide; note = XENP020729 ipilimumab_H3_L0.22-1G6_L1.226_H1.292 M428L/N434S scFv-Fc Heavy Chain
EIVLTQSPATLSVSPGERVTLTCRASQSVGNDVAWYQQKPGQAPRLLINYASHRYTSVPDRFTGSGYGTEFTLTISSVQSEDFAVYYCQQDWSSPRTFGCGTKVEIKGKPGSGKPGSGKPGSGKPGSEVQLVESGGGLVKPGGSLRLTCVASGFTFSNYWMNWVRQAPGKCLEWVAEIRLYSNNYATHYAESVKGRFTISRDDSKSTLYLQMNNLKTEDTGVYYCTRYYGNYGGYFDVWGRGTLVTVSSEPKSSDKTHTCPPCPAPPVAGPSVFLFPPKPKDTLMISRTPEVTCVVVDVKHEDPEVKFNWYVDGVEVHNAKTKPREEQYNSTYRVVSVLTVLHQDWLNGKEYKCKVSNKALPAPIEKTISKAKGQPREPQVYTLPPSREQMTKNQVKLTCLVKGFYPSDIAVEWESNGQPENNYKTTPPVLDSDGSFFLYSKLTVDKSRWQQGNVFSCSVLHEALHSHYTQKSLSLSPGK

SEQ ID NO: 23722 - protein, 107 aa, synthetic construct; identical to SEQ ID NO: 23682
  source 1..107: note = Description of Artificial Sequence: Synthetic polypeptide; note = VH of XENP020729

SEQ ID NO: 23723 - protein, 122 aa, synthetic construct; identical to SEQ ID NO: 23683
  source 1..122: note = Description of Artificial Sequence: Synthetic polypeptide; note = VL of XENP020729

SEQ ID NO: 23724 - protein, 231 aa, synthetic construct; identical to SEQ ID NO: 21572
  source 1..231: note = Description of Artificial Sequence: Synthetic polypeptide; note = Fc chain of XENP020729

SEQ ID NO: 23725 - protein, 11 aa, synthetic construct
  source 1..11: note = Description of Artificial Sequence: Synthetic peptide; note = XENP020729 vhCDR1
RASQSVGNDVA

SEQ ID NO: 23726 - protein, 7 aa, synthetic construct
  source 1..7: note = Description of Artificial Sequence: Synthetic peptide; note = XENP020729 vhCDR2
YASHRYT

SEQ ID NO: 23727 - protein, 9 aa, synthetic construct
  source 1..9: note = Description of Artificial Sequence: Synthetic peptide; note = XENP020729 vhCDR3
QQDWSSPRT

SEQ ID NO: 23728 - protein, 5 aa, synthetic construct
  source 1..5: note = Description of Artificial Sequence: Synthetic peptide; note = XENP020729 vlCDR1
NYWMN

SEQ ID NO: 23729 - protein, 19 aa, synthetic construct
  source 1..19: note = Description of Artificial Sequence: Synthetic peptide; note = XENP020729 vlCDR2
EIRLYSNNYATHYAESVKG

SEQ ID NO: 23730 - protein, 11 aa, synthetic construct
  source 1..11: note = Description of Artificial Sequence: Synthetic peptide; note = XENP020729 vlCDR3
YYGNYGGYFDV

SEQ ID NO: 23731 - protein, 215 aa, synthetic construct; identical to SEQ ID NO: 4504
  source 1..215: note = Description of Artificial Sequence: Synthetic polypeptide; note = XENP020729 ipilimumab_H3_L0.22-1G6_L1.226_H1.292 M428L/N434S Light Chain

SEQ ID NO: 23732 - protein, 108 aa, synthetic construct; identical to SEQ ID NO: 1607
  source 1..108: note = Description of Artificial Sequence: Synthetic polypeptide; note = VL of XENP020729

SEQ ID NO: 23733 - protein, 12 aa, synthetic construct
  source 1..12: note = Description of Artificial Sequence: Synthetic peptide; note = XENP020729 vlCDR1
RASQSVSSSYLA

SEQ ID NO: 23734 - protein, 7 aa, synthetic construct
  source 1..7: note = Description of Artificial Sequence: Synthetic peptide; note = XENP020729 vlCDR2
GAFSRAT

SEQ ID NO: 23735 - protein, 9 aa, synthetic construct
  source 1..9: note = Description of Artificial Sequence: Synthetic peptide; note = XENP020729 vlCDR3
QQYGSSPWT

SEQ ID NO: 23736 - protein, 449 aa, synthetic construct; identical to SEQ ID NO: 21524
  source 1..449: note = Description of Artificial Sequence: Synthetic polypeptide; note = XENP016429 25F7_H0L0-nivolumab_H0.1_L0 Fab-Fc Heavy Chain

SEQ ID NO: 23737 - protein, 120 aa, synthetic construct; identical to SEQ ID NO: 17136
  source 1..120: note = Description of Artificial Sequence: Synthetic polypeptide; note = VH of XENP016429

SEQ ID NO: 23738 - protein, 5 aa, synthetic construct
  source 1..5: note = Description of Artificial Sequence: Synthetic peptide; note = XENP016429 vhCDR1
DYYWN

SEQ ID NO: 23739 - protein, 16 aa, synthetic construct
  source 1..16: note = Description of Artificial Sequence: Synthetic peptide; note = XENP016429 vhCDR2
EINHNGNTNSNPSLKS

SEQ ID NO: 23740 - protein, 12 aa, synthetic construct
  source 1..12: note = Description of Artificial Sequence: Synthetic peptide; note = XENP016429 vhCDR3
GYSDYEYNWFDP

SEQ ID NO: 23741 - protein, 471 aa, synthetic construct; identical to SEQ ID NO: 22749
  source 1..471: note = Description of Artificial Sequence: Synthetic polypeptide; note = XENP016429 25F7_H0L0-nivolumab_H0.1_L0 scFv-Fc Heavy Chain

SEQ ID NO: 23742 - protein, 113 aa, synthetic construct; identical to SEQ ID NO: 6210
  source 1..113: note = Description of Artificial Sequence: Synthetic polypeptide; note = VH of XENP016429

SEQ ID NO: 23743 - protein, 107 aa, synthetic construct [sequence omitted]

SEQ ID NO: 23744 - protein, 231 aa, synthetic construct; identical to SEQ ID NO: 21532
  source 1..231: note = Description of Artificial Sequence: Synthetic polypeptide; note = Fc chain of XENP016429

SEQ ID NO: 23745 - protein, 5 aa, synthetic construct
  source 1..5: note = Description of Artificial Sequence: Synthetic peptide; note = XENP016429 vhCDR1
NSGMH

SEQ ID NO: 23746 - protein, 17 aa, synthetic construct
  source 1..17: note = Description of Artificial Sequence: Synthetic peptide; note = XENP016429 vhCDR2
VIWYDGSKRYYADSVKG

SEQ ID NO: 23747 - protein, 4 aa, synthetic construct
  source 1..4: note = Description of Artificial Sequence: Synthetic peptide; note = XENP016429 vhCDR3
NDDY

SEQ ID NO: 23748 - protein, 11 aa, synthetic construct
  source 1..11: note = Description of Artificial Sequence: Synthetic peptide; note = XENP016429 vlCDR1
RASQSVSSYLA

SEQ ID NO: 23749 - protein, 7 aa, synthetic construct
  source 1..7: note = Description of Artificial Sequence: Synthetic peptide; note = XENP016429 vlCDR2
DASNRAT

SEQ ID NO: 23750 - protein, 9 aa, synthetic construct
  source 1..9: note = Description of Artificial Sequence: Synthetic peptide; note = XENP016429 vlCDR3
QQSSNWPRT

SEQ ID NO: 23751 - protein, 214 aa, synthetic construct; identical to SEQ ID NO: 17140
  source 1..214: note = Description of Artificial Sequence: Synthetic polypeptide; note = XENP016429 25F7_H0L0-nivolumab_H0.1_L0 Light Chain

SEQ ID NO: 23752 - protein, 11 aa, synthetic construct
  source 1..11: note = Description of Artificial Sequence: Synthetic peptide; note = XENP016429 vlCDR1
RASQSISSYLA

SEQ ID NO: 23753 - protein, 7 aa, synthetic construct
  source 1..7: note = Description of Artificial Sequence: Synthetic peptide; note = XENP016429 vlCDR2
DASNRAT

SEQ ID NO: 23754 - protein, 9 aa, synthetic construct
  source 1..9: note = Description of Artificial Sequence: Synthetic peptide; note = XENP016429 vlCDR3
QQRSNWPLT

SEQ ID NO: 23755 - protein, 449 aa, synthetic construct; identical to SEQ ID NO: 21524
  source 1..449: note = Description of Artificial Sequence: Synthetic polypeptide; note = XENP018069 25F7_H0L0-1G6_H1L1 Fab-Fc Heavy Chain

SEQ ID NO: 23756 - protein, 120 aa, synthetic construct; identical to SEQ ID NO: 17136
  source 1..120: note = Description of Artificial Sequence: Synthetic polypeptide; note = VH of XENP018069

SEQ ID NO: 23757 - protein, 5 aa, synthetic construct
  source 1..5: note = Description of Artificial Sequence: Synthetic peptide; note = XENP018069 vhCDR1
DYYWN

SEQ ID NO: 23758 - protein, 16 aa, synthetic construct
  source 1..16: note = Description of Artificial Sequence: Synthetic peptide; note = XENP018069 vhCDR2
EINHNGNTNSNPSLKS

SEQ ID NO: 23759 - protein, 12 aa, synthetic construct
  source 1..12: note = Description of Artificial Sequence: Synthetic peptide; note = XENP018069 vhCDR3
GYSDYEYNWFDP

SEQ ID NO: 23760 - protein, 480 aa, synthetic construct; identical to SEQ ID NO: 23341
  source 1..480: note = Description of Artificial Sequence: Synthetic polypeptide; note = XENP018069 25F7_H0L0-1G6_H1L1 scFv-Fc Heavy Chain

SEQ ID NO: 23761 - protein, 122 aa, synthetic construct; identical to SEQ ID NO: 6246
  source 1..122: note = Description of Artificial Sequence: Synthetic polypeptide; note = VH of XENP018069

SEQ ID NO: 23762 - protein, 107 aa, synthetic construct; identical to SEQ ID NO: 6247
  source 1..107: note = Description of Artificial Sequence: Synthetic polypeptide; note = VL of XENP018069

SEQ ID NO: 23763 - protein, 231 aa, synthetic construct; identical to SEQ ID NO: 21532
  source 1..231: note = Description of Artificial Sequence: Synthetic polypeptide; note = Fc chain of XENP018069

SEQ ID NO: 23764 - protein, 5 aa, synthetic construct
  source 1..5: note = Description of Artificial Sequence: Synthetic peptide; note = XENP018069 vhCDR1
NYWMN

SEQ ID NO: 23765 - protein, 19 aa, synthetic construct
  source 1..19: note = Description of Artificial Sequence: Synthetic peptide; note = XENP018069 vhCDR2
EIRLKSNNYATHYAEPVKG

SEQ ID NO: 23766 - protein, 11 aa, synthetic construct
  source 1..11: note = Description of Artificial Sequence: Synthetic peptide; note = XENP018069 vhCDR3
YYGNYGGYFDV

SEQ ID NO: 23767 - protein, 11 aa, synthetic construct
  source 1..11: note = Description of Artificial Sequence: Synthetic peptide; note = XENP018069 vlCDR1
RASQSVSNDVA

SEQ ID NO: 23768 - protein, 7 aa, synthetic construct
  source 1..7: note = Description of Artificial Sequence: Synthetic peptide; note = XENP018069 vlCDR2
YASHRYT

SEQ ID NO: 23769 - protein, 9 aa, synthetic construct
  source 1..9: note = Description of Artificial Sequence: Synthetic peptide; note = XENP018069 vlCDR3
QQDYSSPRT

SEQ ID NO: 23770 - protein, 214 aa, synthetic construct; identical to SEQ ID NO: 17140
  source 1..214: note = Description of Artificial Sequence: Synthetic polypeptide; note = XENP018069 25F7_H0L0-1G6_H1L1 Light Chain

SEQ ID NO: 23771 - skipped

SEQ ID NO: 23772 - protein, 11 aa, synthetic construct
  source 1..11: note = Description of Artificial Sequence: Synthetic peptide; note = XENP018069 vlCDR1
RASQSISSYLA

SEQ ID NO: 23773 - protein, 7 aa, synthetic construct
  source 1..7: note = Description of Artificial Sequence: Synthetic peptide; note = XENP018069 vlCDR2
DASNRAT

SEQ ID NO: 23774 - protein, 9 aa, synthetic construct
  source 1..9: note = Description of Artificial Sequence: Synthetic peptide; note = XENP018069 vlCDR3
QQRSNWPLT

SEQ ID NO: 23775 - protein, 449 aa, synthetic construct; identical to SEQ ID NO: 21524
  source 1..449: note = Description of Artificial Sequence: Synthetic polypeptide; note = XENP019410 25F7_H0L0-1G6_H1.278_L1.189 Fab-Fc Heavy Chain

SEQ ID NO: 23776 - protein, 120 aa, synthetic construct; identical to SEQ ID NO: 17136
  source 1..120: note = Description of Artificial Sequence: Synthetic polypeptide; note = VH of XENP019410

SEQ ID NO: 23777 - protein, 5 aa, synthetic construct
  source 1..5: note = Description of Artificial Sequence: Synthetic peptide; note = XENP019410 vhCDR1
DYYWN

SEQ ID NO: 23778 - protein, 16 aa, synthetic construct
  source 1..16: note = Description of Artificial Sequence: Synthetic peptide; note = XENP019410 vhCDR2
EINHNGNTNSNPSLKS

SEQ ID NO: 23779 - protein, 12 aa, synthetic construct
  source 1..12: note = Description of Artificial Sequence: Synthetic peptide; note = XENP019410 vhCDR3
GYSDYEYNWFDP

SEQ ID NO: 23780 - protein, 480 aa, synthetic construct
  source 1..480: note = Description of Artificial Sequence: Synthetic polypeptide; note = XENP019410 25F7_H0L0-1G6_H1.278_L1.189 scFv-Fc Heavy Chain
EVQLVESGGGLVKPGGSLRLSCVASGFTFSNYWMNWVRQAPGKGLEWVAEIRLYSNNYATHYAESVKGRFTISRDDSKSTLYLQMNNLKTEDTGVYYCTRYYGNYGGYFDVWGQGTLVTVSSGKPGSGKPGSGKPGSGKPGSEIVLTQSPATLSVSPGERVTLTCRASQSVGNDVAWYQQKPGQAPRLLINYASHRYTGVPDRFTGSGYGTEFTLTISSVQSEDFAVYYCQQDFSSPRTFGGGTKVEIKEPKSSDKTHTCPPCPAPPVAGPSVFLFPPKPKDTLMISRTPEVTCVVVDVKHEDPEVKFNWYVDGVEVHNAKTKPREEQYNSTYRVVSVLTVLHQDWLNGKEYKCKVSNKALPAPIEKTISKAKGQPREPQVYTLPPSREQMTKNQVKLTCLVKGFYPSDIAVEWESNGQPENNYKTTPPVLDSDGSFFLYSKLTVDKSRWQQGNVFSCSVMHEALHNHYTQKSLSLSPGK

SEQ ID NO: 23781 - protein, 122 aa, synthetic construct; identical to SEQ ID NO: 10845
  source 1..122: note = Description of Artificial Sequence: Synthetic polypeptide; note = VH of XENP019410

SEQ ID NO: 23782 - protein, 107 aa, synthetic construct; identical to SEQ ID NO: 10864
  source 1..107: note = Description of Artificial Sequence: Synthetic polypeptide; note = VL of XENP019410

SEQ ID NO: 23783 - protein, 231 aa, synthetic construct; identical to SEQ ID NO: 21532
  source 1..231: note = Description of Artificial Sequence: Synthetic polypeptide; note = Fc chain of XENP019410

SEQ ID NO: 23784 - protein, 5 aa, synthetic construct
  source 1..5: note = Description of Artificial Sequence: Synthetic peptide; note = XENP019410 vhCDR1
NYWMN

SEQ ID NO: 23785 - protein, 19 aa, synthetic construct
  source 1..19: note = Description of Artificial Sequence: Synthetic peptide; note = XENP019410 vhCDR2
EIRLYSNNYATHYAESVKG

SEQ ID NO: 23786 - protein, 11 aa, synthetic construct
  source 1..11: note = Description of Artificial Sequence: Synthetic peptide; note = XENP019410 vhCDR3
YYGNYGGYFDV

SEQ ID NO: 23787 - protein, 11 aa, synthetic construct
  source 1..11: note = Description of Artificial Sequence: Synthetic peptide; note = XENP019410 vlCDR1
RASQSVGNDVA

SEQ ID NO: 23788 - protein, 7 aa, synthetic construct
  source 1..7: note = Description of Artificial Sequence: Synthetic peptide; note = XENP019410 vlCDR2
YASHRYT

SEQ ID NO: 23789 - protein, 9 aa, synthetic construct
  source 1..9: note = Description of Artificial Sequence: Synthetic peptide; note = XENP019410 vlCDR3
QQDFSSPRT

SEQ ID NO: 23790 - protein, 214 aa, synthetic construct; identical to SEQ ID NO: 17140
  source 1..214: note = Description of Artificial Sequence: Synthetic polypeptide; note = XENP019410 25F7_H0L0-1G6_H1.278_L1.189 Light Chain

SEQ ID NO: 23791 - protein, 214 aa, synthetic construct; identical to SEQ ID NO: 17140
  source 1..214: note = Description of Artificial Sequence: Synthetic polypeptide; note = VL of XENP019410

SEQ ID NO: 23792 - protein, 11 aa, synthetic construct
  source 1..11: note = Description of Artificial Sequence: Synthetic peptide; note = XENP019410 vlCDR1
RASQSISSYLA

SEQ ID NO: 23793 - protein, 7 aa, synthetic construct
  source 1..7: note = Description of Artificial Sequence: Synthetic peptide; note = XENP019410 vlCDR2
DASNRAT

SEQ ID NO: 23794 - protein, 9 aa, synthetic construct
  source 1..9: note = Description of Artificial Sequence: Synthetic peptide; note = XENP019410 vlCDR3
QQRSNWPLT

SEQ ID NO: 23795 - protein, 449 aa, synthetic construct; identical to SEQ ID NO: 21524
  source 1..449: note = Description of Artificial Sequence: Synthetic polypeptide; note = XENP019412 25F7_H0L0-1G6_L1.189_H1.278 Fab-Fc Heavy Chain

SEQ ID NO: 23796 - protein, 120 aa, synthetic construct; identical to SEQ ID NO: 17136
  source 1..120: note = Description of Artificial Sequence: Synthetic polypeptide; note = VH of XENP019412

SEQ ID NO: 23797 - protein, 5 aa, synthetic construct
  source 1..5: note = Description of Artificial Sequence: Synthetic peptide; note = XENP019412 vhCDR1
DYYWN

SEQ ID NO: 23798 - protein, 16 aa, synthetic construct
  source 1..16: note = Description of Artificial Sequence: Synthetic peptide; note = XENP019412 vhCDR2
EINHNGNTNSNPSLKS

SEQ ID NO: 23799 - protein, 12 aa, synthetic construct
  source 1..12: note = Description of Artificial Sequence: Synthetic peptide; note = XENP019412 vhCDR3
GYSDYEYNWFDP

SEQ ID NO: 23800 - protein, 480 aa, synthetic construct; identical to SEQ ID NO: 23780
  source 1..480: note = Description of Artificial Sequence: Synthetic polypeptide; note = XENP019412 25F7_H0L0-1G6_L1.189_H1.278 scFv-Fc Heavy Chain

SEQ ID NO: 23801 - protein, 122 aa, synthetic construct; identical to SEQ ID NO: 10845
  source 1..122: note = Description of Artificial Sequence: Synthetic polypeptide; note = VH of XENP019412

SEQ ID NO: 23802 - protein, 107 aa, synthetic construct; identical to SEQ ID NO: 10864
  source 1..107: note = Description of Artificial Sequence: Synthetic polypeptide; note = VL of XENP019412

SEQ ID NO: 23803 - protein, 231 aa, synthetic construct; identical to SEQ ID NO: 21532
  source 1..231: note = Description of Artificial Sequence: Synthetic polypeptide; note = Fc chain of XENP019412

SEQ ID NO: 23804 - protein, 5 aa, synthetic construct
  source 1..5: note = Description of Artificial Sequence: Synthetic peptide; note = XENP019412 vhCDR1
NYWMN

SEQ ID NO: 23805 - protein, 19 aa, synthetic construct
  source 1..19: note = Description of Artificial Sequence: Synthetic peptide; note = XENP019412 vhCDR2
EIRLYSNNYATHYAESVKG

SEQ ID NO: 23806 - protein, 11 aa, synthetic construct
  source 1..11: note = Description of Artificial Sequence: Synthetic peptide; note = XENP019412 vhCDR3
YYGNYGGYFDV

SEQ ID NO: 23807 - protein, 11 aa, synthetic construct
  source 1..11: note = Description of Artificial Sequence: Synthetic peptide; note = XENP019412 vlCDR1
RASQSVGNDVA

SEQ ID NO: 23808 - protein, 7 aa, synthetic construct
  source 1..7: note = Description of Artificial Sequence: Synthetic peptide; note = XENP019412 vlCDR2
YASHRYT

SEQ ID NO: 23809 - protein, 9 aa, synthetic construct
  source 1..9: note = Description of Artificial Sequence: Synthetic peptide; note = XENP019412 vlCDR3
QQDFSSPRT

SEQ ID NO: 23810 - protein, 214 aa, synthetic construct; identical to SEQ ID NO: 17140
  source 1..214: note = Description of Artificial Sequence: Synthetic polypeptide; note = XENP019412 25F7_H0L0-1G6_L1.189_H1.278 Light Chain

SEQ ID NO: 23811 - protein, 214 aa, synthetic construct; identical to SEQ ID NO: 17140
  source 1..214: note = Description of Artificial Sequence: Synthetic polypeptide; note = VL of XENP019412

SEQ ID NO: 23812 - protein, 11 aa, synthetic construct
  source 1..11: note = Description of Artificial Sequence: Synthetic peptide; note = XENP019412 vlCDR1
RASQSISSYLA

SEQ ID NO: 23813 - protein, 7 aa, synthetic construct
  source 1..7: note = Description of Artificial Sequence: Synthetic peptide; note = XENP019412 vlCDR2
DASNRAT

SEQ ID NO: 23814 - protein, 9 aa, synthetic construct
  source 1..9: note = Description of Artificial Sequence: Synthetic peptide; note = XENP019412 vlCDR3
QQRSNWPLT

SEQ ID NO: 23815 - protein, 449 aa, synthetic construct; identical to SEQ ID NO: 21524
  source 1..449: note = Description of Artificial Sequence: Synthetic polypeptide; note = XENP019670 25F7_H0L0-1G6_H1.284_L1.194 Fab-Fc Heavy Chain

SEQ ID NO: 23816 - protein, 120 aa, synthetic construct; identical to SEQ ID NO: 17136
  source 1..120: note = Description of Artificial Sequence: Synthetic polypeptide; note = VH of XENP019670

SEQ ID NO: 23817 - protein, 5 aa, synthetic construct
  source 1..5: note = Description of Artificial Sequence: Synthetic peptide; note = XENP019670 vhCDR1
DYYWN

SEQ ID NO: 23818 - protein, 16 aa, synthetic construct
  source 1..16: note = Description of Artificial Sequence: Synthetic peptide; note = XENP019670 vhCDR2
EINHNGNTNSNPSLKS

SEQ ID NO: 23819 - protein, 12 aa, synthetic construct
  source 1..12: note = Description of Artificial Sequence: Synthetic peptide; note = XENP019670 vhCDR3
GYSDYEYNWFDP

SEQ ID NO: 23820 - protein, 480 aa, synthetic construct
  source 1..480: note = Description of Artificial Sequence: Synthetic polypeptide; note = XENP019670 25F7_H0L0-1G6_H1.284_L1.194 scFv-Fc Heavy Chain
EVQLVESGGGLVKPGGSLRLSCVASGFTFSNYWMNWVRQAPGKGLEWVCEIRLYSNNYATHYAESVKGRFTCSRDDSKSTLYLQMNNLKTEDTGVYYCTRYYGNYGGYFDVWGRGTLVTVSSGKPGSGKPGSGKPGSGKPGSEIVLTQSPATLSASPGERVTLTCRASQSVGNDVAWYQQKPGQAPRLLINYASHRYTGVPDRFTGSGYGTEFTLTISSVQSEDFGVYYCQQDFSSPRTFGGGTKVEIKEPKSSDKTHTCPPCPAPPVAGPSVFLFPPKPKDTLMISRTPEVTCVVVDVKHEDPEVKFNWYVDGVEVHNAKTKPREEQYNSTYRVVSVLTVLHQDWLNGKEYKCKVSNKALPAPIEKTISKAKGQPREPQVYTLPPSREQMTKNQVKLTCLVKGFYPSDIAVEWESNGQPENNYKTTPPVLDSDGSFFLYSKLTVDKSRWQQGNVFSCSVMHEALHNHYTQKSLSLSPGK

SEQ ID NO: 23821 - protein, 122 aa, synthetic construct; identical to SEQ ID NO: 10953
  source 1..122: note = Description of Artificial Sequence: Synthetic polypeptide; note = VH of XENP019670

SEQ ID NO: 23822 - protein, 107 aa, synthetic construct; identical to SEQ ID NO: 10999
  source 1..107: note = Description of Artificial Sequence: Synthetic polypeptide; note = VL of XENP019670

SEQ ID NO: 23823 - protein, 231 aa, synthetic construct; identical to SEQ ID NO: 21532
  source 1..231: note = Description of Artificial Sequence: Synthetic polypeptide; note = Fc chain of XENP019670

SEQ ID NO: 23824 - protein, 5 aa, synthetic construct
  source 1..5: note = Description of Artificial Sequence: Synthetic peptide; note = XENP019670 vhCDR1
NYWMN

SEQ ID NO: 23825 - protein, 19 aa, synthetic construct
  source 1..19: note = Description of Artificial Sequence: Synthetic peptide; note = XENP019670 vhCDR2
EIRLYSNNYATHYAESVKG

SEQ ID NO: 23826 - protein, 11 aa, synthetic construct
  source 1..11: note = Description of Artificial Sequence: Synthetic peptide; note = XENP019670 vhCDR3
YYGNYGGYFDV

SEQ ID NO: 23827 - protein, 11 aa, synthetic construct
  source 1..11: note = Description of Artificial Sequence: Synthetic peptide; note = XENP019670 vlCDR1
RASQSVGNDVA

SEQ ID NO: 23828 - protein, 7 aa, synthetic construct
  source 1..7: note = Description of Artificial Sequence: Synthetic peptide; note = XENP019670 vlCDR2
YASHRYT

SEQ ID NO: 23829 - protein, 9 aa, synthetic construct
  source 1..9: note = Description of Artificial Sequence: Synthetic peptide; note = XENP019670 vlCDR3
QQDFSSPRT

SEQ ID NO: 23830 - protein, 214 aa, synthetic construct; identical to SEQ ID NO: 17140
  source 1..214: note = Description of Artificial Sequence: Synthetic polypeptide; note = XENP019670 25F7_H0L0-1G6_H1.284_L1.194 Light Chain

SEQ ID NO: 23831 - protein, 214 aa, synthetic construct; identical to SEQ ID NO: 17140
  source 1..214: note = Description of Artificial Sequence: Synthetic polypeptide; note = VL of XENP019670

SEQ ID NO: 23832 - protein, 11 aa, synthetic construct
  source 1..11: note = Description of Artificial Sequence: Synthetic peptide; note = XENP019670 vlCDR1
RASQSISSYLA

SEQ ID NO: 23833 - protein, 7 aa, synthetic construct
  source 1..7: note = Description of Artificial Sequence: Synthetic peptide; note = XENP019670 vlCDR2
DASNRAT

SEQ ID NO: 23834 - protein, 9 aa, synthetic construct
  source 1..9: note = Description of Artificial Sequence: Synthetic peptide; note = XENP019670 vlCDR3
QQRSNWPLT

SEQ ID NO: 23835 - protein, 449 aa, synthetic construct; identical to SEQ ID NO: 21524
  source 1..449: note = Description of Artificial Sequence: Synthetic polypeptide; note = XENP019671 25F7_H0L0-1G6_L1.194_H1.284 Fab-Fc Heavy Chain

SEQ ID NO: 23836 - protein, 120 aa, synthetic construct; identical to SEQ ID NO: 17136
  source 1..120: note = Description of Artificial Sequence: Synthetic polypeptide; note = VH of XENP019671

SEQ ID NO: 23837 - protein, 5 aa, synthetic construct
  source 1..5: note = Description of Artificial Sequence: Synthetic peptide; note = XENP019671 vhCDR1
DYYWN

SEQ ID NO: 23838 - protein, 16 aa, synthetic construct
  source 1..16: note = Description of Artificial Sequence: Synthetic peptide; note = XENP019671 vhCDR2
EINHNGNTNSNPSLKS

SEQ ID NO: 23839 - protein, 12 aa, synthetic construct
  source 1..12: note = Description of Artificial Sequence: Synthetic peptide; note = XENP019671 vhCDR3
GYSDYEYNWFDP

SEQ ID NO: 23840 - protein, 480 aa, synthetic construct
  source 1..480: note = Description of Artificial Sequence: Synthetic polypeptide; note = XENP019671 25F7_H0L0-1G6_L1.194_H1.284 scFv-Fc Heavy Chain
EIVLTQSPATLSASPGERVTLTCRASQSVGNDVAWYQQKPGQAPRLLINYASHRYTGVPDRFTGSGYGTEFTLTISSVQSEDFGVYYCQQDFSSPRTFGGGTKVEIKGKPGSGKPGSGKPGSGKPGSEVQLVESGGGLVKPGGSLRLSCVASGFTFSNYWMNWVRQAPGKGLEWVCEIRLYSNNYATHYAESVKGRFTCSRDDSKSTLYLQMNNLKTEDTGVYYCTRYYGNYGGYFDVWGRGTLVTVSSEPKSSDKTHTCPPCPAPPVAGPSVFLFPPKPKDTLMISRTPEVTCVVVDVKHEDPEVKFNWYVDGVEVHNAKTKPREEQYNSTYRVVSVLTVLHQDWLNGKEYKCKVSNKALPAPIEKTISKAKGQPREPQVYTLPPSREQMTKNQVKLTCLVKGFYPSDIAVEWESNGQPENNYKTTPPVLDSDGSFFLYSKLTVDKSRWQQGNVFSCSVMHEALHNHYTQKSLSLSPGK

SEQ ID NO: 23841 - protein, 107 aa, synthetic construct; identical to SEQ ID NO: 10999
  source 1..107: note = Description of Artificial Sequence: Synthetic polypeptide; note = VH of XENP019671

SEQ ID NO: 23842 - protein, 122 aa, synthetic construct; identical to SEQ ID NO: 10953
  source 1..122: note = Description of Artificial Sequence: Synthetic polypeptide; note = VL of XENP019671

SEQ ID NO: 23843 - protein, 231 aa, synthetic construct; identical to SEQ ID NO: 21532
  source 1..231: note = Description of Artificial Sequence: Synthetic polypeptide; note = Fc chain of XENP019671

SEQ ID NO: 23844 - protein, 11 aa, synthetic construct
  source 1..11: note = Description of Artificial Sequence: Synthetic peptide; note = XENP019671 vhCDR1
RASQSVGNDVA

SEQ ID NO: 23845 - protein, 7 aa, synthetic construct
  source 1..7: note = Description of Artificial Sequence: Synthetic peptide; note = XENP019671 vhCDR2
YASHRYT

SEQ ID NO: 23846 - protein, 9 aa, synthetic construct
  source 1..9: note = Description of Artificial Sequence: Synthetic peptide; note = XENP019671 vhCDR3
QQDFSSPRT

SEQ ID NO: 23847 - protein, 5 aa, synthetic construct
  source 1..5: note = Description of Artificial Sequence: Synthetic peptide; note = XENP019671 vlCDR1
NYWMN

SEQ ID NO: 23848 - protein, 19 aa, synthetic construct
  source 1..19: note = Description of Artificial Sequence: Synthetic peptide; note = XENP019671 vlCDR2
EIRLYSNNYATHYAESVKG

SEQ ID NO: 23849 - protein, 11 aa, synthetic construct
  source 1..11: note = Description of Artificial Sequence: Synthetic peptide; note = XENP019671 vlCDR3
YYGNYGGYFDV

SEQ ID NO: 23850 - protein, 214 aa, synthetic construct; identical to SEQ ID NO: 17140
  source 1..214: note = Description of Artificial Sequence: Synthetic polypeptide; note = XENP019671 25F7_H0L0-1G6_L1.194_H1.284 Light Chain

SEQ ID NO: 23851 - protein, 214 aa, synthetic construct; identical to SEQ ID NO: 17140
  source 1..214: note = Description of Artificial Sequence: Synthetic polypeptide; note = VL of XENP019671

SEQ ID NO: 23852 - protein, 11 aa, synthetic construct
  source 1..11: note = Description of Artificial Sequence: Synthetic peptide; note = XENP019671 vlCDR1
RASQSISSYLA

SEQ ID NO: 23853 - protein, 7 aa, synthetic construct
  source 1..7: note = Description of Artificial Sequence: Synthetic peptide; note = XENP019671 vlCDR2
DASNRAT

SEQ ID NO: 23854 - protein, 9 aa, synthetic construct
  source 1..9: note = Description of Artificial Sequence: Synthetic peptide; note = XENP019671 vlCDR3
QQRSNWPLT

SEQ ID NO: 23855 - protein, 449 aa, synthetic construct; identical to SEQ ID NO: 21524
  source 1..449: note = Description of Artificial Sequence: Synthetic polypeptide; note = XENP019672 25F7_H0L0-1G6_H1.288_L1.210 Fab-Fc Heavy Chain

SEQ ID NO: 23856 - protein, 120 aa, synthetic construct; identical to SEQ ID NO: 17136
  source 1..120: note = Description of Artificial Sequence: Synthetic polypeptide; note = VH of XENP019672

SEQ ID NO: 23857 - protein, 5 aa, synthetic construct
  source 1..5: note = Description of Artificial Sequence: Synthetic peptide; note = XENP019672 vhCDR1
DYYWN

SEQ ID NO: 23858 - protein, 16 aa, synthetic construct
  source 1..16: note = Description of Artificial Sequence: Synthetic peptide; note = XENP019672 vhCDR2
EINHNGNTNSNPSLKS

SEQ ID NO: 23859 - protein, 12 aa, synthetic construct
  source 1..12: note = Description of Artificial Sequence: Synthetic peptide; note = XENP019672 vhCDR3
GYSDYEYNWFDP

SEQ ID NO: 23860 - protein, 480 aa, synthetic construct
  source 1..480: note = Description of Artificial Sequence: Synthetic polypeptide; note = XENP019672 25F7_H0L0-1G6_H1.288_L1.210 scFv-Fc Heavy Chain
EVQLVESGGGLVKPGGSLRLSCVASGFTFSNYWMNWVRQAPGKCLEWVAEIRLYSNNYATHYAESVKGRFTISRDDSKSTLYLQMNNLKTEDTGVYYCTRYYGNYGGYFDVWGRGTLVTVSSGKPGSGKPGSGKPGSGKPGSEIVLTQSPATLSASPGERVTLTCRASQSVGNDVAWYQQKPGQAPRLLINYASHRYTGVPDRFTGSGYGTEFTLTISSVQSEDFGVYYCQQDFSSPRTFGCGTKVEIKEPKSSDKTHTCPPCPAPPVAGPSVFLFPPKPKDTLMISRTPEVTCVVVDVKHEDPEVKFNWYVDGVEVHNAKTKPREEQYNSTYRVVSVLTVLHQDWLNGKEYKCKVSNKALPAPIEKTISKAKGQPREPQVYTLPPSREQMTKNQVKLTCLVKGFYPSDIAVEWESNGQPENNYKTTPPVLDSDGSFFLYSKLTVDKSRWQQGNVFSCSVMHEALHNHYTQKSLSLSPGK

SEQ ID NO: 23861 - protein, 122 aa, synthetic construct; identical to SEQ ID NO: 11358
  source 1..122: note = Description of Artificial Sequence: Synthetic polypeptide; note = VH of XENP019672

SEQ ID NO: 23862 - protein, 107 aa, synthetic construct; identical to SEQ ID NO: 11359
  source 1..107: note = Description of Artificial Sequence: Synthetic polypeptide; note = VL of XENP019672

SEQ ID NO: 23863 - protein, 231 aa, synthetic construct; identical to SEQ ID NO: 21532
  source 1..231: note = Description of Artificial Sequence: Synthetic polypeptide; note = Fc chain of XENP019672

SEQ ID NO: 23864 - protein, 5 aa, synthetic construct
  source 1..5: note = Description of Artificial Sequence: Synthetic peptide; note = XENP019672 vhCDR1
NYWMN

SEQ ID NO: 23865 - protein, 19 aa, synthetic construct
  source 1..19: note = Description of Artificial Sequence: Synthetic peptide; note = XENP019672 vhCDR2
EIRLYSNNYATHYAESVKG

SEQ ID NO: 23866 - protein, 11 aa, synthetic construct
  source 1..11: note = Description of Artificial Sequence: Synthetic peptide; note = XENP019672 vhCDR3
YYGNYGGYFDV

SEQ ID NO: 23867 - protein, 11 aa, synthetic construct
  source 1..11: note = Description of Artificial Sequence: Synthetic peptide; note = XENP019672 vlCDR1
RASQSVGNDVA

SEQ ID NO: 23868 - protein, 7 aa, synthetic construct
  source 1..7: note = Description of Artificial Sequence: Synthetic peptide; note = XENP019672 vlCDR2
YASHRYT

SEQ ID NO: 23869 - protein, 9 aa, synthetic construct
  source 1..9: note = Description of Artificial Sequence: Synthetic peptide; note = XENP019672 vlCDR3
QQDFSSPRT

SEQ ID NO: 23870 - protein, 214 aa, synthetic construct; identical to SEQ ID NO: 17140
  source 1..214: note = Description of Artificial Sequence: Synthetic polypeptide; note = XENP019672 25F7_H0L0-1G6_H1.288_L1.210 Light Chain

SEQ ID NO: 23871 - protein, 214 aa, synthetic construct; identical to SEQ ID NO: 17140
  source 1..214: note = Description of Artificial Sequence: Synthetic polypeptide; note = VL of XENP019672

SEQ ID NO: 23872 - protein, 11 aa, synthetic construct
  source 1..11: note = Description of Artificial Sequence: Synthetic peptide; note = XENP019672 vlCDR1
RASQSISSYLA

SEQ ID NO: 23873 - protein, 7 aa, synthetic construct
  source 1..7: note = Description of Artificial Sequence: Synthetic peptide; note = XENP019672 vlCDR2
DASNRAT

SEQ ID NO: 23874 - protein, 9 aa, synthetic construct
  source 1..9: note = Description of Artificial Sequence: Synthetic peptide; note = XENP019672 vlCDR3
QQRSNWPLT

SEQ ID NO: 23875 - protein, 449 aa, synthetic construct; identical to SEQ ID NO: 21524
  source 1..449: note = Description of Artificial Sequence: Synthetic polypeptide; note = XENP019673 25F7_H0L0-1G6_L1.210_H1.288 Fab-Fc Heavy Chain

SEQ ID NO: 23876 - protein, 120 aa, synthetic construct; identical to SEQ ID NO: 17136
  source 1..120: note = Description of Artificial Sequence: Synthetic polypeptide; note = VH of XENP019673

SEQ ID NO: 23877 - protein, 5 aa, synthetic construct
  source 1..5: note = Description of Artificial Sequence: Synthetic peptide; note = XENP019673 vhCDR1
DYYWN

SEQ ID NO: 23878 - protein, 16 aa, synthetic construct
  source 1..16: note = Description of Artificial Sequence: Synthetic peptide; note = XENP019673 vhCDR2
EINHNGNTNSNPSLKS

SEQ ID NO: 23879 - protein, 12 aa, synthetic construct
  source 1..12: note = Description of Artificial Sequence: Synthetic peptide; note = XENP019673 vhCDR3
GYSDYEYNWFDP

SEQ ID NO: 23880 - protein, 480 aa, synthetic construct; identical to SEQ ID NO: 23381
  source 1..480: note = Description of Artificial Sequence: Synthetic polypeptide; note = XENP019673 25F7_H0L0-1G6_L1.210_H1.288 scFv-Fc Heavy Chain

SEQ ID NO: 23881 - protein, 107 aa, synthetic construct; identical to SEQ ID NO: 11359
  source 1..107: note = Description of Artificial Sequence: Synthetic polypeptide; note = VH of XENP019673

SEQ ID NO: 23882 - protein, 122 aa, synthetic construct; identical to SEQ ID NO: 11358
  source 1..122: note = Description of Artificial Sequence: Synthetic polypeptide; note = VL of XENP019673

SEQ ID NO: 23883 - protein, 231 aa, synthetic construct; identical to SEQ ID NO: 21532
  source 1..231: note = Description of Artificial Sequence: Synthetic polypeptide; note = Fc chain of XENP019673

SEQ ID NO: 23884 - protein, 11 aa, synthetic construct
  source 1..11: note = Description of Artificial Sequence: Synthetic peptide; note = XENP019673 vhCDR1
RASQSVGNDVA

SEQ ID NO: 23885 - protein, 7 aa, synthetic construct
  source 1..7: note = Description of Artificial Sequence: Synthetic peptide; note = XENP019673 vhCDR2
YASHRYT

SEQ ID NO: 23886 - protein, 9 aa, synthetic construct
  source 1..9: note = Description of Artificial Sequence: Synthetic peptide; note = XENP019673 vhCDR3
QQDFSSPRT

SEQ ID NO: 23887 - protein, 5 aa, synthetic construct
  source 1..5: note = Description of Artificial Sequence: Synthetic peptide; note = XENP019673 vlCDR1
NYWMN

SEQ ID NO: 23888 - protein, 19 aa, synthetic construct
  source 1..19: note = Description of Artificial Sequence: Synthetic peptide; note = XENP019673 vlCDR2
EIRLYSNNYATHYAESVKG

SEQ ID NO: 23889 - protein, 11 aa, synthetic construct
  source 1..11: note = Description of Artificial Sequence: Synthetic peptide; note = XENP019673 vlCDR3
YYGNYGGYFDV

SEQ ID NO: 23890 - protein, 214 aa, synthetic construct; identical to SEQ ID NO: 17140
  source 1..214: note = Description of Artificial Sequence: Synthetic polypeptide; note = XENP019673 25F7_H0L0-1G6_L1.210_H1.288 Light Chain

SEQ ID NO: 23891 - protein, 214 aa, synthetic construct; identical to SEQ ID NO: 17140
  source 1..214: note = Description of Artificial Sequence: Synthetic polypeptide; note = VL of XENP019673

SEQ ID NO: 23892 - protein, 11 aa, synthetic construct
  source 1..11: note = Description of Artificial Sequence: Synthetic peptide; note = XENP019673 vlCDR1
RASQSISSYLA

SEQ ID NO: 23893 - protein, 7 aa, synthetic construct
  source 1..7: note = Description of Artificial Sequence: Synthetic peptide; note = XENP019673 vlCDR2
DASNRAT

SEQ ID NO: 23894 - protein, 9 aa, synthetic construct
  source 1..9: note = Description of Artificial Sequence: Synthetic peptide; note = XENP019673 vlCDR3
QQRSNWPLT

SEQ ID NO: 23895 - protein, 449 aa, synthetic construct; identical to SEQ ID NO: 21524
  source 1..449: note = Description of Artificial Sequence: Synthetic polypeptide; note = XENP019674 25F7_H0L0-1G6_H1.279_L1.194 Fab-Fc Heavy Chain

SEQ ID NO: 23896 - protein, 120 aa, synthetic construct; identical to SEQ ID NO: 17136
  source 1..120: note = Description of Artificial Sequence: Synthetic polypeptide; note = VH of XENP019674

SEQ ID NO: 23897 - protein, 5 aa, synthetic construct
  source 1..5: note = Description of Artificial Sequence: Synthetic peptide; note = XENP019674 vhCDR1
DYYWN

SEQ ID NO: 23898 - protein, 16 aa, synthetic construct
  source 1..16: note = Description of Artificial Sequence: Synthetic peptide; note = XENP019674 vhCDR2
EINHNGNTNSNPSLKS

SEQ ID NO: 23899 - protein, 12 aa, synthetic construct
  source 1..12: note = Description of Artificial Sequence: Synthetic peptide; note = XENP019674 vhCDR3
GYSDYEYNWFDP

SEQ ID NO: 23900 - protein, 480 aa, synthetic construct; identical to SEQ ID NO: 23401
  source 1..480: note = Description of Artificial Sequence: Synthetic polypeptide; note = XENP019674 25F7_H0L0-1G6_H1.279_L1.194 scFv-Fc Heavy Chain

SEQ ID NO: 23901 - protein, 122 aa, synthetic construct; identical to SEQ ID NO: 10908
  source 1..122: note = Description of Artificial Sequence: Synthetic polypeptide; note = VH of XENP019674

SEQ ID NO: 23902 - protein, 107 aa, synthetic construct; identical to SEQ ID NO: 10999
  source 1..107: note = Description of Artificial Sequence: Synthetic polypeptide; note = VL of XENP019674

SEQ ID NO: 23903 - protein, 231 aa, synthetic construct; identical to SEQ ID NO: 21532
  source 1..231: note = Description of Artificial Sequence: Synthetic polypeptide; note = Fc chain of XENP019674

SEQ ID NO: 23904 - protein, 5 aa, synthetic construct
  source 1..5: note = Description of Artificial Sequence: Synthetic peptide; note = XENP019674 vhCDR1
NYWMN

SEQ ID NO: 23905 - protein, 19 aa, synthetic construct
  source 1..19: note = Description of Artificial Sequence: Synthetic peptide; note = XENP019674 vhCDR2
EIRLYSNNYATHYAESVKG

SEQ ID NO: 23906 - protein, 11 aa, synthetic construct
  source 1..11: note = Description of Artificial Sequence: Synthetic peptide; note = XENP019674 vhCDR3
YYGNYGGYFDV

SEQ ID NO: 23907 - protein, 11 aa, synthetic construct
  source 1..11: note = Description of Artificial Sequence: Synthetic peptide; note = XENP019674 vlCDR1
RASQSVGNDVA

SEQ ID NO: 23908 - protein, 7 aa, synthetic construct
  source 1..7: note = Description of Artificial Sequence: Synthetic peptide; note = XENP019674 vlCDR2
YASHRYT

SEQ ID NO: 23909 - protein, 9 aa, synthetic construct
  source 1..9: note = Description of Artificial Sequence: Synthetic peptide; note = XENP019674 vlCDR3
QQDFSSPRT

SEQ ID NO: 23910 - protein, 214 aa, synthetic construct; identical to SEQ ID NO: 17140
  source 1..214: note = Description of Artificial Sequence: Synthetic polypeptide; note = XENP019674 25F7_H0L0-1G6_H1.279_L1.194 Light Chain

SEQ ID NO: 23911 - protein, 214 aa, synthetic construct; identical to SEQ ID NO: 17140
  source 1..214: note = Description of Artificial Sequence: Synthetic polypeptide; note = VL of XENP019674

SEQ ID NO: 23912 - protein, 11 aa, synthetic construct
  source 1..11: note = Description of Artificial Sequence: Synthetic peptide; note = XENP019674 vlCDR1
RASQSISSYLA

SEQ ID NO: 23913 - protein, 7 aa, synthetic construct
  source 1..7: note = Description of Artificial Sequence: Synthetic peptide; note = XENP019674 vlCDR2
DASNRAT

SEQ ID NO: 23914 - protein, 9 aa, synthetic construct
  source 1..9: note = Description of Artificial Sequence: Synthetic peptide; note = XENP019674 vlCDR3
QQRSNWPLT

SEQ ID NO: 23915 - protein, 449 aa, synthetic construct; identical to SEQ ID NO: 21524
  source 1..449: note = Description of Artificial Sequence: Synthetic polypeptide; note = XENP019675 25F7_H0L0-1G6_H1.282_L1.194 Fab-Fc Heavy Chain

SEQ ID NO: 23916 - protein, 120 aa, synthetic construct; identical to SEQ ID NO: 17136
  source 1..120: note = Description of Artificial Sequence: Synthetic polypeptide; note = VH of XENP019675

SEQ ID NO: 23917 - protein, 5 aa, synthetic construct
  source 1..5: note = Description of Artificial Sequence: Synthetic peptide; note = XENP019675 vhCDR1
DYYWN

SEQ ID NO: 23918 - protein, 16 aa, synthetic construct
  source 1..16: note = Description of Artificial Sequence: Synthetic peptide; note = XENP019675 vhCDR2
EINHNGNTNSNPSLKS

SEQ ID NO: 23919 - protein, 12 aa, synthetic construct
  source 1..12: note = Description of Artificial Sequence: Synthetic peptide; note = XENP019675 vhCDR3
GYSDYEYNWFDP

SEQ ID NO: 23920 - protein, 480 aa, synthetic construct
  source 1..480: note = Description of Artificial Sequence: Synthetic polypeptide; note = XENP019675 25F7_H0L0-1G6_H1.282_L1.194 scFv-Fc Heavy Chain
EVQLVESGGGLVKPGGSLRLTCVASGFTFSNYWMNWVRQAPGKGLEWVAEIRLYSNNYATHYAESVKGRFTISRDDSKSMLYLQMNNLKTEDTGVYYCTRYYGNYGGYFDVWGRGTLVTVSSGKPGSGKPGSGKPGSGKPGSEIVLTQSPATLSASPGERVTLTCRASQSVGNDVAWYQQKPGQAPRLLINYASHRYTGVPDRFTGSGYGTEFTLTISSVQSEDFGVYYCQQDFSSPRTFGGGTKVEIKEPKSSDKTHTCPPCPAPPVAGPSVFLFPPKPKDTLMISRTPEVTCVVVDVKHEDPEVKFNWYVDGVEVHNAKTKPREEQYNSTYRVVSVLTVLHQDWLNGKEYKCKVSNKALPAPIEKTISKAKGQPREPQVYTLPPSREQMTKNQVKLTCLVKGFYPSDIAVEWESNGQPENNYKTTPPVLDSDGSFFLYSKLTVDKSRWQQGNVFSCSVMHEALHNHYTQKSLSLSPGK

SEQ ID NO: 23921 - protein, 122 aa, synthetic construct; identical to SEQ ID NO: 10935
  source 1..122: note = Description of Artificial Sequence: Synthetic polypeptide; note = VH of XENP019675

SEQ ID NO: 23922 - protein, 107 aa, synthetic construct; identical to SEQ ID NO: 10999
  source 1..107: note = Description of Artificial Sequence: Synthetic polypeptide; note = VL of XENP019675

SEQ ID NO: 23923 - protein, 231 aa, synthetic construct; identical to SEQ ID NO: 21532
  source 1..231: note = Description of Artificial Sequence: Synthetic polypeptide; note = Fc chain of XENP019675

SEQ ID NO: 23924 - protein, 5 aa, synthetic construct
  source 1..5: note = Description of Artificial Sequence: Synthetic peptide; note = XENP019675 vhCDR1
NYWMN

SEQ ID NO: 23925 - protein, 19 aa, synthetic construct
  source 1..19: note = Description of Artificial Sequence: Synthetic peptide; note = XENP019675 vhCDR2
EIRLYSNNYATHYAESVKG

SEQ ID NO: 23926 - protein, 11 aa, synthetic construct
  source 1..11: note = Description of Artificial Sequence: Synthetic peptide; note = XENP019675 vhCDR3
YYGNYGGYFDV

SEQ ID NO: 23927 - protein, 11 aa, synthetic construct
  source 1..11: note = Description of Artificial Sequence: Synthetic peptide; note = XENP019675 vlCDR1
RASQSVGNDVA

SEQ ID NO: 23928 - protein, 7 aa, synthetic construct
  source 1..7: note = Description of Artificial Sequence: Synthetic peptide; note = XENP019675 vlCDR2
YASHRYT

SEQ ID NO: 23929 - protein, 9 aa, synthetic construct
  source 1..9: note = Description of Artificial Sequence: Synthetic peptide; note = XENP019675 vlCDR3
QQDFSSPRT

SEQ ID NO: 23930 - protein, 214 aa, synthetic construct; identical to SEQ ID NO: 17140
  source 1..214: note = Description of Artificial Sequence: Synthetic polypeptide; note = XENP019675 25F7_H0L0-1G6_H1.282_L1.194 Light Chain

SEQ ID NO: 23931 - protein, 214 aa, synthetic construct; identical to SEQ ID NO: 17140
  source 1..214: note = Description of Artificial Sequence: Synthetic polypeptide; note = VL of XENP019675

SEQ ID NO: 23932 - protein, 11 aa, synthetic construct
  source 1..11: note = Description of Artificial Sequence: Synthetic peptide; note = XENP019675 vlCDR1
RASQSISSYLA

SEQ ID NO: 23933 - protein, 7 aa, synthetic construct
  source 1..7: note = Description of Artificial Sequence: Synthetic peptide; note = XENP019675 vlCDR2
DASNRAT

SEQ ID NO: 23934 - protein, 9 aa, synthetic construct
  source 1..9: note = Description of Artificial Sequence: Synthetic peptide; note = XENP019675 vlCDR3
QQRSNWPLT

SEQ ID NO: 23935 - protein, 449 aa, synthetic construct; identical to SEQ ID NO: 21524
  source 1..449: note = Description of Artificial Sequence: Synthetic polypeptide; note = XENP019676 25F7_H0L0-1G6_L1.194_H1.279 Fab-Fc Heavy Chain

SEQ ID NO: 23936 - protein, 120 aa, synthetic construct; identical to SEQ ID NO: 17136
  source 1..120: note = Description of Artificial Sequence: Synthetic polypeptide; note = VH of XENP019676

SEQ ID NO: 23937 - protein, 5 aa, synthetic construct
  source 1..5: note = Description of Artificial Sequence: Synthetic peptide; note = XENP019676 vhCDR1
DYYWN

SEQ ID NO: 23938 - protein, 16 aa, synthetic construct
  source 1..16: note = Description of Artificial Sequence: Synthetic peptide; note = XENP019676 vhCDR2
EINHNGNTNSNPSLKS

SEQ ID NO: 23939 - protein, 12 aa, synthetic construct
  source 1..12: note = Description of Artificial Sequence: Synthetic peptide; note = XENP019676 vhCDR3
GYSDYEYNWFDP

SEQ ID NO: 23940 - protein, 480 aa, synthetic construct; identical to SEQ ID NO: 23221
  source 1..480: note = Description of Artificial Sequence: Synthetic polypeptide; note = XENP019676 25F7_H0L0-1G6_L1.194_H1.279 scFv-Fc Heavy Chain

SEQ ID NO: 23941 - protein, 107 aa, synthetic construct; identical to SEQ ID NO: 10999
  source 1..107: note = Description of Artificial Sequence: Synthetic polypeptide; note = VH of XENP019676

SEQ ID NO: 23942 - protein, 122 aa, synthetic construct; identical to SEQ ID NO: 10908
  source 1..122: note = Description of Artificial Sequence: Synthetic polypeptide; note = VL of XENP019676

SEQ ID NO: 23943 - protein, 231 aa, synthetic construct; identical to SEQ ID NO: 21532
  source 1..231: note = Description of Artificial Sequence: Synthetic polypeptide; note = Fc chain of XENP019676

SEQ ID NO: 23944 - protein, 11 aa, synthetic construct
  source 1..11: note = Description of Artificial Sequence: Synthetic peptide; note = XENP019676 vhCDR1
RASQSVGNDVA

SEQ ID NO: 23945 - protein, 7 aa, synthetic construct
  source 1..7: note = Description of Artificial Sequence: Synthetic peptide; note = XENP019676 vhCDR2
YASHRYT

SEQ ID NO: 23946 - protein, 9 aa, synthetic construct
  source 1..9: note = Description of Artificial Sequence: Synthetic peptide; note = XENP019676 vhCDR3
QQDFSSPRT

SEQ ID NO: 23947 - protein, 5 aa, synthetic construct
  source 1..5: note = Description of Artificial Sequence: Synthetic peptide; note = XENP019676 vlCDR1
NYWMN

SEQ ID NO: 23948 - protein, 19 aa, synthetic construct
  source 1..19: note = Description of Artificial Sequence: Synthetic peptide; note = XENP019676 vlCDR2
EIRLYSNNYATHYAESVKG

SEQ ID NO: 23949 - protein, 11 aa, synthetic construct
  source 1..11: note = Description of Artificial Sequence: Synthetic peptide; note = XENP019676 vlCDR3
YYGNYGGYFDV

SEQ ID NO: 23950 - protein, 214 aa, synthetic construct; identical to SEQ ID NO: 17140
  source 1..214: note = Description of Artificial Sequence: Synthetic polypeptide; note = XENP019676 25F7_H0L0-1G6_L1.194_H1.279 Light Chain

SEQ ID NO: 23951 - protein, 214 aa, synthetic construct; identical to SEQ ID NO: 17140
  source 1..214: note = Description of Artificial Sequence: Synthetic polypeptide; note = VL of XENP019676

SEQ ID NO: 23952 - protein, 11 aa, synthetic construct
  source 1..11: note = Description of Artificial Sequence: Synthetic peptide; note = XENP019676 vlCDR1
RASQSISSYLA

SEQ ID NO: 23953 - protein, 7 aa, synthetic construct
  source 1..7: note = Description of Artificial Sequence: Synthetic peptide; note = XENP019676 vlCDR2
DASNRAT

SEQ ID NO: 23954 - protein, 9 aa, synthetic construct
  source 1..9: note = Description of Artificial Sequence: Synthetic peptide; note = XENP019676 vlCDR3
QQRSNWPLT

SEQ ID NO: 23955 - protein, 449 aa, synthetic construct; identical to SEQ ID NO: 21524
  source 1..449: note = Description of Artificial Sequence: Synthetic polypeptide; note = XENP019677 25F7_H0L0-1G6_L1.194_H1.282 Fab-Fc Heavy Chain

SEQ ID NO: 23956 - protein, 120 aa, synthetic construct; identical to SEQ ID NO: 17136
  source 1..120: note = Description of Artificial Sequence: Synthetic polypeptide; note = VH of XENP019677

SEQ ID NO: 23957 - protein, 5 aa, synthetic construct
  source 1..5: note = Description of Artificial Sequence: Synthetic peptide; note = XENP019677 vhCDR1
DYYWN

SEQ ID NO: 23958 - protein, 16 aa, synthetic construct
  source 1..16: note = Description of Artificial Sequence: Synthetic peptide; note = XENP019677 vhCDR2
EINHNGNTNSNPSLKS

SEQ ID NO: 23959 - protein, 12 aa, synthetic construct
  source 1..12: note = Description of Artificial Sequence: Synthetic peptide; note = XENP019677 vhCDR3
GYSDYEYNWFDP

SEQ ID NO: 23960 - protein, 480 aa, synthetic construct
  source 1..480: note = Description of Artificial Sequence: Synthetic polypeptide; note = XENP019677 25F7_H0L0-1G6_L1.194_H1.282 scFv-Fc Heavy Chain
EIVLTQSPATLSASPGERVTLTCRASQSVGNDVAWYQQKPGQAPRLLINYASHRYTGVPDRFTGSGYGTEFTLTISSVQSEDFGVYYCQQDFSSPRTFGGGTKVEIKGKPGSGKPGSGKPGSGKPGSEVQLVESGGGLVKPGGSLRLTCVASGFTFSNYWMNWVRQAPGKGLEWVAEIRLYSNNYATHYAESVKGRFTISRDDSKSMLYLQMNNLKTEDTGVYYCTRYYGNYGGYFDVWGRGTLVTVSSEPKSSDKTHTCPPCPAPPVAGPSVFLFPPKPKDTLMISRTPEVTCVVVDVKHEDPEVKFNWYVDGVEVHNAKTKPREEQYNSTYRVVSVLTVLHQDWLNGKEYKCKVSNKALPAPIEKTISKAKGQPREPQVYTLPPSREQMTKNQVKLTCLVKGFYPSDIAVEWESNGQPENNYKTTPPVLDSDGSFFLYSKLTVDKSRWQQGNVFSCSVMHEALHNHYTQKSLSLSPGK

SEQ ID NO: 23961 - protein, 107 aa, synthetic construct; identical to SEQ ID NO: 10999
  source 1..107: note = Description of Artificial Sequence: Synthetic polypeptide; note = VH of XENP019677

SEQ ID NO: 23962 - protein, 122 aa, synthetic construct; identical to SEQ ID NO: 10935
  source 1..122: note = Description of Artificial Sequence: Synthetic polypeptide; note = VL of XENP019677

SEQ ID NO: 23963 - protein, 231 aa, synthetic construct; identical to SEQ ID NO: 21532
  source 1..231: note = Description of Artificial Sequence: Synthetic polypeptide; note = Fc chain of XENP019677

SEQ ID NO: 23964 - protein, 11 aa, synthetic construct
  source 1..11: note = Description of Artificial Sequence: Synthetic peptide; note = XENP019677 vhCDR1
RASQSVGNDVA

SEQ ID NO: 23965 - protein, 7 aa, synthetic construct
  source 1..7: note = Description of Artificial Sequence: Synthetic peptide; note = XENP019677 vhCDR2
YASHRYT

SEQ ID NO: 23966 - protein, 9 aa, synthetic construct
  source 1..9: note = Description of Artificial Sequence: Synthetic peptide; note = XENP019677 vhCDR3
QQDFSSPRT

SEQ ID NO: 23967 - protein, 5 aa, synthetic construct
  source 1..5: note = Description of Artificial Sequence: Synthetic peptide; note = XENP019677 vlCDR1
NYWMN

SEQ ID NO: 23968 - protein, 19 aa, synthetic construct
  source 1..19: note = Description of Artificial Sequence: Synthetic peptide; note = XENP019677 vlCDR2
EIRLYSNNYATHYAESVKG

SEQ ID NO: 23969 - protein, 11 aa, synthetic construct
  source 1..11: note = Description of Artificial Sequence: Synthetic peptide; note = XENP019677 vlCDR3
YYGNYGGYFDV

SEQ ID NO: 23970 - protein, 214 aa, synthetic construct; identical to SEQ ID NO: 17140
  source 1..214: note = Description of Artificial Sequence: Synthetic polypeptide; note = XENP019677 25F7_H0L0-1G6_L1.194_H1.282 Light Chain

SEQ ID NO: 23971 - protein, 214 aa, synthetic construct; identical to SEQ ID NO: 17140
  source 1..214: note = Description of Artificial Sequence: Synthetic polypeptide; note = VL of XENP019677

SEQ ID NO: 23972 - protein, 11 aa, synthetic construct
  source 1..11: note = Description of Artificial Sequence: Synthetic peptide; note = XENP019677 vlCDR1
RASQSISSYLA

SEQ ID NO: 23973 - protein, 7 aa, synthetic construct
  source 1..7: note = Description of Artificial Sequence: Synthetic peptide; note = XENP019677 vlCDR2
DASNRAT

SEQ ID NO: 23974 - protein, 9 aa, synthetic construct
  source 1..9: note = Description of Artificial Sequence: Synthetic peptide; note = XENP019677 vlCDR3
QQRSNWPLT

SEQ ID NO: 23975 - protein, 447 aa, synthetic construct; identical to SEQ ID NO: 17175
  source 1..447: note = Description of Artificial Sequence: Synthetic polypeptide; note = XENP020032 1H11_H2L2-1G6_H1.279_L1.194 Fab-Fc Heavy Chain

SEQ ID NO: 23976 - protein, 118 aa, synthetic construct; identical to SEQ ID NO: 17176
  source 1..118: note = Description of Artificial Sequence: Synthetic polypeptide; note = VH of XENP020032

SEQ ID NO: 23977 - protein, 5 aa, synthetic construct
  source 1..5: note = Description of Artificial Sequence: Synthetic peptide; note = XENP020032 vhCDR1
NYGMN

SEQ ID NO: 23978 - protein, 17 aa, synthetic construct
  source 1..17: note = Description of Artificial Sequence: Synthetic peptide; note = XENP020032 vhCDR2
WINTYTGEPTYADGFTG

SEQ ID NO: 23979 - protein, 9 aa, synthetic construct
  source 1..9: note = Description of Artificial Sequence: Synthetic peptide; note = XENP020032 vhCDR3
GRGMGYFDY

SEQ ID NO: 23980 - protein, 480 aa, synthetic construct; identical to SEQ ID NO: 23401
  source 1..480: note = Description of Artificial Sequence: Synthetic polypeptide; note = XENP020032 1H11_H2L2-1G6_H1.279_L1.194 scFv-Fc Heavy Chain

SEQ ID NO: 23981 - protein, 122 aa, synthetic construct; identical to SEQ ID NO: 10908
  source 1..122: note = Description of Artificial Sequence: Synthetic polypeptide; note = VH of XENP020032

SEQ ID NO: 23982 - protein, 107 aa, synthetic construct; identical to SEQ ID NO: 10999
  source 1..107: note = Description of Artificial Sequence: Synthetic polypeptide; note = VL of XENP020032

SEQ ID NO: 23983 - protein, 231 aa, synthetic construct; identical to SEQ ID NO: 21532
  source 1..231: note = Description of Artificial Sequence: Synthetic polypeptide; note = Fc chain of XENP020032

SEQ ID NO: 23984 - protein, 5 aa, synthetic construct
  source 1..5: note = Description of Artificial Sequence: Synthetic peptide; note = XENP020032 vhCDR1
NYWMN

SEQ ID NO: 23985 - protein, 19 aa, synthetic construct
  source 1..19: note = Description of Artificial Sequence: Synthetic peptide; note = XENP020032 vhCDR2
EIRLYSNNYATHYAESVKG

SEQ ID NO: 23986 - protein, 11 aa, synthetic construct
  source 1..11: note = Description of Artificial Sequence: Synthetic peptide; note = XENP020032 vhCDR3
YYGNYGGYFDV

SEQ ID NO: 23987 - protein, 11 aa, synthetic construct
  source 1..11: note = Description of Artificial Sequence: Synthetic peptide; note = XENP020032 vlCDR1
RASQSVGNDVA

SEQ ID NO: 23988 - protein, 7 aa, synthetic construct
  source 1..7: note = Description of Artificial Sequence: Synthetic peptide; note = XENP020032 vlCDR2
YASHRYT

SEQ ID NO: 23989 - protein, 9 aa, synthetic construct
  source 1..9: note = Description of Artificial Sequence: Synthetic peptide; note = XENP020032 vlCDR3
QQDFSSPRT

SEQ ID NO: 23990 - protein, 214 aa, synthetic construct; identical to SEQ ID NO: 17170
  source 1..214: note = Description of Artificial Sequence: Synthetic polypeptide; note = XENP020032 1H11_H2L2-1G6_H1.279_L1.194 Light Chain

SEQ ID NO: 23991 - protein, 214 aa, synthetic construct; identical to SEQ ID NO: 17170
  source 1..214: note = Description of Artificial Sequence: Synthetic polypeptide; note = VL of XENP020032

SEQ ID NO: 23992 - protein, 11 aa, synthetic construct
  source 1..11: note = Description of Artificial Sequence: Synthetic peptide; note = XENP020032 vlCDR1
RASENIYSNLA

SEQ ID NO: 23993 - protein, 7 aa, synthetic construct
  source 1..7: note = Description of Artificial Sequence: Synthetic peptide; note = XENP020032 vlCDR2
AATNLAD

SEQ ID NO: 23994 - protein, 9 aa, synthetic construct
  source 1..9: note = Description of Artificial Sequence: Synthetic peptide; note = XENP020032 vlCDR3
QHFWTTPRT

SEQ ID NO: 23995 - protein, 444 aa, synthetic construct; identical to SEQ ID NO: 17215
  source 1..444: note = Description of Artificial Sequence: Synthetic polypeptide; note = XENP020033 8D7_H1L1-1G6_H1.279_L1.194 Fab-Fc Heavy Chain

SEQ ID NO: 23996 - protein, 115 aa, synthetic construct; identical to SEQ ID NO: 17216
  source 1..115: note = Description of Artificial Sequence: Synthetic polypeptide; note = VH of XENP020033

SEQ ID NO: 23997 - protein, 5 aa, synthetic construct
  source 1..5: note = Description of Artificial Sequence: Synthetic peptide; note = XENP020033 vhCDR1
SYGVH

SEQ ID NO: 23998 - protein, 15 aa, synthetic construct
  source 1..15: note = Description of Artificial Sequence: Synthetic peptide; note = XENP020033 vhCDR2
VIWSGSTDYNPSLKS

SEQ ID NO: 23999 - protein, 8 aa, synthetic construct
  source 1..8: note = Description of Artificial Sequence: Synthetic peptide; note = XENP020033 vhCDR3
TYYYAMDY

SEQ ID NO: 24000 - protein, 480 aa, synthetic construct; identical to SEQ ID NO: 23401
  source 1..480: note = Description of Artificial Sequence: Synthetic polypeptide; note = XENP020033 8D7_H1L1-1G6_H1.279_L1.194 scFv-Fc Heavy Chain

SEQ ID NO: 24001 - protein, 122 aa, synthetic construct; identical to SEQ ID NO: 10908
  source 1..122: note = Description of Artificial Sequence: Synthetic polypeptide; note = VH of XENP020033

SEQ ID NO: 24002 - protein, 107 aa, synthetic construct; identical to SEQ ID NO: 10999
  source 1..107: note = Description of Artificial Sequence: Synthetic polypeptide; note = VL of XENP020033

SEQ ID NO: 24003 - protein, 231 aa, synthetic construct; identical to SEQ ID NO: 21532
  source 1..231: note = Description of Artificial Sequence: Synthetic polypeptide; note = Fc chain of XENP020033

SEQ ID NO: 24004 - protein, 5 aa, synthetic construct
  source 1..5: note = Description of Artificial Sequence: Synthetic peptide; note = XENP020033 vhCDR1
NYWMN

SEQ ID NO: 24005 - protein, 19 aa, synthetic construct
  source 1..19: note = Description of Artificial Sequence: Synthetic peptide; note = XENP020033 vhCDR2
EIRLYSNNYATHYAESVKG

SEQ ID NO: 24006 - protein, 11 aa, synthetic construct
  source 1..11: note = Description of Artificial Sequence: Synthetic peptide; note = XENP020033 vhCDR3
YYGNYGGYFDV

SEQ ID NO: 24007 - protein, 11 aa, synthetic construct
  source 1..11: note = Description of Artificial Sequence: Synthetic peptide; note = XENP020033 vlCDR1
RASQSVGNDVA

SEQ ID NO: 24008 - protein, 7 aa, synthetic construct
  source 1..7: note = Description of Artificial Sequence: Synthetic peptide; note = XENP020033 vlCDR2
YASHRYT

SEQ ID NO: 24009 - protein, 9 aa, synthetic construct
  source 1..9: note = Description of Artificial Sequence: Synthetic peptide; note = XENP020033 vlCDR3
QQDFSSPRT

SEQ ID NO: 24010 - protein, 214 aa, synthetic construct; identical to SEQ ID NO: 17220
  source 1..214: note = Description of Artificial Sequence: Synthetic polypeptide; note = XENP020033 8D7_H1L1-1G6_H1.279_L1.194 Light Chain

SEQ ID NO: 24011 - protein, 214 aa, synthetic construct; identical to SEQ ID NO: 17220
  source 1..214: note = Description of Artificial Sequence: Synthetic polypeptide; note = VL of XENP020033

SEQ ID NO: 24012 - protein, 11 aa, synthetic construct
  source 1..11: note = Description of Artificial Sequence: Synthetic peptide; note = XENP020033 vlCDR1
RASENIYSNLA

SEQ ID NO: 24013 - protein, 7 aa, synthetic construct
  source 1..7: note = Description of Artificial Sequence: Synthetic peptide; note = XENP020033 vlCDR2
AATNLAD

SEQ ID NO: 24014 - protein, 9 aa, synthetic construct
  source 1..9: note = Description of Artificial Sequence: Synthetic peptide; note = XENP020033 vlCDR3
QHFWGTPWT

SEQ ID NO: 24015 - protein, 447 aa, synthetic construct; identical to SEQ ID NO: 17235
  source 1..447: note = Description of Artificial Sequence: Synthetic polypeptide; note = XENP020034 2A11_H1L2-1G6_H1.279_L1.194 Fab-Fc Heavy Chain

SEQ ID NO: 24016 - protein, 118 aa, synthetic construct; identical to SEQ ID NO: 17236
  source 1..118: note = Description of Artificial Sequence: Synthetic polypeptide; note = VH of XENP020034

SEQ ID NO: 24017 - protein, 5 aa, synthetic construct
  source 1..5: note = Description of Artificial Sequence: Synthetic peptide; note = XENP020034 vhCDR1
DYYMH

SEQ ID NO: 24018 - protein, 17 aa, synthetic construct
  source 1..17: note = Description of Artificial Sequence: Synthetic peptide; note = XENP020034 vhCDR2
WIDPENGDTEYAPKFQG

SEQ ID NO: 24019 - protein, 9 aa, synthetic construct
  source 1..9: note = Description of Artificial Sequence: Synthetic peptide; note = XENP020034 vhCDR3
RGVRQALDY

SEQ ID NO: 24020 - protein, 480 aa, synthetic construct; identical to SEQ ID NO: 23401
  source 1..480: note = Description of Artificial Sequence: Synthetic polypeptide; note = XENP020034 2A11_H1L2-1G6_H1.279_L1.194 scFv-Fc Heavy Chain

SEQ ID NO: 24021 - protein, 122 aa, synthetic construct; identical to SEQ ID NO: 10908
  source 1..122: note = Description of Artificial Sequence: Synthetic polypeptide; note = VH of XENP020034

SEQ ID NO: 24022 - protein, 107 aa, synthetic construct; identical to SEQ ID NO: 10999
  source 1..107: note = Description of Artificial Sequence: Synthetic polypeptide; note = VL of XENP020034

SEQ ID NO: 24023 - protein, 231 aa, synthetic construct; identical to SEQ ID NO: 21532
  source 1..231: note = Description of Artificial Sequence: Synthetic polypeptide; note = Fc chain of XENP020034

SEQ ID NO: 24024 - protein, 5 aa, synthetic construct
  source 1..5: note = Description of Artificial Sequence: Synthetic peptide; note = XENP020034 vhCDR1
NYWMN

SEQ ID NO: 24025 - protein, 19 aa, synthetic construct
  source 1..19: note = Description of Artificial Sequence: Synthetic peptide; note = XENP020034 vhCDR2
EIRLYSNNYATHYAESVKG

SEQ ID NO: 24026 - protein, 11 aa, synthetic construct
  source 1..11: note = Description of Artificial Sequence: Synthetic peptide; note = XENP020034 vhCDR3
YYGNYGGYFDV

SEQ ID NO: 24027 - protein, 11 aa, synthetic construct
  source 1..11: note = Description of Artificial Sequence: Synthetic peptide; note = XENP020034 vlCDR1
RASQSVGNDVA

SEQ ID NO: 24028 - protein, 7 aa, synthetic construct
  source 1..7: note = Description of Artificial Sequence: Synthetic peptide; note = XENP020034 vlCDR2
YASHRYT

SEQ ID NO: 24029 - protein, 9 aa, synthetic construct
  source 1..9: note = Description of Artificial Sequence: Synthetic peptide; note = XENP020034 vlCDR3
QQDFSSPRT

SEQ ID NO: 24030 - protein, 214 aa, synthetic construct; identical to SEQ ID NO: 17250
  source 1..214: note = Description of Artificial Sequence: Synthetic polypeptide; note = XENP020034 2A11_H1L2-1G6_H1.279_L1.194 Light Chain

SEQ ID NO: 24031 - protein, 214 aa, synthetic construct; identical to SEQ ID NO: 17250
  source 1..214: note = Description of Artificial Sequence: Synthetic polypeptide; note = VL of XENP020034

SEQ ID NO: 24032 - protein, 11 aa, synthetic construct
  source 1..11: note = Description of Artificial Sequence: Synthetic peptide; note = XENP020034 vlCDR1
QASQDIGNYLN

SEQ ID NO: 24033 - protein, 7 aa, synthetic construct
  source 1..7: note = Description of Artificial Sequence: Synthetic peptide; note = XENP020034 vlCDR2
YTSRLHS

SEQ ID NO: 24034 - protein, 9 aa, synthetic construct
  source 1..9: note = Description of Artificial Sequence: Synthetic peptide; note = XENP020034 vlCDR3
QQGNTLPYT

SEQ ID NO: 24035 - protein, 444 aa, synthetic construct; identical to SEQ ID NO: 17405
  source 1..444: note = Description of Artificial Sequence: Synthetic polypeptide; note = XENP020035 9E7_H4L1-1G6_H1.279_L1.194 Fab-Fc Heavy Chain

SEQ ID NO: 24036 - protein, 115 aa, synthetic construct; identical to SEQ ID NO: 17406
  source 1..115: note = Description of Artificial Sequence: Synthetic polypeptide; note = VH of XENP020035

SEQ ID NO: 24037 - protein, 5 aa, synthetic construct
  source 1..5: note = Description of Artificial Sequence: Synthetic peptide; note = XENP020035 vhCDR1
RYGIH

SEQ ID NO: 24038 - protein, 15 aa, synthetic construct
  source 1..15: note = Description of Artificial Sequence: Synthetic peptide; note = XENP020035 vhCDR2
VIWSGVTDYNPSFQG

SEQ ID NO: 24039 - protein, 8 aa, synthetic construct
  source 1..8: note = Description of Artificial Sequence: Synthetic peptide; note = XENP020035 vhCDR3
PYYYAMDY

SEQ ID NO: 24040 - protein, 480 aa, synthetic construct; identical to SEQ ID NO: 23401
  source 1..480: note = Description of Artificial Sequence: Synthetic polypeptide; note = XENP020035 9E7_H4L1-1G6_H1.279_L1.194 scFv-Fc Heavy Chain

SEQ ID NO: 24041 - protein, 122 aa, synthetic construct; identical to SEQ ID NO: 10908
  source 1..122: note = Description of Artificial Sequence: Synthetic polypeptide; note = VH of XENP020035

SEQ ID NO: 24042 - protein, 107 aa, synthetic construct; identical to SEQ ID NO: 10999
  source 1..107: note = Description of Artificial Sequence: Synthetic polypeptide; note = VL of XENP020035

SEQ ID NO: 24043 - protein, 231 aa, synthetic construct; identical to SEQ ID NO: 21532
  source 1..231: note = Description of Artificial Sequence: Synthetic polypeptide; note = Fc chain of XENP020035

SEQ ID NO: 24044 - protein, 5 aa, synthetic construct
  source 1..5: note = Description of Artificial Sequence: Synthetic peptide; note = XENP020035 vhCDR1
NYWMN

SEQ ID NO: 24045 - protein, 19 aa, synthetic construct
  source 1..19: note = Description of Artificial Sequence: Synthetic peptide; note = XENP020035 vhCDR2
EIRLYSNNYATHYAESVKG

SEQ ID NO: 24046 - protein, 11 aa, synthetic construct
  source 1..11: note = Description of Artificial Sequence: Synthetic peptide; note = XENP020035 vhCDR3
YYGNYGGYFDV

SEQ ID NO: 24047 - protein, 11 aa, synthetic construct
  source 1..11: note = Description of Artificial Sequence: Synthetic peptide; note = XENP020035 vlCDR1
RASQSVGNDVA

SEQ ID NO: 24048 - protein, 7 aa, synthetic construct
  source 1..7: note = Description of Artificial Sequence: Synthetic peptide; note = XENP020035 vlCDR2
YASHRYT

SEQ ID NO: 24049 - protein, 9 aa, synthetic construct
  source 1..9: note = Description of Artificial Sequence: Synthetic peptide; note = XENP020035 vlCDR3
QQDFSSPRT

SEQ ID NO: 24050 - protein, 214 aa, synthetic construct; identical to SEQ ID NO: 17350
  source 1..214: note = Description of Artificial Sequence: Synthetic polypeptide; note = XENP020035 9E7_H4L1-1G6_H1.279_L1.194 Light Chain

SEQ ID NO: 24051 - protein, 214 aa, synthetic construct; identical to SEQ ID NO: 17350
  source 1..214: note = Description of Artificial Sequence: Synthetic polypeptide; note = VL of XENP020035

SEQ ID NO: 24052 - protein, 11 aa, synthetic construct
  source 1..11: note = Description of Artificial Sequence: Synthetic peptide; note = XENP020035 vlCDR1
RASENIYSNLA

SEQ ID NO: 24053 - protein, 7 aa, synthetic construct
  source 1..7: note = Description of Artificial Sequence: Synthetic peptide; note = XENP020035 vlCDR2
AATTLAD

SEQ ID NO: 24054 - protein, 9 aa, synthetic construct
  source 1..9: note = Description of Artificial Sequence: Synthetic peptide; note = XENP020035 vlCDR3
QHFWGTPWT

SEQ ID NO: 24055 - protein, 449 aa, synthetic construct; identical to SEQ ID NO: 17435
  source 1..449: note = Description of Artificial Sequence: Synthetic polypeptide; note = XENP020036 4C8_H1L1-1G6_H1.279_L1.194 Fab-Fc Heavy Chain

SEQ ID NO: 24056 - protein, 120 aa, synthetic construct; identical to SEQ ID NO: 17436
  source 1..120: note = Description of Artificial Sequence: Synthetic polypeptide; note = VH of XENP020036

SEQ ID NO: 24057 - protein, 5 aa, synthetic construct
  source 1..5: note = Description of Artificial Sequence: Synthetic peptide; note = XENP020036 vhCDR1
DYNMH

SEQ ID NO: 24058 - protein, 17 aa, synthetic construct
  source 1..17: note = Description of Artificial Sequence: Synthetic peptide; note = XENP020036 vhCDR2
YIYPYTGGTGYNQKFQG

SEQ ID NO: 24059 - protein, 11 aa, synthetic construct
  source 1..11: note = Description of Artificial Sequence: Synthetic peptide; note = XENP020036 vhCDR3
SDDGYSYAMDY

SEQ ID NO: 24060 - protein, 480 aa, synthetic construct; identical to SEQ ID NO: 23401
  source 1..480: note = Description of Artificial Sequence: Synthetic polypeptide; note = XENP020036 4C8_H1L1-1G6_H1.279_L1.194 scFv-Fc Heavy Chain

SEQ ID NO: 24061 - protein, 122 aa, synthetic construct; identical to SEQ ID NO: 10908
  source 1..122: note = Description of Artificial Sequence: Synthetic polypeptide; note = VH of XENP020036

SEQ ID NO: 24062 - protein, 107 aa, synthetic construct; identical to SEQ ID NO: 10999
  source 1..107: note = Description of Artificial Sequence: Synthetic polypeptide; note = VL of XENP020036

SEQ ID NO: 24063 - protein, 231 aa, synthetic construct; identical to SEQ ID NO: 21532
  source 1..231: note = Description of Artificial Sequence: Synthetic polypeptide; note = Fc chain of XENP020036

SEQ ID NO: 24064 - protein, 5 aa, synthetic construct
  source 1..5: note = Description of Artificial Sequence: Synthetic peptide; note = XENP020036 vhCDR1
NYWMN

SEQ ID NO: 24065 - protein, 19 aa, synthetic construct
  source 1..19: note = Description of Artificial Sequence: Synthetic peptide; note = XENP020036 vhCDR2
EIRLYSNNYATHYAESVKG

SEQ ID NO: 24066 - protein, 11 aa, synthetic construct
  source 1..11: note = Description of Artificial Sequence: Synthetic peptide; note = XENP020036 vhCDR3
YYGNYGGYFDV

SEQ ID NO: 24067 - protein, 11 aa, synthetic construct
  source 1..11: note = Description of Artificial Sequence: Synthetic peptide; note = XENP020036 vlCDR1
RASQSVGNDVA

SEQ ID NO: 24068 - protein, 7 aa, synthetic construct
  source 1..7: note = Description of Artificial Sequence: Synthetic peptide; note = XENP020036 vlCDR2
YASHRYT

SEQ ID NO: 24069 - protein, 9 aa, synthetic construct
  source 1..9: note = Description of Artificial Sequence: Synthetic peptide; note = XENP020036 vlCDR3
QQDFSSPRT

SEQ ID NO: 24070 - protein, 213 aa, synthetic construct; identical to SEQ ID NO: 17440
  source 1..213: note = Description of Artificial Sequence: Synthetic polypeptide; note = XENP020036 4C8_H1L1-1G6_H1.279_L1.194 Light Chain

SEQ ID NO: 24071 - protein, 213 aa, synthetic construct; identical to SEQ ID NO: 17440
  source 1..213: note = Description of Artificial Sequence: Synthetic polypeptide; note = VL of XENP020036

SEQ ID NO: 24072 - protein, 11 aa, synthetic construct
  source 1..11: note = Description of Artificial Sequence: Synthetic peptide; note = XENP020036 vlCDR1
QASQDISNYLN

SEQ ID NO: 24073 - protein, 7 aa, synthetic construct
  source 1..7: note = Description of Artificial Sequence: Synthetic peptide; note = XENP020036 vlCDR2
YTSRLHS

SEQ ID NO: 24074 - protein, 8 aa, synthetic construct
  source 1..8: note = Description of Artificial Sequence: Synthetic peptide; note = XENP020036 vlCDR3
QQGNTLWT

SEQ ID NO: 24075 - protein, 445 aa, synthetic construct; identical to SEQ ID NO: 17515
  source 1..445: note = Description of Artificial Sequence: Synthetic polypeptide; note = XENP020037 7A6_H3L1-1G6_H1.279_L1.194 Fab-Fc Heavy Chain

SEQ ID NO: 24076 - protein, 116 aa, synthetic construct; identical to SEQ ID NO: 17516
  source 1..116: note = Description of Artificial Sequence: Synthetic polypeptide; note = VH of XENP020037

SEQ ID NO: 24077 - protein, 6 aa, synthetic construct
  source 1..6: note = Description of Artificial Sequence: Synthetic peptide; note = XENP020037 vhCDR1
SGYFWN

SEQ ID NO: 24078 - protein, 15 aa, synthetic construct
  source 1..15: note = Description of Artificial Sequence: Synthetic peptide; note = XENP020037 vhCDR2
YISYDSNYYNPSVKS

SEQ ID NO: 24079 - protein, 8 aa, synthetic construct
  source 1..8: note = Description of Artificial Sequence: Synthetic peptide; note = XENP020037 vhCDR3
GGITTFDY

SEQ ID NO: 24080 - protein, 480 aa, synthetic construct; identical to SEQ ID NO: 23401
  source 1..480: note = Description of Artificial Sequence: Synthetic polypeptide; note = XENP020037 7A6_H3L1-1G6_H1.279_L1.194 scFv-Fc Heavy Chain

SEQ ID NO: 24081 - protein, 122 aa, synthetic construct; identical to SEQ ID NO: 10908
  source 1..122: note = Description of Artificial Sequence: Synthetic polypeptide; note = VH of XENP020037

SEQ ID NO: 24082 - protein, 107 aa, synthetic construct; identical to SEQ ID NO: 10999
  source 1..107: note = Description of Artificial Sequence: Synthetic polypeptide; note = VL of XENP020037

SEQ ID NO: 24083 - protein, 231 aa, synthetic construct; identical to SEQ ID NO: 21532
  source 1..231: note = Description of Artificial Sequence: Synthetic polypeptide; note = Fc chain of XENP020037

SEQ ID NO: 24084 - protein, 5 aa, synthetic construct
  source 1..5: note = Description of Artificial Sequence: Synthetic peptide; note = XENP020037 vhCDR1
NYWMN

SEQ ID NO: 24085 - protein, 19 aa, synthetic construct
  source 1..19: note = Description of Artificial Sequence: Synthetic peptide; note = XENP020037 vhCDR2
EIRLYSNNYATHYAESVKG

SEQ ID NO: 24086 - protein, 11 aa, synthetic construct
  source 1..11: note = Description of Artificial Sequence: Synthetic peptide; note = XENP020037 vhCDR3
YYGNYGGYFDV

SEQ ID NO: 24087 - protein, 11 aa, synthetic construct
  source 1..11: note = Description of Artificial Sequence: Synthetic peptide; note = XENP020037 vlCDR1
RASQSVGNDVA

SEQ ID NO: 24088 - protein, 7 aa, synthetic construct
  source 1..7: note = Description of Artificial Sequence: Synthetic peptide; note = XENP020037 vlCDR2
YASHRYT

SEQ ID NO: 24089 - protein, 9 aa, synthetic construct
  source 1..9: note = Description of Artificial Sequence: Synthetic peptide; note = XENP020037 vlCDR3
QQDFSSPRT

SEQ ID NO: 24090 - protein, 218 aa, synthetic construct; identical to SEQ ID NO: 17460
  source 1..218: note = Description of Artificial Sequence: Synthetic polypeptide; note = XENP020037 7A6_H3L1-1G6_H1.279_L1.194 Light Chain

SEQ ID NO: 24091 - protein, 218 aa, synthetic construct; identical to SEQ ID NO: 17460
  source 1..218: note = Description of Artificial Sequence: Synthetic polypeptide; note = VL of XENP020037

SEQ ID NO: 24092 - protein, 15 aa, synthetic construct
  source 1..15: note = Description of Artificial Sequence: Synthetic peptide; note = XENP020037 vlCDR1
RASQSVDYDGDSYMN

SEQ ID NO: 24093 - protein, 7 aa, synthetic construct
  source 1..7: note = Description of Artificial Sequence: Synthetic peptide; note = XENP020037 vlCDR2
AASNLES

SEQ ID NO: 24094 - protein, 9 aa, synthetic construct
  source 1..9: note = Description of Artificial Sequence: Synthetic peptide; note = XENP020037 vlCDR3
QQSNEDPRT

SEQ ID NO: 24095 - protein, 450 aa, synthetic construct; identical to SEQ ID NO: 17625
  source 1..450: note = Description of Artificial Sequence: Synthetic polypeptide; note = XENP020038 7G8_H2L2-1G6_H1.279_L1.194 Fab-Fc Heavy Chain

SEQ ID NO: 24096 - protein, 121 aa, synthetic construct; identical to SEQ ID NO: 17626
  source 1..121: note = Description of Artificial Sequence: Synthetic polypeptide; note = VH of XENP020038

SEQ ID NO: 24097 - protein, 5 aa, synthetic construct
  source 1..5: note = Description of Artificial Sequence: Synthetic peptide; note = XENP020038 vhCDR1
DAWMD

SEQ ID NO: 24098 - protein, 19 aa, synthetic construct
  source 1..19: note = Description of Artificial Sequence: Synthetic peptide; note = XENP020038 vhCDR2
EIRTKANNHATYYAESVKG

SEQ ID NO: 24099 - protein, 10 aa, synthetic construct
  source 1..10: note = Description of Artificial Sequence: Synthetic peptide; note = XENP020038 vhCDR3
LANWDWYFDV

SEQ ID NO: 24100 - protein, 480 aa, synthetic construct; identical to SEQ ID NO: 23401
  source 1..480: note = Description of Artificial Sequence: Synthetic polypeptide; note = XENP020038 7G8_H2L2-1G6_H1.279_L1.194 scFv-Fc Heavy Chain

SEQ ID NO: 24101 - protein, 122 aa, synthetic construct; identical to SEQ ID NO: 10908
  source 1..122: note = Description of Artificial Sequence: Synthetic polypeptide; note = VH of XENP020038

SEQ ID NO: 24102 - protein, 107 aa, synthetic construct; identical to SEQ ID NO: 10999
  source 1..107: note = Description of Artificial Sequence: Synthetic polypeptide; note = VL of XENP020038

SEQ ID NO: 24103 - protein, 231 aa, synthetic construct; identical to SEQ ID NO: 21532
  source 1..231: note = Description of Artificial Sequence: Synthetic polypeptide; note = Fc chain of XENP020038

SEQ ID NO: 24104 - protein, 5 aa, synthetic construct
  source 1..5: note = Description of Artificial Sequence: Synthetic peptide; note = XENP020038 vhCDR1
NYWMN

SEQ ID NO: 24105 - protein, 19 aa, synthetic construct
  source 1..19: note = Description of Artificial Sequence: Synthetic peptide; note = XENP020038 vhCDR2
EIRLYSNNYATHYAESVKG

SEQ ID NO: 24106 - protein, 11 aa, synthetic construct
  source 1..11: note = Description of Artificial Sequence: Synthetic peptide; note = XENP020038 vhCDR3
YYGNYGGYFDV

SEQ ID NO: 24107 - protein, 11 aa, synthetic construct
  source 1..11: note = Description of Artificial Sequence: Synthetic peptide; note = XENP020038 vlCDR1
RASQSVGNDVA

SEQ ID NO: 24108 - protein, 7 aa, synthetic construct
  source 1..7: note = Description of Artificial Sequence: Synthetic peptide; note = XENP020038 vlCDR2
YASHRYT

SEQ ID NO: 24109 - protein, 9 aa, synthetic construct
  source 1..9: note = Description of Artificial Sequence: Synthetic peptide; note = XENP020038 vlCDR3
QQDFSSPRT

SEQ ID NO: 24110 - protein, 218 aa, synthetic construct; identical to SEQ ID NO: 17610
  source 1..218: note = Description of Artificial Sequence: Synthetic polypeptide; note = XENP020038 7G8_H2L2-1G6_H1.279_L1.194 Light Chain

SEQ ID NO: 24111 - protein, 218 aa, synthetic construct; identical to SEQ ID NO: 17610
  source 1..218: note = Description of Artificial Sequence: Synthetic polypeptide; note = VL of XENP020038

SEQ ID NO: 24112 - protein, 15 aa, synthetic construct
  source 1..15: note = Description of Artificial Sequence: Synthetic peptide; note = XENP020038 vlCDR1
RASQSVDYDGDSYMN

SEQ ID NO: 24113 - protein, 7 aa, synthetic construct
  source 1..7: note = Description of Artificial Sequence: Synthetic peptide; note = XENP020038 vlCDR2
AASNLES

SEQ ID NO: 24114 - protein, 9 aa, synthetic construct
  source 1..9: note = Description of Artificial Sequence: Synthetic peptide; note = XENP020038 vlCDR3
QQSNEDPFT

SEQ ID NO: 24115 - protein, 447 aa, synthetic construct; identical to SEQ ID NO: 17235
  source 1..447: note = Description of Artificial Sequence: Synthetic polypeptide; note = XENP020064 2A11_H1L2-1G6_H1.282_L1.194 Fab-Fc Heavy Chain

SEQ ID NO: 24116 - protein, 118 aa, synthetic construct; identical to SEQ ID NO: 17236
  source 1..118: note = Description of Artificial Sequence: Synthetic polypeptide; note = VH of XENP020064

SEQ ID NO: 24117 - protein, 5 aa, synthetic construct
  source 1..5: note = Description of Artificial Sequence: Synthetic peptide; note = XENP020064 vhCDR1
DYYMH

SEQ ID NO: 24118 - protein, 17 aa, synthetic construct
  source 1..17: note = Description of Artificial Sequence: Synthetic peptide; note = XENP020064 vhCDR2
WIDPENGDTEYAPKFQG

SEQ ID NO: 24119 - protein, 9 aa, synthetic construct
  source 1..9: note = Description of Artificial Sequence: Synthetic peptide; note = XENP020064 vhCDR3
RGVRQALDY

SEQ ID NO: 24120 - protein, 480 aa, synthetic construct; identical to SEQ ID NO: 23920
  source 1..480: note = Description of Artificial Sequence: Synthetic polypeptide; note = XENP020064 2A11_H1L2-1G6_H1.282_L1.194 scFv-Fc Heavy Chain

SEQ ID NO: 24121 - protein, 122 aa, synthetic construct; identical to SEQ ID NO: 10935
  source 1..122: note = Description of Artificial Sequence: Synthetic polypeptide; note = VH of XENP020064

SEQ ID NO: 24122 - protein, 107 aa, synthetic construct; identical to SEQ ID NO: 10999
  source 1..107: note = Description of Artificial Sequence: Synthetic polypeptide; note = VL of XENP020064

SEQ ID NO: 24123 - protein, 231 aa, synthetic construct; identical to SEQ ID NO: 21532
  source 1..231: note = Description of Artificial Sequence: Synthetic polypeptide; note = Fc chain of XENP020064

SEQ ID NO: 24124 - protein, 5 aa, synthetic construct
  source 1..5: note = Description of Artificial Sequence: Synthetic peptide; note = XENP020064 vhCDR1
NYWMN

SEQ ID NO: 24125 - protein, 19 aa, synthetic construct
  source 1..19: note = Description of Artificial Sequence: Synthetic peptide; note = XENP020064 vhCDR2
EIRLYSNNYATHYAESVKG

SEQ ID NO: 24126 - protein, 11 aa, synthetic construct
  source 1..11: note = Description of Artificial Sequence: Synthetic peptide; note = XENP020064 vhCDR3
YYGNYGGYFDV

SEQ ID NO: 24127 - protein, 11 aa, synthetic construct
  source 1..11: note = Description of Artificial Sequence: Synthetic peptide; note = XENP020064 vlCDR1
RASQSVGNDVA

SEQ ID NO: 24128 - protein, 7 aa, synthetic construct
  source 1..7: note = Description of Artificial Sequence: Synthetic peptide; note = XENP020064 vlCDR2
YASHRYT

SEQ ID NO: 24129 - protein, 9 aa, synthetic construct
  source 1..9: note = Description of Artificial Sequence: Synthetic peptide; note = XENP020064 vlCDR3
QQDFSSPRT

SEQ ID NO: 24130 - protein, 214 aa, synthetic construct; identical to SEQ ID NO: 17250
  source 1..214: note = Description of Artificial Sequence: Synthetic polypeptide; note = XENP020064 2A11_H1L2-1G6_H1.282_L1.194 Light Chain

SEQ ID NO: 24131 - protein, 214 aa, synthetic construct; identical to SEQ ID NO: 17250
  source 1..214: note = Description of Artificial Sequence: Synthetic polypeptide; note = VL of XENP020064

SEQ ID NO: 24132 - protein, 11 aa, synthetic construct
  source 1..11: note = Description of Artificial Sequence: Synthetic peptide; note = XENP020064 vlCDR1
QASQDIGNYLN

SEQ ID NO: 24133 - protein, 7 aa, synthetic construct
  source 1..7: note = Description of Artificial Sequence: Synthetic peptide; note = XENP020064 vlCDR2
YTSRLHS

SEQ ID NO: 24134 - protein, 9 aa, synthetic construct
  source 1..9: note = Description of Artificial Sequence: Synthetic peptide; note = XENP020064 vlCDR3
QQGNTLPYT

SEQ ID NO: 24135 - protein, 444 aa, synthetic construct; identical to SEQ ID NO: 17405
  source 1..444: note = Description of Artificial Sequence: Synthetic polypeptide; note = XENP020065 9E7_H4L1-1G6_H1.282_L1.194 Fab-Fc Heavy Chain

SEQ ID NO: 24136 - protein, 115 aa, synthetic construct; identical to SEQ ID NO: 17406
  source 1..115: note = Description of Artificial Sequence: Synthetic polypeptide; note = VH of XENP020065

SEQ ID NO: 24137 - protein, 5 aa, synthetic construct
  source 1..5: note = Description of Artificial Sequence: Synthetic peptide; note = XENP020065 vhCDR1
RYGIH

SEQ ID NO: 24138 - protein, 15 aa, synthetic construct
  source 1..15: note = Description of Artificial Sequence: Synthetic peptide; note = XENP020065 vhCDR2
VIWSGVTDYNPSFQG

SEQ ID NO: 24139 - protein, 8 aa, synthetic construct
  source 1..8: note = Description of Artificial Sequence: Synthetic peptide; note = XENP020065 vhCDR3
PYYYAMDY

SEQ ID NO: 24140 - protein, 480 aa, synthetic construct; identical to SEQ ID NO: 23920
  source 1..480: note = Description of Artificial Sequence: Synthetic polypeptide; note = XENP020065 9E7_H4L1-1G6_H1.282_L1.194 scFv-Fc Heavy Chain

SEQ ID NO: 24141 - protein, 122 aa, synthetic construct; identical to SEQ ID NO: 10935
  source 1..122: note = Description of Artificial Sequence: Synthetic polypeptide; note = VH of XENP020065

SEQ ID NO: 24142 - protein, 107 aa, synthetic construct; identical to SEQ ID NO: 10999
  source 1..107: note = Description of Artificial Sequence: Synthetic polypeptide; note = VL of XENP020065

SEQ ID NO: 24143 - protein, 231 aa, synthetic construct; identical to SEQ ID NO: 21532
  source 1..231: note = Description of Artificial Sequence: Synthetic polypeptide; note = Fc chain of XENP020065

SEQ ID NO: 24144 - protein, 5 aa, synthetic construct
  source 1..5: note = Description of Artificial Sequence: Synthetic peptide; note = XENP020065 vhCDR1
NYWMN

SEQ ID NO: 24145 - protein, 19 aa, synthetic construct
  source 1..19: note = Description of Artificial Sequence: Synthetic peptide; note = XENP020065 vhCDR2
EIRLYSNNYATHYAESVKG

SEQ ID NO: 24146 - protein, 11 aa, synthetic construct
  source 1..11: note = Description of Artificial Sequence: Synthetic peptide; note = XENP020065 vhCDR3
YYGNYGGYFDV

SEQ ID NO: 24147 - protein, 11 aa, synthetic construct
  source 1..11: note = Description of Artificial Sequence: Synthetic peptide; note = XENP020065 vlCDR1
RASQSVGNDVA

SEQ ID NO: 24148 - protein, 7 aa, synthetic construct
  source 1..7: note = Description of Artificial Sequence: Synthetic peptide; note = XENP020065 vlCDR2
YASHRYT

SEQ ID NO: 24149 - protein, 9 aa, synthetic construct
  source 1..9: note = Description of Artificial Sequence: Synthetic peptide; note = XENP020065 vlCDR3
QQDFSSPRT

SEQ ID NO: 24150 - protein, 214 aa, synthetic construct; identical to SEQ ID NO: 17350
  source 1..214: note = Description of Artificial Sequence: Synthetic polypeptide; note = XENP020065 9E7_H4L1-1G6_H1.282_L1.194 Light Chain

SEQ ID NO: 24151 - protein, 214 aa, synthetic construct; identical to SEQ ID NO: 17350
  source 1..214: note = Description of Artificial Sequence: Synthetic polypeptide; note = VL of XENP020065

SEQ ID NO: 24152 - protein, 11 aa, synthetic construct
  source 1..11: note = Description of Artificial Sequence: Synthetic peptide; note = XENP020065 vlCDR1
RASENIYSNLA

SEQ ID NO: 24153 - protein, 7 aa, synthetic construct
  source 1..7: note = Description of Artificial Sequence: Synthetic peptide; note = XENP020065 vlCDR2
AATTLAD

SEQ ID NO: 24154 - protein, 9 aa, synthetic construct
  source 1..9: note = Description of Artificial Sequence: Synthetic peptide; note = XENP020065 vlCDR3
QHFWGTPWT

SEQ ID NO: 24155 - protein, 447 aa, synthetic construct; identical to SEQ ID NO: 17235
  source 1..447: note = Description of Artificial Sequence: Synthetic polypeptide; note = XENP020203 2A11_H1L0-1G6_H1.279_L1.194 Fab-Fc Heavy Chain

SEQ ID NO: 24156 - protein, 118 aa, synthetic construct; identical to SEQ ID NO: 17236
  source 1..118: note = Description of Artificial Sequence: Synthetic polypeptide; note = VH of XENP020203

SEQ ID NO: 24157 - protein, 5 aa, synthetic construct
  source 1..5: note = Description of Artificial Sequence: Synthetic peptide; note = XENP020203 vhCDR1
DYYMH

SEQ ID NO: 24158 - protein, 17 aa, synthetic construct
  source 1..17: note = Description of Artificial Sequence: Synthetic peptide; note = XENP020203 vhCDR2
WIDPENGDTEYAPKFQG

SEQ ID NO: 24159 - protein, 9 aa, synthetic construct
  source 1..9: note = Description of Artificial Sequence: Synthetic peptide; note = XENP020203 vhCDR3
RGVRQALDY

SEQ ID NO: 24160 - protein, 480 aa, synthetic construct; identical to SEQ ID NO: 23401
  source 1..480: note = Description of Artificial Sequence: Synthetic polypeptide; note = XENP020203 2A11_H1L0-1G6_H1.279_L1.194 scFv-Fc Heavy Chain

SEQ ID NO: 24161 - protein, 122 aa, synthetic construct; identical to SEQ ID NO: 10908
  source 1..122: note = Description of Artificial Sequence: Synthetic polypeptide; note = VH of XENP020203

SEQ ID NO: 24162 - protein, 107 aa, synthetic construct; identical to SEQ ID NO: 10999
  source 1..107: note = Description of Artificial Sequence: Synthetic polypeptide; note = VL of XENP020203

SEQ ID NO: 24163 - protein, 231 aa, synthetic construct; identical to SEQ ID NO: 21532
  source 1..231: note = Description of Artificial Sequence: Synthetic polypeptide; note = Fc chain of XENP020203

SEQ ID NO: 24164 - protein, 5 aa, synthetic construct
  source 1..5: note = Description of Artificial Sequence: Synthetic peptide; note = XENP020203 vhCDR1
NYWMN

SEQ ID NO: 24165 - protein, 19 aa, synthetic construct
  source 1..19: note = Description of Artificial Sequence: Synthetic peptide; note = XENP020203 vhCDR2
EIRLYSNNYATHYAESVKG

SEQ ID NO: 24166 - protein, 11 aa, synthetic construct
  source 1..11: note = Description of Artificial Sequence: Synthetic peptide; note = XENP020203 vhCDR3
YYGNYGGYFDV

SEQ ID NO: 24167 - protein, 11 aa, synthetic construct
  source 1..11: note = Description of Artificial Sequence: Synthetic peptide; note = XENP020203 vlCDR1
RASQSVGNDVA

SEQ ID NO: 24168 - protein, 7 aa, synthetic construct
  source 1..7: note = Description of Artificial Sequence: Synthetic peptide; note = XENP020203 vlCDR2
YASHRYT

SEQ ID NO: 24169 - protein, 9 aa, synthetic construct
  source 1..9: note = Description of Artificial Sequence: Synthetic peptide; note = XENP020203 vlCDR3
QQDFSSPRT

SEQ ID NO: 24170 - protein, 214 aa, synthetic construct; identical to SEQ ID NO: 17230
  source 1..214: note = Description of Artificial Sequence: Synthetic polypeptide; note = XENP020203 2A11_H1L0-1G6_H1.279_L1.194 Light Chain

SEQ ID NO: 24171 - protein, 214 aa, synthetic construct; identical to SEQ ID NO: 17230
  source 1..214: note = Description of Artificial Sequence: Synthetic polypeptide; note = VL of XENP020203

SEQ ID NO: 24172 - protein, 11 aa, synthetic construct
  source 1..11: note = Description of Artificial Sequence: Synthetic peptide; note = XENP020203 vlCDR1
RASQDIGNYLN

SEQ ID NO: 24173 - protein, 7 aa, synthetic construct
  source 1..7: note = Description of Artificial Sequence: Synthetic peptide; note = XENP020203 vlCDR2
YTSRLHS

SEQ ID NO: 24174 - protein, 9 aa, synthetic construct
  source 1..9: note = Description of Artificial Sequence: Synthetic peptide; note = XENP020203 vlCDR3
QQGNTLPYT

SEQ ID NO: 24175 - protein, 447 aa, synthetic construct; identical to SEQ ID NO: 17235
  source 1..447: note = Description of Artificial Sequence: Synthetic polypeptide; note = XENP020204 2A11_H1L1-1G6_H1.279_L1.194 Fab-Fc Heavy Chain

SEQ ID NO: 24176 - protein, 118 aa, synthetic construct; identical to SEQ ID NO: 17236
  source 1..118: note = Description of Artificial Sequence: Synthetic polypeptide; note = VH of XENP020204

SEQ ID NO: 24177 - protein, 5 aa, synthetic construct
  source 1..5: note = Description of Artificial Sequence: Synthetic peptide; note = XENP020204 vhCDR1
DYYMH

SEQ ID NO: 24178 - protein, 17 aa, synthetic construct
  source 1..17: note = Description of Artificial Sequence: Synthetic peptide; note = XENP020204 vhCDR2
WIDPENGDTEYAPKFQG

SEQ ID NO: 24179 - protein, 9 aa, synthetic construct
  source 1..9: note = Description of Artificial Sequence: Synthetic peptide; note = XENP020204 vhCDR3
RGVRQALDY

SEQ ID NO: 24180 - protein, 480 aa, synthetic construct; identical to SEQ ID NO: 23401
  source 1..480: note = Description of Artificial Sequence: Synthetic polypeptide; note = XENP020204 2A11_H1L1-1G6_H1.279_L1.194 scFv-Fc Heavy Chain

SEQ ID NO: 24181 - protein, 122 aa, synthetic construct; identical to SEQ ID NO: 10908
  source 1..122: note = Description of Artificial Sequence: Synthetic polypeptide; note = VH of XENP020204

SEQ ID NO: 24182 - protein, 107 aa, synthetic construct; identical to SEQ ID NO: 10999
  source 1..107: note = Description of Artificial Sequence: Synthetic polypeptide; note = VL of XENP020204

SEQ ID NO: 24183 - protein, 231 aa, synthetic construct; identical to SEQ ID NO: 21532
  source 1..231: note = Description of Artificial Sequence: Synthetic polypeptide; note = Fc chain of XENP020204

SEQ ID NO: 24184 - protein, 5 aa, synthetic construct
  source 1..5: note = Description of Artificial Sequence: Synthetic peptide; note = XENP020204 vhCDR1
NYWMN

SEQ ID NO: 24185 - protein, 19 aa, synthetic construct
  source 1..19: note = Description of Artificial Sequence: Synthetic peptide; note = XENP020204 vhCDR2
EIRLYSNNYATHYAESVKG

SEQ ID NO: 24186 - protein, 11 aa, synthetic construct
  source 1..11: note = Description of Artificial Sequence: Synthetic peptide; note = XENP020204 vhCDR3
YYGNYGGYFDV

SEQ ID NO: 24187 - protein, 11 aa, synthetic construct
  source 1..11: note = Description of Artificial Sequence: Synthetic peptide; note = XENP020204 vlCDR1
RASQSVGNDVA

SEQ ID NO: 24188 - protein, 7 aa, synthetic construct
  source 1..7: note = Description of Artificial Sequence: Synthetic peptide; note = XENP020204 vlCDR2
YASHRYT

SEQ ID NO: 24189 - protein, 9 aa, synthetic construct
  source 1..9: note = Description of Artificial Sequence: Synthetic peptide; note = XENP020204 vlCDR3
QQDFSSPRT

SEQ ID NO: 24190 - protein, 214 aa, synthetic construct; identical to SEQ ID NO: 17240
  source 1..214: note = Description of Artificial Sequence: Synthetic polypeptide; note = XENP020204 2A11_H1L1-1G6_H1.279_L1.194 Light Chain

SEQ ID NO: 24191 - protein, 214 aa, synthetic construct; identical to SEQ ID NO: 17240
  source 1..214: note = Description of Artificial Sequence: Synthetic polypeptide; note = VL of XENP020204

SEQ ID NO: 24192 - protein, 11 aa, synthetic construct
  source 1..11: note = Description of Artificial Sequence: Synthetic peptide; note = XENP020204 vlCDR1
RASQDIGNYLN

SEQ ID NO: 24193 - protein, 7 aa, synthetic construct
  source 1..7: note = Description of Artificial Sequence: Synthetic peptide; note = XENP020204 vlCDR2
YTSRLHS

SEQ ID NO: 24194 - protein, 9 aa, synthetic construct
  source 1..9: note = Description of Artificial Sequence: Synthetic peptide; note = XENP020204 vlCDR3
QQGNTLPYT

SEQ ID NO: 24195 - protein, 447 aa, synthetic construct; identical to SEQ ID NO: 17235
  source 1..447: note = Description of Artificial Sequence: Synthetic polypeptide; note = XENP020205 2A11_H1_25F7_L0-1G6_H1.279_L1.194 Fab-Fc Heavy Chain

SEQ ID NO: 24196 - protein, 118 aa, synthetic construct; identical to SEQ ID NO: 17236
  source 1..118: note = Description of Artificial Sequence: Synthetic polypeptide; note = VH of XENP020205

SEQ ID NO: 24197 - protein, 5 aa, synthetic construct
  source 1..5: note = Description of Artificial Sequence: Synthetic peptide; note = XENP020205 vhCDR1
DYYMH

SEQ ID NO: 24198 - protein, 17 aa, synthetic construct
  source 1..17: note = Description of Artificial Sequence: Synthetic peptide; note = XENP020205 vhCDR2
WIDPENGDTEYAPKFQG

SEQ ID NO: 24199 - protein, 9 aa, synthetic construct
  source 1..9: note = Description of Artificial Sequence: Synthetic peptide; note = XENP020205 vhCDR3
RGVRQALDY

SEQ ID NO: 24200 - protein, 480 aa, synthetic construct; identical to SEQ ID NO: 23401
  source 1..480: note = Description of Artificial Sequence: Synthetic polypeptide; note = XENP020205 2A11_H1_25F7_L0-1G6_H1.279_L1.194 scFv-Fc Heavy Chain

SEQ ID NO: 24201 - protein, 122 aa, synthetic construct; identical to SEQ ID NO: 10908
  source 1..122: note = Description of Artificial Sequence: Synthetic polypeptide; note = VH of XENP020205

SEQ ID NO: 24202 - protein, 107 aa, synthetic construct; identical to SEQ ID NO: 10999
  source 1..107: note = Description of Artificial Sequence: Synthetic polypeptide; note = VL of XENP020205

SEQ ID NO: 24203 - protein, 231 aa, synthetic construct; identical to SEQ ID NO: 21532
  source 1..231: note = Description of Artificial Sequence: Synthetic polypeptide; note = Fc chain of XENP020205

SEQ ID NO: 24204 - protein, 5 aa, synthetic construct
  source 1..5: note = Description of Artificial Sequence: Synthetic peptide; note = XENP020205 vhCDR1
NYWMN

SEQ ID NO: 24205 - protein, 19 aa, synthetic construct
  source 1..19: note = Description of Artificial Sequence: Synthetic peptide; note = XENP020205 vhCDR2
EIRLYSNNYATHYAESVKG

SEQ ID NO: 24206 - protein, 11 aa, synthetic construct
  source 1..11: note = Description of Artificial Sequence: Synthetic peptide; note = XENP020205 vhCDR3
YYGNYGGYFDV

SEQ ID NO: 24207 - protein, 11 aa, synthetic construct
  source 1..11: note = Description of Artificial Sequence: Synthetic peptide; note = XENP020205 vlCDR1
RASQSVGNDVA

SEQ ID NO: 24208 - protein, 7 aa, synthetic construct
  source 1..7: note = Description of Artificial Sequence: Synthetic peptide; note = XENP020205 vlCDR2
YASHRYT

SEQ ID NO: 24209 - protein, 9 aa, synthetic construct
  source 1..9: note = Description of Artificial Sequence: Synthetic peptide; note = XENP020205 vlCDR3
QQDFSSPRT

SEQ ID NO: 24210 - protein, 214 aa, synthetic construct; identical to SEQ ID NO: 17140
  source 1..214: note = Description of Artificial Sequence: Synthetic polypeptide; note = XENP020205 2A11_H1_25F7_L0-1G6_H1.279_L1.194 Light Chain

SEQ ID NO: 24211 - protein, 214 aa, synthetic construct; identical to SEQ ID NO: 17140
  source 1..214: note = Description of Artificial Sequence: Synthetic polypeptide; note = VL of XENP020205

SEQ ID NO: 24212 - protein, 11 aa, synthetic construct
  source 1..11: note = Description of Artificial Sequence: Synthetic peptide; note = XENP020205 vlCDR1
RASQSISSYLA

SEQ ID NO: 24213 - protein, 7 aa, synthetic construct
  source 1..7: note = Description of Artificial Sequence: Synthetic peptide; note = XENP020205 vlCDR2
DASNRAT

SEQ ID NO: 24214 - protein, 9 aa, synthetic construct
  source 1..9: note = Description of Artificial Sequence: Synthetic peptide; note = XENP020205 vlCDR3
QQRSNWPLT

SEQ ID NO: 24215 - protein, 447 aa, synthetic construct; identical to SEQ ID NO: 17235
  source 1..447: note = Description of Artificial Sequence: Synthetic polypeptide; note = XENP020206 2A11_H1L2-1G6_L1.194_H1.279 Fab-Fc Heavy Chain

SEQ ID NO: 24216 - protein, 118 aa, synthetic construct; identical to SEQ ID NO: 17236
  source 1..118: note = Description of Artificial Sequence: Synthetic polypeptide; note = VH of XENP020206

SEQ ID NO: 24217 - protein, 5 aa, synthetic construct
  source 1..5: note = Description of Artificial Sequence: Synthetic peptide; note = XENP020206 vhCDR1
DYYMH

SEQ ID NO: 24218 - protein, 17 aa, synthetic construct
  source 1..17: note = Description of Artificial Sequence: Synthetic peptide; note = XENP020206 vhCDR2
WIDPENGDTEYAPKFQG

SEQ ID NO: 24219 - protein, 9 aa, synthetic construct
  source 1..9: note = Description of Artificial Sequence: Synthetic peptide; note = XENP020206 vhCDR3
RGVRQALDY

SEQ ID NO: 24220 - protein, 480 aa, synthetic construct; identical to SEQ ID NO: 23221
  source 1..480: note = Description of Artificial Sequence: Synthetic polypeptide; note = XENP020206 2A11_H1L2-1G6_L1.194_H1.279 scFv-Fc Heavy Chain

SEQ ID NO: 24221 - protein, 107 aa, synthetic construct; identical to SEQ ID NO: 10999
  source 1..107: note = Description of Artificial Sequence: Synthetic polypeptide; note = VH of XENP020206

SEQ ID NO: 24222 - protein, 122 aa, synthetic construct; identical to SEQ ID NO: 10908
  source 1..122: note = Description of Artificial Sequence: Synthetic polypeptide; note = VL of XENP020206

SEQ ID NO: 24223 - protein, 231 aa, synthetic construct; identical to SEQ ID NO: 21532
  source 1..231: note = Description of Artificial Sequence: Synthetic polypeptide; note = Fc chain of XENP020206

SEQ ID NO: 24224 - protein, 11 aa, synthetic construct
  source 1..11: note = Description of Artificial Sequence: Synthetic peptide; note = XENP020206 vhCDR1
RASQSVGNDVA

SEQ ID NO: 24225 - protein, 7 aa, synthetic construct
  source 1..7: note = Description of Artificial Sequence: Synthetic peptide; note = XENP020206 vhCDR2
YASHRYT

SEQ ID NO: 24226 - protein, 9 aa, synthetic construct
  source 1..9: note = Description of Artificial Sequence: Synthetic peptide; note = XENP020206 vhCDR3
QQDFSSPRT

SEQ ID NO: 24227 - protein, 5 aa, synthetic construct
  source 1..5: note = Description of Artificial Sequence: Synthetic peptide; note = XENP020206 vlCDR1
NYWMN

SEQ ID NO: 24228 - protein, 19 aa, synthetic construct
  source 1..19: note = Description of Artificial Sequence: Synthetic peptide; note = XENP020206 vlCDR2
EIRLYSNNYATHYAESVKG

SEQ ID NO: 24229 - protein, 11 aa, synthetic construct
  source 1..11: note = Description of Artificial Sequence: Synthetic peptide; note = XENP020206 vlCDR3
YYGNYGGYFDV

SEQ ID NO: 24230 - protein, 214 aa, synthetic construct; identical to SEQ ID NO: 17250
  source 1..214: note = Description of Artificial Sequence: Synthetic polypeptide; note = XENP020206 2A11_H1L2-1G6_L1.194_H1.279 Light Chain

SEQ ID NO: 24231 - protein, 214 aa, synthetic construct; identical to SEQ ID NO: 17250
  source 1..214: note = Description of Artificial Sequence: Synthetic polypeptide; note = VL of XENP020206

SEQ ID NO: 24232 - protein, 11 aa, synthetic construct
  source 1..11: note = Description of Artificial Sequence: Synthetic peptide; note = XENP020206 vlCDR1
QASQDIGNYLN

SEQ ID NO: 24233 - protein, 7 aa, synthetic construct
  source 1..7: note = Description of Artificial Sequence: Synthetic peptide; note = XENP020206 vlCDR2
YTSRLHS

SEQ ID NO: 24234 - protein, 9 aa, synthetic construct
  source 1..9: note = Description of Artificial Sequence: Synthetic peptide; note = XENP020206 vlCDR3
QQGNTLPYT

SEQ ID NO: 24235 - protein, 447 aa, synthetic construct; identical to SEQ ID NO: 17235
  source 1..447: note = Description of Artificial Sequence: Synthetic polypeptide; note = XENP020207 2A11_H1L2-1G6_L1.210_H1.288 Fab-Fc Heavy Chain

SEQ ID NO: 24236 - protein, 118 aa, synthetic construct; identical to SEQ ID NO: 17236
  source 1..118: note = Description of Artificial Sequence: Synthetic polypeptide; note = VH of XENP020207

SEQ ID NO: 24237 - protein, 5 aa, synthetic construct
  source 1..5: note = Description of Artificial Sequence: Synthetic peptide; note = XENP020207 vhCDR1
DYYMH

SEQ ID NO: 24238 - protein, 17 aa, synthetic construct
  source 1..17: note = Description of Artificial Sequence: Synthetic peptide; note = XENP020207 vhCDR2
WIDPENGDTEYAPKFQG

SEQ ID NO: 24239 - protein, 9 aa, synthetic construct
  source 1..9: note = Description of Artificial Sequence: Synthetic peptide; note = XENP020207 vhCDR3
RGVRQALDY

SEQ ID NO: 24240 - protein, 480 aa, synthetic construct; identical to SEQ ID NO: 23381
  source 1..480: note = Description of Artificial Sequence: Synthetic polypeptide; note = XENP020207 2A11_H1L2-1G6_L1.210_H1.288 scFv-Fc Heavy Chain

SEQ ID NO: 24241 - protein, 107 aa, synthetic construct; identical to SEQ ID NO: 11359
  source 1..107: note = Description of Artificial Sequence: Synthetic polypeptide; note = VH of XENP020207

SEQ ID NO: 24242 - protein, 122 aa, synthetic construct; identical to SEQ ID NO: 11358
  source 1..122: note = Description of Artificial Sequence: Synthetic polypeptide; note = VL of XENP020207

SEQ ID NO: 24243 - protein, 231 aa, synthetic construct; identical to SEQ ID NO: 21532
  source 1..231: note = Description of Artificial Sequence: Synthetic polypeptide; note = Fc chain of XENP020207

SEQ ID NO: 24244 - protein, 11 aa, synthetic construct
  source 1..11: note = Description of Artificial Sequence: Synthetic peptide; note = XENP020207 vhCDR1
RASQSVGNDVA

SEQ ID NO: 24245 - protein, 7 aa, synthetic construct
  source 1..7: note = Description of Artificial Sequence: Synthetic peptide; note = XENP020207 vhCDR2
YASHRYT

SEQ ID NO: 24246 - protein, 9 aa, synthetic construct
  source 1..9: note = Description of Artificial Sequence: Synthetic peptide; note = XENP020207 vhCDR3
QQDFSSPRT

SEQ ID NO: 24247 - protein, 5 aa, synthetic construct
  source 1..5: note = Description of Artificial Sequence: Synthetic peptide; note = XENP020207 vlCDR1
NYWMN

SEQ ID NO: 24248 - protein, 19 aa, synthetic construct
  source 1..19: note = Description of Artificial Sequence: Synthetic peptide; note = XENP020207 vlCDR2
EIRLYSNNYATHYAESVKG

SEQ ID NO: 24249 - protein, 11 aa, synthetic construct
  source 1..11: note = Description of Artificial Sequence: Synthetic peptide; note = XENP020207 vlCDR3
YYGNYGGYFDV

SEQ ID NO: 24250 - protein, 214 aa, synthetic construct; identical to SEQ ID NO: 17250
  source 1..214: note = Description of Artificial Sequence: Synthetic polypeptide; note = XENP020207 2A11_H1L2-1G6_L1.210_H1.288 Light Chain

SEQ ID NO: 24251 - protein, 214 aa, synthetic construct; identical to SEQ ID NO: 17250
  source 1..214: note = Description of Artificial Sequence: Synthetic polypeptide; note = VL of XENP020207

SEQ ID NO: 24252 - protein, 11 aa, synthetic construct
  source 1..11: note = Description of Artificial Sequence: Synthetic peptide; note = XENP020207 vlCDR1
QASQDIGNYLN

SEQ ID NO: 24253 - protein, 7 aa, synthetic construct
  source 1..7: note = Description of Artificial Sequence: Synthetic peptide; note = XENP020207 vlCDR2
YTSRLHS

SEQ ID NO: 24254 - protein, 9 aa, synthetic construct
  source 1..9: note = Description of Artificial Sequence: Synthetic peptide; note = XENP020207 vlCDR3
QQGNTLPYT

SEQ ID NO: 24255 - protein, 447 aa, synthetic construct; identical to SEQ ID NO: 17235
  source 1..447: note = Description of Artificial Sequence: Synthetic polypeptide; note = XENP020208 2A11_H1L2-1G6_H1.288_L1.210 Fab-Fc Heavy Chain

SEQ ID NO: 24256 - protein, 118 aa, synthetic construct; identical to SEQ ID NO: 17236
  source 1..118: note = Description of Artificial Sequence: Synthetic polypeptide; note = VH of XENP020208

SEQ ID NO: 24257 - protein, 5 aa, synthetic construct
  source 1..5: note = Description of Artificial Sequence: Synthetic peptide; note = XENP020208 vhCDR1
DYYMH

SEQ ID NO: 24258 - protein, 17 aa, synthetic construct
  source 1..17: note = Description of Artificial Sequence: Synthetic peptide; note = XENP020208 vhCDR2
WIDPENGDTEYAPKFQG

SEQ ID NO: 24259 - protein, 9 aa, synthetic construct
  source 1..9: note = Description of Artificial Sequence: Synthetic peptide; note = XENP020208 vhCDR3
RGVRQALDY

SEQ ID NO: 24260 - protein, 480 aa, synthetic construct; identical to SEQ ID NO: 23860
  source 1..480: note = Description of Artificial Sequence: Synthetic polypeptide; note = XENP020208 2A11_H1L2-1G6_H1.288_L1.210 scFv-Fc Heavy Chain

SEQ ID NO: 24261 - protein, 122 aa, synthetic construct; identical to SEQ ID NO: 11358
  source 1..122: note = Description of Artificial Sequence: Synthetic polypeptide; note = VH of XENP020208

SEQ ID NO: 24262 - protein, 107 aa, synthetic construct; identical to SEQ ID NO: 11359
  source 1..107: note = Description of Artificial Sequence: Synthetic polypeptide; note = VL of XENP020208

SEQ ID NO: 24263 - protein, 231 aa, synthetic construct; identical to SEQ ID NO: 21532
  source 1..231: note = Description of Artificial Sequence: Synthetic polypeptide; note = Fc chain of XENP020208

SEQ ID NO: 24264 - protein, 5 aa, synthetic construct
  source 1..5: note = Description of Artificial Sequence: Synthetic peptide; note = XENP020208 vhCDR1
NYWMN

SEQ ID NO: 24265 - protein, 19 aa, synthetic construct
  source 1..19: note = Description of Artificial Sequence: Synthetic peptide; note = XENP020208 vhCDR2
EIRLYSNNYATHYAESVKG

SEQ ID NO: 24266 - protein, 11 aa, synthetic construct
  source 1..11: note = Description of Artificial Sequence: Synthetic peptide; note = XENP020208 vhCDR3
YYGNYGGYFDV

SEQ ID NO: 24267 - protein, 11 aa, synthetic construct
  source 1..11: note = Description of Artificial Sequence: Synthetic peptide; note = XENP020208 vlCDR1
RASQSVGNDVA

SEQ ID NO: 24268 - protein, 7 aa, synthetic construct
  source 1..7: note = Description of Artificial Sequence: Synthetic peptide; note = XENP020208 vlCDR2
YASHRYT

SEQ ID NO: 24269 - protein, 9 aa, synthetic construct
  source 1..9: note = Description of Artificial Sequence: Synthetic peptide; note = XENP020208 vlCDR3
QQDFSSPRT

SEQ ID NO: 24270 - protein, 214 aa, synthetic construct; identical to SEQ ID NO: 17250
  source 1..214: note = Description of Artificial Sequence: Synthetic polypeptide; note = XENP020208 2A11_H1L2-1G6_H1.288_L1.210 Light Chain

SEQ ID NO: 24271 - protein, 214 aa, synthetic construct; identical to SEQ ID NO: 17250
  source 1..214: note = Description of Artificial Sequence: Synthetic polypeptide; note = VL of XENP020208

SEQ ID NO: 24272 - protein, 11 aa, synthetic construct
  source 1..11: note = Description of Artificial Sequence: Synthetic peptide; note = XENP020208 vlCDR1
QASQDIGNYLN

SEQ ID NO: 24273 - protein, 7 aa, synthetic construct
  source 1..7: note = Description of Artificial Sequence: Synthetic peptide; note = XENP020208 vlCDR2
YTSRLHS

SEQ ID NO: 24274 - protein, 9 aa, synthetic construct
  source 1..9: note = Description of Artificial Sequence: Synthetic peptide; note = XENP020208 vlCDR3
QQGNTLPYT

SEQ ID NO: 24275 - protein, 447 aa, synthetic construct; identical to SEQ ID NO: 17235
  source 1..447: note = Description of Artificial Sequence: Synthetic polypeptide; note = XENP020034 2A11_H1L2_Fab-1G6_H1.279_L1.194 Fab-Fc Heavy Chain

SEQ ID NO: 24276 - protein, 118 aa, synthetic construct; identical to SEQ ID NO: 17236
  source 1..118: note = Description of Artificial Sequence: Synthetic polypeptide; note = VH of XENP020034

SEQ ID NO: 24277 - protein, 5 aa, synthetic construct
  source 1..5: note = Description of Artificial Sequence: Synthetic peptide; note = XENP020034 vhCDR1
DYYMH

SEQ ID NO: 24278 - protein, 17 aa, synthetic construct
  source 1..17: note = Description of Artificial Sequence: Synthetic peptide; note = XENP020034 vhCDR2
WIDPENGDTEYAPKFQG

SEQ ID NO: 24279 - protein, 9 aa, synthetic construct
  source 1..9: note = Description of Artificial Sequence: Synthetic peptide; note = XENP020034 vhCDR3
RGVRQALDY

SEQ ID NO: 24280 - protein, 480 aa, synthetic construct; identical to SEQ ID NO: 23401
  source 1..480: note = Description of Artificial Sequence: Synthetic polypeptide; note = XENP020034 2A11_H1L2_Fab-1G6_H1.279_L1.194 scFv-Fc Heavy Chain

SEQ ID NO: 24281 - protein, 122 aa, synthetic construct; identical to SEQ ID NO: 10908
  source 1..122: note = Description of Artificial Sequence: Synthetic polypeptide; note = VH of XENP020034

SEQ ID NO: 24282 - protein, 107 aa, synthetic construct; identical to SEQ ID NO: 10999
  source 1..107: note = Description of Artificial Sequence: Synthetic polypeptide; note = VL of XENP020034

SEQ ID NO: 24283 - protein, 231 aa, synthetic construct; identical to SEQ ID NO: 21532
  source 1..231: note = Description of Artificial Sequence: Synthetic polypeptide; note = Fc chain of XENP020034

SEQ ID NO: 24284 - protein, 5 aa, synthetic construct
  source 1..5: note = Description of Artificial Sequence: Synthetic peptide; note = XENP020034 vhCDR1
NYWMN

SEQ ID NO: 24285 - protein, 19 aa, synthetic construct
  source 1..19: note = Description of Artificial Sequence: Synthetic peptide; note = XENP020034 vhCDR2
EIRLYSNNYATHYAESVKG

SEQ ID NO: 24286 - protein, 11 aa, synthetic construct
  source 1..11: note = Description of Artificial Sequence: Synthetic peptide; note = XENP020034 vhCDR3
YYGNYGGYFDV

SEQ ID NO: 24287 - protein, 11 aa, synthetic construct
  source 1..11: note = Description of Artificial Sequence: Synthetic peptide; note = XENP020034 vlCDR1
RASQSVGNDVA

SEQ ID NO: 24288 - protein, 7 aa, synthetic construct
  source 1..7: note = Description of Artificial Sequence: Synthetic peptide; note = XENP020034 vlCDR2
YASHRYT

SEQ ID NO: 24289 - protein, 9 aa, synthetic construct
  source 1..9: note = Description of Artificial Sequence: Synthetic peptide; note = XENP020034 vlCDR3
QQDFSSPRT

SEQ ID NO: 24290 - protein, 214 aa, synthetic construct; identical to SEQ ID NO: 17250
  source 1..214: note = Description of Artificial Sequence: Synthetic polypeptide; note = XENP020034 2A11_H1L2_Fab-1G6_H1.279_L1.194 Light Chain

SEQ ID NO: 24291 - protein, 107 aa, synthetic construct; identical to SEQ ID NO: 17251
  source 1..107: note = Description of Artificial Sequence: Synthetic polypeptide; note = VL of XENP020034

SEQ ID NO: 24292 - protein, 11 aa, synthetic construct
  source 1..11: note = Description of Artificial Sequence: Synthetic peptide; note = XENP020034 vlCDR1
QASQDIGNYLN

SEQ ID NO: 24293 - protein, 7 aa, synthetic construct
  source 1..7: note = Description of Artificial Sequence: Synthetic peptide; note = XENP020034 vlCDR2
YTSRLHS

SEQ ID NO: 24294 - protein, 9 aa, synthetic construct
  source 1..9: note = Description of Artificial Sequence: Synthetic peptide; note = XENP020034 vlCDR3
QQGNTLPYT

SEQ ID NO: 24295 - protein, 447 aa, synthetic construct; identical to SEQ ID NO: 17235
  source 1..447: note = Description of Artificial Sequence: Synthetic polypeptide; note = XENP020064 2A11_H1L2_Fab-1G6_H1.282_L1.194 Fab-Fc Heavy Chain

SEQ ID NO: 24296 - protein, 118 aa, synthetic construct; identical to SEQ ID NO: 17236
  source 1..118: note = Description of Artificial Sequence: Synthetic polypeptide; note = VH of XENP020064

SEQ ID NO: 24297 - protein, 5 aa, synthetic construct
  source 1..5: note = Description of Artificial Sequence: Synthetic peptide; note = XENP020064 vhCDR1
DYYMH

SEQ ID NO: 24298 - protein, 17 aa, synthetic construct
  source 1..17: note = Description of Artificial Sequence: Synthetic peptide; note = XENP020064 vhCDR2
WIDPENGDTEYAPKFQG

SEQ ID NO: 24299 - protein, 9 aa, synthetic construct
  source 1..9: note = Description of Artificial Sequence: Synthetic peptide; note = XENP020064 vhCDR3
RGVRQALDY

SEQ ID NO: 24300 - protein, 480 aa, synthetic construct; identical to SEQ ID NO: 23920
  source 1..480: note = Description of Artificial Sequence: Synthetic polypeptide; note = XENP020064 2A11_H1L2_Fab-1G6_H1.282_L1.194 scFv-Fc Heavy Chain

SEQ ID NO: 24301 - protein, 122 aa, synthetic construct; identical to SEQ ID NO: 10935
  source 1..122: note = Description of Artificial Sequence: Synthetic polypeptide; note = VH of XENP020064

SEQ ID NO: 24302 - protein, 107 aa, synthetic construct; identical to SEQ ID NO: 10999
  source 1..107: note = Description of Artificial Sequence: Synthetic polypeptide; note = VL of XENP020064

SEQ ID NO: 24303 - protein, 231 aa, synthetic construct; identical to SEQ ID NO: 21532
  source 1..231: note = Description of Artificial Sequence: Synthetic polypeptide; note = Fc chain of XENP020064

SEQ ID NO: 24304 - protein, 5 aa, synthetic construct
  source 1..5: note = Description of Artificial Sequence: Synthetic peptide; note = XENP020064 vhCDR1
NYWMN

SEQ ID NO: 24305 - protein, 19 aa, synthetic construct
  source 1..19: note = Description of Artificial Sequence: Synthetic peptide; note = XENP020064 vhCDR2
EIRLYSNNYATHYAESVKG

SEQ ID NO: 24306 - protein, 11 aa, synthetic construct
  source 1..11: note = Description of Artificial Sequence: Synthetic peptide; note = XENP020064 vhCDR3
YYGNYGGYFDV

SEQ ID NO: 24307 - protein, 11 aa, synthetic construct
  source 1..11: note = Description of Artificial Sequence: Synthetic peptide; note = XENP020064 vlCDR1
RASQSVGNDVA

SEQ ID NO: 24308 - protein, 7 aa, synthetic construct
  source 1..7: note = Description of Artificial Sequence: Synthetic peptide; note = XENP020064 vlCDR2
YASHRYT

SEQ ID NO: 24309 - protein, 9 aa, synthetic construct
  source 1..9: note = Description of Artificial Sequence: Synthetic peptide; note = XENP020064 vlCDR3
QQDFSSPRT

SEQ ID NO: 24310 - protein, 214 aa, synthetic construct; identical to SEQ ID NO: 17250
  source 1..214: note = Description of Artificial Sequence: Synthetic polypeptide; note = XENP020064 2A11_H1L2_Fab-1G6_H1.282_L1.194 Light Chain

SEQ ID NO: 24311 - protein, 107 aa, synthetic construct; identical to SEQ ID NO: 17251
  source 1..107: note = Description of Artificial Sequence: Synthetic polypeptide; note = VL of XENP020064

SEQ ID NO: 24312 - protein, 11 aa, synthetic construct
  source 1..11: note = Description of Artificial Sequence: Synthetic peptide; note = XENP020064 vlCDR1
QASQDIGNYLN

SEQ ID NO: 24313 - protein, 7 aa, synthetic construct
  source 1..7: note = Description of Artificial Sequence: Synthetic peptide; note = XENP020064 vlCDR2
YTSRLHS

SEQ ID NO: 24314 - protein, 9 aa, synthetic construct
  source 1..9: note = Description of Artificial Sequence: Synthetic peptide; note = XENP020064 vlCDR3
QQGNTLPYT

SEQ ID NO: 24315 - protein, 447 aa, synthetic construct; identical to SEQ ID NO: 17235
  source 1..447: note = Description of Artificial Sequence: Synthetic polypeptide; note = XENP020203 2A11_H1L0_Fab-1G6_H1.279_L1.194 Fab-Fc Heavy Chain

SEQ ID NO: 24316 - protein, 118 aa, synthetic construct; identical to SEQ ID NO: 17236
  source 1..118: note = Description of Artificial Sequence: Synthetic polypeptide; note = VH of XENP020203

SEQ ID NO: 24317 - protein, 5 aa, synthetic construct
  source 1..5: note = Description of Artificial Sequence: Synthetic peptide; note = XENP020203 vhCDR1
DYYMH

SEQ ID NO: 24318 - protein, 17 aa, synthetic construct
  source 1..17: note = Description of Artificial Sequence: Synthetic peptide; note = XENP020203 vhCDR2
WIDPENGDTEYAPKFQG

SEQ ID NO: 24319 - protein, 9 aa, synthetic construct
  source 1..9: note = Description of Artificial Sequence: Synthetic peptide; note = XENP020203 vhCDR3
RGVRQALDY

SEQ ID NO: 24320 - protein, 480 aa, synthetic construct; identical to SEQ ID NO: 23401
  source 1..480: note = Description of Artificial Sequence: Synthetic polypeptide; note = XENP020203 2A11_H1L0_Fab-1G6_H1.279_L1.194 scFv-Fc Heavy Chain

SEQ ID NO: 24321 - protein, 122 aa, synthetic construct; identical to SEQ ID NO: 10908
  source 1..122: note = Description of Artificial Sequence: Synthetic polypeptide; note = VH of XENP020203

SEQ ID NO: 24322 - protein, 107 aa, synthetic construct; identical to SEQ ID NO: 10999
  source 1..107: note = Description of Artificial Sequence: Synthetic polypeptide; note = VL of XENP020203

SEQ ID NO: 24323 - protein, 231 aa, synthetic construct; identical to SEQ ID NO: 21532
  source 1..231: note = Description of Artificial Sequence: Synthetic polypeptide; note = Fc chain of XENP020203

SEQ ID NO: 24324 - protein, 5 aa, synthetic construct
  source 1..5: note = Description of Artificial Sequence: Synthetic peptide; note = XENP020203 vhCDR1
NYWMN

SEQ ID NO: 24325 - protein, 19 aa, synthetic construct
  source 1..19: note = Description of Artificial Sequence: Synthetic peptide; note = XENP020203 vhCDR2
EIRLYSNNYATHYAESVKG

SEQ ID NO: 24326 - protein, 11 aa, synthetic construct
  source 1..11: note = Description of Artificial Sequence: Synthetic peptide; note = XENP020203 vhCDR3
YYGNYGGYFDV

SEQ ID NO: 24327 - protein, 11 aa, synthetic construct
  source 1..11: note = Description of Artificial Sequence: Synthetic peptide; note = XENP020203 vlCDR1
RASQSVGNDVA

SEQ ID NO: 24328 - protein, 7 aa, synthetic construct
  source 1..7: note = Description of Artificial Sequence: Synthetic peptide; note = XENP020203 vlCDR2
YASHRYT

SEQ ID NO: 24329 - protein, 9 aa, synthetic construct
  source 1..9: note = Description of Artificial Sequence: Synthetic peptide; note = XENP020203 vlCDR3
QQDFSSPRT

SEQ ID NO: 24330 - protein, 214 aa, synthetic construct; identical to SEQ ID NO: 17230
  source 1..214: note = Description of Artificial Sequence: Synthetic polypeptide; note = XENP020203 2A11_H1L0_Fab-1G6_H1.279_L1.194 Light Chain

SEQ ID NO: 24331 - protein, 107 aa, synthetic construct; identical to SEQ ID NO: 17231
  source 1..107: note = Description of Artificial Sequence: Synthetic polypeptide; note = VL of XENP020203

SEQ ID NO: 24332 - protein, 11 aa, synthetic construct
  source 1..11: note = Description of Artificial Sequence: Synthetic peptide; note = XENP020203 vlCDR1
RASQDIGNYLN

SEQ ID NO: 24333 - protein, 7 aa, synthetic construct
  source 1..7: note = Description of Artificial Sequence: Synthetic peptide; note = XENP020203 vlCDR2
YTSRLHS

SEQ ID NO: 24334 - protein, 9 aa, synthetic construct
  source 1..9: note = Description of Artificial Sequence: Synthetic peptide; note = XENP020203 vlCDR3
QQGNTLPYT

SEQ ID NO: 24335 - protein, 447 aa, synthetic construct; identical to SEQ ID NO: 17235
  source 1..447: note = Description of Artificial Sequence: Synthetic polypeptide; note = XENP020204 2A11_H1L1_Fab-1G6_H1.279_L1.194 Fab-Fc Heavy Chain

SEQ ID NO: 24336 - protein, 118 aa, synthetic construct; identical to SEQ ID NO: 17236
  source 1..118: note = Description of Artificial Sequence: Synthetic polypeptide; note = VH of XENP020204

SEQ ID NO: 24337 - protein, 5 aa, synthetic construct
  source 1..5: note = Description of Artificial Sequence: Synthetic peptide; note = XENP020204 vhCDR1
DYYMH

SEQ ID NO: 24338 - protein, 17 aa, synthetic construct
  source 1..17: note = Description of Artificial Sequence: Synthetic peptide; note = XENP020204 vhCDR2
WIDPENGDTEYAPKFQG

SEQ ID NO: 24339 - protein, 9 aa, synthetic construct
  source 1..9: note = Description of Artificial Sequence: Synthetic peptide; note = XENP020204 vhCDR3
RGVRQALDY

SEQ ID NO: 24340 - protein, 480 aa, synthetic construct; identical to SEQ ID NO: 23401
  source 1..480: note = Description of Artificial Sequence: Synthetic polypeptide; note = XENP020204 2A11_H1L1_Fab-1G6_H1.279_L1.194 scFv-Fc Heavy Chain

SEQ ID NO: 24341 - protein, 122 aa, synthetic construct; identical to SEQ ID NO: 10908
  source 1..122: note = Description of Artificial Sequence: Synthetic polypeptide; note = VH of XENP020204

SEQ ID NO: 24342 - protein, 107 aa, synthetic construct; identical to SEQ ID NO: 10999
  source 1..107: note = Description of Artificial Sequence: Synthetic polypeptide; note = VL of XENP020204

SEQ ID NO: 24343 - protein, 231 aa, synthetic construct; identical to SEQ ID NO: 21532
  source 1..231: note = Description of Artificial Sequence: Synthetic polypeptide; note = Fc chain of XENP020204

SEQ ID NO: 24344 - protein, 5 aa, synthetic construct
  source 1..5: note = Description of Artificial Sequence: Synthetic peptide; note = XENP020204 vhCDR1
NYWMN

SEQ ID NO: 24345 - protein, 19 aa, synthetic construct
  source 1..19: note = Description of Artificial Sequence: Synthetic peptide; note = XENP020204 vhCDR2
EIRLYSNNYATHYAESVKG

SEQ ID NO: 24346 - protein, 11 aa, synthetic construct
  source 1..11: note = Description of Artificial Sequence: Synthetic peptide; note = XENP020204 vhCDR3
YYGNYGGYFDV

SEQ ID NO: 24347 - protein, 11 aa, synthetic construct
  source 1..11: note = Description of Artificial Sequence: Synthetic peptide; note = XENP020204 vlCDR1
RASQSVGNDVA

SEQ ID NO: 24348 - protein, 7 aa, synthetic construct
  source 1..7: note = Description of Artificial Sequence: Synthetic peptide; note = XENP020204 vlCDR2
YASHRYT

SEQ ID NO: 24349 - protein, 9 aa, synthetic construct
  source 1..9: note = Description of Artificial Sequence: Synthetic peptide; note = XENP020204 vlCDR3
QQDFSSPRT

SEQ ID NO: 24350 - protein, 214 aa, synthetic construct; identical to SEQ ID NO: 17240
  source 1..214: note = Description of Artificial Sequence: Synthetic polypeptide; note = XENP020204 2A11_H1L1_Fab-1G6_H1.279_L1.194 Light Chain

SEQ ID NO: 24351 - protein, 107 aa, synthetic construct; identical to SEQ ID NO: 17241
  source 1..107: note = Description of Artificial Sequence: Synthetic polypeptide; note = VL of XENP020204

SEQ ID NO: 24352 - protein, 11 aa, synthetic construct
  source 1..11: note = Description of Artificial Sequence: Synthetic peptide; note = XENP020204 vlCDR1
RASQDIGNYLN

SEQ ID NO: 24353 - protein, 7 aa, synthetic construct
  source 1..7: note = Description of Artificial Sequence: Synthetic peptide; note = XENP020204 vlCDR2
YTSRLHS

SEQ ID NO: 24354 - protein, 9 aa, synthetic construct
  source 1..9: note = Description of Artificial Sequence: Synthetic peptide; note = XENP020204 vlCDR3
QQGNTLPYT

SEQ ID NO: 24355 - protein, 447 aa, synthetic construct; identical to SEQ ID NO: 17235
  source 1..447: note = Description of Artificial Sequence: Synthetic polypeptide; note = XENP020206 2A11_H1L2_Fab-1G6_L1.194_H1.279 Fab-Fc Heavy Chain

SEQ ID NO: 24356 - protein, 118 aa, synthetic construct; identical to SEQ ID NO: 17236
  source 1..118: note = Description of Artificial Sequence: Synthetic polypeptide; note = VH of XENP020206

SEQ ID NO: 24357 - protein, 5 aa, synthetic construct
  source 1..5: note = Description of Artificial Sequence: Synthetic peptide; note = XENP020206 vhCDR1
DYYMH

SEQ ID NO: 24358 - protein, 17 aa, synthetic construct
  source 1..17: note = Description of Artificial Sequence: Synthetic peptide; note = XENP020206 vhCDR2
WIDPENGDTEYAPKFQG

SEQ ID NO: 24359 - protein, 9 aa, synthetic construct
  source 1..9: note = Description of Artificial Sequence: Synthetic peptide; note = XENP020206 vhCDR3
RGVRQALDY

SEQ ID NO: 24360 - protein, 480 aa, synthetic construct; identical to SEQ ID NO: 23221
  source 1..480: note = Description of Artificial Sequence: Synthetic polypeptide; note = XENP020206 2A11_H1L2_Fab-1G6_L1.194_H1.279 scFv-Fc Heavy Chain

SEQ ID NO: 24361 - protein, 107 aa, synthetic construct; identical to SEQ ID NO: 10999
  source 1..107: note = Description of Artificial Sequence: Synthetic polypeptide; note = VH of XENP020206

SEQ ID NO: 24362 - protein, 122 aa, synthetic construct; identical to SEQ ID NO: 10908
  source 1..122: note = Description of Artificial Sequence: Synthetic polypeptide; note = VL of XENP020206

SEQ ID NO: 24363 - protein, 231 aa, synthetic construct; identical to SEQ ID NO: 21532
  source 1..231: note = Description of Artificial Sequence: Synthetic polypeptide; note = Fc chain of XENP020206

SEQ ID NO: 24364 - protein, 11 aa, synthetic construct
  source 1..11: note = Description of Artificial Sequence: Synthetic peptide; note = XENP020206 vhCDR1
RASQSVGNDVA

SEQ ID NO: 24365 - protein, 7 aa, synthetic construct
  source 1..7: note = Description of Artificial Sequence: Synthetic peptide; note = XENP020206 vhCDR2
YASHRYT

SEQ ID NO: 24366 - protein, 9 aa, synthetic construct
  source 1..9: note = Description of Artificial Sequence: Synthetic peptide; note = XENP020206 vhCDR3
QQDFSSPRT

SEQ ID NO: 24367 - protein, 5 aa, synthetic construct
  source 1..5: note = Description of Artificial Sequence: Synthetic peptide; note = XENP020206 vlCDR1
NYWMN

SEQ ID NO: 24368 - protein, 19 aa, synthetic construct
  source 1..19: note = Description of Artificial Sequence: Synthetic peptide; note = XENP020206 vlCDR2
EIRLYSNNYATHYAESVKG

SEQ ID NO: 24369 - protein, 11 aa, synthetic construct
  source 1..11: note = Description of Artificial Sequence: Synthetic peptide; note = XENP020206 vlCDR3
YYGNYGGYFDV

SEQ ID NO: 24370 - protein, 214 aa, synthetic construct; identical to SEQ ID NO: 17250
  source 1..214: note = Description of Artificial Sequence: Synthetic polypeptide; note = XENP020206 2A11_H1L2_Fab-1G6_L1.194_H1.279 Light Chain

SEQ ID NO: 24371 - protein, 107 aa, synthetic construct; identical to SEQ ID NO: 17251
  source 1..107: note = Description of Artificial Sequence: Synthetic polypeptide; note = VL of XENP020206

SEQ ID NO: 24372 - protein, 11 aa, synthetic construct
  source 1..11: note = Description of Artificial Sequence: Synthetic peptide; note = XENP020206 vlCDR1
QASQDIGNYLN

SEQ ID NO: 24373 - protein, 7 aa, synthetic construct
  source 1..7: note = Description of Artificial Sequence: Synthetic peptide; note = XENP020206 vlCDR2
YTSRLHS

SEQ ID NO: 24374 - protein, 9 aa, synthetic construct
  source 1..9: note = Description of Artificial Sequence: Synthetic peptide; note = XENP020206 vlCDR3
QQGNTLPYT

SEQ ID NO: 24375 - protein, 447 aa, synthetic construct; identical to SEQ ID NO: 17235
  source 1..447: note = Description of Artificial Sequence: Synthetic polypeptide; note = XENP020207 2A11_H1L2_Fab-1G6_L1.210_H1.288 Fab-Fc Heavy Chain

SEQ ID NO: 24376 - protein, 118 aa, synthetic construct; identical to SEQ ID NO: 17236
  source 1..118: note = Description of Artificial Sequence: Synthetic polypeptide; note = VH of XENP020207

SEQ ID NO: 24377 - protein, 5 aa, synthetic construct
  source 1..5: note = Description of Artificial Sequence: Synthetic peptide; note = XENP020207 vhCDR1
DYYMH

SEQ ID NO: 24378 - protein, 17 aa, synthetic construct
  source 1..17: note = Description of Artificial Sequence: Synthetic peptide; note = XENP020207 vhCDR2
WIDPENGDTEYAPKFQG

SEQ ID NO: 24379 - protein, 9 aa, synthetic construct
  source 1..9: note = Description of Artificial Sequence: Synthetic peptide; note = XENP020207 vhCDR3
RGVRQALDY

SEQ ID NO: 24380 - protein, 480 aa, synthetic construct; identical to SEQ ID NO: 23381
  source 1..480: note = Description of Artificial Sequence: Synthetic polypeptide; note = XENP020207 2A11_H1L2_Fab-1G6_L1.210_H1.288 scFv-Fc Heavy Chain

SEQ ID NO: 24381 - protein, 107 aa, synthetic construct; identical to SEQ ID NO: 11359
  source 1..107: note = Description of Artificial Sequence: Synthetic polypeptide; note = VH of XENP020207

SEQ ID NO: 24382 - protein, 122 aa, synthetic construct; identical to SEQ ID NO: 11358
  source 1..122: note = Description of Artificial Sequence: Synthetic polypeptide; note = VL of XENP020207

SEQ ID NO: 24383 - protein, 231 aa, synthetic construct; identical to SEQ ID NO: 21532
  source 1..231: note = Description of Artificial Sequence: Synthetic polypeptide; note = Fc chain of XENP020207

SEQ ID NO: 24384 - protein, 11 aa, synthetic construct
  source 1..11: note = Description of Artificial Sequence: Synthetic peptide; note = XENP020207 vhCDR1
RASQSVGNDVA

SEQ ID NO: 24385 - protein, 7 aa, synthetic construct
  source 1..7: note = Description of Artificial Sequence: Synthetic peptide; note = XENP020207 vhCDR2
YASHRYT

SEQ ID NO: 24386 - protein, 9 aa, synthetic construct
  source 1..9: note = Description of Artificial Sequence: Synthetic peptide; note = XENP020207 vhCDR3
QQDFSSPRT

SEQ ID NO: 24387 - protein, 5 aa, synthetic construct
  source 1..5: note = Description of Artificial Sequence: Synthetic peptide; note = XENP020207 vlCDR1
NYWMN

SEQ ID NO: 24388 - protein, 19 aa, synthetic construct
  source 1..19: note = Description of Artificial Sequence: Synthetic peptide; note = XENP020207 vlCDR2
EIRLYSNNYATHYAESVKG

SEQ ID NO: 24389 - protein, 11 aa, synthetic construct
  source 1..11: note = Description of Artificial Sequence: Synthetic peptide; note = XENP020207 vlCDR3
YYGNYGGYFDV

SEQ ID NO: 24390 - protein, 214 aa, synthetic construct; identical to SEQ ID NO: 17250
  source 1..214: note = Description of Artificial Sequence: Synthetic polypeptide; note = XENP020207 2A11_H1L2_Fab-1G6_L1.210_H1.288 Light Chain

SEQ ID NO: 24391 - protein, 107 aa, synthetic construct; identical to SEQ ID NO: 17251
  source 1..107: note = Description of Artificial Sequence: Synthetic polypeptide; note = VL of XENP020207

SEQ ID NO: 24392 - protein, 11 aa, synthetic construct
  source 1..11: note = Description of Artificial Sequence: Synthetic peptide; note = XENP020207 vlCDR1
QASQDIGNYLN

SEQ ID NO: 24393 - protein, 7 aa, synthetic construct
  source 1..7: note = Description of Artificial Sequence: Synthetic peptide; note = XENP020207 vlCDR2
YTSRLHS

SEQ ID NO: 24394 - protein, 9 aa, synthetic construct
  source 1..9: note = Description of Artificial Sequence: Synthetic peptide; note = XENP020207 vlCDR3
QQGNTLPYT

SEQ ID NO: 24395 - protein, 447 aa, synthetic construct; identical to SEQ ID NO: 17235
  source 1..447: note = Description of Artificial Sequence: Synthetic polypeptide; note = XENP020208 2A11_H1L2_Fab-1G6_H1.288_L1.210 Fab-Fc Heavy Chain

SEQ ID NO: 24396 - protein, 118 aa, synthetic construct; identical to SEQ ID NO: 17236
  source 1..118: note = Description of Artificial Sequence: Synthetic polypeptide; note = VH of XENP020208

SEQ ID NO: 24397 - protein, 5 aa, synthetic construct
  source 1..5: note = Description of Artificial Sequence: Synthetic peptide; note = XENP020208 vhCDR1
DYYMH

SEQ ID NO: 24398 - protein, 17 aa, synthetic construct
  source 1..17: note = Description of Artificial Sequence: Synthetic peptide; note = XENP020208 vhCDR2
WIDPENGDTEYAPKFQG

SEQ ID NO: 24399 - protein, 9 aa, synthetic construct
  source 1..9: note = Description of Artificial Sequence: Synthetic peptide; note = XENP020208 vhCDR3
RGVRQALDY

SEQ ID NO: 24400 - protein, 480 aa, synthetic construct; identical to SEQ ID NO: 23860
  source 1..480: note = Description of Artificial Sequence: Synthetic polypeptide; note = XENP020208 2A11_H1L2_Fab-1G6_H1.288_L1.210 scFv-Fc Heavy Chain

SEQ ID NO: 24401 - protein, 122 aa, synthetic construct; identical to SEQ ID NO: 11358
  source 1..122: note = Description of Artificial Sequence: Synthetic polypeptide; note = VH of XENP020208

SEQ ID NO: 24402 - protein, 107 aa, synthetic construct; identical to SEQ ID NO: 11359
  source 1..107: note = Description of Artificial Sequence: Synthetic polypeptide; note = VL of XENP020208

SEQ ID NO: 24403 - protein, 231 aa, synthetic construct; identical to SEQ ID NO: 21532
  source 1..231: note = Description of Artificial Sequence: Synthetic polypeptide; note = Fc chain of XENP020208

SEQ ID NO: 24404 - protein, 5 aa, synthetic construct
  source 1..5: note = Description of Artificial Sequence: Synthetic peptide; note = XENP020208 vhCDR1
NYWMN

SEQ ID NO: 24405 - protein, 19 aa, synthetic construct
  source 1..19: note = Description of Artificial Sequence: Synthetic peptide; note = XENP020208 vhCDR2
EIRLYSNNYATHYAESVKG

SEQ ID NO: 24406 - protein, 11 aa, synthetic construct
  source 1..11: note = Description of Artificial Sequence: Synthetic peptide; note = XENP020208 vhCDR3
YYGNYGGYFDV

SEQ ID NO: 24407 - protein, 11 aa, synthetic construct
  source 1..11: note = Description of Artificial Sequence: Synthetic peptide; note = XENP020208 vlCDR1
RASQSVGNDVA

SEQ ID NO: 24408 - protein, 7 aa, synthetic construct
  source 1..7: note = Description of Artificial Sequence: Synthetic peptide; note = XENP020208 vlCDR2
YASHRYT

SEQ ID NO: 24409 - protein, 9 aa, synthetic construct
  source 1..9: note = Description of Artificial Sequence: Synthetic peptide; note = XENP020208 vlCDR3
QQDFSSPRT

SEQ ID NO: 24410 - protein, 214 aa, synthetic construct; identical to SEQ ID NO: 17250
  source 1..214: note = Description of Artificial Sequence: Synthetic polypeptide; note = XENP020208 2A11_H1L2_Fab-1G6_H1.288_L1.210 Light Chain

SEQ ID NO: 24411 - protein, 107 aa, synthetic construct; identical to SEQ ID NO: 17251
  source 1..107: note = Description of Artificial Sequence: Synthetic polypeptide; note = VL of XENP020208

SEQ ID NO: 24412 - protein, 11 aa, synthetic construct
  source 1..11: note = Description of Artificial Sequence: Synthetic peptide; note = XENP020208 vlCDR1
QASQDIGNYLN

SEQ ID NO: 24413 - protein, 7 aa, synthetic construct
  source 1..7: note = Description of Artificial Sequence: Synthetic peptide; note = XENP020208 vlCDR2
YTSRLHS

SEQ ID NO: 24414 - protein, 9 aa, synthetic construct
  source 1..9: note = Description of Artificial Sequence: Synthetic peptide; note = XENP020208 vlCDR3
QQGNTLPYT

SEQ ID NO: 24415 - protein, 447 aa, synthetic construct; identical to SEQ ID NO: 17235
  source 1..447: note = Description of Artificial Sequence: Synthetic polypeptide; note = XENP021580 2A11_H1_25F7_L0_Fab-1G6_L1.194_H1.279 Fab-Fc Heavy Chain

SEQ ID NO: 24416 - protein, 118 aa, synthetic construct; identical to SEQ ID NO: 17236
  source 1..118: note = Description of Artificial Sequence: Synthetic polypeptide; note = VH of XENP021580

SEQ ID NO: 24417 - protein, 5 aa, synthetic construct
  source 1..5: note = Description of Artificial Sequence: Synthetic peptide; note = XENP021580 vhCDR1
DYYMH

SEQ ID NO: 24418 - protein, 17 aa, synthetic construct
  source 1..17: note = Description of Artificial Sequence: Synthetic peptide; note = XENP021580 vhCDR2
WIDPENGDTEYAPKFQG

SEQ ID NO: 24419 - protein, 9 aa, synthetic construct
  source 1..9: note = Description of Artificial Sequence: Synthetic peptide; note = XENP021580 vhCDR3
RGVRQALDY

SEQ ID NO: 24420 - protein, 480 aa, synthetic construct; identical to SEQ ID NO: 23221
  source 1..480: note = Description of Artificial Sequence: Synthetic polypeptide; note = XENP021580 2A11_H1_25F7_L0_Fab-1G6_L1.194_H1.279 scFv-Fc Heavy Chain

SEQ ID NO: 24421 - protein, 107 aa, synthetic construct; identical to SEQ ID NO: 10999
  source 1..107: note = Description of Artificial Sequence: Synthetic polypeptide; note = VH of XENP021580

SEQ ID NO: 24422 - protein, 122 aa, synthetic construct; identical to SEQ ID NO: 10908
  source 1..122: note = Description of Artificial Sequence: Synthetic polypeptide; note = VL of XENP021580

SEQ ID NO: 24423 - protein, 231 aa, synthetic construct; identical to SEQ ID NO: 21532
  source 1..231: note = Description of Artificial Sequence: Synthetic polypeptide; note = Fc chain of XENP021580

SEQ ID NO: 24424 - protein, 11 aa, synthetic construct
  source 1..11: note = Description of Artificial Sequence: Synthetic peptide; note = XENP021580 vhCDR1
RASQSVGNDVA

SEQ ID NO: 24425 - protein, 7 aa, synthetic construct
  source 1..7: note = Description of Artificial Sequence: Synthetic peptide; note = XENP021580 vhCDR2
YASHRYT

SEQ ID NO: 24426 - protein, 9 aa, synthetic construct
  source 1..9: note = Description of Artificial Sequence: Synthetic peptide; note = XENP021580 vhCDR3
QQDFSSPRT

SEQ ID NO: 24427 - protein, 5 aa, synthetic construct
  source 1..5: note = Description of Artificial Sequence: Synthetic peptide; note = XENP021580 vlCDR1
NYWMN

SEQ ID NO: 24428 - protein, 19 aa, synthetic construct
  source 1..19: note = Description of Artificial Sequence: Synthetic peptide; note = XENP021580 vlCDR2
EIRLYSNNYATHYAESVKG

SEQ ID NO: 24429 - protein, 11 aa, synthetic construct
  source 1..11: note = Description of Artificial Sequence: Synthetic peptide; note = XENP021580 vlCDR3
YYGNYGGYFDV

SEQ ID NO: 24430 - protein, 214 aa, synthetic construct; identical to SEQ ID NO: 17140
  source 1..214: note = Description of Artificial Sequence: Synthetic polypeptide; note = XENP021580 2A11_H1_25F7_L0_Fab-1G6_L1.194_H1.279 Light Chain

SEQ ID NO: 24431 - protein, 107 aa, synthetic construct; identical to SEQ ID NO: 17141
  source 1..107: note = Description of Artificial Sequence: Synthetic polypeptide; note = VL of XENP021580

SEQ ID NO: 24432 - protein, 11 aa, synthetic construct
  source 1..11: note = Description of Artificial Sequence: Synthetic peptide; note = XENP021580 vlCDR1
RASQSISSYLA

SEQ ID NO: 24433 - protein, 7 aa, synthetic construct
  source 1..7: note = Description of Artificial Sequence: Synthetic peptide; note = XENP021580 vlCDR2
DASNRAT

SEQ ID NO: 24434 - protein, 9 aa, synthetic construct
  source 1..9: note = Description of Artificial Sequence: Synthetic peptide; note = XENP021580 vlCDR3
QQRSNWPLT

SEQ ID NO: 24435 - protein, 447 aa, synthetic construct; identical to SEQ ID NO: 17235
  source 1..447: note = Description of Artificial Sequence: Synthetic polypeptide; note = XENP021581 2A11_H1_L2.90_Fab-1G6_L1.194_H1.279 Fab-Fc Heavy Chain

SEQ ID NO: 24436 - protein, 118 aa, synthetic construct; identical to SEQ ID NO: 17236
  source 1..118: note = Description of Artificial Sequence: Synthetic polypeptide; note = VH of XENP021581

SEQ ID NO: 24437 - protein, 5 aa, synthetic construct
  source 1..5: note = Description of Artificial Sequence: Synthetic peptide; note = XENP021581 vhCDR1
DYYMH

SEQ ID NO: 24438 - protein, 17 aa, synthetic construct
  source 1..17: note = Description of Artificial Sequence: Synthetic peptide; note = XENP021581 vhCDR2
WIDPENGDTEYAPKFQG

SEQ ID NO: 24439 - protein, 9 aa, synthetic construct
  source 1..9: note = Description of Artificial Sequence: Synthetic peptide; note = XENP021581 vhCDR3
RGVRQALDY

SEQ ID NO: 24440 - protein, 480 aa, synthetic construct; identical to SEQ ID NO: 23221
  source 1..480: note = Description of Artificial Sequence: Synthetic polypeptide; note = XENP021581 2A11_H1_L2.90_Fab-1G6_L1.194_H1.279 scFv-Fc Heavy Chain

SEQ ID NO: 24441 - protein, 107 aa, synthetic construct; identical to SEQ ID NO: 10999
  source 1..107: note = Description of Artificial Sequence: Synthetic polypeptide; note = VH of XENP021581

SEQ ID NO: 24442 - protein, 122 aa, synthetic construct; identical to SEQ ID NO: 10908
  source 1..122: note = Description of Artificial Sequence: Synthetic polypeptide; note = VL of XENP021581

SEQ ID NO: 24443 - protein, 231 aa, synthetic construct; identical to SEQ ID NO: 21532
  source 1..231: note = Description of Artificial Sequence: Synthetic polypeptide; note = Fc chain of XENP021581

SEQ ID NO: 24444 - protein, 11 aa, synthetic construct
  source 1..11: note = Description of Artificial Sequence: Synthetic peptide; note = XENP021581 vhCDR1
RASQSVGNDVA

SEQ ID NO: 24445 - protein, 7 aa, synthetic construct
  source 1..7: note = Description of Artificial Sequence: Synthetic peptide; note = XENP021581 vhCDR2
YASHRYT

SEQ ID NO: 24446 - protein, 9 aa, synthetic construct
  source 1..9: note = Description of Artificial Sequence: Synthetic peptide; note = XENP021581 vhCDR3
QQDFSSPRT

SEQ ID NO: 24447 - protein, 5 aa, synthetic construct
  source 1..5: note = Description of Artificial Sequence: Synthetic peptide; note = XENP021581 vlCDR1
NYWMN

SEQ ID NO: 24448 - protein, 19 aa, synthetic construct
  source 1..19: note = Description of Artificial Sequence: Synthetic peptide; note = XENP021581 vlCDR2
EIRLYSNNYATHYAESVKG

SEQ ID NO: 24449 - protein, 11 aa, synthetic construct
  source 1..11: note = Description of Artificial Sequence: Synthetic peptide; note = XENP021581 vlCDR3
YYGNYGGYFDV

SEQ ID NO: 24450 - protein, 214 aa, synthetic construct
  source 1..214: note = Description of Artificial Sequence: Synthetic polypeptide; note = XENP021581 2A11_H1_L2.90_Fab-1G6_L1.194_H1.279 Light Chain
DIQMTQSPAFLSVTPGEKVTITCQASQDIGNYLNWYQQKPDQTVKLLIYYTSRLHSGVPSRFSGSGSGTDYTFTISSLEAEDAATYFCQQGNTLPYTFGGGTKVEIKRTVAAPSVFIFPPSDEQLKSGTASVVCLLNNFYPREAKVQWKVDNALQSGNSQESVTEQDSKDSTYSLSSTLTLSKADYEKHKVYACEVTHQGLSSPVTKSFNRGEC

SEQ ID NO: 24451 - protein, 107 aa, synthetic construct
  source 1..107: note = Description of Artificial Sequence: Synthetic polypeptide; note = VL of XENP021581
DIQMTQSPAFLSVTPGEKVTITCQASQDIGNYLNWYQQKPDQTVKLLIYYTSRLHSGVPSRFSGSGSGTDYTFTISSLEAEDAATYFCQQGNTLPYTFGGGTKVEIK

SEQ ID NO: 24452 - protein, 11 aa, synthetic construct
  source 1..11: note = Description of Artificial Sequence: Synthetic peptide; note = XENP021581 vlCDR1
QASQDIGNYLN

SEQ ID NO: 24453 - protein, 7 aa, synthetic construct
  source 1..7: note = Description of Artificial Sequence: Synthetic peptide; note = XENP021581 vlCDR2
YTSRLHS

SEQ ID NO: 24454 - protein, 9 aa, synthetic construct
  source 1..9: note = Description of Artificial Sequence: Synthetic peptide; note = XENP021581 vlCDR3
QQGNTLPYT

SEQ ID NO: 24455 - protein, 447 aa, synthetic construct; identical to SEQ ID NO: 17235
  source 1..447: note = Description of Artificial Sequence: Synthetic polypeptide; note = XENP021582 2A11_H1_L2.91_Fab-1G6_L1.194_H1.279 Fab-Fc Heavy Chain

SEQ ID NO: 24456 - protein, 118 aa, synthetic construct; identical to SEQ ID NO: 17236
  source 1..118: note = Description of Artificial Sequence: Synthetic polypeptide; note = VH of XENP021582

SEQ ID NO: 24457 - protein, 5 aa, synthetic construct
  source 1..5: note = Description of Artificial Sequence: Synthetic peptide; note = XENP021582 vhCDR1
DYYMH

SEQ ID NO: 24458 - protein, 17 aa, synthetic construct
  source 1..17: note = Description of Artificial Sequence: Synthetic peptide; note = XENP021582 vhCDR2
WIDPENGDTEYAPKFQG

SEQ ID NO: 24459 - protein, 9 aa, synthetic construct
  source 1..9: note = Description of Artificial Sequence: Synthetic peptide; note = XENP021582 vhCDR3
RGVRQALDY

SEQ ID NO: 24460 - protein, 480 aa, synthetic construct; identical to SEQ ID NO: 23221
  source 1..480: note = Description of Artificial Sequence: Synthetic polypeptide; note = XENP021582 2A11_H1_L2.91_Fab-1G6_L1.194_H1.279 scFv-Fc Heavy Chain

SEQ ID NO: 24461 - protein, 107 aa, synthetic construct; identical to SEQ ID NO: 10999
  source 1..107: note = Description of Artificial Sequence: Synthetic polypeptide; note = VH of XENP021582

SEQ ID NO: 24462 - protein, 122 aa, synthetic construct; identical to SEQ ID NO: 10908
  source 1..122: note = Description of Artificial Sequence: Synthetic polypeptide; note = VL of XENP021582

SEQ ID NO: 24463 - protein, 231 aa, synthetic construct; identical to SEQ ID NO: 21532
  source 1..231: note = Description of Artificial Sequence: Synthetic polypeptide; note = Fc chain of XENP021582

SEQ ID NO: 24464 - protein, 11 aa, synthetic construct
  source 1..11: note = Description of Artificial Sequence: Synthetic peptide; note = XENP021582 vhCDR1
RASQSVGNDVA

SEQ ID NO: 24465 - protein, 7 aa, synthetic construct
  source 1..7: note = Description of Artificial Sequence: Synthetic peptide; note = XENP021582 vhCDR2
YASHRYT

SEQ ID NO: 24466 - protein, 9 aa, synthetic construct
  source 1..9: note = Description of Artificial Sequence: Synthetic peptide; note = XENP021582 vhCDR3
QQDFSSPRT

SEQ ID NO: 24467 - protein, 5 aa, synthetic construct
  source 1..5: note = Description of Artificial Sequence: Synthetic peptide; note = XENP021582 vlCDR1
NYWMN

SEQ ID NO: 24468 - protein, 19 aa, synthetic construct
  source 1..19: note = Description of Artificial Sequence: Synthetic peptide; note = XENP021582 vlCDR2
EIRLYSNNYATHYAESVKG

SEQ ID NO: 24469 - protein, 11 aa, synthetic construct
  source 1..11: note = Description of Artificial Sequence: Synthetic peptide; note = XENP021582 vlCDR3
YYGNYGGYFDV

SEQ ID NO: 24470 - protein, 214 aa, synthetic construct
  source 1..214: note = Description of Artificial Sequence: Synthetic polypeptide; note = XENP021582 2A11_H1_L2.91_Fab-1G6_L1.194_H1.279 Light Chain
DIQMTQSPAFLSVTPGEKVTITCQASQDIGNYLNWFQQKPGQTVKLLIYYTSRLHSGVPSRFSGSGSGTDYTFTISSLEAEDAATYFCQQGNTLPYTFGGGTKVEIKRTVAAPSVFIFPPSDEQLKSGTASVVCLLNNFYPREAKVQWKVDNALQSGNSQESVTEQDSKDSTYSLSSTLTLSKADYEKHKVYACEVTHQGLSSPVTKSFNRGEC

SEQ ID NO: 24471 - protein, 107 aa, synthetic construct
  source 1..107: note = Description of Artificial Sequence: Synthetic polypeptide; note = VL of XENP021582
DIQMTQSPAFLSVTPGEKVTITCQASQDIGNYLNWFQQKPGQTVKLLIYYTSRLHSGVPSRFSGSGSGTDYTFTISSLEAEDAATYFCQQGNTLPYTFGGGTKVEIK

SEQ ID NO: 24472 - protein, 11 aa, synthetic construct
  source 1..11: note = Description of Artificial Sequence: Synthetic peptide; note = XENP021582 vlCDR1
QASQDIGNYLN

SEQ ID NO: 24473 - protein, 7 aa, synthetic construct
  source 1..7: note = Description of Artificial Sequence: Synthetic peptide; note = XENP021582 vlCDR2
YTSRLHS

SEQ ID NO: 24474 - protein, 9 aa, synthetic construct
  source 1..9: note = Description of Artificial Sequence: Synthetic peptide; note = XENP021582 vlCDR3
QQGNTLPYT

SEQ ID NO: 24475 - protein, 447 aa, synthetic construct; identical to SEQ ID NO: 17235
  source 1..447: note = Description of Artificial Sequence: Synthetic polypeptide; note = XENP021583 2A11_H1_L2.92_Fab-1G6_L1.194_H1.279 Fab-Fc Heavy Chain

SEQ ID NO: 24476 - protein, 118 aa, synthetic construct; identical to SEQ ID NO: 17236
  source 1..118: note = Description of Artificial Sequence: Synthetic polypeptide; note = VH of XENP021583

SEQ ID NO: 24477 - protein, 5 aa, synthetic construct
  source 1..5: note = Description of Artificial Sequence: Synthetic peptide; note = XENP021583 vhCDR1
DYYMH

SEQ ID NO: 24478 - protein, 17 aa, synthetic construct
  source 1..17: note = Description of Artificial Sequence: Synthetic peptide; note = XENP021583 vhCDR2
WIDPENGDTEYAPKFQG

SEQ ID NO: 24479 - protein, 9 aa, synthetic construct
  source 1..9: note = Description of Artificial Sequence: Synthetic peptide; note = XENP021583 vhCDR3
RGVRQALDY

SEQ ID NO: 24480 - protein, 480 aa, synthetic construct; identical to SEQ ID NO: 23221
  source 1..480: note = Description of Artificial Sequence: Synthetic polypeptide; note = XENP021583 2A11_H1_L2.92_Fab-1G6_L1.194_H1.279 scFv-Fc Heavy Chain

SEQ ID NO: 24481 - protein, 107 aa, synthetic construct; identical to SEQ ID NO: 10999
  source 1..107: note = Description of Artificial Sequence: Synthetic polypeptide; note = VH of XENP021583

SEQ ID NO: 24482 - protein, 122 aa, synthetic construct; identical to SEQ ID NO: 10908
  source 1..122: note = Description of Artificial Sequence: Synthetic polypeptide; note = VL of XENP021583

SEQ ID NO: 24483 - protein, 231 aa, synthetic construct; identical to SEQ ID NO: 21532
  source 1..231: note = Description of Artificial Sequence: Synthetic polypeptide; note = Fc chain of XENP021583

SEQ ID NO: 24484 - protein, 11 aa, synthetic construct
  source 1..11: note = Description of Artificial Sequence: Synthetic peptide; note = XENP021583 vhCDR1
RASQSVGNDVA

SEQ ID NO: 24485 - protein, 7 aa, synthetic construct
  source 1..7: note = Description of Artificial Sequence: Synthetic peptide; note = XENP021583 vhCDR2
YASHRYT

SEQ ID NO: 24486 - protein, 9 aa, synthetic construct
  source 1..9: note = Description of Artificial Sequence: Synthetic peptide; note = XENP021583 vhCDR3
QQDFSSPRT

SEQ ID NO: 24487 - protein, 5 aa, synthetic construct
  source 1..5: note = Description of Artificial Sequence: Synthetic peptide; note = XENP021583 vlCDR1
NYWMN

SEQ ID NO: 24488 - protein, 19 aa, synthetic construct
  source 1..19: note = Description of Artificial Sequence: Synthetic peptide; note = XENP021583 vlCDR2
EIRLYSNNYATHYAESVKG

SEQ ID NO: 24489 - protein, 11 aa, synthetic construct
  source 1..11: note = Description of Artificial Sequence: Synthetic peptide; note = XENP021583 vlCDR3
YYGNYGGYFDV

SEQ ID NO: 24490 - protein, 214 aa, synthetic construct
  source 1..214: note = Description of Artificial Sequence: Synthetic polypeptide; note = XENP021583 2A11_H1_L2.92_Fab-1G6_L1.194_H1.279 Light Chain
DIQMTQSPAFLSVTPGEKVTITCQASQDIGNYLNWFQQKPDQSVKLLIYYTSRLHSGVPSRFSGSGSGTDYTFTISSLEAEDAATYFCQQGNTLPYTFGGGTKVEIKRTVAAPSVFIFPPSDEQLKSGTASVVCLLNNFYPREAKVQWKVDNALQSGNSQESVTEQDSKDSTYSLSSTLTLSKADYEKHKVYACEVTHQGLSSPVTKSFNRGEC

SEQ ID NO: 24491 - protein, 107 aa, synthetic construct
  source 1..107: note = Description of Artificial Sequence: Synthetic polypeptide; note = VL of XENP021583
DIQMTQSPAFLSVTPGEKVTITCQASQDIGNYLNWFQQKPDQSVKLLIYYTSRLHSGVPSRFSGSGSGTDYTFTISSLEAEDAATYFCQQGNTLPYTFGGGTKVEIK

SEQ ID NO: 24492 - protein, 11 aa, synthetic construct
  source 1..11: note = Description of Artificial Sequence: Synthetic peptide; note = XENP021583 vlCDR1
QASQDIGNYLN

SEQ ID NO: 24493 - protein, 7 aa, synthetic construct
  source 1..7: note = Description of Artificial Sequence: Synthetic peptide; note = XENP021583 vlCDR2
YTSRLHS

SEQ ID NO: 24494 - protein, 9 aa, synthetic construct
  source 1..9: note = Description of Artificial Sequence: Synthetic peptide; note = XENP021583 vlCDR3
QQGNTLPYT

SEQ ID NO: 24495 - protein, 447 aa, synthetic construct; identical to SEQ ID NO: 17235
  source 1..447: note = Description of Artificial Sequence: Synthetic polypeptide; note = XENP021584 2A11_H1_L2.93_Fab-1G6_L1.194_H1.279 Fab-Fc Heavy Chain

SEQ ID NO: 24496 - protein, 118 aa, synthetic construct; identical to SEQ ID NO: 17236
  source 1..118: note = Description of Artificial Sequence: Synthetic polypeptide; note = VH of XENP021584

SEQ ID NO: 24497 - protein, 5 aa, synthetic construct
  source 1..5: note = Description of Artificial Sequence: Synthetic peptide; note = XENP021584 vhCDR1
DYYMH

SEQ ID NO: 24498 - protein, 17 aa, synthetic construct
  source 1..17: note = Description of Artificial Sequence: Synthetic peptide; note = XENP021584 vhCDR2
WIDPENGDTEYAPKFQG

SEQ ID NO: 24499 - protein, 9 aa, synthetic construct
  source 1..9: note = Description of Artificial Sequence: Synthetic peptide; note = XENP021584 vhCDR3
RGVRQALDY

SEQ ID NO: 24500 - protein, 480 aa, synthetic construct; identical to SEQ ID NO: 23221
  source 1..480: note = Description of Artificial Sequence: Synthetic polypeptide; note = XENP021584 2A11_H1_L2.93_Fab-1G6_L1.194_H1.279 scFv-Fc Heavy Chain

SEQ ID NO: 24501 - protein, 107 aa, synthetic construct; identical to SEQ ID NO: 10999
  source 1..107: note = Description of Artificial Sequence: Synthetic polypeptide; note = VH of XENP021584

SEQ ID NO: 24502 - protein, 122 aa, synthetic construct; identical to SEQ ID NO: 10908
  source 1..122: note = Description of Artificial Sequence: Synthetic polypeptide; note = VL of XENP021584

SEQ ID NO: 24503 - protein, 231 aa, synthetic construct; identical to SEQ ID NO: 21532
  source 1..231: note = Description of Artificial Sequence: Synthetic polypeptide; note = Fc chain of XENP021584

SEQ ID NO: 24504 - protein, 11 aa, synthetic construct
  source 1..11: note = Description of Artificial Sequence: Synthetic peptide; note = XENP021584 vhCDR1
RASQSVGNDVA

SEQ ID NO: 24505 - protein, 7 aa, synthetic construct
  source 1..7: note = Description of Artificial Sequence: Synthetic peptide; note = XENP021584 vhCDR2
YASHRYT

SEQ ID NO: 24506 - protein, 9 aa, synthetic construct
  source 1..9: note = Description of Artificial Sequence: Synthetic peptide; note = XENP021584 vhCDR3
QQDFSSPRT

SEQ ID NO: 24507 - protein, 5 aa, synthetic construct
  source 1..5: note = Description of Artificial Sequence: Synthetic peptide; note = XENP021584 vlCDR1
NYWMN

SEQ ID NO: 24508 - protein, 19 aa, synthetic construct
  source 1..19: note = Description of Artificial Sequence: Synthetic peptide; note = XENP021584 vlCDR2
EIRLYSNNYATHYAESVKG

SEQ ID NO: 24509 - protein, 11 aa, synthetic construct
  source 1..11: note = Description of Artificial Sequence: Synthetic peptide; note = XENP021584 vlCDR3
YYGNYGGYFDV

SEQ ID NO: 24510 - protein, 214 aa, synthetic construct
  source 1..214: note = Description of Artificial Sequence: Synthetic polypeptide; note = XENP021584 2A11_H1_L2.93_Fab-1G6_L1.194_H1.279 Light Chain
DIQMTQSPAFLSVTPGEKVTITCQASQDIGNYLNWFQQKPDQTPKLLIYYTSRLHSGVPSRFSGSGSGTDYTFTISSLEAEDAATYFCQQGNTLPYTFGGGTKVEIKRTVAAPSVFIFPPSDEQLKSGTASVVCLLNNFYPREAKVQWKVDNALQSGNSQESVTEQDSKDSTYSLSSTLTLSKADYEKHKVYACEVTHQGLSSPVTKSFNRGEC

SEQ ID NO: 24511 - protein, 107 aa, synthetic construct
  source 1..107: note = Description of Artificial Sequence: Synthetic polypeptide; note = VL of XENP021584
DIQMTQSPAFLSVTPGEKVTITCQASQDIGNYLNWFQQKPDQTPKLLIYYTSRLHSGVPSRFSGSGSGTDYTFTISSLEAEDAATYFCQQGNTLPYTFGGGTKVEIK

SEQ ID NO: 24512 - protein, 11 aa, synthetic construct
  source 1..11: note = Description of Artificial Sequence: Synthetic peptide; note = XENP021584 vlCDR1
QASQDIGNYLN

SEQ ID NO: 24513 - protein, 7 aa, synthetic construct
  source 1..7: note = Description of Artificial Sequence: Synthetic peptide; note = XENP021584 vlCDR2
YTSRLHS

SEQ ID NO: 24514 - protein, 9 aa, synthetic construct
  source 1..9: note = Description of Artificial Sequence: Synthetic peptide; note = XENP021584 vlCDR3
QQGNTLPYT

SEQ ID NO: 24515 - protein, 447 aa, synthetic construct; identical to SEQ ID NO: 17235
  source 1..447: note = Description of Artificial Sequence: Synthetic polypeptide; note = XENP021585 2A11_H1_L2.94_Fab-1G6_L1.194_H1.279 Fab-Fc Heavy Chain

SEQ ID NO: 24516 - protein, 118 aa, synthetic construct; identical to SEQ ID NO: 17236
  source 1..118: note = Description of Artificial Sequence: Synthetic polypeptide; note = VH of XENP021585

SEQ ID NO: 24517 - protein, 5 aa, synthetic construct
  source 1..5: note = Description of Artificial Sequence: Synthetic peptide; note = XENP021585 vhCDR1
DYYMH

SEQ ID NO: 24518 - protein, 17 aa, synthetic construct
  source 1..17: note = Description of Artificial Sequence: Synthetic peptide; note = XENP021585 vhCDR2
WIDPENGDTEYAPKFQG

SEQ ID NO: 24519 - protein, 9 aa, synthetic construct
  source 1..9: note = Description of Artificial Sequence: Synthetic peptide; note = XENP021585 vhCDR3
RGVRQALDY

SEQ ID NO: 24520 - protein, 480 aa, synthetic construct; identical to SEQ ID NO: 23221
  source 1..480: note = Description of Artificial Sequence: Synthetic polypeptide; note = XENP021585 2A11_H1_L2.94_Fab-1G6_L1.194_H1.279 scFv-Fc Heavy Chain

SEQ ID NO: 24521 - protein, 107 aa, synthetic construct; identical to SEQ ID NO: 10999
  source 1..107: note = Description of Artificial Sequence: Synthetic polypeptide; note = VH of XENP021585

SEQ ID NO: 24522 - protein, 122 aa, synthetic construct; identical to SEQ ID NO: 10908
  source 1..122: note = Description of Artificial Sequence: Synthetic polypeptide; note = VL of XENP021585

SEQ ID NO: 24523 - protein, 231 aa, synthetic construct; identical to SEQ ID NO: 21532
  source 1..231: note = Description of Artificial Sequence: Synthetic polypeptide; note = Fc chain of XENP021585

SEQ ID NO: 24524 - protein, 11 aa, synthetic construct
  source 1..11: note = Description of Artificial Sequence: Synthetic peptide; note = XENP021585 vhCDR1
RASQSVGNDVA

SEQ ID NO: 24525 - protein, 7 aa, synthetic construct
  source 1..7: note = Description of Artificial Sequence: Synthetic peptide; note = XENP021585 vhCDR2
YASHRYT

SEQ ID NO: 24526 - protein, 9 aa, synthetic construct
  source 1..9: note = Description of Artificial Sequence: Synthetic peptide; note = XENP021585 vhCDR3
QQDFSSPRT

SEQ ID NO: 24527 - protein, 5 aa, synthetic construct
  source 1..5: note = Description of Artificial Sequence: Synthetic peptide; note = XENP021585 vlCDR1
NYWMN

SEQ ID NO: 24528 - protein, 19 aa, synthetic construct
  source 1..19: note = Description of Artificial Sequence: Synthetic peptide; note = XENP021585 vlCDR2
EIRLYSNNYATHYAESVKG

SEQ ID NO: 24529 - protein, 11 aa, synthetic construct
  source 1..11: note = Description of Artificial Sequence: Synthetic peptide; note = XENP021585 vlCDR3
YYGNYGGYFDV

SEQ ID NO: 24530 - protein, 214 aa, synthetic construct
  source 1..214: note = Description of Artificial Sequence: Synthetic polypeptide; note = XENP021585 2A11_H1_L2.94_Fab-1G6_L1.194_H1.279 Light Chain
DIQMTQSPAFLSVTPGEKVTITCQASQDIGNYLNWFQQKPDQTVKLLIYYTSRLHSGVPSRFSGSGSGTDYTFTISSLEAEDAATYYCQQGNTLPYTFGGGTKVEIKRTVAAPSVFIFPPSDEQLKSGTASVVCLLNNFYPREAKVQWKVDNALQSGNSQESVTEQDSKDSTYSLSSTLTLSKADYEKHKVYACEVTHQGLSSPVTKSFNRGEC

SEQ ID NO: 24531 - protein, 107 aa, synthetic construct
  source 1..107: note = Description of Artificial Sequence: Synthetic polypeptide; note = VL of XENP021585
DIQMTQSPAFLSVTPGEKVTITCQASQDIGNYLNWFQQKPDQTVKLLIYYTSRLHSGVPSRFSGSGSGTDYTFTISSLEAEDAATYYCQQGNTLPYTFGGGTKVEIK

SEQ ID NO: 24532 - protein, 11 aa, synthetic construct
  source 1..11: note = Description of Artificial Sequence: Synthetic peptide; note = XENP021585 vlCDR1
QASQDIGNYLN

SEQ ID NO: 24533 - protein, 7 aa, synthetic construct
  source 1..7: note = Description of Artificial Sequence: Synthetic peptide; note = XENP021585 vlCDR2
YTSRLHS

SEQ ID NO: 24534 - protein, 9 aa, synthetic construct
  source 1..9: note = Description of Artificial Sequence: Synthetic peptide; note = XENP021585 vlCDR3
QQGNTLPYT

SEQ ID NO: 24535 - protein, 447 aa, synthetic construct; identical to SEQ ID NO: 17235
  source 1..447: note = Description of Artificial Sequence: Synthetic polypeptide; note = XENP021586 2A11_H1_L2.95_Fab-1G6_L1.194_H1.279 Fab-Fc Heavy Chain

SEQ ID NO: 24536 - protein, 118 aa, synthetic construct; identical to SEQ ID NO: 17236
  source 1..118: note = Description of Artificial Sequence: Synthetic polypeptide; note = VH of XENP021586

SEQ ID NO: 24537 - protein, 5 aa, synthetic construct
  source 1..5: note = Description of Artificial Sequence: Synthetic peptide; note = XENP021586 vhCDR1
DYYMH

SEQ ID NO: 24538 - protein, 17 aa, synthetic construct
  source 1..17: note = Description of Artificial Sequence: Synthetic peptide; note = XENP021586 vhCDR2
WIDPENGDTEYAPKFQG

SEQ ID NO: 24539 - protein, 9 aa, synthetic construct
  source 1..9: note = Description of Artificial Sequence: Synthetic peptide; note = XENP021586 vhCDR3
RGVRQALDY

SEQ ID NO: 24540 - protein, 480 aa, synthetic construct; identical to SEQ ID NO: 23221
  source 1..480: note = Description of Artificial Sequence: Synthetic polypeptide; note = XENP021586 2A11_H1_L2.95_Fab-1G6_L1.194_H1.279 scFv-Fc Heavy Chain

SEQ ID NO: 24541 - protein, 107 aa, synthetic construct; identical to SEQ ID NO: 10999
  source 1..107: note = Description of Artificial Sequence: Synthetic polypeptide; note = VH of XENP021586

SEQ ID NO: 24542 - protein, 122 aa, synthetic construct; identical to SEQ ID NO: 10908
  source 1..122: note = Description of Artificial Sequence: Synthetic polypeptide; note = VL of XENP021586

SEQ ID NO: 24543 - protein, 231 aa, synthetic construct; identical to SEQ ID NO: 21532
  source 1..231: note = Description of Artificial Sequence: Synthetic polypeptide; note = Fc chain of XENP021586

SEQ ID NO: 24544 - protein, 11 aa, synthetic construct
  source 1..11: note = Description of Artificial Sequence: Synthetic peptide; note = XENP021586 vhCDR1
RASQSVGNDVA

SEQ ID NO: 24545 - protein, 7 aa, synthetic construct
  source 1..7: note = Description of Artificial Sequence: Synthetic peptide; note = XENP021586 vhCDR2
YASHRYT

SEQ ID NO: 24546 - protein, 9 aa, synthetic construct
  source 1..9: note = Description of Artificial Sequence: Synthetic peptide; note = XENP021586 vhCDR3
QQDFSSPRT

SEQ ID NO: 24547 - protein, 5 aa, synthetic construct
  source 1..5: note = Description of Artificial Sequence: Synthetic peptide; note = XENP021586 vlCDR1
NYWMN

SEQ ID NO: 24548 - protein, 19 aa, synthetic construct
  source 1..19: note = Description of Artificial Sequence: Synthetic peptide; note = XENP021586 vlCDR2
EIRLYSNNYATHYAESVKG

SEQ ID NO: 24549 - protein, 11 aa, synthetic construct
  source 1..11: note = Description of Artificial Sequence: Synthetic peptide; note = XENP021586 vlCDR3
YYGNYGGYFDV

SEQ ID NO: 24550 - protein, 214 aa, synthetic construct
  source 1..214: note = Description of Artificial Sequence: Synthetic polypeptide; note = XENP021586 2A11_H1_L2.95_Fab-1G6_L1.194_H1.279 Light Chain
DIQMTQSPAFLSVTPGEKVTITCQASQDIGNYLNWYQQKPDQTPKLLIYYTSRLHSGVPSRFSGSGSGTDYTFTISSLEAEDAATYFCQQGNTLPYTFGGGTKVEIKRTVAAPSVFIFPPSDEQLKSGTASVVCLLNNFYPREAKVQWKVDNALQSGNSQESVTEQDSKDSTYSLSSTLTLSKADYEKHKVYACEVTHQGLSSPVTKSFNRGEC

SEQ ID NO: 24551 - protein, 107 aa, synthetic construct
  source 1..107: note = Description of Artificial Sequence: Synthetic polypeptide; note = VL of XENP021586
DIQMTQSPAFLSVTPGEKVTITCQASQDIGNYLNWYQQKPDQTPKLLIYYTSRLHSGVPSRFSGSGSGTDYTFTISSLEAEDAATYFCQQGNTLPYTFGGGTKVEIK

SEQ ID NO: 24552 - protein, 11 aa, synthetic construct
  source 1..11: note = Description of Artificial Sequence: Synthetic peptide; note = XENP021586 vlCDR1
QASQDIGNYLN

SEQ ID NO: 24553 - protein, 7 aa, synthetic construct
  source 1..7: note = Description of Artificial Sequence: Synthetic peptide; note = XENP021586 vlCDR2
YTSRLHS

SEQ ID NO: 24554 - protein, 9 aa, synthetic construct
  source 1..9: note = Description of Artificial Sequence: Synthetic peptide; note = XENP021586 vlCDR3
QQGNTLPYT

SEQ ID NO: 24555 - protein, 447 aa, synthetic construct; identical to SEQ ID NO: 17235
  source 1..447: note = Description of Artificial Sequence: Synthetic polypeptide; note = XENP021587 2A11_H1_L2.96_Fab-1G6_L1.194_H1.279 Fab-Fc Heavy Chain

SEQ ID NO: 24556 - protein, 118 aa, synthetic construct; identical to SEQ ID NO: 17236
  source 1..118: note = Description of Artificial Sequence: Synthetic polypeptide; note = VH of XENP021587

SEQ ID NO: 24557 - protein, 5 aa, synthetic construct
  source 1..5: note = Description of Artificial Sequence: Synthetic peptide; note = XENP021587 vhCDR1
DYYMH

SEQ ID NO: 24558 - protein, 17 aa, synthetic construct
  source 1..17: note = Description of Artificial Sequence: Synthetic peptide; note = XENP021587 vhCDR2
WIDPENGDTEYAPKFQG

SEQ ID NO: 24559 - protein, 9 aa, synthetic construct
  source 1..9: note = Description of Artificial Sequence: Synthetic peptide; note = XENP021587 vhCDR3
RGVRQALDY

SEQ ID NO: 24560 - protein, 480 aa, synthetic construct; identical to SEQ ID NO: 23221
  source 1..480: note = Description of Artificial Sequence: Synthetic polypeptide; note = XENP021587 2A11_H1_L2.96_Fab-1G6_L1.194_H1.279 scFv-Fc Heavy Chain

SEQ ID NO: 24561 - protein, 107 aa, synthetic construct; identical to SEQ ID NO: 10999
  source 1..107: note = Description of Artificial Sequence: Synthetic polypeptide; note = VH of XENP021587

SEQ ID NO: 24562 - protein, 122 aa, synthetic construct; identical to SEQ ID NO: 10908
  source 1..122: note = Description of Artificial Sequence: Synthetic polypeptide; note = VL of XENP021587

SEQ ID NO: 24563 - protein, 231 aa, synthetic construct; identical to SEQ ID NO: 21532
  source 1..231: note = Description of Artificial Sequence: Synthetic polypeptide; note = Fc chain of XENP021587

SEQ ID NO: 24564 - protein, 11 aa, synthetic construct
  source 1..11: note = Description of Artificial Sequence: Synthetic peptide; note = XENP021587 vhCDR1
RASQSVGNDVA

SEQ ID NO: 24565 - protein, 7 aa, synthetic construct
  source 1..7: note = Description of Artificial Sequence: Synthetic peptide; note = XENP021587 vhCDR2
YASHRYT

SEQ ID NO: 24566 - protein, 9 aa, synthetic construct
  source 1..9: note = Description of Artificial Sequence: Synthetic peptide; note = XENP021587 vhCDR3
QQDFSSPRT

SEQ ID NO: 24567 - protein, 5 aa, synthetic construct
  source 1..5: note = Description of Artificial Sequence: Synthetic peptide; note = XENP021587 vlCDR1
NYWMN

SEQ ID NO: 24568 - protein, 19 aa, synthetic construct
  source 1..19: note = Description of Artificial Sequence: Synthetic peptide; note = XENP021587 vlCDR2
EIRLYSNNYATHYAESVKG

SEQ ID NO: 24569 - protein, 11 aa, synthetic construct
  source 1..11: note = Description of Artificial Sequence: Synthetic peptide; note = XENP021587 vlCDR3
YYGNYGGYFDV

SEQ ID NO: 24570 - protein, 214 aa, synthetic construct
  source 1..214: note = Description of Artificial Sequence: Synthetic polypeptide; note = XENP021587 2A11_H1_L2.96_Fab-1G6_L1.194_H1.279 Light Chain
DIQMTQSPAFLSVTPGEKVTITCQASQDIGNYLNWYQQKPDQTPKLLIYYTSRLHSGVPSRFSGSGSGTDYTFTISSLEAEDAATYYCQQGNTLPYTFGGGTKVEIKRTVAAPSVFIFPPSDEQLKSGTASVVCLLNNFYPREAKVQWKVDNALQSGNSQESVTEQDSKDSTYSLSSTLTLSKADYEKHKVYACEVTHQGLSSPVTKSFNRGEC

SEQ ID NO: 24571 - protein, 107 aa, synthetic construct
  source 1..107: note = Description of Artificial Sequence: Synthetic polypeptide; note = VL of XENP021587
DIQMTQSPAFLSVTPGEKVTITCQASQDIGNYLNWYQQKPDQTPKLLIYYTSRLHSGVPSRFSGSGSGTDYTFTISSLEAEDAATYYCQQGNTLPYTFGGGTKVEIK

SEQ ID NO: 24572 - protein, 11 aa, synthetic construct
  source 1..11: note = Description of Artificial Sequence: Synthetic peptide; note = XENP021587 vlCDR1
QASQDIGNYLN

SEQ ID NO: 24573 - protein, 7 aa, synthetic construct
  source 1..7: note = Description of Artificial Sequence: Synthetic peptide; note = XENP021587 vlCDR2
YTSRLHS

SEQ ID NO: 24574 - protein, 9 aa, synthetic construct
  source 1..9: note = Description of Artificial Sequence: Synthetic peptide; note = XENP021587 vlCDR3
QQGNTLPYT

SEQ ID NO: 24575 - protein, 447 aa, synthetic construct; identical to SEQ ID NO: 17235
  source 1..447: note = Description of Artificial Sequence: Synthetic polypeptide; note = XENP021588 2A11_H1_L2.97_Fab-1G6_L1.194_H1.279 Fab-Fc Heavy Chain

SEQ ID NO: 24576 - protein, 118 aa, synthetic construct; identical to SEQ ID NO: 17236
  source 1..118: note = Description of Artificial Sequence: Synthetic polypeptide; note = VH of XENP021588

SEQ ID NO: 24577 - protein, 5 aa, synthetic construct
  source 1..5: note = Description of Artificial Sequence: Synthetic peptide; note = XENP021588 vhCDR1
DYYMH

SEQ ID NO: 24578 - protein, 17 aa, synthetic construct
  source 1..17: note = Description of Artificial Sequence: Synthetic peptide; note = XENP021588 vhCDR2
WIDPENGDTEYAPKFQG

SEQ ID NO: 24579 - protein, 9 aa, synthetic construct
  source 1..9: note = Description of Artificial Sequence: Synthetic peptide; note = XENP021588 vhCDR3
RGVRQALDY

SEQ ID NO: 24580 - protein, 480 aa, synthetic construct; identical to SEQ ID NO: 23221
  source 1..480: note = Description of Artificial Sequence: Synthetic polypeptide; note = XENP021588 2A11_H1_L2.97_Fab-1G6_L1.194_H1.279 scFv-Fc Heavy Chain

SEQ ID NO: 24581 - protein, 107 aa, synthetic construct; identical to SEQ ID NO: 10999
  source 1..107: note = Description of Artificial Sequence: Synthetic polypeptide; note = VH of XENP021588

SEQ ID NO: 24582 - protein, 122 aa, synthetic construct; identical to SEQ ID NO: 10908
  source 1..122: note = Description of Artificial Sequence: Synthetic polypeptide; note = VL of XENP021588

SEQ ID NO: 24583 - protein, 231 aa, synthetic construct; identical to SEQ ID NO: 21532
  source 1..231: note = Description of Artificial Sequence: Synthetic polypeptide; note = Fc chain of XENP021588

SEQ ID NO: 24584 - protein, 11 aa, synthetic construct
  source 1..11: note = Description of Artificial Sequence: Synthetic peptide; note = XENP021588 vhCDR1
RASQSVGNDVA

SEQ ID NO: 24585 - protein, 7 aa, synthetic construct
  source 1..7: note = Description of Artificial Sequence: Synthetic peptide; note = XENP021588 vhCDR2
YASHRYT

SEQ ID NO: 24586 - protein, 9 aa, synthetic construct
  source 1..9: note = Description of Artificial Sequence: Synthetic peptide; note = XENP021588 vhCDR3
QQDFSSPRT

SEQ ID NO: 24587 - protein, 5 aa, synthetic construct
  source 1..5: note = Description of Artificial Sequence: Synthetic peptide; note = XENP021588 vlCDR1
NYWMN

SEQ ID NO: 24588 - protein, 19 aa, synthetic construct
  source 1..19: note = Description of Artificial Sequence: Synthetic peptide; note = XENP021588 vlCDR2
EIRLYSNNYATHYAESVKG

SEQ ID NO: 24589 - protein, 11 aa, synthetic construct
  source 1..11: note = Description of Artificial Sequence: Synthetic peptide; note = XENP021588 vlCDR3
YYGNYGGYFDV

SEQ ID NO: 24590 - protein, 214 aa, synthetic construct
  source 1..214: note = Description of Artificial Sequence: Synthetic polypeptide; note = XENP021588 2A11_H1_L2.97_Fab-1G6_L1.194_H1.279 Light Chain
DIQMTQSPAFLSVTPGEKVTITCQASQDIGNYLNWFQQKPDQTPKLLIYYTSRLHSGVPSRFSGSGSGTDYTFTISSLEAEDAATYYCQQGNTLPYTFGGGTKVEIKRTVAAPSVFIFPPSDEQLKSGTASVVCLLNNFYPREAKVQWKVDNALQSGNSQESVTEQDSKDSTYSLSSTLTLSKADYEKHKVYACEVTHQGLSSPVTKSFNRGEC

SEQ ID NO: 24591 - protein, 107 aa, synthetic construct
  source 1..107: note = Description of Artificial Sequence: Synthetic polypeptide; note = VL of XENP021588
DIQMTQSPAFLSVTPGEKVTITCQASQDIGNYLNWFQQKPDQTPKLLIYYTSRLHSGVPSRFSGSGSGTDYTFTISSLEAEDAATYYCQQGNTLPYTFGGGTKVEIK

SEQ ID NO: 24592 - protein, 11 aa, synthetic construct
  source 1..11: note = Description of Artificial Sequence: Synthetic peptide; note = XENP021588 vlCDR1
QASQDIGNYLN

SEQ ID NO: 24593 - protein, 7 aa, synthetic construct
  source 1..7: note = Description of Artificial Sequence: Synthetic peptide; note = XENP021588 vlCDR2
YTSRLHS

SEQ ID NO: 24594 - protein, 9 aa, synthetic construct
  source 1..9: note = Description of Artificial Sequence: Synthetic peptide; note = XENP021588 vlCDR3
QQGNTLPYT

SEQ ID NO: 24595 - protein, 447 aa, synthetic construct; identical to SEQ ID NO: 17235
  source 1..447: note = Description of Artificial Sequence: Synthetic polypeptide; note = XENP021589 2A11_H1_L2.98_Fab-1G6_L1.194_H1.279 Fab-Fc Heavy Chain

SEQ ID NO: 24596 - protein, 118 aa, synthetic construct; identical to SEQ ID NO: 17236
  source 1..118: note = Description of Artificial Sequence: Synthetic polypeptide; note = VH of XENP021589

SEQ ID NO: 24597 - protein, 5 aa, synthetic construct
  source 1..5: note = Description of Artificial Sequence: Synthetic peptide; note = XENP021589 vhCDR1
DYYMH

SEQ ID NO: 24598 - protein, 17 aa, synthetic construct
  source 1..17: note = Description of Artificial Sequence: Synthetic peptide; note = XENP021589 vhCDR2
WIDPENGDTEYAPKFQG

SEQ ID NO: 24599 - protein, 9 aa, synthetic construct
  source 1..9: note = Description of Artificial Sequence: Synthetic peptide; note = XENP021589 vhCDR3
RGVRQALDY

SEQ ID NO: 24600 - protein, 480 aa, synthetic construct; identical to SEQ ID NO: 23221
  source 1..480: note = Description of Artificial Sequence: Synthetic polypeptide; note = XENP021589 2A11_H1_L2.98_Fab-1G6_L1.194_H1.279 scFv-Fc Heavy Chain

SEQ ID NO: 24601 - protein, 107 aa, synthetic construct; identical to SEQ ID NO: 10999
  source 1..107: note = Description of Artificial Sequence: Synthetic polypeptide; note = VH of XENP021589

SEQ ID NO: 24602 - protein, 122 aa, synthetic construct; identical to SEQ ID NO: 10908
  source 1..122: note = Description of Artificial Sequence: Synthetic polypeptide; note = VL of XENP021589

SEQ ID NO: 24603 - protein, 231 aa, synthetic construct; identical to SEQ ID NO: 21532
  source 1..231: note = Description of Artificial Sequence: Synthetic polypeptide; note = Fc chain of XENP021589

SEQ ID NO: 24604 - protein, 11 aa, synthetic construct
  source 1..11: note = Description of Artificial Sequence: Synthetic peptide; note = XENP021589 vhCDR1
RASQSVGNDVA

SEQ ID NO: 24605 - protein, 7 aa, synthetic construct
  source 1..7: note = Description of Artificial Sequence: Synthetic peptide; note = XENP021589 vhCDR2
YASHRYT

SEQ ID NO: 24606 - protein, 9 aa, synthetic construct
  source 1..9: note = Description of Artificial Sequence: Synthetic peptide; note = XENP021589 vhCDR3
QQDFSSPRT

SEQ ID NO: 24607 - protein, 5 aa, synthetic construct
  source 1..5: note = Description of Artificial Sequence: Synthetic peptide; note = XENP021589 vlCDR1
NYWMN

SEQ ID NO: 24608 - protein, 19 aa, synthetic construct
  source 1..19: note = Description of Artificial Sequence: Synthetic peptide; note = XENP021589 vlCDR2
EIRLYSNNYATHYAESVKG

SEQ ID NO: 24609 - protein, 11 aa, synthetic construct
  source 1..11: note = Description of Artificial Sequence: Synthetic peptide; note = XENP021589 vlCDR3
YYGNYGGYFDV

SEQ ID NO: 24610 - protein, 214 aa, synthetic construct
  source 1..214: note = Description of Artificial Sequence: Synthetic polypeptide; note = XENP021589 2A11_H1_L2.98_Fab-1G6_L1.194_H1.279 Light Chain
DIQMTQSPAFLSVTPGEKVTITCQASQDIGNYLNWYQQKPGQTPKLLIYYTSRLHSGVPSRFSGSGSGTDYTFTISSLEAEDAATYFCQQGNTLPYTFGGGTKVEIKRTVAAPSVFIFPPSDEQLKSGTASVVCLLNNFYPREAKVQWKVDNALQSGNSQESVTEQDSKDSTYSLSSTLTLSKADYEKHKVYACEVTHQGLSSPVTKSFNRGEC

SEQ ID NO: 24611 - protein, 107 aa, synthetic construct
  source 1..107: note = Description of Artificial Sequence: Synthetic polypeptide; note = VL of XENP021589
DIQMTQSPAFLSVTPGEKVTITCQASQDIGNYLNWYQQKPGQTPKLLIYYTSRLHSGVPSRFSGSGSGTDYTFTISSLEAEDAATYFCQQGNTLPYTFGGGTKVEIK

SEQ ID NO: 24612 - protein, 11 aa, synthetic construct
  source 1..11: note = Description of Artificial Sequence: Synthetic peptide; note = XENP021589 vlCDR1
QASQDIGNYLN

SEQ ID NO: 24613 - protein, 7 aa, synthetic construct
  source 1..7: note = Description of Artificial Sequence: Synthetic peptide; note = XENP021589 vlCDR2
YTSRLHS

SEQ ID NO: 24614 - protein, 9 aa, synthetic construct
  source 1..9: note = Description of Artificial Sequence: Synthetic peptide; note = XENP021589 vlCDR3
QQGNTLPYT

SEQ ID NO: 24615 - protein, 447 aa, synthetic construct; identical to SEQ ID NO: 17235
  source 1..447: note = Description of Artificial Sequence: Synthetic polypeptide; note = XENP021590 2A11_H1_L2.99_Fab-1G6_L1.194_H1.279 Fab-Fc Heavy  Chain

SEQ ID NO: 24616 - protein, 118 aa, synthetic construct; identical to SEQ ID NO: 17236
  source 1..118: note = Description of Artificial Sequence: Synthetic polypeptide; note = VH of XENP021590

SEQ ID NO: 24617 - protein, 5 aa, synthetic construct
  source 1..5: note = Description of Artificial Sequence: Synthetic peptide; note = XENP021590 vhCDR1
DYYMH

SEQ ID NO: 24618 - protein, 17 aa, synthetic construct
  source 1..17: note = Description of Artificial Sequence: Synthetic peptide; note = XENP021590 vhCDR2
WIDPENGDTEYAPKFQG

SEQ ID NO: 24619 - protein, 9 aa, synthetic construct
  source 1..9: note = Description of Artificial Sequence: Synthetic peptide; note = XENP021590 vhCDR3
RGVRQALDY

SEQ ID NO: 24620 - protein, 480 aa, synthetic construct; identical to SEQ ID NO: 23221
  source 1..480: note = Description of Artificial Sequence: Synthetic polypeptide; note = XENP021590 2A11_H1_L2.99_Fab-1G6_L1.194_H1.279 scFv-Fc Heavy Chain

SEQ ID NO: 24621 - protein, 107 aa, synthetic construct; identical to SEQ ID NO: 10999
  source 1..107: note = Description of Artificial Sequence: Synthetic polypeptide; note = VH of XENP021590

SEQ ID NO: 24622 - protein, 122 aa, synthetic construct; identical to SEQ ID NO: 10908
  source 1..122: note = Description of Artificial Sequence: Synthetic polypeptide; note = VL of XENP021590

SEQ ID NO: 24623 - protein, 231 aa, synthetic construct; identical to SEQ ID NO: 21532
  source 1..231: note = Description of Artificial Sequence: Synthetic polypeptide; note = Fc chain of XENP021590

SEQ ID NO: 24624 - protein, 11 aa, synthetic construct
  source 1..11: note = Description of Artificial Sequence: Synthetic peptide; note = XENP021590 vhCDR1
RASQSVGNDVA

SEQ ID NO: 24625 - protein, 7 aa, synthetic construct
  source 1..7: note = Description of Artificial Sequence: Synthetic peptide; note = XENP021590 vhCDR2
YASHRYT

SEQ ID NO: 24626 - protein, 9 aa, synthetic construct
  source 1..9: note = Description of Artificial Sequence: Synthetic peptide; note = XENP021590 vhCDR3
QQDFSSPRT

SEQ ID NO: 24627 - protein, 5 aa, synthetic construct
  source 1..5: note = Description of Artificial Sequence: Synthetic peptide; note = XENP021590 vlCDR1
NYWMN

SEQ ID NO: 24628 - protein, 19 aa, synthetic construct
  source 1..19: note = Description of Artificial Sequence: Synthetic peptide; note = XENP021590 vlCDR2
EIRLYSNNYATHYAESVKG

SEQ ID NO: 24629 - protein, 11 aa, synthetic construct
  source 1..11: note = Description of Artificial Sequence: Synthetic peptide; note = XENP021590 vlCDR3
YYGNYGGYFDV

SEQ ID NO: 24630 - protein, 214 aa, synthetic construct
  source 1..214: note = Description of Artificial Sequence: Synthetic polypeptide; note = XENP021590 2A11_H1_L2.99_Fab-1G6_L1.194_H1.279 Light Chain
DIQMTQSPAFLSVTPGEKVTITCQASQDIGNYLNWYQQKPGQTPKLLIYYTSRLHSGVPSRFSGSGSGTDYTFTISSLEAEDAATYYCQQGNTLPYTFGGGTKVEIKRTVAAPSVFIFPPSDEQLKSGTASVVCLLNNFYPREAKVQWKVDNALQSGNSQESVTEQDSKDSTYSLSSTLTLSKADYEKHKVYACEVTHQGLSSPVTKSFNRGEC

SEQ ID NO: 24631 - protein, 107 aa, synthetic construct
  source 1..107: note = Description of Artificial Sequence: Synthetic polypeptide; note = VL of XENP021590
DIQMTQSPAFLSVTPGEKVTITCQASQDIGNYLNWYQQKPGQTPKLLIYYTSRLHSGVPSRFSGSGSGTDYTFTISSLEAEDAATYYCQQGNTLPYTFGGGTKVEIK

SEQ ID NO: 24632 - protein, 11 aa, synthetic construct
  source 1..11: note = Description of Artificial Sequence: Synthetic peptide; note = XENP021590 vlCDR1
QASQDIGNYLN

SEQ ID NO: 24633 - protein, 7 aa, synthetic construct
  source 1..7: note = Description of Artificial Sequence: Synthetic peptide; note = XENP021590 vlCDR2
YTSRLHS

SEQ ID NO: 24634 - protein, 9 aa, synthetic construct
  source 1..9: note = Description of Artificial Sequence: Synthetic peptide; note = XENP021590 vlCDR3
QQGNTLPYT

SEQ ID NO: 24635 - protein, 447 aa, synthetic construct; identical to SEQ ID NO: 17235
  source 1..447: note = Description of Artificial Sequence: Synthetic polypeptide; note = XENP021591 2A11_H1_L2.100_Fab-1G6_L1.194_H1.279 Fab-Fc Heavy Chain

SEQ ID NO: 24636 - protein, 118 aa, synthetic construct; identical to SEQ ID NO: 17236
  source 1..118: note = Description of Artificial Sequence: Synthetic polypeptide; note = VH of XENP021591

SEQ ID NO: 24637 - protein, 5 aa, synthetic construct
  source 1..5: note = Description of Artificial Sequence: Synthetic peptide; note = XENP021591 vhCDR1
DYYMH

SEQ ID NO: 24638 - protein, 17 aa, synthetic construct
  source 1..17: note = Description of Artificial Sequence: Synthetic peptide; note = XENP021591 vhCDR2
WIDPENGDTEYAPKFQG

SEQ ID NO: 24639 - protein, 9 aa, synthetic construct
  source 1..9: note = Description of Artificial Sequence: Synthetic peptide; note = XENP021591 vhCDR3
RGVRQALDY

SEQ ID NO: 24640 - protein, 480 aa, synthetic construct; identical to SEQ ID NO: 23221
  source 1..480: note = Description of Artificial Sequence: Synthetic polypeptide; note = XENP021591 2A11_H1_L2.100_Fab-1G6_L1.194_H1.279 scFv-Fc Heavy Chain

SEQ ID NO: 24641 - protein, 107 aa, synthetic construct; identical to SEQ ID NO: 10999
  source 1..107: note = Description of Artificial Sequence: Synthetic polypeptide; note = VH of XENP021591

SEQ ID NO: 24642 - protein, 122 aa, synthetic construct; identical to SEQ ID NO: 10908
  source 1..122: note = Description of Artificial Sequence: Synthetic polypeptide; note = VL of XENP021591

SEQ ID NO: 24643 - protein, 231 aa, synthetic construct; identical to SEQ ID NO: 21532
  source 1..231: note = Description of Artificial Sequence: Synthetic polypeptide; note = Fc chain of XENP021591

SEQ ID NO: 24644 - protein, 11 aa, synthetic construct
  source 1..11: note = Description of Artificial Sequence: Synthetic peptide; note = XENP021591 vhCDR1
RASQSVGNDVA

SEQ ID NO: 24645 - protein, 7 aa, synthetic construct
  source 1..7: note = Description of Artificial Sequence: Synthetic peptide; note = XENP021591 vhCDR2
YASHRYT

SEQ ID NO: 24646 - protein, 9 aa, synthetic construct
  source 1..9: note = Description of Artificial Sequence: Synthetic peptide; note = XENP021591 vhCDR3
QQDFSSPRT

SEQ ID NO: 24647 - protein, 5 aa, synthetic construct
  source 1..5: note = Description of Artificial Sequence: Synthetic peptide; note = XENP021591 vlCDR1
NYWMN

SEQ ID NO: 24648 - protein, 19 aa, synthetic construct
  source 1..19: note = Description of Artificial Sequence: Synthetic peptide; note = XENP021591 vlCDR2
EIRLYSNNYATHYAESVKG

SEQ ID NO: 24649 - protein, 11 aa, synthetic construct
  source 1..11: note = Description of Artificial Sequence: Synthetic peptide; note = XENP021591 vlCDR3
YYGNYGGYFDV

SEQ ID NO: 24650 - protein, 214 aa, synthetic construct
  source 1..214: note = Description of Artificial Sequence: Synthetic polypeptide; note = XENP021591 2A11_H1_L2.100_Fab-1G6_L1.194_H1.279 Light Chain
DIQMTQSPAFLSVTPGEKVTITCQASQDIGNYLNWFQQKPGQTPKLLIYYTSRLHSGVPSRFSGSGSGTDYTFTISSLEAEDAATYYCQQGNTLPYTFGGGTKVEIKRTVAAPSVFIFPPSDEQLKSGTASVVCLLNNFYPREAKVQWKVDNALQSGNSQESVTEQDSKDSTYSLSSTLTLSKADYEKHKVYACEVTHQGLSSPVTKSFNRGEC

SEQ ID NO: 24651 - protein, 107 aa, synthetic construct
  source 1..107: note = Description of Artificial Sequence: Synthetic polypeptide; note = VL of XENP021591
DIQMTQSPAFLSVTPGEKVTITCQASQDIGNYLNWFQQKPGQTPKLLIYYTSRLHSGVPSRFSGSGSGTDYTFTISSLEAEDAATYYCQQGNTLPYTFGGGTKVEIK

SEQ ID NO: 24652 - protein, 11 aa, synthetic construct
  source 1..11: note = Description of Artificial Sequence: Synthetic peptide; note = XENP021591 vlCDR1
QASQDIGNYLN

SEQ ID NO: 24653 - protein, 7 aa, synthetic construct
  source 1..7: note = Description of Artificial Sequence: Synthetic peptide; note = XENP021591 vlCDR2
YTSRLHS

SEQ ID NO: 24654 - protein, 9 aa, synthetic construct
  source 1..9: note = Description of Artificial Sequence: Synthetic peptide; note = XENP021591 vlCDR3
QQGNTLPYT

SEQ ID NO: 24655 - protein, 447 aa, synthetic construct; identical to SEQ ID NO: 17235
  source 1..447: note = Description of Artificial Sequence: Synthetic polypeptide; note = XENP021592 2A11_H1_L2.101_Fab-1G6_L1.194_H1.279 Fab-Fc Heavy Chain

SEQ ID NO: 24656 - protein, 118 aa, synthetic construct; identical to SEQ ID NO: 17236
  source 1..118: note = Description of Artificial Sequence: Synthetic polypeptide; note = VH of XENP021592

SEQ ID NO: 24657 - protein, 5 aa, synthetic construct
  source 1..5: note = Description of Artificial Sequence: Synthetic peptide; note = XENP021592 vhCDR1
DYYMH

SEQ ID NO: 24658 - protein, 17 aa, synthetic construct
  source 1..17: note = Description of Artificial Sequence: Synthetic peptide; note = XENP021592 vhCDR2
WIDPENGDTEYAPKFQG

SEQ ID NO: 24659 - protein, 9 aa, synthetic construct
  source 1..9: note = Description of Artificial Sequence: Synthetic peptide; note = XENP021592 vhCDR3
RGVRQALDY

SEQ ID NO: 24660 - protein, 480 aa, synthetic construct; identical to SEQ ID NO: 23221
  source 1..480: note = Description of Artificial Sequence: Synthetic polypeptide; note = XENP021592 2A11_H1_L2.101_Fab-1G6_L1.194_H1.279 scFv-Fc Heavy Chain

SEQ ID NO: 24661 - protein, 107 aa, synthetic construct; identical to SEQ ID NO: 10999
  source 1..107: note = Description of Artificial Sequence: Synthetic polypeptide; note = VH of XENP021592

SEQ ID NO: 24662 - protein, 122 aa, synthetic construct; identical to SEQ ID NO: 10908
  source 1..122: note = Description of Artificial Sequence: Synthetic polypeptide; note = VL of XENP021592

SEQ ID NO: 24663 - protein, 231 aa, synthetic construct; identical to SEQ ID NO: 21532
  source 1..231: note = Description of Artificial Sequence: Synthetic polypeptide; note = Fc chain of XENP021592

SEQ ID NO: 24664 - protein, 11 aa, synthetic construct
  source 1..11: note = Description of Artificial Sequence: Synthetic peptide; note = XENP021592 vhCDR1
RASQSVGNDVA

SEQ ID NO: 24665 - protein, 7 aa, synthetic construct
  source 1..7: note = Description of Artificial Sequence: Synthetic peptide; note = XENP021592 vhCDR2
YASHRYT

SEQ ID NO: 24666 - protein, 9 aa, synthetic construct
  source 1..9: note = Description of Artificial Sequence: Synthetic peptide; note = XENP021592 vhCDR3
QQDFSSPRT

SEQ ID NO: 24667 - protein, 5 aa, synthetic construct
  source 1..5: note = Description of Artificial Sequence: Synthetic peptide; note = XENP021592 vlCDR1
NYWMN

SEQ ID NO: 24668 - protein, 19 aa, synthetic construct
  source 1..19: note = Description of Artificial Sequence: Synthetic peptide; note = XENP021592 vlCDR2
EIRLYSNNYATHYAESVKG

SEQ ID NO: 24669 - protein, 11 aa, synthetic construct
  source 1..11: note = Description of Artificial Sequence: Synthetic peptide; note = XENP021592 vlCDR3
YYGNYGGYFDV

SEQ ID NO: 24670 - protein, 214 aa, synthetic construct
  source 1..214: note = Description of Artificial Sequence: Synthetic polypeptide; note = XENP021592 2A11_H1_L2.101_Fab-1G6_L1.194_H1.279 Light Chain
DIQMTQSPAFLSVTPGEKVTITCQASQDIGNYLNWYQQKPDQTVKLLIYYTSRLHSGVPSRFSGSGSGTDYTFTISSLEAEDAATYYCQQGNTLPYTFGGGTKVEIKRTVAAPSVFIFPPSDEQLKSGTASVVCLLNNFYPREAKVQWKVDNALQSGNSQESVTEQDSKDSTYSLSSTLTLSKADYEKHKVYACEVTHQGLSSPVTKSFNRGEC

SEQ ID NO: 24671 - protein, 107 aa, synthetic construct
  source 1..107: note = Description of Artificial Sequence: Synthetic polypeptide; note = VL of XENP021592
DIQMTQSPAFLSVTPGEKVTITCQASQDIGNYLNWYQQKPDQTVKLLIYYTSRLHSGVPSRFSGSGSGTDYTFTISSLEAEDAATYYCQQGNTLPYTFGGGTKVEIK

SEQ ID NO: 24672 - protein, 11 aa, synthetic construct
  source 1..11: note = Description of Artificial Sequence: Synthetic peptide; note = XENP021592 vlCDR1
QASQDIGNYLN

SEQ ID NO: 24673 - protein, 7 aa, synthetic construct
  source 1..7: note = Description of Artificial Sequence: Synthetic peptide; note = XENP021592 vlCDR2
YTSRLHS

SEQ ID NO: 24674 - protein, 9 aa, synthetic construct
  source 1..9: note = Description of Artificial Sequence: Synthetic peptide; note = XENP021592 vlCDR3
QQGNTLPYT

SEQ ID NO: 24675 - protein, 447 aa, synthetic construct; identical to SEQ ID NO: 17235
  source 1..447: note = Description of Artificial Sequence: Synthetic polypeptide; note = XENP022123 2A11_H1_L2.122_Fab-1G6_L1.194_H1.279 Fab-Fc Heavy Chain

SEQ ID NO: 24676 - protein, 118 aa, synthetic construct; identical to SEQ ID NO: 17236
  source 1..118: note = Description of Artificial Sequence: Synthetic polypeptide; note = VH of XENP022123

SEQ ID NO: 24677 - protein, 5 aa, synthetic construct
  source 1..5: note = Description of Artificial Sequence: Synthetic peptide; note = XENP022123 vhCDR1
DYYMH

SEQ ID NO: 24678 - protein, 17 aa, synthetic construct
  source 1..17: note = Description of Artificial Sequence: Synthetic peptide; note = XENP022123 vhCDR2
WIDPENGDTEYAPKFQG

SEQ ID NO: 24679 - protein, 9 aa, synthetic construct
  source 1..9: note = Description of Artificial Sequence: Synthetic peptide; note = XENP022123 vhCDR3
RGVRQALDY

SEQ ID NO: 24680 - protein, 480 aa, synthetic construct; identical to SEQ ID NO: 23221
  source 1..480: note = Description of Artificial Sequence: Synthetic polypeptide; note = XENP022123 2A11_H1_L2.122_Fab-1G6_L1.194_H1.279 scFv-Fc Heavy Chain

SEQ ID NO: 24681 - protein, 107 aa, synthetic construct; identical to SEQ ID NO: 10999
  source 1..107: note = Description of Artificial Sequence: Synthetic polypeptide; note = VH of XENP022123

SEQ ID NO: 24682 - protein, 122 aa, synthetic construct; identical to SEQ ID NO: 10908
  source 1..122: note = Description of Artificial Sequence: Synthetic polypeptide; note = VL of XENP022123

SEQ ID NO: 24683 - protein, 231 aa, synthetic construct; identical to SEQ ID NO: 21532
  source 1..231: note = Description of Artificial Sequence: Synthetic polypeptide; note = Fc chain of XENP022123

SEQ ID NO: 24684 - protein, 11 aa, synthetic construct
  source 1..11: note = Description of Artificial Sequence: Synthetic peptide; note = XENP022123 vhCDR1
RASQSVGNDVA

SEQ ID NO: 24685 - protein, 7 aa, synthetic construct
  source 1..7: note = Description of Artificial Sequence: Synthetic peptide; note = XENP022123 vhCDR2
YASHRYT

SEQ ID NO: 24686 - protein, 9 aa, synthetic construct
  source 1..9: note = Description of Artificial Sequence: Synthetic peptide; note = XENP022123 vhCDR3
QQDFSSPRT

SEQ ID NO: 24687 - protein, 5 aa, synthetic construct
  source 1..5: note = Description of Artificial Sequence: Synthetic peptide; note = XENP022123 vlCDR1
NYWMN

SEQ ID NO: 24688 - protein, 19 aa, synthetic construct
  source 1..19: note = Description of Artificial Sequence: Synthetic peptide; note = XENP022123 vlCDR2
EIRLYSNNYATHYAESVKG

SEQ ID NO: 24689 - protein, 11 aa, synthetic construct
  source 1..11: note = Description of Artificial Sequence: Synthetic peptide; note = XENP022123 vlCDR3
YYGNYGGYFDV

SEQ ID NO: 24690 - protein, 214 aa, synthetic construct
  source 1..214: note = Description of Artificial Sequence: Synthetic polypeptide; note = XENP022123 2A11_H1_L2.122_Fab-1G6_L1.194_H1.279 Light Chain
DIQMTQSPAFLSVTPGEKVTITCQASQDIGNYLNWFQQKPGQTPKLLIYYTSRLHSGVPSRFSGSGSGTDYTFTISSLEAEDAATYFCQQGNTLPYTFGGGTKVEIKRTVAAPSVFIFPPSDEQLKSGTASVVCLLNNFYPREAKVQWKVDNALQSGNSQESVTEQDSKDSTYSLSSTLTLSKADYEKHKVYACEVTHQGLSSPVTKSFNRGEC

SEQ ID NO: 24691 - protein, 107 aa, synthetic construct
  source 1..107: note = Description of Artificial Sequence: Synthetic polypeptide; note = VL of XENP022123
DIQMTQSPAFLSVTPGEKVTITCQASQDIGNYLNWFQQKPGQTPKLLIYYTSRLHSGVPSRFSGSGSGTDYTFTISSLEAEDAATYFCQQGNTLPYTFGGGTKVEIK

SEQ ID NO: 24692 - protein, 11 aa, synthetic construct
  source 1..11: note = Description of Artificial Sequence: Synthetic peptide; note = XENP022123 vlCDR1
QASQDIGNYLN

SEQ ID NO: 24693 - protein, 7 aa, synthetic construct
  source 1..7: note = Description of Artificial Sequence: Synthetic peptide; note = XENP022123 vlCDR2
YTSRLHS

SEQ ID NO: 24694 - protein, 9 aa, synthetic construct
  source 1..9: note = Description of Artificial Sequence: Synthetic peptide; note = XENP022123 vlCDR3
QQGNTLPYT

SEQ ID NO: 24695 - protein, 447 aa, synthetic construct; identical to SEQ ID NO: 17235
  source 1..447: note = Description of Artificial Sequence: Synthetic polypeptide; note = XENP022124 2A11_H1_L2.123_Fab-1G6_L1.194_H1.279 Fab-Fc Heavy Chain

SEQ ID NO: 24696 - protein, 118 aa, synthetic construct; identical to SEQ ID NO: 17236
  source 1..118: note = Description of Artificial Sequence: Synthetic polypeptide; note = VH of XENP022124

SEQ ID NO: 24697 - protein, 5 aa, synthetic construct
  source 1..5: note = Description of Artificial Sequence: Synthetic peptide; note = XENP022124 vhCDR1
DYYMH

SEQ ID NO: 24698 - protein, 17 aa, synthetic construct
  source 1..17: note = Description of Artificial Sequence: Synthetic peptide; note = XENP022124 vhCDR2
WIDPENGDTEYAPKFQG

SEQ ID NO: 24699 - protein, 9 aa, synthetic construct
  source 1..9: note = Description of Artificial Sequence: Synthetic peptide; note = XENP022124 vhCDR3
RGVRQALDY

SEQ ID NO: 24700 - protein, 480 aa, synthetic construct; identical to SEQ ID NO: 23221
  source 1..480: note = Description of Artificial Sequence: Synthetic polypeptide; note = XENP022124 2A11_H1_L2.123_Fab-1G6_L1.194_H1.279 scFv-Fc Heavy Chain

SEQ ID NO: 24701 - protein, 107 aa, synthetic construct; identical to SEQ ID NO: 10999
  source 1..107: note = Description of Artificial Sequence: Synthetic polypeptide; note = VH of XENP022124

SEQ ID NO: 24702 - protein, 122 aa, synthetic construct; identical to SEQ ID NO: 10908
  source 1..122: note = Description of Artificial Sequence: Synthetic polypeptide; note = VL of XENP022124

SEQ ID NO: 24703 - protein, 231 aa, synthetic construct; identical to SEQ ID NO: 21532
  source 1..231: note = Description of Artificial Sequence: Synthetic polypeptide; note = Fc chain of XENP022124

SEQ ID NO: 24704 - protein, 11 aa, synthetic construct
  source 1..11: note = Description of Artificial Sequence: Synthetic peptide; note = XENP022124 vhCDR1
RASQSVGNDVA

SEQ ID NO: 24705 - protein, 7 aa, synthetic construct
  source 1..7: note = Description of Artificial Sequence: Synthetic peptide; note = XENP022124 vhCDR2
YASHRYT

SEQ ID NO: 24706 - protein, 9 aa, synthetic construct
  source 1..9: note = Description of Artificial Sequence: Synthetic peptide; note = XENP022124 vhCDR3
QQDFSSPRT

SEQ ID NO: 24707 - protein, 5 aa, synthetic construct
  source 1..5: note = Description of Artificial Sequence: Synthetic peptide; note = XENP022124 vlCDR1
NYWMN

SEQ ID NO: 24708 - protein, 19 aa, synthetic construct
  source 1..19: note = Description of Artificial Sequence: Synthetic peptide; note = XENP022124 vlCDR2
EIRLYSNNYATHYAESVKG

SEQ ID NO: 24709 - protein, 11 aa, synthetic construct
  source 1..11: note = Description of Artificial Sequence: Synthetic peptide; note = XENP022124 vlCDR3
YYGNYGGYFDV

SEQ ID NO: 24710 - protein, 214 aa, synthetic construct
  source 1..214: note = Description of Artificial Sequence: Synthetic polypeptide; note = XENP022124 2A11_H1_L2.123_Fab-1G6_L1.194_H1.279 Light Chain
DIQMTQSPAFLSVTPGEKVTITCQASQDIGNYLNWFQQKPGQSPKLLIYYTSRLHSGVPSRFSGSGSGTDYTFTISSLEAEDAATYFCQQGNTLPYTFGGGTKVEIKRTVAAPSVFIFPPSDEQLKSGTASVVCLLNNFYPREAKVQWKVDNALQSGNSQESVTEQDSKDSTYSLSSTLTLSKADYEKHKVYACEVTHQGLSSPVTKSFNRGEC

SEQ ID NO: 24711 - protein, 107 aa, synthetic construct
  source 1..107: note = Description of Artificial Sequence: Synthetic polypeptide; note = VL of XENP022124
DIQMTQSPAFLSVTPGEKVTITCQASQDIGNYLNWFQQKPGQSPKLLIYYTSRLHSGVPSRFSGSGSGTDYTFTISSLEAEDAATYFCQQGNTLPYTFGGGTKVEIK

SEQ ID NO: 24712 - protein, 11 aa, synthetic construct
  source 1..11: note = Description of Artificial Sequence: Synthetic peptide; note = XENP022124 vlCDR1
QASQDIGNYLN

SEQ ID NO: 24713 - protein, 7 aa, synthetic construct
  source 1..7: note = Description of Artificial Sequence: Synthetic peptide; note = XENP022124 vlCDR2
YTSRLHS

SEQ ID NO: 24714 - protein, 9 aa, synthetic construct
  source 1..9: note = Description of Artificial Sequence: Synthetic peptide; note = XENP022124 vlCDR3
QQGNTLPYT

SEQ ID NO: 24715 - protein, 447 aa, synthetic construct; identical to SEQ ID NO: 17235
  source 1..447: note = Description of Artificial Sequence: Synthetic polypeptide; note = XENP022125 2A11_H1_L2.124_Fab-1G6_L1.194_H1.279 Fab-Fc Heavy Chain

SEQ ID NO: 24716 - protein, 118 aa, synthetic construct; identical to SEQ ID NO: 17236
  source 1..118: note = Description of Artificial Sequence: Synthetic polypeptide; note = VH of XENP022125

SEQ ID NO: 24717 - protein, 5 aa, synthetic construct
  source 1..5: note = Description of Artificial Sequence: Synthetic peptide; note = XENP022125 vhCDR1
DYYMH

SEQ ID NO: 24718 - protein, 17 aa, synthetic construct
  source 1..17: note = Description of Artificial Sequence: Synthetic peptide; note = XENP022125 vhCDR2
WIDPENGDTEYAPKFQG

SEQ ID NO: 24719 - protein, 9 aa, synthetic construct
  source 1..9: note = Description of Artificial Sequence: Synthetic peptide; note = XENP022125 vhCDR3
RGVRQALDY

SEQ ID NO: 24720 - protein, 480 aa, synthetic construct; identical to SEQ ID NO: 23221
  source 1..480: note = Description of Artificial Sequence: Synthetic polypeptide; note = XENP022125 2A11_H1_L2.124_Fab-1G6_L1.194_H1.279 scFv-Fc Heavy Chain

SEQ ID NO: 24721 - protein, 107 aa, synthetic construct; identical to SEQ ID NO: 10999
  source 1..107: note = Description of Artificial Sequence: Synthetic polypeptide; note = VH of XENP022125

SEQ ID NO: 24722 - protein, 122 aa, synthetic construct; identical to SEQ ID NO: 10908
  source 1..122: note = Description of Artificial Sequence: Synthetic polypeptide; note = VL of XENP022125

SEQ ID NO: 24723 - protein, 231 aa, synthetic construct; identical to SEQ ID NO: 21532
  source 1..231: note = Description of Artificial Sequence: Synthetic polypeptide; note = Fc chain of XENP022125

SEQ ID NO: 24724 - protein, 11 aa, synthetic construct
  source 1..11: note = Description of Artificial Sequence: Synthetic peptide; note = XENP022125 vhCDR1
RASQSVGNDVA

SEQ ID NO: 24725 - protein, 7 aa, synthetic construct
  source 1..7: note = Description of Artificial Sequence: Synthetic peptide; note = XENP022125 vhCDR2
YASHRYT

SEQ ID NO: 24726 - protein, 9 aa, synthetic construct
  source 1..9: note = Description of Artificial Sequence: Synthetic peptide; note = XENP022125 vhCDR3
QQDFSSPRT

SEQ ID NO: 24727 - protein, 5 aa, synthetic construct
  source 1..5: note = Description of Artificial Sequence: Synthetic peptide; note = XENP022125 vlCDR1
NYWMN

SEQ ID NO: 24728 - protein, 19 aa, synthetic construct
  source 1..19: note = Description of Artificial Sequence: Synthetic peptide; note = XENP022125 vlCDR2
EIRLYSNNYATHYAESVKG

SEQ ID NO: 24729 - protein, 11 aa, synthetic construct
  source 1..11: note = Description of Artificial Sequence: Synthetic peptide; note = XENP022125 vlCDR3
YYGNYGGYFDV

SEQ ID NO: 24730 - protein, 214 aa, synthetic construct
  source 1..214: note = Description of Artificial Sequence: Synthetic polypeptide; note = XENP022125 2A11_H1_L2.124_Fab-1G6_L1.194_H1.279 Light Chain
DIQMTQSPAFLSVTPGEKVTITCQASQDIGNYLNWFQQKPGKVPKLLIYYTSRLHSGVPSRFSGSGSGTDYTFTISSLEAEDAATYFCQQGNTLPYTFGGGTKVEIKRTVAAPSVFIFPPSDEQLKSGTASVVCLLNNFYPREAKVQWKVDNALQSGNSQESVTEQDSKDSTYSLSSTLTLSKADYEKHKVYACEVTHQGLSSPVTKSFNRGEC

SEQ ID NO: 24731 - protein, 107 aa, synthetic construct
  source 1..107: note = Description of Artificial Sequence: Synthetic polypeptide; note = VL of XENP022125
DIQMTQSPAFLSVTPGEKVTITCQASQDIGNYLNWFQQKPGKVPKLLIYYTSRLHSGVPSRFSGSGSGTDYTFTISSLEAEDAATYFCQQGNTLPYTFGGGTKVEIK

SEQ ID NO: 24732 - protein, 11 aa, synthetic construct
  source 1..11: note = Description of Artificial Sequence: Synthetic peptide; note = XENP022125 vlCDR1
QASQDIGNYLN

SEQ ID NO: 24733 - protein, 7 aa, synthetic construct
  source 1..7: note = Description of Artificial Sequence: Synthetic peptide; note = XENP022125 vlCDR2
YTSRLHS

SEQ ID NO: 24734 - protein, 9 aa, synthetic construct
  source 1..9: note = Description of Artificial Sequence: Synthetic peptide; note = XENP022125 vlCDR3
QQGNTLPYT

SEQ ID NO: 24735 - protein, 447 aa, synthetic construct; identical to SEQ ID NO: 22064
  source 1..447: note = Description of Artificial Sequence: Synthetic polypeptide; note = XENP022626 2A11_H1.125_L2.132_Fab-1G6_L1.194_H1.279 Fab-Fc Heavy Chain

SEQ ID NO: 24736 - protein, 118 aa, synthetic construct; identical to SEQ ID NO: 22065
  source 1..118: note = Description of Artificial Sequence: Synthetic polypeptide; note = VH of XENP022626

SEQ ID NO: 24737 - protein, 5 aa, synthetic construct
  source 1..5: note = Description of Artificial Sequence: Synthetic peptide; note = XENP022626 vhCDR1
HYFMH

SEQ ID NO: 24738 - protein, 17 aa, synthetic construct
  source 1..17: note = Description of Artificial Sequence: Synthetic peptide; note = XENP022626 vhCDR2
WIDPYLGDTEYAPKFQG

SEQ ID NO: 24739 - protein, 9 aa, synthetic construct
  source 1..9: note = Description of Artificial Sequence: Synthetic peptide; note = XENP022626 vhCDR3
RGVYQALDY

SEQ ID NO: 24740 - protein, 480 aa, synthetic construct; identical to SEQ ID NO: 23221
  source 1..480: note = Description of Artificial Sequence: Synthetic polypeptide; note = XENP022626 2A11_H1.125_L2.132_Fab-1G6_L1.194_H1.279 scFv-Fc  Heavy Chain

SEQ ID NO: 24741 - protein, 107 aa, synthetic construct; identical to SEQ ID NO: 10999
  source 1..107: note = Description of Artificial Sequence: Synthetic polypeptide; note = VH of XENP022626

SEQ ID NO: 24742 - protein, 122 aa, synthetic construct; identical to SEQ ID NO: 10908
  source 1..122: note = Description of Artificial Sequence: Synthetic polypeptide; note = VL of XENP022626

SEQ ID NO: 24743 - protein, 231 aa, synthetic construct; identical to SEQ ID NO: 21532
  source 1..231: note = Description of Artificial Sequence: Synthetic polypeptide; note = Fc chain of XENP022626

SEQ ID NO: 24744 - protein, 11 aa, synthetic construct
  source 1..11: note = Description of Artificial Sequence: Synthetic peptide; note = XENP022626 vhCDR1
RASQSVGNDVA

SEQ ID NO: 24745 - protein, 7 aa, synthetic construct
  source 1..7: note = Description of Artificial Sequence: Synthetic peptide; note = XENP022626 vhCDR2
YASHRYT

SEQ ID NO: 24746 - protein, 9 aa, synthetic construct
  source 1..9: note = Description of Artificial Sequence: Synthetic peptide; note = XENP022626 vhCDR3
QQDFSSPRT

SEQ ID NO: 24747 - protein, 5 aa, synthetic construct
  source 1..5: note = Description of Artificial Sequence: Synthetic peptide; note = XENP022626 vlCDR1
NYWMN

SEQ ID NO: 24748 - protein, 19 aa, synthetic construct
  source 1..19: note = Description of Artificial Sequence: Synthetic peptide; note = XENP022626 vlCDR2
EIRLYSNNYATHYAESVKG

SEQ ID NO: 24749 - protein, 11 aa, synthetic construct
  source 1..11: note = Description of Artificial Sequence: Synthetic peptide; note = XENP022626 vlCDR3
YYGNYGGYFDV

SEQ ID NO: 24750 - protein, 214 aa, synthetic construct; identical to SEQ ID NO: 22219
  source 1..214: note = Description of Artificial Sequence: Synthetic polypeptide; note = XENP022626 2A11_H1.125_L2.132_Fab-1G6_L1.194_H1.279 Light Chain

SEQ ID NO: 24751 - protein, 107 aa, synthetic construct; identical to SEQ ID NO: 22220
  source 1..107: note = Description of Artificial Sequence: Synthetic polypeptide; note = VL of XENP022626

SEQ ID NO: 24752 - protein, 11 aa, synthetic construct
  source 1..11: note = Description of Artificial Sequence: Synthetic peptide; note = XENP022626 vlCDR1
QASQDIGNYLN

SEQ ID NO: 24753 - protein, 7 aa, synthetic construct
  source 1..7: note = Description of Artificial Sequence: Synthetic peptide; note = XENP022626 vlCDR2
FTSYLHS

SEQ ID NO: 24754 - protein, 9 aa, synthetic construct
  source 1..9: note = Description of Artificial Sequence: Synthetic peptide; note = XENP022626 vlCDR3
QEGNTLPYT

SEQ ID NO: 24755 - protein, 447 aa, synthetic construct; identical to SEQ ID NO: 22084
  source 1..447: note = Description of Artificial Sequence: Synthetic polypeptide; note = XENP022627 2A11_H1.144_L2.133_Fab-1G6_L1.194_H1.279 Fab-Fc Heavy Chain

SEQ ID NO: 24756 - protein, 118 aa, synthetic construct; identical to SEQ ID NO: 22085
  source 1..118: note = Description of Artificial Sequence: Synthetic polypeptide; note = VH of XENP022627

SEQ ID NO: 24757 - protein, 5 aa, synthetic construct
  source 1..5: note = Description of Artificial Sequence: Synthetic peptide; note = XENP022627 vhCDR1
DYFMH

SEQ ID NO: 24758 - protein, 17 aa, synthetic construct
  source 1..17: note = Description of Artificial Sequence: Synthetic peptide; note = XENP022627 vhCDR2
WIDPELGDTEYAPKFQG

SEQ ID NO: 24759 - protein, 9 aa, synthetic construct
  source 1..9: note = Description of Artificial Sequence: Synthetic peptide; note = XENP022627 vhCDR3
RGVYQALDY

SEQ ID NO: 24760 - protein, 480 aa, synthetic construct; identical to SEQ ID NO: 23221
  source 1..480: note = Description of Artificial Sequence: Synthetic polypeptide; note = XENP022627 2A11_H1.144_L2.133_Fab-1G6_L1.194_H1.279 scFv-Fc  Heavy Chain

SEQ ID NO: 24761 - protein, 107 aa, synthetic construct; identical to SEQ ID NO: 10999
  source 1..107: note = Description of Artificial Sequence: Synthetic polypeptide; note = VH of XENP022627

SEQ ID NO: 24762 - protein, 122 aa, synthetic construct; identical to SEQ ID NO: 10908
  source 1..122: note = Description of Artificial Sequence: Synthetic polypeptide; note = VL of XENP022627

SEQ ID NO: 24763 - protein, 231 aa, synthetic construct; identical to SEQ ID NO: 21532
  source 1..231: note = Description of Artificial Sequence: Synthetic polypeptide; note = Fc chain of XENP022627

SEQ ID NO: 24764 - protein, 11 aa, synthetic construct
  source 1..11: note = Description of Artificial Sequence: Synthetic peptide; note = XENP022627 vhCDR1
RASQSVGNDVA

SEQ ID NO: 24765 - protein, 7 aa, synthetic construct
  source 1..7: note = Description of Artificial Sequence: Synthetic peptide; note = XENP022627 vhCDR2
YASHRYT

SEQ ID NO: 24766 - protein, 9 aa, synthetic construct
  source 1..9: note = Description of Artificial Sequence: Synthetic peptide; note = XENP022627 vhCDR3
QQDFSSPRT

SEQ ID NO: 24767 - protein, 5 aa, synthetic construct
  source 1..5: note = Description of Artificial Sequence: Synthetic peptide; note = XENP022627 vlCDR1
NYWMN

SEQ ID NO: 24768 - protein, 19 aa, synthetic construct
  source 1..19: note = Description of Artificial Sequence: Synthetic peptide; note = XENP022627 vlCDR2
EIRLYSNNYATHYAESVKG

SEQ ID NO: 24769 - protein, 11 aa, synthetic construct
  source 1..11: note = Description of Artificial Sequence: Synthetic peptide; note = XENP022627 vlCDR3
YYGNYGGYFDV

SEQ ID NO: 24770 - protein, 214 aa, synthetic construct; identical to SEQ ID NO: 22199
  source 1..214: note = Description of Artificial Sequence: Synthetic polypeptide; note = XENP022627 2A11_H1.144_L2.133_Fab-1G6_L1.194_H1.279 Light Chain

SEQ ID NO: 24771 - protein, 107 aa, synthetic construct; identical to SEQ ID NO: 22200
  source 1..107: note = Description of Artificial Sequence: Synthetic polypeptide; note = VL of XENP022627

SEQ ID NO: 24772 - protein, 11 aa, synthetic construct
  source 1..11: note = Description of Artificial Sequence: Synthetic peptide; note = XENP022627 vlCDR1
QASQDIGNYLN

SEQ ID NO: 24773 - protein, 7 aa, synthetic construct
  source 1..7: note = Description of Artificial Sequence: Synthetic peptide; note = XENP022627 vlCDR2
FTSYLHS

SEQ ID NO: 24774 - protein, 9 aa, synthetic construct
  source 1..9: note = Description of Artificial Sequence: Synthetic peptide; note = XENP022627 vlCDR3
QEGNTLPYT

SEQ ID NO: 24775 - protein, 447 aa, synthetic construct; identical to SEQ ID NO: 22064
  source 1..447: note = Description of Artificial Sequence: Synthetic polypeptide; note = XENP022628 2A11_H1.125_L2.113_Fab-1G6_L1.194_H1.279 Fab-Fc Heavy Chain

SEQ ID NO: 24776 - protein, 118 aa, synthetic construct; identical to SEQ ID NO: 22065
  source 1..118: note = Description of Artificial Sequence: Synthetic polypeptide; note = VH of XENP022628

SEQ ID NO: 24777 - protein, 5 aa, synthetic construct
  source 1..5: note = Description of Artificial Sequence: Synthetic peptide; note = XENP022628 vhCDR1
HYFMH

SEQ ID NO: 24778 - protein, 17 aa, synthetic construct
  source 1..17: note = Description of Artificial Sequence: Synthetic peptide; note = XENP022628 vhCDR2
WIDPYLGDTEYAPKFQG

SEQ ID NO: 24779 - protein, 9 aa, synthetic construct
  source 1..9: note = Description of Artificial Sequence: Synthetic peptide; note = XENP022628 vhCDR3
RGVYQALDY

SEQ ID NO: 24780 - protein, 480 aa, synthetic construct; identical to SEQ ID NO: 23221
  source 1..480: note = Description of Artificial Sequence: Synthetic polypeptide; note = XENP022628 2A11_H1.125_L2.113_Fab-1G6_L1.194_H1.279 scFv-Fc  Heavy Chain

SEQ ID NO: 24781 - protein, 107 aa, synthetic construct; identical to SEQ ID NO: 10999
  source 1..107: note = Description of Artificial Sequence: Synthetic polypeptide; note = VH of XENP022628

SEQ ID NO: 24782 - protein, 122 aa, synthetic construct; identical to SEQ ID NO: 10908
  source 1..122: note = Description of Artificial Sequence: Synthetic polypeptide; note = VL of XENP022628

SEQ ID NO: 24783 - protein, 231 aa, synthetic construct; identical to SEQ ID NO: 21532
  source 1..231: note = Description of Artificial Sequence: Synthetic polypeptide; note = Fc chain of XENP022628

SEQ ID NO: 24784 - protein, 11 aa, synthetic construct
  source 1..11: note = Description of Artificial Sequence: Synthetic peptide; note = XENP022628 vhCDR1
RASQSVGNDVA

SEQ ID NO: 24785 - protein, 7 aa, synthetic construct
  source 1..7: note = Description of Artificial Sequence: Synthetic peptide; note = XENP022628 vhCDR2
YASHRYT

SEQ ID NO: 24786 - protein, 9 aa, synthetic construct
  source 1..9: note = Description of Artificial Sequence: Synthetic peptide; note = XENP022628 vhCDR3
QQDFSSPRT

SEQ ID NO: 24787 - protein, 5 aa, synthetic construct
  source 1..5: note = Description of Artificial Sequence: Synthetic peptide; note = XENP022628 vlCDR1
NYWMN

SEQ ID NO: 24788 - protein, 19 aa, synthetic construct
  source 1..19: note = Description of Artificial Sequence: Synthetic peptide; note = XENP022628 vlCDR2
EIRLYSNNYATHYAESVKG

SEQ ID NO: 24789 - protein, 11 aa, synthetic construct
  source 1..11: note = Description of Artificial Sequence: Synthetic peptide; note = XENP022628 vlCDR3
YYGNYGGYFDV

SEQ ID NO: 24790 - protein, 214 aa, synthetic construct; identical to SEQ ID NO: 22079
  source 1..214: note = Description of Artificial Sequence: Synthetic polypeptide; note = XENP022628 2A11_H1.125_L2.113_Fab-1G6_L1.194_H1.279 Light Chain

SEQ ID NO: 24791 - protein, 107 aa, synthetic construct; identical to SEQ ID NO: 22080
  source 1..107: note = Description of Artificial Sequence: Synthetic polypeptide; note = VL of XENP022628

SEQ ID NO: 24792 - protein, 11 aa, synthetic construct
  source 1..11: note = Description of Artificial Sequence: Synthetic peptide; note = XENP022628 vlCDR1
QASQDIGNYLN

SEQ ID NO: 24793 - protein, 7 aa, synthetic construct
  source 1..7: note = Description of Artificial Sequence: Synthetic peptide; note = XENP022628 vlCDR2
FTSYLHS

SEQ ID NO: 24794 - protein, 9 aa, synthetic construct
  source 1..9: note = Description of Artificial Sequence: Synthetic peptide; note = XENP022628 vlCDR3
QQGNTLPYT

SEQ ID NO: 24795 - protein, 447 aa, synthetic construct; identical to SEQ ID NO: 22084
  source 1..447: note = Description of Artificial Sequence: Synthetic polypeptide; note = XENP022629 2A11_H1.144_L2.113_Fab-1G6_L1.194_H1.279 Fab-Fc Heavy Chain

SEQ ID NO: 24796 - protein, 118 aa, synthetic construct; identical to SEQ ID NO: 22085
  source 1..118: note = Description of Artificial Sequence: Synthetic polypeptide; note = VH of XENP022629

SEQ ID NO: 24797 - protein, 5 aa, synthetic construct
  source 1..5: note = Description of Artificial Sequence: Synthetic peptide; note = XENP022629 vhCDR1
DYFMH

SEQ ID NO: 24798 - protein, 17 aa, synthetic construct
  source 1..17: note = Description of Artificial Sequence: Synthetic peptide; note = XENP022629 vhCDR2
WIDPELGDTEYAPKFQG

SEQ ID NO: 24799 - protein, 9 aa, synthetic construct
  source 1..9: note = Description of Artificial Sequence: Synthetic peptide; note = XENP022629 vhCDR3
RGVYQALDY

SEQ ID NO: 24800 - protein, 480 aa, synthetic construct; identical to SEQ ID NO: 23221
  source 1..480: note = Description of Artificial Sequence: Synthetic polypeptide; note = XENP022629 2A11_H1.144_L2.113_Fab-1G6_L1.194_H1.279 scFv-Fc  Heavy Chain

SEQ ID NO: 24801 - protein, 107 aa, synthetic construct; identical to SEQ ID NO: 10999
  source 1..107: note = Description of Artificial Sequence: Synthetic polypeptide; note = VH of XENP022629

SEQ ID NO: 24802 - protein, 122 aa, synthetic construct; identical to SEQ ID NO: 10908
  source 1..122: note = Description of Artificial Sequence: Synthetic polypeptide; note = VL of XENP022629

SEQ ID NO: 24803 - protein, 231 aa, synthetic construct; identical to SEQ ID NO: 21532
  source 1..231: note = Description of Artificial Sequence: Synthetic polypeptide; note = Fc chain of XENP022629

SEQ ID NO: 24804 - protein, 11 aa, synthetic construct
  source 1..11: note = Description of Artificial Sequence: Synthetic peptide; note = XENP022629 vhCDR1
RASQSVGNDVA

SEQ ID NO: 24805 - protein, 7 aa, synthetic construct
  source 1..7: note = Description of Artificial Sequence: Synthetic peptide; note = XENP022629 vhCDR2
YASHRYT

SEQ ID NO: 24806 - protein, 9 aa, synthetic construct
  source 1..9: note = Description of Artificial Sequence: Synthetic peptide; note = XENP022629 vhCDR3
QQDFSSPRT

SEQ ID NO: 24807 - protein, 5 aa, synthetic construct
  source 1..5: note = Description of Artificial Sequence: Synthetic peptide; note = XENP022629 vlCDR1
NYWMN

SEQ ID NO: 24808 - protein, 19 aa, synthetic construct
  source 1..19: note = Description of Artificial Sequence: Synthetic peptide; note = XENP022629 vlCDR2
EIRLYSNNYATHYAESVKG

SEQ ID NO: 24809 - protein, 11 aa, synthetic construct
  source 1..11: note = Description of Artificial Sequence: Synthetic peptide; note = XENP022629 vlCDR3
YYGNYGGYFDV

SEQ ID NO: 24810 - protein, 214 aa, synthetic construct; identical to SEQ ID NO: 22079
  source 1..214: note = Description of Artificial Sequence: Synthetic polypeptide; note = XENP022629 2A11_H1.144_L2.113_Fab-1G6_L1.194_H1.279 Light Chain

SEQ ID NO: 24811 - protein, 107 aa, synthetic construct; identical to SEQ ID NO: 22080
  source 1..107: note = Description of Artificial Sequence: Synthetic polypeptide; note = VL of XENP022629

SEQ ID NO: 24812 - protein, 11 aa, synthetic construct
  source 1..11: note = Description of Artificial Sequence: Synthetic peptide; note = XENP022629 vlCDR1
QASQDIGNYLN

SEQ ID NO: 24813 - protein, 7 aa, synthetic construct
  source 1..7: note = Description of Artificial Sequence: Synthetic peptide; note = XENP022629 vlCDR2
FTSYLHS

SEQ ID NO: 24814 - protein, 9 aa, synthetic construct
  source 1..9: note = Description of Artificial Sequence: Synthetic peptide; note = XENP022629 vlCDR3
QQGNTLPYT

SEQ ID NO: 24815 - protein, 447 aa, synthetic construct; identical to SEQ ID NO: 22084
  source 1..447: note = Description of Artificial Sequence: Synthetic polypeptide; note = XENP022631 2A11_H1.144_L2.137_Fab-1G6_L1.194_H1.279 Fab-Fc Heavy Chain

SEQ ID NO: 24816 - protein, 118 aa, synthetic construct; identical to SEQ ID NO: 22085
  source 1..118: note = Description of Artificial Sequence: Synthetic polypeptide; note = VH of XENP022631

SEQ ID NO: 24817 - protein, 5 aa, synthetic construct
  source 1..5: note = Description of Artificial Sequence: Synthetic peptide; note = XENP022631 vhCDR1
DYFMH

SEQ ID NO: 24818 - protein, 17 aa, synthetic construct
  source 1..17: note = Description of Artificial Sequence: Synthetic peptide; note = XENP022631 vhCDR2
WIDPELGDTEYAPKFQG

SEQ ID NO: 24819 - protein, 9 aa, synthetic construct
  source 1..9: note = Description of Artificial Sequence: Synthetic peptide; note = XENP022631 vhCDR3
RGVYQALDY

SEQ ID NO: 24820 - protein, 480 aa, synthetic construct; identical to SEQ ID NO: 23221
  source 1..480: note = Description of Artificial Sequence: Synthetic polypeptide; note = XENP022631 2A11_H1.144_L2.137_Fab-1G6_L1.194_H1.279 scFv-Fc Heavy Chain

SEQ ID NO: 24821 - protein, 107 aa, synthetic construct; identical to SEQ ID NO: 10999
  source 1..107: note = Description of Artificial Sequence: Synthetic polypeptide; note = VH of XENP022631

SEQ ID NO: 24822 - protein, 122 aa, synthetic construct; identical to SEQ ID NO: 10908
  source 1..122: note = Description of Artificial Sequence: Synthetic polypeptide; note = VL of XENP022631

SEQ ID NO: 24823 - protein, 231 aa, synthetic construct; identical to SEQ ID NO: 21532
  source 1..231: note = Description of Artificial Sequence: Synthetic polypeptide; note = Fc chain of XENP022631

SEQ ID NO: 24824 - protein, 11 aa, synthetic construct
  source 1..11: note = Description of Artificial Sequence: Synthetic peptide; note = XENP022631 vhCDR1
RASQSVGNDVA

SEQ ID NO: 24825 - protein, 7 aa, synthetic construct
  source 1..7: note = Description of Artificial Sequence: Synthetic peptide; note = XENP022631 vhCDR2
YASHRYT

SEQ ID NO: 24826 - protein, 9 aa, synthetic construct
  source 1..9: note = Description of Artificial Sequence: Synthetic peptide; note = XENP022631 vhCDR3
QQDFSSPRT

SEQ ID NO: 24827 - protein, 5 aa, synthetic construct
  source 1..5: note = Description of Artificial Sequence: Synthetic peptide; note = XENP022631 vlCDR1
NYWMN

SEQ ID NO: 24828 - protein, 19 aa, synthetic construct
  source 1..19: note = Description of Artificial Sequence: Synthetic peptide; note = XENP022631 vlCDR2
EIRLYSNNYATHYAESVKG

SEQ ID NO: 24829 - protein, 11 aa, synthetic construct
  source 1..11: note = Description of Artificial Sequence: Synthetic peptide; note = XENP022631 vlCDR3
YYGNYGGYFDV

SEQ ID NO: 24830 - protein, 214 aa, synthetic construct; identical to SEQ ID NO: 22239
  source 1..214: note = Description of Artificial Sequence: Synthetic polypeptide; note = XENP022631 2A11_H1.144_L2.137_Fab-1G6_L1.194_H1.279 Light Chain

SEQ ID NO: 24831 - protein, 107 aa, synthetic construct; identical to SEQ ID NO: 22240
  source 1..107: note = Description of Artificial Sequence: Synthetic polypeptide; note = VL of XENP022631

SEQ ID NO: 24832 - protein, 11 aa, synthetic construct
  source 1..11: note = Description of Artificial Sequence: Synthetic peptide; note = XENP022631 vlCDR1
QASQDIGNYLN

SEQ ID NO: 24833 - protein, 7 aa, synthetic construct
  source 1..7: note = Description of Artificial Sequence: Synthetic peptide; note = XENP022631 vlCDR2
FTSYLHS

SEQ ID NO: 24834 - protein, 9 aa, synthetic construct
  source 1..9: note = Description of Artificial Sequence: Synthetic peptide; note = XENP022631 vlCDR3
QEGNTLPYT

SEQ ID NO: 24835 - protein, 447 aa, synthetic construct; identical to SEQ ID NO: 22064
  source 1..447: note = Description of Artificial Sequence: Synthetic polypeptide; note = XENP022668 2A11_H1.125_L2.126_Fab-1G6_L1.194_H1.279 Fab-Fc Heavy Chain

SEQ ID NO: 24836 - protein, 118 aa, synthetic construct; identical to SEQ ID NO: 22065
  source 1..118: note = Description of Artificial Sequence: Synthetic polypeptide; note = VH of XENP022668

SEQ ID NO: 24837 - protein, 5 aa, synthetic construct
  source 1..5: note = Description of Artificial Sequence: Synthetic peptide; note = XENP022668 vhCDR1
HYFMH

SEQ ID NO: 24838 - protein, 17 aa, synthetic construct
  source 1..17: note = Description of Artificial Sequence: Synthetic peptide; note = XENP022668 vhCDR2
WIDPYLGDTEYAPKFQG

SEQ ID NO: 24839 - protein, 9 aa, synthetic construct
  source 1..9: note = Description of Artificial Sequence: Synthetic peptide; note = XENP022668 vhCDR3
RGVYQALDY

SEQ ID NO: 24840 - protein, 480 aa, synthetic construct; identical to SEQ ID NO: 23221
  source 1..480: note = Description of Artificial Sequence: Synthetic polypeptide; note = XENP022668 2A11_H1.125_L2.126_Fab-1G6_L1.194_H1.279 scFv-Fc Heavy Chain

SEQ ID NO: 24841 - protein, 107 aa, synthetic construct; identical to SEQ ID NO: 10999
  source 1..107: note = Description of Artificial Sequence: Synthetic polypeptide; note = VH of XENP022668

SEQ ID NO: 24842 - protein, 122 aa, synthetic construct; identical to SEQ ID NO: 10908
  source 1..122: note = Description of Artificial Sequence: Synthetic polypeptide; note = VL of XENP022668

SEQ ID NO: 24843 - protein, 231 aa, synthetic construct; identical to SEQ ID NO: 21532
  source 1..231: note = Description of Artificial Sequence: Synthetic polypeptide; note = Fc chain of XENP022668

SEQ ID NO: 24844 - protein, 11 aa, synthetic construct
  source 1..11: note = Description of Artificial Sequence: Synthetic peptide; note = XENP022668 vhCDR1
RASQSVGNDVA

SEQ ID NO: 24845 - protein, 7 aa, synthetic construct
  source 1..7: note = Description of Artificial Sequence: Synthetic peptide; note = XENP022668 vhCDR2
YASHRYT

SEQ ID NO: 24846 - protein, 9 aa, synthetic construct
  source 1..9: note = Description of Artificial Sequence: Synthetic peptide; note = XENP022668 vhCDR3
QQDFSSPRT

SEQ ID NO: 24847 - protein, 5 aa, synthetic construct
  source 1..5: note = Description of Artificial Sequence: Synthetic peptide; note = XENP022668 vlCDR1
NYWMN

SEQ ID NO: 24848 - protein, 19 aa, synthetic construct
  source 1..19: note = Description of Artificial Sequence: Synthetic peptide; note = XENP022668 vlCDR2
EIRLYSNNYATHYAESVKG

SEQ ID NO: 24849 - protein, 11 aa, synthetic construct
  source 1..11: note = Description of Artificial Sequence: Synthetic peptide; note = XENP022668 vlCDR3
YYGNYGGYFDV

SEQ ID NO: 24850 - protein, 214 aa, synthetic construct; identical to SEQ ID NO: 22259
  source 1..214: note = Description of Artificial Sequence: Synthetic polypeptide; note = XENP022668 2A11_H1.125_L2.126_Fab-1G6_L1.194_H1.279 Light Chain

SEQ ID NO: 24851 - protein, 107 aa, synthetic construct; identical to SEQ ID NO: 22260
  source 1..107: note = Description of Artificial Sequence: Synthetic polypeptide; note = VL of XENP022668

SEQ ID NO: 24852 - protein, 11 aa, synthetic construct
  source 1..11: note = Description of Artificial Sequence: Synthetic peptide; note = XENP022668 vlCDR1
QASQDIGNYLN

SEQ ID NO: 24853 - protein, 7 aa, synthetic construct
  source 1..7: note = Description of Artificial Sequence: Synthetic peptide; note = XENP022668 vlCDR2
FTSYLHS

SEQ ID NO: 24854 - protein, 9 aa, synthetic construct
  source 1..9: note = Description of Artificial Sequence: Synthetic peptide; note = XENP022668 vlCDR3
QEGNTLPYT

SEQ ID NO: 24855 - protein, 447 aa, synthetic construct; identical to SEQ ID NO: 22064
  source 1..447: note = Description of Artificial Sequence: Synthetic polypeptide; note = XENP022669 2A11_H1.125_L2.142_Fab-1G6_L1.194_H1.279 Fab-Fc Heavy Chain

SEQ ID NO: 24856 - protein, 118 aa, synthetic construct; identical to SEQ ID NO: 22065
  source 1..118: note = Description of Artificial Sequence: Synthetic polypeptide; note = VH of XENP022669

SEQ ID NO: 24857 - protein, 5 aa, synthetic construct
  source 1..5: note = Description of Artificial Sequence: Synthetic peptide; note = XENP022669 vhCDR1
HYFMH

SEQ ID NO: 24858 - protein, 17 aa, synthetic construct
  source 1..17: note = Description of Artificial Sequence: Synthetic peptide; note = XENP022669 vhCDR2
WIDPYLGDTEYAPKFQG

SEQ ID NO: 24859 - protein, 9 aa, synthetic construct
  source 1..9: note = Description of Artificial Sequence: Synthetic peptide; note = XENP022669 vhCDR3
RGVYQALDY

SEQ ID NO: 24860 - protein, 480 aa, synthetic construct; identical to SEQ ID NO: 23221
  source 1..480: note = Description of Artificial Sequence: Synthetic polypeptide; note = XENP022669 2A11_H1.125_L2.142_Fab-1G6_L1.194_H1.279 scFv-Fc Heavy Chain

SEQ ID NO: 24861 - protein, 107 aa, synthetic construct; identical to SEQ ID NO: 10999
  source 1..107: note = Description of Artificial Sequence: Synthetic polypeptide; note = VH of XENP022669

SEQ ID NO: 24862 - protein, 122 aa, synthetic construct; identical to SEQ ID NO: 10908
  source 1..122: note = Description of Artificial Sequence: Synthetic polypeptide; note = VL of XENP022669

SEQ ID NO: 24863 - protein, 231 aa, synthetic construct; identical to SEQ ID NO: 21532
  source 1..231: note = Description of Artificial Sequence: Synthetic polypeptide; note = Fc chain of XENP022669

SEQ ID NO: 24864 - protein, 11 aa, synthetic construct
  source 1..11: note = Description of Artificial Sequence: Synthetic peptide; note = XENP022669 vhCDR1
RASQSVGNDVA

SEQ ID NO: 24865 - protein, 7 aa, synthetic construct
  source 1..7: note = Description of Artificial Sequence: Synthetic peptide; note = XENP022669 vhCDR2
YASHRYT

SEQ ID NO: 24866 - protein, 9 aa, synthetic construct
  source 1..9: note = Description of Artificial Sequence: Synthetic peptide; note = XENP022669 vhCDR3
QQDFSSPRT

SEQ ID NO: 24867 - protein, 5 aa, synthetic construct
  source 1..5: note = Description of Artificial Sequence: Synthetic peptide; note = XENP022669 vlCDR1
NYWMN

SEQ ID NO: 24868 - protein, 19 aa, synthetic construct
  source 1..19: note = Description of Artificial Sequence: Synthetic peptide; note = XENP022669 vlCDR2
EIRLYSNNYATHYAESVKG

SEQ ID NO: 24869 - protein, 11 aa, synthetic construct
  source 1..11: note = Description of Artificial Sequence: Synthetic peptide; note = XENP022669 vlCDR3
YYGNYGGYFDV

SEQ ID NO: 24870 - protein, 214 aa, synthetic construct; identical to SEQ ID NO: 22279
  source 1..214: note = Description of Artificial Sequence: Synthetic polypeptide; note = XENP022669 2A11_H1.125_L2.142_Fab-1G6_L1.194_H1.279 Light Chain

SEQ ID NO: 24871 - protein, 107 aa, synthetic construct; identical to SEQ ID NO: 22280
  source 1..107: note = Description of Artificial Sequence: Synthetic polypeptide; note = VL of XENP022669

SEQ ID NO: 24872 - protein, 11 aa, synthetic construct
  source 1..11: note = Description of Artificial Sequence: Synthetic peptide; note = XENP022669 vlCDR1
QASQDIGNYLN

SEQ ID NO: 24873 - protein, 7 aa, synthetic construct
  source 1..7: note = Description of Artificial Sequence: Synthetic peptide; note = XENP022669 vlCDR2
FTSYLHS

SEQ ID NO: 24874 - protein, 9 aa, synthetic construct
  source 1..9: note = Description of Artificial Sequence: Synthetic peptide; note = XENP022669 vlCDR3
QQGNTLPYT

SEQ ID NO: 24875 - protein, 447 aa, synthetic construct; identical to SEQ ID NO: 22084
  source 1..447: note = Description of Artificial Sequence: Synthetic polypeptide; note = XENP022670 2A11_H1.144_L2.132_Fab-1G6_L1.194_H1.279 Fab-Fc Heavy Chain

SEQ ID NO: 24876 - protein, 118 aa, synthetic construct; identical to SEQ ID NO: 22085
  source 1..118: note = Description of Artificial Sequence: Synthetic polypeptide; note = VH of XENP022670

SEQ ID NO: 24877 - protein, 5 aa, synthetic construct
  source 1..5: note = Description of Artificial Sequence: Synthetic peptide; note = XENP022670 vhCDR1
DYFMH

SEQ ID NO: 24878 - protein, 17 aa, synthetic construct
  source 1..17: note = Description of Artificial Sequence: Synthetic peptide; note = XENP022670 vhCDR2
WIDPELGDTEYAPKFQG

SEQ ID NO: 24879 - protein, 9 aa, synthetic construct
  source 1..9: note = Description of Artificial Sequence: Synthetic peptide; note = XENP022670 vhCDR3
RGVYQALDY

SEQ ID NO: 24880 - protein, 480 aa, synthetic construct; identical to SEQ ID NO: 23221
  source 1..480: note = Description of Artificial Sequence: Synthetic polypeptide; note = XENP022670 2A11_H1.144_L2.132_Fab-1G6_L1.194_H1.279 scFv-Fc Heavy Chain

SEQ ID NO: 24881 - protein, 107 aa, synthetic construct; identical to SEQ ID NO: 10999
  source 1..107: note = Description of Artificial Sequence: Synthetic polypeptide; note = VH of XENP022670

SEQ ID NO: 24882 - protein, 122 aa, synthetic construct; identical to SEQ ID NO: 10908
  source 1..122: note = Description of Artificial Sequence: Synthetic polypeptide; note = VL of XENP022670

SEQ ID NO: 24883 - protein, 231 aa, synthetic construct; identical to SEQ ID NO: 21532
  source 1..231: note = Description of Artificial Sequence: Synthetic polypeptide; note = Fc chain of XENP022670

SEQ ID NO: 24884 - protein, 11 aa, synthetic construct
  source 1..11: note = Description of Artificial Sequence: Synthetic peptide; note = XENP022670 vhCDR1
RASQSVGNDVA

SEQ ID NO: 24885 - protein, 7 aa, synthetic construct
  source 1..7: note = Description of Artificial Sequence: Synthetic peptide; note = XENP022670 vhCDR2
YASHRYT

SEQ ID NO: 24886 - protein, 9 aa, synthetic construct
  source 1..9: note = Description of Artificial Sequence: Synthetic peptide; note = XENP022670 vhCDR3
QQDFSSPRT

SEQ ID NO: 24887 - protein, 5 aa, synthetic construct
  source 1..5: note = Description of Artificial Sequence: Synthetic peptide; note = XENP022670 vlCDR1
NYWMN

SEQ ID NO: 24888 - protein, 19 aa, synthetic construct
  source 1..19: note = Description of Artificial Sequence: Synthetic peptide; note = XENP022670 vlCDR2
EIRLYSNNYATHYAESVKG

SEQ ID NO: 24889 - protein, 11 aa, synthetic construct
  source 1..11: note = Description of Artificial Sequence: Synthetic peptide; note = XENP022670 vlCDR3
YYGNYGGYFDV

SEQ ID NO: 24890 - protein, 214 aa, synthetic construct; identical to SEQ ID NO: 22219
  source 1..214: note = Description of Artificial Sequence: Synthetic polypeptide; note = XENP022670 2A11_H1.144_L2.132_Fab-1G6_L1.194_H1.279 Light Chain

SEQ ID NO: 24891 - protein, 107 aa, synthetic construct; identical to SEQ ID NO: 22220
  source 1..107: note = Description of Artificial Sequence: Synthetic polypeptide; note = VL of XENP022670

SEQ ID NO: 24892 - protein, 11 aa, synthetic construct
  source 1..11: note = Description of Artificial Sequence: Synthetic peptide; note = XENP022670 vlCDR1
QASQDIGNYLN

SEQ ID NO: 24893 - protein, 7 aa, synthetic construct
  source 1..7: note = Description of Artificial Sequence: Synthetic peptide; note = XENP022670 vlCDR2
FTSYLHS

SEQ ID NO: 24894 - protein, 9 aa, synthetic construct
  source 1..9: note = Description of Artificial Sequence: Synthetic peptide; note = XENP022670 vlCDR3
QEGNTLPYT

SEQ ID NO: 24895 - protein, 447 aa, synthetic construct; identical to SEQ ID NO: 22084
  source 1..447: note = Description of Artificial Sequence: Synthetic polypeptide; note = XENP022671 2A11_H1.144_L2.126_Fab-1G6_L1.194_H1.279 Fab-Fc Heavy Chain

SEQ ID NO: 24896 - protein, 118 aa, synthetic construct; identical to SEQ ID NO: 22085
  source 1..118: note = Description of Artificial Sequence: Synthetic polypeptide; note = VH of XENP022671

SEQ ID NO: 24897 - protein, 5 aa, synthetic construct
  source 1..5: note = Description of Artificial Sequence: Synthetic peptide; note = XENP022671 vhCDR1
DYFMH

SEQ ID NO: 24898 - protein, 17 aa, synthetic construct
  source 1..17: note = Description of Artificial Sequence: Synthetic peptide; note = XENP022671 vhCDR2
WIDPELGDTEYAPKFQG

SEQ ID NO: 24899 - protein, 9 aa, synthetic construct
  source 1..9: note = Description of Artificial Sequence: Synthetic peptide; note = XENP022671 vhCDR3
RGVYQALDY

SEQ ID NO: 24900 - protein, 480 aa, synthetic construct; identical to SEQ ID NO: 23221
  source 1..480: note = Description of Artificial Sequence: Synthetic polypeptide; note = XENP022671 2A11_H1.144_L2.126_Fab-1G6_L1.194_H1.279 scFv-Fc Heavy Chain

SEQ ID NO: 24901 - protein, 107 aa, synthetic construct; identical to SEQ ID NO: 10999
  source 1..107: note = Description of Artificial Sequence: Synthetic polypeptide; note = VH of XENP022671

SEQ ID NO: 24902 - protein, 122 aa, synthetic construct; identical to SEQ ID NO: 10908
  source 1..122: note = Description of Artificial Sequence: Synthetic polypeptide; note = VL of XENP022671

SEQ ID NO: 24903 - protein, 231 aa, synthetic construct; identical to SEQ ID NO: 21532
  source 1..231: note = Description of Artificial Sequence: Synthetic polypeptide; note = Fc chain of XENP022671

SEQ ID NO: 24904 - protein, 11 aa, synthetic construct
  source 1..11: note = Description of Artificial Sequence: Synthetic peptide; note = XENP022671 vhCDR1
RASQSVGNDVA

SEQ ID NO: 24905 - protein, 7 aa, synthetic construct
  source 1..7: note = Description of Artificial Sequence: Synthetic peptide; note = XENP022671 vhCDR2
YASHRYT

SEQ ID NO: 24906 - protein, 9 aa, synthetic construct
  source 1..9: note = Description of Artificial Sequence: Synthetic peptide; note = XENP022671 vhCDR3
QQDFSSPRT

SEQ ID NO: 24907 - protein, 5 aa, synthetic construct
  source 1..5: note = Description of Artificial Sequence: Synthetic peptide; note = XENP022671 vlCDR1
NYWMN

SEQ ID NO: 24908 - protein, 19 aa, synthetic construct
  source 1..19: note = Description of Artificial Sequence: Synthetic peptide; note = XENP022671 vlCDR2
EIRLYSNNYATHYAESVKG

SEQ ID NO: 24909 - protein, 11 aa, synthetic construct
  source 1..11: note = Description of Artificial Sequence: Synthetic peptide; note = XENP022671 vlCDR3
YYGNYGGYFDV

SEQ ID NO: 24910 - protein, 214 aa, synthetic construct; identical to SEQ ID NO: 22259
  source 1..214: note = Description of Artificial Sequence: Synthetic polypeptide; note = XENP022671 2A11_H1.144_L2.126_Fab-1G6_L1.194_H1.279 Light Chain

SEQ ID NO: 24911 - protein, 107 aa, synthetic construct; identical to SEQ ID NO: 22260
  source 1..107: note = Description of Artificial Sequence: Synthetic polypeptide; note = VL of XENP022671

SEQ ID NO: 24912 - protein, 11 aa, synthetic construct
  source 1..11: note = Description of Artificial Sequence: Synthetic peptide; note = XENP022671 vlCDR1
QASQDIGNYLN

SEQ ID NO: 24913 - protein, 7 aa, synthetic construct
  source 1..7: note = Description of Artificial Sequence: Synthetic peptide; note = XENP022671 vlCDR2
FTSYLHS

SEQ ID NO: 24914 - protein, 9 aa, synthetic construct
  source 1..9: note = Description of Artificial Sequence: Synthetic peptide; note = XENP022671 vlCDR3
QEGNTLPYT

SEQ ID NO: 24915 - protein, 447 aa, synthetic construct; identical to SEQ ID NO: 22084
  source 1..447: note = Description of Artificial Sequence: Synthetic polypeptide; note = XENP022672 2A11_H1.144_L2.142_Fab-1G6_L1.194_H1.279 Fab-Fc Heavy Chain

SEQ ID NO: 24916 - protein, 118 aa, synthetic construct; identical to SEQ ID NO: 22085
  source 1..118: note = Description of Artificial Sequence: Synthetic polypeptide; note = VH of XENP022672

SEQ ID NO: 24917 - protein, 5 aa, synthetic construct
  source 1..5: note = Description of Artificial Sequence: Synthetic peptide; note = XENP022672 vhCDR1
DYFMH

SEQ ID NO: 24918 - protein, 17 aa, synthetic construct
  source 1..17: note = Description of Artificial Sequence: Synthetic peptide; note = XENP022672 vhCDR2
WIDPELGDTEYAPKFQG

SEQ ID NO: 24919 - protein, 9 aa, synthetic construct
  source 1..9: note = Description of Artificial Sequence: Synthetic peptide; note = XENP022672 vhCDR3
RGVYQALDY

SEQ ID NO: 24920 - protein, 480 aa, synthetic construct; identical to SEQ ID NO: 23221
  source 1..480: note = Description of Artificial Sequence: Synthetic polypeptide; note = XENP022672 2A11_H1.144_L2.142_Fab-1G6_L1.194_H1.279 scFv-Fc Heavy Chain

SEQ ID NO: 24921 - protein, 107 aa, synthetic construct; identical to SEQ ID NO: 10999
  source 1..107: note = Description of Artificial Sequence: Synthetic polypeptide; note = VH of XENP022672

SEQ ID NO: 24922 - protein, 122 aa, synthetic construct; identical to SEQ ID NO: 10908
  source 1..122: note = Description of Artificial Sequence: Synthetic polypeptide; note = VL of XENP022672

SEQ ID NO: 24923 - protein, 231 aa, synthetic construct; identical to SEQ ID NO: 21532
  source 1..231: note = Description of Artificial Sequence: Synthetic polypeptide; note = Fc chain of XENP022672

SEQ ID NO: 24924 - protein, 11 aa, synthetic construct
  source 1..11: note = Description of Artificial Sequence: Synthetic peptide; note = XENP022672 vhCDR1
RASQSVGNDVA

SEQ ID NO: 24925 - protein, 7 aa, synthetic construct
  source 1..7: note = Description of Artificial Sequence: Synthetic peptide; note = XENP022672 vhCDR2
YASHRYT

SEQ ID NO: 24926 - protein, 9 aa, synthetic construct
  source 1..9: note = Description of Artificial Sequence: Synthetic peptide; note = XENP022672 vhCDR3
QQDFSSPRT

SEQ ID NO: 24927 - protein, 5 aa, synthetic construct
  source 1..5: note = Description of Artificial Sequence: Synthetic peptide; note = XENP022672 vlCDR1
NYWMN

SEQ ID NO: 24928 - protein, 19 aa, synthetic construct
  source 1..19: note = Description of Artificial Sequence: Synthetic peptide; note = XENP022672 vlCDR2
EIRLYSNNYATHYAESVKG

SEQ ID NO: 24929 - protein, 11 aa, synthetic construct
  source 1..11: note = Description of Artificial Sequence: Synthetic peptide; note = XENP022672 vlCDR3
YYGNYGGYFDV

SEQ ID NO: 24930 - protein, 214 aa, synthetic construct; identical to SEQ ID NO: 22279
  source 1..214: note = Description of Artificial Sequence: Synthetic polypeptide; note = XENP022672 2A11_H1.144_L2.142_Fab-1G6_L1.194_H1.279 Light Chain

SEQ ID NO: 24931 - protein, 107 aa, synthetic construct; identical to SEQ ID NO: 22280
  source 1..107: note = Description of Artificial Sequence: Synthetic polypeptide; note = VL of XENP022672

SEQ ID NO: 24932 - protein, 11 aa, synthetic construct
  source 1..11: note = Description of Artificial Sequence: Synthetic peptide; note = XENP022672 vlCDR1
QASQDIGNYLN

SEQ ID NO: 24933 - protein, 7 aa, synthetic construct
  source 1..7: note = Description of Artificial Sequence: Synthetic peptide; note = XENP022672 vlCDR2
FTSYLHS

SEQ ID NO: 24934 - protein, 9 aa, synthetic construct
  source 1..9: note = Description of Artificial Sequence: Synthetic peptide; note = XENP022672 vlCDR3
QQGNTLPYT

SEQ ID NO: 24935 - protein, 450 aa, synthetic construct; identical to SEQ ID NO: 17625
  source 1..450: note = Description of Artificial Sequence: Synthetic polypeptide; note = XENP020038 7G8_H2L2_Fab-1G6_H1.279_L1.194 Fab-Fc Heavy Chain

SEQ ID NO: 24936 - protein, 121 aa, synthetic construct; identical to SEQ ID NO: 17626
  source 1..121: note = Description of Artificial Sequence: Synthetic polypeptide; note = VH of XENP020038

SEQ ID NO: 24937 - protein, 5 aa, synthetic construct
  source 1..5: note = Description of Artificial Sequence: Synthetic peptide; note = XENP020038 vhCDR1
DAWMD

SEQ ID NO: 24938 - protein, 19 aa, synthetic construct
  source 1..19: note = Description of Artificial Sequence: Synthetic peptide; note = XENP020038 vhCDR2
EIRTKANNHATYYAESVKG

SEQ ID NO: 24939 - protein, 10 aa, synthetic construct
  source 1..10: note = Description of Artificial Sequence: Synthetic peptide; note = XENP020038 vhCDR3
LANWDWYFDV

SEQ ID NO: 24940 - protein, 480 aa, synthetic construct; identical to SEQ ID NO: 23401
  source 1..480: note = Description of Artificial Sequence: Synthetic polypeptide; note = XENP020038 7G8_H2L2_Fab-1G6_H1.279_L1.194 scFv-Fc Heavy Chain

SEQ ID NO: 24941 - protein, 122 aa, synthetic construct; identical to SEQ ID NO: 10908
  source 1..122: note = Description of Artificial Sequence: Synthetic polypeptide; note = VH of XENP020038

SEQ ID NO: 24942 - protein, 338 aa, synthetic construct
  source 1..338: note = Description of Artificial Sequence: Synthetic polypeptide; note = VL of XENP020038
EIVLTQSPATLSASPGERVTLTCRASQSVGNDVAWYQQKPGQAPRLLINYASHRYTGVPDRFTGSGYGTEFTLTISSVQSEDFGVYYCQQDFSSPRTFGGGTKVEIKEPKSSDKTHTCPPCPAPPVAGPSVFLFPPKPKDTLMISRTPEVTCVVVDVKHEDPEVKFNWYVDGVEVHNAKTKPREEQYNSTYRVVSVLTVLHQDWLNGKEYKCKVSNKALPAPIEKTISKAKGQPREPQVYTLPPSREQMTKNQVKLTCLVKGFYPSDIAVEWESNGQPENNYKTTPPVLDSDGSFFLYSKLTVDKSRWQQGNVFSCSVMHEALHNHYTQKSLSLSPGK

SEQ ID NO: 24943 - protein, 5 aa, synthetic construct
  source 1..5: note = Description of Artificial Sequence: Synthetic peptide; note = XENP020038 vhCDR1
NYWMN

SEQ ID NO: 24944 - protein, 19 aa, synthetic construct
  source 1..19: note = Description of Artificial Sequence: Synthetic peptide; note = XENP020038 vhCDR2
EIRLYSNNYATHYAESVKG

SEQ ID NO: 24945 - protein, 11 aa, synthetic construct
  source 1..11: note = Description of Artificial Sequence: Synthetic peptide; note = XENP020038 vhCDR3
YYGNYGGYFDV

SEQ ID NO: 24946 - protein, 11 aa, synthetic construct
  source 1..11: note = Description of Artificial Sequence: Synthetic peptide; note = XENP020038 vlCDR1
RASQSVGNDVA

SEQ ID NO: 24947 - protein, 7 aa, synthetic construct
  source 1..7: note = Description of Artificial Sequence: Synthetic peptide; note = XENP020038 vlCDR2
YASHRYT

SEQ ID NO: 24948 - protein, 9 aa, synthetic construct
  source 1..9: note = Description of Artificial Sequence: Synthetic peptide; note = XENP020038 vlCDR3
QQDFSSPRT

SEQ ID NO: 24949 - protein, 218 aa, synthetic construct; identical to SEQ ID NO: 17610
  source 1..218: note = Description of Artificial Sequence: Synthetic polypeptide; note = XENP020038 7G8_H2L2_Fab-1G6_H1.279_L1.194 Light Chain

SEQ ID NO: 24950 - protein, 111 aa, synthetic construct; identical to SEQ ID NO: 17611
  source 1..111: note = Description of Artificial Sequence: Synthetic polypeptide; note = VL of XENP020038

SEQ ID NO: 24951 - protein, 15 aa, synthetic construct
  source 1..15: note = Description of Artificial Sequence: Synthetic peptide; note = XENP020038 vlCDR1
RASQSVDYDGDSYMN

SEQ ID NO: 24952 - protein, 7 aa, synthetic construct
  source 1..7: note = Description of Artificial Sequence: Synthetic peptide; note = XENP020038 vlCDR2
AASNLES

SEQ ID NO: 24953 - protein, 9 aa, synthetic construct
  source 1..9: note = Description of Artificial Sequence: Synthetic peptide; note = XENP020038 vlCDR3
QQSNEDPFT

SEQ ID NO: 24954 - protein, 450 aa, synthetic construct; identical to SEQ ID NO: 22324
  source 1..450: note = Description of Artificial Sequence: Synthetic polypeptide; note = XENP022521 7G8_H3.18_L1.11-1G6_L1.194_H1.279 Fab-Fc Heavy Chain

SEQ ID NO: 24955 - protein, 121 aa, synthetic construct; identical to SEQ ID NO: 22325
  source 1..121: note = Description of Artificial Sequence: Synthetic polypeptide; note = VH of XENP022521

SEQ ID NO: 24956 - protein, 5 aa, synthetic construct
  source 1..5: note = Description of Artificial Sequence: Synthetic peptide; note = XENP022521 vhCDR1
DAWMD

SEQ ID NO: 24957 - protein, 19 aa, synthetic construct
  source 1..19: note = Description of Artificial Sequence: Synthetic peptide; note = XENP022521 vhCDR2
EISTKANNHATYYAESVKG

SEQ ID NO: 24958 - protein, 10 aa, synthetic construct
  source 1..10: note = Description of Artificial Sequence: Synthetic peptide; note = XENP022521 vhCDR3
LATWDWYFDV

SEQ ID NO: 24959 - protein, 480 aa, synthetic construct; identical to SEQ ID NO: 23221
  source 1..480: note = Description of Artificial Sequence: Synthetic polypeptide; note = XENP022521 7G8_H3.18_L1.11-1G6_L1.194_H1.279 scFv-Fc Heavy Chain

SEQ ID NO: 24960 - protein, 107 aa, synthetic construct; identical to SEQ ID NO: 10999
  source 1..107: note = Description of Artificial Sequence: Synthetic polypeptide; note = VH of XENP022521

SEQ ID NO: 24961 - protein, 122 aa, synthetic construct; identical to SEQ ID NO: 10908
  source 1..122: note = Description of Artificial Sequence: Synthetic polypeptide; note = VL of XENP022521

SEQ ID NO: 24962 - protein, 231 aa, synthetic construct; identical to SEQ ID NO: 21532
  source 1..231: note = Description of Artificial Sequence: Synthetic polypeptide; note = Fc chain of XENP022521

SEQ ID NO: 24963 - protein, 11 aa, synthetic construct
  source 1..11: note = Description of Artificial Sequence: Synthetic peptide; note = XENP022521 vhCDR1
RASQSVGNDVA

SEQ ID NO: 24964 - protein, 7 aa, synthetic construct
  source 1..7: note = Description of Artificial Sequence: Synthetic peptide; note = XENP022521 vhCDR2
YASHRYT

SEQ ID NO: 24965 - protein, 9 aa, synthetic construct
  source 1..9: note = Description of Artificial Sequence: Synthetic peptide; note = XENP022521 vhCDR3
QQDFSSPRT

SEQ ID NO: 24966 - protein, 5 aa, synthetic construct
  source 1..5: note = Description of Artificial Sequence: Synthetic peptide; note = XENP022521 vlCDR1
NYWMN

SEQ ID NO: 24967 - protein, 19 aa, synthetic construct
  source 1..19: note = Description of Artificial Sequence: Synthetic peptide; note = XENP022521 vlCDR2
EIRLYSNNYATHYAESVKG

SEQ ID NO: 24968 - protein, 11 aa, synthetic construct
  source 1..11: note = Description of Artificial Sequence: Synthetic peptide; note = XENP022521 vlCDR3
YYGNYGGYFDV

SEQ ID NO: 24969 - protein, 218 aa, synthetic construct; identical to SEQ ID NO: 22359
  source 1..218: note = Description of Artificial Sequence: Synthetic polypeptide; note = XENP022521 7G8_H3.18_L1.11-1G6_L1.194_H1.279 Light Chain

SEQ ID NO: 24970 - protein, 111 aa, synthetic construct; identical to SEQ ID NO: 22360
  source 1..111: note = Description of Artificial Sequence: Synthetic polypeptide; note = VL of XENP022521

SEQ ID NO: 24971 - protein, 15 aa, synthetic construct
  source 1..15: note = Description of Artificial Sequence: Synthetic peptide; note = XENP022521 vlCDR1
RASQSVDYDGDSYMN

SEQ ID NO: 24972 - protein, 7 aa, synthetic construct
  source 1..7: note = Description of Artificial Sequence: Synthetic peptide; note = XENP022521 vlCDR2
AASELES

SEQ ID NO: 24973 - protein, 9 aa, synthetic construct
  source 1..9: note = Description of Artificial Sequence: Synthetic peptide; note = XENP022521 vlCDR3
QQSNEDPFT

SEQ ID NO: 24974 - protein, 450 aa, synthetic construct; identical to SEQ ID NO: 22424
  source 1..450: note = Description of Artificial Sequence: Synthetic polypeptide; note = XENP022522 7G8_H3.28_L1.13-1G6_L1.194_H1.279 Fab-Fc Heavy Chain

SEQ ID NO: 24975 - protein, 121 aa, synthetic construct; identical to SEQ ID NO: 22425
  source 1..121: note = Description of Artificial Sequence: Synthetic polypeptide; note = VH of XENP022522

SEQ ID NO: 24976 - protein, 5 aa, synthetic construct
  source 1..5: note = Description of Artificial Sequence: Synthetic peptide; note = XENP022522 vhCDR1
DAWMD

SEQ ID NO: 24977 - protein, 19 aa, synthetic construct
  source 1..19: note = Description of Artificial Sequence: Synthetic peptide; note = XENP022522 vhCDR2
EISTKAYNHATYYAESVKG

SEQ ID NO: 24978 - protein, 10 aa, synthetic construct
  source 1..10: note = Description of Artificial Sequence: Synthetic peptide; note = XENP022522 vhCDR3
LATWDWYFDV

SEQ ID NO: 24979 - protein, 480 aa, synthetic construct; identical to SEQ ID NO: 23221
  source 1..480: note = Description of Artificial Sequence: Synthetic polypeptide; note = XENP022522 7G8_H3.28_L1.13-1G6_L1.194_H1.279 scFv-Fc Heavy Chain

SEQ ID NO: 24980 - protein, 107 aa, synthetic construct; identical to SEQ ID NO: 10999
  source 1..107: note = Description of Artificial Sequence: Synthetic polypeptide; note = VH of XENP022522

SEQ ID NO: 24981 - protein, 122 aa, synthetic construct; identical to SEQ ID NO: 10908
  source 1..122: note = Description of Artificial Sequence: Synthetic polypeptide; note = VL of XENP022522

SEQ ID NO: 24982 - protein, 231 aa, synthetic construct; identical to SEQ ID NO: 21532
  source 1..231: note = Description of Artificial Sequence: Synthetic polypeptide; note = Fc chain of XENP022522

SEQ ID NO: 24983 - protein, 11 aa, synthetic construct
  source 1..11: note = Description of Artificial Sequence: Synthetic peptide; note = XENP022522 vhCDR1
RASQSVGNDVA

SEQ ID NO: 24984 - protein, 7 aa, synthetic construct
  source 1..7: note = Description of Artificial Sequence: Synthetic peptide; note = XENP022522 vhCDR2
YASHRYT

SEQ ID NO: 24985 - protein, 9 aa, synthetic construct
  source 1..9: note = Description of Artificial Sequence: Synthetic peptide; note = XENP022522 vhCDR3
QQDFSSPRT

SEQ ID NO: 24986 - protein, 5 aa, synthetic construct
  source 1..5: note = Description of Artificial Sequence: Synthetic peptide; note = XENP022522 vlCDR1
NYWMN

SEQ ID NO: 24987 - protein, 19 aa, synthetic construct
  source 1..19: note = Description of Artificial Sequence: Synthetic peptide; note = XENP022522 vlCDR2
EIRLYSNNYATHYAESVKG

SEQ ID NO: 24988 - protein, 11 aa, synthetic construct
  source 1..11: note = Description of Artificial Sequence: Synthetic peptide; note = XENP022522 vlCDR3
YYGNYGGYFDV

SEQ ID NO: 24989 - protein, 218 aa, synthetic construct; identical to SEQ ID NO: 22419
  source 1..218: note = Description of Artificial Sequence: Synthetic polypeptide; note = XENP022522 7G8_H3.28_L1.13-1G6_L1.194_H1.279 Light Chain

SEQ ID NO: 24990 - protein, 111 aa, synthetic construct; identical to SEQ ID NO: 22420
  source 1..111: note = Description of Artificial Sequence: Synthetic polypeptide; note = VL of XENP022522

SEQ ID NO: 24991 - protein, 15 aa, synthetic construct
  source 1..15: note = Description of Artificial Sequence: Synthetic peptide; note = XENP022522 vlCDR1
RASQSVDHDGDSYMN

SEQ ID NO: 24992 - protein, 7 aa, synthetic construct
  source 1..7: note = Description of Artificial Sequence: Synthetic peptide; note = XENP022522 vlCDR2
AASELES

SEQ ID NO: 24993 - protein, 9 aa, synthetic construct
  source 1..9: note = Description of Artificial Sequence: Synthetic peptide; note = XENP022522 vlCDR3
QQSNEDPFT

SEQ ID NO: 24994 - protein, 450 aa, synthetic construct; identical to SEQ ID NO: 22484
  source 1..450: note = Description of Artificial Sequence: Synthetic polypeptide; note = XENP022565 7G8_H3.30_L1.11-1G6_L1.194_H1.279 Fab-Fc Heavy Chain

SEQ ID NO: 24995 - protein, 121 aa, synthetic construct; identical to SEQ ID NO: 22485
  source 1..121: note = Description of Artificial Sequence: Synthetic polypeptide; note = VH of XENP022565

SEQ ID NO: 24996 - protein, 5 aa, synthetic construct
  source 1..5: note = Description of Artificial Sequence: Synthetic peptide; note = XENP022565 vhCDR1
DAWMS

SEQ ID NO: 24997 - protein, 19 aa, synthetic construct
  source 1..19: note = Description of Artificial Sequence: Synthetic peptide; note = XENP022565 vhCDR2
EISTKANNHATYYAESVKG

SEQ ID NO: 24998 - protein, 10 aa, synthetic construct
  source 1..10: note = Description of Artificial Sequence: Synthetic peptide; note = XENP022565 vhCDR3
LATWDWYFDV

SEQ ID NO: 24999 - protein, 480 aa, synthetic construct; identical to SEQ ID NO: 23221
  source 1..480: note = Description of Artificial Sequence: Synthetic polypeptide; note = XENP022565 7G8_H3.30_L1.11-1G6_L1.194_H1.279 scFv-Fc Heavy Chain

SEQ ID NO: 25000 - protein, 107 aa, synthetic construct; identical to SEQ ID NO: 10999
  source 1..107: note = Description of Artificial Sequence: Synthetic polypeptide; note = VH of XENP022565

SEQ ID NO: 25001 - protein, 122 aa, synthetic construct; identical to SEQ ID NO: 10908
  source 1..122: note = Description of Artificial Sequence: Synthetic polypeptide; note = VL of XENP022565

SEQ ID NO: 25002 - protein, 231 aa, synthetic construct; identical to SEQ ID NO: 21532
  source 1..231: note = Description of Artificial Sequence: Synthetic polypeptide; note = Fc chain of XENP022565

SEQ ID NO: 25003 - protein, 11 aa, synthetic construct
  source 1..11: note = Description of Artificial Sequence: Synthetic peptide; note = XENP022565 vhCDR1
RASQSVGNDVA

SEQ ID NO: 25004 - protein, 7 aa, synthetic construct
  source 1..7: note = Description of Artificial Sequence: Synthetic peptide; note = XENP022565 vhCDR2
YASHRYT

SEQ ID NO: 25005 - protein, 9 aa, synthetic construct
  source 1..9: note = Description of Artificial Sequence: Synthetic peptide; note = XENP022565 vhCDR3
QQDFSSPRT

SEQ ID NO: 25006 - protein, 5 aa, synthetic construct
  source 1..5: note = Description of Artificial Sequence: Synthetic peptide; note = XENP022565 vlCDR1
NYWMN

SEQ ID NO: 25007 - protein, 19 aa, synthetic construct
  source 1..19: note = Description of Artificial Sequence: Synthetic peptide; note = XENP022565 vlCDR2
EIRLYSNNYATHYAESVKG

SEQ ID NO: 25008 - protein, 11 aa, synthetic construct
  source 1..11: note = Description of Artificial Sequence: Synthetic peptide; note = XENP022565 vlCDR3
YYGNYGGYFDV

SEQ ID NO: 25009 - protein, 218 aa, synthetic construct; identical to SEQ ID NO: 22359
  source 1..218: note = Description of Artificial Sequence: Synthetic polypeptide; note = XENP022565 7G8_H3.30_L1.11-1G6_L1.194_H1.279 Light Chain

SEQ ID NO: 25010 - protein, 111 aa, synthetic construct; identical to SEQ ID NO: 22360
  source 1..111: note = Description of Artificial Sequence: Synthetic polypeptide; note = VL of XENP022565

SEQ ID NO: 25011 - protein, 15 aa, synthetic construct
  source 1..15: note = Description of Artificial Sequence: Synthetic peptide; note = XENP022565 vlCDR1
RASQSVDYDGDSYMN

SEQ ID NO: 25012 - protein, 7 aa, synthetic construct
  source 1..7: note = Description of Artificial Sequence: Synthetic peptide; note = XENP022565 vlCDR2
AASELES

SEQ ID NO: 25013 - protein, 9 aa, synthetic construct
  source 1..9: note = Description of Artificial Sequence: Synthetic peptide; note = XENP022565 vlCDR3
QQSNEDPFT

SEQ ID NO: 25014 - protein, 450 aa, synthetic construct; identical to SEQ ID NO: 22504
  source 1..450: note = Description of Artificial Sequence: Synthetic polypeptide; note = XENP022566 7G8_H3.33_L1.11-1G6_L1.194_H1.279 Fab-Fc Heavy Chain

SEQ ID NO: 25015 - protein, 121 aa, synthetic construct; identical to SEQ ID NO: 22505
  source 1..121: note = Description of Artificial Sequence: Synthetic polypeptide; note = VH of XENP022566

SEQ ID NO: 25016 - protein, 5 aa, synthetic construct
  source 1..5: note = Description of Artificial Sequence: Synthetic peptide; note = XENP022566 vhCDR1
DAWMG

SEQ ID NO: 25017 - protein, 19 aa, synthetic construct
  source 1..19: note = Description of Artificial Sequence: Synthetic peptide; note = XENP022566 vhCDR2
EISTKANNHATYYAESVKG

SEQ ID NO: 25018 - protein, 10 aa, synthetic construct
  source 1..10: note = Description of Artificial Sequence: Synthetic peptide; note = XENP022566 vhCDR3
LATWDWYFDV

SEQ ID NO: 25019 - protein, 480 aa, synthetic construct; identical to SEQ ID NO: 23221
  source 1..480: note = Description of Artificial Sequence: Synthetic polypeptide; note = XENP022566 7G8_H3.33_L1.11-1G6_L1.194_H1.279 scFv-Fc Heavy Chain

SEQ ID NO: 25020 - protein, 107 aa, synthetic construct; identical to SEQ ID NO: 10999
  source 1..107: note = Description of Artificial Sequence: Synthetic polypeptide; note = VH of XENP022566

SEQ ID NO: 25021 - protein, 122 aa, synthetic construct; identical to SEQ ID NO: 10908
  source 1..122: note = Description of Artificial Sequence: Synthetic polypeptide; note = VL of XENP022566

SEQ ID NO: 25022 - protein, 231 aa, synthetic construct; identical to SEQ ID NO: 21532
  source 1..231: note = Description of Artificial Sequence: Synthetic polypeptide; note = Fc chain of XENP022566

SEQ ID NO: 25023 - protein, 11 aa, synthetic construct
  source 1..11: note = Description of Artificial Sequence: Synthetic peptide; note = XENP022566 vhCDR1
RASQSVGNDVA

SEQ ID NO: 25024 - protein, 7 aa, synthetic construct
  source 1..7: note = Description of Artificial Sequence: Synthetic peptide; note = XENP022566 vhCDR2
YASHRYT

SEQ ID NO: 25025 - protein, 9 aa, synthetic construct
  source 1..9: note = Description of Artificial Sequence: Synthetic peptide; note = XENP022566 vhCDR3
QQDFSSPRT

SEQ ID NO: 25026 - protein, 5 aa, synthetic construct
  source 1..5: note = Description of Artificial Sequence: Synthetic peptide; note = XENP022566 vlCDR1
NYWMN

SEQ ID NO: 25027 - protein, 19 aa, synthetic construct
  source 1..19: note = Description of Artificial Sequence: Synthetic peptide; note = XENP022566 vlCDR2
EIRLYSNNYATHYAESVKG

SEQ ID NO: 25028 - protein, 11 aa, synthetic construct
  source 1..11: note = Description of Artificial Sequence: Synthetic peptide; note = XENP022566 vlCDR3
YYGNYGGYFDV

SEQ ID NO: 25029 - protein, 218 aa, synthetic construct; identical to SEQ ID NO: 22359
  source 1..218: note = Description of Artificial Sequence: Synthetic polypeptide; note = XENP022566 7G8_H3.33_L1.11-1G6_L1.194_H1.279 Light Chain

SEQ ID NO: 25030 - protein, 111 aa, synthetic construct; identical to SEQ ID NO: 22360
  source 1..111: note = Description of Artificial Sequence: Synthetic polypeptide; note = VL of XENP022566

SEQ ID NO: 25031 - protein, 15 aa, synthetic construct
  source 1..15: note = Description of Artificial Sequence: Synthetic peptide; note = XENP022566 vlCDR1
RASQSVDYDGDSYMN

SEQ ID NO: 25032 - protein, 7 aa, synthetic construct
  source 1..7: note = Description of Artificial Sequence: Synthetic peptide; note = XENP022566 vlCDR2
AASELES

SEQ ID NO: 25033 - protein, 9 aa, synthetic construct
  source 1..9: note = Description of Artificial Sequence: Synthetic peptide; note = XENP022566 vlCDR3
QQSNEDPFT

SEQ ID NO: 25034 - protein, 450 aa, synthetic construct; identical to SEQ ID NO: 22324
  source 1..450: note = Description of Artificial Sequence: Synthetic polypeptide; note = XENP022567 7G8_H3.18_L1.30-1G6_L1.194_H1.279 Fab-Fc Heavy Chain

SEQ ID NO: 25035 - protein, 121 aa, synthetic construct; identical to SEQ ID NO: 22325
  source 1..121: note = Description of Artificial Sequence: Synthetic polypeptide; note = VH of XENP022567

SEQ ID NO: 25036 - protein, 5 aa, synthetic construct
  source 1..5: note = Description of Artificial Sequence: Synthetic peptide; note = XENP022567 vhCDR1
DAWMD

SEQ ID NO: 25037 - protein, 19 aa, synthetic construct
  source 1..19: note = Description of Artificial Sequence: Synthetic peptide; note = XENP022567 vhCDR2
EISTKANNHATYYAESVKG

SEQ ID NO: 25038 - protein, 10 aa, synthetic construct
  source 1..10: note = Description of Artificial Sequence: Synthetic peptide; note = XENP022567 vhCDR3
LATWDWYFDV

SEQ ID NO: 25039 - protein, 480 aa, synthetic construct; identical to SEQ ID NO: 23221
  source 1..480: note = Description of Artificial Sequence: Synthetic polypeptide; note = XENP022567 7G8_H3.18_L1.30-1G6_L1.194_H1.279 scFv-Fc Heavy Chain

SEQ ID NO: 25040 - protein, 107 aa, synthetic construct; identical to SEQ ID NO: 10999
  source 1..107: note = Description of Artificial Sequence: Synthetic polypeptide; note = VH of XENP022567

SEQ ID NO: 25041 - protein, 122 aa, synthetic construct; identical to SEQ ID NO: 10908
  source 1..122: note = Description of Artificial Sequence: Synthetic polypeptide; note = VL of XENP022567

SEQ ID NO: 25042 - protein, 231 aa, synthetic construct; identical to SEQ ID NO: 21532
  source 1..231: note = Description of Artificial Sequence: Synthetic polypeptide; note = Fc chain of XENP022567

SEQ ID NO: 25043 - protein, 11 aa, synthetic construct
  source 1..11: note = Description of Artificial Sequence: Synthetic peptide; note = XENP022567 vhCDR1
RASQSVGNDVA

SEQ ID NO: 25044 - protein, 7 aa, synthetic construct
  source 1..7: note = Description of Artificial Sequence: Synthetic peptide; note = XENP022567 vhCDR2
YASHRYT

SEQ ID NO: 25045 - protein, 9 aa, synthetic construct
  source 1..9: note = Description of Artificial Sequence: Synthetic peptide; note = XENP022567 vhCDR3
QQDFSSPRT

SEQ ID NO: 25046 - protein, 5 aa, synthetic construct
  source 1..5: note = Description of Artificial Sequence: Synthetic peptide; note = XENP022567 vlCDR1
NYWMN

SEQ ID NO: 25047 - protein, 19 aa, synthetic construct
  source 1..19: note = Description of Artificial Sequence: Synthetic peptide; note = XENP022567 vlCDR2
EIRLYSNNYATHYAESVKG

SEQ ID NO: 25048 - protein, 11 aa, synthetic construct
  source 1..11: note = Description of Artificial Sequence: Synthetic peptide; note = XENP022567 vlCDR3
YYGNYGGYFDV

SEQ ID NO: 25049 - protein, 218 aa, synthetic construct; identical to SEQ ID NO: 22539
  source 1..218: note = Description of Artificial Sequence: Synthetic polypeptide; note = XENP022567 7G8_H3.18_L1.30-1G6_L1.194_H1.279 Light Chain

SEQ ID NO: 25050 - protein, 111 aa, synthetic construct; identical to SEQ ID NO: 22540
  source 1..111: note = Description of Artificial Sequence: Synthetic polypeptide; note = VL of XENP022567

SEQ ID NO: 25051 - protein, 15 aa, synthetic construct
  source 1..15: note = Description of Artificial Sequence: Synthetic peptide; note = XENP022567 vlCDR1
RASQSVDYDGDSYMN

SEQ ID NO: 25052 - protein, 7 aa, synthetic construct
  source 1..7: note = Description of Artificial Sequence: Synthetic peptide; note = XENP022567 vlCDR2
AASELES

SEQ ID NO: 25053 - protein, 9 aa, synthetic construct
  source 1..9: note = Description of Artificial Sequence: Synthetic peptide; note = XENP022567 vlCDR3
QQSNEDPFT

SEQ ID NO: 25054 - protein, 450 aa, synthetic construct; identical to SEQ ID NO: 22484
  source 1..450: note = Description of Artificial Sequence: Synthetic polypeptide; note = XENP022568 7G8_H3.30_L1.30-1G6_L1.194_H1.279 Fab-Fc Heavy Chain

SEQ ID NO: 25055 - protein, 121 aa, synthetic construct; identical to SEQ ID NO: 22485
  source 1..121: note = Description of Artificial Sequence: Synthetic polypeptide; note = VH of XENP022568

SEQ ID NO: 25056 - protein, 5 aa, synthetic construct
  source 1..5: note = Description of Artificial Sequence: Synthetic peptide; note = XENP022568 vhCDR1
DAWMS

SEQ ID NO: 25057 - protein, 19 aa, synthetic construct
  source 1..19: note = Description of Artificial Sequence: Synthetic peptide; note = XENP022568 vhCDR2
EISTKANNHATYYAESVKG

SEQ ID NO: 25058 - protein, 10 aa, synthetic construct
  source 1..10: note = Description of Artificial Sequence: Synthetic peptide; note = XENP022568 vhCDR3
LATWDWYFDV

SEQ ID NO: 25059 - protein, 480 aa, synthetic construct; identical to SEQ ID NO: 23221
  source 1..480: note = Description of Artificial Sequence: Synthetic polypeptide; note = XENP022568 7G8_H3.30_L1.30-1G6_L1.194_H1.279 scFv-Fc Heavy Chain

SEQ ID NO: 25060 - protein, 107 aa, synthetic construct; identical to SEQ ID NO: 10999
  source 1..107: note = Description of Artificial Sequence: Synthetic polypeptide; note = VH of XENP022568

SEQ ID NO: 25061 - protein, 122 aa, synthetic construct; identical to SEQ ID NO: 10908
  source 1..122: note = Description of Artificial Sequence: Synthetic polypeptide; note = VL of XENP022568

SEQ ID NO: 25062 - protein, 231 aa, synthetic construct; identical to SEQ ID NO: 21532
  source 1..231: note = Description of Artificial Sequence: Synthetic polypeptide; note = Fc chain of XENP022568

SEQ ID NO: 25063 - protein, 11 aa, synthetic construct
  source 1..11: note = Description of Artificial Sequence: Synthetic peptide; note = XENP022568 vhCDR1
RASQSVGNDVA

SEQ ID NO: 25064 - protein, 7 aa, synthetic construct
  source 1..7: note = Description of Artificial Sequence: Synthetic peptide; note = XENP022568 vhCDR2
YASHRYT

SEQ ID NO: 25065 - protein, 9 aa, synthetic construct
  source 1..9: note = Description of Artificial Sequence: Synthetic peptide; note = XENP022568 vhCDR3
QQDFSSPRT

SEQ ID NO: 25066 - protein, 5 aa, synthetic construct
  source 1..5: note = Description of Artificial Sequence: Synthetic peptide; note = XENP022568 vlCDR1
NYWMN

SEQ ID NO: 25067 - protein, 19 aa, synthetic construct
  source 1..19: note = Description of Artificial Sequence: Synthetic peptide; note = XENP022568 vlCDR2
EIRLYSNNYATHYAESVKG

SEQ ID NO: 25068 - protein, 11 aa, synthetic construct
  source 1..11: note = Description of Artificial Sequence: Synthetic peptide; note = XENP022568 vlCDR3
YYGNYGGYFDV

SEQ ID NO: 25069 - protein, 218 aa, synthetic construct; identical to SEQ ID NO: 22539
  source 1..218: note = Description of Artificial Sequence: Synthetic polypeptide; note = XENP022568 7G8_H3.30_L1.30-1G6_L1.194_H1.279 Light Chain

SEQ ID NO: 25070 - protein, 111 aa, synthetic construct; identical to SEQ ID NO: 22540
  source 1..111: note = Description of Artificial Sequence: Synthetic polypeptide; note = VL of XENP022568

SEQ ID NO: 25071 - protein, 15 aa, synthetic construct
  source 1..15: note = Description of Artificial Sequence: Synthetic peptide; note = XENP022568 vlCDR1
RASQSVDYDGDSYMN

SEQ ID NO: 25072 - protein, 7 aa, synthetic construct
  source 1..7: note = Description of Artificial Sequence: Synthetic peptide; note = XENP022568 vlCDR2
AASELES

SEQ ID NO: 25073 - protein, 9 aa, synthetic construct
  source 1..9: note = Description of Artificial Sequence: Synthetic peptide; note = XENP022568 vlCDR3
QQSNEDPFT

SEQ ID NO: 25074 - protein, 450 aa, synthetic construct; identical to SEQ ID NO: 22504
  source 1..450: note = Description of Artificial Sequence: Synthetic polypeptide; note = XENP022569 7G8_H3.33_L1.30-1G6_L1.194_H1.279 Fab-Fc Heavy Chain

SEQ ID NO: 25075 - protein, 121 aa, synthetic construct; identical to SEQ ID NO: 22505
  source 1..121: note = Description of Artificial Sequence: Synthetic polypeptide; note = VH of XENP022569

SEQ ID NO: 25076 - protein, 5 aa, synthetic construct
  source 1..5: note = Description of Artificial Sequence: Synthetic peptide; note = XENP022569 vhCDR1
DAWMG

SEQ ID NO: 25077 - protein, 19 aa, synthetic construct
  source 1..19: note = Description of Artificial Sequence: Synthetic peptide; note = XENP022569 vhCDR2
EISTKANNHATYYAESVKG

SEQ ID NO: 25078 - protein, 10 aa, synthetic construct
  source 1..10: note = Description of Artificial Sequence: Synthetic peptide; note = XENP022569 vhCDR3
LATWDWYFDV

SEQ ID NO: 25079 - protein, 480 aa, synthetic construct; identical to SEQ ID NO: 23221
  source 1..480: note = Description of Artificial Sequence: Synthetic polypeptide; note = XENP022569 7G8_H3.33_L1.30-1G6_L1.194_H1.279 scFv-Fc Heavy Chain

SEQ ID NO: 25080 - protein, 107 aa, synthetic construct; identical to SEQ ID NO: 10999
  source 1..107: note = Description of Artificial Sequence: Synthetic polypeptide; note = VH of XENP022569

SEQ ID NO: 25081 - protein, 122 aa, synthetic construct; identical to SEQ ID NO: 10908
  source 1..122: note = Description of Artificial Sequence: Synthetic polypeptide; note = VL of XENP022569

SEQ ID NO: 25082 - protein, 231 aa, synthetic construct; identical to SEQ ID NO: 21532
  source 1..231: note = Description of Artificial Sequence: Synthetic polypeptide; note = Fc chain of XENP022569

SEQ ID NO: 25083 - protein, 11 aa, synthetic construct
  source 1..11: note = Description of Artificial Sequence: Synthetic peptide; note = XENP022569 vhCDR1
RASQSVGNDVA

SEQ ID NO: 25084 - protein, 7 aa, synthetic construct
  source 1..7: note = Description of Artificial Sequence: Synthetic peptide; note = XENP022569 vhCDR2
YASHRYT

SEQ ID NO: 25085 - protein, 9 aa, synthetic construct
  source 1..9: note = Description of Artificial Sequence: Synthetic peptide; note = XENP022569 vhCDR3
QQDFSSPRT

SEQ ID NO: 25086 - protein, 5 aa, synthetic construct
  source 1..5: note = Description of Artificial Sequence: Synthetic peptide; note = XENP022569 vlCDR1
NYWMN

SEQ ID NO: 25087 - protein, 19 aa, synthetic construct
  source 1..19: note = Description of Artificial Sequence: Synthetic peptide; note = XENP022569 vlCDR2
EIRLYSNNYATHYAESVKG

SEQ ID NO: 25088 - protein, 11 aa, synthetic construct
  source 1..11: note = Description of Artificial Sequence: Synthetic peptide; note = XENP022569 vlCDR3
YYGNYGGYFDV

SEQ ID NO: 25089 - protein, 218 aa, synthetic construct; identical to SEQ ID NO: 22539
  source 1..218: note = Description of Artificial Sequence: Synthetic polypeptide; note = XENP022569 7G8_H3.33_L1.30-1G6_L1.194_H1.279 Light Chain

SEQ ID NO: 25090 - protein, 111 aa, synthetic construct; identical to SEQ ID NO: 22540
  source 1..111: note = Description of Artificial Sequence: Synthetic polypeptide; note = VL of XENP022569

SEQ ID NO: 25091 - protein, 15 aa, synthetic construct
  source 1..15: note = Description of Artificial Sequence: Synthetic peptide; note = XENP022569 vlCDR1
RASQSVDYDGDSYMN

SEQ ID NO: 25092 - protein, 7 aa, synthetic construct
  source 1..7: note = Description of Artificial Sequence: Synthetic peptide; note = XENP022569 vlCDR2
AASELES

SEQ ID NO: 25093 - protein, 9 aa, synthetic construct
  source 1..9: note = Description of Artificial Sequence: Synthetic peptide; note = XENP022569 vlCDR3
QQSNEDPFT

SEQ ID NO: 25094 - protein, 450 aa, synthetic construct; identical to SEQ ID NO: 22484
  source 1..450: note = Description of Artificial Sequence: Synthetic polypeptide; note = XENP022604 7G8_H3.30_L1.34-1G6_L1.194_H1.279 Fab-Fc Heavy Chain

SEQ ID NO: 25095 - protein, 121 aa, synthetic construct; identical to SEQ ID NO: 22485
  source 1..121: note = Description of Artificial Sequence: Synthetic polypeptide; note = VH of XENP022604

SEQ ID NO: 25096 - protein, 5 aa, synthetic construct
  source 1..5: note = Description of Artificial Sequence: Synthetic peptide; note = XENP022604 vhCDR1
DAWMS

SEQ ID NO: 25097 - protein, 19 aa, synthetic construct
  source 1..19: note = Description of Artificial Sequence: Synthetic peptide; note = XENP022604 vhCDR2
EISTKANNHATYYAESVKG

SEQ ID NO: 25098 - protein, 10 aa, synthetic construct
  source 1..10: note = Description of Artificial Sequence: Synthetic peptide; note = XENP022604 vhCDR3
LATWDWYFDV

SEQ ID NO: 25099 - protein, 480 aa, synthetic construct; identical to SEQ ID NO: 23221
  source 1..480: note = Description of Artificial Sequence: Synthetic polypeptide; note = XENP022604 7G8_H3.30_L1.34-1G6_L1.194_H1.279 scFv-Fc Heavy Chain

SEQ ID NO: 25100 - protein, 107 aa, synthetic construct; identical to SEQ ID NO: 10999
  source 1..107: note = Description of Artificial Sequence: Synthetic polypeptide; note = VH of XENP022604

SEQ ID NO: 25101 - protein, 122 aa, synthetic construct; identical to SEQ ID NO: 10908
  source 1..122: note = Description of Artificial Sequence: Synthetic polypeptide; note = VL of XENP022604

SEQ ID NO: 25102 - protein, 231 aa, synthetic construct; identical to SEQ ID NO: 21532
  source 1..231: note = Description of Artificial Sequence: Synthetic polypeptide; note = Fc chain of XENP022604

SEQ ID NO: 25103 - protein, 11 aa, synthetic construct
  source 1..11: note = Description of Artificial Sequence: Synthetic peptide; note = XENP022604 vhCDR1
RASQSVGNDVA

SEQ ID NO: 25104 - protein, 7 aa, synthetic construct
  source 1..7: note = Description of Artificial Sequence: Synthetic peptide; note = XENP022604 vhCDR2
YASHRYT

SEQ ID NO: 25105 - protein, 9 aa, synthetic construct
  source 1..9: note = Description of Artificial Sequence: Synthetic peptide; note = XENP022604 vhCDR3
QQDFSSPRT

SEQ ID NO: 25106 - protein, 5 aa, synthetic construct
  source 1..5: note = Description of Artificial Sequence: Synthetic peptide; note = XENP022604 vlCDR1
NYWMN

SEQ ID NO: 25107 - protein, 19 aa, synthetic construct
  source 1..19: note = Description of Artificial Sequence: Synthetic peptide; note = XENP022604 vlCDR2
EIRLYSNNYATHYAESVKG

SEQ ID NO: 25108 - protein, 11 aa, synthetic construct
  source 1..11: note = Description of Artificial Sequence: Synthetic peptide; note = XENP022604 vlCDR3
YYGNYGGYFDV

SEQ ID NO: 25109 - protein, 218 aa, synthetic construct; identical to SEQ ID NO: 22599
  source 1..218: note = Description of Artificial Sequence: Synthetic polypeptide; note = XENP022604 7G8_H3.30_L1.34-1G6_L1.194_H1.279 Light Chain

SEQ ID NO: 25110 - protein, 111 aa, synthetic construct; identical to SEQ ID NO: 22600
  source 1..111: note = Description of Artificial Sequence: Synthetic polypeptide; note = VL of XENP022604

SEQ ID NO: 25111 - protein, 15 aa, synthetic construct
  source 1..15: note = Description of Artificial Sequence: Synthetic peptide; note = XENP022604 vlCDR1
RASQSVDYDGDSYMN

SEQ ID NO: 25112 - protein, 7 aa, synthetic construct
  source 1..7: note = Description of Artificial Sequence: Synthetic peptide; note = XENP022604 vlCDR2
AASELES

SEQ ID NO: 25113 - protein, 9 aa, synthetic construct
  source 1..9: note = Description of Artificial Sequence: Synthetic peptide; note = XENP022604 vlCDR3
QQSNEDPFT

SEQ ID NO: 25114 - protein, 450 aa, synthetic construct; identical to SEQ ID NO: 22484
  source 1..450: note = Description of Artificial Sequence: Synthetic polypeptide; note = XENP022605 7G8_H3.30_L1.36-1G6_L1.194_H1.279 Fab-Fc Heavy Chain

SEQ ID NO: 25115 - protein, 121 aa, synthetic construct; identical to SEQ ID NO: 22485
  source 1..121: note = Description of Artificial Sequence: Synthetic polypeptide; note = VH of XENP022605

SEQ ID NO: 25116 - protein, 5 aa, synthetic construct
  source 1..5: note = Description of Artificial Sequence: Synthetic peptide; note = XENP022605 vhCDR1
DAWMS

SEQ ID NO: 25117 - protein, 19 aa, synthetic construct
  source 1..19: note = Description of Artificial Sequence: Synthetic peptide; note = XENP022605 vhCDR2
EISTKANNHATYYAESVKG

SEQ ID NO: 25118 - protein, 10 aa, synthetic construct
  source 1..10: note = Description of Artificial Sequence: Synthetic peptide; note = XENP022605 vhCDR3
LATWDWYFDV

SEQ ID NO: 25119 - protein, 480 aa, synthetic construct; identical to SEQ ID NO: 23221
  source 1..480: note = Description of Artificial Sequence: Synthetic polypeptide; note = XENP022605 7G8_H3.30_L1.36-1G6_L1.194_H1.279 scFv-Fc Heavy Chain

SEQ ID NO: 25120 - protein, 107 aa, synthetic construct; identical to SEQ ID NO: 10999
  source 1..107: note = Description of Artificial Sequence: Synthetic polypeptide; note = VH of XENP022605

SEQ ID NO: 25121 - protein, 122 aa, synthetic construct; identical to SEQ ID NO: 10908
  source 1..122: note = Description of Artificial Sequence: Synthetic polypeptide; note = VL of XENP022605

SEQ ID NO: 25122 - protein, 231 aa, synthetic construct; identical to SEQ ID NO: 21532
  source 1..231: note = Description of Artificial Sequence: Synthetic polypeptide; note = Fc chain of XENP022605

SEQ ID NO: 25123 - protein, 11 aa, synthetic construct
  source 1..11: note = Description of Artificial Sequence: Synthetic peptide; note = XENP022605 vhCDR1
RASQSVGNDVA

SEQ ID NO: 25124 - protein, 7 aa, synthetic construct
  source 1..7: note = Description of Artificial Sequence: Synthetic peptide; note = XENP022605 vhCDR2
YASHRYT

SEQ ID NO: 25125 - protein, 9 aa, synthetic construct
  source 1..9: note = Description of Artificial Sequence: Synthetic peptide; note = XENP022605 vhCDR3
QQDFSSPRT

SEQ ID NO: 25126 - protein, 5 aa, synthetic construct
  source 1..5: note = Description of Artificial Sequence: Synthetic peptide; note = XENP022605 vlCDR1
NYWMN

SEQ ID NO: 25127 - protein, 19 aa, synthetic construct
  source 1..19: note = Description of Artificial Sequence: Synthetic peptide; note = XENP022605 vlCDR2
EIRLYSNNYATHYAESVKG

SEQ ID NO: 25128 - protein, 11 aa, synthetic construct
  source 1..11: note = Description of Artificial Sequence: Synthetic peptide; note = XENP022605 vlCDR3
YYGNYGGYFDV

SEQ ID NO: 25129 - protein, 218 aa, synthetic construct; identical to SEQ ID NO: 22619
  source 1..218: note = Description of Artificial Sequence: Synthetic polypeptide; note = XENP022605 7G8_H3.30_L1.36-1G6_L1.194_H1.279 Light Chain

SEQ ID NO: 25130 - protein, 111 aa, synthetic construct; identical to SEQ ID NO: 22620
  source 1..111: note = Description of Artificial Sequence: Synthetic polypeptide; note = VL of XENP022605

SEQ ID NO: 25131 - protein, 15 aa, synthetic construct
  source 1..15: note = Description of Artificial Sequence: Synthetic peptide; note = XENP022605 vlCDR1
RASQSVDHDGDSYMN

SEQ ID NO: 25132 - protein, 7 aa, synthetic construct
  source 1..7: note = Description of Artificial Sequence: Synthetic peptide; note = XENP022605 vlCDR2
AASELES

SEQ ID NO: 25133 - protein, 9 aa, synthetic construct
  source 1..9: note = Description of Artificial Sequence: Synthetic peptide; note = XENP022605 vlCDR3
QQSNEDPFT

SEQ ID NO: 25134 - protein, 448 aa, synthetic construct
  source 1..448: note = Description of Artificial Sequence: Synthetic polypeptide; note = XENP019184 10A7_H0L0-nivolumab_H0.1_L0 Fab-Fc Heavy Chain
EVQLVESGGGLTQPGKSLKLSCEASGFTFSSFTMHWVRQSPGKGLEWVAFIRSGSGIVFYADAVRGRFTISRDNAKNLLFLQMNDLKSEDTAMYYCARRPLGHNTFDSWGQGTLVTVSSASTKGPSVFPLAPSSKSTSGGTAALGCLVKDYFPEPVTVSWNSGALTSGVHTFPAVLQSSGLYSLSSVVTVPSSSLGTQTYICNVNHKPSDTKVDKKVEPKSCDKTHTCPPCPAPPVAGPSVFLFPPKPKDTLMISRTPEVTCVVVDVKHEDPEVKFNWYVDGVEVHNAKTKPREEEYNSTYRVVSVLTVLHQDWLNGKEYKCKVSNKALPAPIEKTISKAKGQPREPQVYTLPPSREEMTKNQVSLTCDVSGFYPSDIAVEWESDGQPENNYKTTPPVLDSDGSFFLYSKLTVDKSRWEQGDVFSCSVMHEALHNHYTQKSLSLSPGK

SEQ ID NO: 25135 - protein, 119 aa, synthetic construct; identical to SEQ ID NO: 21505
  source 1..119: note = Description of Artificial Sequence: Synthetic polypeptide; note = VH of XENP019184

SEQ ID NO: 25136 - protein, 5 aa, synthetic construct
  source 1..5: note = Description of Artificial Sequence: Synthetic peptide; note = XENP019184 vhCDR1
SFTMH

SEQ ID NO: 25137 - protein, 17 aa, synthetic construct
  source 1..17: note = Description of Artificial Sequence: Synthetic peptide; note = XENP019184 vhCDR2
FIRSGSGIVFYADAVRG

SEQ ID NO: 25138 - protein, 10 aa, synthetic construct
  source 1..10: note = Description of Artificial Sequence: Synthetic peptide; note = XENP019184 vhCDR3
RPLGHNTFDS

SEQ ID NO: 25139 - protein, 471 aa, synthetic construct; identical to SEQ ID NO: 22749
  source 1..471: note = Description of Artificial Sequence: Synthetic polypeptide; note = XENP019184 10A7_H0L0-nivolumab_H0.1_L0 scFv-Fc Heavy Chain

SEQ ID NO: 25140 - protein, 113 aa, synthetic construct; identical to SEQ ID NO: 6210
  source 1..113: note = Description of Artificial Sequence: Synthetic polypeptide; note = VH of XENP019184

SEQ ID NO: 25141 - protein, 107 aa, synthetic construct [sequence omitted]

SEQ ID NO: 25142 - protein, 231 aa, synthetic construct; identical to SEQ ID NO: 21532
  source 1..231: note = Description of Artificial Sequence: Synthetic polypeptide; note = Fc chain of XENP019184

SEQ ID NO: 25143 - protein, 5 aa, synthetic construct
  source 1..5: note = Description of Artificial Sequence: Synthetic peptide; note = XENP019184 vhCDR1
NSGMH

SEQ ID NO: 25144 - protein, 17 aa, synthetic construct
  source 1..17: note = Description of Artificial Sequence: Synthetic peptide; note = XENP019184 vhCDR2
VIWYDGSKRYYADSVKG

SEQ ID NO: 25145 - protein, 4 aa, synthetic construct
  source 1..4: note = Description of Artificial Sequence: Synthetic peptide; note = XENP019184 vhCDR3
NDDY

SEQ ID NO: 25146 - protein, 11 aa, synthetic construct
  source 1..11: note = Description of Artificial Sequence: Synthetic peptide; note = XENP019184 vlCDR1
RASQSVSSYLA

SEQ ID NO: 25147 - protein, 7 aa, synthetic construct
  source 1..7: note = Description of Artificial Sequence: Synthetic peptide; note = XENP019184 vlCDR2
DASNRAT

SEQ ID NO: 25148 - protein, 9 aa, synthetic construct
  source 1..9: note = Description of Artificial Sequence: Synthetic peptide; note = XENP019184 vlCDR3
QQSSNWPRT

SEQ ID NO: 25149 - protein, 220 aa, synthetic construct; identical to SEQ ID NO: 21509
  source 1..220: note = Description of Artificial Sequence: Synthetic polypeptide; note = XENP019184 10A7_H0L0-nivolumab_H0.1_L0 Light Chain

SEQ ID NO: 25150 - protein, 113 aa, synthetic construct; identical to SEQ ID NO: 21510
  source 1..113: note = Description of Artificial Sequence: Synthetic polypeptide; note = VL of XENP019184

SEQ ID NO: 25151 - protein, 17 aa, synthetic construct
  source 1..17: note = Description of Artificial Sequence: Synthetic peptide; note = XENP019184 vlCDR1
KSSQSLYYSGVKENLLA

SEQ ID NO: 25152 - protein, 7 aa, synthetic construct
  source 1..7: note = Description of Artificial Sequence: Synthetic peptide; note = XENP019184 vlCDR2
YASIRFT

SEQ ID NO: 25153 - protein, 9 aa, synthetic construct
  source 1..9: note = Description of Artificial Sequence: Synthetic peptide; note = XENP019184 vlCDR3
QQGINNPLT

SEQ ID NO: 25154 - protein, 448 aa, synthetic construct
  source 1..448: note = Description of Artificial Sequence: Synthetic polypeptide; note = XENP019185 1F4_H0L0-nivolumab_H0.1_L0 Fab-Fc Heavy Chain
EVQLQQSGPELVKPGTSMKISCKASGYSFTGHLMNWVKQSHGKNLEWIGLIIPYNGGTSYNQKFKGKATLTVDKSSSTAYMELLSLTSDDSAVYFCSRGLRGFYAMDYWGQGTSVTVSSASTKGPSVFPLAPSSKSTSGGTAALGCLVKDYFPEPVTVSWNSGALTSGVHTFPAVLQSSGLYSLSSVVTVPSSSLGTQTYICNVNHKPSDTKVDKKVEPKSCDKTHTCPPCPAPPVAGPSVFLFPPKPKDTLMISRTPEVTCVVVDVKHEDPEVKFNWYVDGVEVHNAKTKPREEEYNSTYRVVSVLTVLHQDWLNGKEYKCKVSNKALPAPIEKTISKAKGQPREPQVYTLPPSREEMTKNQVSLTCDVSGFYPSDIAVEWESDGQPENNYKTTPPVLDSDGSFFLYSKLTVDKSRWEQGDVFSCSVMHEALHNHYTQKSLSLSPGK

SEQ ID NO: 25155 - protein, 119 aa, synthetic construct; identical to SEQ ID NO: 21515
  source 1..119: note = Description of Artificial Sequence: Synthetic polypeptide; note = VH of XENP019185

SEQ ID NO: 25156 - protein, 5 aa, synthetic construct
  source 1..5: note = Description of Artificial Sequence: Synthetic peptide; note = XENP019185 vhCDR1
GHLMN

SEQ ID NO: 25157 - protein, 17 aa, synthetic construct
  source 1..17: note = Description of Artificial Sequence: Synthetic peptide; note = XENP019185 vhCDR2
LIIPYNGGTSYNQKFKG

SEQ ID NO: 25158 - protein, 10 aa, synthetic construct
  source 1..10: note = Description of Artificial Sequence: Synthetic peptide; note = XENP019185 vhCDR3
GLRGFYAMDY

SEQ ID NO: 25159 - protein, 471 aa, synthetic construct; identical to SEQ ID NO: 22749
  source 1..471: note = Description of Artificial Sequence: Synthetic polypeptide; note = XENP019185 1F4_H0L0-nivolumab_H0.1_L0 scFv-Fc Heavy Chain

SEQ ID NO: 25160 - protein, 113 aa, synthetic construct; identical to SEQ ID NO: 6210
  source 1..113: note = Description of Artificial Sequence: Synthetic polypeptide; note = VH of XENP019185

SEQ ID NO: 25161 - protein, 107 aa, synthetic construct [sequence omitted]

SEQ ID NO: 25162 - protein, 231 aa, synthetic construct; identical to SEQ ID NO: 21532
  source 1..231: note = Description of Artificial Sequence: Synthetic polypeptide; note = Fc chain of XENP019185

SEQ ID NO: 25163 - protein, 5 aa, synthetic construct
  source 1..5: note = Description of Artificial Sequence: Synthetic peptide; note = XENP019185 vhCDR1
NSGMH

SEQ ID NO: 25164 - protein, 17 aa, synthetic construct
  source 1..17: note = Description of Artificial Sequence: Synthetic peptide; note = XENP019185 vhCDR2
VIWYDGSKRYYADSVKG

SEQ ID NO: 25165 - protein, 4 aa, synthetic construct
  source 1..4: note = Description of Artificial Sequence: Synthetic peptide; note = XENP019185 vhCDR3
NDDY

SEQ ID NO: 25166 - protein, 11 aa, synthetic construct
  source 1..11: note = Description of Artificial Sequence: Synthetic peptide; note = XENP019185 vlCDR1
RASQSVSSYLA

SEQ ID NO: 25167 - protein, 7 aa, synthetic construct
  source 1..7: note = Description of Artificial Sequence: Synthetic peptide; note = XENP019185 vlCDR2
DASNRAT

SEQ ID NO: 25168 - protein, 9 aa, synthetic construct
  source 1..9: note = Description of Artificial Sequence: Synthetic peptide; note = XENP019185 vlCDR3
QQSSNWPRT

SEQ ID NO: 25169 - protein, 219 aa, synthetic construct; identical to SEQ ID NO: 21519
  source 1..219: note = Description of Artificial Sequence: Synthetic polypeptide; note = XENP019185 1F4_H0L0-nivolumab_H0.1_L0 Light Chain

SEQ ID NO: 25170 - protein, 112 aa, synthetic construct; identical to SEQ ID NO: 21520
  source 1..112: note = Description of Artificial Sequence: Synthetic polypeptide; note = VL of XENP019185

SEQ ID NO: 25171 - protein, 16 aa, synthetic construct
  source 1..16: note = Description of Artificial Sequence: Synthetic peptide; note = XENP019185 vlCDR1
RSSQSLVNSYGNTFLS

SEQ ID NO: 25172 - protein, 7 aa, synthetic construct
  source 1..7: note = Description of Artificial Sequence: Synthetic peptide; note = XENP019185 vlCDR2
GISNRFS

SEQ ID NO: 25173 - protein, 9 aa, synthetic construct
  source 1..9: note = Description of Artificial Sequence: Synthetic peptide; note = XENP019185 vlCDR3
LQGTHQPPT

SEQ ID NO: 25174 - protein, 446 aa, synthetic construct
  source 1..446: note = Description of Artificial Sequence: Synthetic polypeptide; note = XENP016340 mAb8213_H0L0-nivolumab_H0.1_L0 Fab-Fc Heavy Chain
QVQLVQSGAEVKKPGASVKVSCKASGYTFTSYWMHWVRQAPGQGLEWMGEINPSNGRTNYNEKFKTRVTITADTSTSTAYMELSSLRSEDTAVYYCARGYYLYFDYWGQGTLVTVSSASTKGPSVFPLAPSSKSTSGGTAALGCLVKDYFPEPVTVSWNSGALTSGVHTFPAVLQSSGLYSLSSVVTVPSSSLGTQTYICNVNHKPSDTKVDKKVEPKSCDKTHTCPPCPAPPVAGPSVFLFPPKPKDTLMISRTPEVTCVVVDVKHEDPEVKFNWYVDGVEVHNAKTKPREEEYNSTYRVVSVLTVLHQDWLNGKEYKCKVSNKALPAPIEKTISKAKGQPREPQVYTLPPSREEMTKNQVSLTCDVSGFYPSDIAVEWESDGQPENNYKTTPPVLDSDGSFFLYSKLTVDKSRWEQGDVFSCSVMHEALHNHYTQKSLSLSPGK

SEQ ID NO: 25175 - protein, 117 aa, synthetic construct; identical to SEQ ID NO: 20766
  source 1..117: note = Description of Artificial Sequence: Synthetic polypeptide; note = VH of XENP016340

SEQ ID NO: 25176 - protein, 5 aa, synthetic construct
  source 1..5: note = Description of Artificial Sequence: Synthetic peptide; note = XENP016340 vhCDR1
SYWMH

SEQ ID NO: 25177 - protein, 17 aa, synthetic construct
  source 1..17: note = Description of Artificial Sequence: Synthetic peptide; note = XENP016340 vhCDR2
EINPSNGRTNYNEKFKT

SEQ ID NO: 25178 - protein, 8 aa, synthetic construct
  source 1..8: note = Description of Artificial Sequence: Synthetic peptide; note = XENP016340 vhCDR3
GYYLYFDY

SEQ ID NO: 25179 - protein, 471 aa, synthetic construct; identical to SEQ ID NO: 22749
  source 1..471: note = Description of Artificial Sequence: Synthetic polypeptide; note = XENP016340 mAb8213_H0L0-nivolumab_H0.1_L0 scFv-Fc Heavy Chain

SEQ ID NO: 25180 - protein, 113 aa, synthetic construct; identical to SEQ ID NO: 6210
  source 1..113: note = Description of Artificial Sequence: Synthetic polypeptide; note = VH of XENP016340

SEQ ID NO: 25181 - protein, 107 aa, synthetic construct [sequence omitted]

SEQ ID NO: 25182 - protein, 231 aa, synthetic construct; identical to SEQ ID NO: 21532
  source 1..231: note = Description of Artificial Sequence: Synthetic polypeptide; note = Fc chain of XENP016340

SEQ ID NO: 25183 - protein, 5 aa, synthetic construct
  source 1..5: note = Description of Artificial Sequence: Synthetic peptide; note = XENP016340 vhCDR1
NSGMH

SEQ ID NO: 25184 - protein, 17 aa, synthetic construct
  source 1..17: note = Description of Artificial Sequence: Synthetic peptide; note = XENP016340 vhCDR2
VIWYDGSKRYYADSVKG

SEQ ID NO: 25185 - protein, 4 aa, synthetic construct
  source 1..4: note = Description of Artificial Sequence: Synthetic peptide; note = XENP016340 vhCDR3
NDDY

SEQ ID NO: 25186 - protein, 11 aa, synthetic construct
  source 1..11: note = Description of Artificial Sequence: Synthetic peptide; note = XENP016340 vlCDR1
RASQSVSSYLA

SEQ ID NO: 25187 - protein, 7 aa, synthetic construct
  source 1..7: note = Description of Artificial Sequence: Synthetic peptide; note = XENP016340 vlCDR2
DASNRAT

SEQ ID NO: 25188 - protein, 9 aa, synthetic construct
  source 1..9: note = Description of Artificial Sequence: Synthetic peptide; note = XENP016340 vlCDR3
QQSSNWPRT

SEQ ID NO: 25189 - protein, 214 aa, synthetic construct; identical to SEQ ID NO: 20770
  source 1..214: note = Description of Artificial Sequence: Synthetic polypeptide; note = XENP016340 mAb8213_H0L0-nivolumab_H0.1_L0 Light Chain

SEQ ID NO: 25190 - protein, 107 aa, synthetic construct; identical to SEQ ID NO: 20771
  source 1..107: note = Description of Artificial Sequence: Synthetic polypeptide; note = VL of XENP016340

SEQ ID NO: 25191 - protein, 11 aa, synthetic construct
  source 1..11: note = Description of Artificial Sequence: Synthetic peptide; note = XENP016340 vlCDR1
HASQGIRINIG

SEQ ID NO: 25192 - protein, 7 aa, synthetic construct
  source 1..7: note = Description of Artificial Sequence: Synthetic peptide; note = XENP016340 vlCDR2
HGTNLED

SEQ ID NO: 25193 - protein, 9 aa, synthetic construct
  source 1..9: note = Description of Artificial Sequence: Synthetic peptide; note = XENP016340 vlCDR3
VQYGQFPWT

SEQ ID NO: 25194 - protein, 223 aa, synthetic construct
  source 1..223: note = Description of Artificial Sequence: Synthetic polypeptide; note = XENP020847 2A11_H1L2_Fab Heavy Chain
EVQLVQSGAEVKKPGATVKISCKASGFNIKDYYMHWVQQAPGKGLEWMGWIDPENGDTEYAPKFQGRVTITADTSTNTAYMELSSLRSEDTAVYYCYARGVRQALDYWGQGTLVTVSSASTKGPSVFPLAPSSKSTSGGTAALGCLVKDYFPEPVTVSWNSGALTSGVHTFPAVLQSSGLYSLSSVVTVPSSSLGTQTYICNVNHKPSNTKVDKKVEPKSCGS

SEQ ID NO: 25195 - protein, 118 aa, synthetic construct; identical to SEQ ID NO: 17236
  source 1..118: note = Description of Artificial Sequence: Synthetic polypeptide; note = VH of XENP020847

SEQ ID NO: 25196 - protein, 5 aa, synthetic construct
  source 1..5: note = Description of Artificial Sequence: Synthetic peptide; note = XENP020847 vhCDR1
DYYMH

SEQ ID NO: 25197 - protein, 17 aa, synthetic construct
  source 1..17: note = Description of Artificial Sequence: Synthetic peptide; note = XENP020847 vhCDR2
WIDPENGDTEYAPKFQG

SEQ ID NO: 25198 - protein, 9 aa, synthetic construct
  source 1..9: note = Description of Artificial Sequence: Synthetic peptide; note = XENP020847 vhCDR3
RGVRQALDY

SEQ ID NO: 25199 - protein, 214 aa, synthetic construct; identical to SEQ ID NO: 17250
  source 1..214: note = Description of Artificial Sequence: Synthetic polypeptide; note = XENP020847 2A11_H1L2_Fab Light Chain

SEQ ID NO: 25200 - protein, 107 aa, synthetic construct; identical to SEQ ID NO: 17251
  source 1..107: note = Description of Artificial Sequence: Synthetic polypeptide; note = VL of XENP020847

SEQ ID NO: 25201 - protein, 11 aa, synthetic construct
  source 1..11: note = Description of Artificial Sequence: Synthetic peptide; note = XENP020847 vlCDR1
QASQDIGNYLN

SEQ ID NO: 25202 - protein, 7 aa, synthetic construct
  source 1..7: note = Description of Artificial Sequence: Synthetic peptide; note = XENP020847 vlCDR2
YTSRLHS

SEQ ID NO: 25203 - protein, 9 aa, synthetic construct
  source 1..9: note = Description of Artificial Sequence: Synthetic peptide; note = XENP020847 vlCDR3
QQGNTLPYT

SEQ ID NO: 25204 - protein, 223 aa, synthetic construct
  source 1..223: note = Description of Artificial Sequence: Synthetic polypeptide; note = XENP021073 2A11_H0L0_Fab Heavy Chain
EVQLQQSGAELVRSGASVKLSCTASGFNIKDYYMHWVKQRPEQGLEWIGWIDPENGDTEYAPKFQGKATMTADTSSNTAYLQLSSLTSEDTAVYYCYARGVRQALDYWGQGTSVTVSSASTKGPSVFPLAPSSKSTSGGTAALGCLVKDYFPEPVTVSWNSGALTSGVHTFPAVLQSSGLYSLSSVVTVPSSSLGTQTYICNVNHKPSNTKVDKKVEPKSCGS

SEQ ID NO: 25205 - protein, 118 aa, synthetic construct; identical to SEQ ID NO: 17226
  source 1..118: note = Description of Artificial Sequence: Synthetic polypeptide; note = VH of XENP021073

SEQ ID NO: 25206 - protein, 5 aa, synthetic construct
  source 1..5: note = Description of Artificial Sequence: Synthetic peptide; note = XENP021073 vhCDR1
DYYMH

SEQ ID NO: 25207 - protein, 17 aa, synthetic construct
  source 1..17: note = Description of Artificial Sequence: Synthetic peptide; note = XENP021073 vhCDR2
WIDPENGDTEYAPKFQG

SEQ ID NO: 25208 - protein, 9 aa, synthetic construct
  source 1..9: note = Description of Artificial Sequence: Synthetic peptide; note = XENP021073 vhCDR3
RGVRQALDY

SEQ ID NO: 25209 - protein, 214 aa, synthetic construct; identical to SEQ ID NO: 17230
  source 1..214: note = Description of Artificial Sequence: Synthetic polypeptide; note = XENP021073 2A11_H0L0_Fab Light Chain

SEQ ID NO: 25210 - protein, 107 aa, synthetic construct; identical to SEQ ID NO: 17231
  source 1..107: note = Description of Artificial Sequence: Synthetic polypeptide; note = VL of XENP021073

SEQ ID NO: 25211 - protein, 11 aa, synthetic construct
  source 1..11: note = Description of Artificial Sequence: Synthetic peptide; note = XENP021073 vlCDR1
RASQDIGNYLN

SEQ ID NO: 25212 - protein, 7 aa, synthetic construct
  source 1..7: note = Description of Artificial Sequence: Synthetic peptide; note = XENP021073 vlCDR2
YTSRLHS

SEQ ID NO: 25213 - protein, 9 aa, synthetic construct
  source 1..9: note = Description of Artificial Sequence: Synthetic peptide; note = XENP021073 vlCDR3
QQGNTLPYT

SEQ ID NO: 25214 - protein, 223 aa, synthetic construct
  source 1..223: note = Description of Artificial Sequence: Synthetic polypeptide; note = XENP021228 2A11_H1.1_L2_Fab Heavy Chain
EVQLVQSGAEVKKPGATVKISCKASGYNIKDYYMHWVQQAPGKGLEWMGWIDPENGDTEYAPKFQGRVTITADTSTNTAYMELSSLRSEDTAVYYCYARGVRQALDYWGQGTLVTVSSASTKGPSVFPLAPSSKSTSGGTAALGCLVKDYFPEPVTVSWNSGALTSGVHTFPAVLQSSGLYSLSSVVTVPSSSLGTQTYICNVNHKPSNTKVDKKVEPKSCGS

SEQ ID NO: 25215 - protein, 118 aa, synthetic construct
  source 1..118: note = Description of Artificial Sequence: Synthetic polypeptide; note = VH of XENP021228
EVQLVQSGAEVKKPGATVKISCKASGYNIKDYYMHWVQQAPGKGLEWMGWIDPENGDTEYAPKFQGRVTITADTSTNTAYMELSSLRSEDTAVYYCYARGVRQALDYWGQGTLVTVSS

SEQ ID NO: 25216 - protein, 5 aa, synthetic construct
  source 1..5: note = Description of Artificial Sequence: Synthetic peptide; note = XENP021228 vhCDR1
DYYMH

SEQ ID NO: 25217 - protein, 17 aa, synthetic construct
  source 1..17: note = Description of Artificial Sequence: Synthetic peptide; note = XENP021228 vhCDR2
WIDPENGDTEYAPKFQG

SEQ ID NO: 25218 - protein, 9 aa, synthetic construct
  source 1..9: note = Description of Artificial Sequence: Synthetic peptide; note = XENP021228 vhCDR3
RGVRQALDY

SEQ ID NO: 25219 - protein, 214 aa, synthetic construct; identical to SEQ ID NO: 17250
  source 1..214: note = Description of Artificial Sequence: Synthetic polypeptide; note = XENP021228 2A11_H1.1_L2_Fab Light Chain

SEQ ID NO: 25220 - protein, 107 aa, synthetic construct; identical to SEQ ID NO: 17251
  source 1..107: note = Description of Artificial Sequence: Synthetic polypeptide; note = VL of XENP021228

SEQ ID NO: 25221 - protein, 11 aa, synthetic construct
  source 1..11: note = Description of Artificial Sequence: Synthetic peptide; note = XENP021228 vlCDR1
QASQDIGNYLN

SEQ ID NO: 25222 - protein, 7 aa, synthetic construct
  source 1..7: note = Description of Artificial Sequence: Synthetic peptide; note = XENP021228 vlCDR2
YTSRLHS

SEQ ID NO: 25223 - protein, 9 aa, synthetic construct
  source 1..9: note = Description of Artificial Sequence: Synthetic peptide; note = XENP021228 vlCDR3
QQGNTLPYT

SEQ ID NO: 25224 - protein, 223 aa, synthetic construct
  source 1..223: note = Description of Artificial Sequence: Synthetic polypeptide; note = XENP021229 2A11_H1.2_L2_Fab Heavy Chain
EVQLVQSGAEVKKPGATVKISCKASGFDIKDYYMHWVQQAPGKGLEWMGWIDPENGDTEYAPKFQGRVTITADTSTNTAYMELSSLRSEDTAVYYCYARGVRQALDYWGQGTLVTVSSASTKGPSVFPLAPSSKSTSGGTAALGCLVKDYFPEPVTVSWNSGALTSGVHTFPAVLQSSGLYSLSSVVTVPSSSLGTQTYICNVNHKPSNTKVDKKVEPKSCGS

SEQ ID NO: 25225 - protein, 118 aa, synthetic construct
  source 1..118: note = Description of Artificial Sequence: Synthetic polypeptide; note = VH of XENP021229
EVQLVQSGAEVKKPGATVKISCKASGFDIKDYYMHWVQQAPGKGLEWMGWIDPENGDTEYAPKFQGRVTITADTSTNTAYMELSSLRSEDTAVYYCYARGVRQALDYWGQGTLVTVSS

SEQ ID NO: 25226 - protein, 5 aa, synthetic construct
  source 1..5: note = Description of Artificial Sequence: Synthetic peptide; note = XENP021229 vhCDR1
DYYMH

SEQ ID NO: 25227 - protein, 17 aa, synthetic construct
  source 1..17: note = Description of Artificial Sequence: Synthetic peptide; note = XENP021229 vhCDR2
WIDPENGDTEYAPKFQG

SEQ ID NO: 25228 - protein, 9 aa, synthetic construct
  source 1..9: note = Description of Artificial Sequence: Synthetic peptide; note = XENP021229 vhCDR3
RGVRQALDY

SEQ ID NO: 25229 - protein, 214 aa, synthetic construct; identical to SEQ ID NO: 17250
  source 1..214: note = Description of Artificial Sequence: Synthetic polypeptide; note = XENP021229 2A11_H1.2_L2_Fab Light Chain

SEQ ID NO: 25230 - protein, 107 aa, synthetic construct; identical to SEQ ID NO: 17251
  source 1..107: note = Description of Artificial Sequence: Synthetic polypeptide; note = VL of XENP021229

SEQ ID NO: 25231 - protein, 11 aa, synthetic construct
  source 1..11: note = Description of Artificial Sequence: Synthetic peptide; note = XENP021229 vlCDR1
QASQDIGNYLN

SEQ ID NO: 25232 - protein, 7 aa, synthetic construct
  source 1..7: note = Description of Artificial Sequence: Synthetic peptide; note = XENP021229 vlCDR2
YTSRLHS

SEQ ID NO: 25233 - protein, 9 aa, synthetic construct
  source 1..9: note = Description of Artificial Sequence: Synthetic peptide; note = XENP021229 vlCDR3
QQGNTLPYT

SEQ ID NO: 25234 - protein, 223 aa, synthetic construct
  source 1..223: note = Description of Artificial Sequence: Synthetic polypeptide; note = XENP021230 2A11_H1.3_L2_Fab Heavy Chain
EVQLVQSGAEVKKPGATVKISCKASGFHIKDYYMHWVQQAPGKGLEWMGWIDPENGDTEYAPKFQGRVTITADTSTNTAYMELSSLRSEDTAVYYCYARGVRQALDYWGQGTLVTVSSASTKGPSVFPLAPSSKSTSGGTAALGCLVKDYFPEPVTVSWNSGALTSGVHTFPAVLQSSGLYSLSSVVTVPSSSLGTQTYICNVNHKPSNTKVDKKVEPKSCGS

SEQ ID NO: 25235 - protein, 118 aa, synthetic construct
  source 1..118: note = Description of Artificial Sequence: Synthetic polypeptide; note = VH of XENP021230
EVQLVQSGAEVKKPGATVKISCKASGFHIKDYYMHWVQQAPGKGLEWMGWIDPENGDTEYAPKFQGRVTITADTSTNTAYMELSSLRSEDTAVYYCYARGVRQALDYWGQGTLVTVSS

SEQ ID NO: 25236 - protein, 5 aa, synthetic construct
  source 1..5: note = Description of Artificial Sequence: Synthetic peptide; note = XENP021230 vhCDR1
DYYMH

SEQ ID NO: 25237 - protein, 17 aa, synthetic construct
  source 1..17: note = Description of Artificial Sequence: Synthetic peptide; note = XENP021230 vhCDR2
WIDPENGDTEYAPKFQG

SEQ ID NO: 25238 - protein, 9 aa, synthetic construct
  source 1..9: note = Description of Artificial Sequence: Synthetic peptide; note = XENP021230 vhCDR3
RGVRQALDY

SEQ ID NO: 25239 - protein, 214 aa, synthetic construct; identical to SEQ ID NO: 17250
  source 1..214: note = Description of Artificial Sequence: Synthetic polypeptide; note = XENP021230 2A11_H1.3_L2_Fab Light Chain

SEQ ID NO: 25240 - protein, 107 aa, synthetic construct; identical to SEQ ID NO: 17251
  source 1..107: note = Description of Artificial Sequence: Synthetic polypeptide; note = VL of XENP021230

SEQ ID NO: 25241 - protein, 11 aa, synthetic construct
  source 1..11: note = Description of Artificial Sequence: Synthetic peptide; note = XENP021230 vlCDR1
QASQDIGNYLN

SEQ ID NO: 25242 - protein, 7 aa, synthetic construct
  source 1..7: note = Description of Artificial Sequence: Synthetic peptide; note = XENP021230 vlCDR2
YTSRLHS

SEQ ID NO: 25243 - protein, 9 aa, synthetic construct
  source 1..9: note = Description of Artificial Sequence: Synthetic peptide; note = XENP021230 vlCDR3
QQGNTLPYT

SEQ ID NO: 25244 - protein, 223 aa, synthetic construct
  source 1..223: note = Description of Artificial Sequence: Synthetic polypeptide; note = XENP021231 2A11_H1.4_L2_Fab Heavy Chain
EVQLVQSGAEVKKPGATVKISCKASGFEIKDYYMHWVQQAPGKGLEWMGWIDPENGDTEYAPKFQGRVTITADTSTNTAYMELSSLRSEDTAVYYCYARGVRQALDYWGQGTLVTVSSASTKGPSVFPLAPSSKSTSGGTAALGCLVKDYFPEPVTVSWNSGALTSGVHTFPAVLQSSGLYSLSSVVTVPSSSLGTQTYICNVNHKPSNTKVDKKVEPKSCGS

SEQ ID NO: 25245 - protein, 118 aa, synthetic construct
  source 1..118: note = Description of Artificial Sequence: Synthetic polypeptide; note = VH of XENP021231
EVQLVQSGAEVKKPGATVKISCKASGFEIKDYYMHWVQQAPGKGLEWMGWIDPENGDTEYAPKFQGRVTITADTSTNTAYMELSSLRSEDTAVYYCYARGVRQALDYWGQGTLVTVSS

SEQ ID NO: 25246 - protein, 5 aa, synthetic construct
  source 1..5: note = Description of Artificial Sequence: Synthetic peptide; note = XENP021231 vhCDR1
DYYMH

SEQ ID NO: 25247 - protein, 17 aa, synthetic construct
  source 1..17: note = Description of Artificial Sequence: Synthetic peptide; note = XENP021231 vhCDR2
WIDPENGDTEYAPKFQG

SEQ ID NO: 25248 - protein, 9 aa, synthetic construct
  source 1..9: note = Description of Artificial Sequence: Synthetic peptide; note = XENP021231 vhCDR3
RGVRQALDY

SEQ ID NO: 25249 - protein, 214 aa, synthetic construct; identical to SEQ ID NO: 17250
  source 1..214: note = Description of Artificial Sequence: Synthetic polypeptide; note = XENP021231 2A11_H1.4_L2_Fab Light Chain

SEQ ID NO: 25250 - protein, 107 aa, synthetic construct; identical to SEQ ID NO: 17251
  source 1..107: note = Description of Artificial Sequence: Synthetic polypeptide; note = VL of XENP021231

SEQ ID NO: 25251 - protein, 11 aa, synthetic construct
  source 1..11: note = Description of Artificial Sequence: Synthetic peptide; note = XENP021231 vlCDR1
QASQDIGNYLN

SEQ ID NO: 25252 - protein, 7 aa, synthetic construct
  source 1..7: note = Description of Artificial Sequence: Synthetic peptide; note = XENP021231 vlCDR2
YTSRLHS

SEQ ID NO: 25253 - protein, 9 aa, synthetic construct
  source 1..9: note = Description of Artificial Sequence: Synthetic peptide; note = XENP021231 vlCDR3
QQGNTLPYT

SEQ ID NO: 25254 - protein, 223 aa, synthetic construct
  source 1..223: note = Description of Artificial Sequence: Synthetic polypeptide; note = XENP021232 2A11_H1.5_L2_Fab Heavy Chain
EVQLVQSGAEVKKPGATVKISCKASGFQIKDYYMHWVQQAPGKGLEWMGWIDPENGDTEYAPKFQGRVTITADTSTNTAYMELSSLRSEDTAVYYCYARGVRQALDYWGQGTLVTVSSASTKGPSVFPLAPSSKSTSGGTAALGCLVKDYFPEPVTVSWNSGALTSGVHTFPAVLQSSGLYSLSSVVTVPSSSLGTQTYICNVNHKPSNTKVDKKVEPKSCGS

SEQ ID NO: 25255 - protein, 118 aa, synthetic construct
  source 1..118: note = Description of Artificial Sequence: Synthetic polypeptide; note = VH of XENP021232
EVQLVQSGAEVKKPGATVKISCKASGFQIKDYYMHWVQQAPGKGLEWMGWIDPENGDTEYAPKFQGRVTITADTSTNTAYMELSSLRSEDTAVYYCYARGVRQALDYWGQGTLVTVSS

SEQ ID NO: 25256 - protein, 5 aa, synthetic construct
  source 1..5: note = Description of Artificial Sequence: Synthetic peptide; note = XENP021232 vhCDR1
DYYMH

SEQ ID NO: 25257 - protein, 17 aa, synthetic construct
  source 1..17: note = Description of Artificial Sequence: Synthetic peptide; note = XENP021232 vhCDR2
WIDPENGDTEYAPKFQG

SEQ ID NO: 25258 - protein, 9 aa, synthetic construct
  source 1..9: note = Description of Artificial Sequence: Synthetic peptide; note = XENP021232 vhCDR3
RGVRQALDY

SEQ ID NO: 25259 - protein, 214 aa, synthetic construct; identical to SEQ ID NO: 17250
  source 1..214: note = Description of Artificial Sequence: Synthetic polypeptide; note = XENP021232 2A11_H1.5_L2_Fab Light Chain

SEQ ID NO: 25260 - protein, 107 aa, synthetic construct; identical to SEQ ID NO: 17251
  source 1..107: note = Description of Artificial Sequence: Synthetic polypeptide; note = VL of XENP021232

SEQ ID NO: 25261 - protein, 11 aa, synthetic construct
  source 1..11: note = Description of Artificial Sequence: Synthetic peptide; note = XENP021232 vlCDR1
QASQDIGNYLN

SEQ ID NO: 25262 - protein, 7 aa, synthetic construct
  source 1..7: note = Description of Artificial Sequence: Synthetic peptide; note = XENP021232 vlCDR2
YTSRLHS

SEQ ID NO: 25263 - protein, 9 aa, synthetic construct
  source 1..9: note = Description of Artificial Sequence: Synthetic peptide; note = XENP021232 vlCDR3
QQGNTLPYT

SEQ ID NO: 25264 - protein, 223 aa, synthetic construct
  source 1..223: note = Description of Artificial Sequence: Synthetic polypeptide; note = XENP021233 2A11_H1.6_L2_Fab Heavy Chain
EVQLVQSGAEVKKPGATVKISCKASGFAIKDYYMHWVQQAPGKGLEWMGWIDPENGDTEYAPKFQGRVTITADTSTNTAYMELSSLRSEDTAVYYCYARGVRQALDYWGQGTLVTVSSASTKGPSVFPLAPSSKSTSGGTAALGCLVKDYFPEPVTVSWNSGALTSGVHTFPAVLQSSGLYSLSSVVTVPSSSLGTQTYICNVNHKPSNTKVDKKVEPKSCGS

SEQ ID NO: 25265 - protein, 118 aa, synthetic construct
  source 1..118: note = Description of Artificial Sequence: Synthetic polypeptide; note = VH of XENP021233
EVQLVQSGAEVKKPGATVKISCKASGFAIKDYYMHWVQQAPGKGLEWMGWIDPENGDTEYAPKFQGRVTITADTSTNTAYMELSSLRSEDTAVYYCYARGVRQALDYWGQGTLVTVSS

SEQ ID NO: 25266 - protein, 5 aa, synthetic construct
  source 1..5: note = Description of Artificial Sequence: Synthetic peptide; note = XENP021233 vhCDR1
DYYMH

SEQ ID NO: 25267 - protein, 17 aa, synthetic construct
  source 1..17: note = Description of Artificial Sequence: Synthetic peptide; note = XENP021233 vhCDR2
WIDPENGDTEYAPKFQG

SEQ ID NO: 25268 - protein, 9 aa, synthetic construct
  source 1..9: note = Description of Artificial Sequence: Synthetic peptide; note = XENP021233 vhCDR3
RGVRQALDY

SEQ ID NO: 25269 - protein, 214 aa, synthetic construct; identical to SEQ ID NO: 17250
  source 1..214: note = Description of Artificial Sequence: Synthetic polypeptide; note = XENP021233 2A11_H1.6_L2_Fab Light Chain

SEQ ID NO: 25270 - protein, 107 aa, synthetic construct; identical to SEQ ID NO: 17251
  source 1..107: note = Description of Artificial Sequence: Synthetic polypeptide; note = VL of XENP021233

SEQ ID NO: 25271 - protein, 11 aa, synthetic construct
  source 1..11: note = Description of Artificial Sequence: Synthetic peptide; note = XENP021233 vlCDR1
QASQDIGNYLN

SEQ ID NO: 25272 - protein, 7 aa, synthetic construct
  source 1..7: note = Description of Artificial Sequence: Synthetic peptide; note = XENP021233 vlCDR2
YTSRLHS

SEQ ID NO: 25273 - protein, 9 aa, synthetic construct
  source 1..9: note = Description of Artificial Sequence: Synthetic peptide; note = XENP021233 vlCDR3
QQGNTLPYT

SEQ ID NO: 25274 - protein, 223 aa, synthetic construct
  source 1..223: note = Description of Artificial Sequence: Synthetic polypeptide; note = XENP021234 2A11_H1.7_L2_Fab Heavy Chain
EVQLVQSGAEVKKPGATVKISCKASGFLIKDYYMHWVQQAPGKGLEWMGWIDPENGDTEYAPKFQGRVTITADTSTNTAYMELSSLRSEDTAVYYCYARGVRQALDYWGQGTLVTVSSASTKGPSVFPLAPSSKSTSGGTAALGCLVKDYFPEPVTVSWNSGALTSGVHTFPAVLQSSGLYSLSSVVTVPSSSLGTQTYICNVNHKPSNTKVDKKVEPKSCGS

SEQ ID NO: 25275 - protein, 118 aa, synthetic construct
  source 1..118: note = Description of Artificial Sequence: Synthetic polypeptide; note = VH of XENP021234
EVQLVQSGAEVKKPGATVKISCKASGFLIKDYYMHWVQQAPGKGLEWMGWIDPENGDTEYAPKFQGRVTITADTSTNTAYMELSSLRSEDTAVYYCYARGVRQALDYWGQGTLVTVSS

SEQ ID NO: 25276 - protein, 5 aa, synthetic construct
  source 1..5: note = Description of Artificial Sequence: Synthetic peptide; note = XENP021234 vhCDR1
DYYMH

SEQ ID NO: 25277 - protein, 17 aa, synthetic construct
  source 1..17: note = Description of Artificial Sequence: Synthetic peptide; note = XENP021234 vhCDR2
WIDPENGDTEYAPKFQG

SEQ ID NO: 25278 - protein, 9 aa, synthetic construct
  source 1..9: note = Description of Artificial Sequence: Synthetic peptide; note = XENP021234 vhCDR3
RGVRQALDY

SEQ ID NO: 25279 - protein, 214 aa, synthetic construct; identical to SEQ ID NO: 17250
  source 1..214: note = Description of Artificial Sequence: Synthetic polypeptide; note = XENP021234 2A11_H1.7_L2_Fab Light Chain

SEQ ID NO: 25280 - protein, 107 aa, synthetic construct; identical to SEQ ID NO: 17251
  source 1..107: note = Description of Artificial Sequence: Synthetic polypeptide; note = VL of XENP021234

SEQ ID NO: 25281 - protein, 11 aa, synthetic construct
  source 1..11: note = Description of Artificial Sequence: Synthetic peptide; note = XENP021234 vlCDR1
QASQDIGNYLN

SEQ ID NO: 25282 - protein, 7 aa, synthetic construct
  source 1..7: note = Description of Artificial Sequence: Synthetic peptide; note = XENP021234 vlCDR2
YTSRLHS

SEQ ID NO: 25283 - protein, 9 aa, synthetic construct
  source 1..9: note = Description of Artificial Sequence: Synthetic peptide; note = XENP021234 vlCDR3
QQGNTLPYT

SEQ ID NO: 25284 - protein, 223 aa, synthetic construct
  source 1..223: note = Description of Artificial Sequence: Synthetic polypeptide; note = XENP021235 2A11_H1.8_L2_Fab Heavy Chain
EVQLVQSGAEVKKPGATVKISCKASGFTIKDYYMHWVQQAPGKGLEWMGWIDPENGDTEYAPKFQGRVTITADTSTNTAYMELSSLRSEDTAVYYCYARGVRQALDYWGQGTLVTVSSASTKGPSVFPLAPSSKSTSGGTAALGCLVKDYFPEPVTVSWNSGALTSGVHTFPAVLQSSGLYSLSSVVTVPSSSLGTQTYICNVNHKPSNTKVDKKVEPKSCGS

SEQ ID NO: 25285 - protein, 118 aa, synthetic construct
  source 1..118: note = Description of Artificial Sequence: Synthetic polypeptide; note = VH of XENP021235
EVQLVQSGAEVKKPGATVKISCKASGFTIKDYYMHWVQQAPGKGLEWMGWIDPENGDTEYAPKFQGRVTITADTSTNTAYMELSSLRSEDTAVYYCYARGVRQALDYWGQGTLVTVSS

SEQ ID NO: 25286 - protein, 5 aa, synthetic construct
  source 1..5: note = Description of Artificial Sequence: Synthetic peptide; note = XENP021235 vhCDR1
DYYMH

SEQ ID NO: 25287 - protein, 17 aa, synthetic construct
  source 1..17: note = Description of Artificial Sequence: Synthetic peptide; note = XENP021235 vhCDR2
WIDPENGDTEYAPKFQG

SEQ ID NO: 25288 - protein, 9 aa, synthetic construct
  source 1..9: note = Description of Artificial Sequence: Synthetic peptide; note = XENP021235 vhCDR3
RGVRQALDY

SEQ ID NO: 25289 - protein, 214 aa, synthetic construct; identical to SEQ ID NO: 17250
  source 1..214: note = Description of Artificial Sequence: Synthetic polypeptide; note = XENP021235 2A11_H1.8_L2_Fab Light Chain

SEQ ID NO: 25290 - protein, 107 aa, synthetic construct; identical to SEQ ID NO: 17251
  source 1..107: note = Description of Artificial Sequence: Synthetic polypeptide; note = VL of XENP021235

SEQ ID NO: 25291 - protein, 11 aa, synthetic construct
  source 1..11: note = Description of Artificial Sequence: Synthetic peptide; note = XENP021235 vlCDR1
QASQDIGNYLN

SEQ ID NO: 25292 - protein, 7 aa, synthetic construct
  source 1..7: note = Description of Artificial Sequence: Synthetic peptide; note = XENP021235 vlCDR2
YTSRLHS

SEQ ID NO: 25293 - protein, 9 aa, synthetic construct
  source 1..9: note = Description of Artificial Sequence: Synthetic peptide; note = XENP021235 vlCDR3
QQGNTLPYT

SEQ ID NO: 25294 - protein, 223 aa, synthetic construct
  source 1..223: note = Description of Artificial Sequence: Synthetic polypeptide; note = XENP021236 2A11_H1.9_L2_Fab Heavy Chain
EVQLVQSGAEVKKPGATVKISCKASGFKIKDYYMHWVQQAPGKGLEWMGWIDPENGDTEYAPKFQGRVTITADTSTNTAYMELSSLRSEDTAVYYCYARGVRQALDYWGQGTLVTVSSASTKGPSVFPLAPSSKSTSGGTAALGCLVKDYFPEPVTVSWNSGALTSGVHTFPAVLQSSGLYSLSSVVTVPSSSLGTQTYICNVNHKPSNTKVDKKVEPKSCGS

SEQ ID NO: 25295 - protein, 118 aa, synthetic construct
  source 1..118: note = Description of Artificial Sequence: Synthetic polypeptide; note = VH of XENP021236
EVQLVQSGAEVKKPGATVKISCKASGFKIKDYYMHWVQQAPGKGLEWMGWIDPENGDTEYAPKFQGRVTITADTSTNTAYMELSSLRSEDTAVYYCYARGVRQALDYWGQGTLVTVSS

SEQ ID NO: 25296 - protein, 5 aa, synthetic construct
  source 1..5: note = Description of Artificial Sequence: Synthetic peptide; note = XENP021236 vhCDR1
DYYMH

SEQ ID NO: 25297 - protein, 17 aa, synthetic construct
  source 1..17: note = Description of Artificial Sequence: Synthetic peptide; note = XENP021236 vhCDR2
WIDPENGDTEYAPKFQG

SEQ ID NO: 25298 - protein, 9 aa, synthetic construct
  source 1..9: note = Description of Artificial Sequence: Synthetic peptide; note = XENP021236 vhCDR3
RGVRQALDY

SEQ ID NO: 25299 - protein, 214 aa, synthetic construct; identical to SEQ ID NO: 17250
  source 1..214: note = Description of Artificial Sequence: Synthetic polypeptide; note = XENP021236 2A11_H1.9_L2_Fab Light Chain

SEQ ID NO: 25300 - protein, 107 aa, synthetic construct; identical to SEQ ID NO: 17251
  source 1..107: note = Description of Artificial Sequence: Synthetic polypeptide; note = VL of XENP021236

SEQ ID NO: 25301 - protein, 11 aa, synthetic construct
  source 1..11: note = Description of Artificial Sequence: Synthetic peptide; note = XENP021236 vlCDR1
QASQDIGNYLN

SEQ ID NO: 25302 - protein, 7 aa, synthetic construct
  source 1..7: note = Description of Artificial Sequence: Synthetic peptide; note = XENP021236 vlCDR2
YTSRLHS

SEQ ID NO: 25303 - protein, 9 aa, synthetic construct
  source 1..9: note = Description of Artificial Sequence: Synthetic peptide; note = XENP021236 vlCDR3
QQGNTLPYT

SEQ ID NO: 25304 - protein, 223 aa, synthetic construct
  source 1..223: note = Description of Artificial Sequence: Synthetic polypeptide; note = XENP021237 2A11_H1.10_L2_Fab Heavy Chain
EVQLVQSGAEVKKPGATVKISCKASGFNVKDYYMHWVQQAPGKGLEWMGWIDPENGDTEYAPKFQGRVTITADTSTNTAYMELSSLRSEDTAVYYCYARGVRQALDYWGQGTLVTVSSASTKGPSVFPLAPSSKSTSGGTAALGCLVKDYFPEPVTVSWNSGALTSGVHTFPAVLQSSGLYSLSSVVTVPSSSLGTQTYICNVNHKPSNTKVDKKVEPKSCGS

SEQ ID NO: 25305 - protein, 118 aa, synthetic construct
  source 1..118: note = Description of Artificial Sequence: Synthetic polypeptide; note = VH of XENP021237
EVQLVQSGAEVKKPGATVKISCKASGFNVKDYYMHWVQQAPGKGLEWMGWIDPENGDTEYAPKFQGRVTITADTSTNTAYMELSSLRSEDTAVYYCYARGVRQALDYWGQGTLVTVSS

SEQ ID NO: 25306 - protein, 5 aa, synthetic construct
  source 1..5: note = Description of Artificial Sequence: Synthetic peptide; note = XENP021237 vhCDR1
DYYMH

SEQ ID NO: 25307 - protein, 17 aa, synthetic construct
  source 1..17: note = Description of Artificial Sequence: Synthetic peptide; note = XENP021237 vhCDR2
WIDPENGDTEYAPKFQG

SEQ ID NO: 25308 - protein, 9 aa, synthetic construct
  source 1..9: note = Description of Artificial Sequence: Synthetic peptide; note = XENP021237 vhCDR3
RGVRQALDY

SEQ ID NO: 25309 - protein, 214 aa, synthetic construct; identical to SEQ ID NO: 17250
  source 1..214: note = Description of Artificial Sequence: Synthetic polypeptide; note = XENP021237 2A11_H1.10_L2_Fab Light Chain

SEQ ID NO: 25310 - protein, 107 aa, synthetic construct; identical to SEQ ID NO: 17251
  source 1..107: note = Description of Artificial Sequence: Synthetic polypeptide; note = VL of XENP021237

SEQ ID NO: 25311 - protein, 11 aa, synthetic construct
  source 1..11: note = Description of Artificial Sequence: Synthetic peptide; note = XENP021237 vlCDR1
QASQDIGNYLN

SEQ ID NO: 25312 - protein, 7 aa, synthetic construct
  source 1..7: note = Description of Artificial Sequence: Synthetic peptide; note = XENP021237 vlCDR2
YTSRLHS

SEQ ID NO: 25313 - protein, 9 aa, synthetic construct
  source 1..9: note = Description of Artificial Sequence: Synthetic peptide; note = XENP021237 vlCDR3
QQGNTLPYT

SEQ ID NO: 25314 - protein, 223 aa, synthetic construct
  source 1..223: note = Description of Artificial Sequence: Synthetic polypeptide; note = XENP021238 2A11_H1.11_L2_Fab Heavy Chain
EVQLVQSGAEVKKPGATVKISCKASGFNIRDYYMHWVQQAPGKGLEWMGWIDPENGDTEYAPKFQGRVTITADTSTNTAYMELSSLRSEDTAVYYCYARGVRQALDYWGQGTLVTVSSASTKGPSVFPLAPSSKSTSGGTAALGCLVKDYFPEPVTVSWNSGALTSGVHTFPAVLQSSGLYSLSSVVTVPSSSLGTQTYICNVNHKPSNTKVDKKVEPKSCGS

SEQ ID NO: 25315 - protein, 118 aa, synthetic construct
  source 1..118: note = Description of Artificial Sequence: Synthetic polypeptide; note = VH of XENP021238
EVQLVQSGAEVKKPGATVKISCKASGFNIRDYYMHWVQQAPGKGLEWMGWIDPENGDTEYAPKFQGRVTITADTSTNTAYMELSSLRSEDTAVYYCYARGVRQALDYWGQGTLVTVSS

SEQ ID NO: 25316 - protein, 5 aa, synthetic construct
  source 1..5: note = Description of Artificial Sequence: Synthetic peptide; note = XENP021238 vhCDR1
DYYMH

SEQ ID NO: 25317 - protein, 17 aa, synthetic construct
  source 1..17: note = Description of Artificial Sequence: Synthetic peptide; note = XENP021238 vhCDR2
WIDPENGDTEYAPKFQG

SEQ ID NO: 25318 - protein, 9 aa, synthetic construct
  source 1..9: note = Description of Artificial Sequence: Synthetic peptide; note = XENP021238 vhCDR3
RGVRQALDY

SEQ ID NO: 25319 - protein, 214 aa, synthetic construct; identical to SEQ ID NO: 17250
  source 1..214: note = Description of Artificial Sequence: Synthetic polypeptide; note = XENP021238 2A11_H1.11_L2_Fab Light Chain

SEQ ID NO: 25320 - protein, 107 aa, synthetic construct; identical to SEQ ID NO: 17251
  source 1..107: note = Description of Artificial Sequence: Synthetic polypeptide; note = VL of XENP021238

SEQ ID NO: 25321 - protein, 11 aa, synthetic construct
  source 1..11: note = Description of Artificial Sequence: Synthetic peptide; note = XENP021238 vlCDR1
QASQDIGNYLN

SEQ ID NO: 25322 - protein, 7 aa, synthetic construct
  source 1..7: note = Description of Artificial Sequence: Synthetic peptide; note = XENP021238 vlCDR2
YTSRLHS

SEQ ID NO: 25323 - protein, 9 aa, synthetic construct
  source 1..9: note = Description of Artificial Sequence: Synthetic peptide; note = XENP021238 vlCDR3
QQGNTLPYT

SEQ ID NO: 25324 - protein, 223 aa, synthetic construct
  source 1..223: note = Description of Artificial Sequence: Synthetic polypeptide; note = XENP021239 2A11_H1.12_L2_Fab Heavy Chain
EVQLVQSGAEVKKPGATVKISCKASGFNIEDYYMHWVQQAPGKGLEWMGWIDPENGDTEYAPKFQGRVTITADTSTNTAYMELSSLRSEDTAVYYCYARGVRQALDYWGQGTLVTVSSASTKGPSVFPLAPSSKSTSGGTAALGCLVKDYFPEPVTVSWNSGALTSGVHTFPAVLQSSGLYSLSSVVTVPSSSLGTQTYICNVNHKPSNTKVDKKVEPKSCGS

SEQ ID NO: 25325 - protein, 118 aa, synthetic construct
  source 1..118: note = Description of Artificial Sequence: Synthetic polypeptide; note = VH of XENP021239
EVQLVQSGAEVKKPGATVKISCKASGFNIEDYYMHWVQQAPGKGLEWMGWIDPENGDTEYAPKFQGRVTITADTSTNTAYMELSSLRSEDTAVYYCYARGVRQALDYWGQGTLVTVSS

SEQ ID NO: 25326 - protein, 5 aa, synthetic construct
  source 1..5: note = Description of Artificial Sequence: Synthetic peptide; note = XENP021239 vhCDR1
DYYMH

SEQ ID NO: 25327 - protein, 17 aa, synthetic construct
  source 1..17: note = Description of Artificial Sequence: Synthetic peptide; note = XENP021239 vhCDR2
WIDPENGDTEYAPKFQG

SEQ ID NO: 25328 - protein, 9 aa, synthetic construct
  source 1..9: note = Description of Artificial Sequence: Synthetic peptide; note = XENP021239 vhCDR3
RGVRQALDY

SEQ ID NO: 25329 - protein, 214 aa, synthetic construct; identical to SEQ ID NO: 17250
  source 1..214: note = Description of Artificial Sequence: Synthetic polypeptide; note = XENP021239 2A11_H1.12_L2_Fab Light Chain

SEQ ID NO: 25330 - protein, 107 aa, synthetic construct; identical to SEQ ID NO: 17251
  source 1..107: note = Description of Artificial Sequence: Synthetic polypeptide; note = VL of XENP021239

SEQ ID NO: 25331 - protein, 11 aa, synthetic construct
  source 1..11: note = Description of Artificial Sequence: Synthetic peptide; note = XENP021239 vlCDR1
QASQDIGNYLN

SEQ ID NO: 25332 - protein, 7 aa, synthetic construct
  source 1..7: note = Description of Artificial Sequence: Synthetic peptide; note = XENP021239 vlCDR2
YTSRLHS

SEQ ID NO: 25333 - protein, 9 aa, synthetic construct
  source 1..9: note = Description of Artificial Sequence: Synthetic peptide; note = XENP021239 vlCDR3
QQGNTLPYT

SEQ ID NO: 25334 - protein, 223 aa, synthetic construct
  source 1..223: note = Description of Artificial Sequence: Synthetic polypeptide; note = XENP021240 2A11_H1.13_L2_Fab Heavy Chain
EVQLVQSGAEVKKPGATVKISCKASGFNIHDYYMHWVQQAPGKGLEWMGWIDPENGDTEYAPKFQGRVTITADTSTNTAYMELSSLRSEDTAVYYCYARGVRQALDYWGQGTLVTVSSASTKGPSVFPLAPSSKSTSGGTAALGCLVKDYFPEPVTVSWNSGALTSGVHTFPAVLQSSGLYSLSSVVTVPSSSLGTQTYICNVNHKPSNTKVDKKVEPKSCGS

SEQ ID NO: 25335 - protein, 118 aa, synthetic construct
  source 1..118: note = Description of Artificial Sequence: Synthetic polypeptide; note = VH of XENP021240
EVQLVQSGAEVKKPGATVKISCKASGFNIHDYYMHWVQQAPGKGLEWMGWIDPENGDTEYAPKFQGRVTITADTSTNTAYMELSSLRSEDTAVYYCYARGVRQALDYWGQGTLVTVSS

SEQ ID NO: 25336 - protein, 5 aa, synthetic construct
  source 1..5: note = Description of Artificial Sequence: Synthetic peptide; note = XENP021240 vhCDR1
DYYMH

SEQ ID NO: 25337 - protein, 17 aa, synthetic construct
  source 1..17: note = Description of Artificial Sequence: Synthetic peptide; note = XENP021240 vhCDR2
WIDPENGDTEYAPKFQG

SEQ ID NO: 25338 - protein, 9 aa, synthetic construct
  source 1..9: note = Description of Artificial Sequence: Synthetic peptide; note = XENP021240 vhCDR3
RGVRQALDY

SEQ ID NO: 25339 - protein, 214 aa, synthetic construct; identical to SEQ ID NO: 17250
  source 1..214: note = Description of Artificial Sequence: Synthetic polypeptide; note = XENP021240 2A11_H1.13_L2_Fab Light Chain

SEQ ID NO: 25340 - protein, 107 aa, synthetic construct; identical to SEQ ID NO: 17251
  source 1..107: note = Description of Artificial Sequence: Synthetic polypeptide; note = VL of XENP021240

SEQ ID NO: 25341 - protein, 11 aa, synthetic construct
  source 1..11: note = Description of Artificial Sequence: Synthetic peptide; note = XENP021240 vlCDR1
QASQDIGNYLN

SEQ ID NO: 25342 - protein, 7 aa, synthetic construct
  source 1..7: note = Description of Artificial Sequence: Synthetic peptide; note = XENP021240 vlCDR2
YTSRLHS

SEQ ID NO: 25343 - protein, 9 aa, synthetic construct
  source 1..9: note = Description of Artificial Sequence: Synthetic peptide; note = XENP021240 vlCDR3
QQGNTLPYT

SEQ ID NO: 25344 - protein, 223 aa, synthetic construct
  source 1..223: note = Description of Artificial Sequence: Synthetic polypeptide; note = XENP021241 2A11_H1.14_L2_Fab Heavy Chain
EVQLVQSGAEVKKPGATVKISCKASGFNILDYYMHWVQQAPGKGLEWMGWIDPENGDTEYAPKFQGRVTITADTSTNTAYMELSSLRSEDTAVYYCYARGVRQALDYWGQGTLVTVSSASTKGPSVFPLAPSSKSTSGGTAALGCLVKDYFPEPVTVSWNSGALTSGVHTFPAVLQSSGLYSLSSVVTVPSSSLGTQTYICNVNHKPSNTKVDKKVEPKSCGS

SEQ ID NO: 25345 - protein, 118 aa, synthetic construct
  source 1..118: note = Description of Artificial Sequence: Synthetic polypeptide; note = VH of XENP021241
EVQLVQSGAEVKKPGATVKISCKASGFNILDYYMHWVQQAPGKGLEWMGWIDPENGDTEYAPKFQGRVTITADTSTNTAYMELSSLRSEDTAVYYCYARGVRQALDYWGQGTLVTVSS

SEQ ID NO: 25346 - protein, 5 aa, synthetic construct
  source 1..5: note = Description of Artificial Sequence: Synthetic peptide; note = XENP021241 vhCDR1
DYYMH

SEQ ID NO: 25347 - protein, 17 aa, synthetic construct
  source 1..17: note = Description of Artificial Sequence: Synthetic peptide; note = XENP021241 vhCDR2
WIDPENGDTEYAPKFQG

SEQ ID NO: 25348 - protein, 9 aa, synthetic construct
  source 1..9: note = Description of Artificial Sequence: Synthetic peptide; note = XENP021241 vhCDR3
RGVRQALDY

SEQ ID NO: 25349 - protein, 214 aa, synthetic construct; identical to SEQ ID NO: 17250
  source 1..214: note = Description of Artificial Sequence: Synthetic polypeptide; note = XENP021241 2A11_H1.14_L2_Fab Light Chain

SEQ ID NO: 25350 - protein, 107 aa, synthetic construct; identical to SEQ ID NO: 17251
  source 1..107: note = Description of Artificial Sequence: Synthetic polypeptide; note = VL of XENP021241

SEQ ID NO: 25351 - protein, 11 aa, synthetic construct
  source 1..11: note = Description of Artificial Sequence: Synthetic peptide; note = XENP021241 vlCDR1
QASQDIGNYLN

SEQ ID NO: 25352 - protein, 7 aa, synthetic construct
  source 1..7: note = Description of Artificial Sequence: Synthetic peptide; note = XENP021241 vlCDR2
YTSRLHS

SEQ ID NO: 25353 - protein, 9 aa, synthetic construct
  source 1..9: note = Description of Artificial Sequence: Synthetic peptide; note = XENP021241 vlCDR3
QQGNTLPYT

SEQ ID NO: 25354 - protein, 223 aa, synthetic construct
  source 1..223: note = Description of Artificial Sequence: Synthetic polypeptide; note = XENP021242 2A11_H1.15_L2_Fab Heavy Chain
EVQLVQSGAEVKKPGATVKISCKASGFNIDDYYMHWVQQAPGKGLEWMGWIDPENGDTEYAPKFQGRVTITADTSTNTAYMELSSLRSEDTAVYYCYARGVRQALDYWGQGTLVTVSSASTKGPSVFPLAPSSKSTSGGTAALGCLVKDYFPEPVTVSWNSGALTSGVHTFPAVLQSSGLYSLSSVVTVPSSSLGTQTYICNVNHKPSNTKVDKKVEPKSCGS

SEQ ID NO: 25355 - protein, 118 aa, synthetic construct
  source 1..118: note = Description of Artificial Sequence: Synthetic polypeptide; note = VH of XENP021242
EVQLVQSGAEVKKPGATVKISCKASGFNIDDYYMHWVQQAPGKGLEWMGWIDPENGDTEYAPKFQGRVTITADTSTNTAYMELSSLRSEDTAVYYCYARGVRQALDYWGQGTLVTVSS

SEQ ID NO: 25356 - protein, 5 aa, synthetic construct
  source 1..5: note = Description of Artificial Sequence: Synthetic peptide; note = XENP021242 vhCDR1
DYYMH

SEQ ID NO: 25357 - protein, 17 aa, synthetic construct
  source 1..17: note = Description of Artificial Sequence: Synthetic peptide; note = XENP021242 vhCDR2
WIDPENGDTEYAPKFQG

SEQ ID NO: 25358 - protein, 9 aa, synthetic construct
  source 1..9: note = Description of Artificial Sequence: Synthetic peptide; note = XENP021242 vhCDR3
RGVRQALDY

SEQ ID NO: 25359 - protein, 214 aa, synthetic construct; identical to SEQ ID NO: 17250
  source 1..214: note = Description of Artificial Sequence: Synthetic polypeptide; note = XENP021242 2A11_H1.15_L2_Fab Light Chain

SEQ ID NO: 25360 - protein, 107 aa, synthetic construct; identical to SEQ ID NO: 17251
  source 1..107: note = Description of Artificial Sequence: Synthetic polypeptide; note = VL of XENP021242

SEQ ID NO: 25361 - protein, 11 aa, synthetic construct
  source 1..11: note = Description of Artificial Sequence: Synthetic peptide; note = XENP021242 vlCDR1
QASQDIGNYLN

SEQ ID NO: 25362 - protein, 7 aa, synthetic construct
  source 1..7: note = Description of Artificial Sequence: Synthetic peptide; note = XENP021242 vlCDR2
YTSRLHS

SEQ ID NO: 25363 - protein, 9 aa, synthetic construct
  source 1..9: note = Description of Artificial Sequence: Synthetic peptide; note = XENP021242 vlCDR3
QQGNTLPYT

SEQ ID NO: 25364 - protein, 223 aa, synthetic construct
  source 1..223: note = Description of Artificial Sequence: Synthetic polypeptide; note = XENP021243 2A11_H1.16_L2_Fab Heavy Chain
EVQLVQSGAEVKKPGATVKISCKASGFNIADYYMHWVQQAPGKGLEWMGWIDPENGDTEYAPKFQGRVTITADTSTNTAYMELSSLRSEDTAVYYCYARGVRQALDYWGQGTLVTVSSASTKGPSVFPLAPSSKSTSGGTAALGCLVKDYFPEPVTVSWNSGALTSGVHTFPAVLQSSGLYSLSSVVTVPSSSLGTQTYICNVNHKPSNTKVDKKVEPKSCGS

SEQ ID NO: 25365 - protein, 118 aa, synthetic construct
  source 1..118: note = Description of Artificial Sequence: Synthetic polypeptide; note = VH of XENP021243
EVQLVQSGAEVKKPGATVKISCKASGFNIADYYMHWVQQAPGKGLEWMGWIDPENGDTEYAPKFQGRVTITADTSTNTAYMELSSLRSEDTAVYYCYARGVRQALDYWGQGTLVTVSS

SEQ ID NO: 25366 - protein, 5 aa, synthetic construct
  source 1..5: note = Description of Artificial Sequence: Synthetic peptide; note = XENP021243 vhCDR1
DYYMH

SEQ ID NO: 25367 - protein, 17 aa, synthetic construct
  source 1..17: note = Description of Artificial Sequence: Synthetic peptide; note = XENP021243 vhCDR2
WIDPENGDTEYAPKFQG

SEQ ID NO: 25368 - protein, 9 aa, synthetic construct
  source 1..9: note = Description of Artificial Sequence: Synthetic peptide; note = XENP021243 vhCDR3
RGVRQALDY

SEQ ID NO: 25369 - protein, 214 aa, synthetic construct; identical to SEQ ID NO: 17250
  source 1..214: note = Description of Artificial Sequence: Synthetic polypeptide; note = XENP021243 2A11_H1.16_L2_Fab Light Chain

SEQ ID NO: 25370 - protein, 107 aa, synthetic construct; identical to SEQ ID NO: 17251
  source 1..107: note = Description of Artificial Sequence: Synthetic polypeptide; note = VL of XENP021243

SEQ ID NO: 25371 - protein, 11 aa, synthetic construct
  source 1..11: note = Description of Artificial Sequence: Synthetic peptide; note = XENP021243 vlCDR1
QASQDIGNYLN

SEQ ID NO: 25372 - protein, 7 aa, synthetic construct
  source 1..7: note = Description of Artificial Sequence: Synthetic peptide; note = XENP021243 vlCDR2
YTSRLHS

SEQ ID NO: 25373 - protein, 9 aa, synthetic construct
  source 1..9: note = Description of Artificial Sequence: Synthetic peptide; note = XENP021243 vlCDR3
QQGNTLPYT

SEQ ID NO: 25374 - protein, 223 aa, synthetic construct
  source 1..223: note = Description of Artificial Sequence: Synthetic polypeptide; note = XENP021244 2A11_H1.17_L2_Fab Heavy Chain
EVQLVQSGAEVKKPGATVKISCKASGFNIGDYYMHWVQQAPGKGLEWMGWIDPENGDTEYAPKFQGRVTITADTSTNTAYMELSSLRSEDTAVYYCYARGVRQALDYWGQGTLVTVSSASTKGPSVFPLAPSSKSTSGGTAALGCLVKDYFPEPVTVSWNSGALTSGVHTFPAVLQSSGLYSLSSVVTVPSSSLGTQTYICNVNHKPSNTKVDKKVEPKSCGS

SEQ ID NO: 25375 - protein, 118 aa, synthetic construct
  source 1..118: note = Description of Artificial Sequence: Synthetic polypeptide; note = VH of XENP021244
EVQLVQSGAEVKKPGATVKISCKASGFNIGDYYMHWVQQAPGKGLEWMGWIDPENGDTEYAPKFQGRVTITADTSTNTAYMELSSLRSEDTAVYYCYARGVRQALDYWGQGTLVTVSS

SEQ ID NO: 25376 - protein, 5 aa, synthetic construct
  source 1..5: note = Description of Artificial Sequence: Synthetic peptide; note = XENP021244 vhCDR1
DYYMH

SEQ ID NO: 25377 - protein, 17 aa, synthetic construct
  source 1..17: note = Description of Artificial Sequence: Synthetic peptide; note = XENP021244 vhCDR2
WIDPENGDTEYAPKFQG

SEQ ID NO: 25378 - protein, 9 aa, synthetic construct
  source 1..9: note = Description of Artificial Sequence: Synthetic peptide; note = XENP021244 vhCDR3
RGVRQALDY

SEQ ID NO: 25379 - protein, 214 aa, synthetic construct; identical to SEQ ID NO: 17250
  source 1..214: note = Description of Artificial Sequence: Synthetic polypeptide; note = XENP021244 2A11_H1.17_L2_Fab Light Chain

SEQ ID NO: 25380 - protein, 107 aa, synthetic construct; identical to SEQ ID NO: 17251
  source 1..107: note = Description of Artificial Sequence: Synthetic polypeptide; note = VL of XENP021244

SEQ ID NO: 25381 - protein, 11 aa, synthetic construct
  source 1..11: note = Description of Artificial Sequence: Synthetic peptide; note = XENP021244 vlCDR1
QASQDIGNYLN

SEQ ID NO: 25382 - protein, 7 aa, synthetic construct
  source 1..7: note = Description of Artificial Sequence: Synthetic peptide; note = XENP021244 vlCDR2
YTSRLHS

SEQ ID NO: 25383 - protein, 9 aa, synthetic construct
  source 1..9: note = Description of Artificial Sequence: Synthetic peptide; note = XENP021244 vlCDR3
QQGNTLPYT

SEQ ID NO: 25384 - protein, 223 aa, synthetic construct
  source 1..223: note = Description of Artificial Sequence: Synthetic polypeptide; note = XENP021245 2A11_H1.18_L2_Fab Heavy Chain
EVQLVQSGAEVKKPGATVKISCKASGFNIYDYYMHWVQQAPGKGLEWMGWIDPENGDTEYAPKFQGRVTITADTSTNTAYMELSSLRSEDTAVYYCYARGVRQALDYWGQGTLVTVSSASTKGPSVFPLAPSSKSTSGGTAALGCLVKDYFPEPVTVSWNSGALTSGVHTFPAVLQSSGLYSLSSVVTVPSSSLGTQTYICNVNHKPSNTKVDKKVEPKSCGS

SEQ ID NO: 25385 - protein, 118 aa, synthetic construct
  source 1..118: note = Description of Artificial Sequence: Synthetic polypeptide; note = VH of XENP021245
EVQLVQSGAEVKKPGATVKISCKASGFNIYDYYMHWVQQAPGKGLEWMGWIDPENGDTEYAPKFQGRVTITADTSTNTAYMELSSLRSEDTAVYYCYARGVRQALDYWGQGTLVTVSS

SEQ ID NO: 25386 - protein, 5 aa, synthetic construct
  source 1..5: note = Description of Artificial Sequence: Synthetic peptide; note = XENP021245 vhCDR1
DYYMH

SEQ ID NO: 25387 - protein, 17 aa, synthetic construct
  source 1..17: note = Description of Artificial Sequence: Synthetic peptide; note = XENP021245 vhCDR2
WIDPENGDTEYAPKFQG

SEQ ID NO: 25388 - protein, 9 aa, synthetic construct
  source 1..9: note = Description of Artificial Sequence: Synthetic peptide; note = XENP021245 vhCDR3
RGVRQALDY

SEQ ID NO: 25389 - protein, 214 aa, synthetic construct; identical to SEQ ID NO: 17250
  source 1..214: note = Description of Artificial Sequence: Synthetic polypeptide; note = XENP021245 2A11_H1.18_L2_Fab Light Chain

SEQ ID NO: 25390 - protein, 107 aa, synthetic construct; identical to SEQ ID NO: 17251
  source 1..107: note = Description of Artificial Sequence: Synthetic polypeptide; note = VL of XENP021245

SEQ ID NO: 25391 - protein, 11 aa, synthetic construct
  source 1..11: note = Description of Artificial Sequence: Synthetic peptide; note = XENP021245 vlCDR1
QASQDIGNYLN

SEQ ID NO: 25392 - protein, 7 aa, synthetic construct
  source 1..7: note = Description of Artificial Sequence: Synthetic peptide; note = XENP021245 vlCDR2
YTSRLHS

SEQ ID NO: 25393 - protein, 9 aa, synthetic construct
  source 1..9: note = Description of Artificial Sequence: Synthetic peptide; note = XENP021245 vlCDR3
QQGNTLPYT

SEQ ID NO: 25394 - protein, 223 aa, synthetic construct
  source 1..223: note = Description of Artificial Sequence: Synthetic polypeptide; note = XENP021246 2A11_H1.19_L2_Fab Heavy Chain
EVQLVQSGAEVKKPGATVKISCKASGFNIIDYYMHWVQQAPGKGLEWMGWIDPENGDTEYAPKFQGRVTITADTSTNTAYMELSSLRSEDTAVYYCYARGVRQALDYWGQGTLVTVSSASTKGPSVFPLAPSSKSTSGGTAALGCLVKDYFPEPVTVSWNSGALTSGVHTFPAVLQSSGLYSLSSVVTVPSSSLGTQTYICNVNHKPSNTKVDKKVEPKSCGS

SEQ ID NO: 25395 - protein, 118 aa, synthetic construct
  source 1..118: note = Description of Artificial Sequence: Synthetic polypeptide; note = VH of XENP021246
EVQLVQSGAEVKKPGATVKISCKASGFNIIDYYMHWVQQAPGKGLEWMGWIDPENGDTEYAPKFQGRVTITADTSTNTAYMELSSLRSEDTAVYYCYARGVRQALDYWGQGTLVTVSS

SEQ ID NO: 25396 - protein, 5 aa, synthetic construct
  source 1..5: note = Description of Artificial Sequence: Synthetic peptide; note = XENP021246 vhCDR1
DYYMH

SEQ ID NO: 25397 - protein, 17 aa, synthetic construct
  source 1..17: note = Description of Artificial Sequence: Synthetic peptide; note = XENP021246 vhCDR2
WIDPENGDTEYAPKFQG

SEQ ID NO: 25398 - protein, 9 aa, synthetic construct
  source 1..9: note = Description of Artificial Sequence: Synthetic peptide; note = XENP021246 vhCDR3
RGVRQALDY

SEQ ID NO: 25399 - protein, 214 aa, synthetic construct; identical to SEQ ID NO: 17250
  source 1..214: note = Description of Artificial Sequence: Synthetic polypeptide; note = XENP021246 2A11_H1.19_L2_Fab Light Chain

SEQ ID NO: 25400 - protein, 107 aa, synthetic construct; identical to SEQ ID NO: 17251
  source 1..107: note = Description of Artificial Sequence: Synthetic polypeptide; note = VL of XENP021246

SEQ ID NO: 25401 - protein, 11 aa, synthetic construct
  source 1..11: note = Description of Artificial Sequence: Synthetic peptide; note = XENP021246 vlCDR1
QASQDIGNYLN

SEQ ID NO: 25402 - protein, 7 aa, synthetic construct
  source 1..7: note = Description of Artificial Sequence: Synthetic peptide; note = XENP021246 vlCDR2
YTSRLHS

SEQ ID NO: 25403 - protein, 9 aa, synthetic construct
  source 1..9: note = Description of Artificial Sequence: Synthetic peptide; note = XENP021246 vlCDR3
QQGNTLPYT

SEQ ID NO: 25404 - protein, 223 aa, synthetic construct
  source 1..223: note = Description of Artificial Sequence: Synthetic polypeptide; note = XENP021247 2A11_H1.20_L2_Fab Heavy Chain
EVQLVQSGAEVKKPGATVKISCKASGFNIKNYYMHWVQQAPGKGLEWMGWIDPENGDTEYAPKFQGRVTITADTSTNTAYMELSSLRSEDTAVYYCYARGVRQALDYWGQGTLVTVSSASTKGPSVFPLAPSSKSTSGGTAALGCLVKDYFPEPVTVSWNSGALTSGVHTFPAVLQSSGLYSLSSVVTVPSSSLGTQTYICNVNHKPSNTKVDKKVEPKSCGS

SEQ ID NO: 25405 - protein, 118 aa, synthetic construct
  source 1..118: note = Description of Artificial Sequence: Synthetic polypeptide; note = VH of XENP021247
EVQLVQSGAEVKKPGATVKISCKASGFNIKNYYMHWVQQAPGKGLEWMGWIDPENGDTEYAPKFQGRVTITADTSTNTAYMELSSLRSEDTAVYYCYARGVRQALDYWGQGTLVTVSS

SEQ ID NO: 25406 - protein, 5 aa, synthetic construct
  source 1..5: note = Description of Artificial Sequence: Synthetic peptide; note = XENP021247 vhCDR1
NYYMH

SEQ ID NO: 25407 - protein, 17 aa, synthetic construct
  source 1..17: note = Description of Artificial Sequence: Synthetic peptide; note = XENP021247 vhCDR2
WIDPENGDTEYAPKFQG

SEQ ID NO: 25408 - protein, 9 aa, synthetic construct
  source 1..9: note = Description of Artificial Sequence: Synthetic peptide; note = XENP021247 vhCDR3
RGVRQALDY

SEQ ID NO: 25409 - protein, 214 aa, synthetic construct; identical to SEQ ID NO: 17250
  source 1..214: note = Description of Artificial Sequence: Synthetic polypeptide; note = XENP021247 2A11_H1.20_L2_Fab Light Chain

SEQ ID NO: 25410 - protein, 107 aa, synthetic construct; identical to SEQ ID NO: 17251
  source 1..107: note = Description of Artificial Sequence: Synthetic polypeptide; note = VL of XENP021247

SEQ ID NO: 25411 - protein, 11 aa, synthetic construct
  source 1..11: note = Description of Artificial Sequence: Synthetic peptide; note = XENP021247 vlCDR1
QASQDIGNYLN

SEQ ID NO: 25412 - protein, 7 aa, synthetic construct
  source 1..7: note = Description of Artificial Sequence: Synthetic peptide; note = XENP021247 vlCDR2
YTSRLHS

SEQ ID NO: 25413 - protein, 9 aa, synthetic construct
  source 1..9: note = Description of Artificial Sequence: Synthetic peptide; note = XENP021247 vlCDR3
QQGNTLPYT

SEQ ID NO: 25414 - protein, 223 aa, synthetic construct
  source 1..223: note = Description of Artificial Sequence: Synthetic polypeptide; note = XENP021248 2A11_H1.21_L2_Fab Heavy Chain
EVQLVQSGAEVKKPGATVKISCKASGFNIKEYYMHWVQQAPGKGLEWMGWIDPENGDTEYAPKFQGRVTITADTSTNTAYMELSSLRSEDTAVYYCYARGVRQALDYWGQGTLVTVSSASTKGPSVFPLAPSSKSTSGGTAALGCLVKDYFPEPVTVSWNSGALTSGVHTFPAVLQSSGLYSLSSVVTVPSSSLGTQTYICNVNHKPSNTKVDKKVEPKSCGS

SEQ ID NO: 25415 - protein, 118 aa, synthetic construct
  source 1..118: note = Description of Artificial Sequence: Synthetic polypeptide; note = VH of XENP021248
EVQLVQSGAEVKKPGATVKISCKASGFNIKEYYMHWVQQAPGKGLEWMGWIDPENGDTEYAPKFQGRVTITADTSTNTAYMELSSLRSEDTAVYYCYARGVRQALDYWGQGTLVTVSS

SEQ ID NO: 25416 - protein, 5 aa, synthetic construct
  source 1..5: note = Description of Artificial Sequence: Synthetic peptide; note = XENP021248 vhCDR1
EYYMH

SEQ ID NO: 25417 - protein, 17 aa, synthetic construct
  source 1..17: note = Description of Artificial Sequence: Synthetic peptide; note = XENP021248 vhCDR2
WIDPENGDTEYAPKFQG

SEQ ID NO: 25418 - protein, 9 aa, synthetic construct
  source 1..9: note = Description of Artificial Sequence: Synthetic peptide; note = XENP021248 vhCDR3
RGVRQALDY

SEQ ID NO: 25419 - protein, 214 aa, synthetic construct; identical to SEQ ID NO: 17250
  source 1..214: note = Description of Artificial Sequence: Synthetic polypeptide; note = XENP021248 2A11_H1.21_L2_Fab Light Chain

SEQ ID NO: 25420 - protein, 107 aa, synthetic construct; identical to SEQ ID NO: 17251
  source 1..107: note = Description of Artificial Sequence: Synthetic polypeptide; note = VL of XENP021248

SEQ ID NO: 25421 - protein, 11 aa, synthetic construct
  source 1..11: note = Description of Artificial Sequence: Synthetic peptide; note = XENP021248 vlCDR1
QASQDIGNYLN

SEQ ID NO: 25422 - protein, 7 aa, synthetic construct
  source 1..7: note = Description of Artificial Sequence: Synthetic peptide; note = XENP021248 vlCDR2
YTSRLHS

SEQ ID NO: 25423 - protein, 9 aa, synthetic construct
  source 1..9: note = Description of Artificial Sequence: Synthetic peptide; note = XENP021248 vlCDR3
QQGNTLPYT

SEQ ID NO: 25424 - protein, 223 aa, synthetic construct
  source 1..223: note = Description of Artificial Sequence: Synthetic polypeptide; note = XENP021249 2A11_H1.22_L2_Fab Heavy Chain
EVQLVQSGAEVKKPGATVKISCKASGFNIKHYYMHWVQQAPGKGLEWMGWIDPENGDTEYAPKFQGRVTITADTSTNTAYMELSSLRSEDTAVYYCYARGVRQALDYWGQGTLVTVSSASTKGPSVFPLAPSSKSTSGGTAALGCLVKDYFPEPVTVSWNSGALTSGVHTFPAVLQSSGLYSLSSVVTVPSSSLGTQTYICNVNHKPSNTKVDKKVEPKSCGS

SEQ ID NO: 25425 - protein, 118 aa, synthetic construct
  source 1..118: note = Description of Artificial Sequence: Synthetic polypeptide; note = VH of XENP021249
EVQLVQSGAEVKKPGATVKISCKASGFNIKHYYMHWVQQAPGKGLEWMGWIDPENGDTEYAPKFQGRVTITADTSTNTAYMELSSLRSEDTAVYYCYARGVRQALDYWGQGTLVTVSS

SEQ ID NO: 25426 - protein, 5 aa, synthetic construct
  source 1..5: note = Description of Artificial Sequence: Synthetic peptide; note = XENP021249 vhCDR1
HYYMH

SEQ ID NO: 25427 - protein, 17 aa, synthetic construct
  source 1..17: note = Description of Artificial Sequence: Synthetic peptide; note = XENP021249 vhCDR2
WIDPENGDTEYAPKFQG

SEQ ID NO: 25428 - protein, 9 aa, synthetic construct
  source 1..9: note = Description of Artificial Sequence: Synthetic peptide; note = XENP021249 vhCDR3
RGVRQALDY

SEQ ID NO: 25429 - protein, 214 aa, synthetic construct; identical to SEQ ID NO: 17250
  source 1..214: note = Description of Artificial Sequence: Synthetic polypeptide; note = XENP021249 2A11_H1.22_L2_Fab Light Chain

SEQ ID NO: 25430 - protein, 107 aa, synthetic construct; identical to SEQ ID NO: 17251
  source 1..107: note = Description of Artificial Sequence: Synthetic polypeptide; note = VL of XENP021249

SEQ ID NO: 25431 - protein, 11 aa, synthetic construct
  source 1..11: note = Description of Artificial Sequence: Synthetic peptide; note = XENP021249 vlCDR1
QASQDIGNYLN

SEQ ID NO: 25432 - protein, 7 aa, synthetic construct
  source 1..7: note = Description of Artificial Sequence: Synthetic peptide; note = XENP021249 vlCDR2
YTSRLHS

SEQ ID NO: 25433 - protein, 9 aa, synthetic construct
  source 1..9: note = Description of Artificial Sequence: Synthetic peptide; note = XENP021249 vlCDR3
QQGNTLPYT

SEQ ID NO: 25434 - protein, 223 aa, synthetic construct
  source 1..223: note = Description of Artificial Sequence: Synthetic polypeptide; note = XENP021250 2A11_H1.23_L2_Fab Heavy Chain
EVQLVQSGAEVKKPGATVKISCKASGFNIKSYYMHWVQQAPGKGLEWMGWIDPENGDTEYAPKFQGRVTITADTSTNTAYMELSSLRSEDTAVYYCYARGVRQALDYWGQGTLVTVSSASTKGPSVFPLAPSSKSTSGGTAALGCLVKDYFPEPVTVSWNSGALTSGVHTFPAVLQSSGLYSLSSVVTVPSSSLGTQTYICNVNHKPSNTKVDKKVEPKSCGS

SEQ ID NO: 25435 - protein, 118 aa, synthetic construct
  source 1..118: note = Description of Artificial Sequence: Synthetic polypeptide; note = VH of XENP021250
EVQLVQSGAEVKKPGATVKISCKASGFNIKSYYMHWVQQAPGKGLEWMGWIDPENGDTEYAPKFQGRVTITADTSTNTAYMELSSLRSEDTAVYYCYARGVRQALDYWGQGTLVTVSS

SEQ ID NO: 25436 - protein, 5 aa, synthetic construct
  source 1..5: note = Description of Artificial Sequence: Synthetic peptide; note = XENP021250 vhCDR1
SYYMH

SEQ ID NO: 25437 - protein, 17 aa, synthetic construct
  source 1..17: note = Description of Artificial Sequence: Synthetic peptide; note = XENP021250 vhCDR2
WIDPENGDTEYAPKFQG

SEQ ID NO: 25438 - protein, 9 aa, synthetic construct
  source 1..9: note = Description of Artificial Sequence: Synthetic peptide; note = XENP021250 vhCDR3
RGVRQALDY

SEQ ID NO: 25439 - protein, 214 aa, synthetic construct; identical to SEQ ID NO: 17250
  source 1..214: note = Description of Artificial Sequence: Synthetic polypeptide; note = XENP021250 2A11_H1.23_L2_Fab Light Chain

SEQ ID NO: 25440 - protein, 107 aa, synthetic construct; identical to SEQ ID NO: 17251
  source 1..107: note = Description of Artificial Sequence: Synthetic polypeptide; note = VL of XENP021250

SEQ ID NO: 25441 - protein, 11 aa, synthetic construct
  source 1..11: note = Description of Artificial Sequence: Synthetic peptide; note = XENP021250 vlCDR1
QASQDIGNYLN

SEQ ID NO: 25442 - protein, 7 aa, synthetic construct
  source 1..7: note = Description of Artificial Sequence: Synthetic peptide; note = XENP021250 vlCDR2
YTSRLHS

SEQ ID NO: 25443 - protein, 9 aa, synthetic construct
  source 1..9: note = Description of Artificial Sequence: Synthetic peptide; note = XENP021250 vlCDR3
QQGNTLPYT

SEQ ID NO: 25444 - protein, 223 aa, synthetic construct
  source 1..223: note = Description of Artificial Sequence: Synthetic polypeptide; note = XENP021251 2A11_H1.24_L2_Fab Heavy Chain
EVQLVQSGAEVKKPGATVKISCKASGFNIKKYYMHWVQQAPGKGLEWMGWIDPENGDTEYAPKFQGRVTITADTSTNTAYMELSSLRSEDTAVYYCYARGVRQALDYWGQGTLVTVSSASTKGPSVFPLAPSSKSTSGGTAALGCLVKDYFPEPVTVSWNSGALTSGVHTFPAVLQSSGLYSLSSVVTVPSSSLGTQTYICNVNHKPSNTKVDKKVEPKSCGS

SEQ ID NO: 25445 - protein, 118 aa, synthetic construct
  source 1..118: note = Description of Artificial Sequence: Synthetic polypeptide; note = VH of XENP021251
EVQLVQSGAEVKKPGATVKISCKASGFNIKKYYMHWVQQAPGKGLEWMGWIDPENGDTEYAPKFQGRVTITADTSTNTAYMELSSLRSEDTAVYYCYARGVRQALDYWGQGTLVTVSS

SEQ ID NO: 25446 - protein, 5 aa, synthetic construct
  source 1..5: note = Description of Artificial Sequence: Synthetic peptide; note = XENP021251 vhCDR1
KYYMH

SEQ ID NO: 25447 - protein, 17 aa, synthetic construct
  source 1..17: note = Description of Artificial Sequence: Synthetic peptide; note = XENP021251 vhCDR2
WIDPENGDTEYAPKFQG

SEQ ID NO: 25448 - protein, 9 aa, synthetic construct
  source 1..9: note = Description of Artificial Sequence: Synthetic peptide; note = XENP021251 vhCDR3
RGVRQALDY

SEQ ID NO: 25449 - protein, 214 aa, synthetic construct; identical to SEQ ID NO: 17250
  source 1..214: note = Description of Artificial Sequence: Synthetic polypeptide; note = XENP021251 2A11_H1.24_L2_Fab Light Chain

SEQ ID NO: 25450 - protein, 107 aa, synthetic construct; identical to SEQ ID NO: 17251
  source 1..107: note = Description of Artificial Sequence: Synthetic polypeptide; note = VL of XENP021251

SEQ ID NO: 25451 - protein, 11 aa, synthetic construct
  source 1..11: note = Description of Artificial Sequence: Synthetic peptide; note = XENP021251 vlCDR1
QASQDIGNYLN

SEQ ID NO: 25452 - protein, 7 aa, synthetic construct
  source 1..7: note = Description of Artificial Sequence: Synthetic peptide; note = XENP021251 vlCDR2
YTSRLHS

SEQ ID NO: 25453 - protein, 9 aa, synthetic construct
  source 1..9: note = Description of Artificial Sequence: Synthetic peptide; note = XENP021251 vlCDR3
QQGNTLPYT

SEQ ID NO: 25454 - protein, 223 aa, synthetic construct
  source 1..223: note = Description of Artificial Sequence: Synthetic polypeptide; note = XENP021252 2A11_H1.25_L2_Fab Heavy Chain
EVQLVQSGAEVKKPGATVKISCKASGFNIKLYYMHWVQQAPGKGLEWMGWIDPENGDTEYAPKFQGRVTITADTSTNTAYMELSSLRSEDTAVYYCYARGVRQALDYWGQGTLVTVSSASTKGPSVFPLAPSSKSTSGGTAALGCLVKDYFPEPVTVSWNSGALTSGVHTFPAVLQSSGLYSLSSVVTVPSSSLGTQTYICNVNHKPSNTKVDKKVEPKSCGS

SEQ ID NO: 25455 - protein, 118 aa, synthetic construct
  source 1..118: note = Description of Artificial Sequence: Synthetic polypeptide; note = VH of XENP021252
EVQLVQSGAEVKKPGATVKISCKASGFNIKLYYMHWVQQAPGKGLEWMGWIDPENGDTEYAPKFQGRVTITADTSTNTAYMELSSLRSEDTAVYYCYARGVRQALDYWGQGTLVTVSS

SEQ ID NO: 25456 - protein, 5 aa, synthetic construct
  source 1..5: note = Description of Artificial Sequence: Synthetic peptide; note = XENP021252 vhCDR1
LYYMH

SEQ ID NO: 25457 - protein, 17 aa, synthetic construct
  source 1..17: note = Description of Artificial Sequence: Synthetic peptide; note = XENP021252 vhCDR2
WIDPENGDTEYAPKFQG

SEQ ID NO: 25458 - protein, 9 aa, synthetic construct
  source 1..9: note = Description of Artificial Sequence: Synthetic peptide; note = XENP021252 vhCDR3
RGVRQALDY

SEQ ID NO: 25459 - protein, 214 aa, synthetic construct; identical to SEQ ID NO: 17250
  source 1..214: note = Description of Artificial Sequence: Synthetic polypeptide; note = XENP021252 2A11_H1.25_L2_Fab Light Chain

SEQ ID NO: 25460 - protein, 107 aa, synthetic construct; identical to SEQ ID NO: 17251
  source 1..107: note = Description of Artificial Sequence: Synthetic polypeptide; note = VL of XENP021252

SEQ ID NO: 25461 - protein, 11 aa, synthetic construct
  source 1..11: note = Description of Artificial Sequence: Synthetic peptide; note = XENP021252 vlCDR1
QASQDIGNYLN

SEQ ID NO: 25462 - protein, 7 aa, synthetic construct
  source 1..7: note = Description of Artificial Sequence: Synthetic peptide; note = XENP021252 vlCDR2
YTSRLHS

SEQ ID NO: 25463 - protein, 9 aa, synthetic construct
  source 1..9: note = Description of Artificial Sequence: Synthetic peptide; note = XENP021252 vlCDR3
QQGNTLPYT

SEQ ID NO: 25464 - protein, 223 aa, synthetic construct
  source 1..223: note = Description of Artificial Sequence: Synthetic polypeptide; note = XENP021253 2A11_H1.26_L2_Fab Heavy Chain
EVQLVQSGAEVKKPGATVKISCKASGFNIKTYYMHWVQQAPGKGLEWMGWIDPENGDTEYAPKFQGRVTITADTSTNTAYMELSSLRSEDTAVYYCYARGVRQALDYWGQGTLVTVSSASTKGPSVFPLAPSSKSTSGGTAALGCLVKDYFPEPVTVSWNSGALTSGVHTFPAVLQSSGLYSLSSVVTVPSSSLGTQTYICNVNHKPSNTKVDKKVEPKSCGS

SEQ ID NO: 25465 - protein, 118 aa, synthetic construct
  source 1..118: note = Description of Artificial Sequence: Synthetic polypeptide; note = VH of XENP021253
EVQLVQSGAEVKKPGATVKISCKASGFNIKTYYMHWVQQAPGKGLEWMGWIDPENGDTEYAPKFQGRVTITADTSTNTAYMELSSLRSEDTAVYYCYARGVRQALDYWGQGTLVTVSS

SEQ ID NO: 25466 - protein, 5 aa, synthetic construct
  source 1..5: note = Description of Artificial Sequence: Synthetic peptide; note = XENP021253 vhCDR1
TYYMH

SEQ ID NO: 25467 - protein, 17 aa, synthetic construct
  source 1..17: note = Description of Artificial Sequence: Synthetic peptide; note = XENP021253 vhCDR2
WIDPENGDTEYAPKFQG

SEQ ID NO: 25468 - protein, 9 aa, synthetic construct
  source 1..9: note = Description of Artificial Sequence: Synthetic peptide; note = XENP021253 vhCDR3
RGVRQALDY

SEQ ID NO: 25469 - protein, 214 aa, synthetic construct; identical to SEQ ID NO: 17250
  source 1..214: note = Description of Artificial Sequence: Synthetic polypeptide; note = XENP021253 2A11_H1.26_L2_Fab Light Chain

SEQ ID NO: 25470 - protein, 107 aa, synthetic construct; identical to SEQ ID NO: 17251
  source 1..107: note = Description of Artificial Sequence: Synthetic polypeptide; note = VL of XENP021253

SEQ ID NO: 25471 - protein, 11 aa, synthetic construct
  source 1..11: note = Description of Artificial Sequence: Synthetic peptide; note = XENP021253 vlCDR1
QASQDIGNYLN

SEQ ID NO: 25472 - protein, 7 aa, synthetic construct
  source 1..7: note = Description of Artificial Sequence: Synthetic peptide; note = XENP021253 vlCDR2
YTSRLHS

SEQ ID NO: 25473 - protein, 9 aa, synthetic construct
  source 1..9: note = Description of Artificial Sequence: Synthetic peptide; note = XENP021253 vlCDR3
QQGNTLPYT

SEQ ID NO: 25474 - protein, 223 aa, synthetic construct
  source 1..223: note = Description of Artificial Sequence: Synthetic polypeptide; note = XENP021254 2A11_H1.27_L2_Fab Heavy Chain
EVQLVQSGAEVKKPGATVKISCKASGFNIKQYYMHWVQQAPGKGLEWMGWIDPENGDTEYAPKFQGRVTITADTSTNTAYMELSSLRSEDTAVYYCYARGVRQALDYWGQGTLVTVSSASTKGPSVFPLAPSSKSTSGGTAALGCLVKDYFPEPVTVSWNSGALTSGVHTFPAVLQSSGLYSLSSVVTVPSSSLGTQTYICNVNHKPSNTKVDKKVEPKSCGS

SEQ ID NO: 25475 - protein, 118 aa, synthetic construct
  source 1..118: note = Description of Artificial Sequence: Synthetic polypeptide; note = VH of XENP021254
EVQLVQSGAEVKKPGATVKISCKASGFNIKQYYMHWVQQAPGKGLEWMGWIDPENGDTEYAPKFQGRVTITADTSTNTAYMELSSLRSEDTAVYYCYARGVRQALDYWGQGTLVTVSS

SEQ ID NO: 25476 - protein, 5 aa, synthetic construct
  source 1..5: note = Description of Artificial Sequence: Synthetic peptide; note = XENP021254 vhCDR1
QYYMH

SEQ ID NO: 25477 - protein, 17 aa, synthetic construct
  source 1..17: note = Description of Artificial Sequence: Synthetic peptide; note = XENP021254 vhCDR2
WIDPENGDTEYAPKFQG

SEQ ID NO: 25478 - protein, 9 aa, synthetic construct
  source 1..9: note = Description of Artificial Sequence: Synthetic peptide; note = XENP021254 vhCDR3
RGVRQALDY

SEQ ID NO: 25479 - protein, 214 aa, synthetic construct; identical to SEQ ID NO: 17250
  source 1..214: note = Description of Artificial Sequence: Synthetic polypeptide; note = XENP021254 2A11_H1.27_L2_Fab Light Chain

SEQ ID NO: 25480 - protein, 107 aa, synthetic construct; identical to SEQ ID NO: 17251
  source 1..107: note = Description of Artificial Sequence: Synthetic polypeptide; note = VL of XENP021254

SEQ ID NO: 25481 - protein, 11 aa, synthetic construct
  source 1..11: note = Description of Artificial Sequence: Synthetic peptide; note = XENP021254 vlCDR1
QASQDIGNYLN

SEQ ID NO: 25482 - protein, 7 aa, synthetic construct
  source 1..7: note = Description of Artificial Sequence: Synthetic peptide; note = XENP021254 vlCDR2
YTSRLHS

SEQ ID NO: 25483 - protein, 9 aa, synthetic construct
  source 1..9: note = Description of Artificial Sequence: Synthetic peptide; note = XENP021254 vlCDR3
QQGNTLPYT

SEQ ID NO: 25484 - protein, 223 aa, synthetic construct
  source 1..223: note = Description of Artificial Sequence: Synthetic polypeptide; note = XENP021255 2A11_H1.28_L2_Fab Heavy Chain
EVQLVQSGAEVKKPGATVKISCKASGFNIKFYYMHWVQQAPGKGLEWMGWIDPENGDTEYAPKFQGRVTITADTSTNTAYMELSSLRSEDTAVYYCYARGVRQALDYWGQGTLVTVSSASTKGPSVFPLAPSSKSTSGGTAALGCLVKDYFPEPVTVSWNSGALTSGVHTFPAVLQSSGLYSLSSVVTVPSSSLGTQTYICNVNHKPSNTKVDKKVEPKSCGS

SEQ ID NO: 25485 - protein, 118 aa, synthetic construct
  source 1..118: note = Description of Artificial Sequence: Synthetic polypeptide; note = VH of XENP021255
EVQLVQSGAEVKKPGATVKISCKASGFNIKFYYMHWVQQAPGKGLEWMGWIDPENGDTEYAPKFQGRVTITADTSTNTAYMELSSLRSEDTAVYYCYARGVRQALDYWGQGTLVTVSS

SEQ ID NO: 25486 - protein, 5 aa, synthetic construct
  source 1..5: note = Description of Artificial Sequence: Synthetic peptide; note = XENP021255 vhCDR1
FYYMH

SEQ ID NO: 25487 - protein, 17 aa, synthetic construct
  source 1..17: note = Description of Artificial Sequence: Synthetic peptide; note = XENP021255 vhCDR2
WIDPENGDTEYAPKFQG

SEQ ID NO: 25488 - protein, 9 aa, synthetic construct
  source 1..9: note = Description of Artificial Sequence: Synthetic peptide; note = XENP021255 vhCDR3
RGVRQALDY

SEQ ID NO: 25489 - protein, 214 aa, synthetic construct; identical to SEQ ID NO: 17250
  source 1..214: note = Description of Artificial Sequence: Synthetic polypeptide; note = XENP021255 2A11_H1.28_L2_Fab Light Chain

SEQ ID NO: 25490 - protein, 107 aa, synthetic construct; identical to SEQ ID NO: 17251
  source 1..107: note = Description of Artificial Sequence: Synthetic polypeptide; note = VL of XENP021255

SEQ ID NO: 25491 - protein, 11 aa, synthetic construct
  source 1..11: note = Description of Artificial Sequence: Synthetic peptide; note = XENP021255 vlCDR1
QASQDIGNYLN

SEQ ID NO: 25492 - protein, 7 aa, synthetic construct
  source 1..7: note = Description of Artificial Sequence: Synthetic peptide; note = XENP021255 vlCDR2
YTSRLHS

SEQ ID NO: 25493 - protein, 9 aa, synthetic construct
  source 1..9: note = Description of Artificial Sequence: Synthetic peptide; note = XENP021255 vlCDR3
QQGNTLPYT

SEQ ID NO: 25494 - protein, 223 aa, synthetic construct
  source 1..223: note = Description of Artificial Sequence: Synthetic polypeptide; note = XENP021256 2A11_H1.29_L2_Fab Heavy Chain
EVQLVQSGAEVKKPGATVKISCKASGFNIKDFYMHWVQQAPGKGLEWMGWIDPENGDTEYAPKFQGRVTITADTSTNTAYMELSSLRSEDTAVYYCYARGVRQALDYWGQGTLVTVSSASTKGPSVFPLAPSSKSTSGGTAALGCLVKDYFPEPVTVSWNSGALTSGVHTFPAVLQSSGLYSLSSVVTVPSSSLGTQTYICNVNHKPSNTKVDKKVEPKSCGS

SEQ ID NO: 25495 - protein, 118 aa, synthetic construct
  source 1..118: note = Description of Artificial Sequence: Synthetic polypeptide; note = VH of XENP021256
EVQLVQSGAEVKKPGATVKISCKASGFNIKDFYMHWVQQAPGKGLEWMGWIDPENGDTEYAPKFQGRVTITADTSTNTAYMELSSLRSEDTAVYYCYARGVRQALDYWGQGTLVTVSS

SEQ ID NO: 25496 - protein, 5 aa, synthetic construct
  source 1..5: note = Description of Artificial Sequence: Synthetic peptide; note = XENP021256 vhCDR1
DFYMH

SEQ ID NO: 25497 - protein, 17 aa, synthetic construct
  source 1..17: note = Description of Artificial Sequence: Synthetic peptide; note = XENP021256 vhCDR2
WIDPENGDTEYAPKFQG

SEQ ID NO: 25498 - protein, 9 aa, synthetic construct
  source 1..9: note = Description of Artificial Sequence: Synthetic peptide; note = XENP021256 vhCDR3
RGVRQALDY

SEQ ID NO: 25499 - protein, 214 aa, synthetic construct; identical to SEQ ID NO: 17250
  source 1..214: note = Description of Artificial Sequence: Synthetic polypeptide; note = XENP021256 2A11_H1.29_L2_Fab Light Chain

SEQ ID NO: 25500 - protein, 107 aa, synthetic construct; identical to SEQ ID NO: 17251
  source 1..107: note = Description of Artificial Sequence: Synthetic polypeptide; note = VL of XENP021256

SEQ ID NO: 25501 - protein, 11 aa, synthetic construct
  source 1..11: note = Description of Artificial Sequence: Synthetic peptide; note = XENP021256 vlCDR1
QASQDIGNYLN

SEQ ID NO: 25502 - protein, 7 aa, synthetic construct
  source 1..7: note = Description of Artificial Sequence: Synthetic peptide; note = XENP021256 vlCDR2
YTSRLHS

SEQ ID NO: 25503 - protein, 9 aa, synthetic construct
  source 1..9: note = Description of Artificial Sequence: Synthetic peptide; note = XENP021256 vlCDR3
QQGNTLPYT

SEQ ID NO: 25504 - protein, 223 aa, synthetic construct
  source 1..223: note = Description of Artificial Sequence: Synthetic polypeptide; note = XENP021257 2A11_H1.30_L2_Fab Heavy Chain
EVQLVQSGAEVKKPGATVKISCKASGFNIKDHYMHWVQQAPGKGLEWMGWIDPENGDTEYAPKFQGRVTITADTSTNTAYMELSSLRSEDTAVYYCYARGVRQALDYWGQGTLVTVSSASTKGPSVFPLAPSSKSTSGGTAALGCLVKDYFPEPVTVSWNSGALTSGVHTFPAVLQSSGLYSLSSVVTVPSSSLGTQTYICNVNHKPSNTKVDKKVEPKSCGS

SEQ ID NO: 25505 - protein, 118 aa, synthetic construct
  source 1..118: note = Description of Artificial Sequence: Synthetic polypeptide; note = VH of XENP021257
EVQLVQSGAEVKKPGATVKISCKASGFNIKDHYMHWVQQAPGKGLEWMGWIDPENGDTEYAPKFQGRVTITADTSTNTAYMELSSLRSEDTAVYYCYARGVRQALDYWGQGTLVTVSS

SEQ ID NO: 25506 - protein, 5 aa, synthetic construct
  source 1..5: note = Description of Artificial Sequence: Synthetic peptide; note = XENP021257 vhCDR1
DHYMH

SEQ ID NO: 25507 - protein, 17 aa, synthetic construct
  source 1..17: note = Description of Artificial Sequence: Synthetic peptide; note = XENP021257 vhCDR2
WIDPENGDTEYAPKFQG

SEQ ID NO: 25508 - protein, 9 aa, synthetic construct
  source 1..9: note = Description of Artificial Sequence: Synthetic peptide; note = XENP021257 vhCDR3
RGVRQALDY

SEQ ID NO: 25509 - protein, 214 aa, synthetic construct; identical to SEQ ID NO: 17250
  source 1..214: note = Description of Artificial Sequence: Synthetic polypeptide; note = XENP021257 2A11_H1.30_L2_Fab Light Chain

SEQ ID NO: 25510 - protein, 107 aa, synthetic construct; identical to SEQ ID NO: 17251
  source 1..107: note = Description of Artificial Sequence: Synthetic polypeptide; note = VL of XENP021257

SEQ ID NO: 25511 - protein, 11 aa, synthetic construct
  source 1..11: note = Description of Artificial Sequence: Synthetic peptide; note = XENP021257 vlCDR1
QASQDIGNYLN

SEQ ID NO: 25512 - protein, 7 aa, synthetic construct
  source 1..7: note = Description of Artificial Sequence: Synthetic peptide; note = XENP021257 vlCDR2
YTSRLHS

SEQ ID NO: 25513 - protein, 9 aa, synthetic construct
  source 1..9: note = Description of Artificial Sequence: Synthetic peptide; note = XENP021257 vlCDR3
QQGNTLPYT

SEQ ID NO: 25514 - protein, 223 aa, synthetic construct
  source 1..223: note = Description of Artificial Sequence: Synthetic polypeptide; note = XENP021258 2A11_H1.31_L2_Fab Heavy Chain
EVQLVQSGAEVKKPGATVKISCKASGFNIKDLYMHWVQQAPGKGLEWMGWIDPENGDTEYAPKFQGRVTITADTSTNTAYMELSSLRSEDTAVYYCYARGVRQALDYWGQGTLVTVSSASTKGPSVFPLAPSSKSTSGGTAALGCLVKDYFPEPVTVSWNSGALTSGVHTFPAVLQSSGLYSLSSVVTVPSSSLGTQTYICNVNHKPSNTKVDKKVEPKSCGS

SEQ ID NO: 25515 - protein, 118 aa, synthetic construct
  source 1..118: note = Description of Artificial Sequence: Synthetic polypeptide; note = VH of XENP021258
EVQLVQSGAEVKKPGATVKISCKASGFNIKDLYMHWVQQAPGKGLEWMGWIDPENGDTEYAPKFQGRVTITADTSTNTAYMELSSLRSEDTAVYYCYARGVRQALDYWGQGTLVTVSS

SEQ ID NO: 25516 - protein, 5 aa, synthetic construct
  source 1..5: note = Description of Artificial Sequence: Synthetic peptide; note = XENP021258 vhCDR1
DLYMH

SEQ ID NO: 25517 - protein, 17 aa, synthetic construct
  source 1..17: note = Description of Artificial Sequence: Synthetic peptide; note = XENP021258 vhCDR2
WIDPENGDTEYAPKFQG

SEQ ID NO: 25518 - protein, 9 aa, synthetic construct
  source 1..9: note = Description of Artificial Sequence: Synthetic peptide; note = XENP021258 vhCDR3
RGVRQALDY

SEQ ID NO: 25519 - protein, 214 aa, synthetic construct; identical to SEQ ID NO: 17250
  source 1..214: note = Description of Artificial Sequence: Synthetic polypeptide; note = XENP021258 2A11_H1.31_L2_Fab Light Chain

SEQ ID NO: 25520 - protein, 107 aa, synthetic construct; identical to SEQ ID NO: 17251
  source 1..107: note = Description of Artificial Sequence: Synthetic polypeptide; note = VL of XENP021258

SEQ ID NO: 25521 - protein, 11 aa, synthetic construct
  source 1..11: note = Description of Artificial Sequence: Synthetic peptide; note = XENP021258 vlCDR1
QASQDIGNYLN

SEQ ID NO: 25522 - protein, 7 aa, synthetic construct
  source 1..7: note = Description of Artificial Sequence: Synthetic peptide; note = XENP021258 vlCDR2
YTSRLHS

SEQ ID NO: 25523 - protein, 9 aa, synthetic construct
  source 1..9: note = Description of Artificial Sequence: Synthetic peptide; note = XENP021258 vlCDR3
QQGNTLPYT

SEQ ID NO: 25524 - protein, 223 aa, synthetic construct
  source 1..223: note = Description of Artificial Sequence: Synthetic polypeptide; note = XENP021259 2A11_H1.32_L2_Fab Heavy Chain
EVQLVQSGAEVKKPGATVKISCKASGFNIKDVYMHWVQQAPGKGLEWMGWIDPENGDTEYAPKFQGRVTITADTSTNTAYMELSSLRSEDTAVYYCYARGVRQALDYWGQGTLVTVSSASTKGPSVFPLAPSSKSTSGGTAALGCLVKDYFPEPVTVSWNSGALTSGVHTFPAVLQSSGLYSLSSVVTVPSSSLGTQTYICNVNHKPSNTKVDKKVEPKSCGS

SEQ ID NO: 25525 - protein, 118 aa, synthetic construct
  source 1..118: note = Description of Artificial Sequence: Synthetic polypeptide; note = VH of XENP021259
EVQLVQSGAEVKKPGATVKISCKASGFNIKDVYMHWVQQAPGKGLEWMGWIDPENGDTEYAPKFQGRVTITADTSTNTAYMELSSLRSEDTAVYYCYARGVRQALDYWGQGTLVTVSS

SEQ ID NO: 25526 - protein, 5 aa, synthetic construct
  source 1..5: note = Description of Artificial Sequence: Synthetic peptide; note = XENP021259 vhCDR1
DVYMH

SEQ ID NO: 25527 - protein, 17 aa, synthetic construct
  source 1..17: note = Description of Artificial Sequence: Synthetic peptide; note = XENP021259 vhCDR2
WIDPENGDTEYAPKFQG

SEQ ID NO: 25528 - protein, 9 aa, synthetic construct
  source 1..9: note = Description of Artificial Sequence: Synthetic peptide; note = XENP021259 vhCDR3
RGVRQALDY

SEQ ID NO: 25529 - protein, 214 aa, synthetic construct; identical to SEQ ID NO: 17250
  source 1..214: note = Description of Artificial Sequence: Synthetic polypeptide; note = XENP021259 2A11_H1.32_L2_Fab Light Chain

SEQ ID NO: 25530 - protein, 107 aa, synthetic construct; identical to SEQ ID NO: 17251
  source 1..107: note = Description of Artificial Sequence: Synthetic polypeptide; note = VL of XENP021259

SEQ ID NO: 25531 - protein, 11 aa, synthetic construct
  source 1..11: note = Description of Artificial Sequence: Synthetic peptide; note = XENP021259 vlCDR1
QASQDIGNYLN

SEQ ID NO: 25532 - protein, 7 aa, synthetic construct
  source 1..7: note = Description of Artificial Sequence: Synthetic peptide; note = XENP021259 vlCDR2
YTSRLHS

SEQ ID NO: 25533 - protein, 9 aa, synthetic construct
  source 1..9: note = Description of Artificial Sequence: Synthetic peptide; note = XENP021259 vlCDR3
QQGNTLPYT

SEQ ID NO: 25534 - protein, 223 aa, synthetic construct
  source 1..223: note = Description of Artificial Sequence: Synthetic polypeptide; note = XENP021260 2A11_H1.33_L2_Fab Heavy Chain
EVQLVQSGAEVKKPGATVKISCKASGFNIKDAYMHWVQQAPGKGLEWMGWIDPENGDTEYAPKFQGRVTITADTSTNTAYMELSSLRSEDTAVYYCYARGVRQALDYWGQGTLVTVSSASTKGPSVFPLAPSSKSTSGGTAALGCLVKDYFPEPVTVSWNSGALTSGVHTFPAVLQSSGLYSLSSVVTVPSSSLGTQTYICNVNHKPSNTKVDKKVEPKSCGS

SEQ ID NO: 25535 - protein, 118 aa, synthetic construct
  source 1..118: note = Description of Artificial Sequence: Synthetic polypeptide; note = VH of XENP021260
EVQLVQSGAEVKKPGATVKISCKASGFNIKDAYMHWVQQAPGKGLEWMGWIDPENGDTEYAPKFQGRVTITADTSTNTAYMELSSLRSEDTAVYYCYARGVRQALDYWGQGTLVTVSS

SEQ ID NO: 25536 - protein, 5 aa, synthetic construct
  source 1..5: note = Description of Artificial Sequence: Synthetic peptide; note = XENP021260 vhCDR1
DAYMH

SEQ ID NO: 25537 - protein, 17 aa, synthetic construct
  source 1..17: note = Description of Artificial Sequence: Synthetic peptide; note = XENP021260 vhCDR2
WIDPENGDTEYAPKFQG

SEQ ID NO: 25538 - protein, 9 aa, synthetic construct
  source 1..9: note = Description of Artificial Sequence: Synthetic peptide; note = XENP021260 vhCDR3
RGVRQALDY

SEQ ID NO: 25539 - protein, 214 aa, synthetic construct; identical to SEQ ID NO: 17250
  source 1..214: note = Description of Artificial Sequence: Synthetic polypeptide; note = XENP021260 2A11_H1.33_L2_Fab Light Chain

SEQ ID NO: 25540 - protein, 107 aa, synthetic construct; identical to SEQ ID NO: 17251
  source 1..107: note = Description of Artificial Sequence: Synthetic polypeptide; note = VL of XENP021260

SEQ ID NO: 25541 - protein, 11 aa, synthetic construct
  source 1..11: note = Description of Artificial Sequence: Synthetic peptide; note = XENP021260 vlCDR1
QASQDIGNYLN

SEQ ID NO: 25542 - protein, 7 aa, synthetic construct
  source 1..7: note = Description of Artificial Sequence: Synthetic peptide; note = XENP021260 vlCDR2
YTSRLHS

SEQ ID NO: 25543 - protein, 9 aa, synthetic construct
  source 1..9: note = Description of Artificial Sequence: Synthetic peptide; note = XENP021260 vlCDR3
QQGNTLPYT

SEQ ID NO: 25544 - protein, 223 aa, synthetic construct
  source 1..223: note = Description of Artificial Sequence: Synthetic polypeptide; note = XENP021261 2A11_H1.34_L2_Fab Heavy Chain
EVQLVQSGAEVKKPGATVKISCKASGFNIKDQYMHWVQQAPGKGLEWMGWIDPENGDTEYAPKFQGRVTITADTSTNTAYMELSSLRSEDTAVYYCYARGVRQALDYWGQGTLVTVSSASTKGPSVFPLAPSSKSTSGGTAALGCLVKDYFPEPVTVSWNSGALTSGVHTFPAVLQSSGLYSLSSVVTVPSSSLGTQTYICNVNHKPSNTKVDKKVEPKSCGS

SEQ ID NO: 25545 - protein, 118 aa, synthetic construct
  source 1..118: note = Description of Artificial Sequence: Synthetic polypeptide; note = VH of XENP021261
EVQLVQSGAEVKKPGATVKISCKASGFNIKDQYMHWVQQAPGKGLEWMGWIDPENGDTEYAPKFQGRVTITADTSTNTAYMELSSLRSEDTAVYYCYARGVRQALDYWGQGTLVTVSS

SEQ ID NO: 25546 - protein, 5 aa, synthetic construct
  source 1..5: note = Description of Artificial Sequence: Synthetic peptide; note = XENP021261 vhCDR1
DQYMH

SEQ ID NO: 25547 - protein, 17 aa, synthetic construct
  source 1..17: note = Description of Artificial Sequence: Synthetic peptide; note = XENP021261 vhCDR2
WIDPENGDTEYAPKFQG

SEQ ID NO: 25548 - protein, 9 aa, synthetic construct
  source 1..9: note = Description of Artificial Sequence: Synthetic peptide; note = XENP021261 vhCDR3
RGVRQALDY

SEQ ID NO: 25549 - protein, 214 aa, synthetic construct; identical to SEQ ID NO: 17250
  source 1..214: note = Description of Artificial Sequence: Synthetic polypeptide; note = XENP021261 2A11_H1.34_L2_Fab Light Chain

SEQ ID NO: 25550 - protein, 107 aa, synthetic construct; identical to SEQ ID NO: 17251
  source 1..107: note = Description of Artificial Sequence: Synthetic polypeptide; note = VL of XENP021261

SEQ ID NO: 25551 - protein, 11 aa, synthetic construct
  source 1..11: note = Description of Artificial Sequence: Synthetic peptide; note = XENP021261 vlCDR1
QASQDIGNYLN

SEQ ID NO: 25552 - protein, 7 aa, synthetic construct
  source 1..7: note = Description of Artificial Sequence: Synthetic peptide; note = XENP021261 vlCDR2
YTSRLHS

SEQ ID NO: 25553 - protein, 9 aa, synthetic construct
  source 1..9: note = Description of Artificial Sequence: Synthetic peptide; note = XENP021261 vlCDR3
QQGNTLPYT

SEQ ID NO: 25554 - protein, 223 aa, synthetic construct
  source 1..223: note = Description of Artificial Sequence: Synthetic polypeptide; note = XENP021262 2A11_H1.35_L2_Fab Heavy Chain
EVQLVQSGAEVKKPGATVKISCKASGFNIKDEYMHWVQQAPGKGLEWMGWIDPENGDTEYAPKFQGRVTITADTSTNTAYMELSSLRSEDTAVYYCYARGVRQALDYWGQGTLVTVSSASTKGPSVFPLAPSSKSTSGGTAALGCLVKDYFPEPVTVSWNSGALTSGVHTFPAVLQSSGLYSLSSVVTVPSSSLGTQTYICNVNHKPSNTKVDKKVEPKSCGS

SEQ ID NO: 25555 - protein, 118 aa, synthetic construct
  source 1..118: note = Description of Artificial Sequence: Synthetic polypeptide; note = VH of XENP021262
EVQLVQSGAEVKKPGATVKISCKASGFNIKDEYMHWVQQAPGKGLEWMGWIDPENGDTEYAPKFQGRVTITADTSTNTAYMELSSLRSEDTAVYYCYARGVRQALDYWGQGTLVTVSS

SEQ ID NO: 25556 - protein, 5 aa, synthetic construct
  source 1..5: note = Description of Artificial Sequence: Synthetic peptide; note = XENP021262 vhCDR1
DEYMH

SEQ ID NO: 25557 - protein, 17 aa, synthetic construct
  source 1..17: note = Description of Artificial Sequence: Synthetic peptide; note = XENP021262 vhCDR2
WIDPENGDTEYAPKFQG

SEQ ID NO: 25558 - protein, 9 aa, synthetic construct
  source 1..9: note = Description of Artificial Sequence: Synthetic peptide; note = XENP021262 vhCDR3
RGVRQALDY

SEQ ID NO: 25559 - protein, 214 aa, synthetic construct; identical to SEQ ID NO: 17250
  source 1..214: note = Description of Artificial Sequence: Synthetic polypeptide; note = XENP021262 2A11_H1.35_L2_Fab Light Chain

SEQ ID NO: 25560 - protein, 107 aa, synthetic construct; identical to SEQ ID NO: 17251
  source 1..107: note = Description of Artificial Sequence: Synthetic polypeptide; note = VL of XENP021262

SEQ ID NO: 25561 - protein, 11 aa, synthetic construct
  source 1..11: note = Description of Artificial Sequence: Synthetic peptide; note = XENP021262 vlCDR1
QASQDIGNYLN

SEQ ID NO: 25562 - protein, 7 aa, synthetic construct
  source 1..7: note = Description of Artificial Sequence: Synthetic peptide; note = XENP021262 vlCDR2
YTSRLHS

SEQ ID NO: 25563 - protein, 9 aa, synthetic construct
  source 1..9: note = Description of Artificial Sequence: Synthetic peptide; note = XENP021262 vlCDR3
QQGNTLPYT

SEQ ID NO: 25564 - protein, 223 aa, synthetic construct
  source 1..223: note = Description of Artificial Sequence: Synthetic polypeptide; note = XENP021263 2A11_H1.36_L2_Fab Heavy Chain
EVQLVQSGAEVKKPGATVKISCKASGFNIKDKYMHWVQQAPGKGLEWMGWIDPENGDTEYAPKFQGRVTITADTSTNTAYMELSSLRSEDTAVYYCYARGVRQALDYWGQGTLVTVSSASTKGPSVFPLAPSSKSTSGGTAALGCLVKDYFPEPVTVSWNSGALTSGVHTFPAVLQSSGLYSLSSVVTVPSSSLGTQTYICNVNHKPSNTKVDKKVEPKSCGS

SEQ ID NO: 25565 - protein, 118 aa, synthetic construct
  source 1..118: note = Description of Artificial Sequence: Synthetic polypeptide; note = VH of XENP021263
EVQLVQSGAEVKKPGATVKISCKASGFNIKDKYMHWVQQAPGKGLEWMGWIDPENGDTEYAPKFQGRVTITADTSTNTAYMELSSLRSEDTAVYYCYARGVRQALDYWGQGTLVTVSS

SEQ ID NO: 25566 - protein, 5 aa, synthetic construct
  source 1..5: note = Description of Artificial Sequence: Synthetic peptide; note = XENP021263 vhCDR1
DKYMH

SEQ ID NO: 25567 - protein, 17 aa, synthetic construct
  source 1..17: note = Description of Artificial Sequence: Synthetic peptide; note = XENP021263 vhCDR2
WIDPENGDTEYAPKFQG

SEQ ID NO: 25568 - protein, 9 aa, synthetic construct
  source 1..9: note = Description of Artificial Sequence: Synthetic peptide; note = XENP021263 vhCDR3
RGVRQALDY

SEQ ID NO: 25569 - protein, 214 aa, synthetic construct; identical to SEQ ID NO: 17250
  source 1..214: note = Description of Artificial Sequence: Synthetic polypeptide; note = XENP021263 2A11_H1.36_L2_Fab Light Chain

SEQ ID NO: 25570 - protein, 107 aa, synthetic construct; identical to SEQ ID NO: 17251
  source 1..107: note = Description of Artificial Sequence: Synthetic polypeptide; note = VL of XENP021263

SEQ ID NO: 25571 - protein, 11 aa, synthetic construct
  source 1..11: note = Description of Artificial Sequence: Synthetic peptide; note = XENP021263 vlCDR1
QASQDIGNYLN

SEQ ID NO: 25572 - protein, 7 aa, synthetic construct
  source 1..7: note = Description of Artificial Sequence: Synthetic peptide; note = XENP021263 vlCDR2
YTSRLHS

SEQ ID NO: 25573 - protein, 9 aa, synthetic construct
  source 1..9: note = Description of Artificial Sequence: Synthetic peptide; note = XENP021263 vlCDR3
QQGNTLPYT

SEQ ID NO: 25574 - protein, 223 aa, synthetic construct
  source 1..223: note = Description of Artificial Sequence: Synthetic polypeptide; note = XENP021264 2A11_H1.37_L2_Fab Heavy Chain
EVQLVQSGAEVKKPGATVKISCKASGFNIKDYFMHWVQQAPGKGLEWMGWIDPENGDTEYAPKFQGRVTITADTSTNTAYMELSSLRSEDTAVYYCYARGVRQALDYWGQGTLVTVSSASTKGPSVFPLAPSSKSTSGGTAALGCLVKDYFPEPVTVSWNSGALTSGVHTFPAVLQSSGLYSLSSVVTVPSSSLGTQTYICNVNHKPSNTKVDKKVEPKSCGS

SEQ ID NO: 25575 - protein, 118 aa, synthetic construct
  source 1..118: note = Description of Artificial Sequence: Synthetic polypeptide; note = VH of XENP021264
EVQLVQSGAEVKKPGATVKISCKASGFNIKDYFMHWVQQAPGKGLEWMGWIDPENGDTEYAPKFQGRVTITADTSTNTAYMELSSLRSEDTAVYYCYARGVRQALDYWGQGTLVTVSS

SEQ ID NO: 25576 - protein, 5 aa, synthetic construct
  source 1..5: note = Description of Artificial Sequence: Synthetic peptide; note = XENP021264 vhCDR1
DYFMH

SEQ ID NO: 25577 - protein, 17 aa, synthetic construct
  source 1..17: note = Description of Artificial Sequence: Synthetic peptide; note = XENP021264 vhCDR2
WIDPENGDTEYAPKFQG

SEQ ID NO: 25578 - protein, 9 aa, synthetic construct
  source 1..9: note = Description of Artificial Sequence: Synthetic peptide; note = XENP021264 vhCDR3
RGVRQALDY

SEQ ID NO: 25579 - protein, 214 aa, synthetic construct; identical to SEQ ID NO: 17250
  source 1..214: note = Description of Artificial Sequence: Synthetic polypeptide; note = XENP021264 2A11_H1.37_L2_Fab Light Chain

SEQ ID NO: 25580 - protein, 107 aa, synthetic construct; identical to SEQ ID NO: 17251
  source 1..107: note = Description of Artificial Sequence: Synthetic polypeptide; note = VL of XENP021264

SEQ ID NO: 25581 - protein, 11 aa, synthetic construct
  source 1..11: note = Description of Artificial Sequence: Synthetic peptide; note = XENP021264 vlCDR1
QASQDIGNYLN

SEQ ID NO: 25582 - protein, 7 aa, synthetic construct
  source 1..7: note = Description of Artificial Sequence: Synthetic peptide; note = XENP021264 vlCDR2
YTSRLHS

SEQ ID NO: 25583 - protein, 9 aa, synthetic construct
  source 1..9: note = Description of Artificial Sequence: Synthetic peptide; note = XENP021264 vlCDR3
QQGNTLPYT

SEQ ID NO: 25584 - protein, 223 aa, synthetic construct
  source 1..223: note = Description of Artificial Sequence: Synthetic polypeptide; note = XENP021265 2A11_H1.38_L2_Fab Heavy Chain
EVQLVQSGAEVKKPGATVKISCKASGFNIKDYHMHWVQQAPGKGLEWMGWIDPENGDTEYAPKFQGRVTITADTSTNTAYMELSSLRSEDTAVYYCYARGVRQALDYWGQGTLVTVSSASTKGPSVFPLAPSSKSTSGGTAALGCLVKDYFPEPVTVSWNSGALTSGVHTFPAVLQSSGLYSLSSVVTVPSSSLGTQTYICNVNHKPSNTKVDKKVEPKSCGS

SEQ ID NO: 25585 - protein, 118 aa, synthetic construct
  source 1..118: note = Description of Artificial Sequence: Synthetic polypeptide; note = VH of XENP021265
EVQLVQSGAEVKKPGATVKISCKASGFNIKDYHMHWVQQAPGKGLEWMGWIDPENGDTEYAPKFQGRVTITADTSTNTAYMELSSLRSEDTAVYYCYARGVRQALDYWGQGTLVTVSS

SEQ ID NO: 25586 - protein, 5 aa, synthetic construct
  source 1..5: note = Description of Artificial Sequence: Synthetic peptide; note = XENP021265 vhCDR1
DYHMH

SEQ ID NO: 25587 - protein, 17 aa, synthetic construct
  source 1..17: note = Description of Artificial Sequence: Synthetic peptide; note = XENP021265 vhCDR2
WIDPENGDTEYAPKFQG

SEQ ID NO: 25588 - protein, 9 aa, synthetic construct
  source 1..9: note = Description of Artificial Sequence: Synthetic peptide; note = XENP021265 vhCDR3
RGVRQALDY

SEQ ID NO: 25589 - protein, 214 aa, synthetic construct; identical to SEQ ID NO: 17250
  source 1..214: note = Description of Artificial Sequence: Synthetic polypeptide; note = XENP021265 2A11_H1.38_L2_Fab Light Chain

SEQ ID NO: 25590 - protein, 107 aa, synthetic construct; identical to SEQ ID NO: 17251
  source 1..107: note = Description of Artificial Sequence: Synthetic polypeptide; note = VL of XENP021265

SEQ ID NO: 25591 - protein, 11 aa, synthetic construct
  source 1..11: note = Description of Artificial Sequence: Synthetic peptide; note = XENP021265 vlCDR1
QASQDIGNYLN

SEQ ID NO: 25592 - protein, 7 aa, synthetic construct
  source 1..7: note = Description of Artificial Sequence: Synthetic peptide; note = XENP021265 vlCDR2
YTSRLHS

SEQ ID NO: 25593 - protein, 9 aa, synthetic construct
  source 1..9: note = Description of Artificial Sequence: Synthetic peptide; note = XENP021265 vlCDR3
QQGNTLPYT

SEQ ID NO: 25594 - protein, 223 aa, synthetic construct
  source 1..223: note = Description of Artificial Sequence: Synthetic polypeptide; note = XENP021266 2A11_H1.39_L2_Fab Heavy Chain
EVQLVQSGAEVKKPGATVKISCKASGFNIKDYLMHWVQQAPGKGLEWMGWIDPENGDTEYAPKFQGRVTITADTSTNTAYMELSSLRSEDTAVYYCYARGVRQALDYWGQGTLVTVSSASTKGPSVFPLAPSSKSTSGGTAALGCLVKDYFPEPVTVSWNSGALTSGVHTFPAVLQSSGLYSLSSVVTVPSSSLGTQTYICNVNHKPSNTKVDKKVEPKSCGS

SEQ ID NO: 25595 - protein, 118 aa, synthetic construct
  source 1..118: note = Description of Artificial Sequence: Synthetic polypeptide; note = VH of XENP021266
EVQLVQSGAEVKKPGATVKISCKASGFNIKDYLMHWVQQAPGKGLEWMGWIDPENGDTEYAPKFQGRVTITADTSTNTAYMELSSLRSEDTAVYYCYARGVRQALDYWGQGTLVTVSS

SEQ ID NO: 25596 - protein, 5 aa, synthetic construct
  source 1..5: note = Description of Artificial Sequence: Synthetic peptide; note = XENP021266 vhCDR1
DYLMH

SEQ ID NO: 25597 - protein, 17 aa, synthetic construct
  source 1..17: note = Description of Artificial Sequence: Synthetic peptide; note = XENP021266 vhCDR2
WIDPENGDTEYAPKFQG

SEQ ID NO: 25598 - protein, 9 aa, synthetic construct
  source 1..9: note = Description of Artificial Sequence: Synthetic peptide; note = XENP021266 vhCDR3
RGVRQALDY

SEQ ID NO: 25599 - protein, 214 aa, synthetic construct; identical to SEQ ID NO: 17250
  source 1..214: note = Description of Artificial Sequence: Synthetic polypeptide; note = XENP021266 2A11_H1.39_L2_Fab Light Chain

SEQ ID NO: 25600 - protein, 107 aa, synthetic construct; identical to SEQ ID NO: 17251
  source 1..107: note = Description of Artificial Sequence: Synthetic polypeptide; note = VL of XENP021266

SEQ ID NO: 25601 - protein, 11 aa, synthetic construct
  source 1..11: note = Description of Artificial Sequence: Synthetic peptide; note = XENP021266 vlCDR1
QASQDIGNYLN

SEQ ID NO: 25602 - protein, 7 aa, synthetic construct
  source 1..7: note = Description of Artificial Sequence: Synthetic peptide; note = XENP021266 vlCDR2
YTSRLHS

SEQ ID NO: 25603 - protein, 9 aa, synthetic construct
  source 1..9: note = Description of Artificial Sequence: Synthetic peptide; note = XENP021266 vlCDR3
QQGNTLPYT

SEQ ID NO: 25604 - protein, 223 aa, synthetic construct
  source 1..223: note = Description of Artificial Sequence: Synthetic polypeptide; note = XENP021267 2A11_H1.40_L2_Fab Heavy Chain
EVQLVQSGAEVKKPGATVKISCKASGFNIKDYWMHWVQQAPGKGLEWMGWIDPENGDTEYAPKFQGRVTITADTSTNTAYMELSSLRSEDTAVYYCYARGVRQALDYWGQGTLVTVSSASTKGPSVFPLAPSSKSTSGGTAALGCLVKDYFPEPVTVSWNSGALTSGVHTFPAVLQSSGLYSLSSVVTVPSSSLGTQTYICNVNHKPSNTKVDKKVEPKSCGS

SEQ ID NO: 25605 - protein, 118 aa, synthetic construct
  source 1..118: note = Description of Artificial Sequence: Synthetic polypeptide; note = VH of XENP021267
EVQLVQSGAEVKKPGATVKISCKASGFNIKDYWMHWVQQAPGKGLEWMGWIDPENGDTEYAPKFQGRVTITADTSTNTAYMELSSLRSEDTAVYYCYARGVRQALDYWGQGTLVTVSS

SEQ ID NO: 25606 - protein, 5 aa, synthetic construct
  source 1..5: note = Description of Artificial Sequence: Synthetic peptide; note = XENP021267 vhCDR1
DYWMH

SEQ ID NO: 25607 - protein, 17 aa, synthetic construct
  source 1..17: note = Description of Artificial Sequence: Synthetic peptide; note = XENP021267 vhCDR2
WIDPENGDTEYAPKFQG

SEQ ID NO: 25608 - protein, 9 aa, synthetic construct
  source 1..9: note = Description of Artificial Sequence: Synthetic peptide; note = XENP021267 vhCDR3
RGVRQALDY

SEQ ID NO: 25609 - protein, 214 aa, synthetic construct; identical to SEQ ID NO: 17250
  source 1..214: note = Description of Artificial Sequence: Synthetic polypeptide; note = XENP021267 2A11_H1.40_L2_Fab Light Chain

SEQ ID NO: 25610 - protein, 107 aa, synthetic construct; identical to SEQ ID NO: 17251
  source 1..107: note = Description of Artificial Sequence: Synthetic polypeptide; note = VL of XENP021267

SEQ ID NO: 25611 - protein, 11 aa, synthetic construct
  source 1..11: note = Description of Artificial Sequence: Synthetic peptide; note = XENP021267 vlCDR1
QASQDIGNYLN

SEQ ID NO: 25612 - protein, 7 aa, synthetic construct
  source 1..7: note = Description of Artificial Sequence: Synthetic peptide; note = XENP021267 vlCDR2
YTSRLHS

SEQ ID NO: 25613 - protein, 9 aa, synthetic construct
  source 1..9: note = Description of Artificial Sequence: Synthetic peptide; note = XENP021267 vlCDR3
QQGNTLPYT

SEQ ID NO: 25614 - protein, 223 aa, synthetic construct
  source 1..223: note = Description of Artificial Sequence: Synthetic polypeptide; note = XENP021268 2A11_H1.41_L2_Fab Heavy Chain
EVQLVQSGAEVKKPGATVKISCKASGFNIKDYVMHWVQQAPGKGLEWMGWIDPENGDTEYAPKFQGRVTITADTSTNTAYMELSSLRSEDTAVYYCYARGVRQALDYWGQGTLVTVSSASTKGPSVFPLAPSSKSTSGGTAALGCLVKDYFPEPVTVSWNSGALTSGVHTFPAVLQSSGLYSLSSVVTVPSSSLGTQTYICNVNHKPSNTKVDKKVEPKSCGS

SEQ ID NO: 25615 - protein, 118 aa, synthetic construct
  source 1..118: note = Description of Artificial Sequence: Synthetic polypeptide; note = VH of XENP021268
EVQLVQSGAEVKKPGATVKISCKASGFNIKDYVMHWVQQAPGKGLEWMGWIDPENGDTEYAPKFQGRVTITADTSTNTAYMELSSLRSEDTAVYYCYARGVRQALDYWGQGTLVTVSS

SEQ ID NO: 25616 - protein, 5 aa, synthetic construct
  source 1..5: note = Description of Artificial Sequence: Synthetic peptide; note = XENP021268 vhCDR1
DYVMH

SEQ ID NO: 25617 - protein, 17 aa, synthetic construct
  source 1..17: note = Description of Artificial Sequence: Synthetic peptide; note = XENP021268 vhCDR2
WIDPENGDTEYAPKFQG

SEQ ID NO: 25618 - protein, 9 aa, synthetic construct
  source 1..9: note = Description of Artificial Sequence: Synthetic peptide; note = XENP021268 vhCDR3
RGVRQALDY

SEQ ID NO: 25619 - protein, 214 aa, synthetic construct; identical to SEQ ID NO: 17250
  source 1..214: note = Description of Artificial Sequence: Synthetic polypeptide; note = XENP021268 2A11_H1.41_L2_Fab Light Chain

SEQ ID NO: 25620 - protein, 107 aa, synthetic construct; identical to SEQ ID NO: 17251
  source 1..107: note = Description of Artificial Sequence: Synthetic polypeptide; note = VL of XENP021268

SEQ ID NO: 25621 - protein, 11 aa, synthetic construct
  source 1..11: note = Description of Artificial Sequence: Synthetic peptide; note = XENP021268 vlCDR1
QASQDIGNYLN

SEQ ID NO: 25622 - protein, 7 aa, synthetic construct
  source 1..7: note = Description of Artificial Sequence: Synthetic peptide; note = XENP021268 vlCDR2
YTSRLHS

SEQ ID NO: 25623 - protein, 9 aa, synthetic construct
  source 1..9: note = Description of Artificial Sequence: Synthetic peptide; note = XENP021268 vlCDR3
QQGNTLPYT

SEQ ID NO: 25624 - protein, 223 aa, synthetic construct
  source 1..223: note = Description of Artificial Sequence: Synthetic polypeptide; note = XENP021269 2A11_H1.42_L2_Fab Heavy Chain
EVQLVQSGAEVKKPGATVKISCKASGFNIKDYTMHWVQQAPGKGLEWMGWIDPENGDTEYAPKFQGRVTITADTSTNTAYMELSSLRSEDTAVYYCYARGVRQALDYWGQGTLVTVSSASTKGPSVFPLAPSSKSTSGGTAALGCLVKDYFPEPVTVSWNSGALTSGVHTFPAVLQSSGLYSLSSVVTVPSSSLGTQTYICNVNHKPSNTKVDKKVEPKSCGS

SEQ ID NO: 25625 - protein, 118 aa, synthetic construct
  source 1..118: note = Description of Artificial Sequence: Synthetic polypeptide; note = VH of XENP021269
EVQLVQSGAEVKKPGATVKISCKASGFNIKDYTMHWVQQAPGKGLEWMGWIDPENGDTEYAPKFQGRVTITADTSTNTAYMELSSLRSEDTAVYYCYARGVRQALDYWGQGTLVTVSS

SEQ ID NO: 25626 - protein, 5 aa, synthetic construct
  source 1..5: note = Description of Artificial Sequence: Synthetic peptide; note = XENP021269 vhCDR1
DYTMH

SEQ ID NO: 25627 - protein, 17 aa, synthetic construct
  source 1..17: note = Description of Artificial Sequence: Synthetic peptide; note = XENP021269 vhCDR2
WIDPENGDTEYAPKFQG

SEQ ID NO: 25628 - protein, 9 aa, synthetic construct
  source 1..9: note = Description of Artificial Sequence: Synthetic peptide; note = XENP021269 vhCDR3
RGVRQALDY

SEQ ID NO: 25629 - protein, 214 aa, synthetic construct; identical to SEQ ID NO: 17250
  source 1..214: note = Description of Artificial Sequence: Synthetic polypeptide; note = XENP021269 2A11_H1.42_L2_Fab Light Chain

SEQ ID NO: 25630 - protein, 107 aa, synthetic construct; identical to SEQ ID NO: 17251
  source 1..107: note = Description of Artificial Sequence: Synthetic polypeptide; note = VL of XENP021269

SEQ ID NO: 25631 - protein, 11 aa, synthetic construct
  source 1..11: note = Description of Artificial Sequence: Synthetic peptide; note = XENP021269 vlCDR1
QASQDIGNYLN

SEQ ID NO: 25632 - protein, 7 aa, synthetic construct
  source 1..7: note = Description of Artificial Sequence: Synthetic peptide; note = XENP021269 vlCDR2
YTSRLHS

SEQ ID NO: 25633 - protein, 9 aa, synthetic construct
  source 1..9: note = Description of Artificial Sequence: Synthetic peptide; note = XENP021269 vlCDR3
QQGNTLPYT

SEQ ID NO: 25634 - protein, 223 aa, synthetic construct
  source 1..223: note = Description of Artificial Sequence: Synthetic polypeptide; note = XENP021270 2A11_H1.43_L2_Fab Heavy Chain
EVQLVQSGAEVKKPGATVKISCKASGFNIKDYQMHWVQQAPGKGLEWMGWIDPENGDTEYAPKFQGRVTITADTSTNTAYMELSSLRSEDTAVYYCYARGVRQALDYWGQGTLVTVSSASTKGPSVFPLAPSSKSTSGGTAALGCLVKDYFPEPVTVSWNSGALTSGVHTFPAVLQSSGLYSLSSVVTVPSSSLGTQTYICNVNHKPSNTKVDKKVEPKSCGS

SEQ ID NO: 25635 - protein, 118 aa, synthetic construct
  source 1..118: note = Description of Artificial Sequence: Synthetic polypeptide; note = VH of XENP021270
EVQLVQSGAEVKKPGATVKISCKASGFNIKDYQMHWVQQAPGKGLEWMGWIDPENGDTEYAPKFQGRVTITADTSTNTAYMELSSLRSEDTAVYYCYARGVRQALDYWGQGTLVTVSS

SEQ ID NO: 25636 - protein, 5 aa, synthetic construct
  source 1..5: note = Description of Artificial Sequence: Synthetic peptide; note = XENP021270 vhCDR1
DYQMH

SEQ ID NO: 25637 - protein, 17 aa, synthetic construct
  source 1..17: note = Description of Artificial Sequence: Synthetic peptide; note = XENP021270 vhCDR2
WIDPENGDTEYAPKFQG

SEQ ID NO: 25638 - protein, 9 aa, synthetic construct
  source 1..9: note = Description of Artificial Sequence: Synthetic peptide; note = XENP021270 vhCDR3
RGVRQALDY

SEQ ID NO: 25639 - protein, 214 aa, synthetic construct; identical to SEQ ID NO: 17250
  source 1..214: note = Description of Artificial Sequence: Synthetic polypeptide; note = XENP021270 2A11_H1.43_L2_Fab Light Chain

SEQ ID NO: 25640 - protein, 107 aa, synthetic construct; identical to SEQ ID NO: 17251
  source 1..107: note = Description of Artificial Sequence: Synthetic polypeptide; note = VL of XENP021270

SEQ ID NO: 25641 - protein, 11 aa, synthetic construct
  source 1..11: note = Description of Artificial Sequence: Synthetic peptide; note = XENP021270 vlCDR1
QASQDIGNYLN

SEQ ID NO: 25642 - protein, 7 aa, synthetic construct
  source 1..7: note = Description of Artificial Sequence: Synthetic peptide; note = XENP021270 vlCDR2
YTSRLHS

SEQ ID NO: 25643 - protein, 9 aa, synthetic construct
  source 1..9: note = Description of Artificial Sequence: Synthetic peptide; note = XENP021270 vlCDR3
QQGNTLPYT

SEQ ID NO: 25644 - protein, 223 aa, synthetic construct
  source 1..223: note = Description of Artificial Sequence: Synthetic polypeptide; note = XENP021271 2A11_H1.44_L2_Fab Heavy Chain
EVQLVQSGAEVKKPGATVKISCKASGFNIKDYRMHWVQQAPGKGLEWMGWIDPENGDTEYAPKFQGRVTITADTSTNTAYMELSSLRSEDTAVYYCYARGVRQALDYWGQGTLVTVSSASTKGPSVFPLAPSSKSTSGGTAALGCLVKDYFPEPVTVSWNSGALTSGVHTFPAVLQSSGLYSLSSVVTVPSSSLGTQTYICNVNHKPSNTKVDKKVEPKSCGS

SEQ ID NO: 25645 - protein, 118 aa, synthetic construct
  source 1..118: note = Description of Artificial Sequence: Synthetic polypeptide; note = VH of XENP021271
EVQLVQSGAEVKKPGATVKISCKASGFNIKDYRMHWVQQAPGKGLEWMGWIDPENGDTEYAPKFQGRVTITADTSTNTAYMELSSLRSEDTAVYYCYARGVRQALDYWGQGTLVTVSS

SEQ ID NO: 25646 - protein, 5 aa, synthetic construct
  source 1..5: note = Description of Artificial Sequence: Synthetic peptide; note = XENP021271 vhCDR1
DYRMH

SEQ ID NO: 25647 - protein, 17 aa, synthetic construct
  source 1..17: note = Description of Artificial Sequence: Synthetic peptide; note = XENP021271 vhCDR2
WIDPENGDTEYAPKFQG

SEQ ID NO: 25648 - protein, 9 aa, synthetic construct
  source 1..9: note = Description of Artificial Sequence: Synthetic peptide; note = XENP021271 vhCDR3
RGVRQALDY

SEQ ID NO: 25649 - protein, 214 aa, synthetic construct; identical to SEQ ID NO: 17250
  source 1..214: note = Description of Artificial Sequence: Synthetic polypeptide; note = XENP021271 2A11_H1.44_L2_Fab Light Chain

SEQ ID NO: 25650 - protein, 107 aa, synthetic construct; identical to SEQ ID NO: 17251
  source 1..107: note = Description of Artificial Sequence: Synthetic polypeptide; note = VL of XENP021271

SEQ ID NO: 25651 - protein, 11 aa, synthetic construct
  source 1..11: note = Description of Artificial Sequence: Synthetic peptide; note = XENP021271 vlCDR1
QASQDIGNYLN

SEQ ID NO: 25652 - protein, 7 aa, synthetic construct
  source 1..7: note = Description of Artificial Sequence: Synthetic peptide; note = XENP021271 vlCDR2
YTSRLHS

SEQ ID NO: 25653 - protein, 9 aa, synthetic construct
  source 1..9: note = Description of Artificial Sequence: Synthetic peptide; note = XENP021271 vlCDR3
QQGNTLPYT

SEQ ID NO: 25654 - protein, 223 aa, synthetic construct
  source 1..223: note = Description of Artificial Sequence: Synthetic polypeptide; note = XENP021272 2A11_H1.45_L2_Fab Heavy Chain
EVQLVQSGAEVKKPGATVKISCKASGFNIKDYKMHWVQQAPGKGLEWMGWIDPENGDTEYAPKFQGRVTITADTSTNTAYMELSSLRSEDTAVYYCYARGVRQALDYWGQGTLVTVSSASTKGPSVFPLAPSSKSTSGGTAALGCLVKDYFPEPVTVSWNSGALTSGVHTFPAVLQSSGLYSLSSVVTVPSSSLGTQTYICNVNHKPSNTKVDKKVEPKSCGS

SEQ ID NO: 25655 - protein, 118 aa, synthetic construct
  source 1..118: note = Description of Artificial Sequence: Synthetic polypeptide; note = VH of XENP021272
EVQLVQSGAEVKKPGATVKISCKASGFNIKDYKMHWVQQAPGKGLEWMGWIDPENGDTEYAPKFQGRVTITADTSTNTAYMELSSLRSEDTAVYYCYARGVRQALDYWGQGTLVTVSS

SEQ ID NO: 25656 - protein, 5 aa, synthetic construct
  source 1..5: note = Description of Artificial Sequence: Synthetic peptide; note = XENP021272 vhCDR1
DYKMH

SEQ ID NO: 25657 - protein, 17 aa, synthetic construct
  source 1..17: note = Description of Artificial Sequence: Synthetic peptide; note = XENP021272 vhCDR2
WIDPENGDTEYAPKFQG

SEQ ID NO: 25658 - protein, 9 aa, synthetic construct
  source 1..9: note = Description of Artificial Sequence: Synthetic peptide; note = XENP021272 vhCDR3
RGVRQALDY

SEQ ID NO: 25659 - protein, 214 aa, synthetic construct; identical to SEQ ID NO: 17250
  source 1..214: note = Description of Artificial Sequence: Synthetic polypeptide; note = XENP021272 2A11_H1.45_L2_Fab Light Chain

SEQ ID NO: 25660 - protein, 107 aa, synthetic construct; identical to SEQ ID NO: 17251
  source 1..107: note = Description of Artificial Sequence: Synthetic polypeptide; note = VL of XENP021272

SEQ ID NO: 25661 - protein, 11 aa, synthetic construct
  source 1..11: note = Description of Artificial Sequence: Synthetic peptide; note = XENP021272 vlCDR1
QASQDIGNYLN

SEQ ID NO: 25662 - protein, 7 aa, synthetic construct
  source 1..7: note = Description of Artificial Sequence: Synthetic peptide; note = XENP021272 vlCDR2
YTSRLHS

SEQ ID NO: 25663 - protein, 9 aa, synthetic construct
  source 1..9: note = Description of Artificial Sequence: Synthetic peptide; note = XENP021272 vlCDR3
QQGNTLPYT

SEQ ID NO: 25664 - protein, 223 aa, synthetic construct
  source 1..223: note = Description of Artificial Sequence: Synthetic polypeptide; note = XENP021273 2A11_H1.46_L2_Fab Heavy Chain
EVQLVQSGAEVKKPGATVKISCKASGFNIKDYYMNWVQQAPGKGLEWMGWIDPENGDTEYAPKFQGRVTITADTSTNTAYMELSSLRSEDTAVYYCYARGVRQALDYWGQGTLVTVSSASTKGPSVFPLAPSSKSTSGGTAALGCLVKDYFPEPVTVSWNSGALTSGVHTFPAVLQSSGLYSLSSVVTVPSSSLGTQTYICNVNHKPSNTKVDKKVEPKSCGS

SEQ ID NO: 25665 - protein, 118 aa, synthetic construct
  source 1..118: note = Description of Artificial Sequence: Synthetic polypeptide; note = VH of XENP021273
EVQLVQSGAEVKKPGATVKISCKASGFNIKDYYMNWVQQAPGKGLEWMGWIDPENGDTEYAPKFQGRVTITADTSTNTAYMELSSLRSEDTAVYYCYARGVRQALDYWGQGTLVTVSS

SEQ ID NO: 25666 - protein, 5 aa, synthetic construct
  source 1..5: note = Description of Artificial Sequence: Synthetic peptide; note = XENP021273 vhCDR1
DYYMN

SEQ ID NO: 25667 - protein, 17 aa, synthetic construct
  source 1..17: note = Description of Artificial Sequence: Synthetic peptide; note = XENP021273 vhCDR2
WIDPENGDTEYAPKFQG

SEQ ID NO: 25668 - protein, 9 aa, synthetic construct
  source 1..9: note = Description of Artificial Sequence: Synthetic peptide; note = XENP021273 vhCDR3
RGVRQALDY

SEQ ID NO: 25669 - protein, 214 aa, synthetic construct; identical to SEQ ID NO: 17250
  source 1..214: note = Description of Artificial Sequence: Synthetic polypeptide; note = XENP021273 2A11_H1.46_L2_Fab Light Chain

SEQ ID NO: 25670 - protein, 107 aa, synthetic construct; identical to SEQ ID NO: 17251
  source 1..107: note = Description of Artificial Sequence: Synthetic polypeptide; note = VL of XENP021273

SEQ ID NO: 25671 - protein, 11 aa, synthetic construct
  source 1..11: note = Description of Artificial Sequence: Synthetic peptide; note = XENP021273 vlCDR1
QASQDIGNYLN

SEQ ID NO: 25672 - protein, 7 aa, synthetic construct
  source 1..7: note = Description of Artificial Sequence: Synthetic peptide; note = XENP021273 vlCDR2
YTSRLHS

SEQ ID NO: 25673 - protein, 9 aa, synthetic construct
  source 1..9: note = Description of Artificial Sequence: Synthetic peptide; note = XENP021273 vlCDR3
QQGNTLPYT

SEQ ID NO: 25674 - protein, 223 aa, synthetic construct
  source 1..223: note = Description of Artificial Sequence: Synthetic polypeptide; note = XENP021274 2A11_H1.47_L2_Fab Heavy Chain
EVQLVQSGAEVKKPGATVKISCKASGFNIKDYYMSWVQQAPGKGLEWMGWIDPENGDTEYAPKFQGRVTITADTSTNTAYMELSSLRSEDTAVYYCYARGVRQALDYWGQGTLVTVSSASTKGPSVFPLAPSSKSTSGGTAALGCLVKDYFPEPVTVSWNSGALTSGVHTFPAVLQSSGLYSLSSVVTVPSSSLGTQTYICNVNHKPSNTKVDKKVEPKSCGS

SEQ ID NO: 25675 - protein, 118 aa, synthetic construct
  source 1..118: note = Description of Artificial Sequence: Synthetic polypeptide; note = VH of XENP021274
EVQLVQSGAEVKKPGATVKISCKASGFNIKDYYMSWVQQAPGKGLEWMGWIDPENGDTEYAPKFQGRVTITADTSTNTAYMELSSLRSEDTAVYYCYARGVRQALDYWGQGTLVTVSS

SEQ ID NO: 25676 - protein, 5 aa, synthetic construct
  source 1..5: note = Description of Artificial Sequence: Synthetic peptide; note = XENP021274 vhCDR1
DYYMS

SEQ ID NO: 25677 - protein, 17 aa, synthetic construct
  source 1..17: note = Description of Artificial Sequence: Synthetic peptide; note = XENP021274 vhCDR2
WIDPENGDTEYAPKFQG

SEQ ID NO: 25678 - protein, 9 aa, synthetic construct
  source 1..9: note = Description of Artificial Sequence: Synthetic peptide; note = XENP021274 vhCDR3
RGVRQALDY

SEQ ID NO: 25679 - protein, 214 aa, synthetic construct; identical to SEQ ID NO: 17250
  source 1..214: note = Description of Artificial Sequence: Synthetic polypeptide; note = XENP021274 2A11_H1.47_L2_Fab Light Chain

SEQ ID NO: 25680 - protein, 107 aa, synthetic construct; identical to SEQ ID NO: 17251
  source 1..107: note = Description of Artificial Sequence: Synthetic polypeptide; note = VL of XENP021274

SEQ ID NO: 25681 - protein, 11 aa, synthetic construct
  source 1..11: note = Description of Artificial Sequence: Synthetic peptide; note = XENP021274 vlCDR1
QASQDIGNYLN

SEQ ID NO: 25682 - protein, 7 aa, synthetic construct
  source 1..7: note = Description of Artificial Sequence: Synthetic peptide; note = XENP021274 vlCDR2
YTSRLHS

SEQ ID NO: 25683 - protein, 9 aa, synthetic construct
  source 1..9: note = Description of Artificial Sequence: Synthetic peptide; note = XENP021274 vlCDR3
QQGNTLPYT

SEQ ID NO: 25684 - protein, 223 aa, synthetic construct
  source 1..223: note = Description of Artificial Sequence: Synthetic polypeptide; note = XENP021275 2A11_H1.48_L2_Fab Heavy Chain
EVQLVQSGAEVKKPGATVKISCKASGFNIKDYYMEWVQQAPGKGLEWMGWIDPENGDTEYAPKFQGRVTITADTSTNTAYMELSSLRSEDTAVYYCYARGVRQALDYWGQGTLVTVSSASTKGPSVFPLAPSSKSTSGGTAALGCLVKDYFPEPVTVSWNSGALTSGVHTFPAVLQSSGLYSLSSVVTVPSSSLGTQTYICNVNHKPSNTKVDKKVEPKSCGS

SEQ ID NO: 25685 - protein, 118 aa, synthetic construct
  source 1..118: note = Description of Artificial Sequence: Synthetic polypeptide; note = VH of XENP021275
EVQLVQSGAEVKKPGATVKISCKASGFNIKDYYMEWVQQAPGKGLEWMGWIDPENGDTEYAPKFQGRVTITADTSTNTAYMELSSLRSEDTAVYYCYARGVRQALDYWGQGTLVTVSS

SEQ ID NO: 25686 - protein, 5 aa, synthetic construct
  source 1..5: note = Description of Artificial Sequence: Synthetic peptide; note = XENP021275 vhCDR1
DYYME

SEQ ID NO: 25687 - protein, 17 aa, synthetic construct
  source 1..17: note = Description of Artificial Sequence: Synthetic peptide; note = XENP021275 vhCDR2
WIDPENGDTEYAPKFQG

SEQ ID NO: 25688 - protein, 9 aa, synthetic construct
  source 1..9: note = Description of Artificial Sequence: Synthetic peptide; note = XENP021275 vhCDR3
RGVRQALDY

SEQ ID NO: 25689 - protein, 214 aa, synthetic construct; identical to SEQ ID NO: 17250
  source 1..214: note = Description of Artificial Sequence: Synthetic polypeptide; note = XENP021275 2A11_H1.48_L2_Fab Light Chain

SEQ ID NO: 25690 - protein, 107 aa, synthetic construct; identical to SEQ ID NO: 17251
  source 1..107: note = Description of Artificial Sequence: Synthetic polypeptide; note = VL of XENP021275

SEQ ID NO: 25691 - protein, 11 aa, synthetic construct
  source 1..11: note = Description of Artificial Sequence: Synthetic peptide; note = XENP021275 vlCDR1
QASQDIGNYLN

SEQ ID NO: 25692 - protein, 7 aa, synthetic construct
  source 1..7: note = Description of Artificial Sequence: Synthetic peptide; note = XENP021275 vlCDR2
YTSRLHS

SEQ ID NO: 25693 - protein, 9 aa, synthetic construct
  source 1..9: note = Description of Artificial Sequence: Synthetic peptide; note = XENP021275 vlCDR3
QQGNTLPYT

SEQ ID NO: 25694 - protein, 223 aa, synthetic construct
  source 1..223: note = Description of Artificial Sequence: Synthetic polypeptide; note = XENP021276 2A11_H1.49_L2_Fab Heavy Chain
EVQLVQSGAEVKKPGATVKISCKASGFNIKDYYMHWVQQAPGKGLEWMGWINPENGDTEYAPKFQGRVTITADTSTNTAYMELSSLRSEDTAVYYCYARGVRQALDYWGQGTLVTVSSASTKGPSVFPLAPSSKSTSGGTAALGCLVKDYFPEPVTVSWNSGALTSGVHTFPAVLQSSGLYSLSSVVTVPSSSLGTQTYICNVNHKPSNTKVDKKVEPKSCGS

SEQ ID NO: 25695 - protein, 118 aa, synthetic construct
  source 1..118: note = Description of Artificial Sequence: Synthetic polypeptide; note = VH of XENP021276
EVQLVQSGAEVKKPGATVKISCKASGFNIKDYYMHWVQQAPGKGLEWMGWINPENGDTEYAPKFQGRVTITADTSTNTAYMELSSLRSEDTAVYYCYARGVRQALDYWGQGTLVTVSS

SEQ ID NO: 25696 - protein, 5 aa, synthetic construct
  source 1..5: note = Description of Artificial Sequence: Synthetic peptide; note = XENP021276 vhCDR1
DYYMH

SEQ ID NO: 25697 - protein, 17 aa, synthetic construct
  source 1..17: note = Description of Artificial Sequence: Synthetic peptide; note = XENP021276 vhCDR2
WINPENGDTEYAPKFQG

SEQ ID NO: 25698 - protein, 9 aa, synthetic construct
  source 1..9: note = Description of Artificial Sequence: Synthetic peptide; note = XENP021276 vhCDR3
RGVRQALDY

SEQ ID NO: 25699 - protein, 214 aa, synthetic construct; identical to SEQ ID NO: 17250
  source 1..214: note = Description of Artificial Sequence: Synthetic polypeptide; note = XENP021276 2A11_H1.49_L2_Fab Light Chain

SEQ ID NO: 25700 - protein, 107 aa, synthetic construct; identical to SEQ ID NO: 17251
  source 1..107: note = Description of Artificial Sequence: Synthetic polypeptide; note = VL of XENP021276

SEQ ID NO: 25701 - protein, 11 aa, synthetic construct
  source 1..11: note = Description of Artificial Sequence: Synthetic peptide; note = XENP021276 vlCDR1
QASQDIGNYLN

SEQ ID NO: 25702 - protein, 7 aa, synthetic construct
  source 1..7: note = Description of Artificial Sequence: Synthetic peptide; note = XENP021276 vlCDR2
YTSRLHS

SEQ ID NO: 25703 - protein, 9 aa, synthetic construct
  source 1..9: note = Description of Artificial Sequence: Synthetic peptide; note = XENP021276 vlCDR3
QQGNTLPYT

SEQ ID NO: 25704 - protein, 223 aa, synthetic construct
  source 1..223: note = Description of Artificial Sequence: Synthetic polypeptide; note = XENP021277 2A11_H1.50_L2_Fab Heavy Chain
EVQLVQSGAEVKKPGATVKISCKASGFNIKDYYMHWVQQAPGKGLEWMGWIEPENGDTEYAPKFQGRVTITADTSTNTAYMELSSLRSEDTAVYYCYARGVRQALDYWGQGTLVTVSSASTKGPSVFPLAPSSKSTSGGTAALGCLVKDYFPEPVTVSWNSGALTSGVHTFPAVLQSSGLYSLSSVVTVPSSSLGTQTYICNVNHKPSNTKVDKKVEPKSCGS

SEQ ID NO: 25705 - protein, 118 aa, synthetic construct
  source 1..118: note = Description of Artificial Sequence: Synthetic polypeptide; note = VH of XENP021277
EVQLVQSGAEVKKPGATVKISCKASGFNIKDYYMHWVQQAPGKGLEWMGWIEPENGDTEYAPKFQGRVTITADTSTNTAYMELSSLRSEDTAVYYCYARGVRQALDYWGQGTLVTVSS

SEQ ID NO: 25706 - protein, 5 aa, synthetic construct
  source 1..5: note = Description of Artificial Sequence: Synthetic peptide; note = XENP021277 vhCDR1
DYYMH

SEQ ID NO: 25707 - protein, 17 aa, synthetic construct
  source 1..17: note = Description of Artificial Sequence: Synthetic peptide; note = XENP021277 vhCDR2
WIEPENGDTEYAPKFQG

SEQ ID NO: 25708 - protein, 9 aa, synthetic construct
  source 1..9: note = Description of Artificial Sequence: Synthetic peptide; note = XENP021277 vhCDR3
RGVRQALDY

SEQ ID NO: 25709 - protein, 214 aa, synthetic construct; identical to SEQ ID NO: 17250
  source 1..214: note = Description of Artificial Sequence: Synthetic polypeptide; note = XENP021277 2A11_H1.50_L2_Fab Light Chain

SEQ ID NO: 25710 - protein, 107 aa, synthetic construct; identical to SEQ ID NO: 17251
  source 1..107: note = Description of Artificial Sequence: Synthetic polypeptide; note = VL of XENP021277

SEQ ID NO: 25711 - protein, 11 aa, synthetic construct
  source 1..11: note = Description of Artificial Sequence: Synthetic peptide; note = XENP021277 vlCDR1
QASQDIGNYLN

SEQ ID NO: 25712 - protein, 7 aa, synthetic construct
  source 1..7: note = Description of Artificial Sequence: Synthetic peptide; note = XENP021277 vlCDR2
YTSRLHS

SEQ ID NO: 25713 - protein, 9 aa, synthetic construct
  source 1..9: note = Description of Artificial Sequence: Synthetic peptide; note = XENP021277 vlCDR3
QQGNTLPYT

SEQ ID NO: 25714 - protein, 223 aa, synthetic construct
  source 1..223: note = Description of Artificial Sequence: Synthetic polypeptide; note = XENP021278 2A11_H1.51_L2_Fab Heavy Chain
EVQLVQSGAEVKKPGATVKISCKASGFNIKDYYMHWVQQAPGKGLEWMGWIHPENGDTEYAPKFQGRVTITADTSTNTAYMELSSLRSEDTAVYYCYARGVRQALDYWGQGTLVTVSSASTKGPSVFPLAPSSKSTSGGTAALGCLVKDYFPEPVTVSWNSGALTSGVHTFPAVLQSSGLYSLSSVVTVPSSSLGTQTYICNVNHKPSNTKVDKKVEPKSCGS

SEQ ID NO: 25715 - protein, 118 aa, synthetic construct
  source 1..118: note = Description of Artificial Sequence: Synthetic polypeptide; note = VH of XENP021278
EVQLVQSGAEVKKPGATVKISCKASGFNIKDYYMHWVQQAPGKGLEWMGWIHPENGDTEYAPKFQGRVTITADTSTNTAYMELSSLRSEDTAVYYCYARGVRQALDYWGQGTLVTVSS

SEQ ID NO: 25716 - protein, 5 aa, synthetic construct
  source 1..5: note = Description of Artificial Sequence: Synthetic peptide; note = XENP021278 vhCDR1
DYYMH

SEQ ID NO: 25717 - protein, 17 aa, synthetic construct
  source 1..17: note = Description of Artificial Sequence: Synthetic peptide; note = XENP021278 vhCDR2
WIHPENGDTEYAPKFQG

SEQ ID NO: 25718 - protein, 9 aa, synthetic construct
  source 1..9: note = Description of Artificial Sequence: Synthetic peptide; note = XENP021278 vhCDR3
RGVRQALDY

SEQ ID NO: 25719 - protein, 214 aa, synthetic construct; identical to SEQ ID NO: 17250
  source 1..214: note = Description of Artificial Sequence: Synthetic polypeptide; note = XENP021278 2A11_H1.51_L2_Fab Light Chain

SEQ ID NO: 25720 - protein, 107 aa, synthetic construct; identical to SEQ ID NO: 17251
  source 1..107: note = Description of Artificial Sequence: Synthetic polypeptide; note = VL of XENP021278

SEQ ID NO: 25721 - protein, 11 aa, synthetic construct
  source 1..11: note = Description of Artificial Sequence: Synthetic peptide; note = XENP021278 vlCDR1
QASQDIGNYLN

SEQ ID NO: 25722 - protein, 7 aa, synthetic construct
  source 1..7: note = Description of Artificial Sequence: Synthetic peptide; note = XENP021278 vlCDR2
YTSRLHS

SEQ ID NO: 25723 - protein, 9 aa, synthetic construct
  source 1..9: note = Description of Artificial Sequence: Synthetic peptide; note = XENP021278 vlCDR3
QQGNTLPYT

SEQ ID NO: 25724 - protein, 223 aa, synthetic construct
  source 1..223: note = Description of Artificial Sequence: Synthetic polypeptide; note = XENP021279 2A11_H1.52_L2_Fab Heavy Chain
EVQLVQSGAEVKKPGATVKISCKASGFNIKDYYMHWVQQAPGKGLEWMGWISPENGDTEYAPKFQGRVTITADTSTNTAYMELSSLRSEDTAVYYCYARGVRQALDYWGQGTLVTVSSASTKGPSVFPLAPSSKSTSGGTAALGCLVKDYFPEPVTVSWNSGALTSGVHTFPAVLQSSGLYSLSSVVTVPSSSLGTQTYICNVNHKPSNTKVDKKVEPKSCGS

SEQ ID NO: 25725 - protein, 118 aa, synthetic construct
  source 1..118: note = Description of Artificial Sequence: Synthetic polypeptide; note = VH of XENP021279
EVQLVQSGAEVKKPGATVKISCKASGFNIKDYYMHWVQQAPGKGLEWMGWISPENGDTEYAPKFQGRVTITADTSTNTAYMELSSLRSEDTAVYYCYARGVRQALDYWGQGTLVTVSS

SEQ ID NO: 25726 - protein, 5 aa, synthetic construct
  source 1..5: note = Description of Artificial Sequence: Synthetic peptide; note = XENP021279 vhCDR1
DYYMH

SEQ ID NO: 25727 - protein, 17 aa, synthetic construct
  source 1..17: note = Description of Artificial Sequence: Synthetic peptide; note = XENP021279 vhCDR2
WISPENGDTEYAPKFQG

SEQ ID NO: 25728 - protein, 9 aa, synthetic construct
  source 1..9: note = Description of Artificial Sequence: Synthetic peptide; note = XENP021279 vhCDR3
RGVRQALDY

SEQ ID NO: 25729 - protein, 214 aa, synthetic construct; identical to SEQ ID NO: 17250
  source 1..214: note = Description of Artificial Sequence: Synthetic polypeptide; note = XENP021279 2A11_H1.52_L2_Fab Light Chain

SEQ ID NO: 25730 - protein, 107 aa, synthetic construct; identical to SEQ ID NO: 17251
  source 1..107: note = Description of Artificial Sequence: Synthetic polypeptide; note = VL of XENP021279

SEQ ID NO: 25731 - protein, 11 aa, synthetic construct
  source 1..11: note = Description of Artificial Sequence: Synthetic peptide; note = XENP021279 vlCDR1
QASQDIGNYLN

SEQ ID NO: 25732 - protein, 7 aa, synthetic construct
  source 1..7: note = Description of Artificial Sequence: Synthetic peptide; note = XENP021279 vlCDR2
YTSRLHS

SEQ ID NO: 25733 - protein, 9 aa, synthetic construct
  source 1..9: note = Description of Artificial Sequence: Synthetic peptide; note = XENP021279 vlCDR3
QQGNTLPYT

SEQ ID NO: 25734 - protein, 223 aa, synthetic construct
  source 1..223: note = Description of Artificial Sequence: Synthetic polypeptide; note = XENP021280 2A11_H1.53_L2_Fab Heavy Chain
EVQLVQSGAEVKKPGATVKISCKASGFNIKDYYMHWVQQAPGKGLEWMGWIQPENGDTEYAPKFQGRVTITADTSTNTAYMELSSLRSEDTAVYYCYARGVRQALDYWGQGTLVTVSSASTKGPSVFPLAPSSKSTSGGTAALGCLVKDYFPEPVTVSWNSGALTSGVHTFPAVLQSSGLYSLSSVVTVPSSSLGTQTYICNVNHKPSNTKVDKKVEPKSCGS

SEQ ID NO: 25735 - protein, 118 aa, synthetic construct
  source 1..118: note = Description of Artificial Sequence: Synthetic polypeptide; note = VH of XENP021280
EVQLVQSGAEVKKPGATVKISCKASGFNIKDYYMHWVQQAPGKGLEWMGWIQPENGDTEYAPKFQGRVTITADTSTNTAYMELSSLRSEDTAVYYCYARGVRQALDYWGQGTLVTVSS

SEQ ID NO: 25736 - protein, 5 aa, synthetic construct
  source 1..5: note = Description of Artificial Sequence: Synthetic peptide; note = XENP021280 vhCDR1
DYYMH

SEQ ID NO: 25737 - protein, 17 aa, synthetic construct
  source 1..17: note = Description of Artificial Sequence: Synthetic peptide; note = XENP021280 vhCDR2
WIQPENGDTEYAPKFQG

SEQ ID NO: 25738 - protein, 9 aa, synthetic construct
  source 1..9: note = Description of Artificial Sequence: Synthetic peptide; note = XENP021280 vhCDR3
RGVRQALDY

SEQ ID NO: 25739 - protein, 214 aa, synthetic construct; identical to SEQ ID NO: 17250
  source 1..214: note = Description of Artificial Sequence: Synthetic polypeptide; note = XENP021280 2A11_H1.53_L2_Fab Light Chain

SEQ ID NO: 25740 - protein, 107 aa, synthetic construct; identical to SEQ ID NO: 17251
  source 1..107: note = Description of Artificial Sequence: Synthetic polypeptide; note = VL of XENP021280

SEQ ID NO: 25741 - protein, 11 aa, synthetic construct
  source 1..11: note = Description of Artificial Sequence: Synthetic peptide; note = XENP021280 vlCDR1
QASQDIGNYLN

SEQ ID NO: 25742 - protein, 7 aa, synthetic construct
  source 1..7: note = Description of Artificial Sequence: Synthetic peptide; note = XENP021280 vlCDR2
YTSRLHS

SEQ ID NO: 25743 - protein, 9 aa, synthetic construct
  source 1..9: note = Description of Artificial Sequence: Synthetic peptide; note = XENP021280 vlCDR3
QQGNTLPYT

SEQ ID NO: 25744 - protein, 223 aa, synthetic construct
  source 1..223: note = Description of Artificial Sequence: Synthetic polypeptide; note = XENP021281 2A11_H1.54_L2_Fab Heavy Chain
EVQLVQSGAEVKKPGATVKISCKASGFNIKDYYMHWVQQAPGKGLEWMGWILPENGDTEYAPKFQGRVTITADTSTNTAYMELSSLRSEDTAVYYCYARGVRQALDYWGQGTLVTVSSASTKGPSVFPLAPSSKSTSGGTAALGCLVKDYFPEPVTVSWNSGALTSGVHTFPAVLQSSGLYSLSSVVTVPSSSLGTQTYICNVNHKPSNTKVDKKVEPKSCGS

SEQ ID NO: 25745 - protein, 118 aa, synthetic construct
  source 1..118: note = Description of Artificial Sequence: Synthetic polypeptide; note = VH of XENP021281
EVQLVQSGAEVKKPGATVKISCKASGFNIKDYYMHWVQQAPGKGLEWMGWILPENGDTEYAPKFQGRVTITADTSTNTAYMELSSLRSEDTAVYYCYARGVRQALDYWGQGTLVTVSS

SEQ ID NO: 25746 - protein, 5 aa, synthetic construct
  source 1..5: note = Description of Artificial Sequence: Synthetic peptide; note = XENP021281 vhCDR1
DYYMH

SEQ ID NO: 25747 - protein, 17 aa, synthetic construct
  source 1..17: note = Description of Artificial Sequence: Synthetic peptide; note = XENP021281 vhCDR2
WILPENGDTEYAPKFQG

SEQ ID NO: 25748 - protein, 9 aa, synthetic construct
  source 1..9: note = Description of Artificial Sequence: Synthetic peptide; note = XENP021281 vhCDR3
RGVRQALDY

SEQ ID NO: 25749 - protein, 214 aa, synthetic construct; identical to SEQ ID NO: 17250
  source 1..214: note = Description of Artificial Sequence: Synthetic polypeptide; note = XENP021281 2A11_H1.54_L2_Fab Light Chain

SEQ ID NO: 25750 - protein, 107 aa, synthetic construct; identical to SEQ ID NO: 17251
  source 1..107: note = Description of Artificial Sequence: Synthetic polypeptide; note = VL of XENP021281

SEQ ID NO: 25751 - protein, 11 aa, synthetic construct
  source 1..11: note = Description of Artificial Sequence: Synthetic peptide; note = XENP021281 vlCDR1
QASQDIGNYLN

SEQ ID NO: 25752 - protein, 7 aa, synthetic construct
  source 1..7: note = Description of Artificial Sequence: Synthetic peptide; note = XENP021281 vlCDR2
YTSRLHS

SEQ ID NO: 25753 - protein, 9 aa, synthetic construct
  source 1..9: note = Description of Artificial Sequence: Synthetic peptide; note = XENP021281 vlCDR3
QQGNTLPYT

SEQ ID NO: 25754 - protein, 223 aa, synthetic construct
  source 1..223: note = Description of Artificial Sequence: Synthetic polypeptide; note = XENP021282 2A11_H1.55_L2_Fab Heavy Chain
EVQLVQSGAEVKKPGATVKISCKASGFNIKDYYMHWVQQAPGKGLEWMGWITPENGDTEYAPKFQGRVTITADTSTNTAYMELSSLRSEDTAVYYCYARGVRQALDYWGQGTLVTVSSASTKGPSVFPLAPSSKSTSGGTAALGCLVKDYFPEPVTVSWNSGALTSGVHTFPAVLQSSGLYSLSSVVTVPSSSLGTQTYICNVNHKPSNTKVDKKVEPKSCGS

SEQ ID NO: 25755 - protein, 118 aa, synthetic construct
  source 1..118: note = Description of Artificial Sequence: Synthetic polypeptide; note = VH of XENP021282
EVQLVQSGAEVKKPGATVKISCKASGFNIKDYYMHWVQQAPGKGLEWMGWITPENGDTEYAPKFQGRVTITADTSTNTAYMELSSLRSEDTAVYYCYARGVRQALDYWGQGTLVTVSS

SEQ ID NO: 25756 - protein, 5 aa, synthetic construct
  source 1..5: note = Description of Artificial Sequence: Synthetic peptide; note = XENP021282 vhCDR1
DYYMH

SEQ ID NO: 25757 - protein, 17 aa, synthetic construct
  source 1..17: note = Description of Artificial Sequence: Synthetic peptide; note = XENP021282 vhCDR2
WITPENGDTEYAPKFQG

SEQ ID NO: 25758 - protein, 9 aa, synthetic construct
  source 1..9: note = Description of Artificial Sequence: Synthetic peptide; note = XENP021282 vhCDR3
RGVRQALDY

SEQ ID NO: 25759 - protein, 214 aa, synthetic construct; identical to SEQ ID NO: 17250
  source 1..214: note = Description of Artificial Sequence: Synthetic polypeptide; note = XENP021282 2A11_H1.55_L2_Fab Light Chain

SEQ ID NO: 25760 - protein, 107 aa, synthetic construct; identical to SEQ ID NO: 17251
  source 1..107: note = Description of Artificial Sequence: Synthetic polypeptide; note = VL of XENP021282

SEQ ID NO: 25761 - protein, 11 aa, synthetic construct
  source 1..11: note = Description of Artificial Sequence: Synthetic peptide; note = XENP021282 vlCDR1
QASQDIGNYLN

SEQ ID NO: 25762 - protein, 7 aa, synthetic construct
  source 1..7: note = Description of Artificial Sequence: Synthetic peptide; note = XENP021282 vlCDR2
YTSRLHS

SEQ ID NO: 25763 - protein, 9 aa, synthetic construct
  source 1..9: note = Description of Artificial Sequence: Synthetic peptide; note = XENP021282 vlCDR3
QQGNTLPYT

SEQ ID NO: 25764 - protein, 223 aa, synthetic construct
  source 1..223: note = Description of Artificial Sequence: Synthetic polypeptide; note = XENP021283 2A11_H1.56_L2_Fab Heavy Chain
EVQLVQSGAEVKKPGATVKISCKASGFNIKDYYMHWVQQAPGKGLEWMGWIRPENGDTEYAPKFQGRVTITADTSTNTAYMELSSLRSEDTAVYYCYARGVRQALDYWGQGTLVTVSSASTKGPSVFPLAPSSKSTSGGTAALGCLVKDYFPEPVTVSWNSGALTSGVHTFPAVLQSSGLYSLSSVVTVPSSSLGTQTYICNVNHKPSNTKVDKKVEPKSCGS

SEQ ID NO: 25765 - protein, 118 aa, synthetic construct
  source 1..118: note = Description of Artificial Sequence: Synthetic polypeptide; note = VH of XENP021283
EVQLVQSGAEVKKPGATVKISCKASGFNIKDYYMHWVQQAPGKGLEWMGWIRPENGDTEYAPKFQGRVTITADTSTNTAYMELSSLRSEDTAVYYCYARGVRQALDYWGQGTLVTVSS

SEQ ID NO: 25766 - protein, 5 aa, synthetic construct
  source 1..5: note = Description of Artificial Sequence: Synthetic peptide; note = XENP021283 vhCDR1
DYYMH

SEQ ID NO: 25767 - protein, 17 aa, synthetic construct
  source 1..17: note = Description of Artificial Sequence: Synthetic peptide; note = XENP021283 vhCDR2
WIRPENGDTEYAPKFQG

SEQ ID NO: 25768 - protein, 9 aa, synthetic construct
  source 1..9: note = Description of Artificial Sequence: Synthetic peptide; note = XENP021283 vhCDR3
RGVRQALDY

SEQ ID NO: 25769 - protein, 214 aa, synthetic construct; identical to SEQ ID NO: 17250
  source 1..214: note = Description of Artificial Sequence: Synthetic polypeptide; note = XENP021283 2A11_H1.56_L2_Fab Light Chain

SEQ ID NO: 25770 - protein, 107 aa, synthetic construct; identical to SEQ ID NO: 17251
  source 1..107: note = Description of Artificial Sequence: Synthetic polypeptide; note = VL of XENP021283

SEQ ID NO: 25771 - protein, 11 aa, synthetic construct
  source 1..11: note = Description of Artificial Sequence: Synthetic peptide; note = XENP021283 vlCDR1
QASQDIGNYLN

SEQ ID NO: 25772 - protein, 7 aa, synthetic construct
  source 1..7: note = Description of Artificial Sequence: Synthetic peptide; note = XENP021283 vlCDR2
YTSRLHS

SEQ ID NO: 25773 - protein, 9 aa, synthetic construct
  source 1..9: note = Description of Artificial Sequence: Synthetic peptide; note = XENP021283 vlCDR3
QQGNTLPYT

SEQ ID NO: 25774 - protein, 223 aa, synthetic construct
  source 1..223: note = Description of Artificial Sequence: Synthetic polypeptide; note = XENP021284 2A11_H1.57_L2_Fab Heavy Chain
EVQLVQSGAEVKKPGATVKISCKASGFNIKDYYMHWVQQAPGKGLEWMGWIDPQNGDTEYAPKFQGRVTITADTSTNTAYMELSSLRSEDTAVYYCYARGVRQALDYWGQGTLVTVSSASTKGPSVFPLAPSSKSTSGGTAALGCLVKDYFPEPVTVSWNSGALTSGVHTFPAVLQSSGLYSLSSVVTVPSSSLGTQTYICNVNHKPSNTKVDKKVEPKSCGS

SEQ ID NO: 25775 - protein, 118 aa, synthetic construct
  source 1..118: note = Description of Artificial Sequence: Synthetic polypeptide; note = VH of XENP021284
EVQLVQSGAEVKKPGATVKISCKASGFNIKDYYMHWVQQAPGKGLEWMGWIDPQNGDTEYAPKFQGRVTITADTSTNTAYMELSSLRSEDTAVYYCYARGVRQALDYWGQGTLVTVSS

SEQ ID NO: 25776 - protein, 5 aa, synthetic construct
  source 1..5: note = Description of Artificial Sequence: Synthetic peptide; note = XENP021284 vhCDR1
DYYMH

SEQ ID NO: 25777 - protein, 17 aa, synthetic construct
  source 1..17: note = Description of Artificial Sequence: Synthetic peptide; note = XENP021284 vhCDR2
WIDPQNGDTEYAPKFQG

SEQ ID NO: 25778 - protein, 9 aa, synthetic construct
  source 1..9: note = Description of Artificial Sequence: Synthetic peptide; note = XENP021284 vhCDR3
RGVRQALDY

SEQ ID NO: 25779 - protein, 214 aa, synthetic construct; identical to SEQ ID NO: 17250
  source 1..214: note = Description of Artificial Sequence: Synthetic polypeptide; note = XENP021284 2A11_H1.57_L2_Fab Light Chain

SEQ ID NO: 25780 - protein, 107 aa, synthetic construct; identical to SEQ ID NO: 17251
  source 1..107: note = Description of Artificial Sequence: Synthetic polypeptide; note = VL of XENP021284

SEQ ID NO: 25781 - protein, 11 aa, synthetic construct
  source 1..11: note = Description of Artificial Sequence: Synthetic peptide; note = XENP021284 vlCDR1
QASQDIGNYLN

SEQ ID NO: 25782 - protein, 7 aa, synthetic construct
  source 1..7: note = Description of Artificial Sequence: Synthetic peptide; note = XENP021284 vlCDR2
YTSRLHS

SEQ ID NO: 25783 - protein, 9 aa, synthetic construct
  source 1..9: note = Description of Artificial Sequence: Synthetic peptide; note = XENP021284 vlCDR3
QQGNTLPYT

SEQ ID NO: 25784 - protein, 223 aa, synthetic construct
  source 1..223: note = Description of Artificial Sequence: Synthetic polypeptide; note = XENP021285 2A11_H1.58_L2_Fab Heavy Chain
EVQLVQSGAEVKKPGATVKISCKASGFNIKDYYMHWVQQAPGKGLEWMGWIDPDNGDTEYAPKFQGRVTITADTSTNTAYMELSSLRSEDTAVYYCYARGVRQALDYWGQGTLVTVSSASTKGPSVFPLAPSSKSTSGGTAALGCLVKDYFPEPVTVSWNSGALTSGVHTFPAVLQSSGLYSLSSVVTVPSSSLGTQTYICNVNHKPSNTKVDKKVEPKSCGS

SEQ ID NO: 25785 - protein, 118 aa, synthetic construct
  source 1..118: note = Description of Artificial Sequence: Synthetic polypeptide; note = VH of XENP021285
EVQLVQSGAEVKKPGATVKISCKASGFNIKDYYMHWVQQAPGKGLEWMGWIDPDNGDTEYAPKFQGRVTITADTSTNTAYMELSSLRSEDTAVYYCYARGVRQALDYWGQGTLVTVSS

SEQ ID NO: 25786 - protein, 5 aa, synthetic construct
  source 1..5: note = Description of Artificial Sequence: Synthetic peptide; note = XENP021285 vhCDR1
DYYMH

SEQ ID NO: 25787 - protein, 17 aa, synthetic construct
  source 1..17: note = Description of Artificial Sequence: Synthetic peptide; note = XENP021285 vhCDR2
WIDPDNGDTEYAPKFQG

SEQ ID NO: 25788 - protein, 9 aa, synthetic construct
  source 1..9: note = Description of Artificial Sequence: Synthetic peptide; note = XENP021285 vhCDR3
RGVRQALDY

SEQ ID NO: 25789 - protein, 214 aa, synthetic construct; identical to SEQ ID NO: 17250
  source 1..214: note = Description of Artificial Sequence: Synthetic polypeptide; note = XENP021285 2A11_H1.58_L2_Fab Light Chain

SEQ ID NO: 25790 - protein, 107 aa, synthetic construct; identical to SEQ ID NO: 17251
  source 1..107: note = Description of Artificial Sequence: Synthetic polypeptide; note = VL of XENP021285

SEQ ID NO: 25791 - protein, 11 aa, synthetic construct
  source 1..11: note = Description of Artificial Sequence: Synthetic peptide; note = XENP021285 vlCDR1
QASQDIGNYLN

SEQ ID NO: 25792 - protein, 7 aa, synthetic construct
  source 1..7: note = Description of Artificial Sequence: Synthetic peptide; note = XENP021285 vlCDR2
YTSRLHS

SEQ ID NO: 25793 - protein, 9 aa, synthetic construct
  source 1..9: note = Description of Artificial Sequence: Synthetic peptide; note = XENP021285 vlCDR3
QQGNTLPYT

SEQ ID NO: 25794 - protein, 223 aa, synthetic construct
  source 1..223: note = Description of Artificial Sequence: Synthetic polypeptide; note = XENP021286 2A11_H1.59_L2_Fab Heavy Chain
EVQLVQSGAEVKKPGATVKISCKASGFNIKDYYMHWVQQAPGKGLEWMGWIDPKNGDTEYAPKFQGRVTITADTSTNTAYMELSSLRSEDTAVYYCYARGVRQALDYWGQGTLVTVSSASTKGPSVFPLAPSSKSTSGGTAALGCLVKDYFPEPVTVSWNSGALTSGVHTFPAVLQSSGLYSLSSVVTVPSSSLGTQTYICNVNHKPSNTKVDKKVEPKSCGS

SEQ ID NO: 25795 - protein, 118 aa, synthetic construct
  source 1..118: note = Description of Artificial Sequence: Synthetic polypeptide; note = VH of XENP021286
EVQLVQSGAEVKKPGATVKISCKASGFNIKDYYMHWVQQAPGKGLEWMGWIDPKNGDTEYAPKFQGRVTITADTSTNTAYMELSSLRSEDTAVYYCYARGVRQALDYWGQGTLVTVSS

SEQ ID NO: 25796 - protein, 5 aa, synthetic construct
  source 1..5: note = Description of Artificial Sequence: Synthetic peptide; note = XENP021286 vhCDR1
DYYMH

SEQ ID NO: 25797 - protein, 17 aa, synthetic construct
  source 1..17: note = Description of Artificial Sequence: Synthetic peptide; note = XENP021286 vhCDR2
WIDPKNGDTEYAPKFQG

SEQ ID NO: 25798 - protein, 9 aa, synthetic construct
  source 1..9: note = Description of Artificial Sequence: Synthetic peptide; note = XENP021286 vhCDR3
RGVRQALDY

SEQ ID NO: 25799 - protein, 214 aa, synthetic construct; identical to SEQ ID NO: 17250
  source 1..214: note = Description of Artificial Sequence: Synthetic polypeptide; note = XENP021286 2A11_H1.59_L2_Fab Light Chain

SEQ ID NO: 25800 - protein, 107 aa, synthetic construct; identical to SEQ ID NO: 17251
  source 1..107: note = Description of Artificial Sequence: Synthetic polypeptide; note = VL of XENP021286

SEQ ID NO: 25801 - protein, 11 aa, synthetic construct
  source 1..11: note = Description of Artificial Sequence: Synthetic peptide; note = XENP021286 vlCDR1
QASQDIGNYLN

SEQ ID NO: 25802 - protein, 7 aa, synthetic construct
  source 1..7: note = Description of Artificial Sequence: Synthetic peptide; note = XENP021286 vlCDR2
YTSRLHS

SEQ ID NO: 25803 - protein, 9 aa, synthetic construct
  source 1..9: note = Description of Artificial Sequence: Synthetic peptide; note = XENP021286 vlCDR3
QQGNTLPYT

SEQ ID NO: 25804 - protein, 223 aa, synthetic construct
  source 1..223: note = Description of Artificial Sequence: Synthetic polypeptide; note = XENP021287 2A11_H1.60_L2_Fab Heavy Chain
EVQLVQSGAEVKKPGATVKISCKASGFNIKDYYMHWVQQAPGKGLEWMGWIDPSNGDTEYAPKFQGRVTITADTSTNTAYMELSSLRSEDTAVYYCYARGVRQALDYWGQGTLVTVSSASTKGPSVFPLAPSSKSTSGGTAALGCLVKDYFPEPVTVSWNSGALTSGVHTFPAVLQSSGLYSLSSVVTVPSSSLGTQTYICNVNHKPSNTKVDKKVEPKSCGS

SEQ ID NO: 25805 - protein, 118 aa, synthetic construct
  source 1..118: note = Description of Artificial Sequence: Synthetic polypeptide; note = VH of XENP021287
EVQLVQSGAEVKKPGATVKISCKASGFNIKDYYMHWVQQAPGKGLEWMGWIDPSNGDTEYAPKFQGRVTITADTSTNTAYMELSSLRSEDTAVYYCYARGVRQALDYWGQGTLVTVSS

SEQ ID NO: 25806 - protein, 5 aa, synthetic construct
  source 1..5: note = Description of Artificial Sequence: Synthetic peptide; note = XENP021287 vhCDR1
DYYMH

SEQ ID NO: 25807 - protein, 17 aa, synthetic construct
  source 1..17: note = Description of Artificial Sequence: Synthetic peptide; note = XENP021287 vhCDR2
WIDPSNGDTEYAPKFQG

SEQ ID NO: 25808 - protein, 9 aa, synthetic construct
  source 1..9: note = Description of Artificial Sequence: Synthetic peptide; note = XENP021287 vhCDR3
RGVRQALDY

SEQ ID NO: 25809 - protein, 214 aa, synthetic construct; identical to SEQ ID NO: 17250
  source 1..214: note = Description of Artificial Sequence: Synthetic polypeptide; note = XENP021287 2A11_H1.60_L2_Fab Light Chain

SEQ ID NO: 25810 - protein, 107 aa, synthetic construct; identical to SEQ ID NO: 17251
  source 1..107: note = Description of Artificial Sequence: Synthetic polypeptide; note = VL of XENP021287

SEQ ID NO: 25811 - protein, 11 aa, synthetic construct
  source 1..11: note = Description of Artificial Sequence: Synthetic peptide; note = XENP021287 vlCDR1
QASQDIGNYLN

SEQ ID NO: 25812 - protein, 7 aa, synthetic construct
  source 1..7: note = Description of Artificial Sequence: Synthetic peptide; note = XENP021287 vlCDR2
YTSRLHS

SEQ ID NO: 25813 - protein, 9 aa, synthetic construct
  source 1..9: note = Description of Artificial Sequence: Synthetic peptide; note = XENP021287 vlCDR3
QQGNTLPYT

SEQ ID NO: 25814 - protein, 223 aa, synthetic construct
  source 1..223: note = Description of Artificial Sequence: Synthetic polypeptide; note = XENP021288 2A11_H1.61_L2_Fab Heavy Chain
EVQLVQSGAEVKKPGATVKISCKASGFNIKDYYMHWVQQAPGKGLEWMGWIDPNNGDTEYAPKFQGRVTITADTSTNTAYMELSSLRSEDTAVYYCYARGVRQALDYWGQGTLVTVSSASTKGPSVFPLAPSSKSTSGGTAALGCLVKDYFPEPVTVSWNSGALTSGVHTFPAVLQSSGLYSLSSVVTVPSSSLGTQTYICNVNHKPSNTKVDKKVEPKSCGS

SEQ ID NO: 25815 - protein, 118 aa, synthetic construct
  source 1..118: note = Description of Artificial Sequence: Synthetic polypeptide; note = VH of XENP021288
EVQLVQSGAEVKKPGATVKISCKASGFNIKDYYMHWVQQAPGKGLEWMGWIDPNNGDTEYAPKFQGRVTITADTSTNTAYMELSSLRSEDTAVYYCYARGVRQALDYWGQGTLVTVSS

SEQ ID NO: 25816 - protein, 5 aa, synthetic construct
  source 1..5: note = Description of Artificial Sequence: Synthetic peptide; note = XENP021288 vhCDR1
DYYMH

SEQ ID NO: 25817 - protein, 17 aa, synthetic construct
  source 1..17: note = Description of Artificial Sequence: Synthetic peptide; note = XENP021288 vhCDR2
WIDPNNGDTEYAPKFQG

SEQ ID NO: 25818 - protein, 9 aa, synthetic construct
  source 1..9: note = Description of Artificial Sequence: Synthetic peptide; note = XENP021288 vhCDR3
RGVRQALDY

SEQ ID NO: 25819 - protein, 214 aa, synthetic construct; identical to SEQ ID NO: 17250
  source 1..214: note = Description of Artificial Sequence: Synthetic polypeptide; note = XENP021288 2A11_H1.61_L2_Fab Light Chain

SEQ ID NO: 25820 - protein, 107 aa, synthetic construct; identical to SEQ ID NO: 17251
  source 1..107: note = Description of Artificial Sequence: Synthetic polypeptide; note = VL of XENP021288

SEQ ID NO: 25821 - protein, 11 aa, synthetic construct
  source 1..11: note = Description of Artificial Sequence: Synthetic peptide; note = XENP021288 vlCDR1
QASQDIGNYLN

SEQ ID NO: 25822 - protein, 7 aa, synthetic construct
  source 1..7: note = Description of Artificial Sequence: Synthetic peptide; note = XENP021288 vlCDR2
YTSRLHS

SEQ ID NO: 25823 - protein, 9 aa, synthetic construct
  source 1..9: note = Description of Artificial Sequence: Synthetic peptide; note = XENP021288 vlCDR3
QQGNTLPYT

SEQ ID NO: 25824 - protein, 223 aa, synthetic construct
  source 1..223: note = Description of Artificial Sequence: Synthetic polypeptide; note = XENP021289 2A11_H1.62_L2_Fab Heavy Chain
EVQLVQSGAEVKKPGATVKISCKASGFNIKDYYMHWVQQAPGKGLEWMGWIDPANGDTEYAPKFQGRVTITADTSTNTAYMELSSLRSEDTAVYYCYARGVRQALDYWGQGTLVTVSSASTKGPSVFPLAPSSKSTSGGTAALGCLVKDYFPEPVTVSWNSGALTSGVHTFPAVLQSSGLYSLSSVVTVPSSSLGTQTYICNVNHKPSNTKVDKKVEPKSCGS

SEQ ID NO: 25825 - protein, 118 aa, synthetic construct
  source 1..118: note = Description of Artificial Sequence: Synthetic polypeptide; note = VH of XENP021289
EVQLVQSGAEVKKPGATVKISCKASGFNIKDYYMHWVQQAPGKGLEWMGWIDPANGDTEYAPKFQGRVTITADTSTNTAYMELSSLRSEDTAVYYCYARGVRQALDYWGQGTLVTVSS

SEQ ID NO: 25826 - protein, 5 aa, synthetic construct
  source 1..5: note = Description of Artificial Sequence: Synthetic peptide; note = XENP021289 vhCDR1
DYYMH

SEQ ID NO: 25827 - protein, 17 aa, synthetic construct
  source 1..17: note = Description of Artificial Sequence: Synthetic peptide; note = XENP021289 vhCDR2
WIDPANGDTEYAPKFQG

SEQ ID NO: 25828 - protein, 9 aa, synthetic construct
  source 1..9: note = Description of Artificial Sequence: Synthetic peptide; note = XENP021289 vhCDR3
RGVRQALDY

SEQ ID NO: 25829 - protein, 214 aa, synthetic construct; identical to SEQ ID NO: 17250
  source 1..214: note = Description of Artificial Sequence: Synthetic polypeptide; note = XENP021289 2A11_H1.62_L2_Fab Light Chain

SEQ ID NO: 25830 - protein, 107 aa, synthetic construct; identical to SEQ ID NO: 17251
  source 1..107: note = Description of Artificial Sequence: Synthetic polypeptide; note = VL of XENP021289

SEQ ID NO: 25831 - protein, 11 aa, synthetic construct
  source 1..11: note = Description of Artificial Sequence: Synthetic peptide; note = XENP021289 vlCDR1
QASQDIGNYLN

SEQ ID NO: 25832 - protein, 7 aa, synthetic construct
  source 1..7: note = Description of Artificial Sequence: Synthetic peptide; note = XENP021289 vlCDR2
YTSRLHS

SEQ ID NO: 25833 - protein, 9 aa, synthetic construct
  source 1..9: note = Description of Artificial Sequence: Synthetic peptide; note = XENP021289 vlCDR3
QQGNTLPYT

SEQ ID NO: 25834 - protein, 223 aa, synthetic construct
  source 1..223: note = Description of Artificial Sequence: Synthetic polypeptide; note = XENP021290 2A11_H1.63_L2_Fab Heavy Chain
EVQLVQSGAEVKKPGATVKISCKASGFNIKDYYMHWVQQAPGKGLEWMGWIDPTNGDTEYAPKFQGRVTITADTSTNTAYMELSSLRSEDTAVYYCYARGVRQALDYWGQGTLVTVSSASTKGPSVFPLAPSSKSTSGGTAALGCLVKDYFPEPVTVSWNSGALTSGVHTFPAVLQSSGLYSLSSVVTVPSSSLGTQTYICNVNHKPSNTKVDKKVEPKSCGS

SEQ ID NO: 25835 - protein, 118 aa, synthetic construct
  source 1..118: note = Description of Artificial Sequence: Synthetic polypeptide; note = VH of XENP021290
EVQLVQSGAEVKKPGATVKISCKASGFNIKDYYMHWVQQAPGKGLEWMGWIDPTNGDTEYAPKFQGRVTITADTSTNTAYMELSSLRSEDTAVYYCYARGVRQALDYWGQGTLVTVSS

SEQ ID NO: 25836 - protein, 5 aa, synthetic construct
  source 1..5: note = Description of Artificial Sequence: Synthetic peptide; note = XENP021290 vhCDR1
DYYMH

SEQ ID NO: 25837 - protein, 17 aa, synthetic construct
  source 1..17: note = Description of Artificial Sequence: Synthetic peptide; note = XENP021290 vhCDR2
WIDPTNGDTEYAPKFQG

SEQ ID NO: 25838 - protein, 9 aa, synthetic construct
  source 1..9: note = Description of Artificial Sequence: Synthetic peptide; note = XENP021290 vhCDR3
RGVRQALDY

SEQ ID NO: 25839 - protein, 214 aa, synthetic construct; identical to SEQ ID NO: 17250
  source 1..214: note = Description of Artificial Sequence: Synthetic polypeptide; note = XENP021290 2A11_H1.63_L2_Fab Light Chain

SEQ ID NO: 25840 - protein, 107 aa, synthetic construct; identical to SEQ ID NO: 17251
  source 1..107: note = Description of Artificial Sequence: Synthetic polypeptide; note = VL of XENP021290

SEQ ID NO: 25841 - protein, 11 aa, synthetic construct
  source 1..11: note = Description of Artificial Sequence: Synthetic peptide; note = XENP021290 vlCDR1
QASQDIGNYLN

SEQ ID NO: 25842 - protein, 7 aa, synthetic construct
  source 1..7: note = Description of Artificial Sequence: Synthetic peptide; note = XENP021290 vlCDR2
YTSRLHS

SEQ ID NO: 25843 - protein, 9 aa, synthetic construct
  source 1..9: note = Description of Artificial Sequence: Synthetic peptide; note = XENP021290 vlCDR3
QQGNTLPYT

SEQ ID NO: 25844 - protein, 223 aa, synthetic construct
  source 1..223: note = Description of Artificial Sequence: Synthetic polypeptide; note = XENP021291 2A11_H1.64_L2_Fab Heavy Chain
EVQLVQSGAEVKKPGATVKISCKASGFNIKDYYMHWVQQAPGKGLEWMGWIDPYNGDTEYAPKFQGRVTITADTSTNTAYMELSSLRSEDTAVYYCYARGVRQALDYWGQGTLVTVSSASTKGPSVFPLAPSSKSTSGGTAALGCLVKDYFPEPVTVSWNSGALTSGVHTFPAVLQSSGLYSLSSVVTVPSSSLGTQTYICNVNHKPSNTKVDKKVEPKSCGS

SEQ ID NO: 25845 - protein, 118 aa, synthetic construct
  source 1..118: note = Description of Artificial Sequence: Synthetic polypeptide; note = VH of XENP021291
EVQLVQSGAEVKKPGATVKISCKASGFNIKDYYMHWVQQAPGKGLEWMGWIDPYNGDTEYAPKFQGRVTITADTSTNTAYMELSSLRSEDTAVYYCYARGVRQALDYWGQGTLVTVSS

SEQ ID NO: 25846 - protein, 5 aa, synthetic construct
  source 1..5: note = Description of Artificial Sequence: Synthetic peptide; note = XENP021291 vhCDR1
DYYMH

SEQ ID NO: 25847 - protein, 17 aa, synthetic construct
  source 1..17: note = Description of Artificial Sequence: Synthetic peptide; note = XENP021291 vhCDR2
WIDPYNGDTEYAPKFQG

SEQ ID NO: 25848 - protein, 9 aa, synthetic construct
  source 1..9: note = Description of Artificial Sequence: Synthetic peptide; note = XENP021291 vhCDR3
RGVRQALDY

SEQ ID NO: 25849 - protein, 214 aa, synthetic construct; identical to SEQ ID NO: 17250
  source 1..214: note = Description of Artificial Sequence: Synthetic polypeptide; note = XENP021291 2A11_H1.64_L2_Fab Light Chain

SEQ ID NO: 25850 - protein, 107 aa, synthetic construct; identical to SEQ ID NO: 17251
  source 1..107: note = Description of Artificial Sequence: Synthetic polypeptide; note = VL of XENP021291

SEQ ID NO: 25851 - protein, 11 aa, synthetic construct
  source 1..11: note = Description of Artificial Sequence: Synthetic peptide; note = XENP021291 vlCDR1
QASQDIGNYLN

SEQ ID NO: 25852 - protein, 7 aa, synthetic construct
  source 1..7: note = Description of Artificial Sequence: Synthetic peptide; note = XENP021291 vlCDR2
YTSRLHS

SEQ ID NO: 25853 - protein, 9 aa, synthetic construct
  source 1..9: note = Description of Artificial Sequence: Synthetic peptide; note = XENP021291 vlCDR3
QQGNTLPYT

SEQ ID NO: 25854 - protein, 223 aa, synthetic construct
  source 1..223: note = Description of Artificial Sequence: Synthetic polypeptide; note = XENP021292 2A11_H1.65_L2_Fab Heavy Chain
EVQLVQSGAEVKKPGATVKISCKASGFNIKDYYMHWVQQAPGKGLEWMGWIDPEDGDTEYAPKFQGRVTITADTSTNTAYMELSSLRSEDTAVYYCYARGVRQALDYWGQGTLVTVSSASTKGPSVFPLAPSSKSTSGGTAALGCLVKDYFPEPVTVSWNSGALTSGVHTFPAVLQSSGLYSLSSVVTVPSSSLGTQTYICNVNHKPSNTKVDKKVEPKSCGS

SEQ ID NO: 25855 - protein, 118 aa, synthetic construct
  source 1..118: note = Description of Artificial Sequence: Synthetic polypeptide; note = VH of XENP021292
EVQLVQSGAEVKKPGATVKISCKASGFNIKDYYMHWVQQAPGKGLEWMGWIDPEDGDTEYAPKFQGRVTITADTSTNTAYMELSSLRSEDTAVYYCYARGVRQALDYWGQGTLVTVSS

SEQ ID NO: 25856 - protein, 5 aa, synthetic construct
  source 1..5: note = Description of Artificial Sequence: Synthetic peptide; note = XENP021292 vhCDR1
DYYMH

SEQ ID NO: 25857 - protein, 17 aa, synthetic construct
  source 1..17: note = Description of Artificial Sequence: Synthetic peptide; note = XENP021292 vhCDR2
WIDPEDGDTEYAPKFQG

SEQ ID NO: 25858 - protein, 9 aa, synthetic construct
  source 1..9: note = Description of Artificial Sequence: Synthetic peptide; note = XENP021292 vhCDR3
RGVRQALDY

SEQ ID NO: 25859 - protein, 214 aa, synthetic construct; identical to SEQ ID NO: 17250
  source 1..214: note = Description of Artificial Sequence: Synthetic polypeptide; note = XENP021292 2A11_H1.65_L2_Fab Light Chain

SEQ ID NO: 25860 - protein, 107 aa, synthetic construct; identical to SEQ ID NO: 17251
  source 1..107: note = Description of Artificial Sequence: Synthetic polypeptide; note = VL of XENP021292

SEQ ID NO: 25861 - protein, 11 aa, synthetic construct
  source 1..11: note = Description of Artificial Sequence: Synthetic peptide; note = XENP021292 vlCDR1
QASQDIGNYLN

SEQ ID NO: 25862 - protein, 7 aa, synthetic construct
  source 1..7: note = Description of Artificial Sequence: Synthetic peptide; note = XENP021292 vlCDR2
YTSRLHS

SEQ ID NO: 25863 - protein, 9 aa, synthetic construct
  source 1..9: note = Description of Artificial Sequence: Synthetic peptide; note = XENP021292 vlCDR3
QQGNTLPYT

SEQ ID NO: 25864 - protein, 223 aa, synthetic construct
  source 1..223: note = Description of Artificial Sequence: Synthetic polypeptide; note = XENP021293 2A11_H1.66_L2_Fab Heavy Chain
EVQLVQSGAEVKKPGATVKISCKASGFNIKDYYMHWVQQAPGKGLEWMGWIDPEHGDTEYAPKFQGRVTITADTSTNTAYMELSSLRSEDTAVYYCYARGVRQALDYWGQGTLVTVSSASTKGPSVFPLAPSSKSTSGGTAALGCLVKDYFPEPVTVSWNSGALTSGVHTFPAVLQSSGLYSLSSVVTVPSSSLGTQTYICNVNHKPSNTKVDKKVEPKSCGS

SEQ ID NO: 25865 - protein, 118 aa, synthetic construct
  source 1..118: note = Description of Artificial Sequence: Synthetic polypeptide; note = VH of XENP021293
EVQLVQSGAEVKKPGATVKISCKASGFNIKDYYMHWVQQAPGKGLEWMGWIDPEHGDTEYAPKFQGRVTITADTSTNTAYMELSSLRSEDTAVYYCYARGVRQALDYWGQGTLVTVSS

SEQ ID NO: 25866 - protein, 5 aa, synthetic construct
  source 1..5: note = Description of Artificial Sequence: Synthetic peptide; note = XENP021293 vhCDR1
DYYMH

SEQ ID NO: 25867 - protein, 17 aa, synthetic construct
  source 1..17: note = Description of Artificial Sequence: Synthetic peptide; note = XENP021293 vhCDR2
WIDPEHGDTEYAPKFQG

SEQ ID NO: 25868 - protein, 9 aa, synthetic construct
  source 1..9: note = Description of Artificial Sequence: Synthetic peptide; note = XENP021293 vhCDR3
RGVRQALDY

SEQ ID NO: 25869 - protein, 214 aa, synthetic construct; identical to SEQ ID NO: 17250
  source 1..214: note = Description of Artificial Sequence: Synthetic polypeptide; note = XENP021293 2A11_H1.66_L2_Fab Light Chain

SEQ ID NO: 25870 - protein, 107 aa, synthetic construct; identical to SEQ ID NO: 17251
  source 1..107: note = Description of Artificial Sequence: Synthetic polypeptide; note = VL of XENP021293

SEQ ID NO: 25871 - protein, 11 aa, synthetic construct
  source 1..11: note = Description of Artificial Sequence: Synthetic peptide; note = XENP021293 vlCDR1
QASQDIGNYLN

SEQ ID NO: 25872 - protein, 7 aa, synthetic construct
  source 1..7: note = Description of Artificial Sequence: Synthetic peptide; note = XENP021293 vlCDR2
YTSRLHS

SEQ ID NO: 25873 - protein, 9 aa, synthetic construct
  source 1..9: note = Description of Artificial Sequence: Synthetic peptide; note = XENP021293 vlCDR3
QQGNTLPYT

SEQ ID NO: 25874 - protein, 223 aa, synthetic construct
  source 1..223: note = Description of Artificial Sequence: Synthetic polypeptide; note = XENP021294 2A11_H1.67_L2_Fab Heavy Chain
EVQLVQSGAEVKKPGATVKISCKASGFNIKDYYMHWVQQAPGKGLEWMGWIDPEEGDTEYAPKFQGRVTITADTSTNTAYMELSSLRSEDTAVYYCYARGVRQALDYWGQGTLVTVSSASTKGPSVFPLAPSSKSTSGGTAALGCLVKDYFPEPVTVSWNSGALTSGVHTFPAVLQSSGLYSLSSVVTVPSSSLGTQTYICNVNHKPSNTKVDKKVEPKSCGS

SEQ ID NO: 25875 - protein, 118 aa, synthetic construct
  source 1..118: note = Description of Artificial Sequence: Synthetic polypeptide; note = VH of XENP021294
EVQLVQSGAEVKKPGATVKISCKASGFNIKDYYMHWVQQAPGKGLEWMGWIDPEEGDTEYAPKFQGRVTITADTSTNTAYMELSSLRSEDTAVYYCYARGVRQALDYWGQGTLVTVSS

SEQ ID NO: 25876 - protein, 5 aa, synthetic construct
  source 1..5: note = Description of Artificial Sequence: Synthetic peptide; note = XENP021294 vhCDR1
DYYMH

SEQ ID NO: 25877 - protein, 17 aa, synthetic construct
  source 1..17: note = Description of Artificial Sequence: Synthetic peptide; note = XENP021294 vhCDR2
WIDPEEGDTEYAPKFQG

SEQ ID NO: 25878 - protein, 9 aa, synthetic construct
  source 1..9: note = Description of Artificial Sequence: Synthetic peptide; note = XENP021294 vhCDR3
RGVRQALDY

SEQ ID NO: 25879 - protein, 214 aa, synthetic construct; identical to SEQ ID NO: 17250
  source 1..214: note = Description of Artificial Sequence: Synthetic polypeptide; note = XENP021294 2A11_H1.67_L2_Fab Light Chain

SEQ ID NO: 25880 - protein, 107 aa, synthetic construct; identical to SEQ ID NO: 17251
  source 1..107: note = Description of Artificial Sequence: Synthetic polypeptide; note = VL of XENP021294

SEQ ID NO: 25881 - protein, 11 aa, synthetic construct
  source 1..11: note = Description of Artificial Sequence: Synthetic peptide; note = XENP021294 vlCDR1
QASQDIGNYLN

SEQ ID NO: 25882 - protein, 7 aa, synthetic construct
  source 1..7: note = Description of Artificial Sequence: Synthetic peptide; note = XENP021294 vlCDR2
YTSRLHS

SEQ ID NO: 25883 - protein, 9 aa, synthetic construct
  source 1..9: note = Description of Artificial Sequence: Synthetic peptide; note = XENP021294 vlCDR3
QQGNTLPYT

SEQ ID NO: 25884 - protein, 223 aa, synthetic construct
  source 1..223: note = Description of Artificial Sequence: Synthetic polypeptide; note = XENP021295 2A11_H1.68_L2_Fab Heavy Chain
EVQLVQSGAEVKKPGATVKISCKASGFNIKDYYMHWVQQAPGKGLEWMGWIDPEQGDTEYAPKFQGRVTITADTSTNTAYMELSSLRSEDTAVYYCYARGVRQALDYWGQGTLVTVSSASTKGPSVFPLAPSSKSTSGGTAALGCLVKDYFPEPVTVSWNSGALTSGVHTFPAVLQSSGLYSLSSVVTVPSSSLGTQTYICNVNHKPSNTKVDKKVEPKSCGS

SEQ ID NO: 25885 - protein, 118 aa, synthetic construct
  source 1..118: note = Description of Artificial Sequence: Synthetic polypeptide; note = VH of XENP021295
EVQLVQSGAEVKKPGATVKISCKASGFNIKDYYMHWVQQAPGKGLEWMGWIDPEQGDTEYAPKFQGRVTITADTSTNTAYMELSSLRSEDTAVYYCYARGVRQALDYWGQGTLVTVSS

SEQ ID NO: 25886 - protein, 5 aa, synthetic construct
  source 1..5: note = Description of Artificial Sequence: Synthetic peptide; note = XENP021295 vhCDR1
DYYMH

SEQ ID NO: 25887 - protein, 17 aa, synthetic construct
  source 1..17: note = Description of Artificial Sequence: Synthetic peptide; note = XENP021295 vhCDR2
WIDPEQGDTEYAPKFQG

SEQ ID NO: 25888 - protein, 9 aa, synthetic construct
  source 1..9: note = Description of Artificial Sequence: Synthetic peptide; note = XENP021295 vhCDR3
RGVRQALDY

SEQ ID NO: 25889 - protein, 214 aa, synthetic construct; identical to SEQ ID NO: 17250
  source 1..214: note = Description of Artificial Sequence: Synthetic polypeptide; note = XENP021295 2A11_H1.68_L2_Fab Light Chain

SEQ ID NO: 25890 - protein, 107 aa, synthetic construct; identical to SEQ ID NO: 17251
  source 1..107: note = Description of Artificial Sequence: Synthetic polypeptide; note = VL of XENP021295

SEQ ID NO: 25891 - protein, 11 aa, synthetic construct
  source 1..11: note = Description of Artificial Sequence: Synthetic peptide; note = XENP021295 vlCDR1
QASQDIGNYLN

SEQ ID NO: 25892 - protein, 7 aa, synthetic construct
  source 1..7: note = Description of Artificial Sequence: Synthetic peptide; note = XENP021295 vlCDR2
YTSRLHS

SEQ ID NO: 25893 - protein, 9 aa, synthetic construct
  source 1..9: note = Description of Artificial Sequence: Synthetic peptide; note = XENP021295 vlCDR3
QQGNTLPYT

SEQ ID NO: 25894 - protein, 223 aa, synthetic construct
  source 1..223: note = Description of Artificial Sequence: Synthetic polypeptide; note = XENP021296 2A11_H1.69_L2_Fab Heavy Chain
EVQLVQSGAEVKKPGATVKISCKASGFNIKDYYMHWVQQAPGKGLEWMGWIDPERGDTEYAPKFQGRVTITADTSTNTAYMELSSLRSEDTAVYYCYARGVRQALDYWGQGTLVTVSSASTKGPSVFPLAPSSKSTSGGTAALGCLVKDYFPEPVTVSWNSGALTSGVHTFPAVLQSSGLYSLSSVVTVPSSSLGTQTYICNVNHKPSNTKVDKKVEPKSCGS

SEQ ID NO: 25895 - protein, 118 aa, synthetic construct
  source 1..118: note = Description of Artificial Sequence: Synthetic polypeptide; note = VH of XENP021296
EVQLVQSGAEVKKPGATVKISCKASGFNIKDYYMHWVQQAPGKGLEWMGWIDPERGDTEYAPKFQGRVTITADTSTNTAYMELSSLRSEDTAVYYCYARGVRQALDYWGQGTLVTVSS

SEQ ID NO: 25896 - protein, 5 aa, synthetic construct
  source 1..5: note = Description of Artificial Sequence: Synthetic peptide; note = XENP021296 vhCDR1
DYYMH

SEQ ID NO: 25897 - protein, 17 aa, synthetic construct
  source 1..17: note = Description of Artificial Sequence: Synthetic peptide; note = XENP021296 vhCDR2
WIDPERGDTEYAPKFQG

SEQ ID NO: 25898 - protein, 9 aa, synthetic construct
  source 1..9: note = Description of Artificial Sequence: Synthetic peptide; note = XENP021296 vhCDR3
RGVRQALDY

SEQ ID NO: 25899 - protein, 214 aa, synthetic construct; identical to SEQ ID NO: 17250
  source 1..214: note = Description of Artificial Sequence: Synthetic polypeptide; note = XENP021296 2A11_H1.69_L2_Fab Light Chain

SEQ ID NO: 25900 - protein, 107 aa, synthetic construct; identical to SEQ ID NO: 17251
  source 1..107: note = Description of Artificial Sequence: Synthetic polypeptide; note = VL of XENP021296

SEQ ID NO: 25901 - protein, 11 aa, synthetic construct
  source 1..11: note = Description of Artificial Sequence: Synthetic peptide; note = XENP021296 vlCDR1
QASQDIGNYLN

SEQ ID NO: 25902 - protein, 7 aa, synthetic construct
  source 1..7: note = Description of Artificial Sequence: Synthetic peptide; note = XENP021296 vlCDR2
YTSRLHS

SEQ ID NO: 25903 - protein, 9 aa, synthetic construct
  source 1..9: note = Description of Artificial Sequence: Synthetic peptide; note = XENP021296 vlCDR3
QQGNTLPYT

SEQ ID NO: 25904 - protein, 223 aa, synthetic construct
  source 1..223: note = Description of Artificial Sequence: Synthetic polypeptide; note = XENP021301 2A11_H1.70_L2_Fab Heavy Chain
EVQLVQSGAEVKKPGATVKISCKASGFNIKDYYMHWVQQAPGKGLEWMGWIDPELGDTEYAPKFQGRVTITADTSTNTAYMELSSLRSEDTAVYYCYARGVRQALDYWGQGTLVTVSSASTKGPSVFPLAPSSKSTSGGTAALGCLVKDYFPEPVTVSWNSGALTSGVHTFPAVLQSSGLYSLSSVVTVPSSSLGTQTYICNVNHKPSNTKVDKKVEPKSCGS

SEQ ID NO: 25905 - protein, 118 aa, synthetic construct
  source 1..118: note = Description of Artificial Sequence: Synthetic polypeptide; note = VH of XENP021301
EVQLVQSGAEVKKPGATVKISCKASGFNIKDYYMHWVQQAPGKGLEWMGWIDPELGDTEYAPKFQGRVTITADTSTNTAYMELSSLRSEDTAVYYCYARGVRQALDYWGQGTLVTVSS

SEQ ID NO: 25906 - protein, 5 aa, synthetic construct
  source 1..5: note = Description of Artificial Sequence: Synthetic peptide; note = XENP021301 vhCDR1
DYYMH

SEQ ID NO: 25907 - protein, 17 aa, synthetic construct
  source 1..17: note = Description of Artificial Sequence: Synthetic peptide; note = XENP021301 vhCDR2
WIDPELGDTEYAPKFQG

SEQ ID NO: 25908 - protein, 9 aa, synthetic construct
  source 1..9: note = Description of Artificial Sequence: Synthetic peptide; note = XENP021301 vhCDR3
RGVRQALDY

SEQ ID NO: 25909 - protein, 214 aa, synthetic construct; identical to SEQ ID NO: 17250
  source 1..214: note = Description of Artificial Sequence: Synthetic polypeptide; note = XENP021301 2A11_H1.70_L2_Fab Light Chain

SEQ ID NO: 25910 - protein, 107 aa, synthetic construct; identical to SEQ ID NO: 17251
  source 1..107: note = Description of Artificial Sequence: Synthetic polypeptide; note = VL of XENP021301

SEQ ID NO: 25911 - protein, 11 aa, synthetic construct
  source 1..11: note = Description of Artificial Sequence: Synthetic peptide; note = XENP021301 vlCDR1
QASQDIGNYLN

SEQ ID NO: 25912 - protein, 7 aa, synthetic construct
  source 1..7: note = Description of Artificial Sequence: Synthetic peptide; note = XENP021301 vlCDR2
YTSRLHS

SEQ ID NO: 25913 - protein, 9 aa, synthetic construct
  source 1..9: note = Description of Artificial Sequence: Synthetic peptide; note = XENP021301 vlCDR3
QQGNTLPYT

SEQ ID NO: 25914 - protein, 223 aa, synthetic construct
  source 1..223: note = Description of Artificial Sequence: Synthetic polypeptide; note = XENP021302 2A11_H1.71_L2_Fab Heavy Chain
EVQLVQSGAEVKKPGATVKISCKASGFNIKDYYMHWVQQAPGKGLEWMGWIDPETGDTEYAPKFQGRVTITADTSTNTAYMELSSLRSEDTAVYYCYARGVRQALDYWGQGTLVTVSSASTKGPSVFPLAPSSKSTSGGTAALGCLVKDYFPEPVTVSWNSGALTSGVHTFPAVLQSSGLYSLSSVVTVPSSSLGTQTYICNVNHKPSNTKVDKKVEPKSCGS

SEQ ID NO: 25915 - protein, 118 aa, synthetic construct
  source 1..118: note = Description of Artificial Sequence: Synthetic polypeptide; note = VH of XENP021302
EVQLVQSGAEVKKPGATVKISCKASGFNIKDYYMHWVQQAPGKGLEWMGWIDPETGDTEYAPKFQGRVTITADTSTNTAYMELSSLRSEDTAVYYCYARGVRQALDYWGQGTLVTVSS

SEQ ID NO: 25916 - protein, 5 aa, synthetic construct
  source 1..5: note = Description of Artificial Sequence: Synthetic peptide; note = XENP021302 vhCDR1
DYYMH

SEQ ID NO: 25917 - protein, 17 aa, synthetic construct
  source 1..17: note = Description of Artificial Sequence: Synthetic peptide; note = XENP021302 vhCDR2
WIDPETGDTEYAPKFQG

SEQ ID NO: 25918 - protein, 9 aa, synthetic construct
  source 1..9: note = Description of Artificial Sequence: Synthetic peptide; note = XENP021302 vhCDR3
RGVRQALDY

SEQ ID NO: 25919 - protein, 214 aa, synthetic construct; identical to SEQ ID NO: 17250
  source 1..214: note = Description of Artificial Sequence: Synthetic polypeptide; note = XENP021302 2A11_H1.71_L2_Fab Light Chain

SEQ ID NO: 25920 - protein, 107 aa, synthetic construct; identical to SEQ ID NO: 17251
  source 1..107: note = Description of Artificial Sequence: Synthetic polypeptide; note = VL of XENP021302

SEQ ID NO: 25921 - protein, 11 aa, synthetic construct
  source 1..11: note = Description of Artificial Sequence: Synthetic peptide; note = XENP021302 vlCDR1
QASQDIGNYLN

SEQ ID NO: 25922 - protein, 7 aa, synthetic construct
  source 1..7: note = Description of Artificial Sequence: Synthetic peptide; note = XENP021302 vlCDR2
YTSRLHS

SEQ ID NO: 25923 - protein, 9 aa, synthetic construct
  source 1..9: note = Description of Artificial Sequence: Synthetic peptide; note = XENP021302 vlCDR3
QQGNTLPYT

SEQ ID NO: 25924 - protein, 223 aa, synthetic construct
  source 1..223: note = Description of Artificial Sequence: Synthetic polypeptide; note = XENP021303 2A11_H1.72_L2_Fab Heavy Chain
EVQLVQSGAEVKKPGATVKISCKASGFNIKDYYMHWVQQAPGKGLEWMGWIDPENGNTEYAPKFQGRVTITADTSTNTAYMELSSLRSEDTAVYYCYARGVRQALDYWGQGTLVTVSSASTKGPSVFPLAPSSKSTSGGTAALGCLVKDYFPEPVTVSWNSGALTSGVHTFPAVLQSSGLYSLSSVVTVPSSSLGTQTYICNVNHKPSNTKVDKKVEPKSCGS

SEQ ID NO: 25925 - protein, 118 aa, synthetic construct
  source 1..118: note = Description of Artificial Sequence: Synthetic polypeptide; note = VH of XENP021303
EVQLVQSGAEVKKPGATVKISCKASGFNIKDYYMHWVQQAPGKGLEWMGWIDPENGNTEYAPKFQGRVTITADTSTNTAYMELSSLRSEDTAVYYCYARGVRQALDYWGQGTLVTVSS

SEQ ID NO: 25926 - protein, 5 aa, synthetic construct
  source 1..5: note = Description of Artificial Sequence: Synthetic peptide; note = XENP021303 vhCDR1
DYYMH

SEQ ID NO: 25927 - protein, 17 aa, synthetic construct
  source 1..17: note = Description of Artificial Sequence: Synthetic peptide; note = XENP021303 vhCDR2
WIDPENGNTEYAPKFQG

SEQ ID NO: 25928 - protein, 9 aa, synthetic construct
  source 1..9: note = Description of Artificial Sequence: Synthetic peptide; note = XENP021303 vhCDR3
RGVRQALDY

SEQ ID NO: 25929 - protein, 214 aa, synthetic construct; identical to SEQ ID NO: 17250
  source 1..214: note = Description of Artificial Sequence: Synthetic polypeptide; note = XENP021303 2A11_H1.72_L2_Fab Light Chain

SEQ ID NO: 25930 - protein, 107 aa, synthetic construct; identical to SEQ ID NO: 17251
  source 1..107: note = Description of Artificial Sequence: Synthetic polypeptide; note = VL of XENP021303

SEQ ID NO: 25931 - protein, 11 aa, synthetic construct
  source 1..11: note = Description of Artificial Sequence: Synthetic peptide; note = XENP021303 vlCDR1
QASQDIGNYLN

SEQ ID NO: 25932 - protein, 7 aa, synthetic construct
  source 1..7: note = Description of Artificial Sequence: Synthetic peptide; note = XENP021303 vlCDR2
YTSRLHS

SEQ ID NO: 25933 - protein, 9 aa, synthetic construct
  source 1..9: note = Description of Artificial Sequence: Synthetic peptide; note = XENP021303 vlCDR3
QQGNTLPYT

SEQ ID NO: 25934 - protein, 223 aa, synthetic construct
  source 1..223: note = Description of Artificial Sequence: Synthetic polypeptide; note = XENP021304 2A11_H1.73_L2_Fab Heavy Chain
EVQLVQSGAEVKKPGATVKISCKASGFNIKDYYMHWVQQAPGKGLEWMGWIDPENGETEYAPKFQGRVTITADTSTNTAYMELSSLRSEDTAVYYCYARGVRQALDYWGQGTLVTVSSASTKGPSVFPLAPSSKSTSGGTAALGCLVKDYFPEPVTVSWNSGALTSGVHTFPAVLQSSGLYSLSSVVTVPSSSLGTQTYICNVNHKPSNTKVDKKVEPKSCGS

SEQ ID NO: 25935 - protein, 118 aa, synthetic construct
  source 1..118: note = Description of Artificial Sequence: Synthetic polypeptide; note = VH of XENP021304
EVQLVQSGAEVKKPGATVKISCKASGFNIKDYYMHWVQQAPGKGLEWMGWIDPENGETEYAPKFQGRVTITADTSTNTAYMELSSLRSEDTAVYYCYARGVRQALDYWGQGTLVTVSS

SEQ ID NO: 25936 - protein, 5 aa, synthetic construct
  source 1..5: note = Description of Artificial Sequence: Synthetic peptide; note = XENP021304 vhCDR1
DYYMH

SEQ ID NO: 25937 - protein, 17 aa, synthetic construct
  source 1..17: note = Description of Artificial Sequence: Synthetic peptide; note = XENP021304 vhCDR2
WIDPENGETEYAPKFQG

SEQ ID NO: 25938 - protein, 9 aa, synthetic construct
  source 1..9: note = Description of Artificial Sequence: Synthetic peptide; note = XENP021304 vhCDR3
RGVRQALDY

SEQ ID NO: 25939 - protein, 214 aa, synthetic construct; identical to SEQ ID NO: 17250
  source 1..214: note = Description of Artificial Sequence: Synthetic polypeptide; note = XENP021304 2A11_H1.73_L2_Fab Light Chain

SEQ ID NO: 25940 - protein, 107 aa, synthetic construct; identical to SEQ ID NO: 17251
  source 1..107: note = Description of Artificial Sequence: Synthetic polypeptide; note = VL of XENP021304

SEQ ID NO: 25941 - protein, 11 aa, synthetic construct
  source 1..11: note = Description of Artificial Sequence: Synthetic peptide; note = XENP021304 vlCDR1
QASQDIGNYLN

SEQ ID NO: 25942 - protein, 7 aa, synthetic construct
  source 1..7: note = Description of Artificial Sequence: Synthetic peptide; note = XENP021304 vlCDR2
YTSRLHS

SEQ ID NO: 25943 - protein, 9 aa, synthetic construct
  source 1..9: note = Description of Artificial Sequence: Synthetic peptide; note = XENP021304 vlCDR3
QQGNTLPYT

SEQ ID NO: 25944 - protein, 223 aa, synthetic construct
  source 1..223: note = Description of Artificial Sequence: Synthetic polypeptide; note = XENP021305 2A11_H1.74_L2_Fab Heavy Chain
EVQLVQSGAEVKKPGATVKISCKASGFNIKDYYMHWVQQAPGKGLEWMGWIDPENGHTEYAPKFQGRVTITADTSTNTAYMELSSLRSEDTAVYYCYARGVRQALDYWGQGTLVTVSSASTKGPSVFPLAPSSKSTSGGTAALGCLVKDYFPEPVTVSWNSGALTSGVHTFPAVLQSSGLYSLSSVVTVPSSSLGTQTYICNVNHKPSNTKVDKKVEPKSCGS

SEQ ID NO: 25945 - protein, 118 aa, synthetic construct
  source 1..118: note = Description of Artificial Sequence: Synthetic polypeptide; note = VH of XENP021305
EVQLVQSGAEVKKPGATVKISCKASGFNIKDYYMHWVQQAPGKGLEWMGWIDPENGHTEYAPKFQGRVTITADTSTNTAYMELSSLRSEDTAVYYCYARGVRQALDYWGQGTLVTVSS

SEQ ID NO: 25946 - protein, 5 aa, synthetic construct
  source 1..5: note = Description of Artificial Sequence: Synthetic peptide; note = XENP021305 vhCDR1
DYYMH

SEQ ID NO: 25947 - protein, 17 aa, synthetic construct
  source 1..17: note = Description of Artificial Sequence: Synthetic peptide; note = XENP021305 vhCDR2
WIDPENGHTEYAPKFQG

SEQ ID NO: 25948 - protein, 9 aa, synthetic construct
  source 1..9: note = Description of Artificial Sequence: Synthetic peptide; note = XENP021305 vhCDR3
RGVRQALDY

SEQ ID NO: 25949 - protein, 214 aa, synthetic construct; identical to SEQ ID NO: 17250
  source 1..214: note = Description of Artificial Sequence: Synthetic polypeptide; note = XENP021305 2A11_H1.74_L2_Fab Light Chain

SEQ ID NO: 25950 - protein, 107 aa, synthetic construct; identical to SEQ ID NO: 17251
  source 1..107: note = Description of Artificial Sequence: Synthetic polypeptide; note = VL of XENP021305

SEQ ID NO: 25951 - protein, 11 aa, synthetic construct
  source 1..11: note = Description of Artificial Sequence: Synthetic peptide; note = XENP021305 vlCDR1
QASQDIGNYLN

SEQ ID NO: 25952 - protein, 7 aa, synthetic construct
  source 1..7: note = Description of Artificial Sequence: Synthetic peptide; note = XENP021305 vlCDR2
YTSRLHS

SEQ ID NO: 25953 - protein, 9 aa, synthetic construct
  source 1..9: note = Description of Artificial Sequence: Synthetic peptide; note = XENP021305 vlCDR3
QQGNTLPYT

SEQ ID NO: 25954 - protein, 223 aa, synthetic construct
  source 1..223: note = Description of Artificial Sequence: Synthetic polypeptide; note = XENP021306 2A11_H1.75_L2_Fab Heavy Chain
EVQLVQSGAEVKKPGATVKISCKASGFNIKDYYMHWVQQAPGKGLEWMGWIDPENGQTEYAPKFQGRVTITADTSTNTAYMELSSLRSEDTAVYYCYARGVRQALDYWGQGTLVTVSSASTKGPSVFPLAPSSKSTSGGTAALGCLVKDYFPEPVTVSWNSGALTSGVHTFPAVLQSSGLYSLSSVVTVPSSSLGTQTYICNVNHKPSNTKVDKKVEPKSCGS

SEQ ID NO: 25955 - protein, 118 aa, synthetic construct
  source 1..118: note = Description of Artificial Sequence: Synthetic polypeptide; note = VH of XENP021306
EVQLVQSGAEVKKPGATVKISCKASGFNIKDYYMHWVQQAPGKGLEWMGWIDPENGQTEYAPKFQGRVTITADTSTNTAYMELSSLRSEDTAVYYCYARGVRQALDYWGQGTLVTVSS

SEQ ID NO: 25956 - protein, 5 aa, synthetic construct
  source 1..5: note = Description of Artificial Sequence: Synthetic peptide; note = XENP021306 vhCDR1
DYYMH

SEQ ID NO: 25957 - protein, 17 aa, synthetic construct
  source 1..17: note = Description of Artificial Sequence: Synthetic peptide; note = XENP021306 vhCDR2
WIDPENGQTEYAPKFQG

SEQ ID NO: 25958 - protein, 9 aa, synthetic construct
  source 1..9: note = Description of Artificial Sequence: Synthetic peptide; note = XENP021306 vhCDR3
RGVRQALDY

SEQ ID NO: 25959 - protein, 214 aa, synthetic construct; identical to SEQ ID NO: 17250
  source 1..214: note = Description of Artificial Sequence: Synthetic polypeptide; note = XENP021306 2A11_H1.75_L2_Fab Light Chain

SEQ ID NO: 25960 - protein, 107 aa, synthetic construct; identical to SEQ ID NO: 17251
  source 1..107: note = Description of Artificial Sequence: Synthetic polypeptide; note = VL of XENP021306

SEQ ID NO: 25961 - protein, 11 aa, synthetic construct
  source 1..11: note = Description of Artificial Sequence: Synthetic peptide; note = XENP021306 vlCDR1
QASQDIGNYLN

SEQ ID NO: 25962 - protein, 7 aa, synthetic construct
  source 1..7: note = Description of Artificial Sequence: Synthetic peptide; note = XENP021306 vlCDR2
YTSRLHS

SEQ ID NO: 25963 - protein, 9 aa, synthetic construct
  source 1..9: note = Description of Artificial Sequence: Synthetic peptide; note = XENP021306 vlCDR3
QQGNTLPYT

SEQ ID NO: 25964 - protein, 223 aa, synthetic construct
  source 1..223: note = Description of Artificial Sequence: Synthetic polypeptide; note = XENP021307 2A11_H1.76_L2_Fab Heavy Chain
EVQLVQSGAEVKKPGATVKISCKASGFNIKDYYMHWVQQAPGKGLEWMGWIDPENGLTEYAPKFQGRVTITADTSTNTAYMELSSLRSEDTAVYYCYARGVRQALDYWGQGTLVTVSSASTKGPSVFPLAPSSKSTSGGTAALGCLVKDYFPEPVTVSWNSGALTSGVHTFPAVLQSSGLYSLSSVVTVPSSSLGTQTYICNVNHKPSNTKVDKKVEPKSCGS

SEQ ID NO: 25965 - protein, 118 aa, synthetic construct
  source 1..118: note = Description of Artificial Sequence: Synthetic polypeptide; note = VH of XENP021307
EVQLVQSGAEVKKPGATVKISCKASGFNIKDYYMHWVQQAPGKGLEWMGWIDPENGLTEYAPKFQGRVTITADTSTNTAYMELSSLRSEDTAVYYCYARGVRQALDYWGQGTLVTVSS

SEQ ID NO: 25966 - protein, 5 aa, synthetic construct
  source 1..5: note = Description of Artificial Sequence: Synthetic peptide; note = XENP021307 vhCDR1
DYYMH

SEQ ID NO: 25967 - protein, 17 aa, synthetic construct
  source 1..17: note = Description of Artificial Sequence: Synthetic peptide; note = XENP021307 vhCDR2
WIDPENGLTEYAPKFQG

SEQ ID NO: 25968 - protein, 9 aa, synthetic construct
  source 1..9: note = Description of Artificial Sequence: Synthetic peptide; note = XENP021307 vhCDR3
RGVRQALDY

SEQ ID NO: 25969 - protein, 214 aa, synthetic construct; identical to SEQ ID NO: 17250
  source 1..214: note = Description of Artificial Sequence: Synthetic polypeptide; note = XENP021307 2A11_H1.76_L2_Fab Light Chain

SEQ ID NO: 25970 - protein, 107 aa, synthetic construct; identical to SEQ ID NO: 17251
  source 1..107: note = Description of Artificial Sequence: Synthetic polypeptide; note = VL of XENP021307

SEQ ID NO: 25971 - protein, 11 aa, synthetic construct
  source 1..11: note = Description of Artificial Sequence: Synthetic peptide; note = XENP021307 vlCDR1
QASQDIGNYLN

SEQ ID NO: 25972 - protein, 7 aa, synthetic construct
  source 1..7: note = Description of Artificial Sequence: Synthetic peptide; note = XENP021307 vlCDR2
YTSRLHS

SEQ ID NO: 25973 - protein, 9 aa, synthetic construct
  source 1..9: note = Description of Artificial Sequence: Synthetic peptide; note = XENP021307 vlCDR3
QQGNTLPYT

SEQ ID NO: 25974 - protein, 223 aa, synthetic construct
  source 1..223: note = Description of Artificial Sequence: Synthetic polypeptide; note = XENP021308 2A11_H1.77_L2_Fab Heavy Chain
EVQLVQSGAEVKKPGATVKISCKASGFNIKDYYMHWVQQAPGKGLEWMGWIDPENGDTEYAPKFQGRVTITADTSTNTAYMELSSLRSEDTAVYYCNARGVRQALDYWGQGTLVTVSSASTKGPSVFPLAPSSKSTSGGTAALGCLVKDYFPEPVTVSWNSGALTSGVHTFPAVLQSSGLYSLSSVVTVPSSSLGTQTYICNVNHKPSNTKVDKKVEPKSCGS

SEQ ID NO: 25975 - protein, 118 aa, synthetic construct
  source 1..118: note = Description of Artificial Sequence: Synthetic polypeptide; note = VH of XENP021308
EVQLVQSGAEVKKPGATVKISCKASGFNIKDYYMHWVQQAPGKGLEWMGWIDPENGDTEYAPKFQGRVTITADTSTNTAYMELSSLRSEDTAVYYCNARGVRQALDYWGQGTLVTVSS

SEQ ID NO: 25976 - protein, 5 aa, synthetic construct
  source 1..5: note = Description of Artificial Sequence: Synthetic peptide; note = XENP021308 vhCDR1
DYYMH

SEQ ID NO: 25977 - protein, 17 aa, synthetic construct
  source 1..17: note = Description of Artificial Sequence: Synthetic peptide; note = XENP021308 vhCDR2
WIDPENGDTEYAPKFQG

SEQ ID NO: 25978 - protein, 9 aa, synthetic construct
  source 1..9: note = Description of Artificial Sequence: Synthetic peptide; note = XENP021308 vhCDR3
RGVRQALDY

SEQ ID NO: 25979 - protein, 214 aa, synthetic construct; identical to SEQ ID NO: 17250
  source 1..214: note = Description of Artificial Sequence: Synthetic polypeptide; note = XENP021308 2A11_H1.77_L2_Fab Light Chain

SEQ ID NO: 25980 - protein, 107 aa, synthetic construct; identical to SEQ ID NO: 17251
  source 1..107: note = Description of Artificial Sequence: Synthetic polypeptide; note = VL of XENP021308

SEQ ID NO: 25981 - protein, 11 aa, synthetic construct
  source 1..11: note = Description of Artificial Sequence: Synthetic peptide; note = XENP021308 vlCDR1
QASQDIGNYLN

SEQ ID NO: 25982 - protein, 7 aa, synthetic construct
  source 1..7: note = Description of Artificial Sequence: Synthetic peptide; note = XENP021308 vlCDR2
YTSRLHS

SEQ ID NO: 25983 - protein, 9 aa, synthetic construct
  source 1..9: note = Description of Artificial Sequence: Synthetic peptide; note = XENP021308 vlCDR3
QQGNTLPYT

SEQ ID NO: 25984 - protein, 223 aa, synthetic construct
  source 1..223: note = Description of Artificial Sequence: Synthetic polypeptide; note = XENP021309 2A11_H1.78_L2_Fab Heavy Chain
EVQLVQSGAEVKKPGATVKISCKASGFNIKDYYMHWVQQAPGKGLEWMGWIDPENGDTEYAPKFQGRVTITADTSTNTAYMELSSLRSEDTAVYYCQARGVRQALDYWGQGTLVTVSSASTKGPSVFPLAPSSKSTSGGTAALGCLVKDYFPEPVTVSWNSGALTSGVHTFPAVLQSSGLYSLSSVVTVPSSSLGTQTYICNVNHKPSNTKVDKKVEPKSCGS

SEQ ID NO: 25985 - protein, 118 aa, synthetic construct
  source 1..118: note = Description of Artificial Sequence: Synthetic polypeptide; note = VH of XENP021309
EVQLVQSGAEVKKPGATVKISCKASGFNIKDYYMHWVQQAPGKGLEWMGWIDPENGDTEYAPKFQGRVTITADTSTNTAYMELSSLRSEDTAVYYCQARGVRQALDYWGQGTLVTVSS

SEQ ID NO: 25986 - protein, 5 aa, synthetic construct
  source 1..5: note = Description of Artificial Sequence: Synthetic peptide; note = XENP021309 vhCDR1
DYYMH

SEQ ID NO: 25987 - protein, 17 aa, synthetic construct
  source 1..17: note = Description of Artificial Sequence: Synthetic peptide; note = XENP021309 vhCDR2
WIDPENGDTEYAPKFQG

SEQ ID NO: 25988 - protein, 9 aa, synthetic construct
  source 1..9: note = Description of Artificial Sequence: Synthetic peptide; note = XENP021309 vhCDR3
RGVRQALDY

SEQ ID NO: 25989 - protein, 214 aa, synthetic construct; identical to SEQ ID NO: 17250
  source 1..214: note = Description of Artificial Sequence: Synthetic polypeptide; note = XENP021309 2A11_H1.78_L2_Fab Light Chain

SEQ ID NO: 25990 - protein, 107 aa, synthetic construct; identical to SEQ ID NO: 17251
  source 1..107: note = Description of Artificial Sequence: Synthetic polypeptide; note = VL of XENP021309

SEQ ID NO: 25991 - protein, 11 aa, synthetic construct
  source 1..11: note = Description of Artificial Sequence: Synthetic peptide; note = XENP021309 vlCDR1
QASQDIGNYLN

SEQ ID NO: 25992 - protein, 7 aa, synthetic construct
  source 1..7: note = Description of Artificial Sequence: Synthetic peptide; note = XENP021309 vlCDR2
YTSRLHS

SEQ ID NO: 25993 - protein, 9 aa, synthetic construct
  source 1..9: note = Description of Artificial Sequence: Synthetic peptide; note = XENP021309 vlCDR3
QQGNTLPYT

SEQ ID NO: 25994 - protein, 223 aa, synthetic construct
  source 1..223: note = Description of Artificial Sequence: Synthetic polypeptide; note = XENP021310 2A11_H1.79_L2_Fab Heavy Chain
EVQLVQSGAEVKKPGATVKISCKASGFNIKDYYMHWVQQAPGKGLEWMGWIDPENGDTEYAPKFQGRVTITADTSTNTAYMELSSLRSEDTAVYYCYIRGVRQALDYWGQGTLVTVSSASTKGPSVFPLAPSSKSTSGGTAALGCLVKDYFPEPVTVSWNSGALTSGVHTFPAVLQSSGLYSLSSVVTVPSSSLGTQTYICNVNHKPSNTKVDKKVEPKSCGS

SEQ ID NO: 25995 - protein, 118 aa, synthetic construct
  source 1..118: note = Description of Artificial Sequence: Synthetic polypeptide; note = VH of XENP021310
EVQLVQSGAEVKKPGATVKISCKASGFNIKDYYMHWVQQAPGKGLEWMGWIDPENGDTEYAPKFQGRVTITADTSTNTAYMELSSLRSEDTAVYYCYIRGVRQALDYWGQGTLVTVSS

SEQ ID NO: 25996 - protein, 5 aa, synthetic construct
  source 1..5: note = Description of Artificial Sequence: Synthetic peptide; note = XENP021310 vhCDR1
DYYMH

SEQ ID NO: 25997 - protein, 17 aa, synthetic construct
  source 1..17: note = Description of Artificial Sequence: Synthetic peptide; note = XENP021310 vhCDR2
WIDPENGDTEYAPKFQG

SEQ ID NO: 25998 - protein, 9 aa, synthetic construct
  source 1..9: note = Description of Artificial Sequence: Synthetic peptide; note = XENP021310 vhCDR3
RGVRQALDY

SEQ ID NO: 25999 - protein, 214 aa, synthetic construct; identical to SEQ ID NO: 17250
  source 1..214: note = Description of Artificial Sequence: Synthetic polypeptide; note = XENP021310 2A11_H1.79_L2_Fab Light Chain

SEQ ID NO: 26000 - protein, 107 aa, synthetic construct; identical to SEQ ID NO: 17251
  source 1..107: note = Description of Artificial Sequence: Synthetic polypeptide; note = VL of XENP021310

SEQ ID NO: 26001 - protein, 11 aa, synthetic construct
  source 1..11: note = Description of Artificial Sequence: Synthetic peptide; note = XENP021310 vlCDR1
QASQDIGNYLN

SEQ ID NO: 26002 - protein, 7 aa, synthetic construct
  source 1..7: note = Description of Artificial Sequence: Synthetic peptide; note = XENP021310 vlCDR2
YTSRLHS

SEQ ID NO: 26003 - protein, 9 aa, synthetic construct
  source 1..9: note = Description of Artificial Sequence: Synthetic peptide; note = XENP021310 vlCDR3
QQGNTLPYT

SEQ ID NO: 26004 - protein, 223 aa, synthetic construct
  source 1..223: note = Description of Artificial Sequence: Synthetic polypeptide; note = XENP021311 2A11_H1.80_L2_Fab Heavy Chain
EVQLVQSGAEVKKPGATVKISCKASGFNIKDYYMHWVQQAPGKGLEWMGWIDPENGDTEYAPKFQGRVTITADTSTNTAYMELSSLRSEDTAVYYCYLRGVRQALDYWGQGTLVTVSSASTKGPSVFPLAPSSKSTSGGTAALGCLVKDYFPEPVTVSWNSGALTSGVHTFPAVLQSSGLYSLSSVVTVPSSSLGTQTYICNVNHKPSNTKVDKKVEPKSCGS

SEQ ID NO: 26005 - protein, 118 aa, synthetic construct
  source 1..118: note = Description of Artificial Sequence: Synthetic polypeptide; note = VH of XENP021311
EVQLVQSGAEVKKPGATVKISCKASGFNIKDYYMHWVQQAPGKGLEWMGWIDPENGDTEYAPKFQGRVTITADTSTNTAYMELSSLRSEDTAVYYCYLRGVRQALDYWGQGTLVTVSS

SEQ ID NO: 26006 - protein, 5 aa, synthetic construct
  source 1..5: note = Description of Artificial Sequence: Synthetic peptide; note = XENP021311 vhCDR1
DYYMH

SEQ ID NO: 26007 - protein, 17 aa, synthetic construct
  source 1..17: note = Description of Artificial Sequence: Synthetic peptide; note = XENP021311 vhCDR2
WIDPENGDTEYAPKFQG

SEQ ID NO: 26008 - protein, 9 aa, synthetic construct
  source 1..9: note = Description of Artificial Sequence: Synthetic peptide; note = XENP021311 vhCDR3
RGVRQALDY

SEQ ID NO: 26009 - protein, 214 aa, synthetic construct; identical to SEQ ID NO: 17250
  source 1..214: note = Description of Artificial Sequence: Synthetic polypeptide; note = XENP021311 2A11_H1.80_L2_Fab Light Chain

SEQ ID NO: 26010 - protein, 107 aa, synthetic construct; identical to SEQ ID NO: 17251
  source 1..107: note = Description of Artificial Sequence: Synthetic polypeptide; note = VL of XENP021311

SEQ ID NO: 26011 - protein, 11 aa, synthetic construct
  source 1..11: note = Description of Artificial Sequence: Synthetic peptide; note = XENP021311 vlCDR1
QASQDIGNYLN

SEQ ID NO: 26012 - protein, 7 aa, synthetic construct
  source 1..7: note = Description of Artificial Sequence: Synthetic peptide; note = XENP021311 vlCDR2
YTSRLHS

SEQ ID NO: 26013 - protein, 9 aa, synthetic construct
  source 1..9: note = Description of Artificial Sequence: Synthetic peptide; note = XENP021311 vlCDR3
QQGNTLPYT

SEQ ID NO: 26014 - protein, 223 aa, synthetic construct
  source 1..223: note = Description of Artificial Sequence: Synthetic polypeptide; note = XENP021312 2A11_H1.81_L2_Fab Heavy Chain
EVQLVQSGAEVKKPGATVKISCKASGFNIKDYYMHWVQQAPGKGLEWMGWIDPENGDTEYAPKFQGRVTITADTSTNTAYMELSSLRSEDTAVYYCYVRGVRQALDYWGQGTLVTVSSASTKGPSVFPLAPSSKSTSGGTAALGCLVKDYFPEPVTVSWNSGALTSGVHTFPAVLQSSGLYSLSSVVTVPSSSLGTQTYICNVNHKPSNTKVDKKVEPKSCGS

SEQ ID NO: 26015 - protein, 118 aa, synthetic construct
  source 1..118: note = Description of Artificial Sequence: Synthetic polypeptide; note = VH of XENP021312
EVQLVQSGAEVKKPGATVKISCKASGFNIKDYYMHWVQQAPGKGLEWMGWIDPENGDTEYAPKFQGRVTITADTSTNTAYMELSSLRSEDTAVYYCYVRGVRQALDYWGQGTLVTVSS

SEQ ID NO: 26016 - protein, 5 aa, synthetic construct
  source 1..5: note = Description of Artificial Sequence: Synthetic peptide; note = XENP021312 vhCDR1
DYYMH

SEQ ID NO: 26017 - protein, 17 aa, synthetic construct
  source 1..17: note = Description of Artificial Sequence: Synthetic peptide; note = XENP021312 vhCDR2
WIDPENGDTEYAPKFQG

SEQ ID NO: 26018 - protein, 9 aa, synthetic construct
  source 1..9: note = Description of Artificial Sequence: Synthetic peptide; note = XENP021312 vhCDR3
RGVRQALDY

SEQ ID NO: 26019 - protein, 214 aa, synthetic construct; identical to SEQ ID NO: 17250
  source 1..214: note = Description of Artificial Sequence: Synthetic polypeptide; note = XENP021312 2A11_H1.81_L2_Fab Light Chain

SEQ ID NO: 26020 - protein, 107 aa, synthetic construct; identical to SEQ ID NO: 17251
  source 1..107: note = Description of Artificial Sequence: Synthetic polypeptide; note = VL of XENP021312

SEQ ID NO: 26021 - protein, 11 aa, synthetic construct
  source 1..11: note = Description of Artificial Sequence: Synthetic peptide; note = XENP021312 vlCDR1
QASQDIGNYLN

SEQ ID NO: 26022 - protein, 7 aa, synthetic construct
  source 1..7: note = Description of Artificial Sequence: Synthetic peptide; note = XENP021312 vlCDR2
YTSRLHS

SEQ ID NO: 26023 - protein, 9 aa, synthetic construct
  source 1..9: note = Description of Artificial Sequence: Synthetic peptide; note = XENP021312 vlCDR3
QQGNTLPYT

SEQ ID NO: 26024 - protein, 223 aa, synthetic construct
  source 1..223: note = Description of Artificial Sequence: Synthetic polypeptide; note = XENP021313 2A11_H1.82_L2_Fab Heavy Chain
EVQLVQSGAEVKKPGATVKISCKASGFNIKDYYMHWVQQAPGKGLEWMGWIDPENGDTEYAPKFQGRVTITADTSTNTAYMELSSLRSEDTAVYYCYAKGVRQALDYWGQGTLVTVSSASTKGPSVFPLAPSSKSTSGGTAALGCLVKDYFPEPVTVSWNSGALTSGVHTFPAVLQSSGLYSLSSVVTVPSSSLGTQTYICNVNHKPSNTKVDKKVEPKSCGS

SEQ ID NO: 26025 - protein, 118 aa, synthetic construct
  source 1..118: note = Description of Artificial Sequence: Synthetic polypeptide; note = VH of XENP021313
EVQLVQSGAEVKKPGATVKISCKASGFNIKDYYMHWVQQAPGKGLEWMGWIDPENGDTEYAPKFQGRVTITADTSTNTAYMELSSLRSEDTAVYYCYAKGVRQALDYWGQGTLVTVSS

SEQ ID NO: 26026 - protein, 5 aa, synthetic construct
  source 1..5: note = Description of Artificial Sequence: Synthetic peptide; note = XENP021313 vhCDR1
DYYMH

SEQ ID NO: 26027 - protein, 17 aa, synthetic construct
  source 1..17: note = Description of Artificial Sequence: Synthetic peptide; note = XENP021313 vhCDR2
WIDPENGDTEYAPKFQG

SEQ ID NO: 26028 - protein, 9 aa, synthetic construct
  source 1..9: note = Description of Artificial Sequence: Synthetic peptide; note = XENP021313 vhCDR3
KGVRQALDY

SEQ ID NO: 26029 - protein, 214 aa, synthetic construct; identical to SEQ ID NO: 17250
  source 1..214: note = Description of Artificial Sequence: Synthetic polypeptide; note = XENP021313 2A11_H1.82_L2_Fab Light Chain

SEQ ID NO: 26030 - protein, 107 aa, synthetic construct; identical to SEQ ID NO: 17251
  source 1..107: note = Description of Artificial Sequence: Synthetic polypeptide; note = VL of XENP021313

SEQ ID NO: 26031 - protein, 11 aa, synthetic construct
  source 1..11: note = Description of Artificial Sequence: Synthetic peptide; note = XENP021313 vlCDR1
QASQDIGNYLN

SEQ ID NO: 26032 - protein, 7 aa, synthetic construct
  source 1..7: note = Description of Artificial Sequence: Synthetic peptide; note = XENP021313 vlCDR2
YTSRLHS

SEQ ID NO: 26033 - protein, 9 aa, synthetic construct
  source 1..9: note = Description of Artificial Sequence: Synthetic peptide; note = XENP021313 vlCDR3
QQGNTLPYT

SEQ ID NO: 26034 - protein, 223 aa, synthetic construct
  source 1..223: note = Description of Artificial Sequence: Synthetic polypeptide; note = XENP021314 2A11_H1.83_L2_Fab Heavy Chain
EVQLVQSGAEVKKPGATVKISCKASGFNIKDYYMHWVQQAPGKGLEWMGWIDPENGDTEYAPKFQGRVTITADTSTNTAYMELSSLRSEDTAVYYCYAEGVRQALDYWGQGTLVTVSSASTKGPSVFPLAPSSKSTSGGTAALGCLVKDYFPEPVTVSWNSGALTSGVHTFPAVLQSSGLYSLSSVVTVPSSSLGTQTYICNVNHKPSNTKVDKKVEPKSCGS

SEQ ID NO: 26035 - protein, 118 aa, synthetic construct
  source 1..118: note = Description of Artificial Sequence: Synthetic polypeptide; note = VH of XENP021314
EVQLVQSGAEVKKPGATVKISCKASGFNIKDYYMHWVQQAPGKGLEWMGWIDPENGDTEYAPKFQGRVTITADTSTNTAYMELSSLRSEDTAVYYCYAEGVRQALDYWGQGTLVTVSS

SEQ ID NO: 26036 - protein, 5 aa, synthetic construct
  source 1..5: note = Description of Artificial Sequence: Synthetic peptide; note = XENP021314 vhCDR1
DYYMH

SEQ ID NO: 26037 - protein, 17 aa, synthetic construct
  source 1..17: note = Description of Artificial Sequence: Synthetic peptide; note = XENP021314 vhCDR2
WIDPENGDTEYAPKFQG

SEQ ID NO: 26038 - protein, 9 aa, synthetic construct
  source 1..9: note = Description of Artificial Sequence: Synthetic peptide; note = XENP021314 vhCDR3
EGVRQALDY

SEQ ID NO: 26039 - protein, 214 aa, synthetic construct; identical to SEQ ID NO: 17250
  source 1..214: note = Description of Artificial Sequence: Synthetic polypeptide; note = XENP021314 2A11_H1.83_L2_Fab Light Chain

SEQ ID NO: 26040 - protein, 107 aa, synthetic construct; identical to SEQ ID NO: 17251
  source 1..107: note = Description of Artificial Sequence: Synthetic polypeptide; note = VL of XENP021314

SEQ ID NO: 26041 - protein, 11 aa, synthetic construct
  source 1..11: note = Description of Artificial Sequence: Synthetic peptide; note = XENP021314 vlCDR1
QASQDIGNYLN

SEQ ID NO: 26042 - protein, 7 aa, synthetic construct
  source 1..7: note = Description of Artificial Sequence: Synthetic peptide; note = XENP021314 vlCDR2
YTSRLHS

SEQ ID NO: 26043 - protein, 9 aa, synthetic construct
  source 1..9: note = Description of Artificial Sequence: Synthetic peptide; note = XENP021314 vlCDR3
QQGNTLPYT

SEQ ID NO: 26044 - protein, 223 aa, synthetic construct
  source 1..223: note = Description of Artificial Sequence: Synthetic polypeptide; note = XENP021315 2A11_H1.84_L2_Fab Heavy Chain
EVQLVQSGAEVKKPGATVKISCKASGFNIKDYYMHWVQQAPGKGLEWMGWIDPENGDTEYAPKFQGRVTITADTSTNTAYMELSSLRSEDTAVYYCYAYGVRQALDYWGQGTLVTVSSASTKGPSVFPLAPSSKSTSGGTAALGCLVKDYFPEPVTVSWNSGALTSGVHTFPAVLQSSGLYSLSSVVTVPSSSLGTQTYICNVNHKPSNTKVDKKVEPKSCGS

SEQ ID NO: 26045 - protein, 118 aa, synthetic construct
  source 1..118: note = Description of Artificial Sequence: Synthetic polypeptide; note = VH of XENP021315
EVQLVQSGAEVKKPGATVKISCKASGFNIKDYYMHWVQQAPGKGLEWMGWIDPENGDTEYAPKFQGRVTITADTSTNTAYMELSSLRSEDTAVYYCYAYGVRQALDYWGQGTLVTVSS

SEQ ID NO: 26046 - protein, 5 aa, synthetic construct
  source 1..5: note = Description of Artificial Sequence: Synthetic peptide; note = XENP021315 vhCDR1
DYYMH

SEQ ID NO: 26047 - protein, 17 aa, synthetic construct
  source 1..17: note = Description of Artificial Sequence: Synthetic peptide; note = XENP021315 vhCDR2
WIDPENGDTEYAPKFQG

SEQ ID NO: 26048 - protein, 9 aa, synthetic construct
  source 1..9: note = Description of Artificial Sequence: Synthetic peptide; note = XENP021315 vhCDR3
YGVRQALDY

SEQ ID NO: 26049 - protein, 214 aa, synthetic construct; identical to SEQ ID NO: 17250
  source 1..214: note = Description of Artificial Sequence: Synthetic polypeptide; note = XENP021315 2A11_H1.84_L2_Fab Light Chain

SEQ ID NO: 26050 - protein, 107 aa, synthetic construct; identical to SEQ ID NO: 17251
  source 1..107: note = Description of Artificial Sequence: Synthetic polypeptide; note = VL of XENP021315

SEQ ID NO: 26051 - protein, 11 aa, synthetic construct
  source 1..11: note = Description of Artificial Sequence: Synthetic peptide; note = XENP021315 vlCDR1
QASQDIGNYLN

SEQ ID NO: 26052 - protein, 7 aa, synthetic construct
  source 1..7: note = Description of Artificial Sequence: Synthetic peptide; note = XENP021315 vlCDR2
YTSRLHS

SEQ ID NO: 26053 - protein, 9 aa, synthetic construct
  source 1..9: note = Description of Artificial Sequence: Synthetic peptide; note = XENP021315 vlCDR3
QQGNTLPYT

SEQ ID NO: 26054 - protein, 223 aa, synthetic construct
  source 1..223: note = Description of Artificial Sequence: Synthetic polypeptide; note = XENP021316 2A11_H1.85_L2_Fab Heavy Chain
EVQLVQSGAEVKKPGATVKISCKASGFNIKDYYMHWVQQAPGKGLEWMGWIDPENGDTEYAPKFQGRVTITADTSTNTAYMELSSLRSEDTAVYYCYAQGVRQALDYWGQGTLVTVSSASTKGPSVFPLAPSSKSTSGGTAALGCLVKDYFPEPVTVSWNSGALTSGVHTFPAVLQSSGLYSLSSVVTVPSSSLGTQTYICNVNHKPSNTKVDKKVEPKSCGS

SEQ ID NO: 26055 - protein, 118 aa, synthetic construct
  source 1..118: note = Description of Artificial Sequence: Synthetic polypeptide; note = VH of XENP021316
EVQLVQSGAEVKKPGATVKISCKASGFNIKDYYMHWVQQAPGKGLEWMGWIDPENGDTEYAPKFQGRVTITADTSTNTAYMELSSLRSEDTAVYYCYAQGVRQALDYWGQGTLVTVSS

SEQ ID NO: 26056 - protein, 5 aa, synthetic construct
  source 1..5: note = Description of Artificial Sequence: Synthetic peptide; note = XENP021316 vhCDR1
DYYMH

SEQ ID NO: 26057 - protein, 17 aa, synthetic construct
  source 1..17: note = Description of Artificial Sequence: Synthetic peptide; note = XENP021316 vhCDR2
WIDPENGDTEYAPKFQG

SEQ ID NO: 26058 - protein, 9 aa, synthetic construct
  source 1..9: note = Description of Artificial Sequence: Synthetic peptide; note = XENP021316 vhCDR3
QGVRQALDY

SEQ ID NO: 26059 - protein, 214 aa, synthetic construct; identical to SEQ ID NO: 17250
  source 1..214: note = Description of Artificial Sequence: Synthetic polypeptide; note = XENP021316 2A11_H1.85_L2_Fab Light Chain

SEQ ID NO: 26060 - protein, 107 aa, synthetic construct; identical to SEQ ID NO: 17251
  source 1..107: note = Description of Artificial Sequence: Synthetic polypeptide; note = VL of XENP021316

SEQ ID NO: 26061 - protein, 11 aa, synthetic construct
  source 1..11: note = Description of Artificial Sequence: Synthetic peptide; note = XENP021316 vlCDR1
QASQDIGNYLN

SEQ ID NO: 26062 - protein, 7 aa, synthetic construct
  source 1..7: note = Description of Artificial Sequence: Synthetic peptide; note = XENP021316 vlCDR2
YTSRLHS

SEQ ID NO: 26063 - protein, 9 aa, synthetic construct
  source 1..9: note = Description of Artificial Sequence: Synthetic peptide; note = XENP021316 vlCDR3
QQGNTLPYT

SEQ ID NO: 26064 - protein, 223 aa, synthetic construct
  source 1..223: note = Description of Artificial Sequence: Synthetic polypeptide; note = XENP021317 2A11_H1.86_L2_Fab Heavy Chain
EVQLVQSGAEVKKPGATVKISCKASGFNIKDYYMHWVQQAPGKGLEWMGWIDPENGDTEYAPKFQGRVTITADTSTNTAYMELSSLRSEDTAVYYCYATGVRQALDYWGQGTLVTVSSASTKGPSVFPLAPSSKSTSGGTAALGCLVKDYFPEPVTVSWNSGALTSGVHTFPAVLQSSGLYSLSSVVTVPSSSLGTQTYICNVNHKPSNTKVDKKVEPKSCGS

SEQ ID NO: 26065 - protein, 118 aa, synthetic construct
  source 1..118: note = Description of Artificial Sequence: Synthetic polypeptide; note = VH of XENP021317
EVQLVQSGAEVKKPGATVKISCKASGFNIKDYYMHWVQQAPGKGLEWMGWIDPENGDTEYAPKFQGRVTITADTSTNTAYMELSSLRSEDTAVYYCYATGVRQALDYWGQGTLVTVSS

SEQ ID NO: 26066 - protein, 5 aa, synthetic construct
  source 1..5: note = Description of Artificial Sequence: Synthetic peptide; note = XENP021317 vhCDR1
DYYMH

SEQ ID NO: 26067 - protein, 17 aa, synthetic construct
  source 1..17: note = Description of Artificial Sequence: Synthetic peptide; note = XENP021317 vhCDR2
WIDPENGDTEYAPKFQG

SEQ ID NO: 26068 - protein, 9 aa, synthetic construct
  source 1..9: note = Description of Artificial Sequence: Synthetic peptide; note = XENP021317 vhCDR3
TGVRQALDY

SEQ ID NO: 26069 - protein, 214 aa, synthetic construct; identical to SEQ ID NO: 17250
  source 1..214: note = Description of Artificial Sequence: Synthetic polypeptide; note = XENP021317 2A11_H1.86_L2_Fab Light Chain

SEQ ID NO: 26070 - protein, 107 aa, synthetic construct; identical to SEQ ID NO: 17251
  source 1..107: note = Description of Artificial Sequence: Synthetic polypeptide; note = VL of XENP021317

SEQ ID NO: 26071 - protein, 11 aa, synthetic construct
  source 1..11: note = Description of Artificial Sequence: Synthetic peptide; note = XENP021317 vlCDR1
QASQDIGNYLN

SEQ ID NO: 26072 - protein, 7 aa, synthetic construct
  source 1..7: note = Description of Artificial Sequence: Synthetic peptide; note = XENP021317 vlCDR2
YTSRLHS

SEQ ID NO: 26073 - protein, 9 aa, synthetic construct
  source 1..9: note = Description of Artificial Sequence: Synthetic peptide; note = XENP021317 vlCDR3
QQGNTLPYT

SEQ ID NO: 26074 - protein, 223 aa, synthetic construct
  source 1..223: note = Description of Artificial Sequence: Synthetic polypeptide; note = XENP021318 2A11_H1.87_L2_Fab Heavy Chain
EVQLVQSGAEVKKPGATVKISCKASGFNIKDYYMHWVQQAPGKGLEWMGWIDPENGDTEYAPKFQGRVTITADTSTNTAYMELSSLRSEDTAVYYCYAAGVRQALDYWGQGTLVTVSSASTKGPSVFPLAPSSKSTSGGTAALGCLVKDYFPEPVTVSWNSGALTSGVHTFPAVLQSSGLYSLSSVVTVPSSSLGTQTYICNVNHKPSNTKVDKKVEPKSCGS

SEQ ID NO: 26075 - protein, 118 aa, synthetic construct
  source 1..118: note = Description of Artificial Sequence: Synthetic polypeptide; note = VH of XENP021318
EVQLVQSGAEVKKPGATVKISCKASGFNIKDYYMHWVQQAPGKGLEWMGWIDPENGDTEYAPKFQGRVTITADTSTNTAYMELSSLRSEDTAVYYCYAAGVRQALDYWGQGTLVTVSS

SEQ ID NO: 26076 - protein, 5 aa, synthetic construct
  source 1..5: note = Description of Artificial Sequence: Synthetic peptide; note = XENP021318 vhCDR1
DYYMH

SEQ ID NO: 26077 - protein, 17 aa, synthetic construct
  source 1..17: note = Description of Artificial Sequence: Synthetic peptide; note = XENP021318 vhCDR2
WIDPENGDTEYAPKFQG

SEQ ID NO: 26078 - protein, 9 aa, synthetic construct
  source 1..9: note = Description of Artificial Sequence: Synthetic peptide; note = XENP021318 vhCDR3
AGVRQALDY

SEQ ID NO: 26079 - protein, 214 aa, synthetic construct; identical to SEQ ID NO: 17250
  source 1..214: note = Description of Artificial Sequence: Synthetic polypeptide; note = XENP021318 2A11_H1.87_L2_Fab Light Chain

SEQ ID NO: 26080 - protein, 107 aa, synthetic construct; identical to SEQ ID NO: 17251
  source 1..107: note = Description of Artificial Sequence: Synthetic polypeptide; note = VL of XENP021318

SEQ ID NO: 26081 - protein, 11 aa, synthetic construct
  source 1..11: note = Description of Artificial Sequence: Synthetic peptide; note = XENP021318 vlCDR1
QASQDIGNYLN

SEQ ID NO: 26082 - protein, 7 aa, synthetic construct
  source 1..7: note = Description of Artificial Sequence: Synthetic peptide; note = XENP021318 vlCDR2
YTSRLHS

SEQ ID NO: 26083 - protein, 9 aa, synthetic construct
  source 1..9: note = Description of Artificial Sequence: Synthetic peptide; note = XENP021318 vlCDR3
QQGNTLPYT

SEQ ID NO: 26084 - protein, 223 aa, synthetic construct
  source 1..223: note = Description of Artificial Sequence: Synthetic polypeptide; note = XENP021319 2A11_H1.88_L2_Fab Heavy Chain
EVQLVQSGAEVKKPGATVKISCKASGFNIKDYYMHWVQQAPGKGLEWMGWIDPENGDTEYAPKFQGRVTITADTSTNTAYMELSSLRSEDTAVYYCYARPVRQALDYWGQGTLVTVSSASTKGPSVFPLAPSSKSTSGGTAALGCLVKDYFPEPVTVSWNSGALTSGVHTFPAVLQSSGLYSLSSVVTVPSSSLGTQTYICNVNHKPSNTKVDKKVEPKSCGS

SEQ ID NO: 26085 - protein, 118 aa, synthetic construct
  source 1..118: note = Description of Artificial Sequence: Synthetic polypeptide; note = VH of XENP021319
EVQLVQSGAEVKKPGATVKISCKASGFNIKDYYMHWVQQAPGKGLEWMGWIDPENGDTEYAPKFQGRVTITADTSTNTAYMELSSLRSEDTAVYYCYARPVRQALDYWGQGTLVTVSS

SEQ ID NO: 26086 - protein, 5 aa, synthetic construct
  source 1..5: note = Description of Artificial Sequence: Synthetic peptide; note = XENP021319 vhCDR1
DYYMH

SEQ ID NO: 26087 - protein, 17 aa, synthetic construct
  source 1..17: note = Description of Artificial Sequence: Synthetic peptide; note = XENP021319 vhCDR2
WIDPENGDTEYAPKFQG

SEQ ID NO: 26088 - protein, 9 aa, synthetic construct
  source 1..9: note = Description of Artificial Sequence: Synthetic peptide; note = XENP021319 vhCDR3
RPVRQALDY

SEQ ID NO: 26089 - protein, 214 aa, synthetic construct; identical to SEQ ID NO: 17250
  source 1..214: note = Description of Artificial Sequence: Synthetic polypeptide; note = XENP021319 2A11_H1.88_L2_Fab Light Chain

SEQ ID NO: 26090 - protein, 107 aa, synthetic construct; identical to SEQ ID NO: 17251
  source 1..107: note = Description of Artificial Sequence: Synthetic polypeptide; note = VL of XENP021319

SEQ ID NO: 26091 - protein, 11 aa, synthetic construct
  source 1..11: note = Description of Artificial Sequence: Synthetic peptide; note = XENP021319 vlCDR1
QASQDIGNYLN

SEQ ID NO: 26092 - protein, 7 aa, synthetic construct
  source 1..7: note = Description of Artificial Sequence: Synthetic peptide; note = XENP021319 vlCDR2
YTSRLHS

SEQ ID NO: 26093 - protein, 9 aa, synthetic construct
  source 1..9: note = Description of Artificial Sequence: Synthetic peptide; note = XENP021319 vlCDR3
QQGNTLPYT

SEQ ID NO: 26094 - protein, 223 aa, synthetic construct
  source 1..223: note = Description of Artificial Sequence: Synthetic polypeptide; note = XENP021320 2A11_H1.89_L2_Fab Heavy Chain
EVQLVQSGAEVKKPGATVKISCKASGFNIKDYYMHWVQQAPGKGLEWMGWIDPENGDTEYAPKFQGRVTITADTSTNTAYMELSSLRSEDTAVYYCYARAVRQALDYWGQGTLVTVSSASTKGPSVFPLAPSSKSTSGGTAALGCLVKDYFPEPVTVSWNSGALTSGVHTFPAVLQSSGLYSLSSVVTVPSSSLGTQTYICNVNHKPSNTKVDKKVEPKSCGS

SEQ ID NO: 26095 - protein, 118 aa, synthetic construct
  source 1..118: note = Description of Artificial Sequence: Synthetic polypeptide; note = VH of XENP021320
EVQLVQSGAEVKKPGATVKISCKASGFNIKDYYMHWVQQAPGKGLEWMGWIDPENGDTEYAPKFQGRVTITADTSTNTAYMELSSLRSEDTAVYYCYARAVRQALDYWGQGTLVTVSS

SEQ ID NO: 26096 - protein, 5 aa, synthetic construct
  source 1..5: note = Description of Artificial Sequence: Synthetic peptide; note = XENP021320 vhCDR1
DYYMH

SEQ ID NO: 26097 - protein, 17 aa, synthetic construct
  source 1..17: note = Description of Artificial Sequence: Synthetic peptide; note = XENP021320 vhCDR2
WIDPENGDTEYAPKFQG

SEQ ID NO: 26098 - protein, 9 aa, synthetic construct
  source 1..9: note = Description of Artificial Sequence: Synthetic peptide; note = XENP021320 vhCDR3
RAVRQALDY

SEQ ID NO: 26099 - protein, 214 aa, synthetic construct; identical to SEQ ID NO: 17250
  source 1..214: note = Description of Artificial Sequence: Synthetic polypeptide; note = XENP021320 2A11_H1.89_L2_Fab Light Chain

SEQ ID NO: 26100 - protein, 107 aa, synthetic construct; identical to SEQ ID NO: 17251
  source 1..107: note = Description of Artificial Sequence: Synthetic polypeptide; note = VL of XENP021320

SEQ ID NO: 26101 - protein, 11 aa, synthetic construct
  source 1..11: note = Description of Artificial Sequence: Synthetic peptide; note = XENP021320 vlCDR1
QASQDIGNYLN

SEQ ID NO: 26102 - protein, 7 aa, synthetic construct
  source 1..7: note = Description of Artificial Sequence: Synthetic peptide; note = XENP021320 vlCDR2
YTSRLHS

SEQ ID NO: 26103 - protein, 9 aa, synthetic construct
  source 1..9: note = Description of Artificial Sequence: Synthetic peptide; note = XENP021320 vlCDR3
QQGNTLPYT

SEQ ID NO: 26104 - protein, 223 aa, synthetic construct
  source 1..223: note = Description of Artificial Sequence: Synthetic polypeptide; note = XENP021321 2A11_H1.90_L2_Fab Heavy Chain
EVQLVQSGAEVKKPGATVKISCKASGFNIKDYYMHWVQQAPGKGLEWMGWIDPENGDTEYAPKFQGRVTITADTSTNTAYMELSSLRSEDTAVYYCYARSVRQALDYWGQGTLVTVSSASTKGPSVFPLAPSSKSTSGGTAALGCLVKDYFPEPVTVSWNSGALTSGVHTFPAVLQSSGLYSLSSVVTVPSSSLGTQTYICNVNHKPSNTKVDKKVEPKSCGS

SEQ ID NO: 26105 - protein, 118 aa, synthetic construct
  source 1..118: note = Description of Artificial Sequence: Synthetic polypeptide; note = VH of XENP021321
EVQLVQSGAEVKKPGATVKISCKASGFNIKDYYMHWVQQAPGKGLEWMGWIDPENGDTEYAPKFQGRVTITADTSTNTAYMELSSLRSEDTAVYYCYARSVRQALDYWGQGTLVTVSS

SEQ ID NO: 26106 - protein, 5 aa, synthetic construct
  source 1..5: note = Description of Artificial Sequence: Synthetic peptide; note = XENP021321 vhCDR1
DYYMH

SEQ ID NO: 26107 - protein, 17 aa, synthetic construct
  source 1..17: note = Description of Artificial Sequence: Synthetic peptide; note = XENP021321 vhCDR2
WIDPENGDTEYAPKFQG

SEQ ID NO: 26108 - protein, 9 aa, synthetic construct
  source 1..9: note = Description of Artificial Sequence: Synthetic peptide; note = XENP021321 vhCDR3
RSVRQALDY

SEQ ID NO: 26109 - protein, 214 aa, synthetic construct; identical to SEQ ID NO: 17250
  source 1..214: note = Description of Artificial Sequence: Synthetic polypeptide; note = XENP021321 2A11_H1.90_L2_Fab Light Chain

SEQ ID NO: 26110 - protein, 107 aa, synthetic construct; identical to SEQ ID NO: 17251
  source 1..107: note = Description of Artificial Sequence: Synthetic polypeptide; note = VL of XENP021321

SEQ ID NO: 26111 - protein, 11 aa, synthetic construct
  source 1..11: note = Description of Artificial Sequence: Synthetic peptide; note = XENP021321 vlCDR1
QASQDIGNYLN

SEQ ID NO: 26112 - protein, 7 aa, synthetic construct
  source 1..7: note = Description of Artificial Sequence: Synthetic peptide; note = XENP021321 vlCDR2
YTSRLHS

SEQ ID NO: 26113 - protein, 9 aa, synthetic construct
  source 1..9: note = Description of Artificial Sequence: Synthetic peptide; note = XENP021321 vlCDR3
QQGNTLPYT

SEQ ID NO: 26114 - protein, 223 aa, synthetic construct
  source 1..223: note = Description of Artificial Sequence: Synthetic polypeptide; note = XENP021322 2A11_H1.91_L2_Fab Heavy Chain
EVQLVQSGAEVKKPGATVKISCKASGFNIKDYYMHWVQQAPGKGLEWMGWIDPENGDTEYAPKFQGRVTITADTSTNTAYMELSSLRSEDTAVYYCYARGTRQALDYWGQGTLVTVSSASTKGPSVFPLAPSSKSTSGGTAALGCLVKDYFPEPVTVSWNSGALTSGVHTFPAVLQSSGLYSLSSVVTVPSSSLGTQTYICNVNHKPSNTKVDKKVEPKSCGS

SEQ ID NO: 26115 - protein, 118 aa, synthetic construct
  source 1..118: note = Description of Artificial Sequence: Synthetic polypeptide; note = VH of XENP021322
EVQLVQSGAEVKKPGATVKISCKASGFNIKDYYMHWVQQAPGKGLEWMGWIDPENGDTEYAPKFQGRVTITADTSTNTAYMELSSLRSEDTAVYYCYARGTRQALDYWGQGTLVTVSS

SEQ ID NO: 26116 - protein, 5 aa, synthetic construct
  source 1..5: note = Description of Artificial Sequence: Synthetic peptide; note = XENP021322 vhCDR1
DYYMH

SEQ ID NO: 26117 - protein, 17 aa, synthetic construct
  source 1..17: note = Description of Artificial Sequence: Synthetic peptide; note = XENP021322 vhCDR2
WIDPENGDTEYAPKFQG

SEQ ID NO: 26118 - protein, 9 aa, synthetic construct
  source 1..9: note = Description of Artificial Sequence: Synthetic peptide; note = XENP021322 vhCDR3
RGTRQALDY

SEQ ID NO: 26119 - protein, 214 aa, synthetic construct; identical to SEQ ID NO: 17250
  source 1..214: note = Description of Artificial Sequence: Synthetic polypeptide; note = XENP021322 2A11_H1.91_L2_Fab Light Chain

SEQ ID NO: 26120 - protein, 107 aa, synthetic construct; identical to SEQ ID NO: 17251
  source 1..107: note = Description of Artificial Sequence: Synthetic polypeptide; note = VL of XENP021322

SEQ ID NO: 26121 - protein, 11 aa, synthetic construct
  source 1..11: note = Description of Artificial Sequence: Synthetic peptide; note = XENP021322 vlCDR1
QASQDIGNYLN

SEQ ID NO: 26122 - protein, 7 aa, synthetic construct
  source 1..7: note = Description of Artificial Sequence: Synthetic peptide; note = XENP021322 vlCDR2
YTSRLHS

SEQ ID NO: 26123 - protein, 9 aa, synthetic construct
  source 1..9: note = Description of Artificial Sequence: Synthetic peptide; note = XENP021322 vlCDR3
QQGNTLPYT

SEQ ID NO: 26124 - protein, 223 aa, synthetic construct
  source 1..223: note = Description of Artificial Sequence: Synthetic polypeptide; note = XENP021323 2A11_H1.92_L2_Fab Heavy Chain
EVQLVQSGAEVKKPGATVKISCKASGFNIKDYYMHWVQQAPGKGLEWMGWIDPENGDTEYAPKFQGRVTITADTSTNTAYMELSSLRSEDTAVYYCYARGIRQALDYWGQGTLVTVSSASTKGPSVFPLAPSSKSTSGGTAALGCLVKDYFPEPVTVSWNSGALTSGVHTFPAVLQSSGLYSLSSVVTVPSSSLGTQTYICNVNHKPSNTKVDKKVEPKSCGS

SEQ ID NO: 26125 - protein, 118 aa, synthetic construct
  source 1..118: note = Description of Artificial Sequence: Synthetic polypeptide; note = VH of XENP021323
EVQLVQSGAEVKKPGATVKISCKASGFNIKDYYMHWVQQAPGKGLEWMGWIDPENGDTEYAPKFQGRVTITADTSTNTAYMELSSLRSEDTAVYYCYARGIRQALDYWGQGTLVTVSS

SEQ ID NO: 26126 - protein, 5 aa, synthetic construct
  source 1..5: note = Description of Artificial Sequence: Synthetic peptide; note = XENP021323 vhCDR1
DYYMH

SEQ ID NO: 26127 - protein, 17 aa, synthetic construct
  source 1..17: note = Description of Artificial Sequence: Synthetic peptide; note = XENP021323 vhCDR2
WIDPENGDTEYAPKFQG

SEQ ID NO: 26128 - protein, 9 aa, synthetic construct
  source 1..9: note = Description of Artificial Sequence: Synthetic peptide; note = XENP021323 vhCDR3
RGIRQALDY

SEQ ID NO: 26129 - protein, 214 aa, synthetic construct; identical to SEQ ID NO: 17250
  source 1..214: note = Description of Artificial Sequence: Synthetic polypeptide; note = XENP021323 2A11_H1.92_L2_Fab Light Chain

SEQ ID NO: 26130 - protein, 107 aa, synthetic construct; identical to SEQ ID NO: 17251
  source 1..107: note = Description of Artificial Sequence: Synthetic polypeptide; note = VL of XENP021323

SEQ ID NO: 26131 - protein, 11 aa, synthetic construct
  source 1..11: note = Description of Artificial Sequence: Synthetic peptide; note = XENP021323 vlCDR1
QASQDIGNYLN

SEQ ID NO: 26132 - protein, 7 aa, synthetic construct
  source 1..7: note = Description of Artificial Sequence: Synthetic peptide; note = XENP021323 vlCDR2
YTSRLHS

SEQ ID NO: 26133 - protein, 9 aa, synthetic construct
  source 1..9: note = Description of Artificial Sequence: Synthetic peptide; note = XENP021323 vlCDR3
QQGNTLPYT

SEQ ID NO: 26134 - protein, 223 aa, synthetic construct
  source 1..223: note = Description of Artificial Sequence: Synthetic polypeptide; note = XENP021324 2A11_H1.93_L2_Fab Heavy Chain
EVQLVQSGAEVKKPGATVKISCKASGFNIKDYYMHWVQQAPGKGLEWMGWIDPENGDTEYAPKFQGRVTITADTSTNTAYMELSSLRSEDTAVYYCYARGLRQALDYWGQGTLVTVSSASTKGPSVFPLAPSSKSTSGGTAALGCLVKDYFPEPVTVSWNSGALTSGVHTFPAVLQSSGLYSLSSVVTVPSSSLGTQTYICNVNHKPSNTKVDKKVEPKSCGS

SEQ ID NO: 26135 - protein, 118 aa, synthetic construct
  source 1..118: note = Description of Artificial Sequence: Synthetic polypeptide; note = VH of XENP021324
EVQLVQSGAEVKKPGATVKISCKASGFNIKDYYMHWVQQAPGKGLEWMGWIDPENGDTEYAPKFQGRVTITADTSTNTAYMELSSLRSEDTAVYYCYARGLRQALDYWGQGTLVTVSS

SEQ ID NO: 26136 - protein, 5 aa, synthetic construct
  source 1..5: note = Description of Artificial Sequence: Synthetic peptide; note = XENP021324 vhCDR1
DYYMH

SEQ ID NO: 26137 - protein, 17 aa, synthetic construct
  source 1..17: note = Description of Artificial Sequence: Synthetic peptide; note = XENP021324 vhCDR2
WIDPENGDTEYAPKFQG

SEQ ID NO: 26138 - protein, 9 aa, synthetic construct
  source 1..9: note = Description of Artificial Sequence: Synthetic peptide; note = XENP021324 vhCDR3
RGLRQALDY

SEQ ID NO: 26139 - protein, 214 aa, synthetic construct; identical to SEQ ID NO: 17250
  source 1..214: note = Description of Artificial Sequence: Synthetic polypeptide; note = XENP021324 2A11_H1.93_L2_Fab Light Chain

SEQ ID NO: 26140 - protein, 107 aa, synthetic construct; identical to SEQ ID NO: 17251
  source 1..107: note = Description of Artificial Sequence: Synthetic polypeptide; note = VL of XENP021324

SEQ ID NO: 26141 - protein, 11 aa, synthetic construct
  source 1..11: note = Description of Artificial Sequence: Synthetic peptide; note = XENP021324 vlCDR1
QASQDIGNYLN

SEQ ID NO: 26142 - protein, 7 aa, synthetic construct
  source 1..7: note = Description of Artificial Sequence: Synthetic peptide; note = XENP021324 vlCDR2
YTSRLHS

SEQ ID NO: 26143 - protein, 9 aa, synthetic construct
  source 1..9: note = Description of Artificial Sequence: Synthetic peptide; note = XENP021324 vlCDR3
QQGNTLPYT

SEQ ID NO: 26144 - protein, 223 aa, synthetic construct
  source 1..223: note = Description of Artificial Sequence: Synthetic polypeptide; note = XENP021325 2A11_H1.94_L2_Fab Heavy Chain
EVQLVQSGAEVKKPGATVKISCKASGFNIKDYYMHWVQQAPGKGLEWMGWIDPENGDTEYAPKFQGRVTITADTSTNTAYMELSSLRSEDTAVYYCYARGARQALDYWGQGTLVTVSSASTKGPSVFPLAPSSKSTSGGTAALGCLVKDYFPEPVTVSWNSGALTSGVHTFPAVLQSSGLYSLSSVVTVPSSSLGTQTYICNVNHKPSNTKVDKKVEPKSCGS

SEQ ID NO: 26145 - protein, 118 aa, synthetic construct
  source 1..118: note = Description of Artificial Sequence: Synthetic polypeptide; note = VH of XENP021325
EVQLVQSGAEVKKPGATVKISCKASGFNIKDYYMHWVQQAPGKGLEWMGWIDPENGDTEYAPKFQGRVTITADTSTNTAYMELSSLRSEDTAVYYCYARGARQALDYWGQGTLVTVSS

SEQ ID NO: 26146 - protein, 5 aa, synthetic construct
  source 1..5: note = Description of Artificial Sequence: Synthetic peptide; note = XENP021325 vhCDR1
DYYMH

SEQ ID NO: 26147 - protein, 17 aa, synthetic construct
  source 1..17: note = Description of Artificial Sequence: Synthetic peptide; note = XENP021325 vhCDR2
WIDPENGDTEYAPKFQG

SEQ ID NO: 26148 - protein, 9 aa, synthetic construct
  source 1..9: note = Description of Artificial Sequence: Synthetic peptide; note = XENP021325 vhCDR3
RGARQALDY

SEQ ID NO: 26149 - protein, 214 aa, synthetic construct; identical to SEQ ID NO: 17250
  source 1..214: note = Description of Artificial Sequence: Synthetic polypeptide; note = XENP021325 2A11_H1.94_L2_Fab Light Chain

SEQ ID NO: 26150 - protein, 107 aa, synthetic construct; identical to SEQ ID NO: 17251
  source 1..107: note = Description of Artificial Sequence: Synthetic polypeptide; note = VL of XENP021325

SEQ ID NO: 26151 - protein, 11 aa, synthetic construct
  source 1..11: note = Description of Artificial Sequence: Synthetic peptide; note = XENP021325 vlCDR1
QASQDIGNYLN

SEQ ID NO: 26152 - protein, 7 aa, synthetic construct
  source 1..7: note = Description of Artificial Sequence: Synthetic peptide; note = XENP021325 vlCDR2
YTSRLHS

SEQ ID NO: 26153 - protein, 9 aa, synthetic construct
  source 1..9: note = Description of Artificial Sequence: Synthetic peptide; note = XENP021325 vlCDR3
QQGNTLPYT

SEQ ID NO: 26154 - protein, 223 aa, synthetic construct
  source 1..223: note = Description of Artificial Sequence: Synthetic polypeptide; note = XENP021326 2A11_H1.95_L2_Fab Heavy Chain
EVQLVQSGAEVKKPGATVKISCKASGFNIKDYYMHWVQQAPGKGLEWMGWIDPENGDTEYAPKFQGRVTITADTSTNTAYMELSSLRSEDTAVYYCYARGYRQALDYWGQGTLVTVSSASTKGPSVFPLAPSSKSTSGGTAALGCLVKDYFPEPVTVSWNSGALTSGVHTFPAVLQSSGLYSLSSVVTVPSSSLGTQTYICNVNHKPSNTKVDKKVEPKSCGS

SEQ ID NO: 26155 - protein, 118 aa, synthetic construct
  source 1..118: note = Description of Artificial Sequence: Synthetic polypeptide; note = VH of XENP021326
EVQLVQSGAEVKKPGATVKISCKASGFNIKDYYMHWVQQAPGKGLEWMGWIDPENGDTEYAPKFQGRVTITADTSTNTAYMELSSLRSEDTAVYYCYARGYRQALDYWGQGTLVTVSS

SEQ ID NO: 26156 - protein, 5 aa, synthetic construct
  source 1..5: note = Description of Artificial Sequence: Synthetic peptide; note = XENP021326 vhCDR1
DYYMH

SEQ ID NO: 26157 - protein, 17 aa, synthetic construct
  source 1..17: note = Description of Artificial Sequence: Synthetic peptide; note = XENP021326 vhCDR2
WIDPENGDTEYAPKFQG

SEQ ID NO: 26158 - protein, 9 aa, synthetic construct
  source 1..9: note = Description of Artificial Sequence: Synthetic peptide; note = XENP021326 vhCDR3
RGYRQALDY

SEQ ID NO: 26159 - protein, 214 aa, synthetic construct; identical to SEQ ID NO: 17250
  source 1..214: note = Description of Artificial Sequence: Synthetic polypeptide; note = XENP021326 2A11_H1.95_L2_Fab Light Chain

SEQ ID NO: 26160 - protein, 107 aa, synthetic construct; identical to SEQ ID NO: 17251
  source 1..107: note = Description of Artificial Sequence: Synthetic polypeptide; note = VL of XENP021326

SEQ ID NO: 26161 - protein, 11 aa, synthetic construct
  source 1..11: note = Description of Artificial Sequence: Synthetic peptide; note = XENP021326 vlCDR1
QASQDIGNYLN

SEQ ID NO: 26162 - protein, 7 aa, synthetic construct
  source 1..7: note = Description of Artificial Sequence: Synthetic peptide; note = XENP021326 vlCDR2
YTSRLHS

SEQ ID NO: 26163 - protein, 9 aa, synthetic construct
  source 1..9: note = Description of Artificial Sequence: Synthetic peptide; note = XENP021326 vlCDR3
QQGNTLPYT

SEQ ID NO: 26164 - protein, 223 aa, synthetic construct
  source 1..223: note = Description of Artificial Sequence: Synthetic polypeptide; note = XENP021327 2A11_H1.96_L2_Fab Heavy Chain
EVQLVQSGAEVKKPGATVKISCKASGFNIKDYYMHWVQQAPGKGLEWMGWIDPENGDTEYAPKFQGRVTITADTSTNTAYMELSSLRSEDTAVYYCYARGQRQALDYWGQGTLVTVSSASTKGPSVFPLAPSSKSTSGGTAALGCLVKDYFPEPVTVSWNSGALTSGVHTFPAVLQSSGLYSLSSVVTVPSSSLGTQTYICNVNHKPSNTKVDKKVEPKSCGS

SEQ ID NO: 26165 - protein, 118 aa, synthetic construct
  source 1..118: note = Description of Artificial Sequence: Synthetic polypeptide; note = VH of XENP021327
EVQLVQSGAEVKKPGATVKISCKASGFNIKDYYMHWVQQAPGKGLEWMGWIDPENGDTEYAPKFQGRVTITADTSTNTAYMELSSLRSEDTAVYYCYARGQRQALDYWGQGTLVTVSS

SEQ ID NO: 26166 - protein, 5 aa, synthetic construct
  source 1..5: note = Description of Artificial Sequence: Synthetic peptide; note = XENP021327 vhCDR1
DYYMH

SEQ ID NO: 26167 - protein, 17 aa, synthetic construct
  source 1..17: note = Description of Artificial Sequence: Synthetic peptide; note = XENP021327 vhCDR2
WIDPENGDTEYAPKFQG

SEQ ID NO: 26168 - protein, 9 aa, synthetic construct
  source 1..9: note = Description of Artificial Sequence: Synthetic peptide; note = XENP021327 vhCDR3
RGQRQALDY

SEQ ID NO: 26169 - protein, 214 aa, synthetic construct; identical to SEQ ID NO: 17250
  source 1..214: note = Description of Artificial Sequence: Synthetic polypeptide; note = XENP021327 2A11_H1.96_L2_Fab Light Chain

SEQ ID NO: 26170 - protein, 107 aa, synthetic construct; identical to SEQ ID NO: 17251
  source 1..107: note = Description of Artificial Sequence: Synthetic polypeptide; note = VL of XENP021327

SEQ ID NO: 26171 - protein, 11 aa, synthetic construct
  source 1..11: note = Description of Artificial Sequence: Synthetic peptide; note = XENP021327 vlCDR1
QASQDIGNYLN

SEQ ID NO: 26172 - protein, 7 aa, synthetic construct
  source 1..7: note = Description of Artificial Sequence: Synthetic peptide; note = XENP021327 vlCDR2
YTSRLHS

SEQ ID NO: 26173 - protein, 9 aa, synthetic construct
  source 1..9: note = Description of Artificial Sequence: Synthetic peptide; note = XENP021327 vlCDR3
QQGNTLPYT

SEQ ID NO: 26174 - protein, 223 aa, synthetic construct
  source 1..223: note = Description of Artificial Sequence: Synthetic polypeptide; note = XENP021328 2A11_H1.97_L2_Fab Heavy Chain
EVQLVQSGAEVKKPGATVKISCKASGFNIKDYYMHWVQQAPGKGLEWMGWIDPENGDTEYAPKFQGRVTITADTSTNTAYMELSSLRSEDTAVYYCYARGSRQALDYWGQGTLVTVSSASTKGPSVFPLAPSSKSTSGGTAALGCLVKDYFPEPVTVSWNSGALTSGVHTFPAVLQSSGLYSLSSVVTVPSSSLGTQTYICNVNHKPSNTKVDKKVEPKSCGS

SEQ ID NO: 26175 - protein, 118 aa, synthetic construct
  source 1..118: note = Description of Artificial Sequence: Synthetic polypeptide; note = VH of XENP021328
EVQLVQSGAEVKKPGATVKISCKASGFNIKDYYMHWVQQAPGKGLEWMGWIDPENGDTEYAPKFQGRVTITADTSTNTAYMELSSLRSEDTAVYYCYARGSRQALDYWGQGTLVTVSS

SEQ ID NO: 26176 - protein, 5 aa, synthetic construct
  source 1..5: note = Description of Artificial Sequence: Synthetic peptide; note = XENP021328 vhCDR1
DYYMH

SEQ ID NO: 26177 - protein, 17 aa, synthetic construct
  source 1..17: note = Description of Artificial Sequence: Synthetic peptide; note = XENP021328 vhCDR2
WIDPENGDTEYAPKFQG

SEQ ID NO: 26178 - protein, 9 aa, synthetic construct
  source 1..9: note = Description of Artificial Sequence: Synthetic peptide; note = XENP021328 vhCDR3
RGSRQALDY

SEQ ID NO: 26179 - protein, 214 aa, synthetic construct; identical to SEQ ID NO: 17250
  source 1..214: note = Description of Artificial Sequence: Synthetic polypeptide; note = XENP021328 2A11_H1.97_L2_Fab Light Chain

SEQ ID NO: 26180 - protein, 107 aa, synthetic construct; identical to SEQ ID NO: 17251
  source 1..107: note = Description of Artificial Sequence: Synthetic polypeptide; note = VL of XENP021328

SEQ ID NO: 26181 - protein, 11 aa, synthetic construct
  source 1..11: note = Description of Artificial Sequence: Synthetic peptide; note = XENP021328 vlCDR1
QASQDIGNYLN

SEQ ID NO: 26182 - protein, 7 aa, synthetic construct
  source 1..7: note = Description of Artificial Sequence: Synthetic peptide; note = XENP021328 vlCDR2
YTSRLHS

SEQ ID NO: 26183 - protein, 9 aa, synthetic construct
  source 1..9: note = Description of Artificial Sequence: Synthetic peptide; note = XENP021328 vlCDR3
QQGNTLPYT

SEQ ID NO: 26184 - protein, 223 aa, synthetic construct
  source 1..223: note = Description of Artificial Sequence: Synthetic polypeptide; note = XENP021329 2A11_H1.98_L2_Fab Heavy Chain
EVQLVQSGAEVKKPGATVKISCKASGFNIKDYYMHWVQQAPGKGLEWMGWIDPENGDTEYAPKFQGRVTITADTSTNTAYMELSSLRSEDTAVYYCYARGVKQALDYWGQGTLVTVSSASTKGPSVFPLAPSSKSTSGGTAALGCLVKDYFPEPVTVSWNSGALTSGVHTFPAVLQSSGLYSLSSVVTVPSSSLGTQTYICNVNHKPSNTKVDKKVEPKSCGS

SEQ ID NO: 26185 - protein, 118 aa, synthetic construct
  source 1..118: note = Description of Artificial Sequence: Synthetic polypeptide; note = VH of XENP021329
EVQLVQSGAEVKKPGATVKISCKASGFNIKDYYMHWVQQAPGKGLEWMGWIDPENGDTEYAPKFQGRVTITADTSTNTAYMELSSLRSEDTAVYYCYARGVKQALDYWGQGTLVTVSS

SEQ ID NO: 26186 - protein, 5 aa, synthetic construct
  source 1..5: note = Description of Artificial Sequence: Synthetic peptide; note = XENP021329 vhCDR1
DYYMH

SEQ ID NO: 26187 - protein, 17 aa, synthetic construct
  source 1..17: note = Description of Artificial Sequence: Synthetic peptide; note = XENP021329 vhCDR2
WIDPENGDTEYAPKFQG

SEQ ID NO: 26188 - protein, 9 aa, synthetic construct
  source 1..9: note = Description of Artificial Sequence: Synthetic peptide; note = XENP021329 vhCDR3
RGVKQALDY

SEQ ID NO: 26189 - protein, 214 aa, synthetic construct; identical to SEQ ID NO: 17250
  source 1..214: note = Description of Artificial Sequence: Synthetic polypeptide; note = XENP021329 2A11_H1.98_L2_Fab Light Chain

SEQ ID NO: 26190 - protein, 107 aa, synthetic construct; identical to SEQ ID NO: 17251
  source 1..107: note = Description of Artificial Sequence: Synthetic polypeptide; note = VL of XENP021329

SEQ ID NO: 26191 - protein, 11 aa, synthetic construct
  source 1..11: note = Description of Artificial Sequence: Synthetic peptide; note = XENP021329 vlCDR1
QASQDIGNYLN

SEQ ID NO: 26192 - protein, 7 aa, synthetic construct
  source 1..7: note = Description of Artificial Sequence: Synthetic peptide; note = XENP021329 vlCDR2
YTSRLHS

SEQ ID NO: 26193 - protein, 9 aa, synthetic construct
  source 1..9: note = Description of Artificial Sequence: Synthetic peptide; note = XENP021329 vlCDR3
QQGNTLPYT

SEQ ID NO: 26194 - protein, 223 aa, synthetic construct
  source 1..223: note = Description of Artificial Sequence: Synthetic polypeptide; note = XENP021330 2A11_H1.99_L2_Fab Heavy Chain
EVQLVQSGAEVKKPGATVKISCKASGFNIKDYYMHWVQQAPGKGLEWMGWIDPENGDTEYAPKFQGRVTITADTSTNTAYMELSSLRSEDTAVYYCYARGVEQALDYWGQGTLVTVSSASTKGPSVFPLAPSSKSTSGGTAALGCLVKDYFPEPVTVSWNSGALTSGVHTFPAVLQSSGLYSLSSVVTVPSSSLGTQTYICNVNHKPSNTKVDKKVEPKSCGS

SEQ ID NO: 26195 - protein, 118 aa, synthetic construct
  source 1..118: note = Description of Artificial Sequence: Synthetic polypeptide; note = VH of XENP021330
EVQLVQSGAEVKKPGATVKISCKASGFNIKDYYMHWVQQAPGKGLEWMGWIDPENGDTEYAPKFQGRVTITADTSTNTAYMELSSLRSEDTAVYYCYARGVEQALDYWGQGTLVTVSS

SEQ ID NO: 26196 - protein, 5 aa, synthetic construct
  source 1..5: note = Description of Artificial Sequence: Synthetic peptide; note = XENP021330 vhCDR1
DYYMH

SEQ ID NO: 26197 - protein, 17 aa, synthetic construct
  source 1..17: note = Description of Artificial Sequence: Synthetic peptide; note = XENP021330 vhCDR2
WIDPENGDTEYAPKFQG

SEQ ID NO: 26198 - protein, 9 aa, synthetic construct
  source 1..9: note = Description of Artificial Sequence: Synthetic peptide; note = XENP021330 vhCDR3
RGVEQALDY

SEQ ID NO: 26199 - protein, 214 aa, synthetic construct; identical to SEQ ID NO: 17250
  source 1..214: note = Description of Artificial Sequence: Synthetic polypeptide; note = XENP021330 2A11_H1.99_L2_Fab Light Chain

SEQ ID NO: 26200 - protein, 107 aa, synthetic construct; identical to SEQ ID NO: 17251
  source 1..107: note = Description of Artificial Sequence: Synthetic polypeptide; note = VL of XENP021330

SEQ ID NO: 26201 - protein, 11 aa, synthetic construct
  source 1..11: note = Description of Artificial Sequence: Synthetic peptide; note = XENP021330 vlCDR1
QASQDIGNYLN

SEQ ID NO: 26202 - protein, 7 aa, synthetic construct
  source 1..7: note = Description of Artificial Sequence: Synthetic peptide; note = XENP021330 vlCDR2
YTSRLHS

SEQ ID NO: 26203 - protein, 9 aa, synthetic construct
  source 1..9: note = Description of Artificial Sequence: Synthetic peptide; note = XENP021330 vlCDR3
QQGNTLPYT

SEQ ID NO: 26204 - protein, 223 aa, synthetic construct
  source 1..223: note = Description of Artificial Sequence: Synthetic polypeptide; note = XENP021331 2A11_H1.100_L2_Fab Heavy Chain
EVQLVQSGAEVKKPGATVKISCKASGFNIKDYYMHWVQQAPGKGLEWMGWIDPENGDTEYAPKFQGRVTITADTSTNTAYMELSSLRSEDTAVYYCYARGVDQALDYWGQGTLVTVSSASTKGPSVFPLAPSSKSTSGGTAALGCLVKDYFPEPVTVSWNSGALTSGVHTFPAVLQSSGLYSLSSVVTVPSSSLGTQTYICNVNHKPSNTKVDKKVEPKSCGS

SEQ ID NO: 26205 - protein, 118 aa, synthetic construct
  source 1..118: note = Description of Artificial Sequence: Synthetic polypeptide; note = VH of XENP021331
EVQLVQSGAEVKKPGATVKISCKASGFNIKDYYMHWVQQAPGKGLEWMGWIDPENGDTEYAPKFQGRVTITADTSTNTAYMELSSLRSEDTAVYYCYARGVDQALDYWGQGTLVTVSS

SEQ ID NO: 26206 - protein, 5 aa, synthetic construct
  source 1..5: note = Description of Artificial Sequence: Synthetic peptide; note = XENP021331 vhCDR1
DYYMH

SEQ ID NO: 26207 - protein, 17 aa, synthetic construct
  source 1..17: note = Description of Artificial Sequence: Synthetic peptide; note = XENP021331 vhCDR2
WIDPENGDTEYAPKFQG

SEQ ID NO: 26208 - protein, 9 aa, synthetic construct
  source 1..9: note = Description of Artificial Sequence: Synthetic peptide; note = XENP021331 vhCDR3
RGVDQALDY

SEQ ID NO: 26209 - protein, 214 aa, synthetic construct; identical to SEQ ID NO: 17250
  source 1..214: note = Description of Artificial Sequence: Synthetic polypeptide; note = XENP021331 2A11_H1.100_L2_Fab Light Chain

SEQ ID NO: 26210 - protein, 107 aa, synthetic construct; identical to SEQ ID NO: 17251
  source 1..107: note = Description of Artificial Sequence: Synthetic polypeptide; note = VL of XENP021331

SEQ ID NO: 26211 - protein, 11 aa, synthetic construct
  source 1..11: note = Description of Artificial Sequence: Synthetic peptide; note = XENP021331 vlCDR1
QASQDIGNYLN

SEQ ID NO: 26212 - protein, 7 aa, synthetic construct
  source 1..7: note = Description of Artificial Sequence: Synthetic peptide; note = XENP021331 vlCDR2
YTSRLHS

SEQ ID NO: 26213 - protein, 9 aa, synthetic construct
  source 1..9: note = Description of Artificial Sequence: Synthetic peptide; note = XENP021331 vlCDR3
QQGNTLPYT

SEQ ID NO: 26214 - protein, 223 aa, synthetic construct
  source 1..223: note = Description of Artificial Sequence: Synthetic polypeptide; note = XENP021332 2A11_H1.101_L2_Fab Heavy Chain
EVQLVQSGAEVKKPGATVKISCKASGFNIKDYYMHWVQQAPGKGLEWMGWIDPENGDTEYAPKFQGRVTITADTSTNTAYMELSSLRSEDTAVYYCYARGVHQALDYWGQGTLVTVSSASTKGPSVFPLAPSSKSTSGGTAALGCLVKDYFPEPVTVSWNSGALTSGVHTFPAVLQSSGLYSLSSVVTVPSSSLGTQTYICNVNHKPSNTKVDKKVEPKSCGS

SEQ ID NO: 26215 - protein, 118 aa, synthetic construct
  source 1..118: note = Description of Artificial Sequence: Synthetic polypeptide; note = VH of XENP021332
EVQLVQSGAEVKKPGATVKISCKASGFNIKDYYMHWVQQAPGKGLEWMGWIDPENGDTEYAPKFQGRVTITADTSTNTAYMELSSLRSEDTAVYYCYARGVHQALDYWGQGTLVTVSS

SEQ ID NO: 26216 - protein, 5 aa, synthetic construct
  source 1..5: note = Description of Artificial Sequence: Synthetic peptide; note = XENP021332 vhCDR1
DYYMH

SEQ ID NO: 26217 - protein, 17 aa, synthetic construct
  source 1..17: note = Description of Artificial Sequence: Synthetic peptide; note = XENP021332 vhCDR2
WIDPENGDTEYAPKFQG

SEQ ID NO: 26218 - protein, 9 aa, synthetic construct
  source 1..9: note = Description of Artificial Sequence: Synthetic peptide; note = XENP021332 vhCDR3
RGVHQALDY

SEQ ID NO: 26219 - protein, 214 aa, synthetic construct; identical to SEQ ID NO: 17250
  source 1..214: note = Description of Artificial Sequence: Synthetic polypeptide; note = XENP021332 2A11_H1.101_L2_Fab Light Chain

SEQ ID NO: 26220 - protein, 107 aa, synthetic construct; identical to SEQ ID NO: 17251
  source 1..107: note = Description of Artificial Sequence: Synthetic polypeptide; note = VL of XENP021332

SEQ ID NO: 26221 - protein, 11 aa, synthetic construct
  source 1..11: note = Description of Artificial Sequence: Synthetic peptide; note = XENP021332 vlCDR1
QASQDIGNYLN

SEQ ID NO: 26222 - protein, 7 aa, synthetic construct
  source 1..7: note = Description of Artificial Sequence: Synthetic peptide; note = XENP021332 vlCDR2
YTSRLHS

SEQ ID NO: 26223 - protein, 9 aa, synthetic construct
  source 1..9: note = Description of Artificial Sequence: Synthetic peptide; note = XENP021332 vlCDR3
QQGNTLPYT

SEQ ID NO: 26224 - protein, 223 aa, synthetic construct
  source 1..223: note = Description of Artificial Sequence: Synthetic polypeptide; note = XENP021333 2A11_H1.102_L2_Fab Heavy Chain
EVQLVQSGAEVKKPGATVKISCKASGFNIKDYYMHWVQQAPGKGLEWMGWIDPENGDTEYAPKFQGRVTITADTSTNTAYMELSSLRSEDTAVYYCYARGVTQALDYWGQGTLVTVSSASTKGPSVFPLAPSSKSTSGGTAALGCLVKDYFPEPVTVSWNSGALTSGVHTFPAVLQSSGLYSLSSVVTVPSSSLGTQTYICNVNHKPSNTKVDKKVEPKSCGS

SEQ ID NO: 26225 - protein, 118 aa, synthetic construct
  source 1..118: note = Description of Artificial Sequence: Synthetic polypeptide; note = VH of XENP021333
EVQLVQSGAEVKKPGATVKISCKASGFNIKDYYMHWVQQAPGKGLEWMGWIDPENGDTEYAPKFQGRVTITADTSTNTAYMELSSLRSEDTAVYYCYARGVTQALDYWGQGTLVTVSS

SEQ ID NO: 26226 - protein, 5 aa, synthetic construct
  source 1..5: note = Description of Artificial Sequence: Synthetic peptide; note = XENP021333 vhCDR1
DYYMH

SEQ ID NO: 26227 - protein, 17 aa, synthetic construct
  source 1..17: note = Description of Artificial Sequence: Synthetic peptide; note = XENP021333 vhCDR2
WIDPENGDTEYAPKFQG

SEQ ID NO: 26228 - protein, 9 aa, synthetic construct
  source 1..9: note = Description of Artificial Sequence: Synthetic peptide; note = XENP021333 vhCDR3
RGVTQALDY

SEQ ID NO: 26229 - protein, 214 aa, synthetic construct; identical to SEQ ID NO: 17250
  source 1..214: note = Description of Artificial Sequence: Synthetic polypeptide; note = XENP021333 2A11_H1.102_L2_Fab Light Chain

SEQ ID NO: 26230 - protein, 107 aa, synthetic construct; identical to SEQ ID NO: 17251
  source 1..107: note = Description of Artificial Sequence: Synthetic polypeptide; note = VL of XENP021333

SEQ ID NO: 26231 - protein, 11 aa, synthetic construct
  source 1..11: note = Description of Artificial Sequence: Synthetic peptide; note = XENP021333 vlCDR1
QASQDIGNYLN

SEQ ID NO: 26232 - protein, 7 aa, synthetic construct
  source 1..7: note = Description of Artificial Sequence: Synthetic peptide; note = XENP021333 vlCDR2
YTSRLHS

SEQ ID NO: 26233 - protein, 9 aa, synthetic construct
  source 1..9: note = Description of Artificial Sequence: Synthetic peptide; note = XENP021333 vlCDR3
QQGNTLPYT

SEQ ID NO: 26234 - protein, 223 aa, synthetic construct
  source 1..223: note = Description of Artificial Sequence: Synthetic polypeptide; note = XENP021334 2A11_H1.103_L2_Fab Heavy Chain
EVQLVQSGAEVKKPGATVKISCKASGFNIKDYYMHWVQQAPGKGLEWMGWIDPENGDTEYAPKFQGRVTITADTSTNTAYMELSSLRSEDTAVYYCYARGVAQALDYWGQGTLVTVSSASTKGPSVFPLAPSSKSTSGGTAALGCLVKDYFPEPVTVSWNSGALTSGVHTFPAVLQSSGLYSLSSVVTVPSSSLGTQTYICNVNHKPSNTKVDKKVEPKSCGS

SEQ ID NO: 26235 - protein, 118 aa, synthetic construct
  source 1..118: note = Description of Artificial Sequence: Synthetic polypeptide; note = VH of XENP021334
EVQLVQSGAEVKKPGATVKISCKASGFNIKDYYMHWVQQAPGKGLEWMGWIDPENGDTEYAPKFQGRVTITADTSTNTAYMELSSLRSEDTAVYYCYARGVAQALDYWGQGTLVTVSS

SEQ ID NO: 26236 - protein, 5 aa, synthetic construct
  source 1..5: note = Description of Artificial Sequence: Synthetic peptide; note = XENP021334 vhCDR1
DYYMH

SEQ ID NO: 26237 - protein, 17 aa, synthetic construct
  source 1..17: note = Description of Artificial Sequence: Synthetic peptide; note = XENP021334 vhCDR2
WIDPENGDTEYAPKFQG

SEQ ID NO: 26238 - protein, 9 aa, synthetic construct
  source 1..9: note = Description of Artificial Sequence: Synthetic peptide; note = XENP021334 vhCDR3
RGVAQALDY

SEQ ID NO: 26239 - protein, 214 aa, synthetic construct; identical to SEQ ID NO: 17250
  source 1..214: note = Description of Artificial Sequence: Synthetic polypeptide; note = XENP021334 2A11_H1.103_L2_Fab Light Chain

SEQ ID NO: 26240 - protein, 107 aa, synthetic construct; identical to SEQ ID NO: 17251
  source 1..107: note = Description of Artificial Sequence: Synthetic polypeptide; note = VL of XENP021334

SEQ ID NO: 26241 - protein, 11 aa, synthetic construct
  source 1..11: note = Description of Artificial Sequence: Synthetic peptide; note = XENP021334 vlCDR1
QASQDIGNYLN

SEQ ID NO: 26242 - protein, 7 aa, synthetic construct
  source 1..7: note = Description of Artificial Sequence: Synthetic peptide; note = XENP021334 vlCDR2
YTSRLHS

SEQ ID NO: 26243 - protein, 9 aa, synthetic construct
  source 1..9: note = Description of Artificial Sequence: Synthetic peptide; note = XENP021334 vlCDR3
QQGNTLPYT

SEQ ID NO: 26244 - protein, 223 aa, synthetic construct
  source 1..223: note = Description of Artificial Sequence: Synthetic polypeptide; note = XENP021335 2A11_H1.104_L2_Fab Heavy Chain
EVQLVQSGAEVKKPGATVKISCKASGFNIKDYYMHWVQQAPGKGLEWMGWIDPENGDTEYAPKFQGRVTITADTSTNTAYMELSSLRSEDTAVYYCYARGVGQALDYWGQGTLVTVSSASTKGPSVFPLAPSSKSTSGGTAALGCLVKDYFPEPVTVSWNSGALTSGVHTFPAVLQSSGLYSLSSVVTVPSSSLGTQTYICNVNHKPSNTKVDKKVEPKSCGS

SEQ ID NO: 26245 - protein, 118 aa, synthetic construct
  source 1..118: note = Description of Artificial Sequence: Synthetic polypeptide; note = VH of XENP021335
EVQLVQSGAEVKKPGATVKISCKASGFNIKDYYMHWVQQAPGKGLEWMGWIDPENGDTEYAPKFQGRVTITADTSTNTAYMELSSLRSEDTAVYYCYARGVGQALDYWGQGTLVTVSS

SEQ ID NO: 26246 - protein, 5 aa, synthetic construct
  source 1..5: note = Description of Artificial Sequence: Synthetic peptide; note = XENP021335 vhCDR1
DYYMH

SEQ ID NO: 26247 - protein, 17 aa, synthetic construct
  source 1..17: note = Description of Artificial Sequence: Synthetic peptide; note = XENP021335 vhCDR2
WIDPENGDTEYAPKFQG

SEQ ID NO: 26248 - protein, 9 aa, synthetic construct
  source 1..9: note = Description of Artificial Sequence: Synthetic peptide; note = XENP021335 vhCDR3
RGVGQALDY

SEQ ID NO: 26249 - protein, 214 aa, synthetic construct; identical to SEQ ID NO: 17250
  source 1..214: note = Description of Artificial Sequence: Synthetic polypeptide; note = XENP021335 2A11_H1.104_L2_Fab Light Chain

SEQ ID NO: 26250 - protein, 107 aa, synthetic construct; identical to SEQ ID NO: 17251
  source 1..107: note = Description of Artificial Sequence: Synthetic polypeptide; note = VL of XENP021335

SEQ ID NO: 26251 - protein, 11 aa, synthetic construct
  source 1..11: note = Description of Artificial Sequence: Synthetic peptide; note = XENP021335 vlCDR1
QASQDIGNYLN

SEQ ID NO: 26252 - protein, 7 aa, synthetic construct
  source 1..7: note = Description of Artificial Sequence: Synthetic peptide; note = XENP021335 vlCDR2
YTSRLHS

SEQ ID NO: 26253 - protein, 9 aa, synthetic construct
  source 1..9: note = Description of Artificial Sequence: Synthetic peptide; note = XENP021335 vlCDR3
QQGNTLPYT

SEQ ID NO: 26254 - protein, 223 aa, synthetic construct
  source 1..223: note = Description of Artificial Sequence: Synthetic polypeptide; note = XENP021336 2A11_H1.105_L2_Fab Heavy Chain
EVQLVQSGAEVKKPGATVKISCKASGFNIKDYYMHWVQQAPGKGLEWMGWIDPENGDTEYAPKFQGRVTITADTSTNTAYMELSSLRSEDTAVYYCYARGVYQALDYWGQGTLVTVSSASTKGPSVFPLAPSSKSTSGGTAALGCLVKDYFPEPVTVSWNSGALTSGVHTFPAVLQSSGLYSLSSVVTVPSSSLGTQTYICNVNHKPSNTKVDKKVEPKSCGS

SEQ ID NO: 26255 - protein, 118 aa, synthetic construct
  source 1..118: note = Description of Artificial Sequence: Synthetic polypeptide; note = VH of XENP021336
EVQLVQSGAEVKKPGATVKISCKASGFNIKDYYMHWVQQAPGKGLEWMGWIDPENGDTEYAPKFQGRVTITADTSTNTAYMELSSLRSEDTAVYYCYARGVYQALDYWGQGTLVTVSS

SEQ ID NO: 26256 - protein, 5 aa, synthetic construct
  source 1..5: note = Description of Artificial Sequence: Synthetic peptide; note = XENP021336 vhCDR1
DYYMH

SEQ ID NO: 26257 - protein, 17 aa, synthetic construct
  source 1..17: note = Description of Artificial Sequence: Synthetic peptide; note = XENP021336 vhCDR2
WIDPENGDTEYAPKFQG

SEQ ID NO: 26258 - protein, 9 aa, synthetic construct
  source 1..9: note = Description of Artificial Sequence: Synthetic peptide; note = XENP021336 vhCDR3
RGVYQALDY

SEQ ID NO: 26259 - protein, 214 aa, synthetic construct; identical to SEQ ID NO: 17250
  source 1..214: note = Description of Artificial Sequence: Synthetic polypeptide; note = XENP021336 2A11_H1.105_L2_Fab Light Chain

SEQ ID NO: 26260 - protein, 107 aa, synthetic construct; identical to SEQ ID NO: 17251
  source 1..107: note = Description of Artificial Sequence: Synthetic polypeptide; note = VL of XENP021336

SEQ ID NO: 26261 - protein, 11 aa, synthetic construct
  source 1..11: note = Description of Artificial Sequence: Synthetic peptide; note = XENP021336 vlCDR1
QASQDIGNYLN

SEQ ID NO: 26262 - protein, 7 aa, synthetic construct
  source 1..7: note = Description of Artificial Sequence: Synthetic peptide; note = XENP021336 vlCDR2
YTSRLHS

SEQ ID NO: 26263 - protein, 9 aa, synthetic construct
  source 1..9: note = Description of Artificial Sequence: Synthetic peptide; note = XENP021336 vlCDR3
QQGNTLPYT

SEQ ID NO: 26264 - protein, 223 aa, synthetic construct
  source 1..223: note = Description of Artificial Sequence: Synthetic polypeptide; note = XENP021337 2A11_H1.106_L2_Fab Heavy Chain
EVQLVQSGAEVKKPGATVKISCKASGFNIKDYYMHWVQQAPGKGLEWMGWIDPENGDTEYAPKFQGRVTITADTSTNTAYMELSSLRSEDTAVYYCYARGVRAALDYWGQGTLVTVSSASTKGPSVFPLAPSSKSTSGGTAALGCLVKDYFPEPVTVSWNSGALTSGVHTFPAVLQSSGLYSLSSVVTVPSSSLGTQTYICNVNHKPSNTKVDKKVEPKSCGS

SEQ ID NO: 26265 - protein, 118 aa, synthetic construct
  source 1..118: note = Description of Artificial Sequence: Synthetic polypeptide; note = VH of XENP021337
EVQLVQSGAEVKKPGATVKISCKASGFNIKDYYMHWVQQAPGKGLEWMGWIDPENGDTEYAPKFQGRVTITADTSTNTAYMELSSLRSEDTAVYYCYARGVRAALDYWGQGTLVTVSS

SEQ ID NO: 26266 - protein, 5 aa, synthetic construct
  source 1..5: note = Description of Artificial Sequence: Synthetic peptide; note = XENP021337 vhCDR1
DYYMH

SEQ ID NO: 26267 - protein, 17 aa, synthetic construct
  source 1..17: note = Description of Artificial Sequence: Synthetic peptide; note = XENP021337 vhCDR2
WIDPENGDTEYAPKFQG

SEQ ID NO: 26268 - protein, 9 aa, synthetic construct
  source 1..9: note = Description of Artificial Sequence: Synthetic peptide; note = XENP021337 vhCDR3
RGVRAALDY

SEQ ID NO: 26269 - protein, 214 aa, synthetic construct; identical to SEQ ID NO: 17250
  source 1..214: note = Description of Artificial Sequence: Synthetic polypeptide; note = XENP021337 2A11_H1.106_L2_Fab Light Chain

SEQ ID NO: 26270 - protein, 107 aa, synthetic construct; identical to SEQ ID NO: 17251
  source 1..107: note = Description of Artificial Sequence: Synthetic polypeptide; note = VL of XENP021337

SEQ ID NO: 26271 - protein, 11 aa, synthetic construct
  source 1..11: note = Description of Artificial Sequence: Synthetic peptide; note = XENP021337 vlCDR1
QASQDIGNYLN

SEQ ID NO: 26272 - protein, 7 aa, synthetic construct
  source 1..7: note = Description of Artificial Sequence: Synthetic peptide; note = XENP021337 vlCDR2
YTSRLHS

SEQ ID NO: 26273 - protein, 9 aa, synthetic construct
  source 1..9: note = Description of Artificial Sequence: Synthetic peptide; note = XENP021337 vlCDR3
QQGNTLPYT

SEQ ID NO: 26274 - protein, 223 aa, synthetic construct
  source 1..223: note = Description of Artificial Sequence: Synthetic polypeptide; note = XENP021338 2A11_H1.107_L2_Fab Heavy Chain
EVQLVQSGAEVKKPGATVKISCKASGFNIKDYYMHWVQQAPGKGLEWMGWIDPENGDTEYAPKFQGRVTITADTSTNTAYMELSSLRSEDTAVYYCYARGVRSALDYWGQGTLVTVSSASTKGPSVFPLAPSSKSTSGGTAALGCLVKDYFPEPVTVSWNSGALTSGVHTFPAVLQSSGLYSLSSVVTVPSSSLGTQTYICNVNHKPSNTKVDKKVEPKSCGS

SEQ ID NO: 26275 - protein, 118 aa, synthetic construct
  source 1..118: note = Description of Artificial Sequence: Synthetic polypeptide; note = VH of XENP021338
EVQLVQSGAEVKKPGATVKISCKASGFNIKDYYMHWVQQAPGKGLEWMGWIDPENGDTEYAPKFQGRVTITADTSTNTAYMELSSLRSEDTAVYYCYARGVRSALDYWGQGTLVTVSS

SEQ ID NO: 26276 - protein, 5 aa, synthetic construct
  source 1..5: note = Description of Artificial Sequence: Synthetic peptide; note = XENP021338 vhCDR1
DYYMH

SEQ ID NO: 26277 - protein, 17 aa, synthetic construct
  source 1..17: note = Description of Artificial Sequence: Synthetic peptide; note = XENP021338 vhCDR2
WIDPENGDTEYAPKFQG

SEQ ID NO: 26278 - protein, 9 aa, synthetic construct
  source 1..9: note = Description of Artificial Sequence: Synthetic peptide; note = XENP021338 vhCDR3
RGVRSALDY

SEQ ID NO: 26279 - protein, 214 aa, synthetic construct; identical to SEQ ID NO: 17250
  source 1..214: note = Description of Artificial Sequence: Synthetic polypeptide; note = XENP021338 2A11_H1.107_L2_Fab Light Chain

SEQ ID NO: 26280 - protein, 107 aa, synthetic construct; identical to SEQ ID NO: 17251
  source 1..107: note = Description of Artificial Sequence: Synthetic polypeptide; note = VL of XENP021338

SEQ ID NO: 26281 - protein, 11 aa, synthetic construct
  source 1..11: note = Description of Artificial Sequence: Synthetic peptide; note = XENP021338 vlCDR1
QASQDIGNYLN

SEQ ID NO: 26282 - protein, 7 aa, synthetic construct
  source 1..7: note = Description of Artificial Sequence: Synthetic peptide; note = XENP021338 vlCDR2
YTSRLHS

SEQ ID NO: 26283 - protein, 9 aa, synthetic construct
  source 1..9: note = Description of Artificial Sequence: Synthetic peptide; note = XENP021338 vlCDR3
QQGNTLPYT

SEQ ID NO: 26284 - protein, 223 aa, synthetic construct
  source 1..223: note = Description of Artificial Sequence: Synthetic polypeptide; note = XENP021339 2A11_H1.108_L2_Fab Heavy Chain
EVQLVQSGAEVKKPGATVKISCKASGFNIKDYYMHWVQQAPGKGLEWMGWIDPENGDTEYAPKFQGRVTITADTSTNTAYMELSSLRSEDTAVYYCYARGVRHALDYWGQGTLVTVSSASTKGPSVFPLAPSSKSTSGGTAALGCLVKDYFPEPVTVSWNSGALTSGVHTFPAVLQSSGLYSLSSVVTVPSSSLGTQTYICNVNHKPSNTKVDKKVEPKSCGS

SEQ ID NO: 26285 - protein, 118 aa, synthetic construct
  source 1..118: note = Description of Artificial Sequence: Synthetic polypeptide; note = VH of XENP021339
EVQLVQSGAEVKKPGATVKISCKASGFNIKDYYMHWVQQAPGKGLEWMGWIDPENGDTEYAPKFQGRVTITADTSTNTAYMELSSLRSEDTAVYYCYARGVRHALDYWGQGTLVTVSS

SEQ ID NO: 26286 - protein, 5 aa, synthetic construct
  source 1..5: note = Description of Artificial Sequence: Synthetic peptide; note = XENP021339 vhCDR1
DYYMH

SEQ ID NO: 26287 - protein, 17 aa, synthetic construct
  source 1..17: note = Description of Artificial Sequence: Synthetic peptide; note = XENP021339 vhCDR2
WIDPENGDTEYAPKFQG

SEQ ID NO: 26288 - protein, 9 aa, synthetic construct
  source 1..9: note = Description of Artificial Sequence: Synthetic peptide; note = XENP021339 vhCDR3
RGVRHALDY

SEQ ID NO: 26289 - protein, 214 aa, synthetic construct; identical to SEQ ID NO: 17250
  source 1..214: note = Description of Artificial Sequence: Synthetic polypeptide; note = XENP021339 2A11_H1.108_L2_Fab Light Chain

SEQ ID NO: 26290 - protein, 107 aa, synthetic construct; identical to SEQ ID NO: 17251
  source 1..107: note = Description of Artificial Sequence: Synthetic polypeptide; note = VL of XENP021339

SEQ ID NO: 26291 - protein, 11 aa, synthetic construct
  source 1..11: note = Description of Artificial Sequence: Synthetic peptide; note = XENP021339 vlCDR1
QASQDIGNYLN

SEQ ID NO: 26292 - protein, 7 aa, synthetic construct
  source 1..7: note = Description of Artificial Sequence: Synthetic peptide; note = XENP021339 vlCDR2
YTSRLHS

SEQ ID NO: 26293 - protein, 9 aa, synthetic construct
  source 1..9: note = Description of Artificial Sequence: Synthetic peptide; note = XENP021339 vlCDR3
QQGNTLPYT

SEQ ID NO: 26294 - protein, 223 aa, synthetic construct
  source 1..223: note = Description of Artificial Sequence: Synthetic polypeptide; note = XENP021340 2A11_H1.109_L2_Fab Heavy Chain
EVQLVQSGAEVKKPGATVKISCKASGFNIKDYYMHWVQQAPGKGLEWMGWIDPENGDTEYAPKFQGRVTITADTSTNTAYMELSSLRSEDTAVYYCYARGVRLALDYWGQGTLVTVSSASTKGPSVFPLAPSSKSTSGGTAALGCLVKDYFPEPVTVSWNSGALTSGVHTFPAVLQSSGLYSLSSVVTVPSSSLGTQTYICNVNHKPSNTKVDKKVEPKSCGS

SEQ ID NO: 26295 - protein, 118 aa, synthetic construct
  source 1..118: note = Description of Artificial Sequence: Synthetic polypeptide; note = VH of XENP021340
EVQLVQSGAEVKKPGATVKISCKASGFNIKDYYMHWVQQAPGKGLEWMGWIDPENGDTEYAPKFQGRVTITADTSTNTAYMELSSLRSEDTAVYYCYARGVRLALDYWGQGTLVTVSS

SEQ ID NO: 26296 - protein, 5 aa, synthetic construct
  source 1..5: note = Description of Artificial Sequence: Synthetic peptide; note = XENP021340 vhCDR1
DYYMH

SEQ ID NO: 26297 - protein, 17 aa, synthetic construct
  source 1..17: note = Description of Artificial Sequence: Synthetic peptide; note = XENP021340 vhCDR2
WIDPENGDTEYAPKFQG

SEQ ID NO: 26298 - protein, 9 aa, synthetic construct
  source 1..9: note = Description of Artificial Sequence: Synthetic peptide; note = XENP021340 vhCDR3
RGVRLALDY

SEQ ID NO: 26299 - protein, 214 aa, synthetic construct; identical to SEQ ID NO: 17250
  source 1..214: note = Description of Artificial Sequence: Synthetic polypeptide; note = XENP021340 2A11_H1.109_L2_Fab Light Chain

SEQ ID NO: 26300 - protein, 107 aa, synthetic construct; identical to SEQ ID NO: 17251
  source 1..107: note = Description of Artificial Sequence: Synthetic polypeptide; note = VL of XENP021340

SEQ ID NO: 26301 - protein, 11 aa, synthetic construct
  source 1..11: note = Description of Artificial Sequence: Synthetic peptide; note = XENP021340 vlCDR1
QASQDIGNYLN

SEQ ID NO: 26302 - protein, 7 aa, synthetic construct
  source 1..7: note = Description of Artificial Sequence: Synthetic peptide; note = XENP021340 vlCDR2
YTSRLHS

SEQ ID NO: 26303 - protein, 9 aa, synthetic construct
  source 1..9: note = Description of Artificial Sequence: Synthetic peptide; note = XENP021340 vlCDR3
QQGNTLPYT

SEQ ID NO: 26304 - protein, 223 aa, synthetic construct
  source 1..223: note = Description of Artificial Sequence: Synthetic polypeptide; note = XENP021341 2A11_H1.110_L2_Fab Heavy Chain
EVQLVQSGAEVKKPGATVKISCKASGFNIKDYYMHWVQQAPGKGLEWMGWIDPENGDTEYAPKFQGRVTITADTSTNTAYMELSSLRSEDTAVYYCYARGVRPALDYWGQGTLVTVSSASTKGPSVFPLAPSSKSTSGGTAALGCLVKDYFPEPVTVSWNSGALTSGVHTFPAVLQSSGLYSLSSVVTVPSSSLGTQTYICNVNHKPSNTKVDKKVEPKSCGS

SEQ ID NO: 26305 - protein, 118 aa, synthetic construct
  source 1..118: note = Description of Artificial Sequence: Synthetic polypeptide; note = VH of XENP021341
EVQLVQSGAEVKKPGATVKISCKASGFNIKDYYMHWVQQAPGKGLEWMGWIDPENGDTEYAPKFQGRVTITADTSTNTAYMELSSLRSEDTAVYYCYARGVRPALDYWGQGTLVTVSS

SEQ ID NO: 26306 - protein, 5 aa, synthetic construct
  source 1..5: note = Description of Artificial Sequence: Synthetic peptide; note = XENP021341 vhCDR1
DYYMH

SEQ ID NO: 26307 - protein, 17 aa, synthetic construct
  source 1..17: note = Description of Artificial Sequence: Synthetic peptide; note = XENP021341 vhCDR2
WIDPENGDTEYAPKFQG

SEQ ID NO: 26308 - protein, 9 aa, synthetic construct
  source 1..9: note = Description of Artificial Sequence: Synthetic peptide; note = XENP021341 vhCDR3
RGVRPALDY

SEQ ID NO: 26309 - protein, 214 aa, synthetic construct; identical to SEQ ID NO: 17250
  source 1..214: note = Description of Artificial Sequence: Synthetic polypeptide; note = XENP021341 2A11_H1.110_L2_Fab Light Chain

SEQ ID NO: 26310 - protein, 107 aa, synthetic construct; identical to SEQ ID NO: 17251
  source 1..107: note = Description of Artificial Sequence: Synthetic polypeptide; note = VL of XENP021341

SEQ ID NO: 26311 - protein, 11 aa, synthetic construct
  source 1..11: note = Description of Artificial Sequence: Synthetic peptide; note = XENP021341 vlCDR1
QASQDIGNYLN

SEQ ID NO: 26312 - protein, 7 aa, synthetic construct
  source 1..7: note = Description of Artificial Sequence: Synthetic peptide; note = XENP021341 vlCDR2
YTSRLHS

SEQ ID NO: 26313 - protein, 9 aa, synthetic construct
  source 1..9: note = Description of Artificial Sequence: Synthetic peptide; note = XENP021341 vlCDR3
QQGNTLPYT

SEQ ID NO: 26314 - protein, 223 aa, synthetic construct
  source 1..223: note = Description of Artificial Sequence: Synthetic polypeptide; note = XENP021342 2A11_H1.111_L2_Fab Heavy Chain
EVQLVQSGAEVKKPGATVKISCKASGFNIKDYYMHWVQQAPGKGLEWMGWIDPENGDTEYAPKFQGRVTITADTSTNTAYMELSSLRSEDTAVYYCYARGVREALDYWGQGTLVTVSSASTKGPSVFPLAPSSKSTSGGTAALGCLVKDYFPEPVTVSWNSGALTSGVHTFPAVLQSSGLYSLSSVVTVPSSSLGTQTYICNVNHKPSNTKVDKKVEPKSCGS

SEQ ID NO: 26315 - protein, 118 aa, synthetic construct
  source 1..118: note = Description of Artificial Sequence: Synthetic polypeptide; note = VH of XENP021342
EVQLVQSGAEVKKPGATVKISCKASGFNIKDYYMHWVQQAPGKGLEWMGWIDPENGDTEYAPKFQGRVTITADTSTNTAYMELSSLRSEDTAVYYCYARGVREALDYWGQGTLVTVSS

SEQ ID NO: 26316 - protein, 5 aa, synthetic construct
  source 1..5: note = Description of Artificial Sequence: Synthetic peptide; note = XENP021342 vhCDR1
DYYMH

SEQ ID NO: 26317 - protein, 17 aa, synthetic construct
  source 1..17: note = Description of Artificial Sequence: Synthetic peptide; note = XENP021342 vhCDR2
WIDPENGDTEYAPKFQG

SEQ ID NO: 26318 - protein, 9 aa, synthetic construct
  source 1..9: note = Description of Artificial Sequence: Synthetic peptide; note = XENP021342 vhCDR3
RGVREALDY

SEQ ID NO: 26319 - protein, 214 aa, synthetic construct; identical to SEQ ID NO: 17250
  source 1..214: note = Description of Artificial Sequence: Synthetic polypeptide; note = XENP021342 2A11_H1.111_L2_Fab Light Chain

SEQ ID NO: 26320 - protein, 107 aa, synthetic construct; identical to SEQ ID NO: 17251
  source 1..107: note = Description of Artificial Sequence: Synthetic polypeptide; note = VL of XENP021342

SEQ ID NO: 26321 - protein, 11 aa, synthetic construct
  source 1..11: note = Description of Artificial Sequence: Synthetic peptide; note = XENP021342 vlCDR1
QASQDIGNYLN

SEQ ID NO: 26322 - protein, 7 aa, synthetic construct
  source 1..7: note = Description of Artificial Sequence: Synthetic peptide; note = XENP021342 vlCDR2
YTSRLHS

SEQ ID NO: 26323 - protein, 9 aa, synthetic construct
  source 1..9: note = Description of Artificial Sequence: Synthetic peptide; note = XENP021342 vlCDR3
QQGNTLPYT

SEQ ID NO: 26324 - protein, 223 aa, synthetic construct
  source 1..223: note = Description of Artificial Sequence: Synthetic polypeptide; note = XENP021343 2A11_H1.112_L2_Fab Heavy Chain
EVQLVQSGAEVKKPGATVKISCKASGFNIKDYYMHWVQQAPGKGLEWMGWIDPENGDTEYAPKFQGRVTITADTSTNTAYMELSSLRSEDTAVYYCYARGVRGALDYWGQGTLVTVSSASTKGPSVFPLAPSSKSTSGGTAALGCLVKDYFPEPVTVSWNSGALTSGVHTFPAVLQSSGLYSLSSVVTVPSSSLGTQTYICNVNHKPSNTKVDKKVEPKSCGS

SEQ ID NO: 26325 - protein, 118 aa, synthetic construct
  source 1..118: note = Description of Artificial Sequence: Synthetic polypeptide; note = VH of XENP021343
EVQLVQSGAEVKKPGATVKISCKASGFNIKDYYMHWVQQAPGKGLEWMGWIDPENGDTEYAPKFQGRVTITADTSTNTAYMELSSLRSEDTAVYYCYARGVRGALDYWGQGTLVTVSS

SEQ ID NO: 26326 - protein, 5 aa, synthetic construct
  source 1..5: note = Description of Artificial Sequence: Synthetic peptide; note = XENP021343 vhCDR1
DYYMH

SEQ ID NO: 26327 - protein, 17 aa, synthetic construct
  source 1..17: note = Description of Artificial Sequence: Synthetic peptide; note = XENP021343 vhCDR2
WIDPENGDTEYAPKFQG

SEQ ID NO: 26328 - protein, 9 aa, synthetic construct
  source 1..9: note = Description of Artificial Sequence: Synthetic peptide; note = XENP021343 vhCDR3
RGVRGALDY

SEQ ID NO: 26329 - protein, 214 aa, synthetic construct; identical to SEQ ID NO: 17250
  source 1..214: note = Description of Artificial Sequence: Synthetic polypeptide; note = XENP021343 2A11_H1.112_L2_Fab Light Chain

SEQ ID NO: 26330 - protein, 107 aa, synthetic construct; identical to SEQ ID NO: 17251
  source 1..107: note = Description of Artificial Sequence: Synthetic polypeptide; note = VL of XENP021343

SEQ ID NO: 26331 - protein, 11 aa, synthetic construct
  source 1..11: note = Description of Artificial Sequence: Synthetic peptide; note = XENP021343 vlCDR1
QASQDIGNYLN

SEQ ID NO: 26332 - protein, 7 aa, synthetic construct
  source 1..7: note = Description of Artificial Sequence: Synthetic peptide; note = XENP021343 vlCDR2
YTSRLHS

SEQ ID NO: 26333 - protein, 9 aa, synthetic construct
  source 1..9: note = Description of Artificial Sequence: Synthetic peptide; note = XENP021343 vlCDR3
QQGNTLPYT

SEQ ID NO: 26334 - protein, 223 aa, synthetic construct
  source 1..223: note = Description of Artificial Sequence: Synthetic polypeptide; note = XENP021344 2A11_H1.113_L2_Fab Heavy Chain
EVQLVQSGAEVKKPGATVKISCKASGFNIKDYYMHWVQQAPGKGLEWMGWIDPENGDTEYAPKFQGRVTITADTSTNTAYMELSSLRSEDTAVYYCYARGVRKALDYWGQGTLVTVSSASTKGPSVFPLAPSSKSTSGGTAALGCLVKDYFPEPVTVSWNSGALTSGVHTFPAVLQSSGLYSLSSVVTVPSSSLGTQTYICNVNHKPSNTKVDKKVEPKSCGS

SEQ ID NO: 26335 - protein, 118 aa, synthetic construct
  source 1..118: note = Description of Artificial Sequence: Synthetic polypeptide; note = VH of XENP021344
EVQLVQSGAEVKKPGATVKISCKASGFNIKDYYMHWVQQAPGKGLEWMGWIDPENGDTEYAPKFQGRVTITADTSTNTAYMELSSLRSEDTAVYYCYARGVRKALDYWGQGTLVTVSS

SEQ ID NO: 26336 - protein, 5 aa, synthetic construct
  source 1..5: note = Description of Artificial Sequence: Synthetic peptide; note = XENP021344 vhCDR1
DYYMH

SEQ ID NO: 26337 - protein, 17 aa, synthetic construct
  source 1..17: note = Description of Artificial Sequence: Synthetic peptide; note = XENP021344 vhCDR2
WIDPENGDTEYAPKFQG

SEQ ID NO: 26338 - protein, 9 aa, synthetic construct
  source 1..9: note = Description of Artificial Sequence: Synthetic peptide; note = XENP021344 vhCDR3
RGVRKALDY

SEQ ID NO: 26339 - protein, 214 aa, synthetic construct; identical to SEQ ID NO: 17250
  source 1..214: note = Description of Artificial Sequence: Synthetic polypeptide; note = XENP021344 2A11_H1.113_L2_Fab Light Chain

SEQ ID NO: 26340 - protein, 107 aa, synthetic construct; identical to SEQ ID NO: 17251
  source 1..107: note = Description of Artificial Sequence: Synthetic polypeptide; note = VL of XENP021344

SEQ ID NO: 26341 - protein, 11 aa, synthetic construct
  source 1..11: note = Description of Artificial Sequence: Synthetic peptide; note = XENP021344 vlCDR1
QASQDIGNYLN

SEQ ID NO: 26342 - protein, 7 aa, synthetic construct
  source 1..7: note = Description of Artificial Sequence: Synthetic peptide; note = XENP021344 vlCDR2
YTSRLHS

SEQ ID NO: 26343 - protein, 9 aa, synthetic construct
  source 1..9: note = Description of Artificial Sequence: Synthetic peptide; note = XENP021344 vlCDR3
QQGNTLPYT

SEQ ID NO: 26344 - protein, 223 aa, synthetic construct
  source 1..223: note = Description of Artificial Sequence: Synthetic polypeptide; note = XENP021345 2A11_H1.114_L2_Fab Heavy Chain
EVQLVQSGAEVKKPGATVKISCKASGFNIKDYYMHWVQQAPGKGLEWMGWIDPENGDTEYAPKFQGRVTITADTSTNTAYMELSSLRSEDTAVYYCYARGVRQSLDYWGQGTLVTVSSASTKGPSVFPLAPSSKSTSGGTAALGCLVKDYFPEPVTVSWNSGALTSGVHTFPAVLQSSGLYSLSSVVTVPSSSLGTQTYICNVNHKPSNTKVDKKVEPKSCGS

SEQ ID NO: 26345 - protein, 118 aa, synthetic construct
  source 1..118: note = Description of Artificial Sequence: Synthetic polypeptide; note = VH of XENP021345
EVQLVQSGAEVKKPGATVKISCKASGFNIKDYYMHWVQQAPGKGLEWMGWIDPENGDTEYAPKFQGRVTITADTSTNTAYMELSSLRSEDTAVYYCYARGVRQSLDYWGQGTLVTVSS

SEQ ID NO: 26346 - protein, 5 aa, synthetic construct
  source 1..5: note = Description of Artificial Sequence: Synthetic peptide; note = XENP021345 vhCDR1
DYYMH

SEQ ID NO: 26347 - protein, 17 aa, synthetic construct
  source 1..17: note = Description of Artificial Sequence: Synthetic peptide; note = XENP021345 vhCDR2
WIDPENGDTEYAPKFQG

SEQ ID NO: 26348 - protein, 9 aa, synthetic construct
  source 1..9: note = Description of Artificial Sequence: Synthetic peptide; note = XENP021345 vhCDR3
RGVRQSLDY

SEQ ID NO: 26349 - protein, 214 aa, synthetic construct; identical to SEQ ID NO: 17250
  source 1..214: note = Description of Artificial Sequence: Synthetic polypeptide; note = XENP021345 2A11_H1.114_L2_Fab Light Chain

SEQ ID NO: 26350 - protein, 107 aa, synthetic construct; identical to SEQ ID NO: 17251
  source 1..107: note = Description of Artificial Sequence: Synthetic polypeptide; note = VL of XENP021345

SEQ ID NO: 26351 - protein, 11 aa, synthetic construct
  source 1..11: note = Description of Artificial Sequence: Synthetic peptide; note = XENP021345 vlCDR1
QASQDIGNYLN

SEQ ID NO: 26352 - protein, 7 aa, synthetic construct
  source 1..7: note = Description of Artificial Sequence: Synthetic peptide; note = XENP021345 vlCDR2
YTSRLHS

SEQ ID NO: 26353 - protein, 9 aa, synthetic construct
  source 1..9: note = Description of Artificial Sequence: Synthetic peptide; note = XENP021345 vlCDR3
QQGNTLPYT

SEQ ID NO: 26354 - protein, 223 aa, synthetic construct
  source 1..223: note = Description of Artificial Sequence: Synthetic polypeptide; note = XENP021346 2A11_H1.115_L2_Fab Heavy Chain
EVQLVQSGAEVKKPGATVKISCKASGFNIKDYYMHWVQQAPGKGLEWMGWIDPENGDTEYAPKFQGRVTITADTSTNTAYMELSSLRSEDTAVYYCYARGVRQTLDYWGQGTLVTVSSASTKGPSVFPLAPSSKSTSGGTAALGCLVKDYFPEPVTVSWNSGALTSGVHTFPAVLQSSGLYSLSSVVTVPSSSLGTQTYICNVNHKPSNTKVDKKVEPKSCGS

SEQ ID NO: 26355 - protein, 118 aa, synthetic construct
  source 1..118: note = Description of Artificial Sequence: Synthetic polypeptide; note = VH of XENP021346
EVQLVQSGAEVKKPGATVKISCKASGFNIKDYYMHWVQQAPGKGLEWMGWIDPENGDTEYAPKFQGRVTITADTSTNTAYMELSSLRSEDTAVYYCYARGVRQTLDYWGQGTLVTVSS

SEQ ID NO: 26356 - protein, 5 aa, synthetic construct
  source 1..5: note = Description of Artificial Sequence: Synthetic peptide; note = XENP021346 vhCDR1
DYYMH

SEQ ID NO: 26357 - protein, 17 aa, synthetic construct
  source 1..17: note = Description of Artificial Sequence: Synthetic peptide; note = XENP021346 vhCDR2
WIDPENGDTEYAPKFQG

SEQ ID NO: 26358 - protein, 9 aa, synthetic construct
  source 1..9: note = Description of Artificial Sequence: Synthetic peptide; note = XENP021346 vhCDR3
RGVRQTLDY

SEQ ID NO: 26359 - protein, 214 aa, synthetic construct; identical to SEQ ID NO: 17250
  source 1..214: note = Description of Artificial Sequence: Synthetic polypeptide; note = XENP021346 2A11_H1.115_L2_Fab Light Chain

SEQ ID NO: 26360 - protein, 107 aa, synthetic construct; identical to SEQ ID NO: 17251
  source 1..107: note = Description of Artificial Sequence: Synthetic polypeptide; note = VL of XENP021346

SEQ ID NO: 26361 - protein, 11 aa, synthetic construct
  source 1..11: note = Description of Artificial Sequence: Synthetic peptide; note = XENP021346 vlCDR1
QASQDIGNYLN

SEQ ID NO: 26362 - protein, 7 aa, synthetic construct
  source 1..7: note = Description of Artificial Sequence: Synthetic peptide; note = XENP021346 vlCDR2
YTSRLHS

SEQ ID NO: 26363 - protein, 9 aa, synthetic construct
  source 1..9: note = Description of Artificial Sequence: Synthetic peptide; note = XENP021346 vlCDR3
QQGNTLPYT

SEQ ID NO: 26364 - protein, 223 aa, synthetic construct
  source 1..223: note = Description of Artificial Sequence: Synthetic polypeptide; note = XENP021347 2A11_H1.116_L2_Fab Heavy Chain
EVQLVQSGAEVKKPGATVKISCKASGFNIKDYYMHWVQQAPGKGLEWMGWIDPENGDTEYAPKFQGRVTITADTSTNTAYMELSSLRSEDTAVYYCYARGVRQGLDYWGQGTLVTVSSASTKGPSVFPLAPSSKSTSGGTAALGCLVKDYFPEPVTVSWNSGALTSGVHTFPAVLQSSGLYSLSSVVTVPSSSLGTQTYICNVNHKPSNTKVDKKVEPKSCGS

SEQ ID NO: 26365 - protein, 118 aa, synthetic construct
  source 1..118: note = Description of Artificial Sequence: Synthetic polypeptide; note = VH of XENP021347
EVQLVQSGAEVKKPGATVKISCKASGFNIKDYYMHWVQQAPGKGLEWMGWIDPENGDTEYAPKFQGRVTITADTSTNTAYMELSSLRSEDTAVYYCYARGVRQGLDYWGQGTLVTVSS

SEQ ID NO: 26366 - protein, 5 aa, synthetic construct
  source 1..5: note = Description of Artificial Sequence: Synthetic peptide; note = XENP021347 vhCDR1
DYYMH

SEQ ID NO: 26367 - protein, 17 aa, synthetic construct
  source 1..17: note = Description of Artificial Sequence: Synthetic peptide; note = XENP021347 vhCDR2
WIDPENGDTEYAPKFQG

SEQ ID NO: 26368 - protein, 9 aa, synthetic construct
  source 1..9: note = Description of Artificial Sequence: Synthetic peptide; note = XENP021347 vhCDR3
RGVRQGLDY

SEQ ID NO: 26369 - protein, 214 aa, synthetic construct; identical to SEQ ID NO: 17250
  source 1..214: note = Description of Artificial Sequence: Synthetic polypeptide; note = XENP021347 2A11_H1.116_L2_Fab Light Chain

SEQ ID NO: 26370 - protein, 107 aa, synthetic construct; identical to SEQ ID NO: 17251
  source 1..107: note = Description of Artificial Sequence: Synthetic polypeptide; note = VL of XENP021347

SEQ ID NO: 26371 - protein, 11 aa, synthetic construct
  source 1..11: note = Description of Artificial Sequence: Synthetic peptide; note = XENP021347 vlCDR1
QASQDIGNYLN

SEQ ID NO: 26372 - protein, 7 aa, synthetic construct
  source 1..7: note = Description of Artificial Sequence: Synthetic peptide; note = XENP021347 vlCDR2
YTSRLHS

SEQ ID NO: 26373 - protein, 9 aa, synthetic construct
  source 1..9: note = Description of Artificial Sequence: Synthetic peptide; note = XENP021347 vlCDR3
QQGNTLPYT

SEQ ID NO: 26374 - protein, 223 aa, synthetic construct; identical to SEQ ID NO: 25194
  source 1..223: note = Description of Artificial Sequence: Synthetic polypeptide; note = XENP021348 2A11_H1_L2.1_Fab Heavy Chain

SEQ ID NO: 26375 - protein, 118 aa, synthetic construct; identical to SEQ ID NO: 17236
  source 1..118: note = Description of Artificial Sequence: Synthetic polypeptide; note = VH of XENP021348

SEQ ID NO: 26376 - protein, 5 aa, synthetic construct
  source 1..5: note = Description of Artificial Sequence: Synthetic peptide; note = XENP021348 vhCDR1
DYYMH

SEQ ID NO: 26377 - protein, 17 aa, synthetic construct
  source 1..17: note = Description of Artificial Sequence: Synthetic peptide; note = XENP021348 vhCDR2
WIDPENGDTEYAPKFQG

SEQ ID NO: 26378 - protein, 9 aa, synthetic construct
  source 1..9: note = Description of Artificial Sequence: Synthetic peptide; note = XENP021348 vhCDR3
RGVRQALDY

SEQ ID NO: 26379 - protein, 214 aa, synthetic construct
  source 1..214: note = Description of Artificial Sequence: Synthetic polypeptide; note = XENP021348 2A11_H1_L2.1_Fab Light Chain
DIQMTQSPAFLSVTPGEKVTITCQASEDIGNYLNWFQQKPDQTVKLLIYYTSRLHSGVPSRFSGSGSGTDYTFTISSLEAEDAATYFCQQGNTLPYTFGGGTKVEIKRTVAAPSVFIFPPSDEQLKSGTASVVCLLNNFYPREAKVQWKVDNALQSGNSQESVTEQDSKDSTYSLSSTLTLSKADYEKHKVYACEVTHQGLSSPVTKSFNRGEC

SEQ ID NO: 26380 - protein, 107 aa, synthetic construct
  source 1..107: note = Description of Artificial Sequence: Synthetic polypeptide; note = VL of XENP021348
DIQMTQSPAFLSVTPGEKVTITCQASEDIGNYLNWFQQKPDQTVKLLIYYTSRLHSGVPSRFSGSGSGTDYTFTISSLEAEDAATYFCQQGNTLPYTFGGGTKVEIK

SEQ ID NO: 26381 - protein, 11 aa, synthetic construct
  source 1..11: note = Description of Artificial Sequence: Synthetic peptide; note = XENP021348 vlCDR1
QASEDIGNYLN

SEQ ID NO: 26382 - protein, 7 aa, synthetic construct
  source 1..7: note = Description of Artificial Sequence: Synthetic peptide; note = XENP021348 vlCDR2
YTSRLHS

SEQ ID NO: 26383 - protein, 9 aa, synthetic construct
  source 1..9: note = Description of Artificial Sequence: Synthetic peptide; note = XENP021348 vlCDR3
QQGNTLPYT

SEQ ID NO: 26384 - protein, 223 aa, synthetic construct; identical to SEQ ID NO: 25194
  source 1..223: note = Description of Artificial Sequence: Synthetic polypeptide; note = XENP021349 2A11_H1_L2.2_Fab Heavy Chain

SEQ ID NO: 26385 - protein, 118 aa, synthetic construct; identical to SEQ ID NO: 17236
  source 1..118: note = Description of Artificial Sequence: Synthetic polypeptide; note = VH of XENP021349

SEQ ID NO: 26386 - protein, 5 aa, synthetic construct
  source 1..5: note = Description of Artificial Sequence: Synthetic peptide; note = XENP021349 vhCDR1
DYYMH

SEQ ID NO: 26387 - protein, 17 aa, synthetic construct
  source 1..17: note = Description of Artificial Sequence: Synthetic peptide; note = XENP021349 vhCDR2
WIDPENGDTEYAPKFQG

SEQ ID NO: 26388 - protein, 9 aa, synthetic construct
  source 1..9: note = Description of Artificial Sequence: Synthetic peptide; note = XENP021349 vhCDR3
RGVRQALDY

SEQ ID NO: 26389 - protein, 214 aa, synthetic construct
  source 1..214: note = Description of Artificial Sequence: Synthetic polypeptide; note = XENP021349 2A11_H1_L2.2_Fab Light Chain
DIQMTQSPAFLSVTPGEKVTITCQASQNIGNYLNWFQQKPDQTVKLLIYYTSRLHSGVPSRFSGSGSGTDYTFTISSLEAEDAATYFCQQGNTLPYTFGGGTKVEIKRTVAAPSVFIFPPSDEQLKSGTASVVCLLNNFYPREAKVQWKVDNALQSGNSQESVTEQDSKDSTYSLSSTLTLSKADYEKHKVYACEVTHQGLSSPVTKSFNRGEC

SEQ ID NO: 26390 - protein, 107 aa, synthetic construct
  source 1..107: note = Description of Artificial Sequence: Synthetic polypeptide; note = VL of XENP021349
DIQMTQSPAFLSVTPGEKVTITCQASQNIGNYLNWFQQKPDQTVKLLIYYTSRLHSGVPSRFSGSGSGTDYTFTISSLEAEDAATYFCQQGNTLPYTFGGGTKVEIK

SEQ ID NO: 26391 - protein, 11 aa, synthetic construct
  source 1..11: note = Description of Artificial Sequence: Synthetic peptide; note = XENP021349 vlCDR1
QASQNIGNYLN

SEQ ID NO: 26392 - protein, 7 aa, synthetic construct
  source 1..7: note = Description of Artificial Sequence: Synthetic peptide; note = XENP021349 vlCDR2
YTSRLHS

SEQ ID NO: 26393 - protein, 9 aa, synthetic construct
  source 1..9: note = Description of Artificial Sequence: Synthetic peptide; note = XENP021349 vlCDR3
QQGNTLPYT

SEQ ID NO: 26394 - protein, 223 aa, synthetic construct; identical to SEQ ID NO: 25194
  source 1..223: note = Description of Artificial Sequence: Synthetic polypeptide; note = XENP021350 2A11_H1_L2.3_Fab Heavy Chain

SEQ ID NO: 26395 - protein, 118 aa, synthetic construct; identical to SEQ ID NO: 17236
  source 1..118: note = Description of Artificial Sequence: Synthetic polypeptide; note = VH of XENP021350

SEQ ID NO: 26396 - protein, 5 aa, synthetic construct
  source 1..5: note = Description of Artificial Sequence: Synthetic peptide; note = XENP021350 vhCDR1
DYYMH

SEQ ID NO: 26397 - protein, 17 aa, synthetic construct
  source 1..17: note = Description of Artificial Sequence: Synthetic peptide; note = XENP021350 vhCDR2
WIDPENGDTEYAPKFQG

SEQ ID NO: 26398 - protein, 9 aa, synthetic construct
  source 1..9: note = Description of Artificial Sequence: Synthetic peptide; note = XENP021350 vhCDR3
RGVRQALDY

SEQ ID NO: 26399 - protein, 214 aa, synthetic construct
  source 1..214: note = Description of Artificial Sequence: Synthetic polypeptide; note = XENP021350 2A11_H1_L2.3_Fab Light Chain
DIQMTQSPAFLSVTPGEKVTITCQASQEIGNYLNWFQQKPDQTVKLLIYYTSRLHSGVPSRFSGSGSGTDYTFTISSLEAEDAATYFCQQGNTLPYTFGGGTKVEIKRTVAAPSVFIFPPSDEQLKSGTASVVCLLNNFYPREAKVQWKVDNALQSGNSQESVTEQDSKDSTYSLSSTLTLSKADYEKHKVYACEVTHQGLSSPVTKSFNRGEC

SEQ ID NO: 26400 - protein, 107 aa, synthetic construct
  source 1..107: note = Description of Artificial Sequence: Synthetic polypeptide; note = VL of XENP021350
DIQMTQSPAFLSVTPGEKVTITCQASQEIGNYLNWFQQKPDQTVKLLIYYTSRLHSGVPSRFSGSGSGTDYTFTISSLEAEDAATYFCQQGNTLPYTFGGGTKVEIK

SEQ ID NO: 26401 - protein, 11 aa, synthetic construct
  source 1..11: note = Description of Artificial Sequence: Synthetic peptide; note = XENP021350 vlCDR1
QASQEIGNYLN

SEQ ID NO: 26402 - protein, 7 aa, synthetic construct
  source 1..7: note = Description of Artificial Sequence: Synthetic peptide; note = XENP021350 vlCDR2
YTSRLHS

SEQ ID NO: 26403 - protein, 9 aa, synthetic construct
  source 1..9: note = Description of Artificial Sequence: Synthetic peptide; note = XENP021350 vlCDR3
QQGNTLPYT

SEQ ID NO: 26404 - protein, 223 aa, synthetic construct; identical to SEQ ID NO: 25194
  source 1..223: note = Description of Artificial Sequence: Synthetic polypeptide; note = XENP021351 2A11_H1_L2.4_Fab Heavy Chain

SEQ ID NO: 26405 - protein, 118 aa, synthetic construct; identical to SEQ ID NO: 17236
  source 1..118: note = Description of Artificial Sequence: Synthetic polypeptide; note = VH of XENP021351

SEQ ID NO: 26406 - protein, 5 aa, synthetic construct
  source 1..5: note = Description of Artificial Sequence: Synthetic peptide; note = XENP021351 vhCDR1
DYYMH

SEQ ID NO: 26407 - protein, 17 aa, synthetic construct
  source 1..17: note = Description of Artificial Sequence: Synthetic peptide; note = XENP021351 vhCDR2
WIDPENGDTEYAPKFQG

SEQ ID NO: 26408 - protein, 9 aa, synthetic construct
  source 1..9: note = Description of Artificial Sequence: Synthetic peptide; note = XENP021351 vhCDR3
RGVRQALDY

SEQ ID NO: 26409 - protein, 214 aa, synthetic construct
  source 1..214: note = Description of Artificial Sequence: Synthetic polypeptide; note = XENP021351 2A11_H1_L2.4_Fab Light Chain
DIQMTQSPAFLSVTPGEKVTITCQASQHIGNYLNWFQQKPDQTVKLLIYYTSRLHSGVPSRFSGSGSGTDYTFTISSLEAEDAATYFCQQGNTLPYTFGGGTKVEIKRTVAAPSVFIFPPSDEQLKSGTASVVCLLNNFYPREAKVQWKVDNALQSGNSQESVTEQDSKDSTYSLSSTLTLSKADYEKHKVYACEVTHQGLSSPVTKSFNRGEC

SEQ ID NO: 26410 - protein, 107 aa, synthetic construct
  source 1..107: note = Description of Artificial Sequence: Synthetic polypeptide; note = VL of XENP021351
DIQMTQSPAFLSVTPGEKVTITCQASQHIGNYLNWFQQKPDQTVKLLIYYTSRLHSGVPSRFSGSGSGTDYTFTISSLEAEDAATYFCQQGNTLPYTFGGGTKVEIK

SEQ ID NO: 26411 - protein, 11 aa, synthetic construct
  source 1..11: note = Description of Artificial Sequence: Synthetic peptide; note = XENP021351 vlCDR1
QASQHIGNYLN

SEQ ID NO: 26412 - protein, 7 aa, synthetic construct
  source 1..7: note = Description of Artificial Sequence: Synthetic peptide; note = XENP021351 vlCDR2
YTSRLHS

SEQ ID NO: 26413 - protein, 9 aa, synthetic construct
  source 1..9: note = Description of Artificial Sequence: Synthetic peptide; note = XENP021351 vlCDR3
QQGNTLPYT

SEQ ID NO: 26414 - protein, 223 aa, synthetic construct; identical to SEQ ID NO: 25194
  source 1..223: note = Description of Artificial Sequence: Synthetic polypeptide; note = XENP021352 2A11_H1_L2.5_Fab Heavy Chain

SEQ ID NO: 26415 - protein, 118 aa, synthetic construct; identical to SEQ ID NO: 17236
  source 1..118: note = Description of Artificial Sequence: Synthetic polypeptide; note = VH of XENP021352

SEQ ID NO: 26416 - protein, 5 aa, synthetic construct
  source 1..5: note = Description of Artificial Sequence: Synthetic peptide; note = XENP021352 vhCDR1
DYYMH

SEQ ID NO: 26417 - protein, 17 aa, synthetic construct
  source 1..17: note = Description of Artificial Sequence: Synthetic peptide; note = XENP021352 vhCDR2
WIDPENGDTEYAPKFQG

SEQ ID NO: 26418 - protein, 9 aa, synthetic construct
  source 1..9: note = Description of Artificial Sequence: Synthetic peptide; note = XENP021352 vhCDR3
RGVRQALDY

SEQ ID NO: 26419 - protein, 214 aa, synthetic construct
  source 1..214: note = Description of Artificial Sequence: Synthetic polypeptide; note = XENP021352 2A11_H1_L2.5_Fab Light Chain
DIQMTQSPAFLSVTPGEKVTITCQASQSIGNYLNWFQQKPDQTVKLLIYYTSRLHSGVPSRFSGSGSGTDYTFTISSLEAEDAATYFCQQGNTLPYTFGGGTKVEIKRTVAAPSVFIFPPSDEQLKSGTASVVCLLNNFYPREAKVQWKVDNALQSGNSQESVTEQDSKDSTYSLSSTLTLSKADYEKHKVYACEVTHQGLSSPVTKSFNRGEC

SEQ ID NO: 26420 - protein, 107 aa, synthetic construct
  source 1..107: note = Description of Artificial Sequence: Synthetic polypeptide; note = VL of XENP021352
DIQMTQSPAFLSVTPGEKVTITCQASQSIGNYLNWFQQKPDQTVKLLIYYTSRLHSGVPSRFSGSGSGTDYTFTISSLEAEDAATYFCQQGNTLPYTFGGGTKVEIK

SEQ ID NO: 26421 - protein, 11 aa, synthetic construct
  source 1..11: note = Description of Artificial Sequence: Synthetic peptide; note = XENP021352 vlCDR1
QASQSIGNYLN

SEQ ID NO: 26422 - protein, 7 aa, synthetic construct
  source 1..7: note = Description of Artificial Sequence: Synthetic peptide; note = XENP021352 vlCDR2
YTSRLHS

SEQ ID NO: 26423 - protein, 9 aa, synthetic construct
  source 1..9: note = Description of Artificial Sequence: Synthetic peptide; note = XENP021352 vlCDR3
QQGNTLPYT

SEQ ID NO: 26424 - protein, 223 aa, synthetic construct; identical to SEQ ID NO: 25194
  source 1..223: note = Description of Artificial Sequence: Synthetic polypeptide; note = XENP021353 2A11_H1_L2.6_Fab Heavy Chain

SEQ ID NO: 26425 - protein, 118 aa, synthetic construct; identical to SEQ ID NO: 17236
  source 1..118: note = Description of Artificial Sequence: Synthetic polypeptide; note = VH of XENP021353

SEQ ID NO: 26426 - protein, 5 aa, synthetic construct
  source 1..5: note = Description of Artificial Sequence: Synthetic peptide; note = XENP021353 vhCDR1
DYYMH

SEQ ID NO: 26427 - protein, 17 aa, synthetic construct
  source 1..17: note = Description of Artificial Sequence: Synthetic peptide; note = XENP021353 vhCDR2
WIDPENGDTEYAPKFQG

SEQ ID NO: 26428 - protein, 9 aa, synthetic construct
  source 1..9: note = Description of Artificial Sequence: Synthetic peptide; note = XENP021353 vhCDR3
RGVRQALDY

SEQ ID NO: 26429 - protein, 214 aa, synthetic construct
  source 1..214: note = Description of Artificial Sequence: Synthetic polypeptide; note = XENP021353 2A11_H1_L2.6_Fab Light Chain
DIQMTQSPAFLSVTPGEKVTITCQASQRIGNYLNWFQQKPDQTVKLLIYYTSRLHSGVPSRFSGSGSGTDYTFTISSLEAEDAATYFCQQGNTLPYTFGGGTKVEIKRTVAAPSVFIFPPSDEQLKSGTASVVCLLNNFYPREAKVQWKVDNALQSGNSQESVTEQDSKDSTYSLSSTLTLSKADYEKHKVYACEVTHQGLSSPVTKSFNRGEC

SEQ ID NO: 26430 - protein, 107 aa, synthetic construct
  source 1..107: note = Description of Artificial Sequence: Synthetic polypeptide; note = VL of XENP021353
DIQMTQSPAFLSVTPGEKVTITCQASQRIGNYLNWFQQKPDQTVKLLIYYTSRLHSGVPSRFSGSGSGTDYTFTISSLEAEDAATYFCQQGNTLPYTFGGGTKVEIK

SEQ ID NO: 26431 - protein, 11 aa, synthetic construct
  source 1..11: note = Description of Artificial Sequence: Synthetic peptide; note = XENP021353 vlCDR1
QASQRIGNYLN

SEQ ID NO: 26432 - protein, 7 aa, synthetic construct
  source 1..7: note = Description of Artificial Sequence: Synthetic peptide; note = XENP021353 vlCDR2
YTSRLHS

SEQ ID NO: 26433 - protein, 9 aa, synthetic construct
  source 1..9: note = Description of Artificial Sequence: Synthetic peptide; note = XENP021353 vlCDR3
QQGNTLPYT

SEQ ID NO: 26434 - protein, 223 aa, synthetic construct; identical to SEQ ID NO: 25194
  source 1..223: note = Description of Artificial Sequence: Synthetic polypeptide; note = XENP021354 2A11_H1_L2.7_Fab Heavy Chain

SEQ ID NO: 26435 - protein, 118 aa, synthetic construct; identical to SEQ ID NO: 17236
  source 1..118: note = Description of Artificial Sequence: Synthetic polypeptide; note = VH of XENP021354

SEQ ID NO: 26436 - protein, 5 aa, synthetic construct
  source 1..5: note = Description of Artificial Sequence: Synthetic peptide; note = XENP021354 vhCDR1
DYYMH

SEQ ID NO: 26437 - protein, 17 aa, synthetic construct
  source 1..17: note = Description of Artificial Sequence: Synthetic peptide; note = XENP021354 vhCDR2
WIDPENGDTEYAPKFQG

SEQ ID NO: 26438 - protein, 9 aa, synthetic construct
  source 1..9: note = Description of Artificial Sequence: Synthetic peptide; note = XENP021354 vhCDR3
RGVRQALDY

SEQ ID NO: 26439 - protein, 214 aa, synthetic construct
  source 1..214: note = Description of Artificial Sequence: Synthetic polypeptide; note = XENP021354 2A11_H1_L2.7_Fab Light Chain
DIQMTQSPAFLSVTPGEKVTITCQASQLIGNYLNWFQQKPDQTVKLLIYYTSRLHSGVPSRFSGSGSGTDYTFTISSLEAEDAATYFCQQGNTLPYTFGGGTKVEIKRTVAAPSVFIFPPSDEQLKSGTASVVCLLNNFYPREAKVQWKVDNALQSGNSQESVTEQDSKDSTYSLSSTLTLSKADYEKHKVYACEVTHQGLSSPVTKSFNRGEC

SEQ ID NO: 26440 - protein, 107 aa, synthetic construct
  source 1..107: note = Description of Artificial Sequence: Synthetic polypeptide; note = VL of XENP021354
DIQMTQSPAFLSVTPGEKVTITCQASQLIGNYLNWFQQKPDQTVKLLIYYTSRLHSGVPSRFSGSGSGTDYTFTISSLEAEDAATYFCQQGNTLPYTFGGGTKVEIK

SEQ ID NO: 26441 - protein, 11 aa, synthetic construct
  source 1..11: note = Description of Artificial Sequence: Synthetic peptide; note = XENP021354 vlCDR1
QASQLIGNYLN

SEQ ID NO: 26442 - protein, 7 aa, synthetic construct
  source 1..7: note = Description of Artificial Sequence: Synthetic peptide; note = XENP021354 vlCDR2
YTSRLHS

SEQ ID NO: 26443 - protein, 9 aa, synthetic construct
  source 1..9: note = Description of Artificial Sequence: Synthetic peptide; note = XENP021354 vlCDR3
QQGNTLPYT

SEQ ID NO: 26444 - protein, 223 aa, synthetic construct; identical to SEQ ID NO: 25194
  source 1..223: note = Description of Artificial Sequence: Synthetic polypeptide; note = XENP021355 2A11_H1_L2.8_Fab Heavy Chain

SEQ ID NO: 26445 - protein, 118 aa, synthetic construct; identical to SEQ ID NO: 17236
  source 1..118: note = Description of Artificial Sequence: Synthetic polypeptide; note = VH of XENP021355

SEQ ID NO: 26446 - protein, 5 aa, synthetic construct
  source 1..5: note = Description of Artificial Sequence: Synthetic peptide; note = XENP021355 vhCDR1
DYYMH

SEQ ID NO: 26447 - protein, 17 aa, synthetic construct
  source 1..17: note = Description of Artificial Sequence: Synthetic peptide; note = XENP021355 vhCDR2
WIDPENGDTEYAPKFQG

SEQ ID NO: 26448 - protein, 9 aa, synthetic construct
  source 1..9: note = Description of Artificial Sequence: Synthetic peptide; note = XENP021355 vhCDR3
RGVRQALDY

SEQ ID NO: 26449 - protein, 214 aa, synthetic construct
  source 1..214: note = Description of Artificial Sequence: Synthetic polypeptide; note = XENP021355 2A11_H1_L2.8_Fab Light Chain
DIQMTQSPAFLSVTPGEKVTITCQASQTIGNYLNWFQQKPDQTVKLLIYYTSRLHSGVPSRFSGSGSGTDYTFTISSLEAEDAATYFCQQGNTLPYTFGGGTKVEIKRTVAAPSVFIFPPSDEQLKSGTASVVCLLNNFYPREAKVQWKVDNALQSGNSQESVTEQDSKDSTYSLSSTLTLSKADYEKHKVYACEVTHQGLSSPVTKSFNRGEC

SEQ ID NO: 26450 - protein, 107 aa, synthetic construct
  source 1..107: note = Description of Artificial Sequence: Synthetic polypeptide; note = VL of XENP021355
DIQMTQSPAFLSVTPGEKVTITCQASQTIGNYLNWFQQKPDQTVKLLIYYTSRLHSGVPSRFSGSGSGTDYTFTISSLEAEDAATYFCQQGNTLPYTFGGGTKVEIK

SEQ ID NO: 26451 - protein, 11 aa, synthetic construct
  source 1..11: note = Description of Artificial Sequence: Synthetic peptide; note = XENP021355 vlCDR1
QASQTIGNYLN

SEQ ID NO: 26452 - protein, 7 aa, synthetic construct
  source 1..7: note = Description of Artificial Sequence: Synthetic peptide; note = XENP021355 vlCDR2
YTSRLHS

SEQ ID NO: 26453 - protein, 9 aa, synthetic construct
  source 1..9: note = Description of Artificial Sequence: Synthetic peptide; note = XENP021355 vlCDR3
QQGNTLPYT

SEQ ID NO: 26454 - protein, 223 aa, synthetic construct; identical to SEQ ID NO: 25194
  source 1..223: note = Description of Artificial Sequence: Synthetic polypeptide; note = XENP021356 2A11_H1_L2.9_Fab Heavy Chain

SEQ ID NO: 26455 - protein, 118 aa, synthetic construct; identical to SEQ ID NO: 17236
  source 1..118: note = Description of Artificial Sequence: Synthetic polypeptide; note = VH of XENP021356

SEQ ID NO: 26456 - protein, 5 aa, synthetic construct
  source 1..5: note = Description of Artificial Sequence: Synthetic peptide; note = XENP021356 vhCDR1
DYYMH

SEQ ID NO: 26457 - protein, 17 aa, synthetic construct
  source 1..17: note = Description of Artificial Sequence: Synthetic peptide; note = XENP021356 vhCDR2
WIDPENGDTEYAPKFQG

SEQ ID NO: 26458 - protein, 9 aa, synthetic construct
  source 1..9: note = Description of Artificial Sequence: Synthetic peptide; note = XENP021356 vhCDR3
RGVRQALDY

SEQ ID NO: 26459 - protein, 214 aa, synthetic construct
  source 1..214: note = Description of Artificial Sequence: Synthetic polypeptide; note = XENP021356 2A11_H1_L2.9_Fab Light Chain
DIQMTQSPAFLSVTPGEKVTITCQASQQIGNYLNWFQQKPDQTVKLLIYYTSRLHSGVPSRFSGSGSGTDYTFTISSLEAEDAATYFCQQGNTLPYTFGGGTKVEIKRTVAAPSVFIFPPSDEQLKSGTASVVCLLNNFYPREAKVQWKVDNALQSGNSQESVTEQDSKDSTYSLSSTLTLSKADYEKHKVYACEVTHQGLSSPVTKSFNRGEC

SEQ ID NO: 26460 - protein, 107 aa, synthetic construct
  source 1..107: note = Description of Artificial Sequence: Synthetic polypeptide; note = VL of XENP021356
DIQMTQSPAFLSVTPGEKVTITCQASQQIGNYLNWFQQKPDQTVKLLIYYTSRLHSGVPSRFSGSGSGTDYTFTISSLEAEDAATYFCQQGNTLPYTFGGGTKVEIK

SEQ ID NO: 26461 - protein, 11 aa, synthetic construct
  source 1..11: note = Description of Artificial Sequence: Synthetic peptide; note = XENP021356 vlCDR1
QASQQIGNYLN

SEQ ID NO: 26462 - protein, 7 aa, synthetic construct
  source 1..7: note = Description of Artificial Sequence: Synthetic peptide; note = XENP021356 vlCDR2
YTSRLHS

SEQ ID NO: 26463 - protein, 9 aa, synthetic construct
  source 1..9: note = Description of Artificial Sequence: Synthetic peptide; note = XENP021356 vlCDR3
QQGNTLPYT

SEQ ID NO: 26464 - protein, 223 aa, synthetic construct; identical to SEQ ID NO: 25194
  source 1..223: note = Description of Artificial Sequence: Synthetic polypeptide; note = XENP021357 2A11_H1_L2.10_Fab Heavy Chain

SEQ ID NO: 26465 - protein, 118 aa, synthetic construct; identical to SEQ ID NO: 17236
  source 1..118: note = Description of Artificial Sequence: Synthetic polypeptide; note = VH of XENP021357

SEQ ID NO: 26466 - protein, 5 aa, synthetic construct
  source 1..5: note = Description of Artificial Sequence: Synthetic peptide; note = XENP021357 vhCDR1
DYYMH

SEQ ID NO: 26467 - protein, 17 aa, synthetic construct
  source 1..17: note = Description of Artificial Sequence: Synthetic peptide; note = XENP021357 vhCDR2
WIDPENGDTEYAPKFQG

SEQ ID NO: 26468 - protein, 9 aa, synthetic construct
  source 1..9: note = Description of Artificial Sequence: Synthetic peptide; note = XENP021357 vhCDR3
RGVRQALDY

SEQ ID NO: 26469 - protein, 214 aa, synthetic construct
  source 1..214: note = Description of Artificial Sequence: Synthetic polypeptide; note = XENP021357 2A11_H1_L2.10_Fab Light Chain
DIQMTQSPAFLSVTPGEKVTITCQASQYIGNYLNWFQQKPDQTVKLLIYYTSRLHSGVPSRFSGSGSGTDYTFTISSLEAEDAATYFCQQGNTLPYTFGGGTKVEIKRTVAAPSVFIFPPSDEQLKSGTASVVCLLNNFYPREAKVQWKVDNALQSGNSQESVTEQDSKDSTYSLSSTLTLSKADYEKHKVYACEVTHQGLSSPVTKSFNRGEC

SEQ ID NO: 26470 - protein, 107 aa, synthetic construct
  source 1..107: note = Description of Artificial Sequence: Synthetic polypeptide; note = VL of XENP021357
DIQMTQSPAFLSVTPGEKVTITCQASQYIGNYLNWFQQKPDQTVKLLIYYTSRLHSGVPSRFSGSGSGTDYTFTISSLEAEDAATYFCQQGNTLPYTFGGGTKVEIK

SEQ ID NO: 26471 - protein, 11 aa, synthetic construct
  source 1..11: note = Description of Artificial Sequence: Synthetic peptide; note = XENP021357 vlCDR1
QASQYIGNYLN

SEQ ID NO: 26472 - protein, 7 aa, synthetic construct
  source 1..7: note = Description of Artificial Sequence: Synthetic peptide; note = XENP021357 vlCDR2
YTSRLHS

SEQ ID NO: 26473 - protein, 9 aa, synthetic construct
  source 1..9: note = Description of Artificial Sequence: Synthetic peptide; note = XENP021357 vlCDR3
QQGNTLPYT

SEQ ID NO: 26474 - protein, 223 aa, synthetic construct; identical to SEQ ID NO: 25194
  source 1..223: note = Description of Artificial Sequence: Synthetic polypeptide; note = XENP021358 2A11_H1_L2.11_Fab Heavy Chain

SEQ ID NO: 26475 - protein, 118 aa, synthetic construct; identical to SEQ ID NO: 17236
  source 1..118: note = Description of Artificial Sequence: Synthetic polypeptide; note = VH of XENP021358

SEQ ID NO: 26476 - protein, 5 aa, synthetic construct
  source 1..5: note = Description of Artificial Sequence: Synthetic peptide; note = XENP021358 vhCDR1
DYYMH

SEQ ID NO: 26477 - protein, 17 aa, synthetic construct
  source 1..17: note = Description of Artificial Sequence: Synthetic peptide; note = XENP021358 vhCDR2
WIDPENGDTEYAPKFQG

SEQ ID NO: 26478 - protein, 9 aa, synthetic construct
  source 1..9: note = Description of Artificial Sequence: Synthetic peptide; note = XENP021358 vhCDR3
RGVRQALDY

SEQ ID NO: 26479 - protein, 214 aa, synthetic construct
  source 1..214: note = Description of Artificial Sequence: Synthetic polypeptide; note = XENP021358 2A11_H1_L2.11_Fab Light Chain
DIQMTQSPAFLSVTPGEKVTITCQASQDVGNYLNWFQQKPDQTVKLLIYYTSRLHSGVPSRFSGSGSGTDYTFTISSLEAEDAATYFCQQGNTLPYTFGGGTKVEIKRTVAAPSVFIFPPSDEQLKSGTASVVCLLNNFYPREAKVQWKVDNALQSGNSQESVTEQDSKDSTYSLSSTLTLSKADYEKHKVYACEVTHQGLSSPVTKSFNRGEC

SEQ ID NO: 26480 - protein, 107 aa, synthetic construct
  source 1..107: note = Description of Artificial Sequence: Synthetic polypeptide; note = VL of XENP021358
DIQMTQSPAFLSVTPGEKVTITCQASQDVGNYLNWFQQKPDQTVKLLIYYTSRLHSGVPSRFSGSGSGTDYTFTISSLEAEDAATYFCQQGNTLPYTFGGGTKVEIK

SEQ ID NO: 26481 - protein, 11 aa, synthetic construct
  source 1..11: note = Description of Artificial Sequence: Synthetic peptide; note = XENP021358 vlCDR1
QASQDVGNYLN

SEQ ID NO: 26482 - protein, 7 aa, synthetic construct
  source 1..7: note = Description of Artificial Sequence: Synthetic peptide; note = XENP021358 vlCDR2
YTSRLHS

SEQ ID NO: 26483 - protein, 9 aa, synthetic construct
  source 1..9: note = Description of Artificial Sequence: Synthetic peptide; note = XENP021358 vlCDR3
QQGNTLPYT

SEQ ID NO: 26484 - protein, 223 aa, synthetic construct; identical to SEQ ID NO: 25194
  source 1..223: note = Description of Artificial Sequence: Synthetic polypeptide; note = XENP021359 2A11_H1_L2.12_Fab Heavy Chain

SEQ ID NO: 26485 - protein, 118 aa, synthetic construct; identical to SEQ ID NO: 17236
  source 1..118: note = Description of Artificial Sequence: Synthetic polypeptide; note = VH of XENP021359

SEQ ID NO: 26486 - protein, 5 aa, synthetic construct
  source 1..5: note = Description of Artificial Sequence: Synthetic peptide; note = XENP021359 vhCDR1
DYYMH

SEQ ID NO: 26487 - protein, 17 aa, synthetic construct
  source 1..17: note = Description of Artificial Sequence: Synthetic peptide; note = XENP021359 vhCDR2
WIDPENGDTEYAPKFQG

SEQ ID NO: 26488 - protein, 9 aa, synthetic construct
  source 1..9: note = Description of Artificial Sequence: Synthetic peptide; note = XENP021359 vhCDR3
RGVRQALDY

SEQ ID NO: 26489 - protein, 214 aa, synthetic construct
  source 1..214: note = Description of Artificial Sequence: Synthetic polypeptide; note = XENP021359 2A11_H1_L2.12_Fab Light Chain
DIQMTQSPAFLSVTPGEKVTITCQASQDLGNYLNWFQQKPDQTVKLLIYYTSRLHSGVPSRFSGSGSGTDYTFTISSLEAEDAATYFCQQGNTLPYTFGGGTKVEIKRTVAAPSVFIFPPSDEQLKSGTASVVCLLNNFYPREAKVQWKVDNALQSGNSQESVTEQDSKDSTYSLSSTLTLSKADYEKHKVYACEVTHQGLSSPVTKSFNRGEC

SEQ ID NO: 26490 - protein, 107 aa, synthetic construct
  source 1..107: note = Description of Artificial Sequence: Synthetic polypeptide; note = VL of XENP021359
DIQMTQSPAFLSVTPGEKVTITCQASQDLGNYLNWFQQKPDQTVKLLIYYTSRLHSGVPSRFSGSGSGTDYTFTISSLEAEDAATYFCQQGNTLPYTFGGGTKVEIK

SEQ ID NO: 26491 - protein, 11 aa, synthetic construct
  source 1..11: note = Description of Artificial Sequence: Synthetic peptide; note = XENP021359 vlCDR1
QASQDLGNYLN

SEQ ID NO: 26492 - protein, 7 aa, synthetic construct
  source 1..7: note = Description of Artificial Sequence: Synthetic peptide; note = XENP021359 vlCDR2
YTSRLHS

SEQ ID NO: 26493 - protein, 9 aa, synthetic construct
  source 1..9: note = Description of Artificial Sequence: Synthetic peptide; note = XENP021359 vlCDR3
QQGNTLPYT

SEQ ID NO: 26494 - protein, 223 aa, synthetic construct; identical to SEQ ID NO: 25194
  source 1..223: note = Description of Artificial Sequence: Synthetic polypeptide; note = XENP021360 2A11_H1_L2.13_Fab Heavy Chain

SEQ ID NO: 26495 - protein, 118 aa, synthetic construct; identical to SEQ ID NO: 17236
  source 1..118: note = Description of Artificial Sequence: Synthetic polypeptide; note = VH of XENP021360

SEQ ID NO: 26496 - protein, 5 aa, synthetic construct
  source 1..5: note = Description of Artificial Sequence: Synthetic peptide; note = XENP021360 vhCDR1
DYYMH

SEQ ID NO: 26497 - protein, 17 aa, synthetic construct
  source 1..17: note = Description of Artificial Sequence: Synthetic peptide; note = XENP021360 vhCDR2
WIDPENGDTEYAPKFQG

SEQ ID NO: 26498 - protein, 9 aa, synthetic construct
  source 1..9: note = Description of Artificial Sequence: Synthetic peptide; note = XENP021360 vhCDR3
RGVRQALDY

SEQ ID NO: 26499 - protein, 214 aa, synthetic construct
  source 1..214: note = Description of Artificial Sequence: Synthetic polypeptide; note = XENP021360 2A11_H1_L2.13_Fab Light Chain
DIQMTQSPAFLSVTPGEKVTITCQASQDIANYLNWFQQKPDQTVKLLIYYTSRLHSGVPSRFSGSGSGTDYTFTISSLEAEDAATYFCQQGNTLPYTFGGGTKVEIKRTVAAPSVFIFPPSDEQLKSGTASVVCLLNNFYPREAKVQWKVDNALQSGNSQESVTEQDSKDSTYSLSSTLTLSKADYEKHKVYACEVTHQGLSSPVTKSFNRGEC

SEQ ID NO: 26500 - protein, 107 aa, synthetic construct
  source 1..107: note = Description of Artificial Sequence: Synthetic polypeptide; note = VL of XENP021360
DIQMTQSPAFLSVTPGEKVTITCQASQDIANYLNWFQQKPDQTVKLLIYYTSRLHSGVPSRFSGSGSGTDYTFTISSLEAEDAATYFCQQGNTLPYTFGGGTKVEIK

SEQ ID NO: 26501 - protein, 11 aa, synthetic construct
  source 1..11: note = Description of Artificial Sequence: Synthetic peptide; note = XENP021360 vlCDR1
QASQDIANYLN

SEQ ID NO: 26502 - protein, 7 aa, synthetic construct
  source 1..7: note = Description of Artificial Sequence: Synthetic peptide; note = XENP021360 vlCDR2
YTSRLHS

SEQ ID NO: 26503 - protein, 9 aa, synthetic construct
  source 1..9: note = Description of Artificial Sequence: Synthetic peptide; note = XENP021360 vlCDR3
QQGNTLPYT

SEQ ID NO: 26504 - protein, 223 aa, synthetic construct; identical to SEQ ID NO: 25194
  source 1..223: note = Description of Artificial Sequence: Synthetic polypeptide; note = XENP021361 2A11_H1_L2.14_Fab Heavy Chain

SEQ ID NO: 26505 - protein, 118 aa, synthetic construct; identical to SEQ ID NO: 17236
  source 1..118: note = Description of Artificial Sequence: Synthetic polypeptide; note = VH of XENP021361

SEQ ID NO: 26506 - protein, 5 aa, synthetic construct
  source 1..5: note = Description of Artificial Sequence: Synthetic peptide; note = XENP021361 vhCDR1
DYYMH

SEQ ID NO: 26507 - protein, 17 aa, synthetic construct
  source 1..17: note = Description of Artificial Sequence: Synthetic peptide; note = XENP021361 vhCDR2
WIDPENGDTEYAPKFQG

SEQ ID NO: 26508 - protein, 9 aa, synthetic construct
  source 1..9: note = Description of Artificial Sequence: Synthetic peptide; note = XENP021361 vhCDR3
RGVRQALDY

SEQ ID NO: 26509 - protein, 214 aa, synthetic construct
  source 1..214: note = Description of Artificial Sequence: Synthetic polypeptide; note = XENP021361 2A11_H1_L2.14_Fab Light Chain
DIQMTQSPAFLSVTPGEKVTITCQASQDISNYLNWFQQKPDQTVKLLIYYTSRLHSGVPSRFSGSGSGTDYTFTISSLEAEDAATYFCQQGNTLPYTFGGGTKVEIKRTVAAPSVFIFPPSDEQLKSGTASVVCLLNNFYPREAKVQWKVDNALQSGNSQESVTEQDSKDSTYSLSSTLTLSKADYEKHKVYACEVTHQGLSSPVTKSFNRGEC

SEQ ID NO: 26510 - protein, 107 aa, synthetic construct
  source 1..107: note = Description of Artificial Sequence: Synthetic polypeptide; note = VL of XENP021361
DIQMTQSPAFLSVTPGEKVTITCQASQDISNYLNWFQQKPDQTVKLLIYYTSRLHSGVPSRFSGSGSGTDYTFTISSLEAEDAATYFCQQGNTLPYTFGGGTKVEIK

SEQ ID NO: 26511 - protein, 11 aa, synthetic construct
  source 1..11: note = Description of Artificial Sequence: Synthetic peptide; note = XENP021361 vlCDR1
QASQDISNYLN

SEQ ID NO: 26512 - protein, 7 aa, synthetic construct
  source 1..7: note = Description of Artificial Sequence: Synthetic peptide; note = XENP021361 vlCDR2
YTSRLHS

SEQ ID NO: 26513 - protein, 9 aa, synthetic construct
  source 1..9: note = Description of Artificial Sequence: Synthetic peptide; note = XENP021361 vlCDR3
QQGNTLPYT

SEQ ID NO: 26514 - protein, 223 aa, synthetic construct; identical to SEQ ID NO: 25194
  source 1..223: note = Description of Artificial Sequence: Synthetic polypeptide; note = XENP021362 2A11_H1_L2.15_Fab Heavy Chain

SEQ ID NO: 26515 - protein, 118 aa, synthetic construct; identical to SEQ ID NO: 17236
  source 1..118: note = Description of Artificial Sequence: Synthetic polypeptide; note = VH of XENP021362

SEQ ID NO: 26516 - protein, 5 aa, synthetic construct
  source 1..5: note = Description of Artificial Sequence: Synthetic peptide; note = XENP021362 vhCDR1
DYYMH

SEQ ID NO: 26517 - protein, 17 aa, synthetic construct
  source 1..17: note = Description of Artificial Sequence: Synthetic peptide; note = XENP021362 vhCDR2
WIDPENGDTEYAPKFQG

SEQ ID NO: 26518 - protein, 9 aa, synthetic construct
  source 1..9: note = Description of Artificial Sequence: Synthetic peptide; note = XENP021362 vhCDR3
RGVRQALDY

SEQ ID NO: 26519 - protein, 214 aa, synthetic construct
  source 1..214: note = Description of Artificial Sequence: Synthetic polypeptide; note = XENP021362 2A11_H1_L2.15_Fab Light Chain
DIQMTQSPAFLSVTPGEKVTITCQASQDIDNYLNWFQQKPDQTVKLLIYYTSRLHSGVPSRFSGSGSGTDYTFTISSLEAEDAATYFCQQGNTLPYTFGGGTKVEIKRTVAAPSVFIFPPSDEQLKSGTASVVCLLNNFYPREAKVQWKVDNALQSGNSQESVTEQDSKDSTYSLSSTLTLSKADYEKHKVYACEVTHQGLSSPVTKSFNRGEC

SEQ ID NO: 26520 - protein, 107 aa, synthetic construct
  source 1..107: note = Description of Artificial Sequence: Synthetic polypeptide; note = VL of XENP021362
DIQMTQSPAFLSVTPGEKVTITCQASQDIDNYLNWFQQKPDQTVKLLIYYTSRLHSGVPSRFSGSGSGTDYTFTISSLEAEDAATYFCQQGNTLPYTFGGGTKVEIK

SEQ ID NO: 26521 - protein, 11 aa, synthetic construct
  source 1..11: note = Description of Artificial Sequence: Synthetic peptide; note = XENP021362 vlCDR1
QASQDIDNYLN

SEQ ID NO: 26522 - protein, 7 aa, synthetic construct
  source 1..7: note = Description of Artificial Sequence: Synthetic peptide; note = XENP021362 vlCDR2
YTSRLHS

SEQ ID NO: 26523 - protein, 9 aa, synthetic construct
  source 1..9: note = Description of Artificial Sequence: Synthetic peptide; note = XENP021362 vlCDR3
QQGNTLPYT

SEQ ID NO: 26524 - protein, 223 aa, synthetic construct; identical to SEQ ID NO: 25194
  source 1..223: note = Description of Artificial Sequence: Synthetic polypeptide; note = XENP021363 2A11_H1_L2.16_Fab Heavy Chain

SEQ ID NO: 26525 - protein, 118 aa, synthetic construct; identical to SEQ ID NO: 17236
  source 1..118: note = Description of Artificial Sequence: Synthetic polypeptide; note = VH of XENP021363

SEQ ID NO: 26526 - protein, 5 aa, synthetic construct
  source 1..5: note = Description of Artificial Sequence: Synthetic peptide; note = XENP021363 vhCDR1
DYYMH

SEQ ID NO: 26527 - protein, 17 aa, synthetic construct
  source 1..17: note = Description of Artificial Sequence: Synthetic peptide; note = XENP021363 vhCDR2
WIDPENGDTEYAPKFQG

SEQ ID NO: 26528 - protein, 9 aa, synthetic construct
  source 1..9: note = Description of Artificial Sequence: Synthetic peptide; note = XENP021363 vhCDR3
RGVRQALDY

SEQ ID NO: 26529 - protein, 214 aa, synthetic construct
  source 1..214: note = Description of Artificial Sequence: Synthetic polypeptide; note = XENP021363 2A11_H1_L2.16_Fab Light Chain
DIQMTQSPAFLSVTPGEKVTITCQASQDIGDYLNWFQQKPDQTVKLLIYYTSRLHSGVPSRFSGSGSGTDYTFTISSLEAEDAATYFCQQGNTLPYTFGGGTKVEIKRTVAAPSVFIFPPSDEQLKSGTASVVCLLNNFYPREAKVQWKVDNALQSGNSQESVTEQDSKDSTYSLSSTLTLSKADYEKHKVYACEVTHQGLSSPVTKSFNRGEC

SEQ ID NO: 26530 - protein, 107 aa, synthetic construct
  source 1..107: note = Description of Artificial Sequence: Synthetic polypeptide; note = VL of XENP021363
DIQMTQSPAFLSVTPGEKVTITCQASQDIGDYLNWFQQKPDQTVKLLIYYTSRLHSGVPSRFSGSGSGTDYTFTISSLEAEDAATYFCQQGNTLPYTFGGGTKVEIK

SEQ ID NO: 26531 - protein, 11 aa, synthetic construct
  source 1..11: note = Description of Artificial Sequence: Synthetic peptide; note = XENP021363 vlCDR1
QASQDIGDYLN

SEQ ID NO: 26532 - protein, 7 aa, synthetic construct
  source 1..7: note = Description of Artificial Sequence: Synthetic peptide; note = XENP021363 vlCDR2
YTSRLHS

SEQ ID NO: 26533 - protein, 9 aa, synthetic construct
  source 1..9: note = Description of Artificial Sequence: Synthetic peptide; note = XENP021363 vlCDR3
QQGNTLPYT

SEQ ID NO: 26534 - protein, 223 aa, synthetic construct; identical to SEQ ID NO: 25194
  source 1..223: note = Description of Artificial Sequence: Synthetic polypeptide; note = XENP021364 2A11_H1_L2.17_Fab Heavy Chain

SEQ ID NO: 26535 - protein, 118 aa, synthetic construct; identical to SEQ ID NO: 17236
  source 1..118: note = Description of Artificial Sequence: Synthetic polypeptide; note = VH of XENP021364

SEQ ID NO: 26536 - protein, 5 aa, synthetic construct
  source 1..5: note = Description of Artificial Sequence: Synthetic peptide; note = XENP021364 vhCDR1
DYYMH

SEQ ID NO: 26537 - protein, 17 aa, synthetic construct
  source 1..17: note = Description of Artificial Sequence: Synthetic peptide; note = XENP021364 vhCDR2
WIDPENGDTEYAPKFQG

SEQ ID NO: 26538 - protein, 9 aa, synthetic construct
  source 1..9: note = Description of Artificial Sequence: Synthetic peptide; note = XENP021364 vhCDR3
RGVRQALDY

SEQ ID NO: 26539 - protein, 214 aa, synthetic construct
  source 1..214: note = Description of Artificial Sequence: Synthetic polypeptide; note = XENP021364 2A11_H1_L2.17_Fab Light Chain
DIQMTQSPAFLSVTPGEKVTITCQASQDIGHYLNWFQQKPDQTVKLLIYYTSRLHSGVPSRFSGSGSGTDYTFTISSLEAEDAATYFCQQGNTLPYTFGGGTKVEIKRTVAAPSVFIFPPSDEQLKSGTASVVCLLNNFYPREAKVQWKVDNALQSGNSQESVTEQDSKDSTYSLSSTLTLSKADYEKHKVYACEVTHQGLSSPVTKSFNRGEC

SEQ ID NO: 26540 - protein, 107 aa, synthetic construct
  source 1..107: note = Description of Artificial Sequence: Synthetic polypeptide; note = VL of XENP021364
DIQMTQSPAFLSVTPGEKVTITCQASQDIGHYLNWFQQKPDQTVKLLIYYTSRLHSGVPSRFSGSGSGTDYTFTISSLEAEDAATYFCQQGNTLPYTFGGGTKVEIK

SEQ ID NO: 26541 - protein, 11 aa, synthetic construct
  source 1..11: note = Description of Artificial Sequence: Synthetic peptide; note = XENP021364 vlCDR1
QASQDIGHYLN

SEQ ID NO: 26542 - protein, 7 aa, synthetic construct
  source 1..7: note = Description of Artificial Sequence: Synthetic peptide; note = XENP021364 vlCDR2
YTSRLHS

SEQ ID NO: 26543 - protein, 9 aa, synthetic construct
  source 1..9: note = Description of Artificial Sequence: Synthetic peptide; note = XENP021364 vlCDR3
QQGNTLPYT

SEQ ID NO: 26544 - protein, 223 aa, synthetic construct; identical to SEQ ID NO: 25194
  source 1..223: note = Description of Artificial Sequence: Synthetic polypeptide; note = XENP021365 2A11_H1_L2.18_Fab Heavy Chain

SEQ ID NO: 26545 - protein, 118 aa, synthetic construct; identical to SEQ ID NO: 17236
  source 1..118: note = Description of Artificial Sequence: Synthetic polypeptide; note = VH of XENP021365

SEQ ID NO: 26546 - protein, 5 aa, synthetic construct
  source 1..5: note = Description of Artificial Sequence: Synthetic peptide; note = XENP021365 vhCDR1
DYYMH

SEQ ID NO: 26547 - protein, 17 aa, synthetic construct
  source 1..17: note = Description of Artificial Sequence: Synthetic peptide; note = XENP021365 vhCDR2
WIDPENGDTEYAPKFQG

SEQ ID NO: 26548 - protein, 9 aa, synthetic construct
  source 1..9: note = Description of Artificial Sequence: Synthetic peptide; note = XENP021365 vhCDR3
RGVRQALDY

SEQ ID NO: 26549 - protein, 214 aa, synthetic construct
  source 1..214: note = Description of Artificial Sequence: Synthetic polypeptide; note = XENP021365 2A11_H1_L2.18_Fab Light Chain
DIQMTQSPAFLSVTPGEKVTITCQASQDIGEYLNWFQQKPDQTVKLLIYYTSRLHSGVPSRFSGSGSGTDYTFTISSLEAEDAATYFCQQGNTLPYTFGGGTKVEIKRTVAAPSVFIFPPSDEQLKSGTASVVCLLNNFYPREAKVQWKVDNALQSGNSQESVTEQDSKDSTYSLSSTLTLSKADYEKHKVYACEVTHQGLSSPVTKSFNRGEC

SEQ ID NO: 26550 - protein, 107 aa, synthetic construct
  source 1..107: note = Description of Artificial Sequence: Synthetic polypeptide; note = VL of XENP021365
DIQMTQSPAFLSVTPGEKVTITCQASQDIGEYLNWFQQKPDQTVKLLIYYTSRLHSGVPSRFSGSGSGTDYTFTISSLEAEDAATYFCQQGNTLPYTFGGGTKVEIK

SEQ ID NO: 26551 - protein, 11 aa, synthetic construct
  source 1..11: note = Description of Artificial Sequence: Synthetic peptide; note = XENP021365 vlCDR1
QASQDIGEYLN

SEQ ID NO: 26552 - protein, 7 aa, synthetic construct
  source 1..7: note = Description of Artificial Sequence: Synthetic peptide; note = XENP021365 vlCDR2
YTSRLHS

SEQ ID NO: 26553 - protein, 9 aa, synthetic construct
  source 1..9: note = Description of Artificial Sequence: Synthetic peptide; note = XENP021365 vlCDR3
QQGNTLPYT

SEQ ID NO: 26554 - protein, 223 aa, synthetic construct; identical to SEQ ID NO: 25194
  source 1..223: note = Description of Artificial Sequence: Synthetic polypeptide; note = XENP021366 2A11_H1_L2.19_Fab Heavy Chain

SEQ ID NO: 26555 - protein, 118 aa, synthetic construct; identical to SEQ ID NO: 17236
  source 1..118: note = Description of Artificial Sequence: Synthetic polypeptide; note = VH of XENP021366

SEQ ID NO: 26556 - protein, 5 aa, synthetic construct
  source 1..5: note = Description of Artificial Sequence: Synthetic peptide; note = XENP021366 vhCDR1
DYYMH

SEQ ID NO: 26557 - protein, 17 aa, synthetic construct
  source 1..17: note = Description of Artificial Sequence: Synthetic peptide; note = XENP021366 vhCDR2
WIDPENGDTEYAPKFQG

SEQ ID NO: 26558 - protein, 9 aa, synthetic construct
  source 1..9: note = Description of Artificial Sequence: Synthetic peptide; note = XENP021366 vhCDR3
RGVRQALDY

SEQ ID NO: 26559 - protein, 214 aa, synthetic construct
  source 1..214: note = Description of Artificial Sequence: Synthetic polypeptide; note = XENP021366 2A11_H1_L2.19_Fab Light Chain
DIQMTQSPAFLSVTPGEKVTITCQASQDIGSYLNWFQQKPDQTVKLLIYYTSRLHSGVPSRFSGSGSGTDYTFTISSLEAEDAATYFCQQGNTLPYTFGGGTKVEIKRTVAAPSVFIFPPSDEQLKSGTASVVCLLNNFYPREAKVQWKVDNALQSGNSQESVTEQDSKDSTYSLSSTLTLSKADYEKHKVYACEVTHQGLSSPVTKSFNRGEC

SEQ ID NO: 26560 - protein, 107 aa, synthetic construct
  source 1..107: note = Description of Artificial Sequence: Synthetic polypeptide; note = VL of XENP021366
DIQMTQSPAFLSVTPGEKVTITCQASQDIGSYLNWFQQKPDQTVKLLIYYTSRLHSGVPSRFSGSGSGTDYTFTISSLEAEDAATYFCQQGNTLPYTFGGGTKVEIK

SEQ ID NO: 26561 - protein, 11 aa, synthetic construct
  source 1..11: note = Description of Artificial Sequence: Synthetic peptide; note = XENP021366 vlCDR1
QASQDIGSYLN

SEQ ID NO: 26562 - protein, 7 aa, synthetic construct
  source 1..7: note = Description of Artificial Sequence: Synthetic peptide; note = XENP021366 vlCDR2
YTSRLHS

SEQ ID NO: 26563 - protein, 9 aa, synthetic construct
  source 1..9: note = Description of Artificial Sequence: Synthetic peptide; note = XENP021366 vlCDR3
QQGNTLPYT

SEQ ID NO: 26564 - protein, 223 aa, synthetic construct; identical to SEQ ID NO: 25194
  source 1..223: note = Description of Artificial Sequence: Synthetic polypeptide; note = XENP021367 2A11_H1_L2.20_Fab Heavy Chain

SEQ ID NO: 26565 - protein, 118 aa, synthetic construct; identical to SEQ ID NO: 17236
  source 1..118: note = Description of Artificial Sequence: Synthetic polypeptide; note = VH of XENP021367

SEQ ID NO: 26566 - protein, 5 aa, synthetic construct
  source 1..5: note = Description of Artificial Sequence: Synthetic peptide; note = XENP021367 vhCDR1
DYYMH

SEQ ID NO: 26567 - protein, 17 aa, synthetic construct
  source 1..17: note = Description of Artificial Sequence: Synthetic peptide; note = XENP021367 vhCDR2
WIDPENGDTEYAPKFQG

SEQ ID NO: 26568 - protein, 9 aa, synthetic construct
  source 1..9: note = Description of Artificial Sequence: Synthetic peptide; note = XENP021367 vhCDR3
RGVRQALDY

SEQ ID NO: 26569 - protein, 214 aa, synthetic construct
  source 1..214: note = Description of Artificial Sequence: Synthetic polypeptide; note = XENP021367 2A11_H1_L2.20_Fab Light Chain
DIQMTQSPAFLSVTPGEKVTITCQASQDIGRYLNWFQQKPDQTVKLLIYYTSRLHSGVPSRFSGSGSGTDYTFTISSLEAEDAATYFCQQGNTLPYTFGGGTKVEIKRTVAAPSVFIFPPSDEQLKSGTASVVCLLNNFYPREAKVQWKVDNALQSGNSQESVTEQDSKDSTYSLSSTLTLSKADYEKHKVYACEVTHQGLSSPVTKSFNRGEC

SEQ ID NO: 26570 - protein, 107 aa, synthetic construct
  source 1..107: note = Description of Artificial Sequence: Synthetic polypeptide; note = VL of XENP021367
DIQMTQSPAFLSVTPGEKVTITCQASQDIGRYLNWFQQKPDQTVKLLIYYTSRLHSGVPSRFSGSGSGTDYTFTISSLEAEDAATYFCQQGNTLPYTFGGGTKVEIK

SEQ ID NO: 26571 - protein, 11 aa, synthetic construct
  source 1..11: note = Description of Artificial Sequence: Synthetic peptide; note = XENP021367 vlCDR1
QASQDIGRYLN

SEQ ID NO: 26572 - protein, 7 aa, synthetic construct
  source 1..7: note = Description of Artificial Sequence: Synthetic peptide; note = XENP021367 vlCDR2
YTSRLHS

SEQ ID NO: 26573 - protein, 9 aa, synthetic construct
  source 1..9: note = Description of Artificial Sequence: Synthetic peptide; note = XENP021367 vlCDR3
QQGNTLPYT

SEQ ID NO: 26574 - protein, 223 aa, synthetic construct; identical to SEQ ID NO: 25194
  source 1..223: note = Description of Artificial Sequence: Synthetic polypeptide; note = XENP021368 2A11_H1_L2.21_Fab Heavy Chain

SEQ ID NO: 26575 - protein, 118 aa, synthetic construct; identical to SEQ ID NO: 17236
  source 1..118: note = Description of Artificial Sequence: Synthetic polypeptide; note = VH of XENP021368

SEQ ID NO: 26576 - protein, 5 aa, synthetic construct
  source 1..5: note = Description of Artificial Sequence: Synthetic peptide; note = XENP021368 vhCDR1
DYYMH

SEQ ID NO: 26577 - protein, 17 aa, synthetic construct
  source 1..17: note = Description of Artificial Sequence: Synthetic peptide; note = XENP021368 vhCDR2
WIDPENGDTEYAPKFQG

SEQ ID NO: 26578 - protein, 9 aa, synthetic construct
  source 1..9: note = Description of Artificial Sequence: Synthetic peptide; note = XENP021368 vhCDR3
RGVRQALDY

SEQ ID NO: 26579 - protein, 214 aa, synthetic construct
  source 1..214: note = Description of Artificial Sequence: Synthetic polypeptide; note = XENP021368 2A11_H1_L2.21_Fab Light Chain
DIQMTQSPAFLSVTPGEKVTITCQASQDIGLYLNWFQQKPDQTVKLLIYYTSRLHSGVPSRFSGSGSGTDYTFTISSLEAEDAATYFCQQGNTLPYTFGGGTKVEIKRTVAAPSVFIFPPSDEQLKSGTASVVCLLNNFYPREAKVQWKVDNALQSGNSQESVTEQDSKDSTYSLSSTLTLSKADYEKHKVYACEVTHQGLSSPVTKSFNRGEC

SEQ ID NO: 26580 - protein, 107 aa, synthetic construct
  source 1..107: note = Description of Artificial Sequence: Synthetic polypeptide; note = VL of XENP021368
DIQMTQSPAFLSVTPGEKVTITCQASQDIGLYLNWFQQKPDQTVKLLIYYTSRLHSGVPSRFSGSGSGTDYTFTISSLEAEDAATYFCQQGNTLPYTFGGGTKVEIK

SEQ ID NO: 26581 - protein, 11 aa, synthetic construct
  source 1..11: note = Description of Artificial Sequence: Synthetic peptide; note = XENP021368 vlCDR1
QASQDIGLYLN

SEQ ID NO: 26582 - protein, 7 aa, synthetic construct
  source 1..7: note = Description of Artificial Sequence: Synthetic peptide; note = XENP021368 vlCDR2
YTSRLHS

SEQ ID NO: 26583 - protein, 9 aa, synthetic construct
  source 1..9: note = Description of Artificial Sequence: Synthetic peptide; note = XENP021368 vlCDR3
QQGNTLPYT

SEQ ID NO: 26584 - protein, 223 aa, synthetic construct; identical to SEQ ID NO: 25194
  source 1..223: note = Description of Artificial Sequence: Synthetic polypeptide; note = XENP021369 2A11_H1_L2.22_Fab Heavy Chain

SEQ ID NO: 26585 - protein, 118 aa, synthetic construct; identical to SEQ ID NO: 17236
  source 1..118: note = Description of Artificial Sequence: Synthetic polypeptide; note = VH of XENP021369

SEQ ID NO: 26586 - protein, 5 aa, synthetic construct
  source 1..5: note = Description of Artificial Sequence: Synthetic peptide; note = XENP021369 vhCDR1
DYYMH

SEQ ID NO: 26587 - protein, 17 aa, synthetic construct
  source 1..17: note = Description of Artificial Sequence: Synthetic peptide; note = XENP021369 vhCDR2
WIDPENGDTEYAPKFQG

SEQ ID NO: 26588 - protein, 9 aa, synthetic construct
  source 1..9: note = Description of Artificial Sequence: Synthetic peptide; note = XENP021369 vhCDR3
RGVRQALDY

SEQ ID NO: 26589 - protein, 214 aa, synthetic construct
  source 1..214: note = Description of Artificial Sequence: Synthetic polypeptide; note = XENP021369 2A11_H1_L2.22_Fab Light Chain
DIQMTQSPAFLSVTPGEKVTITCQASQDIGTYLNWFQQKPDQTVKLLIYYTSRLHSGVPSRFSGSGSGTDYTFTISSLEAEDAATYFCQQGNTLPYTFGGGTKVEIKRTVAAPSVFIFPPSDEQLKSGTASVVCLLNNFYPREAKVQWKVDNALQSGNSQESVTEQDSKDSTYSLSSTLTLSKADYEKHKVYACEVTHQGLSSPVTKSFNRGEC

SEQ ID NO: 26590 - protein, 107 aa, synthetic construct
  source 1..107: note = Description of Artificial Sequence: Synthetic polypeptide; note = VL of XENP021369
DIQMTQSPAFLSVTPGEKVTITCQASQDIGTYLNWFQQKPDQTVKLLIYYTSRLHSGVPSRFSGSGSGTDYTFTISSLEAEDAATYFCQQGNTLPYTFGGGTKVEIK

SEQ ID NO: 26591 - protein, 11 aa, synthetic construct
  source 1..11: note = Description of Artificial Sequence: Synthetic peptide; note = XENP021369 vlCDR1
QASQDIGTYLN

SEQ ID NO: 26592 - protein, 7 aa, synthetic construct
  source 1..7: note = Description of Artificial Sequence: Synthetic peptide; note = XENP021369 vlCDR2
YTSRLHS

SEQ ID NO: 26593 - protein, 9 aa, synthetic construct
  source 1..9: note = Description of Artificial Sequence: Synthetic peptide; note = XENP021369 vlCDR3
QQGNTLPYT

SEQ ID NO: 26594 - protein, 223 aa, synthetic construct; identical to SEQ ID NO: 25194
  source 1..223: note = Description of Artificial Sequence: Synthetic polypeptide; note = XENP021370 2A11_H1_L2.23_Fab Heavy Chain

SEQ ID NO: 26595 - protein, 118 aa, synthetic construct; identical to SEQ ID NO: 17236
  source 1..118: note = Description of Artificial Sequence: Synthetic polypeptide; note = VH of XENP021370

SEQ ID NO: 26596 - protein, 5 aa, synthetic construct
  source 1..5: note = Description of Artificial Sequence: Synthetic peptide; note = XENP021370 vhCDR1
DYYMH

SEQ ID NO: 26597 - protein, 17 aa, synthetic construct
  source 1..17: note = Description of Artificial Sequence: Synthetic peptide; note = XENP021370 vhCDR2
WIDPENGDTEYAPKFQG

SEQ ID NO: 26598 - protein, 9 aa, synthetic construct
  source 1..9: note = Description of Artificial Sequence: Synthetic peptide; note = XENP021370 vhCDR3
RGVRQALDY

SEQ ID NO: 26599 - protein, 214 aa, synthetic construct
  source 1..214: note = Description of Artificial Sequence: Synthetic polypeptide; note = XENP021370 2A11_H1_L2.23_Fab Light Chain
DIQMTQSPAFLSVTPGEKVTITCQASQDIGKYLNWFQQKPDQTVKLLIYYTSRLHSGVPSRFSGSGSGTDYTFTISSLEAEDAATYFCQQGNTLPYTFGGGTKVEIKRTVAAPSVFIFPPSDEQLKSGTASVVCLLNNFYPREAKVQWKVDNALQSGNSQESVTEQDSKDSTYSLSSTLTLSKADYEKHKVYACEVTHQGLSSPVTKSFNRGEC

SEQ ID NO: 26600 - protein, 107 aa, synthetic construct
  source 1..107: note = Description of Artificial Sequence: Synthetic polypeptide; note = VL of XENP021370
DIQMTQSPAFLSVTPGEKVTITCQASQDIGKYLNWFQQKPDQTVKLLIYYTSRLHSGVPSRFSGSGSGTDYTFTISSLEAEDAATYFCQQGNTLPYTFGGGTKVEIK

SEQ ID NO: 26601 - protein, 11 aa, synthetic construct
  source 1..11: note = Description of Artificial Sequence: Synthetic peptide; note = XENP021370 vlCDR1
QASQDIGKYLN

SEQ ID NO: 26602 - protein, 7 aa, synthetic construct
  source 1..7: note = Description of Artificial Sequence: Synthetic peptide; note = XENP021370 vlCDR2
YTSRLHS

SEQ ID NO: 26603 - protein, 9 aa, synthetic construct
  source 1..9: note = Description of Artificial Sequence: Synthetic peptide; note = XENP021370 vlCDR3
QQGNTLPYT

SEQ ID NO: 26604 - protein, 223 aa, synthetic construct; identical to SEQ ID NO: 25194
  source 1..223: note = Description of Artificial Sequence: Synthetic polypeptide; note = XENP021371 2A11_H1_L2.24_Fab Heavy Chain

SEQ ID NO: 26605 - protein, 118 aa, synthetic construct; identical to SEQ ID NO: 17236
  source 1..118: note = Description of Artificial Sequence: Synthetic polypeptide; note = VH of XENP021371

SEQ ID NO: 26606 - protein, 5 aa, synthetic construct
  source 1..5: note = Description of Artificial Sequence: Synthetic peptide; note = XENP021371 vhCDR1
DYYMH

SEQ ID NO: 26607 - protein, 17 aa, synthetic construct
  source 1..17: note = Description of Artificial Sequence: Synthetic peptide; note = XENP021371 vhCDR2
WIDPENGDTEYAPKFQG

SEQ ID NO: 26608 - protein, 9 aa, synthetic construct
  source 1..9: note = Description of Artificial Sequence: Synthetic peptide; note = XENP021371 vhCDR3
RGVRQALDY

SEQ ID NO: 26609 - protein, 214 aa, synthetic construct
  source 1..214: note = Description of Artificial Sequence: Synthetic polypeptide; note = XENP021371 2A11_H1_L2.24_Fab Light Chain
DIQMTQSPAFLSVTPGEKVTITCQASQDIGNFLNWFQQKPDQTVKLLIYYTSRLHSGVPSRFSGSGSGTDYTFTISSLEAEDAATYFCQQGNTLPYTFGGGTKVEIKRTVAAPSVFIFPPSDEQLKSGTASVVCLLNNFYPREAKVQWKVDNALQSGNSQESVTEQDSKDSTYSLSSTLTLSKADYEKHKVYACEVTHQGLSSPVTKSFNRGEC

SEQ ID NO: 26610 - protein, 107 aa, synthetic construct
  source 1..107: note = Description of Artificial Sequence: Synthetic polypeptide; note = VL of XENP021371
DIQMTQSPAFLSVTPGEKVTITCQASQDIGNFLNWFQQKPDQTVKLLIYYTSRLHSGVPSRFSGSGSGTDYTFTISSLEAEDAATYFCQQGNTLPYTFGGGTKVEIK

SEQ ID NO: 26611 - protein, 11 aa, synthetic construct
  source 1..11: note = Description of Artificial Sequence: Synthetic peptide; note = XENP021371 vlCDR1
QASQDIGNFLN

SEQ ID NO: 26612 - protein, 7 aa, synthetic construct
  source 1..7: note = Description of Artificial Sequence: Synthetic peptide; note = XENP021371 vlCDR2
YTSRLHS

SEQ ID NO: 26613 - protein, 9 aa, synthetic construct
  source 1..9: note = Description of Artificial Sequence: Synthetic peptide; note = XENP021371 vlCDR3
QQGNTLPYT

SEQ ID NO: 26614 - protein, 223 aa, synthetic construct; identical to SEQ ID NO: 25194
  source 1..223: note = Description of Artificial Sequence: Synthetic polypeptide; note = XENP021372 2A11_H1_L2.25_Fab Heavy Chain

SEQ ID NO: 26615 - protein, 118 aa, synthetic construct; identical to SEQ ID NO: 17236
  source 1..118: note = Description of Artificial Sequence: Synthetic polypeptide; note = VH of XENP021372

SEQ ID NO: 26616 - protein, 5 aa, synthetic construct
  source 1..5: note = Description of Artificial Sequence: Synthetic peptide; note = XENP021372 vhCDR1
DYYMH

SEQ ID NO: 26617 - protein, 17 aa, synthetic construct
  source 1..17: note = Description of Artificial Sequence: Synthetic peptide; note = XENP021372 vhCDR2
WIDPENGDTEYAPKFQG

SEQ ID NO: 26618 - protein, 9 aa, synthetic construct
  source 1..9: note = Description of Artificial Sequence: Synthetic peptide; note = XENP021372 vhCDR3
RGVRQALDY

SEQ ID NO: 26619 - protein, 214 aa, synthetic construct; identical to SEQ ID NO: 22179
  source 1..214: note = Description of Artificial Sequence: Synthetic polypeptide; note = XENP021372 2A11_H1_L2.25_Fab Light Chain

SEQ ID NO: 26620 - protein, 107 aa, synthetic construct; identical to SEQ ID NO: 22180
  source 1..107: note = Description of Artificial Sequence: Synthetic polypeptide; note = VL of XENP021372

SEQ ID NO: 26621 - protein, 11 aa, synthetic construct
  source 1..11: note = Description of Artificial Sequence: Synthetic peptide; note = XENP021372 vlCDR1
QASQDIGNHLN

SEQ ID NO: 26622 - protein, 7 aa, synthetic construct
  source 1..7: note = Description of Artificial Sequence: Synthetic peptide; note = XENP021372 vlCDR2
YTSRLHS

SEQ ID NO: 26623 - protein, 9 aa, synthetic construct
  source 1..9: note = Description of Artificial Sequence: Synthetic peptide; note = XENP021372 vlCDR3
QQGNTLPYT

SEQ ID NO: 26624 - protein, 223 aa, synthetic construct; identical to SEQ ID NO: 25194
  source 1..223: note = Description of Artificial Sequence: Synthetic polypeptide; note = XENP021373 2A11_H1_L2.26_Fab Heavy Chain

SEQ ID NO: 26625 - protein, 118 aa, synthetic construct; identical to SEQ ID NO: 17236
  source 1..118: note = Description of Artificial Sequence: Synthetic polypeptide; note = VH of XENP021373

SEQ ID NO: 26626 - protein, 5 aa, synthetic construct
  source 1..5: note = Description of Artificial Sequence: Synthetic peptide; note = XENP021373 vhCDR1
DYYMH

SEQ ID NO: 26627 - protein, 17 aa, synthetic construct
  source 1..17: note = Description of Artificial Sequence: Synthetic peptide; note = XENP021373 vhCDR2
WIDPENGDTEYAPKFQG

SEQ ID NO: 26628 - protein, 9 aa, synthetic construct
  source 1..9: note = Description of Artificial Sequence: Synthetic peptide; note = XENP021373 vhCDR3
RGVRQALDY

SEQ ID NO: 26629 - protein, 214 aa, synthetic construct
  source 1..214: note = Description of Artificial Sequence: Synthetic polypeptide; note = XENP021373 2A11_H1_L2.26_Fab Light Chain
DIQMTQSPAFLSVTPGEKVTITCQASQDIGNLLNWFQQKPDQTVKLLIYYTSRLHSGVPSRFSGSGSGTDYTFTISSLEAEDAATYFCQQGNTLPYTFGGGTKVEIKRTVAAPSVFIFPPSDEQLKSGTASVVCLLNNFYPREAKVQWKVDNALQSGNSQESVTEQDSKDSTYSLSSTLTLSKADYEKHKVYACEVTHQGLSSPVTKSFNRGEC

SEQ ID NO: 26630 - protein, 107 aa, synthetic construct
  source 1..107: note = Description of Artificial Sequence: Synthetic polypeptide; note = VL of XENP021373
DIQMTQSPAFLSVTPGEKVTITCQASQDIGNLLNWFQQKPDQTVKLLIYYTSRLHSGVPSRFSGSGSGTDYTFTISSLEAEDAATYFCQQGNTLPYTFGGGTKVEIK

SEQ ID NO: 26631 - protein, 11 aa, synthetic construct
  source 1..11: note = Description of Artificial Sequence: Synthetic peptide; note = XENP021373 vlCDR1
QASQDIGNLLN

SEQ ID NO: 26632 - protein, 7 aa, synthetic construct
  source 1..7: note = Description of Artificial Sequence: Synthetic peptide; note = XENP021373 vlCDR2
YTSRLHS

SEQ ID NO: 26633 - protein, 9 aa, synthetic construct
  source 1..9: note = Description of Artificial Sequence: Synthetic peptide; note = XENP021373 vlCDR3
QQGNTLPYT

SEQ ID NO: 26634 - protein, 223 aa, synthetic construct; identical to SEQ ID NO: 25194
  source 1..223: note = Description of Artificial Sequence: Synthetic polypeptide; note = XENP021374 2A11_H1_L2.27_Fab Heavy Chain

SEQ ID NO: 26635 - protein, 118 aa, synthetic construct; identical to SEQ ID NO: 17236
  source 1..118: note = Description of Artificial Sequence: Synthetic polypeptide; note = VH of XENP021374

SEQ ID NO: 26636 - protein, 5 aa, synthetic construct
  source 1..5: note = Description of Artificial Sequence: Synthetic peptide; note = XENP021374 vhCDR1
DYYMH

SEQ ID NO: 26637 - protein, 17 aa, synthetic construct
  source 1..17: note = Description of Artificial Sequence: Synthetic peptide; note = XENP021374 vhCDR2
WIDPENGDTEYAPKFQG

SEQ ID NO: 26638 - protein, 9 aa, synthetic construct
  source 1..9: note = Description of Artificial Sequence: Synthetic peptide; note = XENP021374 vhCDR3
RGVRQALDY

SEQ ID NO: 26639 - protein, 214 aa, synthetic construct
  source 1..214: note = Description of Artificial Sequence: Synthetic polypeptide; note = XENP021374 2A11_H1_L2.27_Fab Light Chain
DIQMTQSPAFLSVTPGEKVTITCQASQDIGNWLNWFQQKPDQTVKLLIYYTSRLHSGVPSRFSGSGSGTDYTFTISSLEAEDAATYFCQQGNTLPYTFGGGTKVEIKRTVAAPSVFIFPPSDEQLKSGTASVVCLLNNFYPREAKVQWKVDNALQSGNSQESVTEQDSKDSTYSLSSTLTLSKADYEKHKVYACEVTHQGLSSPVTKSFNRGEC

SEQ ID NO: 26640 - protein, 107 aa, synthetic construct
  source 1..107: note = Description of Artificial Sequence: Synthetic polypeptide; note = VL of XENP021374
DIQMTQSPAFLSVTPGEKVTITCQASQDIGNWLNWFQQKPDQTVKLLIYYTSRLHSGVPSRFSGSGSGTDYTFTISSLEAEDAATYFCQQGNTLPYTFGGGTKVEIK

SEQ ID NO: 26641 - protein, 11 aa, synthetic construct
  source 1..11: note = Description of Artificial Sequence: Synthetic peptide; note = XENP021374 vlCDR1
QASQDIGNWLN

SEQ ID NO: 26642 - protein, 7 aa, synthetic construct
  source 1..7: note = Description of Artificial Sequence: Synthetic peptide; note = XENP021374 vlCDR2
YTSRLHS

SEQ ID NO: 26643 - protein, 9 aa, synthetic construct
  source 1..9: note = Description of Artificial Sequence: Synthetic peptide; note = XENP021374 vlCDR3
QQGNTLPYT

SEQ ID NO: 26644 - protein, 223 aa, synthetic construct; identical to SEQ ID NO: 25194
  source 1..223: note = Description of Artificial Sequence: Synthetic polypeptide; note = XENP021375 2A11_H1_L2.28_Fab Heavy Chain

SEQ ID NO: 26645 - protein, 118 aa, synthetic construct; identical to SEQ ID NO: 17236
  source 1..118: note = Description of Artificial Sequence: Synthetic polypeptide; note = VH of XENP021375

SEQ ID NO: 26646 - protein, 5 aa, synthetic construct
  source 1..5: note = Description of Artificial Sequence: Synthetic peptide; note = XENP021375 vhCDR1
DYYMH

SEQ ID NO: 26647 - protein, 17 aa, synthetic construct
  source 1..17: note = Description of Artificial Sequence: Synthetic peptide; note = XENP021375 vhCDR2
WIDPENGDTEYAPKFQG

SEQ ID NO: 26648 - protein, 9 aa, synthetic construct
  source 1..9: note = Description of Artificial Sequence: Synthetic peptide; note = XENP021375 vhCDR3
RGVRQALDY

SEQ ID NO: 26649 - protein, 214 aa, synthetic construct
  source 1..214: note = Description of Artificial Sequence: Synthetic polypeptide; note = XENP021375 2A11_H1_L2.28_Fab Light Chain
DIQMTQSPAFLSVTPGEKVTITCQASQDIGNVLNWFQQKPDQTVKLLIYYTSRLHSGVPSRFSGSGSGTDYTFTISSLEAEDAATYFCQQGNTLPYTFGGGTKVEIKRTVAAPSVFIFPPSDEQLKSGTASVVCLLNNFYPREAKVQWKVDNALQSGNSQESVTEQDSKDSTYSLSSTLTLSKADYEKHKVYACEVTHQGLSSPVTKSFNRGEC

SEQ ID NO: 26650 - protein, 107 aa, synthetic construct
  source 1..107: note = Description of Artificial Sequence: Synthetic polypeptide; note = VL of XENP021375
DIQMTQSPAFLSVTPGEKVTITCQASQDIGNVLNWFQQKPDQTVKLLIYYTSRLHSGVPSRFSGSGSGTDYTFTISSLEAEDAATYFCQQGNTLPYTFGGGTKVEIK

SEQ ID NO: 26651 - protein, 11 aa, synthetic construct
  source 1..11: note = Description of Artificial Sequence: Synthetic peptide; note = XENP021375 vlCDR1
QASQDIGNVLN

SEQ ID NO: 26652 - protein, 7 aa, synthetic construct
  source 1..7: note = Description of Artificial Sequence: Synthetic peptide; note = XENP021375 vlCDR2
YTSRLHS

SEQ ID NO: 26653 - protein, 9 aa, synthetic construct
  source 1..9: note = Description of Artificial Sequence: Synthetic peptide; note = XENP021375 vlCDR3
QQGNTLPYT

SEQ ID NO: 26654 - protein, 223 aa, synthetic construct; identical to SEQ ID NO: 25194
  source 1..223: note = Description of Artificial Sequence: Synthetic polypeptide; note = XENP021376 2A11_H1_L2.29_Fab Heavy Chain

SEQ ID NO: 26655 - protein, 118 aa, synthetic construct; identical to SEQ ID NO: 17236
  source 1..118: note = Description of Artificial Sequence: Synthetic polypeptide; note = VH of XENP021376

SEQ ID NO: 26656 - protein, 5 aa, synthetic construct
  source 1..5: note = Description of Artificial Sequence: Synthetic peptide; note = XENP021376 vhCDR1
DYYMH

SEQ ID NO: 26657 - protein, 17 aa, synthetic construct
  source 1..17: note = Description of Artificial Sequence: Synthetic peptide; note = XENP021376 vhCDR2
WIDPENGDTEYAPKFQG

SEQ ID NO: 26658 - protein, 9 aa, synthetic construct
  source 1..9: note = Description of Artificial Sequence: Synthetic peptide; note = XENP021376 vhCDR3
RGVRQALDY

SEQ ID NO: 26659 - protein, 214 aa, synthetic construct
  source 1..214: note = Description of Artificial Sequence: Synthetic polypeptide; note = XENP021376 2A11_H1_L2.29_Fab Light Chain
DIQMTQSPAFLSVTPGEKVTITCQASQDIGNALNWFQQKPDQTVKLLIYYTSRLHSGVPSRFSGSGSGTDYTFTISSLEAEDAATYFCQQGNTLPYTFGGGTKVEIKRTVAAPSVFIFPPSDEQLKSGTASVVCLLNNFYPREAKVQWKVDNALQSGNSQESVTEQDSKDSTYSLSSTLTLSKADYEKHKVYACEVTHQGLSSPVTKSFNRGEC

SEQ ID NO: 26660 - protein, 107 aa, synthetic construct
  source 1..107: note = Description of Artificial Sequence: Synthetic polypeptide; note = VL of XENP021376
DIQMTQSPAFLSVTPGEKVTITCQASQDIGNALNWFQQKPDQTVKLLIYYTSRLHSGVPSRFSGSGSGTDYTFTISSLEAEDAATYFCQQGNTLPYTFGGGTKVEIK

SEQ ID NO: 26661 - protein, 11 aa, synthetic construct
  source 1..11: note = Description of Artificial Sequence: Synthetic peptide; note = XENP021376 vlCDR1
QASQDIGNALN

SEQ ID NO: 26662 - protein, 7 aa, synthetic construct
  source 1..7: note = Description of Artificial Sequence: Synthetic peptide; note = XENP021376 vlCDR2
YTSRLHS

SEQ ID NO: 26663 - protein, 9 aa, synthetic construct
  source 1..9: note = Description of Artificial Sequence: Synthetic peptide; note = XENP021376 vlCDR3
QQGNTLPYT

SEQ ID NO: 26664 - protein, 223 aa, synthetic construct; identical to SEQ ID NO: 25194
  source 1..223: note = Description of Artificial Sequence: Synthetic polypeptide; note = XENP021377 2A11_H1_L2.30_Fab Heavy Chain

SEQ ID NO: 26665 - protein, 118 aa, synthetic construct; identical to SEQ ID NO: 17236
  source 1..118: note = Description of Artificial Sequence: Synthetic polypeptide; note = VH of XENP021377

SEQ ID NO: 26666 - protein, 5 aa, synthetic construct
  source 1..5: note = Description of Artificial Sequence: Synthetic peptide; note = XENP021377 vhCDR1
DYYMH

SEQ ID NO: 26667 - protein, 17 aa, synthetic construct
  source 1..17: note = Description of Artificial Sequence: Synthetic peptide; note = XENP021377 vhCDR2
WIDPENGDTEYAPKFQG

SEQ ID NO: 26668 - protein, 9 aa, synthetic construct
  source 1..9: note = Description of Artificial Sequence: Synthetic peptide; note = XENP021377 vhCDR3
RGVRQALDY

SEQ ID NO: 26669 - protein, 214 aa, synthetic construct
  source 1..214: note = Description of Artificial Sequence: Synthetic polypeptide; note = XENP021377 2A11_H1_L2.30_Fab Light Chain
DIQMTQSPAFLSVTPGEKVTITCQASQDIGNQLNWFQQKPDQTVKLLIYYTSRLHSGVPSRFSGSGSGTDYTFTISSLEAEDAATYFCQQGNTLPYTFGGGTKVEIKRTVAAPSVFIFPPSDEQLKSGTASVVCLLNNFYPREAKVQWKVDNALQSGNSQESVTEQDSKDSTYSLSSTLTLSKADYEKHKVYACEVTHQGLSSPVTKSFNRGEC

SEQ ID NO: 26670 - protein, 107 aa, synthetic construct
  source 1..107: note = Description of Artificial Sequence: Synthetic polypeptide; note = VL of XENP021377
DIQMTQSPAFLSVTPGEKVTITCQASQDIGNQLNWFQQKPDQTVKLLIYYTSRLHSGVPSRFSGSGSGTDYTFTISSLEAEDAATYFCQQGNTLPYTFGGGTKVEIK

SEQ ID NO: 26671 - protein, 11 aa, synthetic construct
  source 1..11: note = Description of Artificial Sequence: Synthetic peptide; note = XENP021377 vlCDR1
QASQDIGNQLN

SEQ ID NO: 26672 - protein, 7 aa, synthetic construct
  source 1..7: note = Description of Artificial Sequence: Synthetic peptide; note = XENP021377 vlCDR2
YTSRLHS

SEQ ID NO: 26673 - protein, 9 aa, synthetic construct
  source 1..9: note = Description of Artificial Sequence: Synthetic peptide; note = XENP021377 vlCDR3
QQGNTLPYT

SEQ ID NO: 26674 - protein, 223 aa, synthetic construct; identical to SEQ ID NO: 25194
  source 1..223: note = Description of Artificial Sequence: Synthetic polypeptide; note = XENP021378 2A11_H1_L2.31_Fab Heavy Chain

SEQ ID NO: 26675 - protein, 118 aa, synthetic construct; identical to SEQ ID NO: 17236
  source 1..118: note = Description of Artificial Sequence: Synthetic polypeptide; note = VH of XENP021378

SEQ ID NO: 26676 - protein, 5 aa, synthetic construct
  source 1..5: note = Description of Artificial Sequence: Synthetic peptide; note = XENP021378 vhCDR1
DYYMH

SEQ ID NO: 26677 - protein, 17 aa, synthetic construct
  source 1..17: note = Description of Artificial Sequence: Synthetic peptide; note = XENP021378 vhCDR2
WIDPENGDTEYAPKFQG

SEQ ID NO: 26678 - protein, 9 aa, synthetic construct
  source 1..9: note = Description of Artificial Sequence: Synthetic peptide; note = XENP021378 vhCDR3
RGVRQALDY

SEQ ID NO: 26679 - protein, 214 aa, synthetic construct
  source 1..214: note = Description of Artificial Sequence: Synthetic polypeptide; note = XENP021378 2A11_H1_L2.31_Fab Light Chain
DIQMTQSPAFLSVTPGEKVTITCQASQDIGNELNWFQQKPDQTVKLLIYYTSRLHSGVPSRFSGSGSGTDYTFTISSLEAEDAATYFCQQGNTLPYTFGGGTKVEIKRTVAAPSVFIFPPSDEQLKSGTASVVCLLNNFYPREAKVQWKVDNALQSGNSQESVTEQDSKDSTYSLSSTLTLSKADYEKHKVYACEVTHQGLSSPVTKSFNRGEC

SEQ ID NO: 26680 - protein, 107 aa, synthetic construct
  source 1..107: note = Description of Artificial Sequence: Synthetic polypeptide; note = VL of XENP021378
DIQMTQSPAFLSVTPGEKVTITCQASQDIGNELNWFQQKPDQTVKLLIYYTSRLHSGVPSRFSGSGSGTDYTFTISSLEAEDAATYFCQQGNTLPYTFGGGTKVEIK

SEQ ID NO: 26681 - protein, 11 aa, synthetic construct
  source 1..11: note = Description of Artificial Sequence: Synthetic peptide; note = XENP021378 vlCDR1
QASQDIGNELN

SEQ ID NO: 26682 - protein, 7 aa, synthetic construct
  source 1..7: note = Description of Artificial Sequence: Synthetic peptide; note = XENP021378 vlCDR2
YTSRLHS

SEQ ID NO: 26683 - protein, 9 aa, synthetic construct
  source 1..9: note = Description of Artificial Sequence: Synthetic peptide; note = XENP021378 vlCDR3
QQGNTLPYT

SEQ ID NO: 26684 - protein, 223 aa, synthetic construct; identical to SEQ ID NO: 25194
  source 1..223: note = Description of Artificial Sequence: Synthetic polypeptide; note = XENP021379 2A11_H1_L2.32_Fab Heavy Chain

SEQ ID NO: 26685 - protein, 118 aa, synthetic construct; identical to SEQ ID NO: 17236
  source 1..118: note = Description of Artificial Sequence: Synthetic polypeptide; note = VH of XENP021379

SEQ ID NO: 26686 - protein, 5 aa, synthetic construct
  source 1..5: note = Description of Artificial Sequence: Synthetic peptide; note = XENP021379 vhCDR1
DYYMH

SEQ ID NO: 26687 - protein, 17 aa, synthetic construct
  source 1..17: note = Description of Artificial Sequence: Synthetic peptide; note = XENP021379 vhCDR2
WIDPENGDTEYAPKFQG

SEQ ID NO: 26688 - protein, 9 aa, synthetic construct
  source 1..9: note = Description of Artificial Sequence: Synthetic peptide; note = XENP021379 vhCDR3
RGVRQALDY

SEQ ID NO: 26689 - protein, 214 aa, synthetic construct
  source 1..214: note = Description of Artificial Sequence: Synthetic polypeptide; note = XENP021379 2A11_H1_L2.32_Fab Light Chain
DIQMTQSPAFLSVTPGEKVTITCQASQDIGNKLNWFQQKPDQTVKLLIYYTSRLHSGVPSRFSGSGSGTDYTFTISSLEAEDAATYFCQQGNTLPYTFGGGTKVEIKRTVAAPSVFIFPPSDEQLKSGTASVVCLLNNFYPREAKVQWKVDNALQSGNSQESVTEQDSKDSTYSLSSTLTLSKADYEKHKVYACEVTHQGLSSPVTKSFNRGEC

SEQ ID NO: 26690 - protein, 107 aa, synthetic construct
  source 1..107: note = Description of Artificial Sequence: Synthetic polypeptide; note = VL of XENP021379
DIQMTQSPAFLSVTPGEKVTITCQASQDIGNKLNWFQQKPDQTVKLLIYYTSRLHSGVPSRFSGSGSGTDYTFTISSLEAEDAATYFCQQGNTLPYTFGGGTKVEIK

SEQ ID NO: 26691 - protein, 11 aa, synthetic construct
  source 1..11: note = Description of Artificial Sequence: Synthetic peptide; note = XENP021379 vlCDR1
QASQDIGNKLN

SEQ ID NO: 26692 - protein, 7 aa, synthetic construct
  source 1..7: note = Description of Artificial Sequence: Synthetic peptide; note = XENP021379 vlCDR2
YTSRLHS

SEQ ID NO: 26693 - protein, 9 aa, synthetic construct
  source 1..9: note = Description of Artificial Sequence: Synthetic peptide; note = XENP021379 vlCDR3
QQGNTLPYT

SEQ ID NO: 26694 - protein, 223 aa, synthetic construct; identical to SEQ ID NO: 25194
  source 1..223: note = Description of Artificial Sequence: Synthetic polypeptide; note = XENP021380 2A11_H1_L2.33_Fab Heavy Chain

SEQ ID NO: 26695 - protein, 118 aa, synthetic construct; identical to SEQ ID NO: 17236
  source 1..118: note = Description of Artificial Sequence: Synthetic polypeptide; note = VH of XENP021380

SEQ ID NO: 26696 - protein, 5 aa, synthetic construct
  source 1..5: note = Description of Artificial Sequence: Synthetic peptide; note = XENP021380 vhCDR1
DYYMH

SEQ ID NO: 26697 - protein, 17 aa, synthetic construct
  source 1..17: note = Description of Artificial Sequence: Synthetic peptide; note = XENP021380 vhCDR2
WIDPENGDTEYAPKFQG

SEQ ID NO: 26698 - protein, 9 aa, synthetic construct
  source 1..9: note = Description of Artificial Sequence: Synthetic peptide; note = XENP021380 vhCDR3
RGVRQALDY

SEQ ID NO: 26699 - protein, 214 aa, synthetic construct
  source 1..214: note = Description of Artificial Sequence: Synthetic polypeptide; note = XENP021380 2A11_H1_L2.33_Fab Light Chain
DIQMTQSPAFLSVTPGEKVTITCQASQDIGNYLHWFQQKPDQTVKLLIYYTSRLHSGVPSRFSGSGSGTDYTFTISSLEAEDAATYFCQQGNTLPYTFGGGTKVEIKRTVAAPSVFIFPPSDEQLKSGTASVVCLLNNFYPREAKVQWKVDNALQSGNSQESVTEQDSKDSTYSLSSTLTLSKADYEKHKVYACEVTHQGLSSPVTKSFNRGEC

SEQ ID NO: 26700 - protein, 107 aa, synthetic construct
  source 1..107: note = Description of Artificial Sequence: Synthetic polypeptide; note = VL of XENP021380
DIQMTQSPAFLSVTPGEKVTITCQASQDIGNYLHWFQQKPDQTVKLLIYYTSRLHSGVPSRFSGSGSGTDYTFTISSLEAEDAATYFCQQGNTLPYTFGGGTKVEIK

SEQ ID NO: 26701 - protein, 11 aa, synthetic construct
  source 1..11: note = Description of Artificial Sequence: Synthetic peptide; note = XENP021380 vlCDR1
QASQDIGNYLH

SEQ ID NO: 26702 - protein, 7 aa, synthetic construct
  source 1..7: note = Description of Artificial Sequence: Synthetic peptide; note = XENP021380 vlCDR2
YTSRLHS

SEQ ID NO: 26703 - protein, 9 aa, synthetic construct
  source 1..9: note = Description of Artificial Sequence: Synthetic peptide; note = XENP021380 vlCDR3
QQGNTLPYT

SEQ ID NO: 26704 - protein, 223 aa, synthetic construct; identical to SEQ ID NO: 25194
  source 1..223: note = Description of Artificial Sequence: Synthetic polypeptide; note = XENP021381 2A11_H1_L2.34_Fab Heavy Chain

SEQ ID NO: 26705 - protein, 118 aa, synthetic construct; identical to SEQ ID NO: 17236
  source 1..118: note = Description of Artificial Sequence: Synthetic polypeptide; note = VH of XENP021381

SEQ ID NO: 26706 - protein, 5 aa, synthetic construct
  source 1..5: note = Description of Artificial Sequence: Synthetic peptide; note = XENP021381 vhCDR1
DYYMH

SEQ ID NO: 26707 - protein, 17 aa, synthetic construct
  source 1..17: note = Description of Artificial Sequence: Synthetic peptide; note = XENP021381 vhCDR2
WIDPENGDTEYAPKFQG

SEQ ID NO: 26708 - protein, 9 aa, synthetic construct
  source 1..9: note = Description of Artificial Sequence: Synthetic peptide; note = XENP021381 vhCDR3
RGVRQALDY

SEQ ID NO: 26709 - protein, 214 aa, synthetic construct
  source 1..214: note = Description of Artificial Sequence: Synthetic polypeptide; note = XENP021381 2A11_H1_L2.34_Fab Light Chain
DIQMTQSPAFLSVTPGEKVTITCQASQDIGNYLYWFQQKPDQTVKLLIYYTSRLHSGVPSRFSGSGSGTDYTFTISSLEAEDAATYFCQQGNTLPYTFGGGTKVEIKRTVAAPSVFIFPPSDEQLKSGTASVVCLLNNFYPREAKVQWKVDNALQSGNSQESVTEQDSKDSTYSLSSTLTLSKADYEKHKVYACEVTHQGLSSPVTKSFNRGEC

SEQ ID NO: 26710 - protein, 107 aa, synthetic construct
  source 1..107: note = Description of Artificial Sequence: Synthetic polypeptide; note = VL of XENP021381
DIQMTQSPAFLSVTPGEKVTITCQASQDIGNYLYWFQQKPDQTVKLLIYYTSRLHSGVPSRFSGSGSGTDYTFTISSLEAEDAATYFCQQGNTLPYTFGGGTKVEIK

SEQ ID NO: 26711 - protein, 11 aa, synthetic construct
  source 1..11: note = Description of Artificial Sequence: Synthetic peptide; note = XENP021381 vlCDR1
QASQDIGNYLY

SEQ ID NO: 26712 - protein, 7 aa, synthetic construct
  source 1..7: note = Description of Artificial Sequence: Synthetic peptide; note = XENP021381 vlCDR2
YTSRLHS

SEQ ID NO: 26713 - protein, 9 aa, synthetic construct
  source 1..9: note = Description of Artificial Sequence: Synthetic peptide; note = XENP021381 vlCDR3
QQGNTLPYT

SEQ ID NO: 26714 - protein, 223 aa, synthetic construct; identical to SEQ ID NO: 25194
  source 1..223: note = Description of Artificial Sequence: Synthetic polypeptide; note = XENP021382 2A11_H1_L2.35_Fab Heavy Chain

SEQ ID NO: 26715 - protein, 118 aa, synthetic construct; identical to SEQ ID NO: 17236
  source 1..118: note = Description of Artificial Sequence: Synthetic polypeptide; note = VH of XENP021382

SEQ ID NO: 26716 - protein, 5 aa, synthetic construct
  source 1..5: note = Description of Artificial Sequence: Synthetic peptide; note = XENP021382 vhCDR1
DYYMH

SEQ ID NO: 26717 - protein, 17 aa, synthetic construct
  source 1..17: note = Description of Artificial Sequence: Synthetic peptide; note = XENP021382 vhCDR2
WIDPENGDTEYAPKFQG

SEQ ID NO: 26718 - protein, 9 aa, synthetic construct
  source 1..9: note = Description of Artificial Sequence: Synthetic peptide; note = XENP021382 vhCDR3
RGVRQALDY

SEQ ID NO: 26719 - protein, 214 aa, synthetic construct
  source 1..214: note = Description of Artificial Sequence: Synthetic polypeptide; note = XENP021382 2A11_H1_L2.35_Fab Light Chain
DIQMTQSPAFLSVTPGEKVTITCQASQDIGNYLNWFQQKPDQTVKLLIYFTSRLHSGVPSRFSGSGSGTDYTFTISSLEAEDAATYFCQQGNTLPYTFGGGTKVEIKRTVAAPSVFIFPPSDEQLKSGTASVVCLLNNFYPREAKVQWKVDNALQSGNSQESVTEQDSKDSTYSLSSTLTLSKADYEKHKVYACEVTHQGLSSPVTKSFNRGEC

SEQ ID NO: 26720 - protein, 107 aa, synthetic construct
  source 1..107: note = Description of Artificial Sequence: Synthetic polypeptide; note = VL of XENP021382
DIQMTQSPAFLSVTPGEKVTITCQASQDIGNYLNWFQQKPDQTVKLLIYFTSRLHSGVPSRFSGSGSGTDYTFTISSLEAEDAATYFCQQGNTLPYTFGGGTKVEIK

SEQ ID NO: 26721 - protein, 11 aa, synthetic construct
  source 1..11: note = Description of Artificial Sequence: Synthetic peptide; note = XENP021382 vlCDR1
QASQDIGNYLN

SEQ ID NO: 26722 - protein, 7 aa, synthetic construct
  source 1..7: note = Description of Artificial Sequence: Synthetic peptide; note = XENP021382 vlCDR2
FTSRLHS

SEQ ID NO: 26723 - protein, 9 aa, synthetic construct
  source 1..9: note = Description of Artificial Sequence: Synthetic peptide; note = XENP021382 vlCDR3
QQGNTLPYT

SEQ ID NO: 26724 - protein, 223 aa, synthetic construct; identical to SEQ ID NO: 25194
  source 1..223: note = Description of Artificial Sequence: Synthetic polypeptide; note = XENP021383 2A11_H1_L2.36_Fab Heavy Chain

SEQ ID NO: 26725 - protein, 118 aa, synthetic construct; identical to SEQ ID NO: 17236
  source 1..118: note = Description of Artificial Sequence: Synthetic polypeptide; note = VH of XENP021383

SEQ ID NO: 26726 - protein, 5 aa, synthetic construct
  source 1..5: note = Description of Artificial Sequence: Synthetic peptide; note = XENP021383 vhCDR1
DYYMH

SEQ ID NO: 26727 - protein, 17 aa, synthetic construct
  source 1..17: note = Description of Artificial Sequence: Synthetic peptide; note = XENP021383 vhCDR2
WIDPENGDTEYAPKFQG

SEQ ID NO: 26728 - protein, 9 aa, synthetic construct
  source 1..9: note = Description of Artificial Sequence: Synthetic peptide; note = XENP021383 vhCDR3
RGVRQALDY

SEQ ID NO: 26729 - protein, 214 aa, synthetic construct
  source 1..214: note = Description of Artificial Sequence: Synthetic polypeptide; note = XENP021383 2A11_H1_L2.36_Fab Light Chain
DIQMTQSPAFLSVTPGEKVTITCQASQDIGNYLNWFQQKPDQTVKLLIYHTSRLHSGVPSRFSGSGSGTDYTFTISSLEAEDAATYFCQQGNTLPYTFGGGTKVEIKRTVAAPSVFIFPPSDEQLKSGTASVVCLLNNFYPREAKVQWKVDNALQSGNSQESVTEQDSKDSTYSLSSTLTLSKADYEKHKVYACEVTHQGLSSPVTKSFNRGEC

SEQ ID NO: 26730 - protein, 107 aa, synthetic construct
  source 1..107: note = Description of Artificial Sequence: Synthetic polypeptide; note = VL of XENP021383
DIQMTQSPAFLSVTPGEKVTITCQASQDIGNYLNWFQQKPDQTVKLLIYHTSRLHSGVPSRFSGSGSGTDYTFTISSLEAEDAATYFCQQGNTLPYTFGGGTKVEIK

SEQ ID NO: 26731 - protein, 11 aa, synthetic construct
  source 1..11: note = Description of Artificial Sequence: Synthetic peptide; note = XENP021383 vlCDR1
QASQDIGNYLN

SEQ ID NO: 26732 - protein, 7 aa, synthetic construct
  source 1..7: note = Description of Artificial Sequence: Synthetic peptide; note = XENP021383 vlCDR2
HTSRLHS

SEQ ID NO: 26733 - protein, 9 aa, synthetic construct
  source 1..9: note = Description of Artificial Sequence: Synthetic peptide; note = XENP021383 vlCDR3
QQGNTLPYT

SEQ ID NO: 26734 - protein, 223 aa, synthetic construct; identical to SEQ ID NO: 25194
  source 1..223: note = Description of Artificial Sequence: Synthetic polypeptide; note = XENP021384 2A11_H1_L2.37_Fab Heavy Chain

SEQ ID NO: 26735 - protein, 118 aa, synthetic construct; identical to SEQ ID NO: 17236
  source 1..118: note = Description of Artificial Sequence: Synthetic polypeptide; note = VH of XENP021384

SEQ ID NO: 26736 - protein, 5 aa, synthetic construct
  source 1..5: note = Description of Artificial Sequence: Synthetic peptide; note = XENP021384 vhCDR1
DYYMH

SEQ ID NO: 26737 - protein, 17 aa, synthetic construct
  source 1..17: note = Description of Artificial Sequence: Synthetic peptide; note = XENP021384 vhCDR2
WIDPENGDTEYAPKFQG

SEQ ID NO: 26738 - protein, 9 aa, synthetic construct
  source 1..9: note = Description of Artificial Sequence: Synthetic peptide; note = XENP021384 vhCDR3
RGVRQALDY

SEQ ID NO: 26739 - protein, 214 aa, synthetic construct
  source 1..214: note = Description of Artificial Sequence: Synthetic polypeptide; note = XENP021384 2A11_H1_L2.37_Fab Light Chain
DIQMTQSPAFLSVTPGEKVTITCQASQDIGNYLNWFQQKPDQTVKLLIYLTSRLHSGVPSRFSGSGSGTDYTFTISSLEAEDAATYFCQQGNTLPYTFGGGTKVEIKRTVAAPSVFIFPPSDEQLKSGTASVVCLLNNFYPREAKVQWKVDNALQSGNSQESVTEQDSKDSTYSLSSTLTLSKADYEKHKVYACEVTHQGLSSPVTKSFNRGEC

SEQ ID NO: 26740 - protein, 107 aa, synthetic construct
  source 1..107: note = Description of Artificial Sequence: Synthetic polypeptide; note = VL of XENP021384
DIQMTQSPAFLSVTPGEKVTITCQASQDIGNYLNWFQQKPDQTVKLLIYLTSRLHSGVPSRFSGSGSGTDYTFTISSLEAEDAATYFCQQGNTLPYTFGGGTKVEIK

SEQ ID NO: 26741 - protein, 11 aa, synthetic construct
  source 1..11: note = Description of Artificial Sequence: Synthetic peptide; note = XENP021384 vlCDR1
QASQDIGNYLN

SEQ ID NO: 26742 - protein, 7 aa, synthetic construct
  source 1..7: note = Description of Artificial Sequence: Synthetic peptide; note = XENP021384 vlCDR2
LTSRLHS

SEQ ID NO: 26743 - protein, 9 aa, synthetic construct
  source 1..9: note = Description of Artificial Sequence: Synthetic peptide; note = XENP021384 vlCDR3
QQGNTLPYT

SEQ ID NO: 26744 - protein, 223 aa, synthetic construct; identical to SEQ ID NO: 25194
  source 1..223: note = Description of Artificial Sequence: Synthetic polypeptide; note = XENP021385 2A11_H1_L2.38_Fab Heavy Chain

SEQ ID NO: 26745 - protein, 118 aa, synthetic construct; identical to SEQ ID NO: 17236
  source 1..118: note = Description of Artificial Sequence: Synthetic polypeptide; note = VH of XENP021385

SEQ ID NO: 26746 - protein, 5 aa, synthetic construct
  source 1..5: note = Description of Artificial Sequence: Synthetic peptide; note = XENP021385 vhCDR1
DYYMH

SEQ ID NO: 26747 - protein, 17 aa, synthetic construct
  source 1..17: note = Description of Artificial Sequence: Synthetic peptide; note = XENP021385 vhCDR2
WIDPENGDTEYAPKFQG

SEQ ID NO: 26748 - protein, 9 aa, synthetic construct
  source 1..9: note = Description of Artificial Sequence: Synthetic peptide; note = XENP021385 vhCDR3
RGVRQALDY

SEQ ID NO: 26749 - protein, 214 aa, synthetic construct
  source 1..214: note = Description of Artificial Sequence: Synthetic polypeptide; note = XENP021385 2A11_H1_L2.38_Fab Light Chain
DIQMTQSPAFLSVTPGEKVTITCQASQDIGNYLNWFQQKPDQTVKLLIYWTSRLHSGVPSRFSGSGSGTDYTFTISSLEAEDAATYFCQQGNTLPYTFGGGTKVEIKRTVAAPSVFIFPPSDEQLKSGTASVVCLLNNFYPREAKVQWKVDNALQSGNSQESVTEQDSKDSTYSLSSTLTLSKADYEKHKVYACEVTHQGLSSPVTKSFNRGEC

SEQ ID NO: 26750 - protein, 107 aa, synthetic construct
  source 1..107: note = Description of Artificial Sequence: Synthetic polypeptide; note = VL of XENP021385
DIQMTQSPAFLSVTPGEKVTITCQASQDIGNYLNWFQQKPDQTVKLLIYWTSRLHSGVPSRFSGSGSGTDYTFTISSLEAEDAATYFCQQGNTLPYTFGGGTKVEIK

SEQ ID NO: 26751 - protein, 11 aa, synthetic construct
  source 1..11: note = Description of Artificial Sequence: Synthetic peptide; note = XENP021385 vlCDR1
QASQDIGNYLN

SEQ ID NO: 26752 - protein, 7 aa, synthetic construct
  source 1..7: note = Description of Artificial Sequence: Synthetic peptide; note = XENP021385 vlCDR2
WTSRLHS

SEQ ID NO: 26753 - protein, 9 aa, synthetic construct
  source 1..9: note = Description of Artificial Sequence: Synthetic peptide; note = XENP021385 vlCDR3
QQGNTLPYT

SEQ ID NO: 26754 - protein, 223 aa, synthetic construct; identical to SEQ ID NO: 25194
  source 1..223: note = Description of Artificial Sequence: Synthetic polypeptide; note = XENP021386 2A11_H1_L2.39_Fab Heavy Chain

SEQ ID NO: 26755 - protein, 118 aa, synthetic construct; identical to SEQ ID NO: 17236
  source 1..118: note = Description of Artificial Sequence: Synthetic polypeptide; note = VH of XENP021386

SEQ ID NO: 26756 - protein, 5 aa, synthetic construct
  source 1..5: note = Description of Artificial Sequence: Synthetic peptide; note = XENP021386 vhCDR1
DYYMH

SEQ ID NO: 26757 - protein, 17 aa, synthetic construct
  source 1..17: note = Description of Artificial Sequence: Synthetic peptide; note = XENP021386 vhCDR2
WIDPENGDTEYAPKFQG

SEQ ID NO: 26758 - protein, 9 aa, synthetic construct
  source 1..9: note = Description of Artificial Sequence: Synthetic peptide; note = XENP021386 vhCDR3
RGVRQALDY

SEQ ID NO: 26759 - protein, 214 aa, synthetic construct
  source 1..214: note = Description of Artificial Sequence: Synthetic polypeptide; note = XENP021386 2A11_H1_L2.39_Fab Light Chain
DIQMTQSPAFLSVTPGEKVTITCQASQDIGNYLNWFQQKPDQTVKLLIYATSRLHSGVPSRFSGSGSGTDYTFTISSLEAEDAATYFCQQGNTLPYTFGGGTKVEIKRTVAAPSVFIFPPSDEQLKSGTASVVCLLNNFYPREAKVQWKVDNALQSGNSQESVTEQDSKDSTYSLSSTLTLSKADYEKHKVYACEVTHQGLSSPVTKSFNRGEC

SEQ ID NO: 26760 - protein, 107 aa, synthetic construct
  source 1..107: note = Description of Artificial Sequence: Synthetic polypeptide; note = VL of XENP021386
DIQMTQSPAFLSVTPGEKVTITCQASQDIGNYLNWFQQKPDQTVKLLIYATSRLHSGVPSRFSGSGSGTDYTFTISSLEAEDAATYFCQQGNTLPYTFGGGTKVEIK

SEQ ID NO: 26761 - protein, 11 aa, synthetic construct
  source 1..11: note = Description of Artificial Sequence: Synthetic peptide; note = XENP021386 vlCDR1
QASQDIGNYLN

SEQ ID NO: 26762 - protein, 7 aa, synthetic construct
  source 1..7: note = Description of Artificial Sequence: Synthetic peptide; note = XENP021386 vlCDR2
ATSRLHS

SEQ ID NO: 26763 - protein, 9 aa, synthetic construct
  source 1..9: note = Description of Artificial Sequence: Synthetic peptide; note = XENP021386 vlCDR3
QQGNTLPYT

SEQ ID NO: 26764 - protein, 223 aa, synthetic construct; identical to SEQ ID NO: 25194
  source 1..223: note = Description of Artificial Sequence: Synthetic polypeptide; note = XENP021387 2A11_H1_L2.40_Fab Heavy Chain

SEQ ID NO: 26765 - protein, 118 aa, synthetic construct; identical to SEQ ID NO: 17236
  source 1..118: note = Description of Artificial Sequence: Synthetic polypeptide; note = VH of XENP021387

SEQ ID NO: 26766 - protein, 5 aa, synthetic construct
  source 1..5: note = Description of Artificial Sequence: Synthetic peptide; note = XENP021387 vhCDR1
DYYMH

SEQ ID NO: 26767 - protein, 17 aa, synthetic construct
  source 1..17: note = Description of Artificial Sequence: Synthetic peptide; note = XENP021387 vhCDR2
WIDPENGDTEYAPKFQG

SEQ ID NO: 26768 - protein, 9 aa, synthetic construct
  source 1..9: note = Description of Artificial Sequence: Synthetic peptide; note = XENP021387 vhCDR3
RGVRQALDY

SEQ ID NO: 26769 - protein, 214 aa, synthetic construct
  source 1..214: note = Description of Artificial Sequence: Synthetic polypeptide; note = XENP021387 2A11_H1_L2.40_Fab Light Chain
DIQMTQSPAFLSVTPGEKVTITCQASQDIGNYLNWFQQKPDQTVKLLIYTTSRLHSGVPSRFSGSGSGTDYTFTISSLEAEDAATYFCQQGNTLPYTFGGGTKVEIKRTVAAPSVFIFPPSDEQLKSGTASVVCLLNNFYPREAKVQWKVDNALQSGNSQESVTEQDSKDSTYSLSSTLTLSKADYEKHKVYACEVTHQGLSSPVTKSFNRGEC

SEQ ID NO: 26770 - protein, 107 aa, synthetic construct
  source 1..107: note = Description of Artificial Sequence: Synthetic polypeptide; note = VL of XENP021387
DIQMTQSPAFLSVTPGEKVTITCQASQDIGNYLNWFQQKPDQTVKLLIYTTSRLHSGVPSRFSGSGSGTDYTFTISSLEAEDAATYFCQQGNTLPYTFGGGTKVEIK

SEQ ID NO: 26771 - protein, 11 aa, synthetic construct
  source 1..11: note = Description of Artificial Sequence: Synthetic peptide; note = XENP021387 vlCDR1
QASQDIGNYLN

SEQ ID NO: 26772 - protein, 7 aa, synthetic construct
  source 1..7: note = Description of Artificial Sequence: Synthetic peptide; note = XENP021387 vlCDR2
TTSRLHS

SEQ ID NO: 26773 - protein, 9 aa, synthetic construct
  source 1..9: note = Description of Artificial Sequence: Synthetic peptide; note = XENP021387 vlCDR3
QQGNTLPYT

SEQ ID NO: 26774 - protein, 223 aa, synthetic construct; identical to SEQ ID NO: 25194
  source 1..223: note = Description of Artificial Sequence: Synthetic polypeptide; note = XENP021388 2A11_H1_L2.41_Fab Heavy Chain

SEQ ID NO: 26775 - protein, 118 aa, synthetic construct; identical to SEQ ID NO: 17236
  source 1..118: note = Description of Artificial Sequence: Synthetic polypeptide; note = VH of XENP021388

SEQ ID NO: 26776 - protein, 5 aa, synthetic construct
  source 1..5: note = Description of Artificial Sequence: Synthetic peptide; note = XENP021388 vhCDR1
DYYMH

SEQ ID NO: 26777 - protein, 17 aa, synthetic construct
  source 1..17: note = Description of Artificial Sequence: Synthetic peptide; note = XENP021388 vhCDR2
WIDPENGDTEYAPKFQG

SEQ ID NO: 26778 - protein, 9 aa, synthetic construct
  source 1..9: note = Description of Artificial Sequence: Synthetic peptide; note = XENP021388 vhCDR3
RGVRQALDY

SEQ ID NO: 26779 - protein, 214 aa, synthetic construct
  source 1..214: note = Description of Artificial Sequence: Synthetic polypeptide; note = XENP021388 2A11_H1_L2.41_Fab Light Chain
DIQMTQSPAFLSVTPGEKVTITCQASQDIGNYLNWFQQKPDQTVKLLIYQTSRLHSGVPSRFSGSGSGTDYTFTISSLEAEDAATYFCQQGNTLPYTFGGGTKVEIKRTVAAPSVFIFPPSDEQLKSGTASVVCLLNNFYPREAKVQWKVDNALQSGNSQESVTEQDSKDSTYSLSSTLTLSKADYEKHKVYACEVTHQGLSSPVTKSFNRGEC

SEQ ID NO: 26780 - protein, 107 aa, synthetic construct
  source 1..107: note = Description of Artificial Sequence: Synthetic polypeptide; note = VL of XENP021388
DIQMTQSPAFLSVTPGEKVTITCQASQDIGNYLNWFQQKPDQTVKLLIYQTSRLHSGVPSRFSGSGSGTDYTFTISSLEAEDAATYFCQQGNTLPYTFGGGTKVEIK

SEQ ID NO: 26781 - protein, 11 aa, synthetic construct
  source 1..11: note = Description of Artificial Sequence: Synthetic peptide; note = XENP021388 vlCDR1
QASQDIGNYLN

SEQ ID NO: 26782 - protein, 7 aa, synthetic construct
  source 1..7: note = Description of Artificial Sequence: Synthetic peptide; note = XENP021388 vlCDR2
QTSRLHS

SEQ ID NO: 26783 - protein, 9 aa, synthetic construct
  source 1..9: note = Description of Artificial Sequence: Synthetic peptide; note = XENP021388 vlCDR3
QQGNTLPYT

SEQ ID NO: 26784 - protein, 223 aa, synthetic construct; identical to SEQ ID NO: 25194
  source 1..223: note = Description of Artificial Sequence: Synthetic polypeptide; note = XENP021389 2A11_H1_L2.42_Fab Heavy Chain

SEQ ID NO: 26785 - protein, 118 aa, synthetic construct; identical to SEQ ID NO: 17236
  source 1..118: note = Description of Artificial Sequence: Synthetic polypeptide; note = VH of XENP021389

SEQ ID NO: 26786 - protein, 5 aa, synthetic construct
  source 1..5: note = Description of Artificial Sequence: Synthetic peptide; note = XENP021389 vhCDR1
DYYMH

SEQ ID NO: 26787 - protein, 17 aa, synthetic construct
  source 1..17: note = Description of Artificial Sequence: Synthetic peptide; note = XENP021389 vhCDR2
WIDPENGDTEYAPKFQG

SEQ ID NO: 26788 - protein, 9 aa, synthetic construct
  source 1..9: note = Description of Artificial Sequence: Synthetic peptide; note = XENP021389 vhCDR3
RGVRQALDY

SEQ ID NO: 26789 - protein, 214 aa, synthetic construct
  source 1..214: note = Description of Artificial Sequence: Synthetic polypeptide; note = XENP021389 2A11_H1_L2.42_Fab Light Chain
DIQMTQSPAFLSVTPGEKVTITCQASQDIGNYLNWFQQKPDQTVKLLIYETSRLHSGVPSRFSGSGSGTDYTFTISSLEAEDAATYFCQQGNTLPYTFGGGTKVEIKRTVAAPSVFIFPPSDEQLKSGTASVVCLLNNFYPREAKVQWKVDNALQSGNSQESVTEQDSKDSTYSLSSTLTLSKADYEKHKVYACEVTHQGLSSPVTKSFNRGEC

SEQ ID NO: 26790 - protein, 107 aa, synthetic construct
  source 1..107: note = Description of Artificial Sequence: Synthetic polypeptide; note = VL of XENP021389
DIQMTQSPAFLSVTPGEKVTITCQASQDIGNYLNWFQQKPDQTVKLLIYETSRLHSGVPSRFSGSGSGTDYTFTISSLEAEDAATYFCQQGNTLPYTFGGGTKVEIK

SEQ ID NO: 26791 - protein, 11 aa, synthetic construct
  source 1..11: note = Description of Artificial Sequence: Synthetic peptide; note = XENP021389 vlCDR1
QASQDIGNYLN

SEQ ID NO: 26792 - protein, 7 aa, synthetic construct
  source 1..7: note = Description of Artificial Sequence: Synthetic peptide; note = XENP021389 vlCDR2
ETSRLHS

SEQ ID NO: 26793 - protein, 9 aa, synthetic construct
  source 1..9: note = Description of Artificial Sequence: Synthetic peptide; note = XENP021389 vlCDR3
QQGNTLPYT

SEQ ID NO: 26794 - protein, 223 aa, synthetic construct; identical to SEQ ID NO: 25194
  source 1..223: note = Description of Artificial Sequence: Synthetic polypeptide; note = XENP021390 2A11_H1_L2.43_Fab Heavy Chain

SEQ ID NO: 26795 - protein, 118 aa, synthetic construct; identical to SEQ ID NO: 17236
  source 1..118: note = Description of Artificial Sequence: Synthetic polypeptide; note = VH of XENP021390

SEQ ID NO: 26796 - protein, 5 aa, synthetic construct
  source 1..5: note = Description of Artificial Sequence: Synthetic peptide; note = XENP021390 vhCDR1
DYYMH

SEQ ID NO: 26797 - protein, 17 aa, synthetic construct
  source 1..17: note = Description of Artificial Sequence: Synthetic peptide; note = XENP021390 vhCDR2
WIDPENGDTEYAPKFQG

SEQ ID NO: 26798 - protein, 9 aa, synthetic construct
  source 1..9: note = Description of Artificial Sequence: Synthetic peptide; note = XENP021390 vhCDR3
RGVRQALDY

SEQ ID NO: 26799 - protein, 214 aa, synthetic construct
  source 1..214: note = Description of Artificial Sequence: Synthetic polypeptide; note = XENP021390 2A11_H1_L2.43_Fab Light Chain
DIQMTQSPAFLSVTPGEKVTITCQASQDIGNYLNWFQQKPDQTVKLLIYKTSRLHSGVPSRFSGSGSGTDYTFTISSLEAEDAATYFCQQGNTLPYTFGGGTKVEIKRTVAAPSVFIFPPSDEQLKSGTASVVCLLNNFYPREAKVQWKVDNALQSGNSQESVTEQDSKDSTYSLSSTLTLSKADYEKHKVYACEVTHQGLSSPVTKSFNRGEC

SEQ ID NO: 26800 - protein, 107 aa, synthetic construct
  source 1..107: note = Description of Artificial Sequence: Synthetic polypeptide; note = VL of XENP021390
DIQMTQSPAFLSVTPGEKVTITCQASQDIGNYLNWFQQKPDQTVKLLIYKTSRLHSGVPSRFSGSGSGTDYTFTISSLEAEDAATYFCQQGNTLPYTFGGGTKVEIK

SEQ ID NO: 26801 - protein, 11 aa, synthetic construct
  source 1..11: note = Description of Artificial Sequence: Synthetic peptide; note = XENP021390 vlCDR1
QASQDIGNYLN

SEQ ID NO: 26802 - protein, 7 aa, synthetic construct
  source 1..7: note = Description of Artificial Sequence: Synthetic peptide; note = XENP021390 vlCDR2
KTSRLHS

SEQ ID NO: 26803 - protein, 9 aa, synthetic construct
  source 1..9: note = Description of Artificial Sequence: Synthetic peptide; note = XENP021390 vlCDR3
QQGNTLPYT

SEQ ID NO: 26804 - protein, 223 aa, synthetic construct; identical to SEQ ID NO: 25194
  source 1..223: note = Description of Artificial Sequence: Synthetic polypeptide; note = XENP021391 2A11_H1_L2.44_Fab Heavy Chain

SEQ ID NO: 26805 - protein, 118 aa, synthetic construct; identical to SEQ ID NO: 17236
  source 1..118: note = Description of Artificial Sequence: Synthetic polypeptide; note = VH of XENP021391

SEQ ID NO: 26806 - protein, 5 aa, synthetic construct
  source 1..5: note = Description of Artificial Sequence: Synthetic peptide; note = XENP021391 vhCDR1
DYYMH

SEQ ID NO: 26807 - protein, 17 aa, synthetic construct
  source 1..17: note = Description of Artificial Sequence: Synthetic peptide; note = XENP021391 vhCDR2
WIDPENGDTEYAPKFQG

SEQ ID NO: 26808 - protein, 9 aa, synthetic construct
  source 1..9: note = Description of Artificial Sequence: Synthetic peptide; note = XENP021391 vhCDR3
RGVRQALDY

SEQ ID NO: 26809 - protein, 214 aa, synthetic construct
  source 1..214: note = Description of Artificial Sequence: Synthetic polypeptide; note = XENP021391 2A11_H1_L2.44_Fab Light Chain
DIQMTQSPAFLSVTPGEKVTITCQASQDIGNYLNWFQQKPDQTVKLLIYYTSKLHSGVPSRFSGSGSGTDYTFTISSLEAEDAATYFCQQGNTLPYTFGGGTKVEIKRTVAAPSVFIFPPSDEQLKSGTASVVCLLNNFYPREAKVQWKVDNALQSGNSQESVTEQDSKDSTYSLSSTLTLSKADYEKHKVYACEVTHQGLSSPVTKSFNRGEC

SEQ ID NO: 26810 - protein, 107 aa, synthetic construct
  source 1..107: note = Description of Artificial Sequence: Synthetic polypeptide; note = VL of XENP021391
DIQMTQSPAFLSVTPGEKVTITCQASQDIGNYLNWFQQKPDQTVKLLIYYTSKLHSGVPSRFSGSGSGTDYTFTISSLEAEDAATYFCQQGNTLPYTFGGGTKVEIK

SEQ ID NO: 26811 - protein, 11 aa, synthetic construct
  source 1..11: note = Description of Artificial Sequence: Synthetic peptide; note = XENP021391 vlCDR1
QASQDIGNYLN

SEQ ID NO: 26812 - protein, 7 aa, synthetic construct
  source 1..7: note = Description of Artificial Sequence: Synthetic peptide; note = XENP021391 vlCDR2
YTSKLHS

SEQ ID NO: 26813 - protein, 9 aa, synthetic construct
  source 1..9: note = Description of Artificial Sequence: Synthetic peptide; note = XENP021391 vlCDR3
QQGNTLPYT

SEQ ID NO: 26814 - protein, 223 aa, synthetic construct; identical to SEQ ID NO: 25194
  source 1..223: note = Description of Artificial Sequence: Synthetic polypeptide; note = XENP021392 2A11_H1_L2.45_Fab Heavy Chain

SEQ ID NO: 26815 - protein, 118 aa, synthetic construct; identical to SEQ ID NO: 17236
  source 1..118: note = Description of Artificial Sequence: Synthetic polypeptide; note = VH of XENP021392

SEQ ID NO: 26816 - protein, 5 aa, synthetic construct
  source 1..5: note = Description of Artificial Sequence: Synthetic peptide; note = XENP021392 vhCDR1
DYYMH

SEQ ID NO: 26817 - protein, 17 aa, synthetic construct
  source 1..17: note = Description of Artificial Sequence: Synthetic peptide; note = XENP021392 vhCDR2
WIDPENGDTEYAPKFQG

SEQ ID NO: 26818 - protein, 9 aa, synthetic construct
  source 1..9: note = Description of Artificial Sequence: Synthetic peptide; note = XENP021392 vhCDR3
RGVRQALDY

SEQ ID NO: 26819 - protein, 214 aa, synthetic construct
  source 1..214: note = Description of Artificial Sequence: Synthetic polypeptide; note = XENP021392 2A11_H1_L2.45_Fab Light Chain
DIQMTQSPAFLSVTPGEKVTITCQASQDIGNYLNWFQQKPDQTVKLLIYYTSELHSGVPSRFSGSGSGTDYTFTISSLEAEDAATYFCQQGNTLPYTFGGGTKVEIKRTVAAPSVFIFPPSDEQLKSGTASVVCLLNNFYPREAKVQWKVDNALQSGNSQESVTEQDSKDSTYSLSSTLTLSKADYEKHKVYACEVTHQGLSSPVTKSFNRGEC

SEQ ID NO: 26820 - protein, 107 aa, synthetic construct
  source 1..107: note = Description of Artificial Sequence: Synthetic polypeptide; note = VL of XENP021392
DIQMTQSPAFLSVTPGEKVTITCQASQDIGNYLNWFQQKPDQTVKLLIYYTSELHSGVPSRFSGSGSGTDYTFTISSLEAEDAATYFCQQGNTLPYTFGGGTKVEIK

SEQ ID NO: 26821 - protein, 11 aa, synthetic construct
  source 1..11: note = Description of Artificial Sequence: Synthetic peptide; note = XENP021392 vlCDR1
QASQDIGNYLN

SEQ ID NO: 26822 - protein, 7 aa, synthetic construct
  source 1..7: note = Description of Artificial Sequence: Synthetic peptide; note = XENP021392 vlCDR2
YTSELHS

SEQ ID NO: 26823 - protein, 9 aa, synthetic construct
  source 1..9: note = Description of Artificial Sequence: Synthetic peptide; note = XENP021392 vlCDR3
QQGNTLPYT

SEQ ID NO: 26824 - protein, 223 aa, synthetic construct; identical to SEQ ID NO: 25194
  source 1..223: note = Description of Artificial Sequence: Synthetic polypeptide; note = XENP021393 2A11_H1_L2.46_Fab Heavy Chain

SEQ ID NO: 26825 - protein, 118 aa, synthetic construct; identical to SEQ ID NO: 17236
  source 1..118: note = Description of Artificial Sequence: Synthetic polypeptide; note = VH of XENP021393

SEQ ID NO: 26826 - protein, 5 aa, synthetic construct
  source 1..5: note = Description of Artificial Sequence: Synthetic peptide; note = XENP021393 vhCDR1
DYYMH

SEQ ID NO: 26827 - protein, 17 aa, synthetic construct
  source 1..17: note = Description of Artificial Sequence: Synthetic peptide; note = XENP021393 vhCDR2
WIDPENGDTEYAPKFQG

SEQ ID NO: 26828 - protein, 9 aa, synthetic construct
  source 1..9: note = Description of Artificial Sequence: Synthetic peptide; note = XENP021393 vhCDR3
RGVRQALDY

SEQ ID NO: 26829 - protein, 214 aa, synthetic construct
  source 1..214: note = Description of Artificial Sequence: Synthetic polypeptide; note = XENP021393 2A11_H1_L2.46_Fab Light Chain
DIQMTQSPAFLSVTPGEKVTITCQASQDIGNYLNWFQQKPDQTVKLLIYYTSDLHSGVPSRFSGSGSGTDYTFTISSLEAEDAATYFCQQGNTLPYTFGGGTKVEIKRTVAAPSVFIFPPSDEQLKSGTASVVCLLNNFYPREAKVQWKVDNALQSGNSQESVTEQDSKDSTYSLSSTLTLSKADYEKHKVYACEVTHQGLSSPVTKSFNRGEC

SEQ ID NO: 26830 - protein, 107 aa, synthetic construct
  source 1..107: note = Description of Artificial Sequence: Synthetic polypeptide; note = VL of XENP021393
DIQMTQSPAFLSVTPGEKVTITCQASQDIGNYLNWFQQKPDQTVKLLIYYTSDLHSGVPSRFSGSGSGTDYTFTISSLEAEDAATYFCQQGNTLPYTFGGGTKVEIK

SEQ ID NO: 26831 - protein, 11 aa, synthetic construct
  source 1..11: note = Description of Artificial Sequence: Synthetic peptide; note = XENP021393 vlCDR1
QASQDIGNYLN

SEQ ID NO: 26832 - protein, 7 aa, synthetic construct
  source 1..7: note = Description of Artificial Sequence: Synthetic peptide; note = XENP021393 vlCDR2
YTSDLHS

SEQ ID NO: 26833 - protein, 9 aa, synthetic construct
  source 1..9: note = Description of Artificial Sequence: Synthetic peptide; note = XENP021393 vlCDR3
QQGNTLPYT

SEQ ID NO: 26834 - protein, 223 aa, synthetic construct; identical to SEQ ID NO: 25194
  source 1..223: note = Description of Artificial Sequence: Synthetic polypeptide; note = XENP021394 2A11_H1_L2.47_Fab Heavy Chain

SEQ ID NO: 26835 - protein, 118 aa, synthetic construct; identical to SEQ ID NO: 17236
  source 1..118: note = Description of Artificial Sequence: Synthetic polypeptide; note = VH of XENP021394

SEQ ID NO: 26836 - protein, 5 aa, synthetic construct
  source 1..5: note = Description of Artificial Sequence: Synthetic peptide; note = XENP021394 vhCDR1
DYYMH

SEQ ID NO: 26837 - protein, 17 aa, synthetic construct
  source 1..17: note = Description of Artificial Sequence: Synthetic peptide; note = XENP021394 vhCDR2
WIDPENGDTEYAPKFQG

SEQ ID NO: 26838 - protein, 9 aa, synthetic construct
  source 1..9: note = Description of Artificial Sequence: Synthetic peptide; note = XENP021394 vhCDR3
RGVRQALDY

SEQ ID NO: 26839 - protein, 214 aa, synthetic construct; identical to SEQ ID NO: 22039
  source 1..214: note = Description of Artificial Sequence: Synthetic polypeptide; note = XENP021394 2A11_H1_L2.47_Fab Light Chain

SEQ ID NO: 26840 - protein, 107 aa, synthetic construct; identical to SEQ ID NO: 22040
  source 1..107: note = Description of Artificial Sequence: Synthetic polypeptide; note = VL of XENP021394

SEQ ID NO: 26841 - protein, 11 aa, synthetic construct
  source 1..11: note = Description of Artificial Sequence: Synthetic peptide; note = XENP021394 vlCDR1
QASQDIGNYLN

SEQ ID NO: 26842 - protein, 7 aa, synthetic construct
  source 1..7: note = Description of Artificial Sequence: Synthetic peptide; note = XENP021394 vlCDR2
YTSHLHS

SEQ ID NO: 26843 - protein, 9 aa, synthetic construct
  source 1..9: note = Description of Artificial Sequence: Synthetic peptide; note = XENP021394 vlCDR3
QQGNTLPYT

SEQ ID NO: 26844 - protein, 223 aa, synthetic construct; identical to SEQ ID NO: 25194
  source 1..223: note = Description of Artificial Sequence: Synthetic polypeptide; note = XENP021395 2A11_H1_L2.48_Fab Heavy Chain

SEQ ID NO: 26845 - protein, 118 aa, synthetic construct; identical to SEQ ID NO: 17236
  source 1..118: note = Description of Artificial Sequence: Synthetic polypeptide; note = VH of XENP021395

SEQ ID NO: 26846 - protein, 5 aa, synthetic construct
  source 1..5: note = Description of Artificial Sequence: Synthetic peptide; note = XENP021395 vhCDR1
DYYMH

SEQ ID NO: 26847 - protein, 17 aa, synthetic construct
  source 1..17: note = Description of Artificial Sequence: Synthetic peptide; note = XENP021395 vhCDR2
WIDPENGDTEYAPKFQG

SEQ ID NO: 26848 - protein, 9 aa, synthetic construct
  source 1..9: note = Description of Artificial Sequence: Synthetic peptide; note = XENP021395 vhCDR3
RGVRQALDY

SEQ ID NO: 26849 - protein, 214 aa, synthetic construct
  source 1..214: note = Description of Artificial Sequence: Synthetic polypeptide; note = XENP021395 2A11_H1_L2.48_Fab Light Chain
DIQMTQSPAFLSVTPGEKVTITCQASQDIGNYLNWFQQKPDQTVKLLIYYTSTLHSGVPSRFSGSGSGTDYTFTISSLEAEDAATYFCQQGNTLPYTFGGGTKVEIKRTVAAPSVFIFPPSDEQLKSGTASVVCLLNNFYPREAKVQWKVDNALQSGNSQESVTEQDSKDSTYSLSSTLTLSKADYEKHKVYACEVTHQGLSSPVTKSFNRGEC

SEQ ID NO: 26850 - protein, 107 aa, synthetic construct
  source 1..107: note = Description of Artificial Sequence: Synthetic polypeptide; note = VL of XENP021395
DIQMTQSPAFLSVTPGEKVTITCQASQDIGNYLNWFQQKPDQTVKLLIYYTSTLHSGVPSRFSGSGSGTDYTFTISSLEAEDAATYFCQQGNTLPYTFGGGTKVEIK

SEQ ID NO: 26851 - protein, 11 aa, synthetic construct
  source 1..11: note = Description of Artificial Sequence: Synthetic peptide; note = XENP021395 vlCDR1
QASQDIGNYLN

SEQ ID NO: 26852 - protein, 7 aa, synthetic construct
  source 1..7: note = Description of Artificial Sequence: Synthetic peptide; note = XENP021395 vlCDR2
YTSTLHS

SEQ ID NO: 26853 - protein, 9 aa, synthetic construct
  source 1..9: note = Description of Artificial Sequence: Synthetic peptide; note = XENP021395 vlCDR3
QQGNTLPYT

SEQ ID NO: 26854 - protein, 223 aa, synthetic construct; identical to SEQ ID NO: 25194
  source 1..223: note = Description of Artificial Sequence: Synthetic polypeptide; note = XENP021396 2A11_H1_L2.49_Fab Heavy Chain

SEQ ID NO: 26855 - protein, 118 aa, synthetic construct; identical to SEQ ID NO: 17236
  source 1..118: note = Description of Artificial Sequence: Synthetic polypeptide; note = VH of XENP021396

SEQ ID NO: 26856 - protein, 5 aa, synthetic construct
  source 1..5: note = Description of Artificial Sequence: Synthetic peptide; note = XENP021396 vhCDR1
DYYMH

SEQ ID NO: 26857 - protein, 17 aa, synthetic construct
  source 1..17: note = Description of Artificial Sequence: Synthetic peptide; note = XENP021396 vhCDR2
WIDPENGDTEYAPKFQG

SEQ ID NO: 26858 - protein, 9 aa, synthetic construct
  source 1..9: note = Description of Artificial Sequence: Synthetic peptide; note = XENP021396 vhCDR3
RGVRQALDY

SEQ ID NO: 26859 - protein, 214 aa, synthetic construct
  source 1..214: note = Description of Artificial Sequence: Synthetic polypeptide; note = XENP021396 2A11_H1_L2.49_Fab Light Chain
DIQMTQSPAFLSVTPGEKVTITCQASQDIGNYLNWFQQKPDQTVKLLIYYTSALHSGVPSRFSGSGSGTDYTFTISSLEAEDAATYFCQQGNTLPYTFGGGTKVEIKRTVAAPSVFIFPPSDEQLKSGTASVVCLLNNFYPREAKVQWKVDNALQSGNSQESVTEQDSKDSTYSLSSTLTLSKADYEKHKVYACEVTHQGLSSPVTKSFNRGEC

SEQ ID NO: 26860 - protein, 107 aa, synthetic construct
  source 1..107: note = Description of Artificial Sequence: Synthetic polypeptide; note = VL of XENP021396
DIQMTQSPAFLSVTPGEKVTITCQASQDIGNYLNWFQQKPDQTVKLLIYYTSALHSGVPSRFSGSGSGTDYTFTISSLEAEDAATYFCQQGNTLPYTFGGGTKVEIK

SEQ ID NO: 26861 - protein, 11 aa, synthetic construct
  source 1..11: note = Description of Artificial Sequence: Synthetic peptide; note = XENP021396 vlCDR1
QASQDIGNYLN

SEQ ID NO: 26862 - protein, 7 aa, synthetic construct
  source 1..7: note = Description of Artificial Sequence: Synthetic peptide; note = XENP021396 vlCDR2
YTSALHS

SEQ ID NO: 26863 - protein, 9 aa, synthetic construct
  source 1..9: note = Description of Artificial Sequence: Synthetic peptide; note = XENP021396 vlCDR3
QQGNTLPYT

SEQ ID NO: 26864 - protein, 223 aa, synthetic construct; identical to SEQ ID NO: 25194
  source 1..223: note = Description of Artificial Sequence: Synthetic polypeptide; note = XENP021401 2A11_H1_L2.50_Fab Heavy Chain

SEQ ID NO: 26865 - protein, 118 aa, synthetic construct; identical to SEQ ID NO: 17236
  source 1..118: note = Description of Artificial Sequence: Synthetic polypeptide; note = VH of XENP021401

SEQ ID NO: 26866 - protein, 5 aa, synthetic construct
  source 1..5: note = Description of Artificial Sequence: Synthetic peptide; note = XENP021401 vhCDR1
DYYMH

SEQ ID NO: 26867 - protein, 17 aa, synthetic construct
  source 1..17: note = Description of Artificial Sequence: Synthetic peptide; note = XENP021401 vhCDR2
WIDPENGDTEYAPKFQG

SEQ ID NO: 26868 - protein, 9 aa, synthetic construct
  source 1..9: note = Description of Artificial Sequence: Synthetic peptide; note = XENP021401 vhCDR3
RGVRQALDY

SEQ ID NO: 26869 - protein, 214 aa, synthetic construct; identical to SEQ ID NO: 22059
  source 1..214: note = Description of Artificial Sequence: Synthetic polypeptide; note = XENP021401 2A11_H1_L2.50_Fab Light Chain

SEQ ID NO: 26870 - protein, 107 aa, synthetic construct; identical to SEQ ID NO: 22060
  source 1..107: note = Description of Artificial Sequence: Synthetic polypeptide; note = VL of XENP021401

SEQ ID NO: 26871 - protein, 11 aa, synthetic construct
  source 1..11: note = Description of Artificial Sequence: Synthetic peptide; note = XENP021401 vlCDR1
QASQDIGNYLN

SEQ ID NO: 26872 - protein, 7 aa, synthetic construct
  source 1..7: note = Description of Artificial Sequence: Synthetic peptide; note = XENP021401 vlCDR2
YTSYLHS

SEQ ID NO: 26873 - protein, 9 aa, synthetic construct
  source 1..9: note = Description of Artificial Sequence: Synthetic peptide; note = XENP021401 vlCDR3
QQGNTLPYT

SEQ ID NO: 26874 - protein, 223 aa, synthetic construct; identical to SEQ ID NO: 25194
  source 1..223: note = Description of Artificial Sequence: Synthetic polypeptide; note = XENP021402 2A11_H1_L2.51_Fab Heavy Chain

SEQ ID NO: 26875 - protein, 118 aa, synthetic construct; identical to SEQ ID NO: 17236
  source 1..118: note = Description of Artificial Sequence: Synthetic polypeptide; note = VH of XENP021402

SEQ ID NO: 26876 - protein, 5 aa, synthetic construct
  source 1..5: note = Description of Artificial Sequence: Synthetic peptide; note = XENP021402 vhCDR1
DYYMH

SEQ ID NO: 26877 - protein, 17 aa, synthetic construct
  source 1..17: note = Description of Artificial Sequence: Synthetic peptide; note = XENP021402 vhCDR2
WIDPENGDTEYAPKFQG

SEQ ID NO: 26878 - protein, 9 aa, synthetic construct
  source 1..9: note = Description of Artificial Sequence: Synthetic peptide; note = XENP021402 vhCDR3
RGVRQALDY

SEQ ID NO: 26879 - protein, 214 aa, synthetic construct
  source 1..214: note = Description of Artificial Sequence: Synthetic polypeptide; note = XENP021402 2A11_H1_L2.51_Fab Light Chain
DIQMTQSPAFLSVTPGEKVTITCQASQDIGNYLNWFQQKPDQTVKLLIYYTSLLHSGVPSRFSGSGSGTDYTFTISSLEAEDAATYFCQQGNTLPYTFGGGTKVEIKRTVAAPSVFIFPPSDEQLKSGTASVVCLLNNFYPREAKVQWKVDNALQSGNSQESVTEQDSKDSTYSLSSTLTLSKADYEKHKVYACEVTHQGLSSPVTKSFNRGEC

SEQ ID NO: 26880 - protein, 107 aa, synthetic construct
  source 1..107: note = Description of Artificial Sequence: Synthetic polypeptide; note = VL of XENP021402
DIQMTQSPAFLSVTPGEKVTITCQASQDIGNYLNWFQQKPDQTVKLLIYYTSLLHSGVPSRFSGSGSGTDYTFTISSLEAEDAATYFCQQGNTLPYTFGGGTKVEIK

SEQ ID NO: 26881 - protein, 11 aa, synthetic construct
  source 1..11: note = Description of Artificial Sequence: Synthetic peptide; note = XENP021402 vlCDR1
QASQDIGNYLN

SEQ ID NO: 26882 - protein, 7 aa, synthetic construct
  source 1..7: note = Description of Artificial Sequence: Synthetic peptide; note = XENP021402 vlCDR2
YTSLLHS

SEQ ID NO: 26883 - protein, 9 aa, synthetic construct
  source 1..9: note = Description of Artificial Sequence: Synthetic peptide; note = XENP021402 vlCDR3
QQGNTLPYT

SEQ ID NO: 26884 - protein, 223 aa, synthetic construct; identical to SEQ ID NO: 25194
  source 1..223: note = Description of Artificial Sequence: Synthetic polypeptide; note = XENP021403 2A11_H1_L2.52_Fab Heavy Chain

SEQ ID NO: 26885 - protein, 118 aa, synthetic construct; identical to SEQ ID NO: 17236
  source 1..118: note = Description of Artificial Sequence: Synthetic polypeptide; note = VH of XENP021403

SEQ ID NO: 26886 - protein, 5 aa, synthetic construct
  source 1..5: note = Description of Artificial Sequence: Synthetic peptide; note = XENP021403 vhCDR1
DYYMH

SEQ ID NO: 26887 - protein, 17 aa, synthetic construct
  source 1..17: note = Description of Artificial Sequence: Synthetic peptide; note = XENP021403 vhCDR2
WIDPENGDTEYAPKFQG

SEQ ID NO: 26888 - protein, 9 aa, synthetic construct
  source 1..9: note = Description of Artificial Sequence: Synthetic peptide; note = XENP021403 vhCDR3
RGVRQALDY

SEQ ID NO: 26889 - protein, 214 aa, synthetic construct
  source 1..214: note = Description of Artificial Sequence: Synthetic polypeptide; note = XENP021403 2A11_H1_L2.52_Fab Light Chain
DIQMTQSPAFLSVTPGEKVTITCQASQDIGNYLNWFQQKPDQTVKLLIYYTSRYHSGVPSRFSGSGSGTDYTFTISSLEAEDAATYFCQQGNTLPYTFGGGTKVEIKRTVAAPSVFIFPPSDEQLKSGTASVVCLLNNFYPREAKVQWKVDNALQSGNSQESVTEQDSKDSTYSLSSTLTLSKADYEKHKVYACEVTHQGLSSPVTKSFNRGEC

SEQ ID NO: 26890 - protein, 107 aa, synthetic construct
  source 1..107: note = Description of Artificial Sequence: Synthetic polypeptide; note = VL of XENP021403
DIQMTQSPAFLSVTPGEKVTITCQASQDIGNYLNWFQQKPDQTVKLLIYYTSRYHSGVPSRFSGSGSGTDYTFTISSLEAEDAATYFCQQGNTLPYTFGGGTKVEIK

SEQ ID NO: 26891 - protein, 11 aa, synthetic construct
  source 1..11: note = Description of Artificial Sequence: Synthetic peptide; note = XENP021403 vlCDR1
QASQDIGNYLN

SEQ ID NO: 26892 - protein, 7 aa, synthetic construct
  source 1..7: note = Description of Artificial Sequence: Synthetic peptide; note = XENP021403 vlCDR2
YTSRYHS

SEQ ID NO: 26893 - protein, 9 aa, synthetic construct
  source 1..9: note = Description of Artificial Sequence: Synthetic peptide; note = XENP021403 vlCDR3
QQGNTLPYT

SEQ ID NO: 26894 - protein, 223 aa, synthetic construct; identical to SEQ ID NO: 25194
  source 1..223: note = Description of Artificial Sequence: Synthetic polypeptide; note = XENP021404 2A11_H1_L2.53_Fab Heavy Chain

SEQ ID NO: 26895 - protein, 118 aa, synthetic construct; identical to SEQ ID NO: 17236
  source 1..118: note = Description of Artificial Sequence: Synthetic polypeptide; note = VH of XENP021404

SEQ ID NO: 26896 - protein, 5 aa, synthetic construct
  source 1..5: note = Description of Artificial Sequence: Synthetic peptide; note = XENP021404 vhCDR1
DYYMH

SEQ ID NO: 26897 - protein, 17 aa, synthetic construct
  source 1..17: note = Description of Artificial Sequence: Synthetic peptide; note = XENP021404 vhCDR2
WIDPENGDTEYAPKFQG

SEQ ID NO: 26898 - protein, 9 aa, synthetic construct
  source 1..9: note = Description of Artificial Sequence: Synthetic peptide; note = XENP021404 vhCDR3
RGVRQALDY

SEQ ID NO: 26899 - protein, 214 aa, synthetic construct
  source 1..214: note = Description of Artificial Sequence: Synthetic polypeptide; note = XENP021404 2A11_H1_L2.53_Fab Light Chain
DIQMTQSPAFLSVTPGEKVTITCQASQDIGNYLNWFQQKPDQTVKLLIYYTSRRHSGVPSRFSGSGSGTDYTFTISSLEAEDAATYFCQQGNTLPYTFGGGTKVEIKRTVAAPSVFIFPPSDEQLKSGTASVVCLLNNFYPREAKVQWKVDNALQSGNSQESVTEQDSKDSTYSLSSTLTLSKADYEKHKVYACEVTHQGLSSPVTKSFNRGEC

SEQ ID NO: 26900 - protein, 107 aa, synthetic construct
  source 1..107: note = Description of Artificial Sequence: Synthetic polypeptide; note = VL of XENP021404
DIQMTQSPAFLSVTPGEKVTITCQASQDIGNYLNWFQQKPDQTVKLLIYYTSRRHSGVPSRFSGSGSGTDYTFTISSLEAEDAATYFCQQGNTLPYTFGGGTKVEIK

SEQ ID NO: 26901 - protein, 11 aa, synthetic construct
  source 1..11: note = Description of Artificial Sequence: Synthetic peptide; note = XENP021404 vlCDR1
QASQDIGNYLN

SEQ ID NO: 26902 - protein, 7 aa, synthetic construct
  source 1..7: note = Description of Artificial Sequence: Synthetic peptide; note = XENP021404 vlCDR2
YTSRRHS

SEQ ID NO: 26903 - protein, 9 aa, synthetic construct
  source 1..9: note = Description of Artificial Sequence: Synthetic peptide; note = XENP021404 vlCDR3
QQGNTLPYT

SEQ ID NO: 26904 - protein, 223 aa, synthetic construct; identical to SEQ ID NO: 25194
  source 1..223: note = Description of Artificial Sequence: Synthetic polypeptide; note = XENP021405 2A11_H1_L2.54_Fab Heavy Chain

SEQ ID NO: 26905 - protein, 118 aa, synthetic construct; identical to SEQ ID NO: 17236
  source 1..118: note = Description of Artificial Sequence: Synthetic polypeptide; note = VH of XENP021405

SEQ ID NO: 26906 - protein, 5 aa, synthetic construct
  source 1..5: note = Description of Artificial Sequence: Synthetic peptide; note = XENP021405 vhCDR1
DYYMH

SEQ ID NO: 26907 - protein, 17 aa, synthetic construct
  source 1..17: note = Description of Artificial Sequence: Synthetic peptide; note = XENP021405 vhCDR2
WIDPENGDTEYAPKFQG

SEQ ID NO: 26908 - protein, 9 aa, synthetic construct
  source 1..9: note = Description of Artificial Sequence: Synthetic peptide; note = XENP021405 vhCDR3
RGVRQALDY

SEQ ID NO: 26909 - protein, 214 aa, synthetic construct
  source 1..214: note = Description of Artificial Sequence: Synthetic polypeptide; note = XENP021405 2A11_H1_L2.54_Fab Light Chain
DIQMTQSPAFLSVTPGEKVTITCQASQDIGNYLNWFQQKPDQTVKLLIYYTSRLHSGVPSRFSGSGSGTDYTFTISSLEAEDAATYFCQQANTLPYTFGGGTKVEIKRTVAAPSVFIFPPSDEQLKSGTASVVCLLNNFYPREAKVQWKVDNALQSGNSQESVTEQDSKDSTYSLSSTLTLSKADYEKHKVYACEVTHQGLSSPVTKSFNRGEC

SEQ ID NO: 26910 - protein, 107 aa, synthetic construct
  source 1..107: note = Description of Artificial Sequence: Synthetic polypeptide; note = VL of XENP021405
DIQMTQSPAFLSVTPGEKVTITCQASQDIGNYLNWFQQKPDQTVKLLIYYTSRLHSGVPSRFSGSGSGTDYTFTISSLEAEDAATYFCQQANTLPYTFGGGTKVEIK

SEQ ID NO: 26911 - protein, 11 aa, synthetic construct
  source 1..11: note = Description of Artificial Sequence: Synthetic peptide; note = XENP021405 vlCDR1
QASQDIGNYLN

SEQ ID NO: 26912 - protein, 7 aa, synthetic construct
  source 1..7: note = Description of Artificial Sequence: Synthetic peptide; note = XENP021405 vlCDR2
YTSRLHS

SEQ ID NO: 26913 - protein, 9 aa, synthetic construct
  source 1..9: note = Description of Artificial Sequence: Synthetic peptide; note = XENP021405 vlCDR3
QQANTLPYT

SEQ ID NO: 26914 - protein, 223 aa, synthetic construct; identical to SEQ ID NO: 25194
  source 1..223: note = Description of Artificial Sequence: Synthetic polypeptide; note = XENP021406 2A11_H1_L2.55_Fab Heavy Chain

SEQ ID NO: 26915 - protein, 118 aa, synthetic construct; identical to SEQ ID NO: 17236
  source 1..118: note = Description of Artificial Sequence: Synthetic polypeptide; note = VH of XENP021406

SEQ ID NO: 26916 - protein, 5 aa, synthetic construct
  source 1..5: note = Description of Artificial Sequence: Synthetic peptide; note = XENP021406 vhCDR1
DYYMH

SEQ ID NO: 26917 - protein, 17 aa, synthetic construct
  source 1..17: note = Description of Artificial Sequence: Synthetic peptide; note = XENP021406 vhCDR2
WIDPENGDTEYAPKFQG

SEQ ID NO: 26918 - protein, 9 aa, synthetic construct
  source 1..9: note = Description of Artificial Sequence: Synthetic peptide; note = XENP021406 vhCDR3
RGVRQALDY

SEQ ID NO: 26919 - protein, 214 aa, synthetic construct
  source 1..214: note = Description of Artificial Sequence: Synthetic polypeptide; note = XENP021406 2A11_H1_L2.55_Fab Light Chain
DIQMTQSPAFLSVTPGEKVTITCQASQDIGNYLNWFQQKPDQTVKLLIYYTSRLHSGVPSRFSGSGSGTDYTFTISSLEAEDAATYFCQQSNTLPYTFGGGTKVEIKRTVAAPSVFIFPPSDEQLKSGTASVVCLLNNFYPREAKVQWKVDNALQSGNSQESVTEQDSKDSTYSLSSTLTLSKADYEKHKVYACEVTHQGLSSPVTKSFNRGEC

SEQ ID NO: 26920 - protein, 107 aa, synthetic construct
  source 1..107: note = Description of Artificial Sequence: Synthetic polypeptide; note = VL of XENP021406
DIQMTQSPAFLSVTPGEKVTITCQASQDIGNYLNWFQQKPDQTVKLLIYYTSRLHSGVPSRFSGSGSGTDYTFTISSLEAEDAATYFCQQSNTLPYTFGGGTKVEIK

SEQ ID NO: 26921 - protein, 11 aa, synthetic construct
  source 1..11: note = Description of Artificial Sequence: Synthetic peptide; note = XENP021406 vlCDR1
QASQDIGNYLN

SEQ ID NO: 26922 - protein, 7 aa, synthetic construct
  source 1..7: note = Description of Artificial Sequence: Synthetic peptide; note = XENP021406 vlCDR2
YTSRLHS

SEQ ID NO: 26923 - protein, 9 aa, synthetic construct
  source 1..9: note = Description of Artificial Sequence: Synthetic peptide; note = XENP021406 vlCDR3
QQSNTLPYT

SEQ ID NO: 26924 - protein, 223 aa, synthetic construct; identical to SEQ ID NO: 25194
  source 1..223: note = Description of Artificial Sequence: Synthetic polypeptide; note = XENP021407 2A11_H1_L2.56_Fab Heavy Chain

SEQ ID NO: 26925 - protein, 118 aa, synthetic construct; identical to SEQ ID NO: 17236
  source 1..118: note = Description of Artificial Sequence: Synthetic polypeptide; note = VH of XENP021407

SEQ ID NO: 26926 - protein, 5 aa, synthetic construct
  source 1..5: note = Description of Artificial Sequence: Synthetic peptide; note = XENP021407 vhCDR1
DYYMH

SEQ ID NO: 26927 - protein, 17 aa, synthetic construct
  source 1..17: note = Description of Artificial Sequence: Synthetic peptide; note = XENP021407 vhCDR2
WIDPENGDTEYAPKFQG

SEQ ID NO: 26928 - protein, 9 aa, synthetic construct
  source 1..9: note = Description of Artificial Sequence: Synthetic peptide; note = XENP021407 vhCDR3
RGVRQALDY

SEQ ID NO: 26929 - protein, 214 aa, synthetic construct
  source 1..214: note = Description of Artificial Sequence: Synthetic polypeptide; note = XENP021407 2A11_H1_L2.56_Fab Light Chain
DIQMTQSPAFLSVTPGEKVTITCQASQDIGNYLNWFQQKPDQTVKLLIYYTSRLHSGVPSRFSGSGSGTDYTFTISSLEAEDAATYFCQQTNTLPYTFGGGTKVEIKRTVAAPSVFIFPPSDEQLKSGTASVVCLLNNFYPREAKVQWKVDNALQSGNSQESVTEQDSKDSTYSLSSTLTLSKADYEKHKVYACEVTHQGLSSPVTKSFNRGEC

SEQ ID NO: 26930 - protein, 107 aa, synthetic construct
  source 1..107: note = Description of Artificial Sequence: Synthetic polypeptide; note = VL of XENP021407
DIQMTQSPAFLSVTPGEKVTITCQASQDIGNYLNWFQQKPDQTVKLLIYYTSRLHSGVPSRFSGSGSGTDYTFTISSLEAEDAATYFCQQTNTLPYTFGGGTKVEIK

SEQ ID NO: 26931 - protein, 11 aa, synthetic construct
  source 1..11: note = Description of Artificial Sequence: Synthetic peptide; note = XENP021407 vlCDR1
QASQDIGNYLN

SEQ ID NO: 26932 - protein, 7 aa, synthetic construct
  source 1..7: note = Description of Artificial Sequence: Synthetic peptide; note = XENP021407 vlCDR2
YTSRLHS

SEQ ID NO: 26933 - protein, 9 aa, synthetic construct
  source 1..9: note = Description of Artificial Sequence: Synthetic peptide; note = XENP021407 vlCDR3
QQTNTLPYT

SEQ ID NO: 26934 - protein, 223 aa, synthetic construct; identical to SEQ ID NO: 25194
  source 1..223: note = Description of Artificial Sequence: Synthetic polypeptide; note = XENP021408 2A11_H1_L2.57_Fab Heavy Chain

SEQ ID NO: 26935 - protein, 118 aa, synthetic construct; identical to SEQ ID NO: 17236
  source 1..118: note = Description of Artificial Sequence: Synthetic polypeptide; note = VH of XENP021408

SEQ ID NO: 26936 - protein, 5 aa, synthetic construct
  source 1..5: note = Description of Artificial Sequence: Synthetic peptide; note = XENP021408 vhCDR1
DYYMH

SEQ ID NO: 26937 - protein, 17 aa, synthetic construct
  source 1..17: note = Description of Artificial Sequence: Synthetic peptide; note = XENP021408 vhCDR2
WIDPENGDTEYAPKFQG

SEQ ID NO: 26938 - protein, 9 aa, synthetic construct
  source 1..9: note = Description of Artificial Sequence: Synthetic peptide; note = XENP021408 vhCDR3
RGVRQALDY

SEQ ID NO: 26939 - protein, 214 aa, synthetic construct
  source 1..214: note = Description of Artificial Sequence: Synthetic polypeptide; note = XENP021408 2A11_H1_L2.57_Fab Light Chain
DIQMTQSPAFLSVTPGEKVTITCQASQDIGNYLNWFQQKPDQTVKLLIYYTSRLHSGVPSRFSGSGSGTDYTFTISSLEAEDAATYFCQQGQTLPYTFGGGTKVEIKRTVAAPSVFIFPPSDEQLKSGTASVVCLLNNFYPREAKVQWKVDNALQSGNSQESVTEQDSKDSTYSLSSTLTLSKADYEKHKVYACEVTHQGLSSPVTKSFNRGEC

SEQ ID NO: 26940 - protein, 107 aa, synthetic construct
  source 1..107: note = Description of Artificial Sequence: Synthetic polypeptide; note = VL of XENP021408
DIQMTQSPAFLSVTPGEKVTITCQASQDIGNYLNWFQQKPDQTVKLLIYYTSRLHSGVPSRFSGSGSGTDYTFTISSLEAEDAATYFCQQGQTLPYTFGGGTKVEIK

SEQ ID NO: 26941 - protein, 11 aa, synthetic construct
  source 1..11: note = Description of Artificial Sequence: Synthetic peptide; note = XENP021408 vlCDR1
QASQDIGNYLN

SEQ ID NO: 26942 - protein, 7 aa, synthetic construct
  source 1..7: note = Description of Artificial Sequence: Synthetic peptide; note = XENP021408 vlCDR2
YTSRLHS

SEQ ID NO: 26943 - protein, 9 aa, synthetic construct
  source 1..9: note = Description of Artificial Sequence: Synthetic peptide; note = XENP021408 vlCDR3
QQGQTLPYT

SEQ ID NO: 26944 - protein, 223 aa, synthetic construct; identical to SEQ ID NO: 25194
  source 1..223: note = Description of Artificial Sequence: Synthetic polypeptide; note = XENP021409 2A11_H1_L2.58_Fab Heavy Chain

SEQ ID NO: 26945 - protein, 118 aa, synthetic construct; identical to SEQ ID NO: 17236
  source 1..118: note = Description of Artificial Sequence: Synthetic polypeptide; note = VH of XENP021409

SEQ ID NO: 26946 - protein, 5 aa, synthetic construct
  source 1..5: note = Description of Artificial Sequence: Synthetic peptide; note = XENP021409 vhCDR1
DYYMH

SEQ ID NO: 26947 - protein, 17 aa, synthetic construct
  source 1..17: note = Description of Artificial Sequence: Synthetic peptide; note = XENP021409 vhCDR2
WIDPENGDTEYAPKFQG

SEQ ID NO: 26948 - protein, 9 aa, synthetic construct
  source 1..9: note = Description of Artificial Sequence: Synthetic peptide; note = XENP021409 vhCDR3
RGVRQALDY

SEQ ID NO: 26949 - protein, 214 aa, synthetic construct
  source 1..214: note = Description of Artificial Sequence: Synthetic polypeptide; note = XENP021409 2A11_H1_L2.58_Fab Light Chain
DIQMTQSPAFLSVTPGEKVTITCQASQDIGNYLNWFQQKPDQTVKLLIYYTSRLHSGVPSRFSGSGSGTDYTFTISSLEAEDAATYFCQQGHTLPYTFGGGTKVEIKRTVAAPSVFIFPPSDEQLKSGTASVVCLLNNFYPREAKVQWKVDNALQSGNSQESVTEQDSKDSTYSLSSTLTLSKADYEKHKVYACEVTHQGLSSPVTKSFNRGEC

SEQ ID NO: 26950 - protein, 107 aa, synthetic construct
  source 1..107: note = Description of Artificial Sequence: Synthetic polypeptide; note = VL of XENP021409
DIQMTQSPAFLSVTPGEKVTITCQASQDIGNYLNWFQQKPDQTVKLLIYYTSRLHSGVPSRFSGSGSGTDYTFTISSLEAEDAATYFCQQGHTLPYTFGGGTKVEIK

SEQ ID NO: 26951 - protein, 11 aa, synthetic construct
  source 1..11: note = Description of Artificial Sequence: Synthetic peptide; note = XENP021409 vlCDR1
QASQDIGNYLN

SEQ ID NO: 26952 - protein, 7 aa, synthetic construct
  source 1..7: note = Description of Artificial Sequence: Synthetic peptide; note = XENP021409 vlCDR2
YTSRLHS

SEQ ID NO: 26953 - protein, 9 aa, synthetic construct
  source 1..9: note = Description of Artificial Sequence: Synthetic peptide; note = XENP021409 vlCDR3
QQGHTLPYT

SEQ ID NO: 26954 - protein, 223 aa, synthetic construct; identical to SEQ ID NO: 25194
  source 1..223: note = Description of Artificial Sequence: Synthetic polypeptide; note = XENP021410 2A11_H1_L2.59_Fab Heavy Chain

SEQ ID NO: 26955 - protein, 118 aa, synthetic construct; identical to SEQ ID NO: 17236
  source 1..118: note = Description of Artificial Sequence: Synthetic polypeptide; note = VH of XENP021410

SEQ ID NO: 26956 - protein, 5 aa, synthetic construct
  source 1..5: note = Description of Artificial Sequence: Synthetic peptide; note = XENP021410 vhCDR1
DYYMH

SEQ ID NO: 26957 - protein, 17 aa, synthetic construct
  source 1..17: note = Description of Artificial Sequence: Synthetic peptide; note = XENP021410 vhCDR2
WIDPENGDTEYAPKFQG

SEQ ID NO: 26958 - protein, 9 aa, synthetic construct
  source 1..9: note = Description of Artificial Sequence: Synthetic peptide; note = XENP021410 vhCDR3
RGVRQALDY

SEQ ID NO: 26959 - protein, 214 aa, synthetic construct
  source 1..214: note = Description of Artificial Sequence: Synthetic polypeptide; note = XENP021410 2A11_H1_L2.59_Fab Light Chain
DIQMTQSPAFLSVTPGEKVTITCQASQDIGNYLNWFQQKPDQTVKLLIYYTSRLHSGVPSRFSGSGSGTDYTFTISSLEAEDAATYFCQQGETLPYTFGGGTKVEIKRTVAAPSVFIFPPSDEQLKSGTASVVCLLNNFYPREAKVQWKVDNALQSGNSQESVTEQDSKDSTYSLSSTLTLSKADYEKHKVYACEVTHQGLSSPVTKSFNRGEC

SEQ ID NO: 26960 - protein, 107 aa, synthetic construct
  source 1..107: note = Description of Artificial Sequence: Synthetic polypeptide; note = VL of XENP021410
DIQMTQSPAFLSVTPGEKVTITCQASQDIGNYLNWFQQKPDQTVKLLIYYTSRLHSGVPSRFSGSGSGTDYTFTISSLEAEDAATYFCQQGETLPYTFGGGTKVEIK

SEQ ID NO: 26961 - protein, 11 aa, synthetic construct
  source 1..11: note = Description of Artificial Sequence: Synthetic peptide; note = XENP021410 vlCDR1
QASQDIGNYLN

SEQ ID NO: 26962 - protein, 7 aa, synthetic construct
  source 1..7: note = Description of Artificial Sequence: Synthetic peptide; note = XENP021410 vlCDR2
YTSRLHS

SEQ ID NO: 26963 - protein, 9 aa, synthetic construct
  source 1..9: note = Description of Artificial Sequence: Synthetic peptide; note = XENP021410 vlCDR3
QQGETLPYT

SEQ ID NO: 26964 - protein, 223 aa, synthetic construct; identical to SEQ ID NO: 25194
  source 1..223: note = Description of Artificial Sequence: Synthetic polypeptide; note = XENP021411 2A11_H1_L2.60_Fab Heavy Chain

SEQ ID NO: 26965 - protein, 118 aa, synthetic construct; identical to SEQ ID NO: 17236
  source 1..118: note = Description of Artificial Sequence: Synthetic polypeptide; note = VH of XENP021411

SEQ ID NO: 26966 - protein, 5 aa, synthetic construct
  source 1..5: note = Description of Artificial Sequence: Synthetic peptide; note = XENP021411 vhCDR1
DYYMH

SEQ ID NO: 26967 - protein, 17 aa, synthetic construct
  source 1..17: note = Description of Artificial Sequence: Synthetic peptide; note = XENP021411 vhCDR2
WIDPENGDTEYAPKFQG

SEQ ID NO: 26968 - protein, 9 aa, synthetic construct
  source 1..9: note = Description of Artificial Sequence: Synthetic peptide; note = XENP021411 vhCDR3
RGVRQALDY

SEQ ID NO: 26969 - protein, 214 aa, synthetic construct
  source 1..214: note = Description of Artificial Sequence: Synthetic polypeptide; note = XENP021411 2A11_H1_L2.60_Fab Light Chain
DIQMTQSPAFLSVTPGEKVTITCQASQDIGNYLNWFQQKPDQTVKLLIYYTSRLHSGVPSRFSGSGSGTDYTFTISSLEAEDAATYFCQQGSTLPYTFGGGTKVEIKRTVAAPSVFIFPPSDEQLKSGTASVVCLLNNFYPREAKVQWKVDNALQSGNSQESVTEQDSKDSTYSLSSTLTLSKADYEKHKVYACEVTHQGLSSPVTKSFNRGEC

SEQ ID NO: 26970 - protein, 107 aa, synthetic construct
  source 1..107: note = Description of Artificial Sequence: Synthetic polypeptide; note = VL of XENP021411
DIQMTQSPAFLSVTPGEKVTITCQASQDIGNYLNWFQQKPDQTVKLLIYYTSRLHSGVPSRFSGSGSGTDYTFTISSLEAEDAATYFCQQGSTLPYTFGGGTKVEIK

SEQ ID NO: 26971 - protein, 11 aa, synthetic construct
  source 1..11: note = Description of Artificial Sequence: Synthetic peptide; note = XENP021411 vlCDR1
QASQDIGNYLN

SEQ ID NO: 26972 - protein, 7 aa, synthetic construct
  source 1..7: note = Description of Artificial Sequence: Synthetic peptide; note = XENP021411 vlCDR2
YTSRLHS

SEQ ID NO: 26973 - protein, 9 aa, synthetic construct
  source 1..9: note = Description of Artificial Sequence: Synthetic peptide; note = XENP021411 vlCDR3
QQGSTLPYT

SEQ ID NO: 26974 - protein, 223 aa, synthetic construct; identical to SEQ ID NO: 25194
  source 1..223: note = Description of Artificial Sequence: Synthetic polypeptide; note = XENP021412 2A11_H1_L2.61_Fab Heavy Chain

SEQ ID NO: 26975 - protein, 118 aa, synthetic construct; identical to SEQ ID NO: 17236
  source 1..118: note = Description of Artificial Sequence: Synthetic polypeptide; note = VH of XENP021412

SEQ ID NO: 26976 - protein, 5 aa, synthetic construct
  source 1..5: note = Description of Artificial Sequence: Synthetic peptide; note = XENP021412 vhCDR1
DYYMH

SEQ ID NO: 26977 - protein, 17 aa, synthetic construct
  source 1..17: note = Description of Artificial Sequence: Synthetic peptide; note = XENP021412 vhCDR2
WIDPENGDTEYAPKFQG

SEQ ID NO: 26978 - protein, 9 aa, synthetic construct
  source 1..9: note = Description of Artificial Sequence: Synthetic peptide; note = XENP021412 vhCDR3
RGVRQALDY

SEQ ID NO: 26979 - protein, 214 aa, synthetic construct
  source 1..214: note = Description of Artificial Sequence: Synthetic polypeptide; note = XENP021412 2A11_H1_L2.61_Fab Light Chain
DIQMTQSPAFLSVTPGEKVTITCQASQDIGNYLNWFQQKPDQTVKLLIYYTSRLHSGVPSRFSGSGSGTDYTFTISSLEAEDAATYFCQQGRTLPYTFGGGTKVEIKRTVAAPSVFIFPPSDEQLKSGTASVVCLLNNFYPREAKVQWKVDNALQSGNSQESVTEQDSKDSTYSLSSTLTLSKADYEKHKVYACEVTHQGLSSPVTKSFNRGEC

SEQ ID NO: 26980 - protein, 107 aa, synthetic construct
  source 1..107: note = Description of Artificial Sequence: Synthetic polypeptide; note = VL of XENP021412
DIQMTQSPAFLSVTPGEKVTITCQASQDIGNYLNWFQQKPDQTVKLLIYYTSRLHSGVPSRFSGSGSGTDYTFTISSLEAEDAATYFCQQGRTLPYTFGGGTKVEIK

SEQ ID NO: 26981 - protein, 11 aa, synthetic construct
  source 1..11: note = Description of Artificial Sequence: Synthetic peptide; note = XENP021412 vlCDR1
QASQDIGNYLN

SEQ ID NO: 26982 - protein, 7 aa, synthetic construct
  source 1..7: note = Description of Artificial Sequence: Synthetic peptide; note = XENP021412 vlCDR2
YTSRLHS

SEQ ID NO: 26983 - protein, 9 aa, synthetic construct
  source 1..9: note = Description of Artificial Sequence: Synthetic peptide; note = XENP021412 vlCDR3
QQGRTLPYT

SEQ ID NO: 26984 - protein, 223 aa, synthetic construct; identical to SEQ ID NO: 25194
  source 1..223: note = Description of Artificial Sequence: Synthetic polypeptide; note = XENP021413 2A11_H1_L2.62_Fab Heavy Chain

SEQ ID NO: 26985 - protein, 118 aa, synthetic construct; identical to SEQ ID NO: 17236
  source 1..118: note = Description of Artificial Sequence: Synthetic polypeptide; note = VH of XENP021413

SEQ ID NO: 26986 - protein, 5 aa, synthetic construct
  source 1..5: note = Description of Artificial Sequence: Synthetic peptide; note = XENP021413 vhCDR1
DYYMH

SEQ ID NO: 26987 - protein, 17 aa, synthetic construct
  source 1..17: note = Description of Artificial Sequence: Synthetic peptide; note = XENP021413 vhCDR2
WIDPENGDTEYAPKFQG

SEQ ID NO: 26988 - protein, 9 aa, synthetic construct
  source 1..9: note = Description of Artificial Sequence: Synthetic peptide; note = XENP021413 vhCDR3
RGVRQALDY

SEQ ID NO: 26989 - protein, 214 aa, synthetic construct
  source 1..214: note = Description of Artificial Sequence: Synthetic polypeptide; note = XENP021413 2A11_H1_L2.62_Fab Light Chain
DIQMTQSPAFLSVTPGEKVTITCQASQDIGNYLNWFQQKPDQTVKLLIYYTSRLHSGVPSRFSGSGSGTDYTFTISSLEAEDAATYFCQQGLTLPYTFGGGTKVEIKRTVAAPSVFIFPPSDEQLKSGTASVVCLLNNFYPREAKVQWKVDNALQSGNSQESVTEQDSKDSTYSLSSTLTLSKADYEKHKVYACEVTHQGLSSPVTKSFNRGEC

SEQ ID NO: 26990 - protein, 107 aa, synthetic construct
  source 1..107: note = Description of Artificial Sequence: Synthetic polypeptide; note = VL of XENP021413
DIQMTQSPAFLSVTPGEKVTITCQASQDIGNYLNWFQQKPDQTVKLLIYYTSRLHSGVPSRFSGSGSGTDYTFTISSLEAEDAATYFCQQGLTLPYTFGGGTKVEIK

SEQ ID NO: 26991 - protein, 11 aa, synthetic construct
  source 1..11: note = Description of Artificial Sequence: Synthetic peptide; note = XENP021413 vlCDR1
QASQDIGNYLN

SEQ ID NO: 26992 - protein, 7 aa, synthetic construct
  source 1..7: note = Description of Artificial Sequence: Synthetic peptide; note = XENP021413 vlCDR2
YTSRLHS

SEQ ID NO: 26993 - protein, 9 aa, synthetic construct
  source 1..9: note = Description of Artificial Sequence: Synthetic peptide; note = XENP021413 vlCDR3
QQGLTLPYT

SEQ ID NO: 26994 - protein, 223 aa, synthetic construct; identical to SEQ ID NO: 25194
  source 1..223: note = Description of Artificial Sequence: Synthetic polypeptide; note = XENP021414 2A11_H1_L2.63_Fab Heavy Chain

SEQ ID NO: 26995 - protein, 118 aa, synthetic construct; identical to SEQ ID NO: 17236
  source 1..118: note = Description of Artificial Sequence: Synthetic polypeptide; note = VH of XENP021414

SEQ ID NO: 26996 - protein, 5 aa, synthetic construct
  source 1..5: note = Description of Artificial Sequence: Synthetic peptide; note = XENP021414 vhCDR1
DYYMH

SEQ ID NO: 26997 - protein, 17 aa, synthetic construct
  source 1..17: note = Description of Artificial Sequence: Synthetic peptide; note = XENP021414 vhCDR2
WIDPENGDTEYAPKFQG

SEQ ID NO: 26998 - protein, 9 aa, synthetic construct
  source 1..9: note = Description of Artificial Sequence: Synthetic peptide; note = XENP021414 vhCDR3
RGVRQALDY

SEQ ID NO: 26999 - protein, 214 aa, synthetic construct
  source 1..214: note = Description of Artificial Sequence: Synthetic polypeptide; note = XENP021414 2A11_H1_L2.63_Fab Light Chain
DIQMTQSPAFLSVTPGEKVTITCQASQDIGNYLNWFQQKPDQTVKLLIYYTSRLHSGVPSRFSGSGSGTDYTFTISSLEAEDAATYFCQQGTTLPYTFGGGTKVEIKRTVAAPSVFIFPPSDEQLKSGTASVVCLLNNFYPREAKVQWKVDNALQSGNSQESVTEQDSKDSTYSLSSTLTLSKADYEKHKVYACEVTHQGLSSPVTKSFNRGEC

SEQ ID NO: 27000 - protein, 107 aa, synthetic construct
  source 1..107: note = Description of Artificial Sequence: Synthetic polypeptide; note = VL of XENP021414
DIQMTQSPAFLSVTPGEKVTITCQASQDIGNYLNWFQQKPDQTVKLLIYYTSRLHSGVPSRFSGSGSGTDYTFTISSLEAEDAATYFCQQGTTLPYTFGGGTKVEIK

SEQ ID NO: 27001 - protein, 11 aa, synthetic construct
  source 1..11: note = Description of Artificial Sequence: Synthetic peptide; note = XENP021414 vlCDR1
QASQDIGNYLN

SEQ ID NO: 27002 - protein, 7 aa, synthetic construct
  source 1..7: note = Description of Artificial Sequence: Synthetic peptide; note = XENP021414 vlCDR2
YTSRLHS

SEQ ID NO: 27003 - protein, 9 aa, synthetic construct
  source 1..9: note = Description of Artificial Sequence: Synthetic peptide; note = XENP021414 vlCDR3
QQGTTLPYT

SEQ ID NO: 27004 - protein, 223 aa, synthetic construct; identical to SEQ ID NO: 25194
  source 1..223: note = Description of Artificial Sequence: Synthetic polypeptide; note = XENP021415 2A11_H1_L2.64_Fab Heavy Chain

SEQ ID NO: 27005 - protein, 118 aa, synthetic construct; identical to SEQ ID NO: 17236
  source 1..118: note = Description of Artificial Sequence: Synthetic polypeptide; note = VH of XENP021415

SEQ ID NO: 27006 - protein, 5 aa, synthetic construct
  source 1..5: note = Description of Artificial Sequence: Synthetic peptide; note = XENP021415 vhCDR1
DYYMH

SEQ ID NO: 27007 - protein, 17 aa, synthetic construct
  source 1..17: note = Description of Artificial Sequence: Synthetic peptide; note = XENP021415 vhCDR2
WIDPENGDTEYAPKFQG

SEQ ID NO: 27008 - protein, 9 aa, synthetic construct
  source 1..9: note = Description of Artificial Sequence: Synthetic peptide; note = XENP021415 vhCDR3
RGVRQALDY

SEQ ID NO: 27009 - protein, 214 aa, synthetic construct
  source 1..214: note = Description of Artificial Sequence: Synthetic polypeptide; note = XENP021415 2A11_H1_L2.64_Fab Light Chain
DIQMTQSPAFLSVTPGEKVTITCQASQDIGNYLNWFQQKPDQTVKLLIYYTSRLHSGVPSRFSGSGSGTDYTFTISSLEAEDAATYFCQQGGTLPYTFGGGTKVEIKRTVAAPSVFIFPPSDEQLKSGTASVVCLLNNFYPREAKVQWKVDNALQSGNSQESVTEQDSKDSTYSLSSTLTLSKADYEKHKVYACEVTHQGLSSPVTKSFNRGEC

SEQ ID NO: 27010 - protein, 107 aa, synthetic construct
  source 1..107: note = Description of Artificial Sequence: Synthetic polypeptide; note = VL of XENP021415
DIQMTQSPAFLSVTPGEKVTITCQASQDIGNYLNWFQQKPDQTVKLLIYYTSRLHSGVPSRFSGSGSGTDYTFTISSLEAEDAATYFCQQGGTLPYTFGGGTKVEIK

SEQ ID NO: 27011 - protein, 11 aa, synthetic construct
  source 1..11: note = Description of Artificial Sequence: Synthetic peptide; note = XENP021415 vlCDR1
QASQDIGNYLN

SEQ ID NO: 27012 - protein, 7 aa, synthetic construct
  source 1..7: note = Description of Artificial Sequence: Synthetic peptide; note = XENP021415 vlCDR2
YTSRLHS

SEQ ID NO: 27013 - protein, 9 aa, synthetic construct
  source 1..9: note = Description of Artificial Sequence: Synthetic peptide; note = XENP021415 vlCDR3
QQGGTLPYT

SEQ ID NO: 27014 - protein, 223 aa, synthetic construct; identical to SEQ ID NO: 25194
  source 1..223: note = Description of Artificial Sequence: Synthetic polypeptide; note = XENP021416 2A11_H1_L2.65_Fab Heavy Chain

SEQ ID NO: 27015 - protein, 118 aa, synthetic construct; identical to SEQ ID NO: 17236
  source 1..118: note = Description of Artificial Sequence: Synthetic polypeptide; note = VH of XENP021416

SEQ ID NO: 27016 - protein, 5 aa, synthetic construct
  source 1..5: note = Description of Artificial Sequence: Synthetic peptide; note = XENP021416 vhCDR1
DYYMH

SEQ ID NO: 27017 - protein, 17 aa, synthetic construct
  source 1..17: note = Description of Artificial Sequence: Synthetic peptide; note = XENP021416 vhCDR2
WIDPENGDTEYAPKFQG

SEQ ID NO: 27018 - protein, 9 aa, synthetic construct
  source 1..9: note = Description of Artificial Sequence: Synthetic peptide; note = XENP021416 vhCDR3
RGVRQALDY

SEQ ID NO: 27019 - protein, 214 aa, synthetic construct
  source 1..214: note = Description of Artificial Sequence: Synthetic polypeptide; note = XENP021416 2A11_H1_L2.65_Fab Light Chain
DIQMTQSPAFLSVTPGEKVTITCQASQDIGNYLNWFQQKPDQTVKLLIYYTSRLHSGVPSRFSGSGSGTDYTFTISSLEAEDAATYFCQQGYTLPYTFGGGTKVEIKRTVAAPSVFIFPPSDEQLKSGTASVVCLLNNFYPREAKVQWKVDNALQSGNSQESVTEQDSKDSTYSLSSTLTLSKADYEKHKVYACEVTHQGLSSPVTKSFNRGEC

SEQ ID NO: 27020 - protein, 107 aa, synthetic construct
  source 1..107: note = Description of Artificial Sequence: Synthetic polypeptide; note = VL of XENP021416
DIQMTQSPAFLSVTPGEKVTITCQASQDIGNYLNWFQQKPDQTVKLLIYYTSRLHSGVPSRFSGSGSGTDYTFTISSLEAEDAATYFCQQGYTLPYTFGGGTKVEIK

SEQ ID NO: 27021 - protein, 11 aa, synthetic construct
  source 1..11: note = Description of Artificial Sequence: Synthetic peptide; note = XENP021416 vlCDR1
QASQDIGNYLN

SEQ ID NO: 27022 - protein, 7 aa, synthetic construct
  source 1..7: note = Description of Artificial Sequence: Synthetic peptide; note = XENP021416 vlCDR2
YTSRLHS

SEQ ID NO: 27023 - protein, 9 aa, synthetic construct
  source 1..9: note = Description of Artificial Sequence: Synthetic peptide; note = XENP021416 vlCDR3
QQGYTLPYT

SEQ ID NO: 27024 - protein, 223 aa, synthetic construct; identical to SEQ ID NO: 25194
  source 1..223: note = Description of Artificial Sequence: Synthetic polypeptide; note = XENP021417 2A11_H1_L2.66_Fab Heavy Chain

SEQ ID NO: 27025 - protein, 118 aa, synthetic construct; identical to SEQ ID NO: 17236
  source 1..118: note = Description of Artificial Sequence: Synthetic polypeptide; note = VH of XENP021417

SEQ ID NO: 27026 - protein, 5 aa, synthetic construct
  source 1..5: note = Description of Artificial Sequence: Synthetic peptide; note = XENP021417 vhCDR1
DYYMH

SEQ ID NO: 27027 - protein, 17 aa, synthetic construct
  source 1..17: note = Description of Artificial Sequence: Synthetic peptide; note = XENP021417 vhCDR2
WIDPENGDTEYAPKFQG

SEQ ID NO: 27028 - protein, 9 aa, synthetic construct
  source 1..9: note = Description of Artificial Sequence: Synthetic peptide; note = XENP021417 vhCDR3
RGVRQALDY

SEQ ID NO: 27029 - protein, 214 aa, synthetic construct
  source 1..214: note = Description of Artificial Sequence: Synthetic polypeptide; note = XENP021417 2A11_H1_L2.66_Fab Light Chain
DIQMTQSPAFLSVTPGEKVTITCQASQDIGNYLNWFQQKPDQTVKLLIYYTSRLHSGVPSRFSGSGSGTDYTFTISSLEAEDAATYFCQQGNVLPYTFGGGTKVEIKRTVAAPSVFIFPPSDEQLKSGTASVVCLLNNFYPREAKVQWKVDNALQSGNSQESVTEQDSKDSTYSLSSTLTLSKADYEKHKVYACEVTHQGLSSPVTKSFNRGEC

SEQ ID NO: 27030 - protein, 107 aa, synthetic construct
  source 1..107: note = Description of Artificial Sequence: Synthetic polypeptide; note = VL of XENP021417
DIQMTQSPAFLSVTPGEKVTITCQASQDIGNYLNWFQQKPDQTVKLLIYYTSRLHSGVPSRFSGSGSGTDYTFTISSLEAEDAATYFCQQGNVLPYTFGGGTKVEIK

SEQ ID NO: 27031 - protein, 11 aa, synthetic construct
  source 1..11: note = Description of Artificial Sequence: Synthetic peptide; note = XENP021417 vlCDR1
QASQDIGNYLN

SEQ ID NO: 27032 - protein, 7 aa, synthetic construct
  source 1..7: note = Description of Artificial Sequence: Synthetic peptide; note = XENP021417 vlCDR2
YTSRLHS

SEQ ID NO: 27033 - protein, 9 aa, synthetic construct
  source 1..9: note = Description of Artificial Sequence: Synthetic peptide; note = XENP021417 vlCDR3
QQGNVLPYT

SEQ ID NO: 27034 - protein, 223 aa, synthetic construct; identical to SEQ ID NO: 25194
  source 1..223: note = Description of Artificial Sequence: Synthetic polypeptide; note = XENP021418 2A11_H1_L2.67_Fab Heavy Chain

SEQ ID NO: 27035 - protein, 118 aa, synthetic construct; identical to SEQ ID NO: 17236
  source 1..118: note = Description of Artificial Sequence: Synthetic polypeptide; note = VH of XENP021418

SEQ ID NO: 27036 - protein, 5 aa, synthetic construct
  source 1..5: note = Description of Artificial Sequence: Synthetic peptide; note = XENP021418 vhCDR1
DYYMH

SEQ ID NO: 27037 - protein, 17 aa, synthetic construct
  source 1..17: note = Description of Artificial Sequence: Synthetic peptide; note = XENP021418 vhCDR2
WIDPENGDTEYAPKFQG

SEQ ID NO: 27038 - protein, 9 aa, synthetic construct
  source 1..9: note = Description of Artificial Sequence: Synthetic peptide; note = XENP021418 vhCDR3
RGVRQALDY

SEQ ID NO: 27039 - protein, 214 aa, synthetic construct
  source 1..214: note = Description of Artificial Sequence: Synthetic polypeptide; note = XENP021418 2A11_H1_L2.67_Fab Light Chain
DIQMTQSPAFLSVTPGEKVTITCQASQDIGNYLNWFQQKPDQTVKLLIYYTSRLHSGVPSRFSGSGSGTDYTFTISSLEAEDAATYFCQQGNSLPYTFGGGTKVEIKRTVAAPSVFIFPPSDEQLKSGTASVVCLLNNFYPREAKVQWKVDNALQSGNSQESVTEQDSKDSTYSLSSTLTLSKADYEKHKVYACEVTHQGLSSPVTKSFNRGEC

SEQ ID NO: 27040 - protein, 107 aa, synthetic construct
  source 1..107: note = Description of Artificial Sequence: Synthetic polypeptide; note = VL of XENP021418
DIQMTQSPAFLSVTPGEKVTITCQASQDIGNYLNWFQQKPDQTVKLLIYYTSRLHSGVPSRFSGSGSGTDYTFTISSLEAEDAATYFCQQGNSLPYTFGGGTKVEIK

SEQ ID NO: 27041 - protein, 11 aa, synthetic construct
  source 1..11: note = Description of Artificial Sequence: Synthetic peptide; note = XENP021418 vlCDR1
QASQDIGNYLN

SEQ ID NO: 27042 - protein, 7 aa, synthetic construct
  source 1..7: note = Description of Artificial Sequence: Synthetic peptide; note = XENP021418 vlCDR2
YTSRLHS

SEQ ID NO: 27043 - protein, 9 aa, synthetic construct
  source 1..9: note = Description of Artificial Sequence: Synthetic peptide; note = XENP021418 vlCDR3
QQGNSLPYT

SEQ ID NO: 27044 - protein, 223 aa, synthetic construct; identical to SEQ ID NO: 25194
  source 1..223: note = Description of Artificial Sequence: Synthetic polypeptide; note = XENP021419 2A11_H1_L2.68_Fab Heavy Chain

SEQ ID NO: 27045 - protein, 118 aa, synthetic construct; identical to SEQ ID NO: 17236
  source 1..118: note = Description of Artificial Sequence: Synthetic polypeptide; note = VH of XENP021419

SEQ ID NO: 27046 - protein, 5 aa, synthetic construct
  source 1..5: note = Description of Artificial Sequence: Synthetic peptide; note = XENP021419 vhCDR1
DYYMH

SEQ ID NO: 27047 - protein, 17 aa, synthetic construct
  source 1..17: note = Description of Artificial Sequence: Synthetic peptide; note = XENP021419 vhCDR2
WIDPENGDTEYAPKFQG

SEQ ID NO: 27048 - protein, 9 aa, synthetic construct
  source 1..9: note = Description of Artificial Sequence: Synthetic peptide; note = XENP021419 vhCDR3
RGVRQALDY

SEQ ID NO: 27049 - protein, 214 aa, synthetic construct
  source 1..214: note = Description of Artificial Sequence: Synthetic polypeptide; note = XENP021419 2A11_H1_L2.68_Fab Light Chain
DIQMTQSPAFLSVTPGEKVTITCQASQDIGNYLNWFQQKPDQTVKLLIYYTSRLHSGVPSRFSGSGSGTDYTFTISSLEAEDAATYFCQQGNALPYTFGGGTKVEIKRTVAAPSVFIFPPSDEQLKSGTASVVCLLNNFYPREAKVQWKVDNALQSGNSQESVTEQDSKDSTYSLSSTLTLSKADYEKHKVYACEVTHQGLSSPVTKSFNRGEC

SEQ ID NO: 27050 - protein, 107 aa, synthetic construct
  source 1..107: note = Description of Artificial Sequence: Synthetic polypeptide; note = VL of XENP021419
DIQMTQSPAFLSVTPGEKVTITCQASQDIGNYLNWFQQKPDQTVKLLIYYTSRLHSGVPSRFSGSGSGTDYTFTISSLEAEDAATYFCQQGNALPYTFGGGTKVEIK

SEQ ID NO: 27051 - protein, 11 aa, synthetic construct
  source 1..11: note = Description of Artificial Sequence: Synthetic peptide; note = XENP021419 vlCDR1
QASQDIGNYLN

SEQ ID NO: 27052 - protein, 7 aa, synthetic construct
  source 1..7: note = Description of Artificial Sequence: Synthetic peptide; note = XENP021419 vlCDR2
YTSRLHS

SEQ ID NO: 27053 - protein, 9 aa, synthetic construct
  source 1..9: note = Description of Artificial Sequence: Synthetic peptide; note = XENP021419 vlCDR3
QQGNALPYT

SEQ ID NO: 27054 - protein, 223 aa, synthetic construct; identical to SEQ ID NO: 25194
  source 1..223: note = Description of Artificial Sequence: Synthetic polypeptide; note = XENP021420 2A11_H1_L2.69_Fab Heavy Chain

SEQ ID NO: 27055 - protein, 118 aa, synthetic construct; identical to SEQ ID NO: 17236
  source 1..118: note = Description of Artificial Sequence: Synthetic polypeptide; note = VH of XENP021420

SEQ ID NO: 27056 - protein, 5 aa, synthetic construct
  source 1..5: note = Description of Artificial Sequence: Synthetic peptide; note = XENP021420 vhCDR1
DYYMH

SEQ ID NO: 27057 - protein, 17 aa, synthetic construct
  source 1..17: note = Description of Artificial Sequence: Synthetic peptide; note = XENP021420 vhCDR2
WIDPENGDTEYAPKFQG

SEQ ID NO: 27058 - protein, 9 aa, synthetic construct
  source 1..9: note = Description of Artificial Sequence: Synthetic peptide; note = XENP021420 vhCDR3
RGVRQALDY

SEQ ID NO: 27059 - protein, 214 aa, synthetic construct
  source 1..214: note = Description of Artificial Sequence: Synthetic polypeptide; note = XENP021420 2A11_H1_L2.69_Fab Light Chain
DIQMTQSPAFLSVTPGEKVTITCQASQDIGNYLNWFQQKPDQTVKLLIYYTSRLHSGVPSRFSGSGSGTDYTFTISSLEAEDAATYFCQQGNILPYTFGGGTKVEIKRTVAAPSVFIFPPSDEQLKSGTASVVCLLNNFYPREAKVQWKVDNALQSGNSQESVTEQDSKDSTYSLSSTLTLSKADYEKHKVYACEVTHQGLSSPVTKSFNRGEC

SEQ ID NO: 27060 - protein, 107 aa, synthetic construct
  source 1..107: note = Description of Artificial Sequence: Synthetic polypeptide; note = VL of XENP021420
DIQMTQSPAFLSVTPGEKVTITCQASQDIGNYLNWFQQKPDQTVKLLIYYTSRLHSGVPSRFSGSGSGTDYTFTISSLEAEDAATYFCQQGNILPYTFGGGTKVEIK

SEQ ID NO: 27061 - protein, 11 aa, synthetic construct
  source 1..11: note = Description of Artificial Sequence: Synthetic peptide; note = XENP021420 vlCDR1
QASQDIGNYLN

SEQ ID NO: 27062 - protein, 7 aa, synthetic construct
  source 1..7: note = Description of Artificial Sequence: Synthetic peptide; note = XENP021420 vlCDR2
YTSRLHS

SEQ ID NO: 27063 - protein, 9 aa, synthetic construct
  source 1..9: note = Description of Artificial Sequence: Synthetic peptide; note = XENP021420 vlCDR3
QQGNILPYT

SEQ ID NO: 27064 - protein, 223 aa, synthetic construct; identical to SEQ ID NO: 25194
  source 1..223: note = Description of Artificial Sequence: Synthetic polypeptide; note = XENP021421 2A11_H1_L2.70_Fab Heavy Chain

SEQ ID NO: 27065 - protein, 118 aa, synthetic construct; identical to SEQ ID NO: 17236
  source 1..118: note = Description of Artificial Sequence: Synthetic polypeptide; note = VH of XENP021421

SEQ ID NO: 27066 - protein, 5 aa, synthetic construct
  source 1..5: note = Description of Artificial Sequence: Synthetic peptide; note = XENP021421 vhCDR1
DYYMH

SEQ ID NO: 27067 - protein, 17 aa, synthetic construct
  source 1..17: note = Description of Artificial Sequence: Synthetic peptide; note = XENP021421 vhCDR2
WIDPENGDTEYAPKFQG

SEQ ID NO: 27068 - protein, 9 aa, synthetic construct
  source 1..9: note = Description of Artificial Sequence: Synthetic peptide; note = XENP021421 vhCDR3
RGVRQALDY

SEQ ID NO: 27069 - protein, 214 aa, synthetic construct
  source 1..214: note = Description of Artificial Sequence: Synthetic polypeptide; note = XENP021421 2A11_H1_L2.70_Fab Light Chain
DIQMTQSPAFLSVTPGEKVTITCQASQDIGNYLNWFQQKPDQTVKLLIYYTSRLHSGVPSRFSGSGSGTDYTFTISSLEAEDAATYFCQQGNQLPYTFGGGTKVEIKRTVAAPSVFIFPPSDEQLKSGTASVVCLLNNFYPREAKVQWKVDNALQSGNSQESVTEQDSKDSTYSLSSTLTLSKADYEKHKVYACEVTHQGLSSPVTKSFNRGEC

SEQ ID NO: 27070 - protein, 107 aa, synthetic construct
  source 1..107: note = Description of Artificial Sequence: Synthetic polypeptide; note = VL of XENP021421
DIQMTQSPAFLSVTPGEKVTITCQASQDIGNYLNWFQQKPDQTVKLLIYYTSRLHSGVPSRFSGSGSGTDYTFTISSLEAEDAATYFCQQGNQLPYTFGGGTKVEIK

SEQ ID NO: 27071 - protein, 11 aa, synthetic construct
  source 1..11: note = Description of Artificial Sequence: Synthetic peptide; note = XENP021421 vlCDR1
QASQDIGNYLN

SEQ ID NO: 27072 - protein, 7 aa, synthetic construct
  source 1..7: note = Description of Artificial Sequence: Synthetic peptide; note = XENP021421 vlCDR2
YTSRLHS

SEQ ID NO: 27073 - protein, 9 aa, synthetic construct
  source 1..9: note = Description of Artificial Sequence: Synthetic peptide; note = XENP021421 vlCDR3
QQGNQLPYT

SEQ ID NO: 27074 - protein, 223 aa, synthetic construct; identical to SEQ ID NO: 25194
  source 1..223: note = Description of Artificial Sequence: Synthetic polypeptide; note = XENP021422 2A11_H1_L2.71_Fab Heavy Chain

SEQ ID NO: 27075 - protein, 118 aa, synthetic construct; identical to SEQ ID NO: 17236
  source 1..118: note = Description of Artificial Sequence: Synthetic polypeptide; note = VH of XENP021422

SEQ ID NO: 27076 - protein, 5 aa, synthetic construct
  source 1..5: note = Description of Artificial Sequence: Synthetic peptide; note = XENP021422 vhCDR1
DYYMH

SEQ ID NO: 27077 - protein, 17 aa, synthetic construct
  source 1..17: note = Description of Artificial Sequence: Synthetic peptide; note = XENP021422 vhCDR2
WIDPENGDTEYAPKFQG

SEQ ID NO: 27078 - protein, 9 aa, synthetic construct
  source 1..9: note = Description of Artificial Sequence: Synthetic peptide; note = XENP021422 vhCDR3
RGVRQALDY

SEQ ID NO: 27079 - protein, 214 aa, synthetic construct
  source 1..214: note = Description of Artificial Sequence: Synthetic polypeptide; note = XENP021422 2A11_H1_L2.71_Fab Light Chain
DIQMTQSPAFLSVTPGEKVTITCQASQDIGNYLNWFQQKPDQTVKLLIYYTSRLHSGVPSRFSGSGSGTDYTFTISSLEAEDAATYFCQQGNHLPYTFGGGTKVEIKRTVAAPSVFIFPPSDEQLKSGTASVVCLLNNFYPREAKVQWKVDNALQSGNSQESVTEQDSKDSTYSLSSTLTLSKADYEKHKVYACEVTHQGLSSPVTKSFNRGEC

SEQ ID NO: 27080 - protein, 107 aa, synthetic construct
  source 1..107: note = Description of Artificial Sequence: Synthetic polypeptide; note = VL of XENP021422
DIQMTQSPAFLSVTPGEKVTITCQASQDIGNYLNWFQQKPDQTVKLLIYYTSRLHSGVPSRFSGSGSGTDYTFTISSLEAEDAATYFCQQGNHLPYTFGGGTKVEIK

SEQ ID NO: 27081 - protein, 11 aa, synthetic construct
  source 1..11: note = Description of Artificial Sequence: Synthetic peptide; note = XENP021422 vlCDR1
QASQDIGNYLN

SEQ ID NO: 27082 - protein, 7 aa, synthetic construct
  source 1..7: note = Description of Artificial Sequence: Synthetic peptide; note = XENP021422 vlCDR2
YTSRLHS

SEQ ID NO: 27083 - protein, 9 aa, synthetic construct
  source 1..9: note = Description of Artificial Sequence: Synthetic peptide; note = XENP021422 vlCDR3
QQGNHLPYT

SEQ ID NO: 27084 - protein, 223 aa, synthetic construct; identical to SEQ ID NO: 25194
  source 1..223: note = Description of Artificial Sequence: Synthetic polypeptide; note = XENP021423 2A11_H1_L2.72_Fab Heavy Chain

SEQ ID NO: 27085 - protein, 118 aa, synthetic construct; identical to SEQ ID NO: 17236
  source 1..118: note = Description of Artificial Sequence: Synthetic polypeptide; note = VH of XENP021423

SEQ ID NO: 27086 - protein, 5 aa, synthetic construct
  source 1..5: note = Description of Artificial Sequence: Synthetic peptide; note = XENP021423 vhCDR1
DYYMH

SEQ ID NO: 27087 - protein, 17 aa, synthetic construct
  source 1..17: note = Description of Artificial Sequence: Synthetic peptide; note = XENP021423 vhCDR2
WIDPENGDTEYAPKFQG

SEQ ID NO: 27088 - protein, 9 aa, synthetic construct
  source 1..9: note = Description of Artificial Sequence: Synthetic peptide; note = XENP021423 vhCDR3
RGVRQALDY

SEQ ID NO: 27089 - protein, 214 aa, synthetic construct
  source 1..214: note = Description of Artificial Sequence: Synthetic polypeptide; note = XENP021423 2A11_H1_L2.72_Fab Light Chain
DIQMTQSPAFLSVTPGEKVTITCQASQDIGNYLNWFQQKPDQTVKLLIYYTSRLHSGVPSRFSGSGSGTDYTFTISSLEAEDAATYFCQQGNDLPYTFGGGTKVEIKRTVAAPSVFIFPPSDEQLKSGTASVVCLLNNFYPREAKVQWKVDNALQSGNSQESVTEQDSKDSTYSLSSTLTLSKADYEKHKVYACEVTHQGLSSPVTKSFNRGEC

SEQ ID NO: 27090 - protein, 107 aa, synthetic construct
  source 1..107: note = Description of Artificial Sequence: Synthetic polypeptide; note = VL of XENP021423
DIQMTQSPAFLSVTPGEKVTITCQASQDIGNYLNWFQQKPDQTVKLLIYYTSRLHSGVPSRFSGSGSGTDYTFTISSLEAEDAATYFCQQGNDLPYTFGGGTKVEIK

SEQ ID NO: 27091 - protein, 11 aa, synthetic construct
  source 1..11: note = Description of Artificial Sequence: Synthetic peptide; note = XENP021423 vlCDR1
QASQDIGNYLN

SEQ ID NO: 27092 - protein, 7 aa, synthetic construct
  source 1..7: note = Description of Artificial Sequence: Synthetic peptide; note = XENP021423 vlCDR2
YTSRLHS

SEQ ID NO: 27093 - protein, 9 aa, synthetic construct
  source 1..9: note = Description of Artificial Sequence: Synthetic peptide; note = XENP021423 vlCDR3
QQGNDLPYT

SEQ ID NO: 27094 - protein, 223 aa, synthetic construct; identical to SEQ ID NO: 25194
  source 1..223: note = Description of Artificial Sequence: Synthetic polypeptide; note = XENP021424 2A11_H1_L2.73_Fab Heavy Chain

SEQ ID NO: 27095 - protein, 118 aa, synthetic construct; identical to SEQ ID NO: 17236
  source 1..118: note = Description of Artificial Sequence: Synthetic polypeptide; note = VH of XENP021424

SEQ ID NO: 27096 - protein, 5 aa, synthetic construct
  source 1..5: note = Description of Artificial Sequence: Synthetic peptide; note = XENP021424 vhCDR1
DYYMH

SEQ ID NO: 27097 - protein, 17 aa, synthetic construct
  source 1..17: note = Description of Artificial Sequence: Synthetic peptide; note = XENP021424 vhCDR2
WIDPENGDTEYAPKFQG

SEQ ID NO: 27098 - protein, 9 aa, synthetic construct
  source 1..9: note = Description of Artificial Sequence: Synthetic peptide; note = XENP021424 vhCDR3
RGVRQALDY

SEQ ID NO: 27099 - protein, 214 aa, synthetic construct
  source 1..214: note = Description of Artificial Sequence: Synthetic polypeptide; note = XENP021424 2A11_H1_L2.73_Fab Light Chain
DIQMTQSPAFLSVTPGEKVTITCQASQDIGNYLNWFQQKPDQTVKLLIYYTSRLHSGVPSRFSGSGSGTDYTFTISSLEAEDAATYFCQQGNKLPYTFGGGTKVEIKRTVAAPSVFIFPPSDEQLKSGTASVVCLLNNFYPREAKVQWKVDNALQSGNSQESVTEQDSKDSTYSLSSTLTLSKADYEKHKVYACEVTHQGLSSPVTKSFNRGEC

SEQ ID NO: 27100 - protein, 107 aa, synthetic construct
  source 1..107: note = Description of Artificial Sequence: Synthetic polypeptide; note = VL of XENP021424
DIQMTQSPAFLSVTPGEKVTITCQASQDIGNYLNWFQQKPDQTVKLLIYYTSRLHSGVPSRFSGSGSGTDYTFTISSLEAEDAATYFCQQGNKLPYTFGGGTKVEIK

SEQ ID NO: 27101 - protein, 11 aa, synthetic construct
  source 1..11: note = Description of Artificial Sequence: Synthetic peptide; note = XENP021424 vlCDR1
QASQDIGNYLN

SEQ ID NO: 27102 - protein, 7 aa, synthetic construct
  source 1..7: note = Description of Artificial Sequence: Synthetic peptide; note = XENP021424 vlCDR2
YTSRLHS

SEQ ID NO: 27103 - protein, 9 aa, synthetic construct
  source 1..9: note = Description of Artificial Sequence: Synthetic peptide; note = XENP021424 vlCDR3
QQGNKLPYT

SEQ ID NO: 27104 - protein, 223 aa, synthetic construct; identical to SEQ ID NO: 25194
  source 1..223: note = Description of Artificial Sequence: Synthetic polypeptide; note = XENP021425 2A11_H1_L2.74_Fab Heavy Chain

SEQ ID NO: 27105 - protein, 118 aa, synthetic construct; identical to SEQ ID NO: 17236
  source 1..118: note = Description of Artificial Sequence: Synthetic polypeptide; note = VH of XENP021425

SEQ ID NO: 27106 - protein, 5 aa, synthetic construct
  source 1..5: note = Description of Artificial Sequence: Synthetic peptide; note = XENP021425 vhCDR1
DYYMH

SEQ ID NO: 27107 - protein, 17 aa, synthetic construct
  source 1..17: note = Description of Artificial Sequence: Synthetic peptide; note = XENP021425 vhCDR2
WIDPENGDTEYAPKFQG

SEQ ID NO: 27108 - protein, 9 aa, synthetic construct
  source 1..9: note = Description of Artificial Sequence: Synthetic peptide; note = XENP021425 vhCDR3
RGVRQALDY

SEQ ID NO: 27109 - protein, 214 aa, synthetic construct
  source 1..214: note = Description of Artificial Sequence: Synthetic polypeptide; note = XENP021425 2A11_H1_L2.74_Fab Light Chain
DIQMTQSPAFLSVTPGEKVTITCQASQDIGNYLNWFQQKPDQTVKLLIYYTSRLHSGVPSRFSGSGSGTDYTFTISSLEAEDAATYFCQQGNYLPYTFGGGTKVEIKRTVAAPSVFIFPPSDEQLKSGTASVVCLLNNFYPREAKVQWKVDNALQSGNSQESVTEQDSKDSTYSLSSTLTLSKADYEKHKVYACEVTHQGLSSPVTKSFNRGEC

SEQ ID NO: 27110 - protein, 107 aa, synthetic construct
  source 1..107: note = Description of Artificial Sequence: Synthetic polypeptide; note = VL of XENP021425
DIQMTQSPAFLSVTPGEKVTITCQASQDIGNYLNWFQQKPDQTVKLLIYYTSRLHSGVPSRFSGSGSGTDYTFTISSLEAEDAATYFCQQGNYLPYTFGGGTKVEIK

SEQ ID NO: 27111 - protein, 11 aa, synthetic construct
  source 1..11: note = Description of Artificial Sequence: Synthetic peptide; note = XENP021425 vlCDR1
QASQDIGNYLN

SEQ ID NO: 27112 - protein, 7 aa, synthetic construct
  source 1..7: note = Description of Artificial Sequence: Synthetic peptide; note = XENP021425 vlCDR2
YTSRLHS

SEQ ID NO: 27113 - protein, 9 aa, synthetic construct
  source 1..9: note = Description of Artificial Sequence: Synthetic peptide; note = XENP021425 vlCDR3
QQGNYLPYT

SEQ ID NO: 27114 - protein, 223 aa, synthetic construct; identical to SEQ ID NO: 25194
  source 1..223: note = Description of Artificial Sequence: Synthetic polypeptide; note = XENP021426 2A11_H1_L2.75_Fab Heavy Chain

SEQ ID NO: 27115 - protein, 118 aa, synthetic construct; identical to SEQ ID NO: 17236
  source 1..118: note = Description of Artificial Sequence: Synthetic polypeptide; note = VH of XENP021426

SEQ ID NO: 27116 - protein, 5 aa, synthetic construct
  source 1..5: note = Description of Artificial Sequence: Synthetic peptide; note = XENP021426 vhCDR1
DYYMH

SEQ ID NO: 27117 - protein, 17 aa, synthetic construct
  source 1..17: note = Description of Artificial Sequence: Synthetic peptide; note = XENP021426 vhCDR2
WIDPENGDTEYAPKFQG

SEQ ID NO: 27118 - protein, 9 aa, synthetic construct
  source 1..9: note = Description of Artificial Sequence: Synthetic peptide; note = XENP021426 vhCDR3
RGVRQALDY

SEQ ID NO: 27119 - protein, 214 aa, synthetic construct
  source 1..214: note = Description of Artificial Sequence: Synthetic polypeptide; note = XENP021426 2A11_H1_L2.75_Fab Light Chain
DIQMTQSPAFLSVTPGEKVTITCQASQDIGNYLNWFQQKPDQTVKLLIYYTSRLHSGVPSRFSGSGSGTDYTFTISSLEAEDAATYFCQQGNTIPYTFGGGTKVEIKRTVAAPSVFIFPPSDEQLKSGTASVVCLLNNFYPREAKVQWKVDNALQSGNSQESVTEQDSKDSTYSLSSTLTLSKADYEKHKVYACEVTHQGLSSPVTKSFNRGEC

SEQ ID NO: 27120 - protein, 107 aa, synthetic construct
  source 1..107: note = Description of Artificial Sequence: Synthetic polypeptide; note = VL of XENP021426
DIQMTQSPAFLSVTPGEKVTITCQASQDIGNYLNWFQQKPDQTVKLLIYYTSRLHSGVPSRFSGSGSGTDYTFTISSLEAEDAATYFCQQGNTIPYTFGGGTKVEIK

SEQ ID NO: 27121 - protein, 11 aa, synthetic construct
  source 1..11: note = Description of Artificial Sequence: Synthetic peptide; note = XENP021426 vlCDR1
QASQDIGNYLN

SEQ ID NO: 27122 - protein, 7 aa, synthetic construct
  source 1..7: note = Description of Artificial Sequence: Synthetic peptide; note = XENP021426 vlCDR2
YTSRLHS

SEQ ID NO: 27123 - protein, 9 aa, synthetic construct
  source 1..9: note = Description of Artificial Sequence: Synthetic peptide; note = XENP021426 vlCDR3
QQGNTIPYT

SEQ ID NO: 27124 - protein, 223 aa, synthetic construct; identical to SEQ ID NO: 25194
  source 1..223: note = Description of Artificial Sequence: Synthetic polypeptide; note = XENP021427 2A11_H1_L2.76_Fab Heavy Chain

SEQ ID NO: 27125 - protein, 118 aa, synthetic construct; identical to SEQ ID NO: 17236
  source 1..118: note = Description of Artificial Sequence: Synthetic polypeptide; note = VH of XENP021427

SEQ ID NO: 27126 - protein, 5 aa, synthetic construct
  source 1..5: note = Description of Artificial Sequence: Synthetic peptide; note = XENP021427 vhCDR1
DYYMH

SEQ ID NO: 27127 - protein, 17 aa, synthetic construct
  source 1..17: note = Description of Artificial Sequence: Synthetic peptide; note = XENP021427 vhCDR2
WIDPENGDTEYAPKFQG

SEQ ID NO: 27128 - protein, 9 aa, synthetic construct
  source 1..9: note = Description of Artificial Sequence: Synthetic peptide; note = XENP021427 vhCDR3
RGVRQALDY

SEQ ID NO: 27129 - protein, 214 aa, synthetic construct
  source 1..214: note = Description of Artificial Sequence: Synthetic polypeptide; note = XENP021427 2A11_H1_L2.76_Fab Light Chain
DIQMTQSPAFLSVTPGEKVTITCQASQDIGNYLNWFQQKPDQTVKLLIYYTSRLHSGVPSRFSGSGSGTDYTFTISSLEAEDAATYFCQQGNTFPYTFGGGTKVEIKRTVAAPSVFIFPPSDEQLKSGTASVVCLLNNFYPREAKVQWKVDNALQSGNSQESVTEQDSKDSTYSLSSTLTLSKADYEKHKVYACEVTHQGLSSPVTKSFNRGEC

SEQ ID NO: 27130 - protein, 107 aa, synthetic construct
  source 1..107: note = Description of Artificial Sequence: Synthetic polypeptide; note = VL of XENP021427
DIQMTQSPAFLSVTPGEKVTITCQASQDIGNYLNWFQQKPDQTVKLLIYYTSRLHSGVPSRFSGSGSGTDYTFTISSLEAEDAATYFCQQGNTFPYTFGGGTKVEIK

SEQ ID NO: 27131 - protein, 11 aa, synthetic construct
  source 1..11: note = Description of Artificial Sequence: Synthetic peptide; note = XENP021427 vlCDR1
QASQDIGNYLN

SEQ ID NO: 27132 - protein, 7 aa, synthetic construct
  source 1..7: note = Description of Artificial Sequence: Synthetic peptide; note = XENP021427 vlCDR2
YTSRLHS

SEQ ID NO: 27133 - protein, 9 aa, synthetic construct
  source 1..9: note = Description of Artificial Sequence: Synthetic peptide; note = XENP021427 vlCDR3
QQGNTFPYT

SEQ ID NO: 27134 - protein, 223 aa, synthetic construct; identical to SEQ ID NO: 25194
  source 1..223: note = Description of Artificial Sequence: Synthetic polypeptide; note = XENP021428 2A11_H1_L2.77_Fab Heavy Chain

SEQ ID NO: 27135 - protein, 118 aa, synthetic construct; identical to SEQ ID NO: 17236
  source 1..118: note = Description of Artificial Sequence: Synthetic polypeptide; note = VH of XENP021428

SEQ ID NO: 27136 - protein, 5 aa, synthetic construct
  source 1..5: note = Description of Artificial Sequence: Synthetic peptide; note = XENP021428 vhCDR1
DYYMH

SEQ ID NO: 27137 - protein, 17 aa, synthetic construct
  source 1..17: note = Description of Artificial Sequence: Synthetic peptide; note = XENP021428 vhCDR2
WIDPENGDTEYAPKFQG

SEQ ID NO: 27138 - protein, 9 aa, synthetic construct
  source 1..9: note = Description of Artificial Sequence: Synthetic peptide; note = XENP021428 vhCDR3
RGVRQALDY

SEQ ID NO: 27139 - protein, 214 aa, synthetic construct
  source 1..214: note = Description of Artificial Sequence: Synthetic polypeptide; note = XENP021428 2A11_H1_L2.77_Fab Light Chain
DIQMTQSPAFLSVTPGEKVTITCQASQDIGNYLNWFQQKPDQTVKLLIYYTSRLHSGVPSRFSGSGSGTDYTFTISSLEAEDAATYFCQQGNTVPYTFGGGTKVEIKRTVAAPSVFIFPPSDEQLKSGTASVVCLLNNFYPREAKVQWKVDNALQSGNSQESVTEQDSKDSTYSLSSTLTLSKADYEKHKVYACEVTHQGLSSPVTKSFNRGEC

SEQ ID NO: 27140 - protein, 107 aa, synthetic construct
  source 1..107: note = Description of Artificial Sequence: Synthetic polypeptide; note = VL of XENP021428
DIQMTQSPAFLSVTPGEKVTITCQASQDIGNYLNWFQQKPDQTVKLLIYYTSRLHSGVPSRFSGSGSGTDYTFTISSLEAEDAATYFCQQGNTVPYTFGGGTKVEIK

SEQ ID NO: 27141 - protein, 11 aa, synthetic construct
  source 1..11: note = Description of Artificial Sequence: Synthetic peptide; note = XENP021428 vlCDR1
QASQDIGNYLN

SEQ ID NO: 27142 - protein, 7 aa, synthetic construct
  source 1..7: note = Description of Artificial Sequence: Synthetic peptide; note = XENP021428 vlCDR2
YTSRLHS

SEQ ID NO: 27143 - protein, 9 aa, synthetic construct
  source 1..9: note = Description of Artificial Sequence: Synthetic peptide; note = XENP021428 vlCDR3
QQGNTVPYT

SEQ ID NO: 27144 - protein, 223 aa, synthetic construct; identical to SEQ ID NO: 25194
  source 1..223: note = Description of Artificial Sequence: Synthetic polypeptide; note = XENP021429 2A11_H1_L2.78_Fab Heavy Chain

SEQ ID NO: 27145 - protein, 118 aa, synthetic construct; identical to SEQ ID NO: 17236
  source 1..118: note = Description of Artificial Sequence: Synthetic polypeptide; note = VH of XENP021429

SEQ ID NO: 27146 - protein, 5 aa, synthetic construct
  source 1..5: note = Description of Artificial Sequence: Synthetic peptide; note = XENP021429 vhCDR1
DYYMH

SEQ ID NO: 27147 - protein, 17 aa, synthetic construct
  source 1..17: note = Description of Artificial Sequence: Synthetic peptide; note = XENP021429 vhCDR2
WIDPENGDTEYAPKFQG

SEQ ID NO: 27148 - protein, 9 aa, synthetic construct
  source 1..9: note = Description of Artificial Sequence: Synthetic peptide; note = XENP021429 vhCDR3
RGVRQALDY

SEQ ID NO: 27149 - protein, 214 aa, synthetic construct
  source 1..214: note = Description of Artificial Sequence: Synthetic polypeptide; note = XENP021429 2A11_H1_L2.78_Fab Light Chain
DIQMTQSPAFLSVTPGEKVTITCQASQDIGNYLNWFQQKPDQTVKLLIYYTSRLHSGVPSRFSGSGSGTDYTFTISSLEAEDAATYFCQQGNTYPYTFGGGTKVEIKRTVAAPSVFIFPPSDEQLKSGTASVVCLLNNFYPREAKVQWKVDNALQSGNSQESVTEQDSKDSTYSLSSTLTLSKADYEKHKVYACEVTHQGLSSPVTKSFNRGEC

SEQ ID NO: 27150 - protein, 107 aa, synthetic construct
  source 1..107: note = Description of Artificial Sequence: Synthetic polypeptide; note = VL of XENP021429
DIQMTQSPAFLSVTPGEKVTITCQASQDIGNYLNWFQQKPDQTVKLLIYYTSRLHSGVPSRFSGSGSGTDYTFTISSLEAEDAATYFCQQGNTYPYTFGGGTKVEIK

SEQ ID NO: 27151 - protein, 11 aa, synthetic construct
  source 1..11: note = Description of Artificial Sequence: Synthetic peptide; note = XENP021429 vlCDR1
QASQDIGNYLN

SEQ ID NO: 27152 - protein, 7 aa, synthetic construct
  source 1..7: note = Description of Artificial Sequence: Synthetic peptide; note = XENP021429 vlCDR2
YTSRLHS

SEQ ID NO: 27153 - protein, 9 aa, synthetic construct
  source 1..9: note = Description of Artificial Sequence: Synthetic peptide; note = XENP021429 vlCDR3
QQGNTYPYT

SEQ ID NO: 27154 - protein, 223 aa, synthetic construct; identical to SEQ ID NO: 25194
  source 1..223: note = Description of Artificial Sequence: Synthetic polypeptide; note = XENP021430 2A11_H1_L2.79_Fab Heavy Chain

SEQ ID NO: 27155 - protein, 118 aa, synthetic construct; identical to SEQ ID NO: 17236
  source 1..118: note = Description of Artificial Sequence: Synthetic polypeptide; note = VH of XENP021430

SEQ ID NO: 27156 - protein, 5 aa, synthetic construct
  source 1..5: note = Description of Artificial Sequence: Synthetic peptide; note = XENP021430 vhCDR1
DYYMH

SEQ ID NO: 27157 - protein, 17 aa, synthetic construct
  source 1..17: note = Description of Artificial Sequence: Synthetic peptide; note = XENP021430 vhCDR2
WIDPENGDTEYAPKFQG

SEQ ID NO: 27158 - protein, 9 aa, synthetic construct
  source 1..9: note = Description of Artificial Sequence: Synthetic peptide; note = XENP021430 vhCDR3
RGVRQALDY

SEQ ID NO: 27159 - protein, 214 aa, synthetic construct
  source 1..214: note = Description of Artificial Sequence: Synthetic polypeptide; note = XENP021430 2A11_H1_L2.79_Fab Light Chain
DIQMTQSPAFLSVTPGEKVTITCQASQDIGNYLNWFQQKPDQTVKLLIYYTSRLHSGVPSRFSGSGSGTDYTFTISSLEAEDAATYFCQQGNTWPYTFGGGTKVEIKRTVAAPSVFIFPPSDEQLKSGTASVVCLLNNFYPREAKVQWKVDNALQSGNSQESVTEQDSKDSTYSLSSTLTLSKADYEKHKVYACEVTHQGLSSPVTKSFNRGEC

SEQ ID NO: 27160 - protein, 107 aa, synthetic construct
  source 1..107: note = Description of Artificial Sequence: Synthetic polypeptide; note = VL of XENP021430
DIQMTQSPAFLSVTPGEKVTITCQASQDIGNYLNWFQQKPDQTVKLLIYYTSRLHSGVPSRFSGSGSGTDYTFTISSLEAEDAATYFCQQGNTWPYTFGGGTKVEIK

SEQ ID NO: 27161 - protein, 11 aa, synthetic construct
  source 1..11: note = Description of Artificial Sequence: Synthetic peptide; note = XENP021430 vlCDR1
QASQDIGNYLN

SEQ ID NO: 27162 - protein, 7 aa, synthetic construct
  source 1..7: note = Description of Artificial Sequence: Synthetic peptide; note = XENP021430 vlCDR2
YTSRLHS

SEQ ID NO: 27163 - protein, 9 aa, synthetic construct
  source 1..9: note = Description of Artificial Sequence: Synthetic peptide; note = XENP021430 vlCDR3
QQGNTWPYT

SEQ ID NO: 27164 - protein, 223 aa, synthetic construct; identical to SEQ ID NO: 25194
  source 1..223: note = Description of Artificial Sequence: Synthetic polypeptide; note = XENP021431 2A11_H1_L2.80_Fab Heavy Chain

SEQ ID NO: 27165 - protein, 118 aa, synthetic construct; identical to SEQ ID NO: 17236
  source 1..118: note = Description of Artificial Sequence: Synthetic polypeptide; note = VH of XENP021431

SEQ ID NO: 27166 - protein, 5 aa, synthetic construct
  source 1..5: note = Description of Artificial Sequence: Synthetic peptide; note = XENP021431 vhCDR1
DYYMH

SEQ ID NO: 27167 - protein, 17 aa, synthetic construct
  source 1..17: note = Description of Artificial Sequence: Synthetic peptide; note = XENP021431 vhCDR2
WIDPENGDTEYAPKFQG

SEQ ID NO: 27168 - protein, 9 aa, synthetic construct
  source 1..9: note = Description of Artificial Sequence: Synthetic peptide; note = XENP021431 vhCDR3
RGVRQALDY

SEQ ID NO: 27169 - protein, 214 aa, synthetic construct
  source 1..214: note = Description of Artificial Sequence: Synthetic polypeptide; note = XENP021431 2A11_H1_L2.80_Fab Light Chain
DIQMTQSPAFLSVTPGEKVTITCQASQDIGNYLNWFQQKPDQTVKLLIYYTSRLHSGVPSRFSGSGSGTDYTFTISSLEAEDAATYFCQQGNTTPYTFGGGTKVEIKRTVAAPSVFIFPPSDEQLKSGTASVVCLLNNFYPREAKVQWKVDNALQSGNSQESVTEQDSKDSTYSLSSTLTLSKADYEKHKVYACEVTHQGLSSPVTKSFNRGEC

SEQ ID NO: 27170 - protein, 107 aa, synthetic construct
  source 1..107: note = Description of Artificial Sequence: Synthetic polypeptide; note = VL of XENP021431
DIQMTQSPAFLSVTPGEKVTITCQASQDIGNYLNWFQQKPDQTVKLLIYYTSRLHSGVPSRFSGSGSGTDYTFTISSLEAEDAATYFCQQGNTTPYTFGGGTKVEIK

SEQ ID NO: 27171 - protein, 11 aa, synthetic construct
  source 1..11: note = Description of Artificial Sequence: Synthetic peptide; note = XENP021431 vlCDR1
QASQDIGNYLN

SEQ ID NO: 27172 - protein, 7 aa, synthetic construct
  source 1..7: note = Description of Artificial Sequence: Synthetic peptide; note = XENP021431 vlCDR2
YTSRLHS

SEQ ID NO: 27173 - protein, 9 aa, synthetic construct
  source 1..9: note = Description of Artificial Sequence: Synthetic peptide; note = XENP021431 vlCDR3
QQGNTTPYT

SEQ ID NO: 27174 - protein, 223 aa, synthetic construct; identical to SEQ ID NO: 25194
  source 1..223: note = Description of Artificial Sequence: Synthetic polypeptide; note = XENP021432 2A11_H1_L2.81_Fab Heavy Chain

SEQ ID NO: 27175 - protein, 118 aa, synthetic construct; identical to SEQ ID NO: 17236
  source 1..118: note = Description of Artificial Sequence: Synthetic polypeptide; note = VH of XENP021432

SEQ ID NO: 27176 - protein, 5 aa, synthetic construct
  source 1..5: note = Description of Artificial Sequence: Synthetic peptide; note = XENP021432 vhCDR1
DYYMH

SEQ ID NO: 27177 - protein, 17 aa, synthetic construct
  source 1..17: note = Description of Artificial Sequence: Synthetic peptide; note = XENP021432 vhCDR2
WIDPENGDTEYAPKFQG

SEQ ID NO: 27178 - protein, 9 aa, synthetic construct
  source 1..9: note = Description of Artificial Sequence: Synthetic peptide; note = XENP021432 vhCDR3
RGVRQALDY

SEQ ID NO: 27179 - protein, 214 aa, synthetic construct
  source 1..214: note = Description of Artificial Sequence: Synthetic polypeptide; note = XENP021432 2A11_H1_L2.81_Fab Light Chain
DIQMTQSPAFLSVTPGEKVTITCQASQDIGNYLNWFQQKPDQTVKLLIYYTSRLHSGVPSRFSGSGSGTDYTFTISSLEAEDAATYFCQQGNTAPYTFGGGTKVEIKRTVAAPSVFIFPPSDEQLKSGTASVVCLLNNFYPREAKVQWKVDNALQSGNSQESVTEQDSKDSTYSLSSTLTLSKADYEKHKVYACEVTHQGLSSPVTKSFNRGEC

SEQ ID NO: 27180 - protein, 107 aa, synthetic construct
  source 1..107: note = Description of Artificial Sequence: Synthetic polypeptide; note = VL of XENP021432
DIQMTQSPAFLSVTPGEKVTITCQASQDIGNYLNWFQQKPDQTVKLLIYYTSRLHSGVPSRFSGSGSGTDYTFTISSLEAEDAATYFCQQGNTAPYTFGGGTKVEIK

SEQ ID NO: 27181 - protein, 11 aa, synthetic construct
  source 1..11: note = Description of Artificial Sequence: Synthetic peptide; note = XENP021432 vlCDR1
QASQDIGNYLN

SEQ ID NO: 27182 - protein, 7 aa, synthetic construct
  source 1..7: note = Description of Artificial Sequence: Synthetic peptide; note = XENP021432 vlCDR2
YTSRLHS

SEQ ID NO: 27183 - protein, 9 aa, synthetic construct
  source 1..9: note = Description of Artificial Sequence: Synthetic peptide; note = XENP021432 vlCDR3
QQGNTAPYT

SEQ ID NO: 27184 - protein, 223 aa, synthetic construct; identical to SEQ ID NO: 25194
  source 1..223: note = Description of Artificial Sequence: Synthetic polypeptide; note = XENP021433 2A11_H1_L2.82_Fab Heavy Chain

SEQ ID NO: 27185 - protein, 118 aa, synthetic construct; identical to SEQ ID NO: 17236
  source 1..118: note = Description of Artificial Sequence: Synthetic polypeptide; note = VH of XENP021433

SEQ ID NO: 27186 - protein, 5 aa, synthetic construct
  source 1..5: note = Description of Artificial Sequence: Synthetic peptide; note = XENP021433 vhCDR1
DYYMH

SEQ ID NO: 27187 - protein, 17 aa, synthetic construct
  source 1..17: note = Description of Artificial Sequence: Synthetic peptide; note = XENP021433 vhCDR2
WIDPENGDTEYAPKFQG

SEQ ID NO: 27188 - protein, 9 aa, synthetic construct
  source 1..9: note = Description of Artificial Sequence: Synthetic peptide; note = XENP021433 vhCDR3
RGVRQALDY

SEQ ID NO: 27189 - protein, 214 aa, synthetic construct
  source 1..214: note = Description of Artificial Sequence: Synthetic polypeptide; note = XENP021433 2A11_H1_L2.82_Fab Light Chain
DIQMTQSPAFLSVTPGEKVTITCQASQDIGNYLNWFQQKPDQTVKLLIYYTSRLHSGVPSRFSGSGSGTDYTFTISSLEAEDAATYFCQQGNTQPYTFGGGTKVEIKRTVAAPSVFIFPPSDEQLKSGTASVVCLLNNFYPREAKVQWKVDNALQSGNSQESVTEQDSKDSTYSLSSTLTLSKADYEKHKVYACEVTHQGLSSPVTKSFNRGEC

SEQ ID NO: 27190 - protein, 107 aa, synthetic construct
  source 1..107: note = Description of Artificial Sequence: Synthetic polypeptide; note = VL of XENP021433
DIQMTQSPAFLSVTPGEKVTITCQASQDIGNYLNWFQQKPDQTVKLLIYYTSRLHSGVPSRFSGSGSGTDYTFTISSLEAEDAATYFCQQGNTQPYTFGGGTKVEIK

SEQ ID NO: 27191 - protein, 11 aa, synthetic construct
  source 1..11: note = Description of Artificial Sequence: Synthetic peptide; note = XENP021433 vlCDR1
QASQDIGNYLN

SEQ ID NO: 27192 - protein, 7 aa, synthetic construct
  source 1..7: note = Description of Artificial Sequence: Synthetic peptide; note = XENP021433 vlCDR2
YTSRLHS

SEQ ID NO: 27193 - protein, 9 aa, synthetic construct
  source 1..9: note = Description of Artificial Sequence: Synthetic peptide; note = XENP021433 vlCDR3
QQGNTQPYT

SEQ ID NO: 27194 - protein, 223 aa, synthetic construct; identical to SEQ ID NO: 25194
  source 1..223: note = Description of Artificial Sequence: Synthetic polypeptide; note = XENP021434 2A11_H1_L2.83_Fab Heavy Chain

SEQ ID NO: 27195 - protein, 118 aa, synthetic construct; identical to SEQ ID NO: 17236
  source 1..118: note = Description of Artificial Sequence: Synthetic polypeptide; note = VH of XENP021434

SEQ ID NO: 27196 - protein, 5 aa, synthetic construct
  source 1..5: note = Description of Artificial Sequence: Synthetic peptide; note = XENP021434 vhCDR1
DYYMH

SEQ ID NO: 27197 - protein, 17 aa, synthetic construct
  source 1..17: note = Description of Artificial Sequence: Synthetic peptide; note = XENP021434 vhCDR2
WIDPENGDTEYAPKFQG

SEQ ID NO: 27198 - protein, 9 aa, synthetic construct
  source 1..9: note = Description of Artificial Sequence: Synthetic peptide; note = XENP021434 vhCDR3
RGVRQALDY

SEQ ID NO: 27199 - protein, 214 aa, synthetic construct
  source 1..214: note = Description of Artificial Sequence: Synthetic polypeptide; note = XENP021434 2A11_H1_L2.83_Fab Light Chain
DIQMTQSPAFLSVTPGEKVTITCQASQDIGNYLNWFQQKPDQTVKLLIYYTSRLHSGVPSRFSGSGSGTDYTFTISSLEAEDAATYFCQQGNTKPYTFGGGTKVEIKRTVAAPSVFIFPPSDEQLKSGTASVVCLLNNFYPREAKVQWKVDNALQSGNSQESVTEQDSKDSTYSLSSTLTLSKADYEKHKVYACEVTHQGLSSPVTKSFNRGEC

SEQ ID NO: 27200 - protein, 107 aa, synthetic construct
  source 1..107: note = Description of Artificial Sequence: Synthetic polypeptide; note = VL of XENP021434
DIQMTQSPAFLSVTPGEKVTITCQASQDIGNYLNWFQQKPDQTVKLLIYYTSRLHSGVPSRFSGSGSGTDYTFTISSLEAEDAATYFCQQGNTKPYTFGGGTKVEIK

SEQ ID NO: 27201 - protein, 11 aa, synthetic construct
  source 1..11: note = Description of Artificial Sequence: Synthetic peptide; note = XENP021434 vlCDR1
QASQDIGNYLN

SEQ ID NO: 27202 - protein, 7 aa, synthetic construct
  source 1..7: note = Description of Artificial Sequence: Synthetic peptide; note = XENP021434 vlCDR2
YTSRLHS

SEQ ID NO: 27203 - protein, 9 aa, synthetic construct
  source 1..9: note = Description of Artificial Sequence: Synthetic peptide; note = XENP021434 vlCDR3
QQGNTKPYT

SEQ ID NO: 27204 - protein, 223 aa, synthetic construct; identical to SEQ ID NO: 25194
  source 1..223: note = Description of Artificial Sequence: Synthetic polypeptide; note = XENP021435 2A11_H1_L2.84_Fab Heavy Chain

SEQ ID NO: 27205 - protein, 118 aa, synthetic construct; identical to SEQ ID NO: 17236
  source 1..118: note = Description of Artificial Sequence: Synthetic polypeptide; note = VH of XENP021435

SEQ ID NO: 27206 - protein, 5 aa, synthetic construct
  source 1..5: note = Description of Artificial Sequence: Synthetic peptide; note = XENP021435 vhCDR1
DYYMH

SEQ ID NO: 27207 - protein, 17 aa, synthetic construct
  source 1..17: note = Description of Artificial Sequence: Synthetic peptide; note = XENP021435 vhCDR2
WIDPENGDTEYAPKFQG

SEQ ID NO: 27208 - protein, 9 aa, synthetic construct
  source 1..9: note = Description of Artificial Sequence: Synthetic peptide; note = XENP021435 vhCDR3
RGVRQALDY

SEQ ID NO: 27209 - protein, 214 aa, synthetic construct
  source 1..214: note = Description of Artificial Sequence: Synthetic polypeptide; note = XENP021435 2A11_H1_L2.84_Fab Light Chain
DIQMTQSPAFLSVTPGEKVTITCQASQDIGNYLNWFQQKPDQTVKLLIYYTSRLHSGVPSRFSGSGSGTDYTFTISSLEAEDAATYFCQQGNTLPFTFGGGTKVEIKRTVAAPSVFIFPPSDEQLKSGTASVVCLLNNFYPREAKVQWKVDNALQSGNSQESVTEQDSKDSTYSLSSTLTLSKADYEKHKVYACEVTHQGLSSPVTKSFNRGEC

SEQ ID NO: 27210 - protein, 107 aa, synthetic construct
  source 1..107: note = Description of Artificial Sequence: Synthetic polypeptide; note = VL of XENP021435
DIQMTQSPAFLSVTPGEKVTITCQASQDIGNYLNWFQQKPDQTVKLLIYYTSRLHSGVPSRFSGSGSGTDYTFTISSLEAEDAATYFCQQGNTLPFTFGGGTKVEIK

SEQ ID NO: 27211 - protein, 11 aa, synthetic construct
  source 1..11: note = Description of Artificial Sequence: Synthetic peptide; note = XENP021435 vlCDR1
QASQDIGNYLN

SEQ ID NO: 27212 - protein, 7 aa, synthetic construct
  source 1..7: note = Description of Artificial Sequence: Synthetic peptide; note = XENP021435 vlCDR2
YTSRLHS

SEQ ID NO: 27213 - protein, 9 aa, synthetic construct
  source 1..9: note = Description of Artificial Sequence: Synthetic peptide; note = XENP021435 vlCDR3
QQGNTLPFT

SEQ ID NO: 27214 - protein, 223 aa, synthetic construct; identical to SEQ ID NO: 25194
  source 1..223: note = Description of Artificial Sequence: Synthetic polypeptide; note = XENP021436 2A11_H1_L2.85_Fab Heavy Chain

SEQ ID NO: 27215 - protein, 118 aa, synthetic construct; identical to SEQ ID NO: 17236
  source 1..118: note = Description of Artificial Sequence: Synthetic polypeptide; note = VH of XENP021436

SEQ ID NO: 27216 - protein, 5 aa, synthetic construct
  source 1..5: note = Description of Artificial Sequence: Synthetic peptide; note = XENP021436 vhCDR1
DYYMH

SEQ ID NO: 27217 - protein, 17 aa, synthetic construct
  source 1..17: note = Description of Artificial Sequence: Synthetic peptide; note = XENP021436 vhCDR2
WIDPENGDTEYAPKFQG

SEQ ID NO: 27218 - protein, 9 aa, synthetic construct
  source 1..9: note = Description of Artificial Sequence: Synthetic peptide; note = XENP021436 vhCDR3
RGVRQALDY

SEQ ID NO: 27219 - protein, 214 aa, synthetic construct
  source 1..214: note = Description of Artificial Sequence: Synthetic polypeptide; note = XENP021436 2A11_H1_L2.85_Fab Light Chain
DIQMTQSPAFLSVTPGEKVTITCQASQDIGNYLNWFQQKPDQTVKLLIYYTSRLHSGVPSRFSGSGSGTDYTFTISSLEAEDAATYFCQQGNTLPHTFGGGTKVEIKRTVAAPSVFIFPPSDEQLKSGTASVVCLLNNFYPREAKVQWKVDNALQSGNSQESVTEQDSKDSTYSLSSTLTLSKADYEKHKVYACEVTHQGLSSPVTKSFNRGEC

SEQ ID NO: 27220 - protein, 107 aa, synthetic construct
  source 1..107: note = Description of Artificial Sequence: Synthetic polypeptide; note = VL of XENP021436
DIQMTQSPAFLSVTPGEKVTITCQASQDIGNYLNWFQQKPDQTVKLLIYYTSRLHSGVPSRFSGSGSGTDYTFTISSLEAEDAATYFCQQGNTLPHTFGGGTKVEIK

SEQ ID NO: 27221 - protein, 11 aa, synthetic construct
  source 1..11: note = Description of Artificial Sequence: Synthetic peptide; note = XENP021436 vlCDR1
QASQDIGNYLN

SEQ ID NO: 27222 - protein, 7 aa, synthetic construct
  source 1..7: note = Description of Artificial Sequence: Synthetic peptide; note = XENP021436 vlCDR2
YTSRLHS

SEQ ID NO: 27223 - protein, 9 aa, synthetic construct
  source 1..9: note = Description of Artificial Sequence: Synthetic peptide; note = XENP021436 vlCDR3
QQGNTLPHT

SEQ ID NO: 27224 - protein, 223 aa, synthetic construct; identical to SEQ ID NO: 25194
  source 1..223: note = Description of Artificial Sequence: Synthetic polypeptide; note = XENP021437 2A11_H1_L2.86_Fab Heavy Chain

SEQ ID NO: 27225 - protein, 118 aa, synthetic construct; identical to SEQ ID NO: 17236
  source 1..118: note = Description of Artificial Sequence: Synthetic polypeptide; note = VH of XENP021437

SEQ ID NO: 27226 - protein, 5 aa, synthetic construct
  source 1..5: note = Description of Artificial Sequence: Synthetic peptide; note = XENP021437 vhCDR1
DYYMH

SEQ ID NO: 27227 - protein, 17 aa, synthetic construct
  source 1..17: note = Description of Artificial Sequence: Synthetic peptide; note = XENP021437 vhCDR2
WIDPENGDTEYAPKFQG

SEQ ID NO: 27228 - protein, 9 aa, synthetic construct
  source 1..9: note = Description of Artificial Sequence: Synthetic peptide; note = XENP021437 vhCDR3
RGVRQALDY

SEQ ID NO: 27229 - protein, 214 aa, synthetic construct
  source 1..214: note = Description of Artificial Sequence: Synthetic polypeptide; note = XENP021437 2A11_H1_L2.86_Fab Light Chain
DIQMTQSPAFLSVTPGEKVTITCQASQDIGNYLNWFQQKPDQTVKLLIYYTSRLHSGVPSRFSGSGSGTDYTFTISSLEAEDAATYFCQQGNTLPLTFGGGTKVEIKRTVAAPSVFIFPPSDEQLKSGTASVVCLLNNFYPREAKVQWKVDNALQSGNSQESVTEQDSKDSTYSLSSTLTLSKADYEKHKVYACEVTHQGLSSPVTKSFNRGEC

SEQ ID NO: 27230 - protein, 107 aa, synthetic construct
  source 1..107: note = Description of Artificial Sequence: Synthetic polypeptide; note = VL of XENP021437
DIQMTQSPAFLSVTPGEKVTITCQASQDIGNYLNWFQQKPDQTVKLLIYYTSRLHSGVPSRFSGSGSGTDYTFTISSLEAEDAATYFCQQGNTLPLTFGGGTKVEIK

SEQ ID NO: 27231 - protein, 11 aa, synthetic construct
  source 1..11: note = Description of Artificial Sequence: Synthetic peptide; note = XENP021437 vlCDR1
QASQDIGNYLN

SEQ ID NO: 27232 - protein, 7 aa, synthetic construct
  source 1..7: note = Description of Artificial Sequence: Synthetic peptide; note = XENP021437 vlCDR2
YTSRLHS

SEQ ID NO: 27233 - protein, 9 aa, synthetic construct
  source 1..9: note = Description of Artificial Sequence: Synthetic peptide; note = XENP021437 vlCDR3
QQGNTLPLT

SEQ ID NO: 27234 - protein, 223 aa, synthetic construct; identical to SEQ ID NO: 25194
  source 1..223: note = Description of Artificial Sequence: Synthetic polypeptide; note = XENP021438 2A11_H1_L2.87_Fab Heavy Chain

SEQ ID NO: 27235 - protein, 118 aa, synthetic construct; identical to SEQ ID NO: 17236
  source 1..118: note = Description of Artificial Sequence: Synthetic polypeptide; note = VH of XENP021438

SEQ ID NO: 27236 - protein, 5 aa, synthetic construct
  source 1..5: note = Description of Artificial Sequence: Synthetic peptide; note = XENP021438 vhCDR1
DYYMH

SEQ ID NO: 27237 - protein, 17 aa, synthetic construct
  source 1..17: note = Description of Artificial Sequence: Synthetic peptide; note = XENP021438 vhCDR2
WIDPENGDTEYAPKFQG

SEQ ID NO: 27238 - protein, 9 aa, synthetic construct
  source 1..9: note = Description of Artificial Sequence: Synthetic peptide; note = XENP021438 vhCDR3
RGVRQALDY

SEQ ID NO: 27239 - protein, 214 aa, synthetic construct
  source 1..214: note = Description of Artificial Sequence: Synthetic polypeptide; note = XENP021438 2A11_H1_L2.87_Fab Light Chain
DIQMTQSPAFLSVTPGEKVTITCQASQDIGNYLNWFQQKPDQTVKLLIYYTSRLHSGVPSRFSGSGSGTDYTFTISSLEAEDAATYFCQQGNTLPWTFGGGTKVEIKRTVAAPSVFIFPPSDEQLKSGTASVVCLLNNFYPREAKVQWKVDNALQSGNSQESVTEQDSKDSTYSLSSTLTLSKADYEKHKVYACEVTHQGLSSPVTKSFNRGEC

SEQ ID NO: 27240 - protein, 107 aa, synthetic construct
  source 1..107: note = Description of Artificial Sequence: Synthetic polypeptide; note = VL of XENP021438
DIQMTQSPAFLSVTPGEKVTITCQASQDIGNYLNWFQQKPDQTVKLLIYYTSRLHSGVPSRFSGSGSGTDYTFTISSLEAEDAATYFCQQGNTLPWTFGGGTKVEIK

SEQ ID NO: 27241 - protein, 11 aa, synthetic construct
  source 1..11: note = Description of Artificial Sequence: Synthetic peptide; note = XENP021438 vlCDR1
QASQDIGNYLN

SEQ ID NO: 27242 - protein, 7 aa, synthetic construct
  source 1..7: note = Description of Artificial Sequence: Synthetic peptide; note = XENP021438 vlCDR2
YTSRLHS

SEQ ID NO: 27243 - protein, 9 aa, synthetic construct
  source 1..9: note = Description of Artificial Sequence: Synthetic peptide; note = XENP021438 vlCDR3
QQGNTLPWT

SEQ ID NO: 27244 - protein, 223 aa, synthetic construct; identical to SEQ ID NO: 25194
  source 1..223: note = Description of Artificial Sequence: Synthetic polypeptide; note = XENP021439 2A11_H1_L2.88_Fab Heavy Chain

SEQ ID NO: 27245 - protein, 118 aa, synthetic construct; identical to SEQ ID NO: 17236
  source 1..118: note = Description of Artificial Sequence: Synthetic polypeptide; note = VH of XENP021439

SEQ ID NO: 27246 - protein, 5 aa, synthetic construct
  source 1..5: note = Description of Artificial Sequence: Synthetic peptide; note = XENP021439 vhCDR1
DYYMH

SEQ ID NO: 27247 - protein, 17 aa, synthetic construct
  source 1..17: note = Description of Artificial Sequence: Synthetic peptide; note = XENP021439 vhCDR2
WIDPENGDTEYAPKFQG

SEQ ID NO: 27248 - protein, 9 aa, synthetic construct
  source 1..9: note = Description of Artificial Sequence: Synthetic peptide; note = XENP021439 vhCDR3
RGVRQALDY

SEQ ID NO: 27249 - protein, 214 aa, synthetic construct
  source 1..214: note = Description of Artificial Sequence: Synthetic polypeptide; note = XENP021439 2A11_H1_L2.88_Fab Light Chain
DIQMTQSPAFLSVTPGEKVTITCQASQDIGNYLNWFQQKPDQTVKLLIYYTSRLHSGVPSRFSGSGSGTDYTFTISSLEAEDAATYFCQQGNTLPRTFGGGTKVEIKRTVAAPSVFIFPPSDEQLKSGTASVVCLLNNFYPREAKVQWKVDNALQSGNSQESVTEQDSKDSTYSLSSTLTLSKADYEKHKVYACEVTHQGLSSPVTKSFNRGEC

SEQ ID NO: 27250 - protein, 107 aa, synthetic construct
  source 1..107: note = Description of Artificial Sequence: Synthetic polypeptide; note = VL of XENP021439
DIQMTQSPAFLSVTPGEKVTITCQASQDIGNYLNWFQQKPDQTVKLLIYYTSRLHSGVPSRFSGSGSGTDYTFTISSLEAEDAATYFCQQGNTLPRTFGGGTKVEIK

SEQ ID NO: 27251 - protein, 11 aa, synthetic construct
  source 1..11: note = Description of Artificial Sequence: Synthetic peptide; note = XENP021439 vlCDR1
QASQDIGNYLN

SEQ ID NO: 27252 - protein, 7 aa, synthetic construct
  source 1..7: note = Description of Artificial Sequence: Synthetic peptide; note = XENP021439 vlCDR2
YTSRLHS

SEQ ID NO: 27253 - protein, 9 aa, synthetic construct
  source 1..9: note = Description of Artificial Sequence: Synthetic peptide; note = XENP021439 vlCDR3
QQGNTLPRT

SEQ ID NO: 27254 - protein, 223 aa, synthetic construct; identical to SEQ ID NO: 25194
  source 1..223: note = Description of Artificial Sequence: Synthetic polypeptide; note = XENP021440 2A11_H1_L2.89_Fab Heavy Chain

SEQ ID NO: 27255 - protein, 118 aa, synthetic construct; identical to SEQ ID NO: 17236
  source 1..118: note = Description of Artificial Sequence: Synthetic polypeptide; note = VH of XENP021440

SEQ ID NO: 27256 - protein, 5 aa, synthetic construct
  source 1..5: note = Description of Artificial Sequence: Synthetic peptide; note = XENP021440 vhCDR1
DYYMH

SEQ ID NO: 27257 - protein, 17 aa, synthetic construct
  source 1..17: note = Description of Artificial Sequence: Synthetic peptide; note = XENP021440 vhCDR2
WIDPENGDTEYAPKFQG

SEQ ID NO: 27258 - protein, 9 aa, synthetic construct
  source 1..9: note = Description of Artificial Sequence: Synthetic peptide; note = XENP021440 vhCDR3
RGVRQALDY

SEQ ID NO: 27259 - protein, 214 aa, synthetic construct
  source 1..214: note = Description of Artificial Sequence: Synthetic polypeptide; note = XENP021440 2A11_H1_L2.89_Fab Light Chain
DIQMTQSPAFLSVTPGEKVTITCQASQDIGNYLNWFQQKPDQTVKLLIYYTSRLHSGVPSRFSGSGSGTDYTFTISSLEAEDAATYFCQQGNTLPATFGGGTKVEIKRTVAAPSVFIFPPSDEQLKSGTASVVCLLNNFYPREAKVQWKVDNALQSGNSQESVTEQDSKDSTYSLSSTLTLSKADYEKHKVYACEVTHQGLSSPVTKSFNRGEC

SEQ ID NO: 27260 - protein, 107 aa, synthetic construct
  source 1..107: note = Description of Artificial Sequence: Synthetic polypeptide; note = VL of XENP021440
DIQMTQSPAFLSVTPGEKVTITCQASQDIGNYLNWFQQKPDQTVKLLIYYTSRLHSGVPSRFSGSGSGTDYTFTISSLEAEDAATYFCQQGNTLPATFGGGTKVEIK

SEQ ID NO: 27261 - protein, 11 aa, synthetic construct
  source 1..11: note = Description of Artificial Sequence: Synthetic peptide; note = XENP021440 vlCDR1
QASQDIGNYLN

SEQ ID NO: 27262 - protein, 7 aa, synthetic construct
  source 1..7: note = Description of Artificial Sequence: Synthetic peptide; note = XENP021440 vlCDR2
YTSRLHS

SEQ ID NO: 27263 - protein, 9 aa, synthetic construct
  source 1..9: note = Description of Artificial Sequence: Synthetic peptide; note = XENP021440 vlCDR3
QQGNTLPAT

SEQ ID NO: 27264 - protein, 223 aa, synthetic construct; identical to SEQ ID NO: 25574
  source 1..223: note = Description of Artificial Sequence: Synthetic polypeptide; note = XENP021606 2A11_H1.37_L2.35_Fab Heavy Chain

SEQ ID NO: 27265 - protein, 118 aa, synthetic construct; identical to SEQ ID NO: 25575
  source 1..118: note = Description of Artificial Sequence: Synthetic polypeptide; note = VH of XENP021606

SEQ ID NO: 27266 - protein, 5 aa, synthetic construct
  source 1..5: note = Description of Artificial Sequence: Synthetic peptide; note = XENP021606 vhCDR1
DYFMH

SEQ ID NO: 27267 - protein, 17 aa, synthetic construct
  source 1..17: note = Description of Artificial Sequence: Synthetic peptide; note = XENP021606 vhCDR2
WIDPENGDTEYAPKFQG

SEQ ID NO: 27268 - protein, 9 aa, synthetic construct
  source 1..9: note = Description of Artificial Sequence: Synthetic peptide; note = XENP021606 vhCDR3
RGVRQALDY

SEQ ID NO: 27269 - protein, 214 aa, synthetic construct; identical to SEQ ID NO: 26719
  source 1..214: note = Description of Artificial Sequence: Synthetic polypeptide; note = XENP021606 2A11_H1.37_L2.35_Fab Light Chain

SEQ ID NO: 27270 - protein, 107 aa, synthetic construct; identical to SEQ ID NO: 26720
  source 1..107: note = Description of Artificial Sequence: Synthetic polypeptide; note = VL of XENP021606

SEQ ID NO: 27271 - protein, 11 aa, synthetic construct
  source 1..11: note = Description of Artificial Sequence: Synthetic peptide; note = XENP021606 vlCDR1
QASQDIGNYLN

SEQ ID NO: 27272 - protein, 7 aa, synthetic construct
  source 1..7: note = Description of Artificial Sequence: Synthetic peptide; note = XENP021606 vlCDR2
FTSRLHS

SEQ ID NO: 27273 - protein, 9 aa, synthetic construct
  source 1..9: note = Description of Artificial Sequence: Synthetic peptide; note = XENP021606 vlCDR3
QQGNTLPYT

SEQ ID NO: 27274 - protein, 223 aa, synthetic construct; identical to SEQ ID NO: 25574
  source 1..223: note = Description of Artificial Sequence: Synthetic polypeptide; note = XENP021607 2A11_H1.37_L2.47_Fab Heavy Chain

SEQ ID NO: 27275 - protein, 118 aa, synthetic construct; identical to SEQ ID NO: 25575
  source 1..118: note = Description of Artificial Sequence: Synthetic polypeptide; note = VH of XENP021607

SEQ ID NO: 27276 - protein, 5 aa, synthetic construct
  source 1..5: note = Description of Artificial Sequence: Synthetic peptide; note = XENP021607 vhCDR1
DYFMH

SEQ ID NO: 27277 - protein, 17 aa, synthetic construct
  source 1..17: note = Description of Artificial Sequence: Synthetic peptide; note = XENP021607 vhCDR2
WIDPENGDTEYAPKFQG

SEQ ID NO: 27278 - protein, 9 aa, synthetic construct
  source 1..9: note = Description of Artificial Sequence: Synthetic peptide; note = XENP021607 vhCDR3
RGVRQALDY

SEQ ID NO: 27279 - protein, 214 aa, synthetic construct; identical to SEQ ID NO: 22039
  source 1..214: note = Description of Artificial Sequence: Synthetic polypeptide; note = XENP021607 2A11_H1.37_L2.47_Fab Light Chain

SEQ ID NO: 27280 - protein, 107 aa, synthetic construct; identical to SEQ ID NO: 22040
  source 1..107: note = Description of Artificial Sequence: Synthetic polypeptide; note = VL of XENP021607

SEQ ID NO: 27281 - protein, 11 aa, synthetic construct
  source 1..11: note = Description of Artificial Sequence: Synthetic peptide; note = XENP021607 vlCDR1
QASQDIGNYLN

SEQ ID NO: 27282 - protein, 7 aa, synthetic construct
  source 1..7: note = Description of Artificial Sequence: Synthetic peptide; note = XENP021607 vlCDR2
YTSHLHS

SEQ ID NO: 27283 - protein, 9 aa, synthetic construct
  source 1..9: note = Description of Artificial Sequence: Synthetic peptide; note = XENP021607 vlCDR3
QQGNTLPYT

SEQ ID NO: 27284 - protein, 223 aa, synthetic construct; identical to SEQ ID NO: 25574
  source 1..223: note = Description of Artificial Sequence: Synthetic polypeptide; note = XENP021608 2A11_H1.37_L2.50_Fab Heavy Chain

SEQ ID NO: 27285 - protein, 118 aa, synthetic construct; identical to SEQ ID NO: 25575
  source 1..118: note = Description of Artificial Sequence: Synthetic polypeptide; note = VH of XENP021608

SEQ ID NO: 27286 - protein, 5 aa, synthetic construct
  source 1..5: note = Description of Artificial Sequence: Synthetic peptide; note = XENP021608 vhCDR1
DYFMH

SEQ ID NO: 27287 - protein, 17 aa, synthetic construct
  source 1..17: note = Description of Artificial Sequence: Synthetic peptide; note = XENP021608 vhCDR2
WIDPENGDTEYAPKFQG

SEQ ID NO: 27288 - protein, 9 aa, synthetic construct
  source 1..9: note = Description of Artificial Sequence: Synthetic peptide; note = XENP021608 vhCDR3
RGVRQALDY

SEQ ID NO: 27289 - protein, 214 aa, synthetic construct; identical to SEQ ID NO: 22059
  source 1..214: note = Description of Artificial Sequence: Synthetic polypeptide; note = XENP021608 2A11_H1.37_L2.50_Fab Light Chain

SEQ ID NO: 27290 - protein, 107 aa, synthetic construct; identical to SEQ ID NO: 22060
  source 1..107: note = Description of Artificial Sequence: Synthetic polypeptide; note = VL of XENP021608

SEQ ID NO: 27291 - protein, 11 aa, synthetic construct
  source 1..11: note = Description of Artificial Sequence: Synthetic peptide; note = XENP021608 vlCDR1
QASQDIGNYLN

SEQ ID NO: 27292 - protein, 7 aa, synthetic construct
  source 1..7: note = Description of Artificial Sequence: Synthetic peptide; note = XENP021608 vlCDR2
YTSYLHS

SEQ ID NO: 27293 - protein, 9 aa, synthetic construct
  source 1..9: note = Description of Artificial Sequence: Synthetic peptide; note = XENP021608 vlCDR3
QQGNTLPYT

SEQ ID NO: 27294 - protein, 223 aa, synthetic construct; identical to SEQ ID NO: 25844
  source 1..223: note = Description of Artificial Sequence: Synthetic polypeptide; note = XENP021609 2A11_H1.64_L2.35_Fab Heavy Chain

SEQ ID NO: 27295 - protein, 118 aa, synthetic construct; identical to SEQ ID NO: 25845
  source 1..118: note = Description of Artificial Sequence: Synthetic polypeptide; note = VH of XENP021609

SEQ ID NO: 27296 - protein, 5 aa, synthetic construct
  source 1..5: note = Description of Artificial Sequence: Synthetic peptide; note = XENP021609 vhCDR1
DYYMH

SEQ ID NO: 27297 - protein, 17 aa, synthetic construct
  source 1..17: note = Description of Artificial Sequence: Synthetic peptide; note = XENP021609 vhCDR2
WIDPYNGDTEYAPKFQG

SEQ ID NO: 27298 - protein, 9 aa, synthetic construct
  source 1..9: note = Description of Artificial Sequence: Synthetic peptide; note = XENP021609 vhCDR3
RGVRQALDY

SEQ ID NO: 27299 - protein, 214 aa, synthetic construct; identical to SEQ ID NO: 26719
  source 1..214: note = Description of Artificial Sequence: Synthetic polypeptide; note = XENP021609 2A11_H1.64_L2.35_Fab Light Chain

SEQ ID NO: 27300 - protein, 107 aa, synthetic construct; identical to SEQ ID NO: 26720
  source 1..107: note = Description of Artificial Sequence: Synthetic polypeptide; note = VL of XENP021609

SEQ ID NO: 27301 - protein, 11 aa, synthetic construct
  source 1..11: note = Description of Artificial Sequence: Synthetic peptide; note = XENP021609 vlCDR1
QASQDIGNYLN

SEQ ID NO: 27302 - protein, 7 aa, synthetic construct
  source 1..7: note = Description of Artificial Sequence: Synthetic peptide; note = XENP021609 vlCDR2
FTSRLHS

SEQ ID NO: 27303 - protein, 9 aa, synthetic construct
  source 1..9: note = Description of Artificial Sequence: Synthetic peptide; note = XENP021609 vlCDR3
QQGNTLPYT

SEQ ID NO: 27304 - protein, 223 aa, synthetic construct; identical to SEQ ID NO: 25844
  source 1..223: note = Description of Artificial Sequence: Synthetic polypeptide; note = XENP021610 2A11_H1.64_L2.47_Fab Heavy Chain

SEQ ID NO: 27305 - protein, 118 aa, synthetic construct; identical to SEQ ID NO: 25845
  source 1..118: note = Description of Artificial Sequence: Synthetic polypeptide; note = VH of XENP021610

SEQ ID NO: 27306 - protein, 5 aa, synthetic construct
  source 1..5: note = Description of Artificial Sequence: Synthetic peptide; note = XENP021610 vhCDR1
DYYMH

SEQ ID NO: 27307 - protein, 17 aa, synthetic construct
  source 1..17: note = Description of Artificial Sequence: Synthetic peptide; note = XENP021610 vhCDR2
WIDPYNGDTEYAPKFQG

SEQ ID NO: 27308 - protein, 9 aa, synthetic construct
  source 1..9: note = Description of Artificial Sequence: Synthetic peptide; note = XENP021610 vhCDR3
RGVRQALDY

SEQ ID NO: 27309 - protein, 214 aa, synthetic construct; identical to SEQ ID NO: 22039
  source 1..214: note = Description of Artificial Sequence: Synthetic polypeptide; note = XENP021610 2A11_H1.64_L2.47_Fab Light Chain

SEQ ID NO: 27310 - protein, 107 aa, synthetic construct; identical to SEQ ID NO: 22040
  source 1..107: note = Description of Artificial Sequence: Synthetic polypeptide; note = VL of XENP021610

SEQ ID NO: 27311 - protein, 11 aa, synthetic construct
  source 1..11: note = Description of Artificial Sequence: Synthetic peptide; note = XENP021610 vlCDR1
QASQDIGNYLN

SEQ ID NO: 27312 - protein, 7 aa, synthetic construct
  source 1..7: note = Description of Artificial Sequence: Synthetic peptide; note = XENP021610 vlCDR2
YTSHLHS

SEQ ID NO: 27313 - protein, 9 aa, synthetic construct
  source 1..9: note = Description of Artificial Sequence: Synthetic peptide; note = XENP021610 vlCDR3
QQGNTLPYT

SEQ ID NO: 27314 - protein, 223 aa, synthetic construct; identical to SEQ ID NO: 25844
  source 1..223: note = Description of Artificial Sequence: Synthetic polypeptide; note = XENP021611 2A11_H1.64_L2.50_Fab Heavy Chain

SEQ ID NO: 27315 - protein, 118 aa, synthetic construct; identical to SEQ ID NO: 25845
  source 1..118: note = Description of Artificial Sequence: Synthetic polypeptide; note = VH of XENP021611

SEQ ID NO: 27316 - protein, 5 aa, synthetic construct
  source 1..5: note = Description of Artificial Sequence: Synthetic peptide; note = XENP021611 vhCDR1
DYYMH

SEQ ID NO: 27317 - protein, 17 aa, synthetic construct
  source 1..17: note = Description of Artificial Sequence: Synthetic peptide; note = XENP021611 vhCDR2
WIDPYNGDTEYAPKFQG

SEQ ID NO: 27318 - protein, 9 aa, synthetic construct
  source 1..9: note = Description of Artificial Sequence: Synthetic peptide; note = XENP021611 vhCDR3
RGVRQALDY

SEQ ID NO: 27319 - protein, 214 aa, synthetic construct; identical to SEQ ID NO: 22059
  source 1..214: note = Description of Artificial Sequence: Synthetic polypeptide; note = XENP021611 2A11_H1.64_L2.50_Fab Light Chain

SEQ ID NO: 27320 - protein, 107 aa, synthetic construct; identical to SEQ ID NO: 22060
  source 1..107: note = Description of Artificial Sequence: Synthetic polypeptide; note = VL of XENP021611

SEQ ID NO: 27321 - protein, 11 aa, synthetic construct
  source 1..11: note = Description of Artificial Sequence: Synthetic peptide; note = XENP021611 vlCDR1
QASQDIGNYLN

SEQ ID NO: 27322 - protein, 7 aa, synthetic construct
  source 1..7: note = Description of Artificial Sequence: Synthetic peptide; note = XENP021611 vlCDR2
YTSYLHS

SEQ ID NO: 27323 - protein, 9 aa, synthetic construct
  source 1..9: note = Description of Artificial Sequence: Synthetic peptide; note = XENP021611 vlCDR3
QQGNTLPYT

SEQ ID NO: 27324 - protein, 223 aa, synthetic construct; identical to SEQ ID NO: 25904
  source 1..223: note = Description of Artificial Sequence: Synthetic polypeptide; note = XENP021612 2A11_H1.70_L2.35_Fab Heavy Chain

SEQ ID NO: 27325 - protein, 118 aa, synthetic construct; identical to SEQ ID NO: 25905
  source 1..118: note = Description of Artificial Sequence: Synthetic polypeptide; note = VH of XENP021612

SEQ ID NO: 27326 - protein, 5 aa, synthetic construct
  source 1..5: note = Description of Artificial Sequence: Synthetic peptide; note = XENP021612 vhCDR1
DYYMH

SEQ ID NO: 27327 - protein, 17 aa, synthetic construct
  source 1..17: note = Description of Artificial Sequence: Synthetic peptide; note = XENP021612 vhCDR2
WIDPELGDTEYAPKFQG

SEQ ID NO: 27328 - protein, 9 aa, synthetic construct
  source 1..9: note = Description of Artificial Sequence: Synthetic peptide; note = XENP021612 vhCDR3
RGVRQALDY

SEQ ID NO: 27329 - protein, 214 aa, synthetic construct; identical to SEQ ID NO: 26719
  source 1..214: note = Description of Artificial Sequence: Synthetic polypeptide; note = XENP021612 2A11_H1.70_L2.35_Fab Light Chain

SEQ ID NO: 27330 - protein, 107 aa, synthetic construct; identical to SEQ ID NO: 26720
  source 1..107: note = Description of Artificial Sequence: Synthetic polypeptide; note = VL of XENP021612

SEQ ID NO: 27331 - protein, 11 aa, synthetic construct
  source 1..11: note = Description of Artificial Sequence: Synthetic peptide; note = XENP021612 vlCDR1
QASQDIGNYLN

SEQ ID NO: 27332 - protein, 7 aa, synthetic construct
  source 1..7: note = Description of Artificial Sequence: Synthetic peptide; note = XENP021612 vlCDR2
FTSRLHS

SEQ ID NO: 27333 - protein, 9 aa, synthetic construct
  source 1..9: note = Description of Artificial Sequence: Synthetic peptide; note = XENP021612 vlCDR3
QQGNTLPYT

SEQ ID NO: 27334 - protein, 223 aa, synthetic construct; identical to SEQ ID NO: 25904
  source 1..223: note = Description of Artificial Sequence: Synthetic polypeptide; note = XENP021613 2A11_H1.70_L2.47_Fab Heavy Chain

SEQ ID NO: 27335 - protein, 118 aa, synthetic construct; identical to SEQ ID NO: 25905
  source 1..118: note = Description of Artificial Sequence: Synthetic polypeptide; note = VH of XENP021613

SEQ ID NO: 27336 - protein, 5 aa, synthetic construct
  source 1..5: note = Description of Artificial Sequence: Synthetic peptide; note = XENP021613 vhCDR1
DYYMH

SEQ ID NO: 27337 - protein, 17 aa, synthetic construct
  source 1..17: note = Description of Artificial Sequence: Synthetic peptide; note = XENP021613 vhCDR2
WIDPELGDTEYAPKFQG

SEQ ID NO: 27338 - protein, 9 aa, synthetic construct
  source 1..9: note = Description of Artificial Sequence: Synthetic peptide; note = XENP021613 vhCDR3
RGVRQALDY

SEQ ID NO: 27339 - protein, 214 aa, synthetic construct; identical to SEQ ID NO: 22039
  source 1..214: note = Description of Artificial Sequence: Synthetic polypeptide; note = XENP021613 2A11_H1.70_L2.47_Fab Light Chain

SEQ ID NO: 27340 - protein, 107 aa, synthetic construct; identical to SEQ ID NO: 22040
  source 1..107: note = Description of Artificial Sequence: Synthetic polypeptide; note = VL of XENP021613

SEQ ID NO: 27341 - protein, 11 aa, synthetic construct
  source 1..11: note = Description of Artificial Sequence: Synthetic peptide; note = XENP021613 vlCDR1
QASQDIGNYLN

SEQ ID NO: 27342 - protein, 7 aa, synthetic construct
  source 1..7: note = Description of Artificial Sequence: Synthetic peptide; note = XENP021613 vlCDR2
YTSHLHS

SEQ ID NO: 27343 - protein, 9 aa, synthetic construct
  source 1..9: note = Description of Artificial Sequence: Synthetic peptide; note = XENP021613 vlCDR3
QQGNTLPYT

SEQ ID NO: 27344 - protein, 223 aa, synthetic construct; identical to SEQ ID NO: 25904
  source 1..223: note = Description of Artificial Sequence: Synthetic polypeptide; note = XENP021614 2A11_H1.70_L2.50_Fab Heavy Chain

SEQ ID NO: 27345 - protein, 118 aa, synthetic construct; identical to SEQ ID NO: 25905
  source 1..118: note = Description of Artificial Sequence: Synthetic polypeptide; note = VH of XENP021614

SEQ ID NO: 27346 - protein, 5 aa, synthetic construct
  source 1..5: note = Description of Artificial Sequence: Synthetic peptide; note = XENP021614 vhCDR1
DYYMH

SEQ ID NO: 27347 - protein, 17 aa, synthetic construct
  source 1..17: note = Description of Artificial Sequence: Synthetic peptide; note = XENP021614 vhCDR2
WIDPELGDTEYAPKFQG

SEQ ID NO: 27348 - protein, 9 aa, synthetic construct
  source 1..9: note = Description of Artificial Sequence: Synthetic peptide; note = XENP021614 vhCDR3
RGVRQALDY

SEQ ID NO: 27349 - protein, 214 aa, synthetic construct; identical to SEQ ID NO: 22059
  source 1..214: note = Description of Artificial Sequence: Synthetic polypeptide; note = XENP021614 2A11_H1.70_L2.50_Fab Light Chain

SEQ ID NO: 27350 - protein, 107 aa, synthetic construct; identical to SEQ ID NO: 22060
  source 1..107: note = Description of Artificial Sequence: Synthetic polypeptide; note = VL of XENP021614

SEQ ID NO: 27351 - protein, 11 aa, synthetic construct
  source 1..11: note = Description of Artificial Sequence: Synthetic peptide; note = XENP021614 vlCDR1
QASQDIGNYLN

SEQ ID NO: 27352 - protein, 7 aa, synthetic construct
  source 1..7: note = Description of Artificial Sequence: Synthetic peptide; note = XENP021614 vlCDR2
YTSYLHS

SEQ ID NO: 27353 - protein, 9 aa, synthetic construct
  source 1..9: note = Description of Artificial Sequence: Synthetic peptide; note = XENP021614 vlCDR3
QQGNTLPYT

SEQ ID NO: 27354 - protein, 223 aa, synthetic construct; identical to SEQ ID NO: 26254
  source 1..223: note = Description of Artificial Sequence: Synthetic polypeptide; note = XENP021615 2A11_H1.105_L2.35_Fab Heavy Chain

SEQ ID NO: 27355 - protein, 118 aa, synthetic construct; identical to SEQ ID NO: 26255
  source 1..118: note = Description of Artificial Sequence: Synthetic polypeptide; note = VH of XENP021615

SEQ ID NO: 27356 - protein, 5 aa, synthetic construct
  source 1..5: note = Description of Artificial Sequence: Synthetic peptide; note = XENP021615 vhCDR1
DYYMH

SEQ ID NO: 27357 - protein, 17 aa, synthetic construct
  source 1..17: note = Description of Artificial Sequence: Synthetic peptide; note = XENP021615 vhCDR2
WIDPENGDTEYAPKFQG

SEQ ID NO: 27358 - protein, 9 aa, synthetic construct
  source 1..9: note = Description of Artificial Sequence: Synthetic peptide; note = XENP021615 vhCDR3
RGVYQALDY

SEQ ID NO: 27359 - protein, 214 aa, synthetic construct; identical to SEQ ID NO: 26719
  source 1..214: note = Description of Artificial Sequence: Synthetic polypeptide; note = XENP021615 2A11_H1.105_L2.35_Fab Light Chain

SEQ ID NO: 27360 - protein, 107 aa, synthetic construct; identical to SEQ ID NO: 26720
  source 1..107: note = Description of Artificial Sequence: Synthetic polypeptide; note = VL of XENP021615

SEQ ID NO: 27361 - protein, 11 aa, synthetic construct
  source 1..11: note = Description of Artificial Sequence: Synthetic peptide; note = XENP021615 vlCDR1
QASQDIGNYLN

SEQ ID NO: 27362 - protein, 7 aa, synthetic construct
  source 1..7: note = Description of Artificial Sequence: Synthetic peptide; note = XENP021615 vlCDR2
FTSRLHS

SEQ ID NO: 27363 - protein, 9 aa, synthetic construct
  source 1..9: note = Description of Artificial Sequence: Synthetic peptide; note = XENP021615 vlCDR3
QQGNTLPYT

SEQ ID NO: 27364 - protein, 223 aa, synthetic construct; identical to SEQ ID NO: 26254
  source 1..223: note = Description of Artificial Sequence: Synthetic polypeptide; note = XENP021616 2A11_H1.105_L2.47_Fab Heavy Chain

SEQ ID NO: 27365 - protein, 118 aa, synthetic construct; identical to SEQ ID NO: 26255
  source 1..118: note = Description of Artificial Sequence: Synthetic polypeptide; note = VH of XENP021616

SEQ ID NO: 27366 - protein, 5 aa, synthetic construct
  source 1..5: note = Description of Artificial Sequence: Synthetic peptide; note = XENP021616 vhCDR1
DYYMH

SEQ ID NO: 27367 - protein, 17 aa, synthetic construct
  source 1..17: note = Description of Artificial Sequence: Synthetic peptide; note = XENP021616 vhCDR2
WIDPENGDTEYAPKFQG

SEQ ID NO: 27368 - protein, 9 aa, synthetic construct
  source 1..9: note = Description of Artificial Sequence: Synthetic peptide; note = XENP021616 vhCDR3
RGVYQALDY

SEQ ID NO: 27369 - protein, 214 aa, synthetic construct; identical to SEQ ID NO: 22039
  source 1..214: note = Description of Artificial Sequence: Synthetic polypeptide; note = XENP021616 2A11_H1.105_L2.47_Fab Light Chain

SEQ ID NO: 27370 - protein, 107 aa, synthetic construct; identical to SEQ ID NO: 22040
  source 1..107: note = Description of Artificial Sequence: Synthetic polypeptide; note = VL of XENP021616

SEQ ID NO: 27371 - protein, 11 aa, synthetic construct
  source 1..11: note = Description of Artificial Sequence: Synthetic peptide; note = XENP021616 vlCDR1
QASQDIGNYLN

SEQ ID NO: 27372 - protein, 7 aa, synthetic construct
  source 1..7: note = Description of Artificial Sequence: Synthetic peptide; note = XENP021616 vlCDR2
YTSHLHS

SEQ ID NO: 27373 - protein, 9 aa, synthetic construct
  source 1..9: note = Description of Artificial Sequence: Synthetic peptide; note = XENP021616 vlCDR3
QQGNTLPYT

SEQ ID NO: 27374 - protein, 223 aa, synthetic construct; identical to SEQ ID NO: 26254
  source 1..223: note = Description of Artificial Sequence: Synthetic polypeptide; note = XENP021617 2A11_H1.105_L2.50_Fab Heavy Chain

SEQ ID NO: 27375 - protein, 118 aa, synthetic construct; identical to SEQ ID NO: 26255
  source 1..118: note = Description of Artificial Sequence: Synthetic polypeptide; note = VH of XENP021617

SEQ ID NO: 27376 - protein, 5 aa, synthetic construct
  source 1..5: note = Description of Artificial Sequence: Synthetic peptide; note = XENP021617 vhCDR1
DYYMH

SEQ ID NO: 27377 - protein, 17 aa, synthetic construct
  source 1..17: note = Description of Artificial Sequence: Synthetic peptide; note = XENP021617 vhCDR2
WIDPENGDTEYAPKFQG

SEQ ID NO: 27378 - protein, 9 aa, synthetic construct
  source 1..9: note = Description of Artificial Sequence: Synthetic peptide; note = XENP021617 vhCDR3
RGVYQALDY

SEQ ID NO: 27379 - protein, 214 aa, synthetic construct; identical to SEQ ID NO: 22059
  source 1..214: note = Description of Artificial Sequence: Synthetic polypeptide; note = XENP021617 2A11_H1.105_L2.50_Fab Light Chain

SEQ ID NO: 27380 - protein, 107 aa, synthetic construct; identical to SEQ ID NO: 22060
  source 1..107: note = Description of Artificial Sequence: Synthetic polypeptide; note = VL of XENP021617

SEQ ID NO: 27381 - protein, 11 aa, synthetic construct
  source 1..11: note = Description of Artificial Sequence: Synthetic peptide; note = XENP021617 vlCDR1
QASQDIGNYLN

SEQ ID NO: 27382 - protein, 7 aa, synthetic construct
  source 1..7: note = Description of Artificial Sequence: Synthetic peptide; note = XENP021617 vlCDR2
YTSYLHS

SEQ ID NO: 27383 - protein, 9 aa, synthetic construct
  source 1..9: note = Description of Artificial Sequence: Synthetic peptide; note = XENP021617 vlCDR3
QQGNTLPYT

SEQ ID NO: 27384 - protein, 223 aa, synthetic construct
  source 1..223: note = Description of Artificial Sequence: Synthetic polypeptide; note = XENP021705 2A11_H1.117_L2_Fab Heavy Chain
EVQLVQSGAEVKKPGATVKISCKASGFNIKHYFMHWVQQAPGKGLEWMGWIDPYLGDTEYAPKFQGRVTITADTSTNTAYMELSSLRSEDTAVYYCYARGVRQALDYWGQGTLVTVSSASTKGPSVFPLAPSSKSTSGGTAALGCLVKDYFPEPVTVSWNSGALTSGVHTFPAVLQSSGLYSLSSVVTVPSSSLGTQTYICNVNHKPSNTKVDKKVEPKSCGS

SEQ ID NO: 27385 - protein, 118 aa, synthetic construct; identical to SEQ ID NO: 22105
  source 1..118: note = Description of Artificial Sequence: Synthetic polypeptide; note = VH of XENP021705

SEQ ID NO: 27386 - protein, 5 aa, synthetic construct
  source 1..5: note = Description of Artificial Sequence: Synthetic peptide; note = XENP021705 vhCDR1
HYFMH

SEQ ID NO: 27387 - protein, 17 aa, synthetic construct
  source 1..17: note = Description of Artificial Sequence: Synthetic peptide; note = XENP021705 vhCDR2
WIDPYLGDTEYAPKFQG

SEQ ID NO: 27388 - protein, 9 aa, synthetic construct
  source 1..9: note = Description of Artificial Sequence: Synthetic peptide; note = XENP021705 vhCDR3
RGVRQALDY

SEQ ID NO: 27389 - protein, 214 aa, synthetic construct; identical to SEQ ID NO: 17250
  source 1..214: note = Description of Artificial Sequence: Synthetic polypeptide; note = XENP021705 2A11_H1.117_L2_Fab Light Chain

SEQ ID NO: 27390 - protein, 107 aa, synthetic construct; identical to SEQ ID NO: 17251
  source 1..107: note = Description of Artificial Sequence: Synthetic polypeptide; note = VL of XENP021705

SEQ ID NO: 27391 - protein, 11 aa, synthetic construct
  source 1..11: note = Description of Artificial Sequence: Synthetic peptide; note = XENP021705 vlCDR1
QASQDIGNYLN

SEQ ID NO: 27392 - protein, 7 aa, synthetic construct
  source 1..7: note = Description of Artificial Sequence: Synthetic peptide; note = XENP021705 vlCDR2
YTSRLHS

SEQ ID NO: 27393 - protein, 9 aa, synthetic construct
  source 1..9: note = Description of Artificial Sequence: Synthetic peptide; note = XENP021705 vlCDR3
QQGNTLPYT

SEQ ID NO: 27394 - protein, 223 aa, synthetic construct
  source 1..223: note = Description of Artificial Sequence: Synthetic polypeptide; note = XENP021706 2A11_H1.118_L2_Fab Heavy Chain
EVQLVQSGAEVKKPGATVKISCKASGFNIKHYFMHWVQQAPGKGLEWMGWIDPYTGDTEYAPKFQGRVTITADTSTNTAYMELSSLRSEDTAVYYCYARGVRQALDYWGQGTLVTVSSASTKGPSVFPLAPSSKSTSGGTAALGCLVKDYFPEPVTVSWNSGALTSGVHTFPAVLQSSGLYSLSSVVTVPSSSLGTQTYICNVNHKPSNTKVDKKVEPKSCGS

SEQ ID NO: 27395 - protein, 118 aa, synthetic construct
  source 1..118: note = Description of Artificial Sequence: Synthetic polypeptide; note = VH of XENP021706
EVQLVQSGAEVKKPGATVKISCKASGFNIKHYFMHWVQQAPGKGLEWMGWIDPYTGDTEYAPKFQGRVTITADTSTNTAYMELSSLRSEDTAVYYCYARGVRQALDYWGQGTLVTVSS

SEQ ID NO: 27396 - protein, 5 aa, synthetic construct
  source 1..5: note = Description of Artificial Sequence: Synthetic peptide; note = XENP021706 vhCDR1
HYFMH

SEQ ID NO: 27397 - protein, 17 aa, synthetic construct
  source 1..17: note = Description of Artificial Sequence: Synthetic peptide; note = XENP021706 vhCDR2
WIDPYTGDTEYAPKFQG

SEQ ID NO: 27398 - protein, 9 aa, synthetic construct
  source 1..9: note = Description of Artificial Sequence: Synthetic peptide; note = XENP021706 vhCDR3
RGVRQALDY

SEQ ID NO: 27399 - protein, 214 aa, synthetic construct; identical to SEQ ID NO: 17250
  source 1..214: note = Description of Artificial Sequence: Synthetic polypeptide; note = XENP021706 2A11_H1.118_L2_Fab Light Chain

SEQ ID NO: 27400 - protein, 107 aa, synthetic construct; identical to SEQ ID NO: 17251
  source 1..107: note = Description of Artificial Sequence: Synthetic polypeptide; note = VL of XENP021706

SEQ ID NO: 27401 - protein, 11 aa, synthetic construct
  source 1..11: note = Description of Artificial Sequence: Synthetic peptide; note = XENP021706 vlCDR1
QASQDIGNYLN

SEQ ID NO: 27402 - protein, 7 aa, synthetic construct
  source 1..7: note = Description of Artificial Sequence: Synthetic peptide; note = XENP021706 vlCDR2
YTSRLHS

SEQ ID NO: 27403 - protein, 9 aa, synthetic construct
  source 1..9: note = Description of Artificial Sequence: Synthetic peptide; note = XENP021706 vlCDR3
QQGNTLPYT

SEQ ID NO: 27404 - protein, 223 aa, synthetic construct
  source 1..223: note = Description of Artificial Sequence: Synthetic polypeptide; note = XENP021707 2A11_H1.119_L2_Fab Heavy Chain
EVQLVQSGAEVKKPGATVKISCKASGFNIKHYFMHWVQQAPGKGLEWMGWIDPELGDTEYAPKFQGRVTITADTSTNTAYMELSSLRSEDTAVYYCYARGVRQALDYWGQGTLVTVSSASTKGPSVFPLAPSSKSTSGGTAALGCLVKDYFPEPVTVSWNSGALTSGVHTFPAVLQSSGLYSLSSVVTVPSSSLGTQTYICNVNHKPSNTKVDKKVEPKSCGS

SEQ ID NO: 27405 - protein, 118 aa, synthetic construct
  source 1..118: note = Description of Artificial Sequence: Synthetic polypeptide; note = VH of XENP021707
EVQLVQSGAEVKKPGATVKISCKASGFNIKHYFMHWVQQAPGKGLEWMGWIDPELGDTEYAPKFQGRVTITADTSTNTAYMELSSLRSEDTAVYYCYARGVRQALDYWGQGTLVTVSS

SEQ ID NO: 27406 - protein, 5 aa, synthetic construct
  source 1..5: note = Description of Artificial Sequence: Synthetic peptide; note = XENP021707 vhCDR1
HYFMH

SEQ ID NO: 27407 - protein, 17 aa, synthetic construct
  source 1..17: note = Description of Artificial Sequence: Synthetic peptide; note = XENP021707 vhCDR2
WIDPELGDTEYAPKFQG

SEQ ID NO: 27408 - protein, 9 aa, synthetic construct
  source 1..9: note = Description of Artificial Sequence: Synthetic peptide; note = XENP021707 vhCDR3
RGVRQALDY

SEQ ID NO: 27409 - protein, 214 aa, synthetic construct; identical to SEQ ID NO: 17250
  source 1..214: note = Description of Artificial Sequence: Synthetic polypeptide; note = XENP021707 2A11_H1.119_L2_Fab Light Chain

SEQ ID NO: 27410 - protein, 107 aa, synthetic construct; identical to SEQ ID NO: 17251
  source 1..107: note = Description of Artificial Sequence: Synthetic polypeptide; note = VL of XENP021707

SEQ ID NO: 27411 - protein, 11 aa, synthetic construct
  source 1..11: note = Description of Artificial Sequence: Synthetic peptide; note = XENP021707 vlCDR1
QASQDIGNYLN

SEQ ID NO: 27412 - protein, 7 aa, synthetic construct
  source 1..7: note = Description of Artificial Sequence: Synthetic peptide; note = XENP021707 vlCDR2
YTSRLHS

SEQ ID NO: 27413 - protein, 9 aa, synthetic construct
  source 1..9: note = Description of Artificial Sequence: Synthetic peptide; note = XENP021707 vlCDR3
QQGNTLPYT

SEQ ID NO: 27414 - protein, 223 aa, synthetic construct
  source 1..223: note = Description of Artificial Sequence: Synthetic polypeptide; note = XENP021708 2A11_H1.120_L2_Fab Heavy Chain
EVQLVQSGAEVKKPGATVKISCKASGFNIKHYFMHWVQQAPGKGLEWMGWIDPETGDTEYAPKFQGRVTITADTSTNTAYMELSSLRSEDTAVYYCYARGVRQALDYWGQGTLVTVSSASTKGPSVFPLAPSSKSTSGGTAALGCLVKDYFPEPVTVSWNSGALTSGVHTFPAVLQSSGLYSLSSVVTVPSSSLGTQTYICNVNHKPSNTKVDKKVEPKSCGS

SEQ ID NO: 27415 - protein, 118 aa, synthetic construct
  source 1..118: note = Description of Artificial Sequence: Synthetic polypeptide; note = VH of XENP021708
EVQLVQSGAEVKKPGATVKISCKASGFNIKHYFMHWVQQAPGKGLEWMGWIDPETGDTEYAPKFQGRVTITADTSTNTAYMELSSLRSEDTAVYYCYARGVRQALDYWGQGTLVTVSS

SEQ ID NO: 27416 - protein, 5 aa, synthetic construct
  source 1..5: note = Description of Artificial Sequence: Synthetic peptide; note = XENP021708 vhCDR1
HYFMH

SEQ ID NO: 27417 - protein, 17 aa, synthetic construct
  source 1..17: note = Description of Artificial Sequence: Synthetic peptide; note = XENP021708 vhCDR2
WIDPETGDTEYAPKFQG

SEQ ID NO: 27418 - protein, 9 aa, synthetic construct
  source 1..9: note = Description of Artificial Sequence: Synthetic peptide; note = XENP021708 vhCDR3
RGVRQALDY

SEQ ID NO: 27419 - protein, 214 aa, synthetic construct; identical to SEQ ID NO: 17250
  source 1..214: note = Description of Artificial Sequence: Synthetic polypeptide; note = XENP021708 2A11_H1.120_L2_Fab Light Chain

SEQ ID NO: 27420 - protein, 107 aa, synthetic construct; identical to SEQ ID NO: 17251
  source 1..107: note = Description of Artificial Sequence: Synthetic polypeptide; note = VL of XENP021708

SEQ ID NO: 27421 - protein, 11 aa, synthetic construct
  source 1..11: note = Description of Artificial Sequence: Synthetic peptide; note = XENP021708 vlCDR1
QASQDIGNYLN

SEQ ID NO: 27422 - protein, 7 aa, synthetic construct
  source 1..7: note = Description of Artificial Sequence: Synthetic peptide; note = XENP021708 vlCDR2
YTSRLHS

SEQ ID NO: 27423 - protein, 9 aa, synthetic construct
  source 1..9: note = Description of Artificial Sequence: Synthetic peptide; note = XENP021708 vlCDR3
QQGNTLPYT

SEQ ID NO: 27424 - protein, 223 aa, synthetic construct
  source 1..223: note = Description of Artificial Sequence: Synthetic polypeptide; note = XENP021709 2A11_H1.121_L2_Fab Heavy Chain
EVQLVQSGAEVKKPGATVKISCKASGFNIKHYFMHWVQQAPGKGLEWMGWIDPYLGDTEYAPKFQGRVTITADTSTNTAYMELSSLRSEDTAVYYCYARGVKQALDYWGQGTLVTVSSASTKGPSVFPLAPSSKSTSGGTAALGCLVKDYFPEPVTVSWNSGALTSGVHTFPAVLQSSGLYSLSSVVTVPSSSLGTQTYICNVNHKPSNTKVDKKVEPKSCGS

SEQ ID NO: 27425 - protein, 118 aa, synthetic construct
  source 1..118: note = Description of Artificial Sequence: Synthetic polypeptide; note = VH of XENP021709
EVQLVQSGAEVKKPGATVKISCKASGFNIKHYFMHWVQQAPGKGLEWMGWIDPYLGDTEYAPKFQGRVTITADTSTNTAYMELSSLRSEDTAVYYCYARGVKQALDYWGQGTLVTVSS

SEQ ID NO: 27426 - protein, 5 aa, synthetic construct
  source 1..5: note = Description of Artificial Sequence: Synthetic peptide; note = XENP021709 vhCDR1
HYFMH

SEQ ID NO: 27427 - protein, 17 aa, synthetic construct
  source 1..17: note = Description of Artificial Sequence: Synthetic peptide; note = XENP021709 vhCDR2
WIDPYLGDTEYAPKFQG

SEQ ID NO: 27428 - protein, 9 aa, synthetic construct
  source 1..9: note = Description of Artificial Sequence: Synthetic peptide; note = XENP021709 vhCDR3
RGVKQALDY

SEQ ID NO: 27429 - protein, 214 aa, synthetic construct; identical to SEQ ID NO: 17250
  source 1..214: note = Description of Artificial Sequence: Synthetic polypeptide; note = XENP021709 2A11_H1.121_L2_Fab Light Chain

SEQ ID NO: 27430 - protein, 107 aa, synthetic construct; identical to SEQ ID NO: 17251
  source 1..107: note = Description of Artificial Sequence: Synthetic polypeptide; note = VL of XENP021709

SEQ ID NO: 27431 - protein, 11 aa, synthetic construct
  source 1..11: note = Description of Artificial Sequence: Synthetic peptide; note = XENP021709 vlCDR1
QASQDIGNYLN

SEQ ID NO: 27432 - protein, 7 aa, synthetic construct
  source 1..7: note = Description of Artificial Sequence: Synthetic peptide; note = XENP021709 vlCDR2
YTSRLHS

SEQ ID NO: 27433 - protein, 9 aa, synthetic construct
  source 1..9: note = Description of Artificial Sequence: Synthetic peptide; note = XENP021709 vlCDR3
QQGNTLPYT

SEQ ID NO: 27434 - protein, 223 aa, synthetic construct
  source 1..223: note = Description of Artificial Sequence: Synthetic polypeptide; note = XENP021710 2A11_H1.122_L2_Fab Heavy Chain
EVQLVQSGAEVKKPGATVKISCKASGFNIKHYFMHWVQQAPGKGLEWMGWIDPYTGDTEYAPKFQGRVTITADTSTNTAYMELSSLRSEDTAVYYCYARGVKQALDYWGQGTLVTVSSASTKGPSVFPLAPSSKSTSGGTAALGCLVKDYFPEPVTVSWNSGALTSGVHTFPAVLQSSGLYSLSSVVTVPSSSLGTQTYICNVNHKPSNTKVDKKVEPKSCGS

SEQ ID NO: 27435 - protein, 118 aa, synthetic construct
  source 1..118: note = Description of Artificial Sequence: Synthetic polypeptide; note = VH of XENP021710
EVQLVQSGAEVKKPGATVKISCKASGFNIKHYFMHWVQQAPGKGLEWMGWIDPYTGDTEYAPKFQGRVTITADTSTNTAYMELSSLRSEDTAVYYCYARGVKQALDYWGQGTLVTVSS

SEQ ID NO: 27436 - protein, 5 aa, synthetic construct
  source 1..5: note = Description of Artificial Sequence: Synthetic peptide; note = XENP021710 vhCDR1
HYFMH

SEQ ID NO: 27437 - protein, 17 aa, synthetic construct
  source 1..17: note = Description of Artificial Sequence: Synthetic peptide; note = XENP021710 vhCDR2
WIDPYTGDTEYAPKFQG

SEQ ID NO: 27438 - protein, 9 aa, synthetic construct
  source 1..9: note = Description of Artificial Sequence: Synthetic peptide; note = XENP021710 vhCDR3
RGVKQALDY

SEQ ID NO: 27439 - protein, 214 aa, synthetic construct; identical to SEQ ID NO: 17250
  source 1..214: note = Description of Artificial Sequence: Synthetic polypeptide; note = XENP021710 2A11_H1.122_L2_Fab Light Chain

SEQ ID NO: 27440 - protein, 107 aa, synthetic construct; identical to SEQ ID NO: 17251
  source 1..107: note = Description of Artificial Sequence: Synthetic polypeptide; note = VL of XENP021710

SEQ ID NO: 27441 - protein, 11 aa, synthetic construct
  source 1..11: note = Description of Artificial Sequence: Synthetic peptide; note = XENP021710 vlCDR1
QASQDIGNYLN

SEQ ID NO: 27442 - protein, 7 aa, synthetic construct
  source 1..7: note = Description of Artificial Sequence: Synthetic peptide; note = XENP021710 vlCDR2
YTSRLHS

SEQ ID NO: 27443 - protein, 9 aa, synthetic construct
  source 1..9: note = Description of Artificial Sequence: Synthetic peptide; note = XENP021710 vlCDR3
QQGNTLPYT

SEQ ID NO: 27444 - protein, 223 aa, synthetic construct
  source 1..223: note = Description of Artificial Sequence: Synthetic polypeptide; note = XENP021711 2A11_H1.123_L2_Fab Heavy Chain
EVQLVQSGAEVKKPGATVKISCKASGFNIKHYFMHWVQQAPGKGLEWMGWIDPELGDTEYAPKFQGRVTITADTSTNTAYMELSSLRSEDTAVYYCYARGVKQALDYWGQGTLVTVSSASTKGPSVFPLAPSSKSTSGGTAALGCLVKDYFPEPVTVSWNSGALTSGVHTFPAVLQSSGLYSLSSVVTVPSSSLGTQTYICNVNHKPSNTKVDKKVEPKSCGS

SEQ ID NO: 27445 - protein, 118 aa, synthetic construct
  source 1..118: note = Description of Artificial Sequence: Synthetic polypeptide; note = VH of XENP021711
EVQLVQSGAEVKKPGATVKISCKASGFNIKHYFMHWVQQAPGKGLEWMGWIDPELGDTEYAPKFQGRVTITADTSTNTAYMELSSLRSEDTAVYYCYARGVKQALDYWGQGTLVTVSS

SEQ ID NO: 27446 - protein, 5 aa, synthetic construct
  source 1..5: note = Description of Artificial Sequence: Synthetic peptide; note = XENP021711 vhCDR1
HYFMH

SEQ ID NO: 27447 - protein, 17 aa, synthetic construct
  source 1..17: note = Description of Artificial Sequence: Synthetic peptide; note = XENP021711 vhCDR2
WIDPELGDTEYAPKFQG

SEQ ID NO: 27448 - protein, 9 aa, synthetic construct
  source 1..9: note = Description of Artificial Sequence: Synthetic peptide; note = XENP021711 vhCDR3
RGVKQALDY

SEQ ID NO: 27449 - protein, 214 aa, synthetic construct; identical to SEQ ID NO: 17250
  source 1..214: note = Description of Artificial Sequence: Synthetic polypeptide; note = XENP021711 2A11_H1.123_L2_Fab Light Chain

SEQ ID NO: 27450 - protein, 107 aa, synthetic construct; identical to SEQ ID NO: 17251
  source 1..107: note = Description of Artificial Sequence: Synthetic polypeptide; note = VL of XENP021711

SEQ ID NO: 27451 - protein, 11 aa, synthetic construct
  source 1..11: note = Description of Artificial Sequence: Synthetic peptide; note = XENP021711 vlCDR1
QASQDIGNYLN

SEQ ID NO: 27452 - protein, 7 aa, synthetic construct
  source 1..7: note = Description of Artificial Sequence: Synthetic peptide; note = XENP021711 vlCDR2
YTSRLHS

SEQ ID NO: 27453 - protein, 9 aa, synthetic construct
  source 1..9: note = Description of Artificial Sequence: Synthetic peptide; note = XENP021711 vlCDR3
QQGNTLPYT

SEQ ID NO: 27454 - protein, 223 aa, synthetic construct
  source 1..223: note = Description of Artificial Sequence: Synthetic polypeptide; note = XENP021712 2A11_H1.124_L2_Fab Heavy Chain
EVQLVQSGAEVKKPGATVKISCKASGFNIKHYFMHWVQQAPGKGLEWMGWIDPETGDTEYAPKFQGRVTITADTSTNTAYMELSSLRSEDTAVYYCYARGVKQALDYWGQGTLVTVSSASTKGPSVFPLAPSSKSTSGGTAALGCLVKDYFPEPVTVSWNSGALTSGVHTFPAVLQSSGLYSLSSVVTVPSSSLGTQTYICNVNHKPSNTKVDKKVEPKSCGS

SEQ ID NO: 27455 - protein, 118 aa, synthetic construct
  source 1..118: note = Description of Artificial Sequence: Synthetic polypeptide; note = VH of XENP021712
EVQLVQSGAEVKKPGATVKISCKASGFNIKHYFMHWVQQAPGKGLEWMGWIDPETGDTEYAPKFQGRVTITADTSTNTAYMELSSLRSEDTAVYYCYARGVKQALDYWGQGTLVTVSS

SEQ ID NO: 27456 - protein, 5 aa, synthetic construct
  source 1..5: note = Description of Artificial Sequence: Synthetic peptide; note = XENP021712 vhCDR1
HYFMH

SEQ ID NO: 27457 - protein, 17 aa, synthetic construct
  source 1..17: note = Description of Artificial Sequence: Synthetic peptide; note = XENP021712 vhCDR2
WIDPETGDTEYAPKFQG

SEQ ID NO: 27458 - protein, 9 aa, synthetic construct
  source 1..9: note = Description of Artificial Sequence: Synthetic peptide; note = XENP021712 vhCDR3
RGVKQALDY

SEQ ID NO: 27459 - protein, 214 aa, synthetic construct; identical to SEQ ID NO: 17250
  source 1..214: note = Description of Artificial Sequence: Synthetic polypeptide; note = XENP021712 2A11_H1.124_L2_Fab Light Chain

SEQ ID NO: 27460 - protein, 107 aa, synthetic construct; identical to SEQ ID NO: 17251
  source 1..107: note = Description of Artificial Sequence: Synthetic polypeptide; note = VL of XENP021712

SEQ ID NO: 27461 - protein, 11 aa, synthetic construct
  source 1..11: note = Description of Artificial Sequence: Synthetic peptide; note = XENP021712 vlCDR1
QASQDIGNYLN

SEQ ID NO: 27462 - protein, 7 aa, synthetic construct
  source 1..7: note = Description of Artificial Sequence: Synthetic peptide; note = XENP021712 vlCDR2
YTSRLHS

SEQ ID NO: 27463 - protein, 9 aa, synthetic construct
  source 1..9: note = Description of Artificial Sequence: Synthetic peptide; note = XENP021712 vlCDR3
QQGNTLPYT

SEQ ID NO: 27464 - protein, 223 aa, synthetic construct
  source 1..223: note = Description of Artificial Sequence: Synthetic polypeptide; note = XENP021713 2A11_H1.126_L2_Fab Heavy Chain
EVQLVQSGAEVKKPGATVKISCKASGFNIKHYFMHWVQQAPGKGLEWMGWIDPYTGDTEYAPKFQGRVTITADTSTNTAYMELSSLRSEDTAVYYCYARGVYQALDYWGQGTLVTVSSASTKGPSVFPLAPSSKSTSGGTAALGCLVKDYFPEPVTVSWNSGALTSGVHTFPAVLQSSGLYSLSSVVTVPSSSLGTQTYICNVNHKPSNTKVDKKVEPKSCGS

SEQ ID NO: 27465 - protein, 118 aa, synthetic construct
  source 1..118: note = Description of Artificial Sequence: Synthetic polypeptide; note = VH of XENP021713
EVQLVQSGAEVKKPGATVKISCKASGFNIKHYFMHWVQQAPGKGLEWMGWIDPYTGDTEYAPKFQGRVTITADTSTNTAYMELSSLRSEDTAVYYCYARGVYQALDYWGQGTLVTVSS

SEQ ID NO: 27466 - protein, 5 aa, synthetic construct
  source 1..5: note = Description of Artificial Sequence: Synthetic peptide; note = XENP021713 vhCDR1
HYFMH

SEQ ID NO: 27467 - protein, 17 aa, synthetic construct
  source 1..17: note = Description of Artificial Sequence: Synthetic peptide; note = XENP021713 vhCDR2
WIDPYTGDTEYAPKFQG

SEQ ID NO: 27468 - protein, 9 aa, synthetic construct
  source 1..9: note = Description of Artificial Sequence: Synthetic peptide; note = XENP021713 vhCDR3
RGVYQALDY

SEQ ID NO: 27469 - protein, 214 aa, synthetic construct; identical to SEQ ID NO: 17250
  source 1..214: note = Description of Artificial Sequence: Synthetic polypeptide; note = XENP021713 2A11_H1.126_L2_Fab Light Chain

SEQ ID NO: 27470 - protein, 107 aa, synthetic construct; identical to SEQ ID NO: 17251
  source 1..107: note = Description of Artificial Sequence: Synthetic polypeptide; note = VL of XENP021713

SEQ ID NO: 27471 - protein, 11 aa, synthetic construct
  source 1..11: note = Description of Artificial Sequence: Synthetic peptide; note = XENP021713 vlCDR1
QASQDIGNYLN

SEQ ID NO: 27472 - protein, 7 aa, synthetic construct
  source 1..7: note = Description of Artificial Sequence: Synthetic peptide; note = XENP021713 vlCDR2
YTSRLHS

SEQ ID NO: 27473 - protein, 9 aa, synthetic construct
  source 1..9: note = Description of Artificial Sequence: Synthetic peptide; note = XENP021713 vlCDR3
QQGNTLPYT

SEQ ID NO: 27474 - protein, 223 aa, synthetic construct
  source 1..223: note = Description of Artificial Sequence: Synthetic polypeptide; note = XENP021714 2A11_H1.128_L2_Fab Heavy Chain
EVQLVQSGAEVKKPGATVKISCKASGFNIKHYFMHWVQQAPGKGLEWMGWIDPELGDTEYAPKFQGRVTITADTSTNTAYMELSSLRSEDTAVYYCYARGVYQALDYWGQGTLVTVSSASTKGPSVFPLAPSSKSTSGGTAALGCLVKDYFPEPVTVSWNSGALTSGVHTFPAVLQSSGLYSLSSVVTVPSSSLGTQTYICNVNHKPSNTKVDKKVEPKSCGS

SEQ ID NO: 27475 - protein, 118 aa, synthetic construct
  source 1..118: note = Description of Artificial Sequence: Synthetic polypeptide; note = VH of XENP021714
EVQLVQSGAEVKKPGATVKISCKASGFNIKHYFMHWVQQAPGKGLEWMGWIDPELGDTEYAPKFQGRVTITADTSTNTAYMELSSLRSEDTAVYYCYARGVYQALDYWGQGTLVTVSS

SEQ ID NO: 27476 - protein, 5 aa, synthetic construct
  source 1..5: note = Description of Artificial Sequence: Synthetic peptide; note = XENP021714 vhCDR1
HYFMH

SEQ ID NO: 27477 - protein, 17 aa, synthetic construct
  source 1..17: note = Description of Artificial Sequence: Synthetic peptide; note = XENP021714 vhCDR2
WIDPELGDTEYAPKFQG

SEQ ID NO: 27478 - protein, 9 aa, synthetic construct
  source 1..9: note = Description of Artificial Sequence: Synthetic peptide; note = XENP021714 vhCDR3
RGVYQALDY

SEQ ID NO: 27479 - protein, 214 aa, synthetic construct; identical to SEQ ID NO: 17250
  source 1..214: note = Description of Artificial Sequence: Synthetic polypeptide; note = XENP021714 2A11_H1.128_L2_Fab Light Chain

SEQ ID NO: 27480 - protein, 107 aa, synthetic construct; identical to SEQ ID NO: 17251
  source 1..107: note = Description of Artificial Sequence: Synthetic polypeptide; note = VL of XENP021714

SEQ ID NO: 27481 - protein, 11 aa, synthetic construct
  source 1..11: note = Description of Artificial Sequence: Synthetic peptide; note = XENP021714 vlCDR1
QASQDIGNYLN

SEQ ID NO: 27482 - protein, 7 aa, synthetic construct
  source 1..7: note = Description of Artificial Sequence: Synthetic peptide; note = XENP021714 vlCDR2
YTSRLHS

SEQ ID NO: 27483 - protein, 9 aa, synthetic construct
  source 1..9: note = Description of Artificial Sequence: Synthetic peptide; note = XENP021714 vlCDR3
QQGNTLPYT

SEQ ID NO: 27484 - protein, 223 aa, synthetic construct
  source 1..223: note = Description of Artificial Sequence: Synthetic polypeptide; note = XENP021715 2A11_H1.129_L2_Fab Heavy Chain
EVQLVQSGAEVKKPGATVKISCKASGFNIKHYYMHWVQQAPGKGLEWMGWIDPELGDTEYAPKFQGRVTITADTSTNTAYMELSSLRSEDTAVYYCYARGVRQALDYWGQGTLVTVSSASTKGPSVFPLAPSSKSTSGGTAALGCLVKDYFPEPVTVSWNSGALTSGVHTFPAVLQSSGLYSLSSVVTVPSSSLGTQTYICNVNHKPSNTKVDKKVEPKSCGS

SEQ ID NO: 27485 - protein, 118 aa, synthetic construct
  source 1..118: note = Description of Artificial Sequence: Synthetic polypeptide; note = VH of XENP021715
EVQLVQSGAEVKKPGATVKISCKASGFNIKHYYMHWVQQAPGKGLEWMGWIDPELGDTEYAPKFQGRVTITADTSTNTAYMELSSLRSEDTAVYYCYARGVRQALDYWGQGTLVTVSS

SEQ ID NO: 27486 - protein, 5 aa, synthetic construct
  source 1..5: note = Description of Artificial Sequence: Synthetic peptide; note = XENP021715 vhCDR1
HYYMH

SEQ ID NO: 27487 - protein, 17 aa, synthetic construct
  source 1..17: note = Description of Artificial Sequence: Synthetic peptide; note = XENP021715 vhCDR2
WIDPELGDTEYAPKFQG

SEQ ID NO: 27488 - protein, 9 aa, synthetic construct
  source 1..9: note = Description of Artificial Sequence: Synthetic peptide; note = XENP021715 vhCDR3
RGVRQALDY

SEQ ID NO: 27489 - protein, 214 aa, synthetic construct; identical to SEQ ID NO: 17250
  source 1..214: note = Description of Artificial Sequence: Synthetic polypeptide; note = XENP021715 2A11_H1.129_L2_Fab Light Chain

SEQ ID NO: 27490 - protein, 107 aa, synthetic construct; identical to SEQ ID NO: 17251
  source 1..107: note = Description of Artificial Sequence: Synthetic polypeptide; note = VL of XENP021715

SEQ ID NO: 27491 - protein, 11 aa, synthetic construct
  source 1..11: note = Description of Artificial Sequence: Synthetic peptide; note = XENP021715 vlCDR1
QASQDIGNYLN

SEQ ID NO: 27492 - protein, 7 aa, synthetic construct
  source 1..7: note = Description of Artificial Sequence: Synthetic peptide; note = XENP021715 vlCDR2
YTSRLHS

SEQ ID NO: 27493 - protein, 9 aa, synthetic construct
  source 1..9: note = Description of Artificial Sequence: Synthetic peptide; note = XENP021715 vlCDR3
QQGNTLPYT

SEQ ID NO: 27494 - protein, 223 aa, synthetic construct
  source 1..223: note = Description of Artificial Sequence: Synthetic polypeptide; note = XENP021716 2A11_H1.130_L2_Fab Heavy Chain
EVQLVQSGAEVKKPGATVKISCKASGFNIKHYYMHWVQQAPGKGLEWMGWIDPELGDTEYAPKFQGRVTITADTSTNTAYMELSSLRSEDTAVYYCYARGVYQALDYWGQGTLVTVSSASTKGPSVFPLAPSSKSTSGGTAALGCLVKDYFPEPVTVSWNSGALTSGVHTFPAVLQSSGLYSLSSVVTVPSSSLGTQTYICNVNHKPSNTKVDKKVEPKSCGS

SEQ ID NO: 27495 - protein, 118 aa, synthetic construct
  source 1..118: note = Description of Artificial Sequence: Synthetic polypeptide; note = VH of XENP021716
EVQLVQSGAEVKKPGATVKISCKASGFNIKHYYMHWVQQAPGKGLEWMGWIDPELGDTEYAPKFQGRVTITADTSTNTAYMELSSLRSEDTAVYYCYARGVYQALDYWGQGTLVTVSS

SEQ ID NO: 27496 - protein, 5 aa, synthetic construct
  source 1..5: note = Description of Artificial Sequence: Synthetic peptide; note = XENP021716 vhCDR1
HYYMH

SEQ ID NO: 27497 - protein, 17 aa, synthetic construct
  source 1..17: note = Description of Artificial Sequence: Synthetic peptide; note = XENP021716 vhCDR2
WIDPELGDTEYAPKFQG

SEQ ID NO: 27498 - protein, 9 aa, synthetic construct
  source 1..9: note = Description of Artificial Sequence: Synthetic peptide; note = XENP021716 vhCDR3
RGVYQALDY

SEQ ID NO: 27499 - protein, 214 aa, synthetic construct; identical to SEQ ID NO: 17250
  source 1..214: note = Description of Artificial Sequence: Synthetic polypeptide; note = XENP021716 2A11_H1.130_L2_Fab Light Chain

SEQ ID NO: 27500 - protein, 107 aa, synthetic construct; identical to SEQ ID NO: 17251
  source 1..107: note = Description of Artificial Sequence: Synthetic polypeptide; note = VL of XENP021716

SEQ ID NO: 27501 - protein, 11 aa, synthetic construct
  source 1..11: note = Description of Artificial Sequence: Synthetic peptide; note = XENP021716 vlCDR1
QASQDIGNYLN

SEQ ID NO: 27502 - protein, 7 aa, synthetic construct
  source 1..7: note = Description of Artificial Sequence: Synthetic peptide; note = XENP021716 vlCDR2
YTSRLHS

SEQ ID NO: 27503 - protein, 9 aa, synthetic construct
  source 1..9: note = Description of Artificial Sequence: Synthetic peptide; note = XENP021716 vlCDR3
QQGNTLPYT

SEQ ID NO: 27504 - protein, 223 aa, synthetic construct
  source 1..223: note = Description of Artificial Sequence: Synthetic polypeptide; note = XENP021717 2A11_H1.131_L2_Fab Heavy Chain
EVQLVQSGAEVKKPGATVKISCKASGFNIKHYYMHWVQQAPGKGLEWMGWIDPELGDTEYAPKFQGRVTITADTSTNTAYMELSSLRSEDTAVYYCYARGVKQALDYWGQGTLVTVSSASTKGPSVFPLAPSSKSTSGGTAALGCLVKDYFPEPVTVSWNSGALTSGVHTFPAVLQSSGLYSLSSVVTVPSSSLGTQTYICNVNHKPSNTKVDKKVEPKSCGS

SEQ ID NO: 27505 - protein, 118 aa, synthetic construct
  source 1..118: note = Description of Artificial Sequence: Synthetic polypeptide; note = VH of XENP021717
EVQLVQSGAEVKKPGATVKISCKASGFNIKHYYMHWVQQAPGKGLEWMGWIDPELGDTEYAPKFQGRVTITADTSTNTAYMELSSLRSEDTAVYYCYARGVKQALDYWGQGTLVTVSS

SEQ ID NO: 27506 - protein, 5 aa, synthetic construct
  source 1..5: note = Description of Artificial Sequence: Synthetic peptide; note = XENP021717 vhCDR1
HYYMH

SEQ ID NO: 27507 - protein, 17 aa, synthetic construct
  source 1..17: note = Description of Artificial Sequence: Synthetic peptide; note = XENP021717 vhCDR2
WIDPELGDTEYAPKFQG

SEQ ID NO: 27508 - protein, 9 aa, synthetic construct
  source 1..9: note = Description of Artificial Sequence: Synthetic peptide; note = XENP021717 vhCDR3
RGVKQALDY

SEQ ID NO: 27509 - protein, 214 aa, synthetic construct; identical to SEQ ID NO: 17250
  source 1..214: note = Description of Artificial Sequence: Synthetic polypeptide; note = XENP021717 2A11_H1.131_L2_Fab Light Chain

SEQ ID NO: 27510 - protein, 107 aa, synthetic construct; identical to SEQ ID NO: 17251
  source 1..107: note = Description of Artificial Sequence: Synthetic polypeptide; note = VL of XENP021717

SEQ ID NO: 27511 - protein, 11 aa, synthetic construct
  source 1..11: note = Description of Artificial Sequence: Synthetic peptide; note = XENP021717 vlCDR1
QASQDIGNYLN

SEQ ID NO: 27512 - protein, 7 aa, synthetic construct
  source 1..7: note = Description of Artificial Sequence: Synthetic peptide; note = XENP021717 vlCDR2
YTSRLHS

SEQ ID NO: 27513 - protein, 9 aa, synthetic construct
  source 1..9: note = Description of Artificial Sequence: Synthetic peptide; note = XENP021717 vlCDR3
QQGNTLPYT

SEQ ID NO: 27514 - protein, 223 aa, synthetic construct
  source 1..223: note = Description of Artificial Sequence: Synthetic polypeptide; note = XENP021718 2A11_H1.132_L2_Fab Heavy Chain
EVQLVQSGAEVKKPGATVKISCKASGFNIKHYYMHWVQQAPGKGLEWMGWIDPETGDTEYAPKFQGRVTITADTSTNTAYMELSSLRSEDTAVYYCYARGVRQALDYWGQGTLVTVSSASTKGPSVFPLAPSSKSTSGGTAALGCLVKDYFPEPVTVSWNSGALTSGVHTFPAVLQSSGLYSLSSVVTVPSSSLGTQTYICNVNHKPSNTKVDKKVEPKSCGS

SEQ ID NO: 27515 - protein, 118 aa, synthetic construct
  source 1..118: note = Description of Artificial Sequence: Synthetic polypeptide; note = VH of XENP021718
EVQLVQSGAEVKKPGATVKISCKASGFNIKHYYMHWVQQAPGKGLEWMGWIDPETGDTEYAPKFQGRVTITADTSTNTAYMELSSLRSEDTAVYYCYARGVRQALDYWGQGTLVTVSS

SEQ ID NO: 27516 - protein, 5 aa, synthetic construct
  source 1..5: note = Description of Artificial Sequence: Synthetic peptide; note = XENP021718 vhCDR1
HYYMH

SEQ ID NO: 27517 - protein, 17 aa, synthetic construct
  source 1..17: note = Description of Artificial Sequence: Synthetic peptide; note = XENP021718 vhCDR2
WIDPETGDTEYAPKFQG

SEQ ID NO: 27518 - protein, 9 aa, synthetic construct
  source 1..9: note = Description of Artificial Sequence: Synthetic peptide; note = XENP021718 vhCDR3
RGVRQALDY

SEQ ID NO: 27519 - protein, 214 aa, synthetic construct; identical to SEQ ID NO: 17250
  source 1..214: note = Description of Artificial Sequence: Synthetic polypeptide; note = XENP021718 2A11_H1.132_L2_Fab Light Chain

SEQ ID NO: 27520 - protein, 107 aa, synthetic construct; identical to SEQ ID NO: 17251
  source 1..107: note = Description of Artificial Sequence: Synthetic polypeptide; note = VL of XENP021718

SEQ ID NO: 27521 - protein, 11 aa, synthetic construct
  source 1..11: note = Description of Artificial Sequence: Synthetic peptide; note = XENP021718 vlCDR1
QASQDIGNYLN

SEQ ID NO: 27522 - protein, 7 aa, synthetic construct
  source 1..7: note = Description of Artificial Sequence: Synthetic peptide; note = XENP021718 vlCDR2
YTSRLHS

SEQ ID NO: 27523 - protein, 9 aa, synthetic construct
  source 1..9: note = Description of Artificial Sequence: Synthetic peptide; note = XENP021718 vlCDR3
QQGNTLPYT

SEQ ID NO: 27524 - protein, 223 aa, synthetic construct
  source 1..223: note = Description of Artificial Sequence: Synthetic polypeptide; note = XENP021719 2A11_H1.133_L2_Fab Heavy Chain
EVQLVQSGAEVKKPGATVKISCKASGFNIKHYYMHWVQQAPGKGLEWMGWIDPETGDTEYAPKFQGRVTITADTSTNTAYMELSSLRSEDTAVYYCYARGVYQALDYWGQGTLVTVSSASTKGPSVFPLAPSSKSTSGGTAALGCLVKDYFPEPVTVSWNSGALTSGVHTFPAVLQSSGLYSLSSVVTVPSSSLGTQTYICNVNHKPSNTKVDKKVEPKSCGS

SEQ ID NO: 27525 - protein, 118 aa, synthetic construct
  source 1..118: note = Description of Artificial Sequence: Synthetic polypeptide; note = VH of XENP021719
EVQLVQSGAEVKKPGATVKISCKASGFNIKHYYMHWVQQAPGKGLEWMGWIDPETGDTEYAPKFQGRVTITADTSTNTAYMELSSLRSEDTAVYYCYARGVYQALDYWGQGTLVTVSS

SEQ ID NO: 27526 - protein, 5 aa, synthetic construct
  source 1..5: note = Description of Artificial Sequence: Synthetic peptide; note = XENP021719 vhCDR1
HYYMH

SEQ ID NO: 27527 - protein, 17 aa, synthetic construct
  source 1..17: note = Description of Artificial Sequence: Synthetic peptide; note = XENP021719 vhCDR2
WIDPETGDTEYAPKFQG

SEQ ID NO: 27528 - protein, 9 aa, synthetic construct
  source 1..9: note = Description of Artificial Sequence: Synthetic peptide; note = XENP021719 vhCDR3
RGVYQALDY

SEQ ID NO: 27529 - protein, 214 aa, synthetic construct; identical to SEQ ID NO: 17250
  source 1..214: note = Description of Artificial Sequence: Synthetic polypeptide; note = XENP021719 2A11_H1.133_L2_Fab Light Chain

SEQ ID NO: 27530 - protein, 107 aa, synthetic construct; identical to SEQ ID NO: 17251
  source 1..107: note = Description of Artificial Sequence: Synthetic polypeptide; note = VL of XENP021719

SEQ ID NO: 27531 - protein, 11 aa, synthetic construct
  source 1..11: note = Description of Artificial Sequence: Synthetic peptide; note = XENP021719 vlCDR1
QASQDIGNYLN

SEQ ID NO: 27532 - protein, 7 aa, synthetic construct
  source 1..7: note = Description of Artificial Sequence: Synthetic peptide; note = XENP021719 vlCDR2
YTSRLHS

SEQ ID NO: 27533 - protein, 9 aa, synthetic construct
  source 1..9: note = Description of Artificial Sequence: Synthetic peptide; note = XENP021719 vlCDR3
QQGNTLPYT

SEQ ID NO: 27534 - protein, 223 aa, synthetic construct
  source 1..223: note = Description of Artificial Sequence: Synthetic polypeptide; note = XENP021720 2A11_H1.134_L2_Fab Heavy Chain
EVQLVQSGAEVKKPGATVKISCKASGFNIKHYYMHWVQQAPGKGLEWMGWIDPETGDTEYAPKFQGRVTITADTSTNTAYMELSSLRSEDTAVYYCYARGVKQALDYWGQGTLVTVSSASTKGPSVFPLAPSSKSTSGGTAALGCLVKDYFPEPVTVSWNSGALTSGVHTFPAVLQSSGLYSLSSVVTVPSSSLGTQTYICNVNHKPSNTKVDKKVEPKSCGS

SEQ ID NO: 27535 - protein, 118 aa, synthetic construct
  source 1..118: note = Description of Artificial Sequence: Synthetic polypeptide; note = VH of XENP021720
EVQLVQSGAEVKKPGATVKISCKASGFNIKHYYMHWVQQAPGKGLEWMGWIDPETGDTEYAPKFQGRVTITADTSTNTAYMELSSLRSEDTAVYYCYARGVKQALDYWGQGTLVTVSS

SEQ ID NO: 27536 - protein, 5 aa, synthetic construct
  source 1..5: note = Description of Artificial Sequence: Synthetic peptide; note = XENP021720 vhCDR1
HYYMH

SEQ ID NO: 27537 - protein, 17 aa, synthetic construct
  source 1..17: note = Description of Artificial Sequence: Synthetic peptide; note = XENP021720 vhCDR2
WIDPETGDTEYAPKFQG

SEQ ID NO: 27538 - protein, 9 aa, synthetic construct
  source 1..9: note = Description of Artificial Sequence: Synthetic peptide; note = XENP021720 vhCDR3
RGVKQALDY

SEQ ID NO: 27539 - protein, 214 aa, synthetic construct; identical to SEQ ID NO: 17250
  source 1..214: note = Description of Artificial Sequence: Synthetic polypeptide; note = XENP021720 2A11_H1.134_L2_Fab Light Chain

SEQ ID NO: 27540 - protein, 107 aa, synthetic construct; identical to SEQ ID NO: 17251
  source 1..107: note = Description of Artificial Sequence: Synthetic polypeptide; note = VL of XENP021720

SEQ ID NO: 27541 - protein, 11 aa, synthetic construct
  source 1..11: note = Description of Artificial Sequence: Synthetic peptide; note = XENP021720 vlCDR1
QASQDIGNYLN

SEQ ID NO: 27542 - protein, 7 aa, synthetic construct
  source 1..7: note = Description of Artificial Sequence: Synthetic peptide; note = XENP021720 vlCDR2
YTSRLHS

SEQ ID NO: 27543 - protein, 9 aa, synthetic construct
  source 1..9: note = Description of Artificial Sequence: Synthetic peptide; note = XENP021720 vlCDR3
QQGNTLPYT

SEQ ID NO: 27544 - protein, 223 aa, synthetic construct
  source 1..223: note = Description of Artificial Sequence: Synthetic polypeptide; note = XENP021721 2A11_H1.135_L2_Fab Heavy Chain
EVQLVQSGAEVKKPGATVKISCKASGFNIKHYYMHWVQQAPGKGLEWMGWIDPYLGDTEYAPKFQGRVTITADTSTNTAYMELSSLRSEDTAVYYCYARGVRQALDYWGQGTLVTVSSASTKGPSVFPLAPSSKSTSGGTAALGCLVKDYFPEPVTVSWNSGALTSGVHTFPAVLQSSGLYSLSSVVTVPSSSLGTQTYICNVNHKPSNTKVDKKVEPKSCGS

SEQ ID NO: 27545 - protein, 118 aa, synthetic construct
  source 1..118: note = Description of Artificial Sequence: Synthetic polypeptide; note = VH of XENP021721
EVQLVQSGAEVKKPGATVKISCKASGFNIKHYYMHWVQQAPGKGLEWMGWIDPYLGDTEYAPKFQGRVTITADTSTNTAYMELSSLRSEDTAVYYCYARGVRQALDYWGQGTLVTVSS

SEQ ID NO: 27546 - protein, 5 aa, synthetic construct
  source 1..5: note = Description of Artificial Sequence: Synthetic peptide; note = XENP021721 vhCDR1
HYYMH

SEQ ID NO: 27547 - protein, 17 aa, synthetic construct
  source 1..17: note = Description of Artificial Sequence: Synthetic peptide; note = XENP021721 vhCDR2
WIDPYLGDTEYAPKFQG

SEQ ID NO: 27548 - protein, 9 aa, synthetic construct
  source 1..9: note = Description of Artificial Sequence: Synthetic peptide; note = XENP021721 vhCDR3
RGVRQALDY

SEQ ID NO: 27549 - protein, 214 aa, synthetic construct; identical to SEQ ID NO: 17250
  source 1..214: note = Description of Artificial Sequence: Synthetic polypeptide; note = XENP021721 2A11_H1.135_L2_Fab Light Chain

SEQ ID NO: 27550 - protein, 107 aa, synthetic construct; identical to SEQ ID NO: 17251
  source 1..107: note = Description of Artificial Sequence: Synthetic polypeptide; note = VL of XENP021721

SEQ ID NO: 27551 - protein, 11 aa, synthetic construct
  source 1..11: note = Description of Artificial Sequence: Synthetic peptide; note = XENP021721 vlCDR1
QASQDIGNYLN

SEQ ID NO: 27552 - protein, 7 aa, synthetic construct
  source 1..7: note = Description of Artificial Sequence: Synthetic peptide; note = XENP021721 vlCDR2
YTSRLHS

SEQ ID NO: 27553 - protein, 9 aa, synthetic construct
  source 1..9: note = Description of Artificial Sequence: Synthetic peptide; note = XENP021721 vlCDR3
QQGNTLPYT

SEQ ID NO: 27554 - protein, 223 aa, synthetic construct
  source 1..223: note = Description of Artificial Sequence: Synthetic polypeptide; note = XENP021722 2A11_H1.136_L2_Fab Heavy Chain
EVQLVQSGAEVKKPGATVKISCKASGFNIKHYYMHWVQQAPGKGLEWMGWIDPYLGDTEYAPKFQGRVTITADTSTNTAYMELSSLRSEDTAVYYCYARGVYQALDYWGQGTLVTVSSASTKGPSVFPLAPSSKSTSGGTAALGCLVKDYFPEPVTVSWNSGALTSGVHTFPAVLQSSGLYSLSSVVTVPSSSLGTQTYICNVNHKPSNTKVDKKVEPKSCGS

SEQ ID NO: 27555 - protein, 118 aa, synthetic construct
  source 1..118: note = Description of Artificial Sequence: Synthetic polypeptide; note = VH of XENP021722
EVQLVQSGAEVKKPGATVKISCKASGFNIKHYYMHWVQQAPGKGLEWMGWIDPYLGDTEYAPKFQGRVTITADTSTNTAYMELSSLRSEDTAVYYCYARGVYQALDYWGQGTLVTVSS

SEQ ID NO: 27556 - protein, 5 aa, synthetic construct
  source 1..5: note = Description of Artificial Sequence: Synthetic peptide; note = XENP021722 vhCDR1
HYYMH

SEQ ID NO: 27557 - protein, 17 aa, synthetic construct
  source 1..17: note = Description of Artificial Sequence: Synthetic peptide; note = XENP021722 vhCDR2
WIDPYLGDTEYAPKFQG

SEQ ID NO: 27558 - protein, 9 aa, synthetic construct
  source 1..9: note = Description of Artificial Sequence: Synthetic peptide; note = XENP021722 vhCDR3
RGVYQALDY

SEQ ID NO: 27559 - protein, 214 aa, synthetic construct; identical to SEQ ID NO: 17250
  source 1..214: note = Description of Artificial Sequence: Synthetic polypeptide; note = XENP021722 2A11_H1.136_L2_Fab Light Chain

SEQ ID NO: 27560 - protein, 107 aa, synthetic construct; identical to SEQ ID NO: 17251
  source 1..107: note = Description of Artificial Sequence: Synthetic polypeptide; note = VL of XENP021722

SEQ ID NO: 27561 - protein, 11 aa, synthetic construct
  source 1..11: note = Description of Artificial Sequence: Synthetic peptide; note = XENP021722 vlCDR1
QASQDIGNYLN

SEQ ID NO: 27562 - protein, 7 aa, synthetic construct
  source 1..7: note = Description of Artificial Sequence: Synthetic peptide; note = XENP021722 vlCDR2
YTSRLHS

SEQ ID NO: 27563 - protein, 9 aa, synthetic construct
  source 1..9: note = Description of Artificial Sequence: Synthetic peptide; note = XENP021722 vlCDR3
QQGNTLPYT

SEQ ID NO: 27564 - protein, 223 aa, synthetic construct
  source 1..223: note = Description of Artificial Sequence: Synthetic polypeptide; note = XENP021723 2A11_H1.137_L2_Fab Heavy Chain
EVQLVQSGAEVKKPGATVKISCKASGFNIKHYYMHWVQQAPGKGLEWMGWIDPYLGDTEYAPKFQGRVTITADTSTNTAYMELSSLRSEDTAVYYCYARGVKQALDYWGQGTLVTVSSASTKGPSVFPLAPSSKSTSGGTAALGCLVKDYFPEPVTVSWNSGALTSGVHTFPAVLQSSGLYSLSSVVTVPSSSLGTQTYICNVNHKPSNTKVDKKVEPKSCGS

SEQ ID NO: 27565 - protein, 118 aa, synthetic construct
  source 1..118: note = Description of Artificial Sequence: Synthetic polypeptide; note = VH of XENP021723
EVQLVQSGAEVKKPGATVKISCKASGFNIKHYYMHWVQQAPGKGLEWMGWIDPYLGDTEYAPKFQGRVTITADTSTNTAYMELSSLRSEDTAVYYCYARGVKQALDYWGQGTLVTVSS

SEQ ID NO: 27566 - protein, 5 aa, synthetic construct
  source 1..5: note = Description of Artificial Sequence: Synthetic peptide; note = XENP021723 vhCDR1
HYYMH

SEQ ID NO: 27567 - protein, 17 aa, synthetic construct
  source 1..17: note = Description of Artificial Sequence: Synthetic peptide; note = XENP021723 vhCDR2
WIDPYLGDTEYAPKFQG

SEQ ID NO: 27568 - protein, 9 aa, synthetic construct
  source 1..9: note = Description of Artificial Sequence: Synthetic peptide; note = XENP021723 vhCDR3
RGVKQALDY

SEQ ID NO: 27569 - protein, 214 aa, synthetic construct; identical to SEQ ID NO: 17250
  source 1..214: note = Description of Artificial Sequence: Synthetic polypeptide; note = XENP021723 2A11_H1.137_L2_Fab Light Chain

SEQ ID NO: 27570 - protein, 107 aa, synthetic construct; identical to SEQ ID NO: 17251
  source 1..107: note = Description of Artificial Sequence: Synthetic polypeptide; note = VL of XENP021723

SEQ ID NO: 27571 - protein, 11 aa, synthetic construct
  source 1..11: note = Description of Artificial Sequence: Synthetic peptide; note = XENP021723 vlCDR1
QASQDIGNYLN

SEQ ID NO: 27572 - protein, 7 aa, synthetic construct
  source 1..7: note = Description of Artificial Sequence: Synthetic peptide; note = XENP021723 vlCDR2
YTSRLHS

SEQ ID NO: 27573 - protein, 9 aa, synthetic construct
  source 1..9: note = Description of Artificial Sequence: Synthetic peptide; note = XENP021723 vlCDR3
QQGNTLPYT

SEQ ID NO: 27574 - protein, 223 aa, synthetic construct
  source 1..223: note = Description of Artificial Sequence: Synthetic polypeptide; note = XENP021724 2A11_H1.138_L2_Fab Heavy Chain
EVQLVQSGAEVKKPGATVKISCKASGFNIKHYYMHWVQQAPGKGLEWMGWIDPYTGDTEYAPKFQGRVTITADTSTNTAYMELSSLRSEDTAVYYCYARGVRQALDYWGQGTLVTVSSASTKGPSVFPLAPSSKSTSGGTAALGCLVKDYFPEPVTVSWNSGALTSGVHTFPAVLQSSGLYSLSSVVTVPSSSLGTQTYICNVNHKPSNTKVDKKVEPKSCGS

SEQ ID NO: 27575 - protein, 118 aa, synthetic construct
  source 1..118: note = Description of Artificial Sequence: Synthetic polypeptide; note = VH of XENP021724
EVQLVQSGAEVKKPGATVKISCKASGFNIKHYYMHWVQQAPGKGLEWMGWIDPYTGDTEYAPKFQGRVTITADTSTNTAYMELSSLRSEDTAVYYCYARGVRQALDYWGQGTLVTVSS

SEQ ID NO: 27576 - protein, 5 aa, synthetic construct
  source 1..5: note = Description of Artificial Sequence: Synthetic peptide; note = XENP021724 vhCDR1
HYYMH

SEQ ID NO: 27577 - protein, 17 aa, synthetic construct
  source 1..17: note = Description of Artificial Sequence: Synthetic peptide; note = XENP021724 vhCDR2
WIDPYTGDTEYAPKFQG

SEQ ID NO: 27578 - protein, 9 aa, synthetic construct
  source 1..9: note = Description of Artificial Sequence: Synthetic peptide; note = XENP021724 vhCDR3
RGVRQALDY

SEQ ID NO: 27579 - protein, 214 aa, synthetic construct; identical to SEQ ID NO: 17250
  source 1..214: note = Description of Artificial Sequence: Synthetic polypeptide; note = XENP021724 2A11_H1.138_L2_Fab Light Chain

SEQ ID NO: 27580 - protein, 107 aa, synthetic construct; identical to SEQ ID NO: 17251
  source 1..107: note = Description of Artificial Sequence: Synthetic polypeptide; note = VL of XENP021724

SEQ ID NO: 27581 - protein, 11 aa, synthetic construct
  source 1..11: note = Description of Artificial Sequence: Synthetic peptide; note = XENP021724 vlCDR1
QASQDIGNYLN

SEQ ID NO: 27582 - protein, 7 aa, synthetic construct
  source 1..7: note = Description of Artificial Sequence: Synthetic peptide; note = XENP021724 vlCDR2
YTSRLHS

SEQ ID NO: 27583 - protein, 9 aa, synthetic construct
  source 1..9: note = Description of Artificial Sequence: Synthetic peptide; note = XENP021724 vlCDR3
QQGNTLPYT

SEQ ID NO: 27584 - protein, 223 aa, synthetic construct
  source 1..223: note = Description of Artificial Sequence: Synthetic polypeptide; note = XENP021725 2A11_H1.139_L2_Fab Heavy Chain
EVQLVQSGAEVKKPGATVKISCKASGFNIKHYYMHWVQQAPGKGLEWMGWIDPYTGDTEYAPKFQGRVTITADTSTNTAYMELSSLRSEDTAVYYCYARGVYQALDYWGQGTLVTVSSASTKGPSVFPLAPSSKSTSGGTAALGCLVKDYFPEPVTVSWNSGALTSGVHTFPAVLQSSGLYSLSSVVTVPSSSLGTQTYICNVNHKPSNTKVDKKVEPKSCGS

SEQ ID NO: 27585 - protein, 118 aa, synthetic construct
  source 1..118: note = Description of Artificial Sequence: Synthetic polypeptide; note = VH of XENP021725
EVQLVQSGAEVKKPGATVKISCKASGFNIKHYYMHWVQQAPGKGLEWMGWIDPYTGDTEYAPKFQGRVTITADTSTNTAYMELSSLRSEDTAVYYCYARGVYQALDYWGQGTLVTVSS

SEQ ID NO: 27586 - protein, 5 aa, synthetic construct
  source 1..5: note = Description of Artificial Sequence: Synthetic peptide; note = XENP021725 vhCDR1
HYYMH

SEQ ID NO: 27587 - protein, 17 aa, synthetic construct
  source 1..17: note = Description of Artificial Sequence: Synthetic peptide; note = XENP021725 vhCDR2
WIDPYTGDTEYAPKFQG

SEQ ID NO: 27588 - protein, 9 aa, synthetic construct
  source 1..9: note = Description of Artificial Sequence: Synthetic peptide; note = XENP021725 vhCDR3
RGVYQALDY

SEQ ID NO: 27589 - protein, 214 aa, synthetic construct; identical to SEQ ID NO: 17250
  source 1..214: note = Description of Artificial Sequence: Synthetic polypeptide; note = XENP021725 2A11_H1.139_L2_Fab Light Chain

SEQ ID NO: 27590 - protein, 107 aa, synthetic construct; identical to SEQ ID NO: 17251
  source 1..107: note = Description of Artificial Sequence: Synthetic polypeptide; note = VL of XENP021725

SEQ ID NO: 27591 - protein, 11 aa, synthetic construct
  source 1..11: note = Description of Artificial Sequence: Synthetic peptide; note = XENP021725 vlCDR1
QASQDIGNYLN

SEQ ID NO: 27592 - protein, 7 aa, synthetic construct
  source 1..7: note = Description of Artificial Sequence: Synthetic peptide; note = XENP021725 vlCDR2
YTSRLHS

SEQ ID NO: 27593 - protein, 9 aa, synthetic construct
  source 1..9: note = Description of Artificial Sequence: Synthetic peptide; note = XENP021725 vlCDR3
QQGNTLPYT

SEQ ID NO: 27594 - protein, 223 aa, synthetic construct
  source 1..223: note = Description of Artificial Sequence: Synthetic polypeptide; note = XENP021726 2A11_H1.140_L2_Fab Heavy Chain
EVQLVQSGAEVKKPGATVKISCKASGFNIKHYYMHWVQQAPGKGLEWMGWIDPYTGDTEYAPKFQGRVTITADTSTNTAYMELSSLRSEDTAVYYCYARGVKQALDYWGQGTLVTVSSASTKGPSVFPLAPSSKSTSGGTAALGCLVKDYFPEPVTVSWNSGALTSGVHTFPAVLQSSGLYSLSSVVTVPSSSLGTQTYICNVNHKPSNTKVDKKVEPKSCGS

SEQ ID NO: 27595 - protein, 118 aa, synthetic construct
  source 1..118: note = Description of Artificial Sequence: Synthetic polypeptide; note = VH of XENP021726
EVQLVQSGAEVKKPGATVKISCKASGFNIKHYYMHWVQQAPGKGLEWMGWIDPYTGDTEYAPKFQGRVTITADTSTNTAYMELSSLRSEDTAVYYCYARGVKQALDYWGQGTLVTVSS

SEQ ID NO: 27596 - protein, 5 aa, synthetic construct
  source 1..5: note = Description of Artificial Sequence: Synthetic peptide; note = XENP021726 vhCDR1
HYYMH

SEQ ID NO: 27597 - protein, 17 aa, synthetic construct
  source 1..17: note = Description of Artificial Sequence: Synthetic peptide; note = XENP021726 vhCDR2
WIDPYTGDTEYAPKFQG

SEQ ID NO: 27598 - protein, 9 aa, synthetic construct
  source 1..9: note = Description of Artificial Sequence: Synthetic peptide; note = XENP021726 vhCDR3
RGVKQALDY

SEQ ID NO: 27599 - protein, 214 aa, synthetic construct; identical to SEQ ID NO: 17250
  source 1..214: note = Description of Artificial Sequence: Synthetic polypeptide; note = XENP021726 2A11_H1.140_L2_Fab Light Chain

SEQ ID NO: 27600 - protein, 107 aa, synthetic construct; identical to SEQ ID NO: 17251
  source 1..107: note = Description of Artificial Sequence: Synthetic polypeptide; note = VL of XENP021726

SEQ ID NO: 27601 - protein, 11 aa, synthetic construct
  source 1..11: note = Description of Artificial Sequence: Synthetic peptide; note = XENP021726 vlCDR1
QASQDIGNYLN

SEQ ID NO: 27602 - protein, 7 aa, synthetic construct
  source 1..7: note = Description of Artificial Sequence: Synthetic peptide; note = XENP021726 vlCDR2
YTSRLHS

SEQ ID NO: 27603 - protein, 9 aa, synthetic construct
  source 1..9: note = Description of Artificial Sequence: Synthetic peptide; note = XENP021726 vlCDR3
QQGNTLPYT

SEQ ID NO: 27604 - protein, 223 aa, synthetic construct
  source 1..223: note = Description of Artificial Sequence: Synthetic polypeptide; note = XENP021727 2A11_H1.141_L2_Fab Heavy Chain
EVQLVQSGAEVKKPGATVKISCKASGFNIKDYFMHWVQQAPGKGLEWMGWIDPELGDTEYAPKFQGRVTITADTSTNTAYMELSSLRSEDTAVYYCYARGVRQALDYWGQGTLVTVSSASTKGPSVFPLAPSSKSTSGGTAALGCLVKDYFPEPVTVSWNSGALTSGVHTFPAVLQSSGLYSLSSVVTVPSSSLGTQTYICNVNHKPSNTKVDKKVEPKSCGS

SEQ ID NO: 27605 - protein, 118 aa, synthetic construct
  source 1..118: note = Description of Artificial Sequence: Synthetic polypeptide; note = VH of XENP021727
EVQLVQSGAEVKKPGATVKISCKASGFNIKDYFMHWVQQAPGKGLEWMGWIDPELGDTEYAPKFQGRVTITADTSTNTAYMELSSLRSEDTAVYYCYARGVRQALDYWGQGTLVTVSS

SEQ ID NO: 27606 - protein, 5 aa, synthetic construct
  source 1..5: note = Description of Artificial Sequence: Synthetic peptide; note = XENP021727 vhCDR1
DYFMH

SEQ ID NO: 27607 - protein, 17 aa, synthetic construct
  source 1..17: note = Description of Artificial Sequence: Synthetic peptide; note = XENP021727 vhCDR2
WIDPELGDTEYAPKFQG

SEQ ID NO: 27608 - protein, 9 aa, synthetic construct
  source 1..9: note = Description of Artificial Sequence: Synthetic peptide; note = XENP021727 vhCDR3
RGVRQALDY

SEQ ID NO: 27609 - protein, 214 aa, synthetic construct; identical to SEQ ID NO: 17250
  source 1..214: note = Description of Artificial Sequence: Synthetic polypeptide; note = XENP021727 2A11_H1.141_L2_Fab Light Chain

SEQ ID NO: 27610 - protein, 107 aa, synthetic construct; identical to SEQ ID NO: 17251
  source 1..107: note = Description of Artificial Sequence: Synthetic polypeptide; note = VL of XENP021727

SEQ ID NO: 27611 - protein, 11 aa, synthetic construct
  source 1..11: note = Description of Artificial Sequence: Synthetic peptide; note = XENP021727 vlCDR1
QASQDIGNYLN

SEQ ID NO: 27612 - protein, 7 aa, synthetic construct
  source 1..7: note = Description of Artificial Sequence: Synthetic peptide; note = XENP021727 vlCDR2
YTSRLHS

SEQ ID NO: 27613 - protein, 9 aa, synthetic construct
  source 1..9: note = Description of Artificial Sequence: Synthetic peptide; note = XENP021727 vlCDR3
QQGNTLPYT

SEQ ID NO: 27614 - protein, 223 aa, synthetic construct
  source 1..223: note = Description of Artificial Sequence: Synthetic polypeptide; note = XENP021728 2A11_H1.142_L2_Fab Heavy Chain
EVQLVQSGAEVKKPGATVKISCKASGFNIKDYFMHWVQQAPGKGLEWMGWIDPETGDTEYAPKFQGRVTITADTSTNTAYMELSSLRSEDTAVYYCYARGVRQALDYWGQGTLVTVSSASTKGPSVFPLAPSSKSTSGGTAALGCLVKDYFPEPVTVSWNSGALTSGVHTFPAVLQSSGLYSLSSVVTVPSSSLGTQTYICNVNHKPSNTKVDKKVEPKSCGS

SEQ ID NO: 27615 - protein, 118 aa, synthetic construct
  source 1..118: note = Description of Artificial Sequence: Synthetic polypeptide; note = VH of XENP021728
EVQLVQSGAEVKKPGATVKISCKASGFNIKDYFMHWVQQAPGKGLEWMGWIDPETGDTEYAPKFQGRVTITADTSTNTAYMELSSLRSEDTAVYYCYARGVRQALDYWGQGTLVTVSS

SEQ ID NO: 27616 - protein, 5 aa, synthetic construct
  source 1..5: note = Description of Artificial Sequence: Synthetic peptide; note = XENP021728 vhCDR1
DYFMH

SEQ ID NO: 27617 - protein, 17 aa, synthetic construct
  source 1..17: note = Description of Artificial Sequence: Synthetic peptide; note = XENP021728 vhCDR2
WIDPETGDTEYAPKFQG

SEQ ID NO: 27618 - protein, 9 aa, synthetic construct
  source 1..9: note = Description of Artificial Sequence: Synthetic peptide; note = XENP021728 vhCDR3
RGVRQALDY

SEQ ID NO: 27619 - protein, 214 aa, synthetic construct; identical to SEQ ID NO: 17250
  source 1..214: note = Description of Artificial Sequence: Synthetic polypeptide; note = XENP021728 2A11_H1.142_L2_Fab Light Chain

SEQ ID NO: 27620 - protein, 107 aa, synthetic construct; identical to SEQ ID NO: 17251
  source 1..107: note = Description of Artificial Sequence: Synthetic polypeptide; note = VL of XENP021728

SEQ ID NO: 27621 - protein, 11 aa, synthetic construct
  source 1..11: note = Description of Artificial Sequence: Synthetic peptide; note = XENP021728 vlCDR1
QASQDIGNYLN

SEQ ID NO: 27622 - protein, 7 aa, synthetic construct
  source 1..7: note = Description of Artificial Sequence: Synthetic peptide; note = XENP021728 vlCDR2
YTSRLHS

SEQ ID NO: 27623 - protein, 9 aa, synthetic construct
  source 1..9: note = Description of Artificial Sequence: Synthetic peptide; note = XENP021728 vlCDR3
QQGNTLPYT

SEQ ID NO: 27624 - protein, 223 aa, synthetic construct
  source 1..223: note = Description of Artificial Sequence: Synthetic polypeptide; note = XENP021729 2A11_H1.143_L2_Fab Heavy Chain
EVQLVQSGAEVKKPGATVKISCKASGFNIKDYFMHWVQQAPGKGLEWMGWIDPELGDTEYAPKFQGRVTITADTSTNTAYMELSSLRSEDTAVYYCYARGVKQALDYWGQGTLVTVSSASTKGPSVFPLAPSSKSTSGGTAALGCLVKDYFPEPVTVSWNSGALTSGVHTFPAVLQSSGLYSLSSVVTVPSSSLGTQTYICNVNHKPSNTKVDKKVEPKSCGS

SEQ ID NO: 27625 - protein, 118 aa, synthetic construct
  source 1..118: note = Description of Artificial Sequence: Synthetic polypeptide; note = VH of XENP021729
EVQLVQSGAEVKKPGATVKISCKASGFNIKDYFMHWVQQAPGKGLEWMGWIDPELGDTEYAPKFQGRVTITADTSTNTAYMELSSLRSEDTAVYYCYARGVKQALDYWGQGTLVTVSS

SEQ ID NO: 27626 - protein, 5 aa, synthetic construct
  source 1..5: note = Description of Artificial Sequence: Synthetic peptide; note = XENP021729 vhCDR1
DYFMH

SEQ ID NO: 27627 - protein, 17 aa, synthetic construct
  source 1..17: note = Description of Artificial Sequence: Synthetic peptide; note = XENP021729 vhCDR2
WIDPELGDTEYAPKFQG

SEQ ID NO: 27628 - protein, 9 aa, synthetic construct
  source 1..9: note = Description of Artificial Sequence: Synthetic peptide; note = XENP021729 vhCDR3
RGVKQALDY

SEQ ID NO: 27629 - protein, 214 aa, synthetic construct; identical to SEQ ID NO: 17250
  source 1..214: note = Description of Artificial Sequence: Synthetic polypeptide; note = XENP021729 2A11_H1.143_L2_Fab Light Chain

SEQ ID NO: 27630 - protein, 107 aa, synthetic construct; identical to SEQ ID NO: 17251
  source 1..107: note = Description of Artificial Sequence: Synthetic polypeptide; note = VL of XENP021729

SEQ ID NO: 27631 - protein, 11 aa, synthetic construct
  source 1..11: note = Description of Artificial Sequence: Synthetic peptide; note = XENP021729 vlCDR1
QASQDIGNYLN

SEQ ID NO: 27632 - protein, 7 aa, synthetic construct
  source 1..7: note = Description of Artificial Sequence: Synthetic peptide; note = XENP021729 vlCDR2
YTSRLHS

SEQ ID NO: 27633 - protein, 9 aa, synthetic construct
  source 1..9: note = Description of Artificial Sequence: Synthetic peptide; note = XENP021729 vlCDR3
QQGNTLPYT

SEQ ID NO: 27634 - protein, 223 aa, synthetic construct
  source 1..223: note = Description of Artificial Sequence: Synthetic polypeptide; note = XENP021730 2A11_H1.144_L2_Fab Heavy Chain
EVQLVQSGAEVKKPGATVKISCKASGFNIKDYFMHWVQQAPGKGLEWMGWIDPELGDTEYAPKFQGRVTITADTSTNTAYMELSSLRSEDTAVYYCYARGVYQALDYWGQGTLVTVSSASTKGPSVFPLAPSSKSTSGGTAALGCLVKDYFPEPVTVSWNSGALTSGVHTFPAVLQSSGLYSLSSVVTVPSSSLGTQTYICNVNHKPSNTKVDKKVEPKSCGS

SEQ ID NO: 27635 - protein, 118 aa, synthetic construct; identical to SEQ ID NO: 22085
  source 1..118: note = Description of Artificial Sequence: Synthetic polypeptide; note = VH of XENP021730

SEQ ID NO: 27636 - protein, 5 aa, synthetic construct
  source 1..5: note = Description of Artificial Sequence: Synthetic peptide; note = XENP021730 vhCDR1
DYFMH

SEQ ID NO: 27637 - protein, 17 aa, synthetic construct
  source 1..17: note = Description of Artificial Sequence: Synthetic peptide; note = XENP021730 vhCDR2
WIDPELGDTEYAPKFQG

SEQ ID NO: 27638 - protein, 9 aa, synthetic construct
  source 1..9: note = Description of Artificial Sequence: Synthetic peptide; note = XENP021730 vhCDR3
RGVYQALDY

SEQ ID NO: 27639 - protein, 214 aa, synthetic construct; identical to SEQ ID NO: 17250
  source 1..214: note = Description of Artificial Sequence: Synthetic polypeptide; note = XENP021730 2A11_H1.144_L2_Fab Light Chain

SEQ ID NO: 27640 - protein, 107 aa, synthetic construct; identical to SEQ ID NO: 17251
  source 1..107: note = Description of Artificial Sequence: Synthetic polypeptide; note = VL of XENP021730

SEQ ID NO: 27641 - protein, 11 aa, synthetic construct
  source 1..11: note = Description of Artificial Sequence: Synthetic peptide; note = XENP021730 vlCDR1
QASQDIGNYLN

SEQ ID NO: 27642 - protein, 7 aa, synthetic construct
  source 1..7: note = Description of Artificial Sequence: Synthetic peptide; note = XENP021730 vlCDR2
YTSRLHS

SEQ ID NO: 27643 - protein, 9 aa, synthetic construct
  source 1..9: note = Description of Artificial Sequence: Synthetic peptide; note = XENP021730 vlCDR3
QQGNTLPYT

SEQ ID NO: 27644 - protein, 223 aa, synthetic construct
  source 1..223: note = Description of Artificial Sequence: Synthetic polypeptide; note = XENP021731 2A11_H1.145_L2_Fab Heavy Chain
EVQLVQSGAEVKKPGATVKISCKASGFNIKDYFMHWVQQAPGKGLEWMGWIDPETGDTEYAPKFQGRVTITADTSTNTAYMELSSLRSEDTAVYYCYARGVKQALDYWGQGTLVTVSSASTKGPSVFPLAPSSKSTSGGTAALGCLVKDYFPEPVTVSWNSGALTSGVHTFPAVLQSSGLYSLSSVVTVPSSSLGTQTYICNVNHKPSNTKVDKKVEPKSCGS

SEQ ID NO: 27645 - protein, 118 aa, synthetic construct
  source 1..118: note = Description of Artificial Sequence: Synthetic polypeptide; note = VH of XENP021731
EVQLVQSGAEVKKPGATVKISCKASGFNIKDYFMHWVQQAPGKGLEWMGWIDPETGDTEYAPKFQGRVTITADTSTNTAYMELSSLRSEDTAVYYCYARGVKQALDYWGQGTLVTVSS

SEQ ID NO: 27646 - protein, 5 aa, synthetic construct
  source 1..5: note = Description of Artificial Sequence: Synthetic peptide; note = XENP021731 vhCDR1
DYFMH

SEQ ID NO: 27647 - protein, 17 aa, synthetic construct
  source 1..17: note = Description of Artificial Sequence: Synthetic peptide; note = XENP021731 vhCDR2
WIDPETGDTEYAPKFQG

SEQ ID NO: 27648 - protein, 9 aa, synthetic construct
  source 1..9: note = Description of Artificial Sequence: Synthetic peptide; note = XENP021731 vhCDR3
RGVKQALDY

SEQ ID NO: 27649 - protein, 214 aa, synthetic construct; identical to SEQ ID NO: 17250
  source 1..214: note = Description of Artificial Sequence: Synthetic polypeptide; note = XENP021731 2A11_H1.145_L2_Fab Light Chain

SEQ ID NO: 27650 - protein, 107 aa, synthetic construct; identical to SEQ ID NO: 17251
  source 1..107: note = Description of Artificial Sequence: Synthetic polypeptide; note = VL of XENP021731

SEQ ID NO: 27651 - protein, 11 aa, synthetic construct
  source 1..11: note = Description of Artificial Sequence: Synthetic peptide; note = XENP021731 vlCDR1
QASQDIGNYLN

SEQ ID NO: 27652 - protein, 7 aa, synthetic construct
  source 1..7: note = Description of Artificial Sequence: Synthetic peptide; note = XENP021731 vlCDR2
YTSRLHS

SEQ ID NO: 27653 - protein, 9 aa, synthetic construct
  source 1..9: note = Description of Artificial Sequence: Synthetic peptide; note = XENP021731 vlCDR3
QQGNTLPYT

SEQ ID NO: 27654 - protein, 223 aa, synthetic construct
  source 1..223: note = Description of Artificial Sequence: Synthetic polypeptide; note = XENP021732 2A11_H1.146_L2_Fab Heavy Chain
EVQLVQSGAEVKKPGATVKISCKASGFNIKDYFMHWVQQAPGKGLEWMGWIDPETGDTEYAPKFQGRVTITADTSTNTAYMELSSLRSEDTAVYYCYARGVYQALDYWGQGTLVTVSSASTKGPSVFPLAPSSKSTSGGTAALGCLVKDYFPEPVTVSWNSGALTSGVHTFPAVLQSSGLYSLSSVVTVPSSSLGTQTYICNVNHKPSNTKVDKKVEPKSCGS

SEQ ID NO: 27655 - protein, 118 aa, synthetic construct
  source 1..118: note = Description of Artificial Sequence: Synthetic polypeptide; note = VH of XENP021732
EVQLVQSGAEVKKPGATVKISCKASGFNIKDYFMHWVQQAPGKGLEWMGWIDPETGDTEYAPKFQGRVTITADTSTNTAYMELSSLRSEDTAVYYCYARGVYQALDYWGQGTLVTVSS

SEQ ID NO: 27656 - protein, 5 aa, synthetic construct
  source 1..5: note = Description of Artificial Sequence: Synthetic peptide; note = XENP021732 vhCDR1
DYFMH

SEQ ID NO: 27657 - protein, 17 aa, synthetic construct
  source 1..17: note = Description of Artificial Sequence: Synthetic peptide; note = XENP021732 vhCDR2
WIDPETGDTEYAPKFQG

SEQ ID NO: 27658 - protein, 9 aa, synthetic construct
  source 1..9: note = Description of Artificial Sequence: Synthetic peptide; note = XENP021732 vhCDR3
RGVYQALDY

SEQ ID NO: 27659 - protein, 214 aa, synthetic construct; identical to SEQ ID NO: 17250
  source 1..214: note = Description of Artificial Sequence: Synthetic polypeptide; note = XENP021732 2A11_H1.146_L2_Fab Light Chain

SEQ ID NO: 27660 - protein, 107 aa, synthetic construct; identical to SEQ ID NO: 17251
  source 1..107: note = Description of Artificial Sequence: Synthetic polypeptide; note = VL of XENP021732

SEQ ID NO: 27661 - protein, 11 aa, synthetic construct
  source 1..11: note = Description of Artificial Sequence: Synthetic peptide; note = XENP021732 vlCDR1
QASQDIGNYLN

SEQ ID NO: 27662 - protein, 7 aa, synthetic construct
  source 1..7: note = Description of Artificial Sequence: Synthetic peptide; note = XENP021732 vlCDR2
YTSRLHS

SEQ ID NO: 27663 - protein, 9 aa, synthetic construct
  source 1..9: note = Description of Artificial Sequence: Synthetic peptide; note = XENP021732 vlCDR3
QQGNTLPYT

SEQ ID NO: 27664 - protein, 223 aa, synthetic construct
  source 1..223: note = Description of Artificial Sequence: Synthetic polypeptide; note = XENP021733 2A11_H1.147_L2_Fab Heavy Chain
EVQLVQSGAEVKKPGATVKISCKASGFNIKDYYMHWVQQAPGKGLEWMGWIDLENGDTEYAPKFQGRVTITADTSTNTAYMELSSLRSEDTAVYYCYARGVRQALDYWGQGTLVTVSSASTKGPSVFPLAPSSKSTSGGTAALGCLVKDYFPEPVTVSWNSGALTSGVHTFPAVLQSSGLYSLSSVVTVPSSSLGTQTYICNVNHKPSNTKVDKKVEPKSCGS

SEQ ID NO: 27665 - protein, 118 aa, synthetic construct
  source 1..118: note = Description of Artificial Sequence: Synthetic polypeptide; note = VH of XENP021733
EVQLVQSGAEVKKPGATVKISCKASGFNIKDYYMHWVQQAPGKGLEWMGWIDLENGDTEYAPKFQGRVTITADTSTNTAYMELSSLRSEDTAVYYCYARGVRQALDYWGQGTLVTVSS

SEQ ID NO: 27666 - protein, 5 aa, synthetic construct
  source 1..5: note = Description of Artificial Sequence: Synthetic peptide; note = XENP021733 vhCDR1
DYYMH

SEQ ID NO: 27667 - protein, 17 aa, synthetic construct
  source 1..17: note = Description of Artificial Sequence: Synthetic peptide; note = XENP021733 vhCDR2
WIDLENGDTEYAPKFQG

SEQ ID NO: 27668 - protein, 9 aa, synthetic construct
  source 1..9: note = Description of Artificial Sequence: Synthetic peptide; note = XENP021733 vhCDR3
RGVRQALDY

SEQ ID NO: 27669 - protein, 214 aa, synthetic construct; identical to SEQ ID NO: 17250
  source 1..214: note = Description of Artificial Sequence: Synthetic polypeptide; note = XENP021733 2A11_H1.147_L2_Fab Light Chain

SEQ ID NO: 27670 - protein, 107 aa, synthetic construct; identical to SEQ ID NO: 17251
  source 1..107: note = Description of Artificial Sequence: Synthetic polypeptide; note = VL of XENP021733

SEQ ID NO: 27671 - protein, 11 aa, synthetic construct
  source 1..11: note = Description of Artificial Sequence: Synthetic peptide; note = XENP021733 vlCDR1
QASQDIGNYLN

SEQ ID NO: 27672 - protein, 7 aa, synthetic construct
  source 1..7: note = Description of Artificial Sequence: Synthetic peptide; note = XENP021733 vlCDR2
YTSRLHS

SEQ ID NO: 27673 - protein, 9 aa, synthetic construct
  source 1..9: note = Description of Artificial Sequence: Synthetic peptide; note = XENP021733 vlCDR3
QQGNTLPYT

SEQ ID NO: 27674 - protein, 223 aa, synthetic construct
  source 1..223: note = Description of Artificial Sequence: Synthetic polypeptide; note = XENP021734 2A11_H1.148_L2_Fab Heavy Chain
EVQLVQSGAEVKKPGATVKISCKASGFNIKDYYMHWVQQAPGKGLEWMGWIDIENGDTEYAPKFQGRVTITADTSTNTAYMELSSLRSEDTAVYYCYARGVRQALDYWGQGTLVTVSSASTKGPSVFPLAPSSKSTSGGTAALGCLVKDYFPEPVTVSWNSGALTSGVHTFPAVLQSSGLYSLSSVVTVPSSSLGTQTYICNVNHKPSNTKVDKKVEPKSCGS

SEQ ID NO: 27675 - protein, 118 aa, synthetic construct
  source 1..118: note = Description of Artificial Sequence: Synthetic polypeptide; note = VH of XENP021734
EVQLVQSGAEVKKPGATVKISCKASGFNIKDYYMHWVQQAPGKGLEWMGWIDIENGDTEYAPKFQGRVTITADTSTNTAYMELSSLRSEDTAVYYCYARGVRQALDYWGQGTLVTVSS

SEQ ID NO: 27676 - protein, 5 aa, synthetic construct
  source 1..5: note = Description of Artificial Sequence: Synthetic peptide; note = XENP021734 vhCDR1
DYYMH

SEQ ID NO: 27677 - protein, 17 aa, synthetic construct
  source 1..17: note = Description of Artificial Sequence: Synthetic peptide; note = XENP021734 vhCDR2
WIDIENGDTEYAPKFQG

SEQ ID NO: 27678 - protein, 9 aa, synthetic construct
  source 1..9: note = Description of Artificial Sequence: Synthetic peptide; note = XENP021734 vhCDR3
RGVRQALDY

SEQ ID NO: 27679 - protein, 214 aa, synthetic construct; identical to SEQ ID NO: 17250
  source 1..214: note = Description of Artificial Sequence: Synthetic polypeptide; note = XENP021734 2A11_H1.148_L2_Fab Light Chain

SEQ ID NO: 27680 - protein, 107 aa, synthetic construct; identical to SEQ ID NO: 17251
  source 1..107: note = Description of Artificial Sequence: Synthetic polypeptide; note = VL of XENP021734

SEQ ID NO: 27681 - protein, 11 aa, synthetic construct
  source 1..11: note = Description of Artificial Sequence: Synthetic peptide; note = XENP021734 vlCDR1
QASQDIGNYLN

SEQ ID NO: 27682 - protein, 7 aa, synthetic construct
  source 1..7: note = Description of Artificial Sequence: Synthetic peptide; note = XENP021734 vlCDR2
YTSRLHS

SEQ ID NO: 27683 - protein, 9 aa, synthetic construct
  source 1..9: note = Description of Artificial Sequence: Synthetic peptide; note = XENP021734 vlCDR3
QQGNTLPYT

SEQ ID NO: 27684 - protein, 223 aa, synthetic construct
  source 1..223: note = Description of Artificial Sequence: Synthetic polypeptide; note = XENP021735 2A11_H1.149_L2_Fab Heavy Chain
EVQLVQSGAEVKKPGATVKISCKASGFNIKDYYMHWVQQAPGKGLEWMGWIDAENGDTEYAPKFQGRVTITADTSTNTAYMELSSLRSEDTAVYYCYARGVRQALDYWGQGTLVTVSSASTKGPSVFPLAPSSKSTSGGTAALGCLVKDYFPEPVTVSWNSGALTSGVHTFPAVLQSSGLYSLSSVVTVPSSSLGTQTYICNVNHKPSNTKVDKKVEPKSCGS

SEQ ID NO: 27685 - protein, 118 aa, synthetic construct
  source 1..118: note = Description of Artificial Sequence: Synthetic polypeptide; note = VH of XENP021735
EVQLVQSGAEVKKPGATVKISCKASGFNIKDYYMHWVQQAPGKGLEWMGWIDAENGDTEYAPKFQGRVTITADTSTNTAYMELSSLRSEDTAVYYCYARGVRQALDYWGQGTLVTVSS

SEQ ID NO: 27686 - protein, 5 aa, synthetic construct
  source 1..5: note = Description of Artificial Sequence: Synthetic peptide; note = XENP021735 vhCDR1
DYYMH

SEQ ID NO: 27687 - protein, 17 aa, synthetic construct
  source 1..17: note = Description of Artificial Sequence: Synthetic peptide; note = XENP021735 vhCDR2
WIDAENGDTEYAPKFQG

SEQ ID NO: 27688 - protein, 9 aa, synthetic construct
  source 1..9: note = Description of Artificial Sequence: Synthetic peptide; note = XENP021735 vhCDR3
RGVRQALDY

SEQ ID NO: 27689 - protein, 214 aa, synthetic construct; identical to SEQ ID NO: 17250
  source 1..214: note = Description of Artificial Sequence: Synthetic polypeptide; note = XENP021735 2A11_H1.149_L2_Fab Light Chain

SEQ ID NO: 27690 - protein, 107 aa, synthetic construct; identical to SEQ ID NO: 17251
  source 1..107: note = Description of Artificial Sequence: Synthetic polypeptide; note = VL of XENP021735

SEQ ID NO: 27691 - protein, 11 aa, synthetic construct
  source 1..11: note = Description of Artificial Sequence: Synthetic peptide; note = XENP021735 vlCDR1
QASQDIGNYLN

SEQ ID NO: 27692 - protein, 7 aa, synthetic construct
  source 1..7: note = Description of Artificial Sequence: Synthetic peptide; note = XENP021735 vlCDR2
YTSRLHS

SEQ ID NO: 27693 - protein, 9 aa, synthetic construct
  source 1..9: note = Description of Artificial Sequence: Synthetic peptide; note = XENP021735 vlCDR3
QQGNTLPYT

SEQ ID NO: 27694 - protein, 223 aa, synthetic construct
  source 1..223: note = Description of Artificial Sequence: Synthetic polypeptide; note = XENP021736 2A11_H1.150_L2_Fab Heavy Chain
EVQLVQSGAEVKKPGATVKISCKASGFNIKDYYMHWVQQAPGKGLEWMGWIDQENGDTEYAPKFQGRVTITADTSTNTAYMELSSLRSEDTAVYYCYARGVRQALDYWGQGTLVTVSSASTKGPSVFPLAPSSKSTSGGTAALGCLVKDYFPEPVTVSWNSGALTSGVHTFPAVLQSSGLYSLSSVVTVPSSSLGTQTYICNVNHKPSNTKVDKKVEPKSCGS

SEQ ID NO: 27695 - protein, 118 aa, synthetic construct
  source 1..118: note = Description of Artificial Sequence: Synthetic polypeptide; note = VH of XENP021736
EVQLVQSGAEVKKPGATVKISCKASGFNIKDYYMHWVQQAPGKGLEWMGWIDQENGDTEYAPKFQGRVTITADTSTNTAYMELSSLRSEDTAVYYCYARGVRQALDYWGQGTLVTVSS

SEQ ID NO: 27696 - protein, 5 aa, synthetic construct
  source 1..5: note = Description of Artificial Sequence: Synthetic peptide; note = XENP021736 vhCDR1
DYYMH

SEQ ID NO: 27697 - protein, 17 aa, synthetic construct
  source 1..17: note = Description of Artificial Sequence: Synthetic peptide; note = XENP021736 vhCDR2
WIDQENGDTEYAPKFQG

SEQ ID NO: 27698 - protein, 9 aa, synthetic construct
  source 1..9: note = Description of Artificial Sequence: Synthetic peptide; note = XENP021736 vhCDR3
RGVRQALDY

SEQ ID NO: 27699 - protein, 214 aa, synthetic construct; identical to SEQ ID NO: 17250
  source 1..214: note = Description of Artificial Sequence: Synthetic polypeptide; note = XENP021736 2A11_H1.150_L2_Fab Light Chain

SEQ ID NO: 27700 - protein, 107 aa, synthetic construct; identical to SEQ ID NO: 17251
  source 1..107: note = Description of Artificial Sequence: Synthetic polypeptide; note = VL of XENP021736

SEQ ID NO: 27701 - protein, 11 aa, synthetic construct
  source 1..11: note = Description of Artificial Sequence: Synthetic peptide; note = XENP021736 vlCDR1
QASQDIGNYLN

SEQ ID NO: 27702 - protein, 7 aa, synthetic construct
  source 1..7: note = Description of Artificial Sequence: Synthetic peptide; note = XENP021736 vlCDR2
YTSRLHS

SEQ ID NO: 27703 - protein, 9 aa, synthetic construct
  source 1..9: note = Description of Artificial Sequence: Synthetic peptide; note = XENP021736 vlCDR3
QQGNTLPYT

SEQ ID NO: 27704 - protein, 223 aa, synthetic construct
  source 1..223: note = Description of Artificial Sequence: Synthetic polypeptide; note = XENP021737 2A11_H1.151_L2_Fab Heavy Chain
EVQLVQSGAEVKKPGATVKISCKASGFNIKDYYMHWVQQAPGKGLEWMGWIDHENGDTEYAPKFQGRVTITADTSTNTAYMELSSLRSEDTAVYYCYARGVRQALDYWGQGTLVTVSSASTKGPSVFPLAPSSKSTSGGTAALGCLVKDYFPEPVTVSWNSGALTSGVHTFPAVLQSSGLYSLSSVVTVPSSSLGTQTYICNVNHKPSNTKVDKKVEPKSCGS

SEQ ID NO: 27705 - protein, 118 aa, synthetic construct
  source 1..118: note = Description of Artificial Sequence: Synthetic polypeptide; note = VH of XENP021737
EVQLVQSGAEVKKPGATVKISCKASGFNIKDYYMHWVQQAPGKGLEWMGWIDHENGDTEYAPKFQGRVTITADTSTNTAYMELSSLRSEDTAVYYCYARGVRQALDYWGQGTLVTVSS

SEQ ID NO: 27706 - protein, 5 aa, synthetic construct
  source 1..5: note = Description of Artificial Sequence: Synthetic peptide; note = XENP021737 vhCDR1
DYYMH

SEQ ID NO: 27707 - protein, 17 aa, synthetic construct
  source 1..17: note = Description of Artificial Sequence: Synthetic peptide; note = XENP021737 vhCDR2
WIDHENGDTEYAPKFQG

SEQ ID NO: 27708 - protein, 9 aa, synthetic construct
  source 1..9: note = Description of Artificial Sequence: Synthetic peptide; note = XENP021737 vhCDR3
RGVRQALDY

SEQ ID NO: 27709 - protein, 214 aa, synthetic construct; identical to SEQ ID NO: 17250
  source 1..214: note = Description of Artificial Sequence: Synthetic polypeptide; note = XENP021737 2A11_H1.151_L2_Fab Light Chain

SEQ ID NO: 27710 - protein, 107 aa, synthetic construct; identical to SEQ ID NO: 17251
  source 1..107: note = Description of Artificial Sequence: Synthetic polypeptide; note = VL of XENP021737

SEQ ID NO: 27711 - protein, 11 aa, synthetic construct
  source 1..11: note = Description of Artificial Sequence: Synthetic peptide; note = XENP021737 vlCDR1
QASQDIGNYLN

SEQ ID NO: 27712 - protein, 7 aa, synthetic construct
  source 1..7: note = Description of Artificial Sequence: Synthetic peptide; note = XENP021737 vlCDR2
YTSRLHS

SEQ ID NO: 27713 - protein, 9 aa, synthetic construct
  source 1..9: note = Description of Artificial Sequence: Synthetic peptide; note = XENP021737 vlCDR3
QQGNTLPYT

SEQ ID NO: 27714 - protein, 223 aa, synthetic construct
  source 1..223: note = Description of Artificial Sequence: Synthetic polypeptide; note = XENP021738 2A11_H1.152_L2_Fab Heavy Chain
EVQLVQSGAEVKKPGATVKISCKASGFNIKDYYMHWVQQAPGKGLEWMGWIDVENGDTEYAPKFQGRVTITADTSTNTAYMELSSLRSEDTAVYYCYARGVRQALDYWGQGTLVTVSSASTKGPSVFPLAPSSKSTSGGTAALGCLVKDYFPEPVTVSWNSGALTSGVHTFPAVLQSSGLYSLSSVVTVPSSSLGTQTYICNVNHKPSNTKVDKKVEPKSCGS

SEQ ID NO: 27715 - protein, 118 aa, synthetic construct
  source 1..118: note = Description of Artificial Sequence: Synthetic polypeptide; note = VH of XENP021738
EVQLVQSGAEVKKPGATVKISCKASGFNIKDYYMHWVQQAPGKGLEWMGWIDVENGDTEYAPKFQGRVTITADTSTNTAYMELSSLRSEDTAVYYCYARGVRQALDYWGQGTLVTVSS

SEQ ID NO: 27716 - protein, 5 aa, synthetic construct
  source 1..5: note = Description of Artificial Sequence: Synthetic peptide; note = XENP021738 vhCDR1
DYYMH

SEQ ID NO: 27717 - protein, 17 aa, synthetic construct
  source 1..17: note = Description of Artificial Sequence: Synthetic peptide; note = XENP021738 vhCDR2
WIDVENGDTEYAPKFQG

SEQ ID NO: 27718 - protein, 9 aa, synthetic construct
  source 1..9: note = Description of Artificial Sequence: Synthetic peptide; note = XENP021738 vhCDR3
RGVRQALDY

SEQ ID NO: 27719 - protein, 214 aa, synthetic construct; identical to SEQ ID NO: 17250
  source 1..214: note = Description of Artificial Sequence: Synthetic polypeptide; note = XENP021738 2A11_H1.152_L2_Fab Light Chain

SEQ ID NO: 27720 - protein, 107 aa, synthetic construct; identical to SEQ ID NO: 17251
  source 1..107: note = Description of Artificial Sequence: Synthetic polypeptide; note = VL of XENP021738

SEQ ID NO: 27721 - protein, 11 aa, synthetic construct
  source 1..11: note = Description of Artificial Sequence: Synthetic peptide; note = XENP021738 vlCDR1
QASQDIGNYLN

SEQ ID NO: 27722 - protein, 7 aa, synthetic construct
  source 1..7: note = Description of Artificial Sequence: Synthetic peptide; note = XENP021738 vlCDR2
YTSRLHS

SEQ ID NO: 27723 - protein, 9 aa, synthetic construct
  source 1..9: note = Description of Artificial Sequence: Synthetic peptide; note = XENP021738 vlCDR3
QQGNTLPYT

SEQ ID NO: 27724 - protein, 223 aa, synthetic construct
  source 1..223: note = Description of Artificial Sequence: Synthetic polypeptide; note = XENP021739 2A11_H1.153_L2_Fab Heavy Chain
EVQLVQSGAEVKKPGATVKISCKASGFNIKDYYMHWVQQAPGKGLEWMGWIDWENGDTEYAPKFQGRVTITADTSTNTAYMELSSLRSEDTAVYYCYARGVRQALDYWGQGTLVTVSSASTKGPSVFPLAPSSKSTSGGTAALGCLVKDYFPEPVTVSWNSGALTSGVHTFPAVLQSSGLYSLSSVVTVPSSSLGTQTYICNVNHKPSNTKVDKKVEPKSCGS

SEQ ID NO: 27725 - protein, 118 aa, synthetic construct
  source 1..118: note = Description of Artificial Sequence: Synthetic polypeptide; note = VH of XENP021739
EVQLVQSGAEVKKPGATVKISCKASGFNIKDYYMHWVQQAPGKGLEWMGWIDWENGDTEYAPKFQGRVTITADTSTNTAYMELSSLRSEDTAVYYCYARGVRQALDYWGQGTLVTVSS

SEQ ID NO: 27726 - protein, 5 aa, synthetic construct
  source 1..5: note = Description of Artificial Sequence: Synthetic peptide; note = XENP021739 vhCDR1
DYYMH

SEQ ID NO: 27727 - protein, 17 aa, synthetic construct
  source 1..17: note = Description of Artificial Sequence: Synthetic peptide; note = XENP021739 vhCDR2
WIDWENGDTEYAPKFQG

SEQ ID NO: 27728 - protein, 9 aa, synthetic construct
  source 1..9: note = Description of Artificial Sequence: Synthetic peptide; note = XENP021739 vhCDR3
RGVRQALDY

SEQ ID NO: 27729 - protein, 214 aa, synthetic construct; identical to SEQ ID NO: 17250
  source 1..214: note = Description of Artificial Sequence: Synthetic polypeptide; note = XENP021739 2A11_H1.153_L2_Fab Light Chain

SEQ ID NO: 27730 - protein, 107 aa, synthetic construct; identical to SEQ ID NO: 17251
  source 1..107: note = Description of Artificial Sequence: Synthetic polypeptide; note = VL of XENP021739

SEQ ID NO: 27731 - protein, 11 aa, synthetic construct
  source 1..11: note = Description of Artificial Sequence: Synthetic peptide; note = XENP021739 vlCDR1
QASQDIGNYLN

SEQ ID NO: 27732 - protein, 7 aa, synthetic construct
  source 1..7: note = Description of Artificial Sequence: Synthetic peptide; note = XENP021739 vlCDR2
YTSRLHS

SEQ ID NO: 27733 - protein, 9 aa, synthetic construct
  source 1..9: note = Description of Artificial Sequence: Synthetic peptide; note = XENP021739 vlCDR3
QQGNTLPYT

SEQ ID NO: 27734 - protein, 223 aa, synthetic construct
  source 1..223: note = Description of Artificial Sequence: Synthetic polypeptide; note = XENP021794 2A11_H1.125_L2_Fab Heavy Chain
EVQLVQSGAEVKKPGATVKISCKASGFNIKHYFMHWVQQAPGKGLEWMGWIDPYLGDTEYAPKFQGRVTITADTSTNTAYMELSSLRSEDTAVYYCYARGVYQALDYWGQGTLVTVSSASTKGPSVFPLAPSSKSTSGGTAALGCLVKDYFPEPVTVSWNSGALTSGVHTFPAVLQSSGLYSLSSVVTVPSSSLGTQTYICNVNHKPSNTKVDKKVEPKSCGS

SEQ ID NO: 27735 - protein, 118 aa, synthetic construct; identical to SEQ ID NO: 22065
  source 1..118: note = Description of Artificial Sequence: Synthetic polypeptide; note = VH of XENP021794

SEQ ID NO: 27736 - protein, 5 aa, synthetic construct
  source 1..5: note = Description of Artificial Sequence: Synthetic peptide; note = XENP021794 vhCDR1
HYFMH

SEQ ID NO: 27737 - protein, 17 aa, synthetic construct
  source 1..17: note = Description of Artificial Sequence: Synthetic peptide; note = XENP021794 vhCDR2
WIDPYLGDTEYAPKFQG

SEQ ID NO: 27738 - protein, 9 aa, synthetic construct
  source 1..9: note = Description of Artificial Sequence: Synthetic peptide; note = XENP021794 vhCDR3
RGVYQALDY

SEQ ID NO: 27739 - protein, 214 aa, synthetic construct; identical to SEQ ID NO: 17250
  source 1..214: note = Description of Artificial Sequence: Synthetic polypeptide; note = XENP021794 2A11_H1.125_L2_Fab Light Chain

SEQ ID NO: 27740 - protein, 107 aa, synthetic construct; identical to SEQ ID NO: 17251
  source 1..107: note = Description of Artificial Sequence: Synthetic polypeptide; note = VL of XENP021794

SEQ ID NO: 27741 - protein, 11 aa, synthetic construct
  source 1..11: note = Description of Artificial Sequence: Synthetic peptide; note = XENP021794 vlCDR1
QASQDIGNYLN

SEQ ID NO: 27742 - protein, 7 aa, synthetic construct
  source 1..7: note = Description of Artificial Sequence: Synthetic peptide; note = XENP021794 vlCDR2
YTSRLHS

SEQ ID NO: 27743 - protein, 9 aa, synthetic construct
  source 1..9: note = Description of Artificial Sequence: Synthetic peptide; note = XENP021794 vlCDR3
QQGNTLPYT

SEQ ID NO: 27744 - protein, 223 aa, synthetic construct; identical to SEQ ID NO: 27474
  source 1..223: note = Description of Artificial Sequence: Synthetic polypeptide; note = XENP021795 2A11_H1.127_L2_Fab Heavy Chain

SEQ ID NO: 27745 - protein, 118 aa, synthetic construct; identical to SEQ ID NO: 27475
  source 1..118: note = Description of Artificial Sequence: Synthetic polypeptide; note = VH of XENP021795

SEQ ID NO: 27746 - protein, 5 aa, synthetic construct
  source 1..5: note = Description of Artificial Sequence: Synthetic peptide; note = XENP021795 vhCDR1
HYFMH

SEQ ID NO: 27747 - protein, 17 aa, synthetic construct
  source 1..17: note = Description of Artificial Sequence: Synthetic peptide; note = XENP021795 vhCDR2
WIDPELGDTEYAPKFQG

SEQ ID NO: 27748 - protein, 9 aa, synthetic construct
  source 1..9: note = Description of Artificial Sequence: Synthetic peptide; note = XENP021795 vhCDR3
RGVYQALDY

SEQ ID NO: 27749 - protein, 214 aa, synthetic construct; identical to SEQ ID NO: 17250
  source 1..214: note = Description of Artificial Sequence: Synthetic polypeptide; note = XENP021795 2A11_H1.127_L2_Fab Light Chain

SEQ ID NO: 27750 - protein, 107 aa, synthetic construct; identical to SEQ ID NO: 17251
  source 1..107: note = Description of Artificial Sequence: Synthetic polypeptide; note = VL of XENP021795

SEQ ID NO: 27751 - protein, 11 aa, synthetic construct
  source 1..11: note = Description of Artificial Sequence: Synthetic peptide; note = XENP021795 vlCDR1
QASQDIGNYLN

SEQ ID NO: 27752 - protein, 7 aa, synthetic construct
  source 1..7: note = Description of Artificial Sequence: Synthetic peptide; note = XENP021795 vlCDR2
YTSRLHS

SEQ ID NO: 27753 - protein, 9 aa, synthetic construct
  source 1..9: note = Description of Artificial Sequence: Synthetic peptide; note = XENP021795 vlCDR3
QQGNTLPYT

SEQ ID NO: 27754 - protein, 223 aa, synthetic construct; identical to SEQ ID NO: 25194
  source 1..223: note = Description of Artificial Sequence: Synthetic polypeptide; note = XENP021796 2A11_H1_L2.102_Fab Heavy Chain

SEQ ID NO: 27755 - protein, 118 aa, synthetic construct; identical to SEQ ID NO: 17236
  source 1..118: note = Description of Artificial Sequence: Synthetic polypeptide; note = VH of XENP021796

SEQ ID NO: 27756 - protein, 5 aa, synthetic construct
  source 1..5: note = Description of Artificial Sequence: Synthetic peptide; note = XENP021796 vhCDR1
DYYMH

SEQ ID NO: 27757 - protein, 17 aa, synthetic construct
  source 1..17: note = Description of Artificial Sequence: Synthetic peptide; note = XENP021796 vhCDR2
WIDPENGDTEYAPKFQG

SEQ ID NO: 27758 - protein, 9 aa, synthetic construct
  source 1..9: note = Description of Artificial Sequence: Synthetic peptide; note = XENP021796 vhCDR3
RGVRQALDY

SEQ ID NO: 27759 - protein, 214 aa, synthetic construct
  source 1..214: note = Description of Artificial Sequence: Synthetic polypeptide; note = XENP021796 2A11_H1_L2.102_Fab Light Chain
DIQMTQSPAFLSVTPGEKVTITCQASQDIGNYLNWFQQKPDQTVKLLIYYTSRLHSGVPSRFSGSGSGTDYTFTISSLEAEDAATYFCQEGNTLPYTFGGGTKVEIKRTVAAPSVFIFPPSDEQLKSGTASVVCLLNNFYPREAKVQWKVDNALQSGNSQESVTEQDSKDSTYSLSSTLTLSKADYEKHKVYACEVTHQGLSSPVTKSFNRGEC

SEQ ID NO: 27760 - protein, 107 aa, synthetic construct
  source 1..107: note = Description of Artificial Sequence: Synthetic polypeptide; note = VL of XENP021796
DIQMTQSPAFLSVTPGEKVTITCQASQDIGNYLNWFQQKPDQTVKLLIYYTSRLHSGVPSRFSGSGSGTDYTFTISSLEAEDAATYFCQEGNTLPYTFGGGTKVEIK

SEQ ID NO: 27761 - protein, 11 aa, synthetic construct
  source 1..11: note = Description of Artificial Sequence: Synthetic peptide; note = XENP021796 vlCDR1
QASQDIGNYLN

SEQ ID NO: 27762 - protein, 7 aa, synthetic construct
  source 1..7: note = Description of Artificial Sequence: Synthetic peptide; note = XENP021796 vlCDR2
YTSRLHS

SEQ ID NO: 27763 - protein, 9 aa, synthetic construct
  source 1..9: note = Description of Artificial Sequence: Synthetic peptide; note = XENP021796 vlCDR3
QEGNTLPYT

SEQ ID NO: 27764 - protein, 223 aa, synthetic construct; identical to SEQ ID NO: 25194
  source 1..223: note = Description of Artificial Sequence: Synthetic polypeptide; note = XENP021801 2A11_H1_L2.103_Fab Heavy Chain

SEQ ID NO: 27765 - protein, 118 aa, synthetic construct; identical to SEQ ID NO: 17236
  source 1..118: note = Description of Artificial Sequence: Synthetic polypeptide; note = VH of XENP021801

SEQ ID NO: 27766 - protein, 5 aa, synthetic construct
  source 1..5: note = Description of Artificial Sequence: Synthetic peptide; note = XENP021801 vhCDR1
DYYMH

SEQ ID NO: 27767 - protein, 17 aa, synthetic construct
  source 1..17: note = Description of Artificial Sequence: Synthetic peptide; note = XENP021801 vhCDR2
WIDPENGDTEYAPKFQG

SEQ ID NO: 27768 - protein, 9 aa, synthetic construct
  source 1..9: note = Description of Artificial Sequence: Synthetic peptide; note = XENP021801 vhCDR3
RGVRQALDY

SEQ ID NO: 27769 - protein, 214 aa, synthetic construct
  source 1..214: note = Description of Artificial Sequence: Synthetic polypeptide; note = XENP021801 2A11_H1_L2.103_Fab Light Chain
DIQMTQSPAFLSVTPGEKVTITCQASQDIGNYLNWFQQKPDQTVKLLIYYTSRLHSGVPSRFSGSGSGTDYTFTISSLEAEDAATYFCQHGNTLPYTFGGGTKVEIKRTVAAPSVFIFPPSDEQLKSGTASVVCLLNNFYPREAKVQWKVDNALQSGNSQESVTEQDSKDSTYSLSSTLTLSKADYEKHKVYACEVTHQGLSSPVTKSFNRGEC

SEQ ID NO: 27770 - protein, 107 aa, synthetic construct
  source 1..107: note = Description of Artificial Sequence: Synthetic polypeptide; note = VL of XENP021801
DIQMTQSPAFLSVTPGEKVTITCQASQDIGNYLNWFQQKPDQTVKLLIYYTSRLHSGVPSRFSGSGSGTDYTFTISSLEAEDAATYFCQHGNTLPYTFGGGTKVEIK

SEQ ID NO: 27771 - protein, 11 aa, synthetic construct
  source 1..11: note = Description of Artificial Sequence: Synthetic peptide; note = XENP021801 vlCDR1
QASQDIGNYLN

SEQ ID NO: 27772 - protein, 7 aa, synthetic construct
  source 1..7: note = Description of Artificial Sequence: Synthetic peptide; note = XENP021801 vlCDR2
YTSRLHS

SEQ ID NO: 27773 - protein, 9 aa, synthetic construct
  source 1..9: note = Description of Artificial Sequence: Synthetic peptide; note = XENP021801 vlCDR3
QHGNTLPYT

SEQ ID NO: 27774 - protein, 223 aa, synthetic construct; identical to SEQ ID NO: 25194
  source 1..223: note = Description of Artificial Sequence: Synthetic polypeptide; note = XENP021802 2A11_H1_L2.104_Fab Heavy Chain

SEQ ID NO: 27775 - protein, 118 aa, synthetic construct; identical to SEQ ID NO: 17236
  source 1..118: note = Description of Artificial Sequence: Synthetic polypeptide; note = VH of XENP021802

SEQ ID NO: 27776 - protein, 5 aa, synthetic construct
  source 1..5: note = Description of Artificial Sequence: Synthetic peptide; note = XENP021802 vhCDR1
DYYMH

SEQ ID NO: 27777 - protein, 17 aa, synthetic construct
  source 1..17: note = Description of Artificial Sequence: Synthetic peptide; note = XENP021802 vhCDR2
WIDPENGDTEYAPKFQG

SEQ ID NO: 27778 - protein, 9 aa, synthetic construct
  source 1..9: note = Description of Artificial Sequence: Synthetic peptide; note = XENP021802 vhCDR3
RGVRQALDY

SEQ ID NO: 27779 - protein, 214 aa, synthetic construct
  source 1..214: note = Description of Artificial Sequence: Synthetic polypeptide; note = XENP021802 2A11_H1_L2.104_Fab Light Chain
DIQMTQSPAFLSVTPGEKVTITCQASQDIGNYLNWFQQKPDQTVKLLIYYTSRLHSGVPSRFSGSGSGTDYTFTISSLEAEDAATYFCQKGNTLPYTFGGGTKVEIKRTVAAPSVFIFPPSDEQLKSGTASVVCLLNNFYPREAKVQWKVDNALQSGNSQESVTEQDSKDSTYSLSSTLTLSKADYEKHKVYACEVTHQGLSSPVTKSFNRGEC

SEQ ID NO: 27780 - protein, 107 aa, synthetic construct
  source 1..107: note = Description of Artificial Sequence: Synthetic polypeptide; note = VL of XENP021802
DIQMTQSPAFLSVTPGEKVTITCQASQDIGNYLNWFQQKPDQTVKLLIYYTSRLHSGVPSRFSGSGSGTDYTFTISSLEAEDAATYFCQKGNTLPYTFGGGTKVEIK

SEQ ID NO: 27781 - protein, 11 aa, synthetic construct
  source 1..11: note = Description of Artificial Sequence: Synthetic peptide; note = XENP021802 vlCDR1
QASQDIGNYLN

SEQ ID NO: 27782 - protein, 7 aa, synthetic construct
  source 1..7: note = Description of Artificial Sequence: Synthetic peptide; note = XENP021802 vlCDR2
YTSRLHS

SEQ ID NO: 27783 - protein, 9 aa, synthetic construct
  source 1..9: note = Description of Artificial Sequence: Synthetic peptide; note = XENP021802 vlCDR3
QKGNTLPYT

SEQ ID NO: 27784 - protein, 223 aa, synthetic construct; identical to SEQ ID NO: 25194
  source 1..223: note = Description of Artificial Sequence: Synthetic polypeptide; note = XENP021803 2A11_H1_L2.105_Fab Heavy Chain

SEQ ID NO: 27785 - protein, 118 aa, synthetic construct; identical to SEQ ID NO: 17236
  source 1..118: note = Description of Artificial Sequence: Synthetic polypeptide; note = VH of XENP021803

SEQ ID NO: 27786 - protein, 5 aa, synthetic construct
  source 1..5: note = Description of Artificial Sequence: Synthetic peptide; note = XENP021803 vhCDR1
DYYMH

SEQ ID NO: 27787 - protein, 17 aa, synthetic construct
  source 1..17: note = Description of Artificial Sequence: Synthetic peptide; note = XENP021803 vhCDR2
WIDPENGDTEYAPKFQG

SEQ ID NO: 27788 - protein, 9 aa, synthetic construct
  source 1..9: note = Description of Artificial Sequence: Synthetic peptide; note = XENP021803 vhCDR3
RGVRQALDY

SEQ ID NO: 27789 - protein, 214 aa, synthetic construct
  source 1..214: note = Description of Artificial Sequence: Synthetic polypeptide; note = XENP021803 2A11_H1_L2.105_Fab Light Chain
DIQMTQSPAFLSVTPGEKVTITCQASQDIGNYLNWFQQKPDQTVKLLIYYTSRLHSGVPSRFSGSGSGTDYTFTISSLEAEDAATYFCQTGNTLPYTFGGGTKVEIKRTVAAPSVFIFPPSDEQLKSGTASVVCLLNNFYPREAKVQWKVDNALQSGNSQESVTEQDSKDSTYSLSSTLTLSKADYEKHKVYACEVTHQGLSSPVTKSFNRGEC

SEQ ID NO: 27790 - protein, 107 aa, synthetic construct
  source 1..107: note = Description of Artificial Sequence: Synthetic polypeptide; note = VL of XENP021803
DIQMTQSPAFLSVTPGEKVTITCQASQDIGNYLNWFQQKPDQTVKLLIYYTSRLHSGVPSRFSGSGSGTDYTFTISSLEAEDAATYFCQTGNTLPYTFGGGTKVEIK

SEQ ID NO: 27791 - protein, 11 aa, synthetic construct
  source 1..11: note = Description of Artificial Sequence: Synthetic peptide; note = XENP021803 vlCDR1
QASQDIGNYLN

SEQ ID NO: 27792 - protein, 7 aa, synthetic construct
  source 1..7: note = Description of Artificial Sequence: Synthetic peptide; note = XENP021803 vlCDR2
YTSRLHS

SEQ ID NO: 27793 - protein, 9 aa, synthetic construct
  source 1..9: note = Description of Artificial Sequence: Synthetic peptide; note = XENP021803 vlCDR3
QTGNTLPYT

SEQ ID NO: 27794 - protein, 223 aa, synthetic construct; identical to SEQ ID NO: 25194
  source 1..223: note = Description of Artificial Sequence: Synthetic polypeptide; note = XENP021804 2A11_H1_L2.106_Fab Heavy Chain

SEQ ID NO: 27795 - protein, 118 aa, synthetic construct; identical to SEQ ID NO: 17236
  source 1..118: note = Description of Artificial Sequence: Synthetic polypeptide; note = VH of XENP021804

SEQ ID NO: 27796 - protein, 5 aa, synthetic construct
  source 1..5: note = Description of Artificial Sequence: Synthetic peptide; note = XENP021804 vhCDR1
DYYMH

SEQ ID NO: 27797 - protein, 17 aa, synthetic construct
  source 1..17: note = Description of Artificial Sequence: Synthetic peptide; note = XENP021804 vhCDR2
WIDPENGDTEYAPKFQG

SEQ ID NO: 27798 - protein, 9 aa, synthetic construct
  source 1..9: note = Description of Artificial Sequence: Synthetic peptide; note = XENP021804 vhCDR3
RGVRQALDY

SEQ ID NO: 27799 - protein, 214 aa, synthetic construct
  source 1..214: note = Description of Artificial Sequence: Synthetic polypeptide; note = XENP021804 2A11_H1_L2.106_Fab Light Chain
DIQMTQSPAFLSVTPGEKVTITCQASQDIGNYLNWFQQKPDQTVKLLIYYTSRLHSGVPSRFSGSGSGTDYTFTISSLEAEDAATYFCQRGNTLPYTFGGGTKVEIKRTVAAPSVFIFPPSDEQLKSGTASVVCLLNNFYPREAKVQWKVDNALQSGNSQESVTEQDSKDSTYSLSSTLTLSKADYEKHKVYACEVTHQGLSSPVTKSFNRGEC

SEQ ID NO: 27800 - protein, 107 aa, synthetic construct
  source 1..107: note = Description of Artificial Sequence: Synthetic polypeptide; note = VL of XENP021804
DIQMTQSPAFLSVTPGEKVTITCQASQDIGNYLNWFQQKPDQTVKLLIYYTSRLHSGVPSRFSGSGSGTDYTFTISSLEAEDAATYFCQRGNTLPYTFGGGTKVEIK

SEQ ID NO: 27801 - protein, 11 aa, synthetic construct
  source 1..11: note = Description of Artificial Sequence: Synthetic peptide; note = XENP021804 vlCDR1
QASQDIGNYLN

SEQ ID NO: 27802 - protein, 7 aa, synthetic construct
  source 1..7: note = Description of Artificial Sequence: Synthetic peptide; note = XENP021804 vlCDR2
YTSRLHS

SEQ ID NO: 27803 - protein, 9 aa, synthetic construct
  source 1..9: note = Description of Artificial Sequence: Synthetic peptide; note = XENP021804 vlCDR3
QRGNTLPYT

SEQ ID NO: 27804 - protein, 223 aa, synthetic construct; identical to SEQ ID NO: 25194
  source 1..223: note = Description of Artificial Sequence: Synthetic polypeptide; note = XENP021805 2A11_H1_L2.107_Fab Heavy Chain

SEQ ID NO: 27805 - protein, 118 aa, synthetic construct; identical to SEQ ID NO: 17236
  source 1..118: note = Description of Artificial Sequence: Synthetic polypeptide; note = VH of XENP021805

SEQ ID NO: 27806 - protein, 5 aa, synthetic construct
  source 1..5: note = Description of Artificial Sequence: Synthetic peptide; note = XENP021805 vhCDR1
DYYMH

SEQ ID NO: 27807 - protein, 17 aa, synthetic construct
  source 1..17: note = Description of Artificial Sequence: Synthetic peptide; note = XENP021805 vhCDR2
WIDPENGDTEYAPKFQG

SEQ ID NO: 27808 - protein, 9 aa, synthetic construct
  source 1..9: note = Description of Artificial Sequence: Synthetic peptide; note = XENP021805 vhCDR3
RGVRQALDY

SEQ ID NO: 27809 - protein, 214 aa, synthetic construct
  source 1..214: note = Description of Artificial Sequence: Synthetic polypeptide; note = XENP021805 2A11_H1_L2.107_Fab Light Chain
DIQMTQSPAFLSVTPGEKVTITCQASQDIGNYLNWFQQKPDQTVKLLIYYTSRLHSGVPSRFSGSGSGTDYTFTISSLEAEDAATYFCQIGNTLPYTFGGGTKVEIKRTVAAPSVFIFPPSDEQLKSGTASVVCLLNNFYPREAKVQWKVDNALQSGNSQESVTEQDSKDSTYSLSSTLTLSKADYEKHKVYACEVTHQGLSSPVTKSFNRGEC

SEQ ID NO: 27810 - protein, 107 aa, synthetic construct
  source 1..107: note = Description of Artificial Sequence: Synthetic polypeptide; note = VL of XENP021805
DIQMTQSPAFLSVTPGEKVTITCQASQDIGNYLNWFQQKPDQTVKLLIYYTSRLHSGVPSRFSGSGSGTDYTFTISSLEAEDAATYFCQIGNTLPYTFGGGTKVEIK

SEQ ID NO: 27811 - protein, 11 aa, synthetic construct
  source 1..11: note = Description of Artificial Sequence: Synthetic peptide; note = XENP021805 vlCDR1
QASQDIGNYLN

SEQ ID NO: 27812 - protein, 7 aa, synthetic construct
  source 1..7: note = Description of Artificial Sequence: Synthetic peptide; note = XENP021805 vlCDR2
YTSRLHS

SEQ ID NO: 27813 - protein, 9 aa, synthetic construct
  source 1..9: note = Description of Artificial Sequence: Synthetic peptide; note = XENP021805 vlCDR3
QIGNTLPYT

SEQ ID NO: 27814 - protein, 223 aa, synthetic construct; identical to SEQ ID NO: 25194
  source 1..223: note = Description of Artificial Sequence: Synthetic polypeptide; note = XENP021806 2A11_H1_L2.108_Fab Heavy Chain

SEQ ID NO: 27815 - protein, 118 aa, synthetic construct; identical to SEQ ID NO: 17236
  source 1..118: note = Description of Artificial Sequence: Synthetic polypeptide; note = VH of XENP021806

SEQ ID NO: 27816 - protein, 5 aa, synthetic construct
  source 1..5: note = Description of Artificial Sequence: Synthetic peptide; note = XENP021806 vhCDR1
DYYMH

SEQ ID NO: 27817 - protein, 17 aa, synthetic construct
  source 1..17: note = Description of Artificial Sequence: Synthetic peptide; note = XENP021806 vhCDR2
WIDPENGDTEYAPKFQG

SEQ ID NO: 27818 - protein, 9 aa, synthetic construct
  source 1..9: note = Description of Artificial Sequence: Synthetic peptide; note = XENP021806 vhCDR3
RGVRQALDY

SEQ ID NO: 27819 - protein, 214 aa, synthetic construct
  source 1..214: note = Description of Artificial Sequence: Synthetic polypeptide; note = XENP021806 2A11_H1_L2.108_Fab Light Chain
DIQMTQSPAFLSVTPGEKVTITCQASQDIGNYLNWFQQKPDQTVKLLIYYTSRLHSGVPSRFSGSGSGTDYTFTISSLEAEDAATYFCQYGNTLPYTFGGGTKVEIKRTVAAPSVFIFPPSDEQLKSGTASVVCLLNNFYPREAKVQWKVDNALQSGNSQESVTEQDSKDSTYSLSSTLTLSKADYEKHKVYACEVTHQGLSSPVTKSFNRGEC

SEQ ID NO: 27820 - protein, 107 aa, synthetic construct
  source 1..107: note = Description of Artificial Sequence: Synthetic polypeptide; note = VL of XENP021806
DIQMTQSPAFLSVTPGEKVTITCQASQDIGNYLNWFQQKPDQTVKLLIYYTSRLHSGVPSRFSGSGSGTDYTFTISSLEAEDAATYFCQYGNTLPYTFGGGTKVEIK

SEQ ID NO: 27821 - protein, 11 aa, synthetic construct
  source 1..11: note = Description of Artificial Sequence: Synthetic peptide; note = XENP021806 vlCDR1
QASQDIGNYLN

SEQ ID NO: 27822 - protein, 7 aa, synthetic construct
  source 1..7: note = Description of Artificial Sequence: Synthetic peptide; note = XENP021806 vlCDR2
YTSRLHS

SEQ ID NO: 27823 - protein, 9 aa, synthetic construct
  source 1..9: note = Description of Artificial Sequence: Synthetic peptide; note = XENP021806 vlCDR3
QYGNTLPYT

SEQ ID NO: 27824 - protein, 223 aa, synthetic construct; identical to SEQ ID NO: 25194
  source 1..223: note = Description of Artificial Sequence: Synthetic polypeptide; note = XENP021807 2A11_H1_L2.109_Fab Heavy Chain

SEQ ID NO: 27825 - protein, 118 aa, synthetic construct; identical to SEQ ID NO: 17236
  source 1..118: note = Description of Artificial Sequence: Synthetic polypeptide; note = VH of XENP021807

SEQ ID NO: 27826 - protein, 5 aa, synthetic construct
  source 1..5: note = Description of Artificial Sequence: Synthetic peptide; note = XENP021807 vhCDR1
DYYMH

SEQ ID NO: 27827 - protein, 17 aa, synthetic construct
  source 1..17: note = Description of Artificial Sequence: Synthetic peptide; note = XENP021807 vhCDR2
WIDPENGDTEYAPKFQG

SEQ ID NO: 27828 - protein, 9 aa, synthetic construct
  source 1..9: note = Description of Artificial Sequence: Synthetic peptide; note = XENP021807 vhCDR3
RGVRQALDY

SEQ ID NO: 27829 - protein, 214 aa, synthetic construct
  source 1..214: note = Description of Artificial Sequence: Synthetic polypeptide; note = XENP021807 2A11_H1_L2.109_Fab Light Chain
DIQMTQSPAFLSVTPGEKVTITCQASQDIGNYLNWFQQKPDQTVKLLIYFTSRLHSGVPSRFSGSGSGTDYTFTISSLEAEDAATYFCQQGHQLPYTFGGGTKVEIKRTVAAPSVFIFPPSDEQLKSGTASVVCLLNNFYPREAKVQWKVDNALQSGNSQESVTEQDSKDSTYSLSSTLTLSKADYEKHKVYACEVTHQGLSSPVTKSFNRGEC

SEQ ID NO: 27830 - protein, 107 aa, synthetic construct
  source 1..107: note = Description of Artificial Sequence: Synthetic polypeptide; note = VL of XENP021807
DIQMTQSPAFLSVTPGEKVTITCQASQDIGNYLNWFQQKPDQTVKLLIYFTSRLHSGVPSRFSGSGSGTDYTFTISSLEAEDAATYFCQQGHQLPYTFGGGTKVEIK

SEQ ID NO: 27831 - protein, 11 aa, synthetic construct
  source 1..11: note = Description of Artificial Sequence: Synthetic peptide; note = XENP021807 vlCDR1
QASQDIGNYLN

SEQ ID NO: 27832 - protein, 7 aa, synthetic construct
  source 1..7: note = Description of Artificial Sequence: Synthetic peptide; note = XENP021807 vlCDR2
FTSRLHS

SEQ ID NO: 27833 - protein, 9 aa, synthetic construct
  source 1..9: note = Description of Artificial Sequence: Synthetic peptide; note = XENP021807 vlCDR3
QQGHQLPYT

SEQ ID NO: 27834 - protein, 223 aa, synthetic construct; identical to SEQ ID NO: 25194
  source 1..223: note = Description of Artificial Sequence: Synthetic polypeptide; note = XENP021808 2A11_H1_L2.110_Fab Heavy Chain

SEQ ID NO: 27835 - protein, 118 aa, synthetic construct; identical to SEQ ID NO: 17236
  source 1..118: note = Description of Artificial Sequence: Synthetic polypeptide; note = VH of XENP021808

SEQ ID NO: 27836 - protein, 5 aa, synthetic construct
  source 1..5: note = Description of Artificial Sequence: Synthetic peptide; note = XENP021808 vhCDR1
DYYMH

SEQ ID NO: 27837 - protein, 17 aa, synthetic construct
  source 1..17: note = Description of Artificial Sequence: Synthetic peptide; note = XENP021808 vhCDR2
WIDPENGDTEYAPKFQG

SEQ ID NO: 27838 - protein, 9 aa, synthetic construct
  source 1..9: note = Description of Artificial Sequence: Synthetic peptide; note = XENP021808 vhCDR3
RGVRQALDY

SEQ ID NO: 27839 - protein, 214 aa, synthetic construct
  source 1..214: note = Description of Artificial Sequence: Synthetic polypeptide; note = XENP021808 2A11_H1_L2.110_Fab Light Chain
DIQMTQSPAFLSVTPGEKVTITCQASQDIGNYLNWFQQKPDQTVKLLIYYTSHLHSGVPSRFSGSGSGTDYTFTISSLEAEDAATYFCQQGHQLPYTFGGGTKVEIKRTVAAPSVFIFPPSDEQLKSGTASVVCLLNNFYPREAKVQWKVDNALQSGNSQESVTEQDSKDSTYSLSSTLTLSKADYEKHKVYACEVTHQGLSSPVTKSFNRGEC

SEQ ID NO: 27840 - protein, 107 aa, synthetic construct
  source 1..107: note = Description of Artificial Sequence: Synthetic polypeptide; note = VL of XENP021808
DIQMTQSPAFLSVTPGEKVTITCQASQDIGNYLNWFQQKPDQTVKLLIYYTSHLHSGVPSRFSGSGSGTDYTFTISSLEAEDAATYFCQQGHQLPYTFGGGTKVEIK

SEQ ID NO: 27841 - protein, 11 aa, synthetic construct
  source 1..11: note = Description of Artificial Sequence: Synthetic peptide; note = XENP021808 vlCDR1
QASQDIGNYLN

SEQ ID NO: 27842 - protein, 7 aa, synthetic construct
  source 1..7: note = Description of Artificial Sequence: Synthetic peptide; note = XENP021808 vlCDR2
YTSHLHS

SEQ ID NO: 27843 - protein, 9 aa, synthetic construct
  source 1..9: note = Description of Artificial Sequence: Synthetic peptide; note = XENP021808 vlCDR3
QQGHQLPYT

SEQ ID NO: 27844 - protein, 223 aa, synthetic construct; identical to SEQ ID NO: 25194
  source 1..223: note = Description of Artificial Sequence: Synthetic polypeptide; note = XENP021809 2A11_H1_L2.111_Fab Heavy Chain

SEQ ID NO: 27845 - protein, 118 aa, synthetic construct; identical to SEQ ID NO: 17236
  source 1..118: note = Description of Artificial Sequence: Synthetic polypeptide; note = VH of XENP021809

SEQ ID NO: 27846 - protein, 5 aa, synthetic construct
  source 1..5: note = Description of Artificial Sequence: Synthetic peptide; note = XENP021809 vhCDR1
DYYMH

SEQ ID NO: 27847 - protein, 17 aa, synthetic construct
  source 1..17: note = Description of Artificial Sequence: Synthetic peptide; note = XENP021809 vhCDR2
WIDPENGDTEYAPKFQG

SEQ ID NO: 27848 - protein, 9 aa, synthetic construct
  source 1..9: note = Description of Artificial Sequence: Synthetic peptide; note = XENP021809 vhCDR3
RGVRQALDY

SEQ ID NO: 27849 - protein, 214 aa, synthetic construct
  source 1..214: note = Description of Artificial Sequence: Synthetic polypeptide; note = XENP021809 2A11_H1_L2.111_Fab Light Chain
DIQMTQSPAFLSVTPGEKVTITCQASQDIGNYLNWFQQKPDQTVKLLIYYTSYLHSGVPSRFSGSGSGTDYTFTISSLEAEDAATYFCQQGHQLPYTFGGGTKVEIKRTVAAPSVFIFPPSDEQLKSGTASVVCLLNNFYPREAKVQWKVDNALQSGNSQESVTEQDSKDSTYSLSSTLTLSKADYEKHKVYACEVTHQGLSSPVTKSFNRGEC

SEQ ID NO: 27850 - protein, 107 aa, synthetic construct
  source 1..107: note = Description of Artificial Sequence: Synthetic polypeptide; note = VL of XENP021809
DIQMTQSPAFLSVTPGEKVTITCQASQDIGNYLNWFQQKPDQTVKLLIYYTSYLHSGVPSRFSGSGSGTDYTFTISSLEAEDAATYFCQQGHQLPYTFGGGTKVEIK

SEQ ID NO: 27851 - protein, 11 aa, synthetic construct
  source 1..11: note = Description of Artificial Sequence: Synthetic peptide; note = XENP021809 vlCDR1
QASQDIGNYLN

SEQ ID NO: 27852 - protein, 7 aa, synthetic construct
  source 1..7: note = Description of Artificial Sequence: Synthetic peptide; note = XENP021809 vlCDR2
YTSYLHS

SEQ ID NO: 27853 - protein, 9 aa, synthetic construct
  source 1..9: note = Description of Artificial Sequence: Synthetic peptide; note = XENP021809 vlCDR3
QQGHQLPYT

SEQ ID NO: 27854 - protein, 223 aa, synthetic construct; identical to SEQ ID NO: 25194
  source 1..223: note = Description of Artificial Sequence: Synthetic polypeptide; note = XENP021810 2A11_H1_L2.112_Fab Heavy Chain

SEQ ID NO: 27855 - protein, 118 aa, synthetic construct; identical to SEQ ID NO: 17236
  source 1..118: note = Description of Artificial Sequence: Synthetic polypeptide; note = VH of XENP021810

SEQ ID NO: 27856 - protein, 5 aa, synthetic construct
  source 1..5: note = Description of Artificial Sequence: Synthetic peptide; note = XENP021810 vhCDR1
DYYMH

SEQ ID NO: 27857 - protein, 17 aa, synthetic construct
  source 1..17: note = Description of Artificial Sequence: Synthetic peptide; note = XENP021810 vhCDR2
WIDPENGDTEYAPKFQG

SEQ ID NO: 27858 - protein, 9 aa, synthetic construct
  source 1..9: note = Description of Artificial Sequence: Synthetic peptide; note = XENP021810 vhCDR3
RGVRQALDY

SEQ ID NO: 27859 - protein, 214 aa, synthetic construct
  source 1..214: note = Description of Artificial Sequence: Synthetic polypeptide; note = XENP021810 2A11_H1_L2.112_Fab Light Chain
DIQMTQSPAFLSVTPGEKVTITCQASQDIGNYLNWFQQKPDQTVKLLIYFTSHLHSGVPSRFSGSGSGTDYTFTISSLEAEDAATYFCQQGNTLPYTFGGGTKVEIKRTVAAPSVFIFPPSDEQLKSGTASVVCLLNNFYPREAKVQWKVDNALQSGNSQESVTEQDSKDSTYSLSSTLTLSKADYEKHKVYACEVTHQGLSSPVTKSFNRGEC

SEQ ID NO: 27860 - protein, 107 aa, synthetic construct
  source 1..107: note = Description of Artificial Sequence: Synthetic polypeptide; note = VL of XENP021810
DIQMTQSPAFLSVTPGEKVTITCQASQDIGNYLNWFQQKPDQTVKLLIYFTSHLHSGVPSRFSGSGSGTDYTFTISSLEAEDAATYFCQQGNTLPYTFGGGTKVEIK

SEQ ID NO: 27861 - protein, 11 aa, synthetic construct
  source 1..11: note = Description of Artificial Sequence: Synthetic peptide; note = XENP021810 vlCDR1
QASQDIGNYLN

SEQ ID NO: 27862 - protein, 7 aa, synthetic construct
  source 1..7: note = Description of Artificial Sequence: Synthetic peptide; note = XENP021810 vlCDR2
FTSHLHS

SEQ ID NO: 27863 - protein, 9 aa, synthetic construct
  source 1..9: note = Description of Artificial Sequence: Synthetic peptide; note = XENP021810 vlCDR3
QQGNTLPYT

SEQ ID NO: 27864 - protein, 223 aa, synthetic construct; identical to SEQ ID NO: 25194
  source 1..223: note = Description of Artificial Sequence: Synthetic polypeptide; note = XENP021811 2A11_H1_L2.113_Fab Heavy Chain

SEQ ID NO: 27865 - protein, 118 aa, synthetic construct; identical to SEQ ID NO: 17236
  source 1..118: note = Description of Artificial Sequence: Synthetic polypeptide; note = VH of XENP021811

SEQ ID NO: 27866 - protein, 5 aa, synthetic construct
  source 1..5: note = Description of Artificial Sequence: Synthetic peptide; note = XENP021811 vhCDR1
DYYMH

SEQ ID NO: 27867 - protein, 17 aa, synthetic construct
  source 1..17: note = Description of Artificial Sequence: Synthetic peptide; note = XENP021811 vhCDR2
WIDPENGDTEYAPKFQG

SEQ ID NO: 27868 - protein, 9 aa, synthetic construct
  source 1..9: note = Description of Artificial Sequence: Synthetic peptide; note = XENP021811 vhCDR3
RGVRQALDY

SEQ ID NO: 27869 - protein, 214 aa, synthetic construct; identical to SEQ ID NO: 22079
  source 1..214: note = Description of Artificial Sequence: Synthetic polypeptide; note = XENP021811 2A11_H1_L2.113_Fab Light Chain

SEQ ID NO: 27870 - protein, 107 aa, synthetic construct; identical to SEQ ID NO: 22080
  source 1..107: note = Description of Artificial Sequence: Synthetic polypeptide; note = VL of XENP021811

SEQ ID NO: 27871 - protein, 11 aa, synthetic construct
  source 1..11: note = Description of Artificial Sequence: Synthetic peptide; note = XENP021811 vlCDR1
QASQDIGNYLN

SEQ ID NO: 27872 - protein, 7 aa, synthetic construct
  source 1..7: note = Description of Artificial Sequence: Synthetic peptide; note = XENP021811 vlCDR2
FTSYLHS

SEQ ID NO: 27873 - protein, 9 aa, synthetic construct
  source 1..9: note = Description of Artificial Sequence: Synthetic peptide; note = XENP021811 vlCDR3
QQGNTLPYT

SEQ ID NO: 27874 - protein, 223 aa, synthetic construct; identical to SEQ ID NO: 25194
  source 1..223: note = Description of Artificial Sequence: Synthetic polypeptide; note = XENP021812 2A11_H1_L2.114_Fab Heavy Chain

SEQ ID NO: 27875 - protein, 118 aa, synthetic construct; identical to SEQ ID NO: 17236
  source 1..118: note = Description of Artificial Sequence: Synthetic polypeptide; note = VH of XENP021812

SEQ ID NO: 27876 - protein, 5 aa, synthetic construct
  source 1..5: note = Description of Artificial Sequence: Synthetic peptide; note = XENP021812 vhCDR1
DYYMH

SEQ ID NO: 27877 - protein, 17 aa, synthetic construct
  source 1..17: note = Description of Artificial Sequence: Synthetic peptide; note = XENP021812 vhCDR2
WIDPENGDTEYAPKFQG

SEQ ID NO: 27878 - protein, 9 aa, synthetic construct
  source 1..9: note = Description of Artificial Sequence: Synthetic peptide; note = XENP021812 vhCDR3
RGVRQALDY

SEQ ID NO: 27879 - protein, 214 aa, synthetic construct
  source 1..214: note = Description of Artificial Sequence: Synthetic polypeptide; note = XENP021812 2A11_H1_L2.114_Fab Light Chain
DIQMTQSPAFLSVTPGEKVTITCQASQDIGNYLNWFQQKPDQTVKLLIYFTSHLHSGVPSRFSGSGSGTDYTFTISSLEAEDAATYFCQQGNQLPYTFGGGTKVEIKRTVAAPSVFIFPPSDEQLKSGTASVVCLLNNFYPREAKVQWKVDNALQSGNSQESVTEQDSKDSTYSLSSTLTLSKADYEKHKVYACEVTHQGLSSPVTKSFNRGEC

SEQ ID NO: 27880 - protein, 107 aa, synthetic construct
  source 1..107: note = Description of Artificial Sequence: Synthetic polypeptide; note = VL of XENP021812
DIQMTQSPAFLSVTPGEKVTITCQASQDIGNYLNWFQQKPDQTVKLLIYFTSHLHSGVPSRFSGSGSGTDYTFTISSLEAEDAATYFCQQGNQLPYTFGGGTKVEIK

SEQ ID NO: 27881 - protein, 11 aa, synthetic construct
  source 1..11: note = Description of Artificial Sequence: Synthetic peptide; note = XENP021812 vlCDR1
QASQDIGNYLN

SEQ ID NO: 27882 - protein, 7 aa, synthetic construct
  source 1..7: note = Description of Artificial Sequence: Synthetic peptide; note = XENP021812 vlCDR2
FTSHLHS

SEQ ID NO: 27883 - protein, 9 aa, synthetic construct
  source 1..9: note = Description of Artificial Sequence: Synthetic peptide; note = XENP021812 vlCDR3
QQGNQLPYT

SEQ ID NO: 27884 - protein, 223 aa, synthetic construct; identical to SEQ ID NO: 25194
  source 1..223: note = Description of Artificial Sequence: Synthetic polypeptide; note = XENP021813 2A11_H1_L2.115_Fab Heavy Chain

SEQ ID NO: 27885 - protein, 118 aa, synthetic construct; identical to SEQ ID NO: 17236
  source 1..118: note = Description of Artificial Sequence: Synthetic polypeptide; note = VH of XENP021813

SEQ ID NO: 27886 - protein, 5 aa, synthetic construct
  source 1..5: note = Description of Artificial Sequence: Synthetic peptide; note = XENP021813 vhCDR1
DYYMH

SEQ ID NO: 27887 - protein, 17 aa, synthetic construct
  source 1..17: note = Description of Artificial Sequence: Synthetic peptide; note = XENP021813 vhCDR2
WIDPENGDTEYAPKFQG

SEQ ID NO: 27888 - protein, 9 aa, synthetic construct
  source 1..9: note = Description of Artificial Sequence: Synthetic peptide; note = XENP021813 vhCDR3
RGVRQALDY

SEQ ID NO: 27889 - protein, 214 aa, synthetic construct
  source 1..214: note = Description of Artificial Sequence: Synthetic polypeptide; note = XENP021813 2A11_H1_L2.115_Fab Light Chain
DIQMTQSPAFLSVTPGEKVTITCQASQDIGNYLNWFQQKPDQTVKLLIYFTSYLHSGVPSRFSGSGSGTDYTFTISSLEAEDAATYFCQQGNQLPYTFGGGTKVEIKRTVAAPSVFIFPPSDEQLKSGTASVVCLLNNFYPREAKVQWKVDNALQSGNSQESVTEQDSKDSTYSLSSTLTLSKADYEKHKVYACEVTHQGLSSPVTKSFNRGEC

SEQ ID NO: 27890 - protein, 107 aa, synthetic construct
  source 1..107: note = Description of Artificial Sequence: Synthetic polypeptide; note = VL of XENP021813
DIQMTQSPAFLSVTPGEKVTITCQASQDIGNYLNWFQQKPDQTVKLLIYFTSYLHSGVPSRFSGSGSGTDYTFTISSLEAEDAATYFCQQGNQLPYTFGGGTKVEIK

SEQ ID NO: 27891 - protein, 11 aa, synthetic construct
  source 1..11: note = Description of Artificial Sequence: Synthetic peptide; note = XENP021813 vlCDR1
QASQDIGNYLN

SEQ ID NO: 27892 - protein, 7 aa, synthetic construct
  source 1..7: note = Description of Artificial Sequence: Synthetic peptide; note = XENP021813 vlCDR2
FTSYLHS

SEQ ID NO: 27893 - protein, 9 aa, synthetic construct
  source 1..9: note = Description of Artificial Sequence: Synthetic peptide; note = XENP021813 vlCDR3
QQGNQLPYT

SEQ ID NO: 27894 - protein, 223 aa, synthetic construct; identical to SEQ ID NO: 25194
  source 1..223: note = Description of Artificial Sequence: Synthetic polypeptide; note = XENP021814 2A11_H1_L2.116_Fab Heavy Chain

SEQ ID NO: 27895 - protein, 118 aa, synthetic construct; identical to SEQ ID NO: 17236
  source 1..118: note = Description of Artificial Sequence: Synthetic polypeptide; note = VH of XENP021814

SEQ ID NO: 27896 - protein, 5 aa, synthetic construct
  source 1..5: note = Description of Artificial Sequence: Synthetic peptide; note = XENP021814 vhCDR1
DYYMH

SEQ ID NO: 27897 - protein, 17 aa, synthetic construct
  source 1..17: note = Description of Artificial Sequence: Synthetic peptide; note = XENP021814 vhCDR2
WIDPENGDTEYAPKFQG

SEQ ID NO: 27898 - protein, 9 aa, synthetic construct
  source 1..9: note = Description of Artificial Sequence: Synthetic peptide; note = XENP021814 vhCDR3
RGVRQALDY

SEQ ID NO: 27899 - protein, 214 aa, synthetic construct; identical to SEQ ID NO: 22119
  source 1..214: note = Description of Artificial Sequence: Synthetic polypeptide; note = XENP021814 2A11_H1_L2.116_Fab Light Chain

SEQ ID NO: 27900 - protein, 107 aa, synthetic construct; identical to SEQ ID NO: 22120
  source 1..107: note = Description of Artificial Sequence: Synthetic polypeptide; note = VL of XENP021814

SEQ ID NO: 27901 - protein, 11 aa, synthetic construct
  source 1..11: note = Description of Artificial Sequence: Synthetic peptide; note = XENP021814 vlCDR1
QASQDIGNYLN

SEQ ID NO: 27902 - protein, 7 aa, synthetic construct
  source 1..7: note = Description of Artificial Sequence: Synthetic peptide; note = XENP021814 vlCDR2
FTSHLHS

SEQ ID NO: 27903 - protein, 9 aa, synthetic construct
  source 1..9: note = Description of Artificial Sequence: Synthetic peptide; note = XENP021814 vlCDR3
QQGHQLPYT

SEQ ID NO: 27904 - protein, 223 aa, synthetic construct; identical to SEQ ID NO: 25194
  source 1..223: note = Description of Artificial Sequence: Synthetic polypeptide; note = XENP021815 2A11_H1_L2.117_Fab Heavy Chain

SEQ ID NO: 27905 - protein, 118 aa, synthetic construct; identical to SEQ ID NO: 17236
  source 1..118: note = Description of Artificial Sequence: Synthetic polypeptide; note = VH of XENP021815

SEQ ID NO: 27906 - protein, 5 aa, synthetic construct
  source 1..5: note = Description of Artificial Sequence: Synthetic peptide; note = XENP021815 vhCDR1
DYYMH

SEQ ID NO: 27907 - protein, 17 aa, synthetic construct
  source 1..17: note = Description of Artificial Sequence: Synthetic peptide; note = XENP021815 vhCDR2
WIDPENGDTEYAPKFQG

SEQ ID NO: 27908 - protein, 9 aa, synthetic construct
  source 1..9: note = Description of Artificial Sequence: Synthetic peptide; note = XENP021815 vhCDR3
RGVRQALDY

SEQ ID NO: 27909 - protein, 214 aa, synthetic construct
  source 1..214: note = Description of Artificial Sequence: Synthetic polypeptide; note = XENP021815 2A11_H1_L2.117_Fab Light Chain
DIQMTQSPAFLSVTPGEKVTITCQASQDIGNYLNWFQQKPDQTVKLLIYFTSYLHSGVPSRFSGSGSGTDYTFTISSLEAEDAATYFCQQGHQLPYTFGGGTKVEIKRTVAAPSVFIFPPSDEQLKSGTASVVCLLNNFYPREAKVQWKVDNALQSGNSQESVTEQDSKDSTYSLSSTLTLSKADYEKHKVYACEVTHQGLSSPVTKSFNRGEC

SEQ ID NO: 27910 - protein, 107 aa, synthetic construct
  source 1..107: note = Description of Artificial Sequence: Synthetic polypeptide; note = VL of XENP021815
DIQMTQSPAFLSVTPGEKVTITCQASQDIGNYLNWFQQKPDQTVKLLIYFTSYLHSGVPSRFSGSGSGTDYTFTISSLEAEDAATYFCQQGHQLPYTFGGGTKVEIK

SEQ ID NO: 27911 - protein, 11 aa, synthetic construct
  source 1..11: note = Description of Artificial Sequence: Synthetic peptide; note = XENP021815 vlCDR1
QASQDIGNYLN

SEQ ID NO: 27912 - protein, 7 aa, synthetic construct
  source 1..7: note = Description of Artificial Sequence: Synthetic peptide; note = XENP021815 vlCDR2
FTSYLHS

SEQ ID NO: 27913 - protein, 9 aa, synthetic construct
  source 1..9: note = Description of Artificial Sequence: Synthetic peptide; note = XENP021815 vlCDR3
QQGHQLPYT

SEQ ID NO: 27914 - protein, 223 aa, synthetic construct; identical to SEQ ID NO: 25194
  source 1..223: note = Description of Artificial Sequence: Synthetic polypeptide; note = XENP021816 2A11_H1_L2.118_Fab Heavy Chain

SEQ ID NO: 27915 - protein, 118 aa, synthetic construct; identical to SEQ ID NO: 17236
  source 1..118: note = Description of Artificial Sequence: Synthetic polypeptide; note = VH of XENP021816

SEQ ID NO: 27916 - protein, 5 aa, synthetic construct
  source 1..5: note = Description of Artificial Sequence: Synthetic peptide; note = XENP021816 vhCDR1
DYYMH

SEQ ID NO: 27917 - protein, 17 aa, synthetic construct
  source 1..17: note = Description of Artificial Sequence: Synthetic peptide; note = XENP021816 vhCDR2
WIDPENGDTEYAPKFQG

SEQ ID NO: 27918 - protein, 9 aa, synthetic construct
  source 1..9: note = Description of Artificial Sequence: Synthetic peptide; note = XENP021816 vhCDR3
RGVRQALDY

SEQ ID NO: 27919 - protein, 214 aa, synthetic construct
  source 1..214: note = Description of Artificial Sequence: Synthetic polypeptide; note = XENP021816 2A11_H1_L2.118_Fab Light Chain
DIQMTQSPAFLSVTPGEKVTITCQASQDIGNYLNWFQQKPDQTVKLLIYFTSRLHSGVPSRFSGSGSGTDYTFTISSLEAEDAATYFCQQGNQLPYTFGGGTKVEIKRTVAAPSVFIFPPSDEQLKSGTASVVCLLNNFYPREAKVQWKVDNALQSGNSQESVTEQDSKDSTYSLSSTLTLSKADYEKHKVYACEVTHQGLSSPVTKSFNRGEC

SEQ ID NO: 27920 - protein, 107 aa, synthetic construct
  source 1..107: note = Description of Artificial Sequence: Synthetic polypeptide; note = VL of XENP021816
DIQMTQSPAFLSVTPGEKVTITCQASQDIGNYLNWFQQKPDQTVKLLIYFTSRLHSGVPSRFSGSGSGTDYTFTISSLEAEDAATYFCQQGNQLPYTFGGGTKVEIK

SEQ ID NO: 27921 - protein, 11 aa, synthetic construct
  source 1..11: note = Description of Artificial Sequence: Synthetic peptide; note = XENP021816 vlCDR1
QASQDIGNYLN

SEQ ID NO: 27922 - protein, 7 aa, synthetic construct
  source 1..7: note = Description of Artificial Sequence: Synthetic peptide; note = XENP021816 vlCDR2
FTSRLHS

SEQ ID NO: 27923 - protein, 9 aa, synthetic construct
  source 1..9: note = Description of Artificial Sequence: Synthetic peptide; note = XENP021816 vlCDR3
QQGNQLPYT

SEQ ID NO: 27924 - protein, 223 aa, synthetic construct; identical to SEQ ID NO: 25194
  source 1..223: note = Description of Artificial Sequence: Synthetic polypeptide; note = XENP021817 2A11_H1_L2.119_Fab Heavy Chain

SEQ ID NO: 27925 - protein, 118 aa, synthetic construct; identical to SEQ ID NO: 17236
  source 1..118: note = Description of Artificial Sequence: Synthetic polypeptide; note = VH of XENP021817

SEQ ID NO: 27926 - protein, 5 aa, synthetic construct
  source 1..5: note = Description of Artificial Sequence: Synthetic peptide; note = XENP021817 vhCDR1
DYYMH

SEQ ID NO: 27927 - protein, 17 aa, synthetic construct
  source 1..17: note = Description of Artificial Sequence: Synthetic peptide; note = XENP021817 vhCDR2
WIDPENGDTEYAPKFQG

SEQ ID NO: 27928 - protein, 9 aa, synthetic construct
  source 1..9: note = Description of Artificial Sequence: Synthetic peptide; note = XENP021817 vhCDR3
RGVRQALDY

SEQ ID NO: 27929 - protein, 214 aa, synthetic construct
  source 1..214: note = Description of Artificial Sequence: Synthetic polypeptide; note = XENP021817 2A11_H1_L2.119_Fab Light Chain
DIQMTQSPAFLSVTPGEKVTITCQASQDIGNYLNWFQQKPDQTVKLLIYYTSHLHSGVPSRFSGSGSGTDYTFTISSLEAEDAATYFCQQGNQLPYTFGGGTKVEIKRTVAAPSVFIFPPSDEQLKSGTASVVCLLNNFYPREAKVQWKVDNALQSGNSQESVTEQDSKDSTYSLSSTLTLSKADYEKHKVYACEVTHQGLSSPVTKSFNRGEC

SEQ ID NO: 27930 - protein, 107 aa, synthetic construct
  source 1..107: note = Description of Artificial Sequence: Synthetic polypeptide; note = VL of XENP021817
DIQMTQSPAFLSVTPGEKVTITCQASQDIGNYLNWFQQKPDQTVKLLIYYTSHLHSGVPSRFSGSGSGTDYTFTISSLEAEDAATYFCQQGNQLPYTFGGGTKVEIK

SEQ ID NO: 27931 - protein, 11 aa, synthetic construct
  source 1..11: note = Description of Artificial Sequence: Synthetic peptide; note = XENP021817 vlCDR1
QASQDIGNYLN

SEQ ID NO: 27932 - protein, 7 aa, synthetic construct
  source 1..7: note = Description of Artificial Sequence: Synthetic peptide; note = XENP021817 vlCDR2
YTSHLHS

SEQ ID NO: 27933 - protein, 9 aa, synthetic construct
  source 1..9: note = Description of Artificial Sequence: Synthetic peptide; note = XENP021817 vlCDR3
QQGNQLPYT

SEQ ID NO: 27934 - protein, 223 aa, synthetic construct; identical to SEQ ID NO: 25194
  source 1..223: note = Description of Artificial Sequence: Synthetic polypeptide; note = XENP021818 2A11_H1_L2.120_Fab Heavy Chain

SEQ ID NO: 27935 - protein, 118 aa, synthetic construct; identical to SEQ ID NO: 17236
  source 1..118: note = Description of Artificial Sequence: Synthetic polypeptide; note = VH of XENP021818

SEQ ID NO: 27936 - protein, 5 aa, synthetic construct
  source 1..5: note = Description of Artificial Sequence: Synthetic peptide; note = XENP021818 vhCDR1
DYYMH

SEQ ID NO: 27937 - protein, 17 aa, synthetic construct
  source 1..17: note = Description of Artificial Sequence: Synthetic peptide; note = XENP021818 vhCDR2
WIDPENGDTEYAPKFQG

SEQ ID NO: 27938 - protein, 9 aa, synthetic construct
  source 1..9: note = Description of Artificial Sequence: Synthetic peptide; note = XENP021818 vhCDR3
RGVRQALDY

SEQ ID NO: 27939 - protein, 214 aa, synthetic construct
  source 1..214: note = Description of Artificial Sequence: Synthetic polypeptide; note = XENP021818 2A11_H1_L2.120_Fab Light Chain
DIQMTQSPAFLSVTPGEKVTITCQASQDIGNYLNWFQQKPDQTVKLLIYYTSYLHSGVPSRFSGSGSGTDYTFTISSLEAEDAATYFCQQGNQLPYTFGGGTKVEIKRTVAAPSVFIFPPSDEQLKSGTASVVCLLNNFYPREAKVQWKVDNALQSGNSQESVTEQDSKDSTYSLSSTLTLSKADYEKHKVYACEVTHQGLSSPVTKSFNRGEC

SEQ ID NO: 27940 - protein, 107 aa, synthetic construct
  source 1..107: note = Description of Artificial Sequence: Synthetic polypeptide; note = VL of XENP021818
DIQMTQSPAFLSVTPGEKVTITCQASQDIGNYLNWFQQKPDQTVKLLIYYTSYLHSGVPSRFSGSGSGTDYTFTISSLEAEDAATYFCQQGNQLPYTFGGGTKVEIK

SEQ ID NO: 27941 - protein, 11 aa, synthetic construct
  source 1..11: note = Description of Artificial Sequence: Synthetic peptide; note = XENP021818 vlCDR1
QASQDIGNYLN

SEQ ID NO: 27942 - protein, 7 aa, synthetic construct
  source 1..7: note = Description of Artificial Sequence: Synthetic peptide; note = XENP021818 vlCDR2
YTSYLHS

SEQ ID NO: 27943 - protein, 9 aa, synthetic construct
  source 1..9: note = Description of Artificial Sequence: Synthetic peptide; note = XENP021818 vlCDR3
QQGNQLPYT

SEQ ID NO: 27944 - protein, 223 aa, synthetic construct; identical to SEQ ID NO: 25194
  source 1..223: note = Description of Artificial Sequence: Synthetic polypeptide; note = XENP021819 2A11_H1_L2.121_Fab Heavy Chain

SEQ ID NO: 27945 - protein, 118 aa, synthetic construct; identical to SEQ ID NO: 17236
  source 1..118: note = Description of Artificial Sequence: Synthetic polypeptide; note = VH of XENP021819

SEQ ID NO: 27946 - protein, 5 aa, synthetic construct
  source 1..5: note = Description of Artificial Sequence: Synthetic peptide; note = XENP021819 vhCDR1
DYYMH

SEQ ID NO: 27947 - protein, 17 aa, synthetic construct
  source 1..17: note = Description of Artificial Sequence: Synthetic peptide; note = XENP021819 vhCDR2
WIDPENGDTEYAPKFQG

SEQ ID NO: 27948 - protein, 9 aa, synthetic construct
  source 1..9: note = Description of Artificial Sequence: Synthetic peptide; note = XENP021819 vhCDR3
RGVRQALDY

SEQ ID NO: 27949 - protein, 214 aa, synthetic construct
  source 1..214: note = Description of Artificial Sequence: Synthetic polypeptide; note = XENP021819 2A11_H1_L2.121_Fab Light Chain
DIQMTQSPAFLSVTPGEKVTITCQASQDIGNYLNWFQQKPDQTVKLLIYYTSRLHSGVPSRFSGSGSGTDYTFTISSLEAEDAATYFCQQGHQLPYTFGGGTKVEIKRTVAAPSVFIFPPSDEQLKSGTASVVCLLNNFYPREAKVQWKVDNALQSGNSQESVTEQDSKDSTYSLSSTLTLSKADYEKHKVYACEVTHQGLSSPVTKSFNRGEC

SEQ ID NO: 27950 - protein, 107 aa, synthetic construct
  source 1..107: note = Description of Artificial Sequence: Synthetic polypeptide; note = VL of XENP021819
DIQMTQSPAFLSVTPGEKVTITCQASQDIGNYLNWFQQKPDQTVKLLIYYTSRLHSGVPSRFSGSGSGTDYTFTISSLEAEDAATYFCQQGHQLPYTFGGGTKVEIK

SEQ ID NO: 27951 - protein, 11 aa, synthetic construct
  source 1..11: note = Description of Artificial Sequence: Synthetic peptide; note = XENP021819 vlCDR1
QASQDIGNYLN

SEQ ID NO: 27952 - protein, 7 aa, synthetic construct
  source 1..7: note = Description of Artificial Sequence: Synthetic peptide; note = XENP021819 vlCDR2
YTSRLHS

SEQ ID NO: 27953 - protein, 9 aa, synthetic construct
  source 1..9: note = Description of Artificial Sequence: Synthetic peptide; note = XENP021819 vlCDR3
QQGHQLPYT

SEQ ID NO: 27954 - protein, 223 aa, synthetic construct; identical to SEQ ID NO: 27384
  source 1..223: note = Description of Artificial Sequence: Synthetic polypeptide; note = XENP021912 2A11_H1.117_L2.50_Fab Heavy Chain

SEQ ID NO: 27955 - protein, 118 aa, synthetic construct; identical to SEQ ID NO: 22105
  source 1..118: note = Description of Artificial Sequence: Synthetic polypeptide; note = VH of XENP021912

SEQ ID NO: 27956 - protein, 5 aa, synthetic construct
  source 1..5: note = Description of Artificial Sequence: Synthetic peptide; note = XENP021912 vhCDR1
HYFMH

SEQ ID NO: 27957 - protein, 17 aa, synthetic construct
  source 1..17: note = Description of Artificial Sequence: Synthetic peptide; note = XENP021912 vhCDR2
WIDPYLGDTEYAPKFQG

SEQ ID NO: 27958 - protein, 9 aa, synthetic construct
  source 1..9: note = Description of Artificial Sequence: Synthetic peptide; note = XENP021912 vhCDR3
RGVRQALDY

SEQ ID NO: 27959 - protein, 214 aa, synthetic construct; identical to SEQ ID NO: 22059
  source 1..214: note = Description of Artificial Sequence: Synthetic polypeptide; note = XENP021912 2A11_H1.117_L2.50_Fab Light Chain

SEQ ID NO: 27960 - protein, 107 aa, synthetic construct; identical to SEQ ID NO: 22060
  source 1..107: note = Description of Artificial Sequence: Synthetic polypeptide; note = VL of XENP021912

SEQ ID NO: 27961 - protein, 11 aa, synthetic construct
  source 1..11: note = Description of Artificial Sequence: Synthetic peptide; note = XENP021912 vlCDR1
QASQDIGNYLN

SEQ ID NO: 27962 - protein, 7 aa, synthetic construct
  source 1..7: note = Description of Artificial Sequence: Synthetic peptide; note = XENP021912 vlCDR2
YTSYLHS

SEQ ID NO: 27963 - protein, 9 aa, synthetic construct
  source 1..9: note = Description of Artificial Sequence: Synthetic peptide; note = XENP021912 vlCDR3
QQGNTLPYT

SEQ ID NO: 27964 - protein, 223 aa, synthetic construct; identical to SEQ ID NO: 27734
  source 1..223: note = Description of Artificial Sequence: Synthetic polypeptide; note = XENP021913 2A11_H1.125_L2.50_Fab Heavy Chain

SEQ ID NO: 27965 - protein, 118 aa, synthetic construct; identical to SEQ ID NO: 22065
  source 1..118: note = Description of Artificial Sequence: Synthetic polypeptide; note = VH of XENP021913

SEQ ID NO: 27966 - protein, 5 aa, synthetic construct
  source 1..5: note = Description of Artificial Sequence: Synthetic peptide; note = XENP021913 vhCDR1
HYFMH

SEQ ID NO: 27967 - protein, 17 aa, synthetic construct
  source 1..17: note = Description of Artificial Sequence: Synthetic peptide; note = XENP021913 vhCDR2
WIDPYLGDTEYAPKFQG

SEQ ID NO: 27968 - protein, 9 aa, synthetic construct
  source 1..9: note = Description of Artificial Sequence: Synthetic peptide; note = XENP021913 vhCDR3
RGVYQALDY

SEQ ID NO: 27969 - protein, 214 aa, synthetic construct; identical to SEQ ID NO: 22059
  source 1..214: note = Description of Artificial Sequence: Synthetic polypeptide; note = XENP021913 2A11_H1.125_L2.50_Fab Light Chain

SEQ ID NO: 27970 - protein, 107 aa, synthetic construct; identical to SEQ ID NO: 22060
  source 1..107: note = Description of Artificial Sequence: Synthetic polypeptide; note = VL of XENP021913

SEQ ID NO: 27971 - protein, 11 aa, synthetic construct
  source 1..11: note = Description of Artificial Sequence: Synthetic peptide; note = XENP021913 vlCDR1
QASQDIGNYLN

SEQ ID NO: 27972 - protein, 7 aa, synthetic construct
  source 1..7: note = Description of Artificial Sequence: Synthetic peptide; note = XENP021913 vlCDR2
YTSYLHS

SEQ ID NO: 27973 - protein, 9 aa, synthetic construct
  source 1..9: note = Description of Artificial Sequence: Synthetic peptide; note = XENP021913 vlCDR3
QQGNTLPYT

SEQ ID NO: 27974 - protein, 223 aa, synthetic construct; identical to SEQ ID NO: 27464
  source 1..223: note = Description of Artificial Sequence: Synthetic polypeptide; note = XENP021914 2A11_H1.126_L2.50_Fab Heavy Chain

SEQ ID NO: 27975 - protein, 118 aa, synthetic construct; identical to SEQ ID NO: 27465
  source 1..118: note = Description of Artificial Sequence: Synthetic polypeptide; note = VH of XENP021914

SEQ ID NO: 27976 - protein, 5 aa, synthetic construct
  source 1..5: note = Description of Artificial Sequence: Synthetic peptide; note = XENP021914 vhCDR1
HYFMH

SEQ ID NO: 27977 - protein, 17 aa, synthetic construct
  source 1..17: note = Description of Artificial Sequence: Synthetic peptide; note = XENP021914 vhCDR2
WIDPYTGDTEYAPKFQG

SEQ ID NO: 27978 - protein, 9 aa, synthetic construct
  source 1..9: note = Description of Artificial Sequence: Synthetic peptide; note = XENP021914 vhCDR3
RGVYQALDY

SEQ ID NO: 27979 - protein, 214 aa, synthetic construct; identical to SEQ ID NO: 22059
  source 1..214: note = Description of Artificial Sequence: Synthetic polypeptide; note = XENP021914 2A11_H1.126_L2.50_Fab Light Chain

SEQ ID NO: 27980 - protein, 107 aa, synthetic construct; identical to SEQ ID NO: 22060
  source 1..107: note = Description of Artificial Sequence: Synthetic polypeptide; note = VL of XENP021914

SEQ ID NO: 27981 - protein, 11 aa, synthetic construct
  source 1..11: note = Description of Artificial Sequence: Synthetic peptide; note = XENP021914 vlCDR1
QASQDIGNYLN

SEQ ID NO: 27982 - protein, 7 aa, synthetic construct
  source 1..7: note = Description of Artificial Sequence: Synthetic peptide; note = XENP021914 vlCDR2
YTSYLHS

SEQ ID NO: 27983 - protein, 9 aa, synthetic construct
  source 1..9: note = Description of Artificial Sequence: Synthetic peptide; note = XENP021914 vlCDR3
QQGNTLPYT

SEQ ID NO: 27984 - protein, 223 aa, synthetic construct; identical to SEQ ID NO: 27634
  source 1..223: note = Description of Artificial Sequence: Synthetic polypeptide; note = XENP021915 2A11_H1.144_L2.50_Fab Heavy Chain

SEQ ID NO: 27985 - protein, 118 aa, synthetic construct; identical to SEQ ID NO: 22085
  source 1..118: note = Description of Artificial Sequence: Synthetic polypeptide; note = VH of XENP021915

SEQ ID NO: 27986 - protein, 5 aa, synthetic construct
  source 1..5: note = Description of Artificial Sequence: Synthetic peptide; note = XENP021915 vhCDR1
DYFMH

SEQ ID NO: 27987 - protein, 17 aa, synthetic construct
  source 1..17: note = Description of Artificial Sequence: Synthetic peptide; note = XENP021915 vhCDR2
WIDPELGDTEYAPKFQG

SEQ ID NO: 27988 - protein, 9 aa, synthetic construct
  source 1..9: note = Description of Artificial Sequence: Synthetic peptide; note = XENP021915 vhCDR3
RGVYQALDY

SEQ ID NO: 27989 - protein, 214 aa, synthetic construct; identical to SEQ ID NO: 22059
  source 1..214: note = Description of Artificial Sequence: Synthetic polypeptide; note = XENP021915 2A11_H1.144_L2.50_Fab Light Chain

SEQ ID NO: 27990 - protein, 107 aa, synthetic construct; identical to SEQ ID NO: 22060
  source 1..107: note = Description of Artificial Sequence: Synthetic polypeptide; note = VL of XENP021915

SEQ ID NO: 27991 - protein, 11 aa, synthetic construct
  source 1..11: note = Description of Artificial Sequence: Synthetic peptide; note = XENP021915 vlCDR1
QASQDIGNYLN

SEQ ID NO: 27992 - protein, 7 aa, synthetic construct
  source 1..7: note = Description of Artificial Sequence: Synthetic peptide; note = XENP021915 vlCDR2
YTSYLHS

SEQ ID NO: 27993 - protein, 9 aa, synthetic construct
  source 1..9: note = Description of Artificial Sequence: Synthetic peptide; note = XENP021915 vlCDR3
QQGNTLPYT

SEQ ID NO: 27994 - protein, 223 aa, synthetic construct; identical to SEQ ID NO: 27474
  source 1..223: note = Description of Artificial Sequence: Synthetic polypeptide; note = XENP021916 2A11_H1.127_L2.50_Fab Heavy Chain

SEQ ID NO: 27995 - protein, 118 aa, synthetic construct; identical to SEQ ID NO: 27475
  source 1..118: note = Description of Artificial Sequence: Synthetic polypeptide; note = VH of XENP021916

SEQ ID NO: 27996 - protein, 5 aa, synthetic construct
  source 1..5: note = Description of Artificial Sequence: Synthetic peptide; note = XENP021916 vhCDR1
HYFMH

SEQ ID NO: 27997 - protein, 17 aa, synthetic construct
  source 1..17: note = Description of Artificial Sequence: Synthetic peptide; note = XENP021916 vhCDR2
WIDPELGDTEYAPKFQG

SEQ ID NO: 27998 - protein, 9 aa, synthetic construct
  source 1..9: note = Description of Artificial Sequence: Synthetic peptide; note = XENP021916 vhCDR3
RGVYQALDY

SEQ ID NO: 27999 - protein, 214 aa, synthetic construct; identical to SEQ ID NO: 22059
  source 1..214: note = Description of Artificial Sequence: Synthetic polypeptide; note = XENP021916 2A11_H1.127_L2.50_Fab Light Chain

SEQ ID NO: 28000 - protein, 107 aa, synthetic construct; identical to SEQ ID NO: 22060
  source 1..107: note = Description of Artificial Sequence: Synthetic polypeptide; note = VL of XENP021916

SEQ ID NO: 28001 - protein, 11 aa, synthetic construct
  source 1..11: note = Description of Artificial Sequence: Synthetic peptide; note = XENP021916 vlCDR1
QASQDIGNYLN

SEQ ID NO: 28002 - protein, 7 aa, synthetic construct
  source 1..7: note = Description of Artificial Sequence: Synthetic peptide; note = XENP021916 vlCDR2
YTSYLHS

SEQ ID NO: 28003 - protein, 9 aa, synthetic construct
  source 1..9: note = Description of Artificial Sequence: Synthetic peptide; note = XENP021916 vlCDR3
QQGNTLPYT

SEQ ID NO: 28004 - protein, 223 aa, synthetic construct; identical to SEQ ID NO: 27554
  source 1..223: note = Description of Artificial Sequence: Synthetic polypeptide; note = XENP021917 2A11_H1.136_L2.50_Fab Heavy Chain

SEQ ID NO: 28005 - protein, 118 aa, synthetic construct; identical to SEQ ID NO: 27555
  source 1..118: note = Description of Artificial Sequence: Synthetic polypeptide; note = VH of XENP021917

SEQ ID NO: 28006 - protein, 5 aa, synthetic construct
  source 1..5: note = Description of Artificial Sequence: Synthetic peptide; note = XENP021917 vhCDR1
HYYMH

SEQ ID NO: 28007 - protein, 17 aa, synthetic construct
  source 1..17: note = Description of Artificial Sequence: Synthetic peptide; note = XENP021917 vhCDR2
WIDPYLGDTEYAPKFQG

SEQ ID NO: 28008 - protein, 9 aa, synthetic construct
  source 1..9: note = Description of Artificial Sequence: Synthetic peptide; note = XENP021917 vhCDR3
RGVYQALDY

SEQ ID NO: 28009 - protein, 214 aa, synthetic construct; identical to SEQ ID NO: 22059
  source 1..214: note = Description of Artificial Sequence: Synthetic polypeptide; note = XENP021917 2A11_H1.136_L2.50_Fab Light Chain

SEQ ID NO: 28010 - protein, 107 aa, synthetic construct; identical to SEQ ID NO: 22060
  source 1..107: note = Description of Artificial Sequence: Synthetic polypeptide; note = VL of XENP021917

SEQ ID NO: 28011 - protein, 11 aa, synthetic construct
  source 1..11: note = Description of Artificial Sequence: Synthetic peptide; note = XENP021917 vlCDR1
QASQDIGNYLN

SEQ ID NO: 28012 - protein, 7 aa, synthetic construct
  source 1..7: note = Description of Artificial Sequence: Synthetic peptide; note = XENP021917 vlCDR2
YTSYLHS

SEQ ID NO: 28013 - protein, 9 aa, synthetic construct
  source 1..9: note = Description of Artificial Sequence: Synthetic peptide; note = XENP021917 vlCDR3
QQGNTLPYT

SEQ ID NO: 28014 - protein, 223 aa, synthetic construct
  source 1..223: note = Description of Artificial Sequence: Synthetic polypeptide; note = XENP021918 2A11_H1.154_L2.50_Fab Heavy Chain
EVQLVQSGAEVKKPGATVKISCKASGFNIKDYYMHWVQQAPGKGLEWMGWIDPELGDTEYAPKFQGRVTITADTSTNTAYMELSSLRSEDTAVYYCYARGVYQALDYWGQGTLVTVSSASTKGPSVFPLAPSSKSTSGGTAALGCLVKDYFPEPVTVSWNSGALTSGVHTFPAVLQSSGLYSLSSVVTVPSSSLGTQTYICNVNHKPSNTKVDKKVEPKSCGS

SEQ ID NO: 28015 - protein, 118 aa, synthetic construct
  source 1..118: note = Description of Artificial Sequence: Synthetic polypeptide; note = VH of XENP021918
EVQLVQSGAEVKKPGATVKISCKASGFNIKDYYMHWVQQAPGKGLEWMGWIDPELGDTEYAPKFQGRVTITADTSTNTAYMELSSLRSEDTAVYYCYARGVYQALDYWGQGTLVTVSS

SEQ ID NO: 28016 - protein, 5 aa, synthetic construct
  source 1..5: note = Description of Artificial Sequence: Synthetic peptide; note = XENP021918 vhCDR1
DYYMH

SEQ ID NO: 28017 - protein, 17 aa, synthetic construct
  source 1..17: note = Description of Artificial Sequence: Synthetic peptide; note = XENP021918 vhCDR2
WIDPELGDTEYAPKFQG

SEQ ID NO: 28018 - protein, 9 aa, synthetic construct
  source 1..9: note = Description of Artificial Sequence: Synthetic peptide; note = XENP021918 vhCDR3
RGVYQALDY

SEQ ID NO: 28019 - protein, 214 aa, synthetic construct; identical to SEQ ID NO: 22059
  source 1..214: note = Description of Artificial Sequence: Synthetic polypeptide; note = XENP021918 2A11_H1.154_L2.50_Fab Light Chain

SEQ ID NO: 28020 - protein, 107 aa, synthetic construct; identical to SEQ ID NO: 22060
  source 1..107: note = Description of Artificial Sequence: Synthetic polypeptide; note = VL of XENP021918

SEQ ID NO: 28021 - protein, 11 aa, synthetic construct
  source 1..11: note = Description of Artificial Sequence: Synthetic peptide; note = XENP021918 vlCDR1
QASQDIGNYLN

SEQ ID NO: 28022 - protein, 7 aa, synthetic construct
  source 1..7: note = Description of Artificial Sequence: Synthetic peptide; note = XENP021918 vlCDR2
YTSYLHS

SEQ ID NO: 28023 - protein, 9 aa, synthetic construct
  source 1..9: note = Description of Artificial Sequence: Synthetic peptide; note = XENP021918 vlCDR3
QQGNTLPYT

SEQ ID NO: 28024 - protein, 223 aa, synthetic construct; identical to SEQ ID NO: 27604
  source 1..223: note = Description of Artificial Sequence: Synthetic polypeptide; note = XENP021919 2A11_H1.141_L2.50_Fab Heavy Chain

SEQ ID NO: 28025 - protein, 118 aa, synthetic construct; identical to SEQ ID NO: 27605
  source 1..118: note = Description of Artificial Sequence: Synthetic polypeptide; note = VH of XENP021919

SEQ ID NO: 28026 - protein, 5 aa, synthetic construct
  source 1..5: note = Description of Artificial Sequence: Synthetic peptide; note = XENP021919 vhCDR1
DYFMH

SEQ ID NO: 28027 - protein, 17 aa, synthetic construct
  source 1..17: note = Description of Artificial Sequence: Synthetic peptide; note = XENP021919 vhCDR2
WIDPELGDTEYAPKFQG

SEQ ID NO: 28028 - protein, 9 aa, synthetic construct
  source 1..9: note = Description of Artificial Sequence: Synthetic peptide; note = XENP021919 vhCDR3
RGVRQALDY

SEQ ID NO: 28029 - protein, 214 aa, synthetic construct; identical to SEQ ID NO: 22059
  source 1..214: note = Description of Artificial Sequence: Synthetic polypeptide; note = XENP021919 2A11_H1.141_L2.50_Fab Light Chain

SEQ ID NO: 28030 - protein, 107 aa, synthetic construct; identical to SEQ ID NO: 22060
  source 1..107: note = Description of Artificial Sequence: Synthetic polypeptide; note = VL of XENP021919

SEQ ID NO: 28031 - protein, 11 aa, synthetic construct
  source 1..11: note = Description of Artificial Sequence: Synthetic peptide; note = XENP021919 vlCDR1
QASQDIGNYLN

SEQ ID NO: 28032 - protein, 7 aa, synthetic construct
  source 1..7: note = Description of Artificial Sequence: Synthetic peptide; note = XENP021919 vlCDR2
YTSYLHS

SEQ ID NO: 28033 - protein, 9 aa, synthetic construct
  source 1..9: note = Description of Artificial Sequence: Synthetic peptide; note = XENP021919 vlCDR3
QQGNTLPYT

SEQ ID NO: 28034 - protein, 223 aa, synthetic construct; identical to SEQ ID NO: 27384
  source 1..223: note = Description of Artificial Sequence: Synthetic polypeptide; note = XENP021920 2A11_H1.117_L2.113_Fab Heavy Chain

SEQ ID NO: 28035 - protein, 118 aa, synthetic construct; identical to SEQ ID NO: 22105
  source 1..118: note = Description of Artificial Sequence: Synthetic polypeptide; note = VH of XENP021920

SEQ ID NO: 28036 - protein, 5 aa, synthetic construct
  source 1..5: note = Description of Artificial Sequence: Synthetic peptide; note = XENP021920 vhCDR1
HYFMH

SEQ ID NO: 28037 - protein, 17 aa, synthetic construct
  source 1..17: note = Description of Artificial Sequence: Synthetic peptide; note = XENP021920 vhCDR2
WIDPYLGDTEYAPKFQG

SEQ ID NO: 28038 - protein, 9 aa, synthetic construct
  source 1..9: note = Description of Artificial Sequence: Synthetic peptide; note = XENP021920 vhCDR3
RGVRQALDY

SEQ ID NO: 28039 - protein, 214 aa, synthetic construct; identical to SEQ ID NO: 22079
  source 1..214: note = Description of Artificial Sequence: Synthetic polypeptide; note = XENP021920 2A11_H1.117_L2.113_Fab Light Chain

SEQ ID NO: 28040 - protein, 107 aa, synthetic construct; identical to SEQ ID NO: 22080
  source 1..107: note = Description of Artificial Sequence: Synthetic polypeptide; note = VL of XENP021920

SEQ ID NO: 28041 - protein, 11 aa, synthetic construct
  source 1..11: note = Description of Artificial Sequence: Synthetic peptide; note = XENP021920 vlCDR1
QASQDIGNYLN

SEQ ID NO: 28042 - protein, 7 aa, synthetic construct
  source 1..7: note = Description of Artificial Sequence: Synthetic peptide; note = XENP021920 vlCDR2
FTSYLHS

SEQ ID NO: 28043 - protein, 9 aa, synthetic construct
  source 1..9: note = Description of Artificial Sequence: Synthetic peptide; note = XENP021920 vlCDR3
QQGNTLPYT

SEQ ID NO: 28044 - protein, 223 aa, synthetic construct; identical to SEQ ID NO: 27734
  source 1..223: note = Description of Artificial Sequence: Synthetic polypeptide; note = XENP021921 2A11_H1.125_L2.113_Fab Heavy Chain

SEQ ID NO: 28045 - protein, 118 aa, synthetic construct; identical to SEQ ID NO: 22065
  source 1..118: note = Description of Artificial Sequence: Synthetic polypeptide; note = VH of XENP021921

SEQ ID NO: 28046 - protein, 5 aa, synthetic construct
  source 1..5: note = Description of Artificial Sequence: Synthetic peptide; note = XENP021921 vhCDR1
HYFMH

SEQ ID NO: 28047 - protein, 17 aa, synthetic construct
  source 1..17: note = Description of Artificial Sequence: Synthetic peptide; note = XENP021921 vhCDR2
WIDPYLGDTEYAPKFQG

SEQ ID NO: 28048 - protein, 9 aa, synthetic construct
  source 1..9: note = Description of Artificial Sequence: Synthetic peptide; note = XENP021921 vhCDR3
RGVYQALDY

SEQ ID NO: 28049 - protein, 214 aa, synthetic construct; identical to SEQ ID NO: 22079
  source 1..214: note = Description of Artificial Sequence: Synthetic polypeptide; note = XENP021921 2A11_H1.125_L2.113_Fab Light Chain

SEQ ID NO: 28050 - protein, 107 aa, synthetic construct; identical to SEQ ID NO: 22080
  source 1..107: note = Description of Artificial Sequence: Synthetic polypeptide; note = VL of XENP021921

SEQ ID NO: 28051 - protein, 11 aa, synthetic construct
  source 1..11: note = Description of Artificial Sequence: Synthetic peptide; note = XENP021921 vlCDR1
QASQDIGNYLN

SEQ ID NO: 28052 - protein, 7 aa, synthetic construct
  source 1..7: note = Description of Artificial Sequence: Synthetic peptide; note = XENP021921 vlCDR2
FTSYLHS

SEQ ID NO: 28053 - protein, 9 aa, synthetic construct
  source 1..9: note = Description of Artificial Sequence: Synthetic peptide; note = XENP021921 vlCDR3
QQGNTLPYT

SEQ ID NO: 28054 - protein, 223 aa, synthetic construct; identical to SEQ ID NO: 27464
  source 1..223: note = Description of Artificial Sequence: Synthetic polypeptide; note = XENP021922 2A11_H1.126_L2.113_Fab Heavy Chain

SEQ ID NO: 28055 - protein, 118 aa, synthetic construct; identical to SEQ ID NO: 27465
  source 1..118: note = Description of Artificial Sequence: Synthetic polypeptide; note = VH of XENP021922

SEQ ID NO: 28056 - protein, 5 aa, synthetic construct
  source 1..5: note = Description of Artificial Sequence: Synthetic peptide; note = XENP021922 vhCDR1
HYFMH

SEQ ID NO: 28057 - protein, 17 aa, synthetic construct
  source 1..17: note = Description of Artificial Sequence: Synthetic peptide; note = XENP021922 vhCDR2
WIDPYTGDTEYAPKFQG

SEQ ID NO: 28058 - protein, 9 aa, synthetic construct
  source 1..9: note = Description of Artificial Sequence: Synthetic peptide; note = XENP021922 vhCDR3
RGVYQALDY

SEQ ID NO: 28059 - protein, 214 aa, synthetic construct; identical to SEQ ID NO: 22079
  source 1..214: note = Description of Artificial Sequence: Synthetic polypeptide; note = XENP021922 2A11_H1.126_L2.113_Fab Light Chain

SEQ ID NO: 28060 - protein, 107 aa, synthetic construct; identical to SEQ ID NO: 22080
  source 1..107: note = Description of Artificial Sequence: Synthetic polypeptide; note = VL of XENP021922

SEQ ID NO: 28061 - protein, 11 aa, synthetic construct
  source 1..11: note = Description of Artificial Sequence: Synthetic peptide; note = XENP021922 vlCDR1
QASQDIGNYLN

SEQ ID NO: 28062 - protein, 7 aa, synthetic construct
  source 1..7: note = Description of Artificial Sequence: Synthetic peptide; note = XENP021922 vlCDR2
FTSYLHS

SEQ ID NO: 28063 - protein, 9 aa, synthetic construct
  source 1..9: note = Description of Artificial Sequence: Synthetic peptide; note = XENP021922 vlCDR3
QQGNTLPYT

SEQ ID NO: 28064 - protein, 223 aa, synthetic construct; identical to SEQ ID NO: 27634
  source 1..223: note = Description of Artificial Sequence: Synthetic polypeptide; note = XENP021923 2A11_H1.144_L2.113_Fab Heavy Chain

SEQ ID NO: 28065 - protein, 118 aa, synthetic construct; identical to SEQ ID NO: 22085
  source 1..118: note = Description of Artificial Sequence: Synthetic polypeptide; note = VH of XENP021923

SEQ ID NO: 28066 - protein, 5 aa, synthetic construct
  source 1..5: note = Description of Artificial Sequence: Synthetic peptide; note = XENP021923 vhCDR1
DYFMH

SEQ ID NO: 28067 - protein, 17 aa, synthetic construct
  source 1..17: note = Description of Artificial Sequence: Synthetic peptide; note = XENP021923 vhCDR2
WIDPELGDTEYAPKFQG

SEQ ID NO: 28068 - protein, 9 aa, synthetic construct
  source 1..9: note = Description of Artificial Sequence: Synthetic peptide; note = XENP021923 vhCDR3
RGVYQALDY

SEQ ID NO: 28069 - protein, 214 aa, synthetic construct; identical to SEQ ID NO: 22079
  source 1..214: note = Description of Artificial Sequence: Synthetic polypeptide; note = XENP021923 2A11_H1.144_L2.113_Fab Light Chain

SEQ ID NO: 28070 - protein, 107 aa, synthetic construct; identical to SEQ ID NO: 22080
  source 1..107: note = Description of Artificial Sequence: Synthetic polypeptide; note = VL of XENP021923

SEQ ID NO: 28071 - protein, 11 aa, synthetic construct
  source 1..11: note = Description of Artificial Sequence: Synthetic peptide; note = XENP021923 vlCDR1
QASQDIGNYLN

SEQ ID NO: 28072 - protein, 7 aa, synthetic construct
  source 1..7: note = Description of Artificial Sequence: Synthetic peptide; note = XENP021923 vlCDR2
FTSYLHS

SEQ ID NO: 28073 - protein, 9 aa, synthetic construct
  source 1..9: note = Description of Artificial Sequence: Synthetic peptide; note = XENP021923 vlCDR3
QQGNTLPYT

SEQ ID NO: 28074 - protein, 223 aa, synthetic construct; identical to SEQ ID NO: 27474
  source 1..223: note = Description of Artificial Sequence: Synthetic polypeptide; note = XENP021924 2A11_H1.127_L2.113_Fab Heavy Chain

SEQ ID NO: 28075 - protein, 118 aa, synthetic construct; identical to SEQ ID NO: 27475
  source 1..118: note = Description of Artificial Sequence: Synthetic polypeptide; note = VH of XENP021924

SEQ ID NO: 28076 - protein, 5 aa, synthetic construct
  source 1..5: note = Description of Artificial Sequence: Synthetic peptide; note = XENP021924 vhCDR1
HYFMH

SEQ ID NO: 28077 - protein, 17 aa, synthetic construct
  source 1..17: note = Description of Artificial Sequence: Synthetic peptide; note = XENP021924 vhCDR2
WIDPELGDTEYAPKFQG

SEQ ID NO: 28078 - protein, 9 aa, synthetic construct
  source 1..9: note = Description of Artificial Sequence: Synthetic peptide; note = XENP021924 vhCDR3
RGVYQALDY

SEQ ID NO: 28079 - protein, 214 aa, synthetic construct; identical to SEQ ID NO: 22079
  source 1..214: note = Description of Artificial Sequence: Synthetic polypeptide; note = XENP021924 2A11_H1.127_L2.113_Fab Light Chain

SEQ ID NO: 28080 - protein, 107 aa, synthetic construct; identical to SEQ ID NO: 22080
  source 1..107: note = Description of Artificial Sequence: Synthetic polypeptide; note = VL of XENP021924

SEQ ID NO: 28081 - protein, 11 aa, synthetic construct
  source 1..11: note = Description of Artificial Sequence: Synthetic peptide; note = XENP021924 vlCDR1
QASQDIGNYLN

SEQ ID NO: 28082 - protein, 7 aa, synthetic construct
  source 1..7: note = Description of Artificial Sequence: Synthetic peptide; note = XENP021924 vlCDR2
FTSYLHS

SEQ ID NO: 28083 - protein, 9 aa, synthetic construct
  source 1..9: note = Description of Artificial Sequence: Synthetic peptide; note = XENP021924 vlCDR3
QQGNTLPYT

SEQ ID NO: 28084 - protein, 223 aa, synthetic construct; identical to SEQ ID NO: 27554
  source 1..223: note = Description of Artificial Sequence: Synthetic polypeptide; note = XENP021925 2A11_H1.136_L2.113_Fab Heavy Chain

SEQ ID NO: 28085 - protein, 118 aa, synthetic construct; identical to SEQ ID NO: 27555
  source 1..118: note = Description of Artificial Sequence: Synthetic polypeptide; note = VH of XENP021925

SEQ ID NO: 28086 - protein, 5 aa, synthetic construct
  source 1..5: note = Description of Artificial Sequence: Synthetic peptide; note = XENP021925 vhCDR1
HYYMH

SEQ ID NO: 28087 - protein, 17 aa, synthetic construct
  source 1..17: note = Description of Artificial Sequence: Synthetic peptide; note = XENP021925 vhCDR2
WIDPYLGDTEYAPKFQG

SEQ ID NO: 28088 - protein, 9 aa, synthetic construct
  source 1..9: note = Description of Artificial Sequence: Synthetic peptide; note = XENP021925 vhCDR3
RGVYQALDY

SEQ ID NO: 28089 - protein, 214 aa, synthetic construct; identical to SEQ ID NO: 22079
  source 1..214: note = Description of Artificial Sequence: Synthetic polypeptide; note = XENP021925 2A11_H1.136_L2.113_Fab Light Chain

SEQ ID NO: 28090 - protein, 107 aa, synthetic construct; identical to SEQ ID NO: 22080
  source 1..107: note = Description of Artificial Sequence: Synthetic polypeptide; note = VL of XENP021925

SEQ ID NO: 28091 - protein, 11 aa, synthetic construct
  source 1..11: note = Description of Artificial Sequence: Synthetic peptide; note = XENP021925 vlCDR1
QASQDIGNYLN

SEQ ID NO: 28092 - protein, 7 aa, synthetic construct
  source 1..7: note = Description of Artificial Sequence: Synthetic peptide; note = XENP021925 vlCDR2
FTSYLHS

SEQ ID NO: 28093 - protein, 9 aa, synthetic construct
  source 1..9: note = Description of Artificial Sequence: Synthetic peptide; note = XENP021925 vlCDR3
QQGNTLPYT

SEQ ID NO: 28094 - protein, 223 aa, synthetic construct; identical to SEQ ID NO: 28014
  source 1..223: note = Description of Artificial Sequence: Synthetic polypeptide; note = XENP021926 2A11_H1.154_L2.113_Fab Heavy Chain

SEQ ID NO: 28095 - protein, 118 aa, synthetic construct; identical to SEQ ID NO: 28015
  source 1..118: note = Description of Artificial Sequence: Synthetic polypeptide; note = VH of XENP021926

SEQ ID NO: 28096 - protein, 5 aa, synthetic construct
  source 1..5: note = Description of Artificial Sequence: Synthetic peptide; note = XENP021926 vhCDR1
DYYMH

SEQ ID NO: 28097 - protein, 17 aa, synthetic construct
  source 1..17: note = Description of Artificial Sequence: Synthetic peptide; note = XENP021926 vhCDR2
WIDPELGDTEYAPKFQG

SEQ ID NO: 28098 - protein, 9 aa, synthetic construct
  source 1..9: note = Description of Artificial Sequence: Synthetic peptide; note = XENP021926 vhCDR3
RGVYQALDY

SEQ ID NO: 28099 - protein, 214 aa, synthetic construct; identical to SEQ ID NO: 22079
  source 1..214: note = Description of Artificial Sequence: Synthetic polypeptide; note = XENP021926 2A11_H1.154_L2.113_Fab Light Chain

SEQ ID NO: 28100 - protein, 107 aa, synthetic construct; identical to SEQ ID NO: 22080
  source 1..107: note = Description of Artificial Sequence: Synthetic polypeptide; note = VL of XENP021926

SEQ ID NO: 28101 - protein, 11 aa, synthetic construct
  source 1..11: note = Description of Artificial Sequence: Synthetic peptide; note = XENP021926 vlCDR1
QASQDIGNYLN

SEQ ID NO: 28102 - protein, 7 aa, synthetic construct
  source 1..7: note = Description of Artificial Sequence: Synthetic peptide; note = XENP021926 vlCDR2
FTSYLHS

SEQ ID NO: 28103 - protein, 9 aa, synthetic construct
  source 1..9: note = Description of Artificial Sequence: Synthetic peptide; note = XENP021926 vlCDR3
QQGNTLPYT

SEQ ID NO: 28104 - protein, 223 aa, synthetic construct; identical to SEQ ID NO: 27604
  source 1..223: note = Description of Artificial Sequence: Synthetic polypeptide; note = XENP021927 2A11_H1.141_L2.113_Fab Heavy Chain

SEQ ID NO: 28105 - protein, 118 aa, synthetic construct; identical to SEQ ID NO: 27605
  source 1..118: note = Description of Artificial Sequence: Synthetic polypeptide; note = VH of XENP021927

SEQ ID NO: 28106 - protein, 5 aa, synthetic construct
  source 1..5: note = Description of Artificial Sequence: Synthetic peptide; note = XENP021927 vhCDR1
DYFMH

SEQ ID NO: 28107 - protein, 17 aa, synthetic construct
  source 1..17: note = Description of Artificial Sequence: Synthetic peptide; note = XENP021927 vhCDR2
WIDPELGDTEYAPKFQG

SEQ ID NO: 28108 - protein, 9 aa, synthetic construct
  source 1..9: note = Description of Artificial Sequence: Synthetic peptide; note = XENP021927 vhCDR3
RGVRQALDY

SEQ ID NO: 28109 - protein, 214 aa, synthetic construct; identical to SEQ ID NO: 22079
  source 1..214: note = Description of Artificial Sequence: Synthetic polypeptide; note = XENP021927 2A11_H1.141_L2.113_Fab Light Chain

SEQ ID NO: 28110 - protein, 107 aa, synthetic construct; identical to SEQ ID NO: 22080
  source 1..107: note = Description of Artificial Sequence: Synthetic polypeptide; note = VL of XENP021927

SEQ ID NO: 28111 - protein, 11 aa, synthetic construct
  source 1..11: note = Description of Artificial Sequence: Synthetic peptide; note = XENP021927 vlCDR1
QASQDIGNYLN

SEQ ID NO: 28112 - protein, 7 aa, synthetic construct
  source 1..7: note = Description of Artificial Sequence: Synthetic peptide; note = XENP021927 vlCDR2
FTSYLHS

SEQ ID NO: 28113 - protein, 9 aa, synthetic construct
  source 1..9: note = Description of Artificial Sequence: Synthetic peptide; note = XENP021927 vlCDR3
QQGNTLPYT

SEQ ID NO: 28114 - protein, 223 aa, synthetic construct; identical to SEQ ID NO: 27384
  source 1..223: note = Description of Artificial Sequence: Synthetic polypeptide; note = XENP021928 2A11_H1.117_L2.116_Fab Heavy Chain

SEQ ID NO: 28115 - protein, 118 aa, synthetic construct; identical to SEQ ID NO: 22105
  source 1..118: note = Description of Artificial Sequence: Synthetic polypeptide; note = VH of XENP021928

SEQ ID NO: 28116 - protein, 5 aa, synthetic construct
  source 1..5: note = Description of Artificial Sequence: Synthetic peptide; note = XENP021928 vhCDR1
HYFMH

SEQ ID NO: 28117 - protein, 17 aa, synthetic construct
  source 1..17: note = Description of Artificial Sequence: Synthetic peptide; note = XENP021928 vhCDR2
WIDPYLGDTEYAPKFQG

SEQ ID NO: 28118 - protein, 9 aa, synthetic construct
  source 1..9: note = Description of Artificial Sequence: Synthetic peptide; note = XENP021928 vhCDR3
RGVRQALDY

SEQ ID NO: 28119 - protein, 214 aa, synthetic construct; identical to SEQ ID NO: 22119
  source 1..214: note = Description of Artificial Sequence: Synthetic polypeptide; note = XENP021928 2A11_H1.117_L2.116_Fab Light Chain

SEQ ID NO: 28120 - protein, 107 aa, synthetic construct; identical to SEQ ID NO: 22120
  source 1..107: note = Description of Artificial Sequence: Synthetic polypeptide; note = VL of XENP021928

SEQ ID NO: 28121 - protein, 11 aa, synthetic construct
  source 1..11: note = Description of Artificial Sequence: Synthetic peptide; note = XENP021928 vlCDR1
QASQDIGNYLN

SEQ ID NO: 28122 - protein, 7 aa, synthetic construct
  source 1..7: note = Description of Artificial Sequence: Synthetic peptide; note = XENP021928 vlCDR2
FTSHLHS

SEQ ID NO: 28123 - protein, 9 aa, synthetic construct
  source 1..9: note = Description of Artificial Sequence: Synthetic peptide; note = XENP021928 vlCDR3
QQGHQLPYT

SEQ ID NO: 28124 - protein, 223 aa, synthetic construct; identical to SEQ ID NO: 27734
  source 1..223: note = Description of Artificial Sequence: Synthetic polypeptide; note = XENP021929 2A11_H1.125_L2.116_Fab Heavy Chain

SEQ ID NO: 28125 - protein, 118 aa, synthetic construct; identical to SEQ ID NO: 22065
  source 1..118: note = Description of Artificial Sequence: Synthetic polypeptide; note = VH of XENP021929

SEQ ID NO: 28126 - protein, 5 aa, synthetic construct
  source 1..5: note = Description of Artificial Sequence: Synthetic peptide; note = XENP021929 vhCDR1
HYFMH

SEQ ID NO: 28127 - protein, 17 aa, synthetic construct
  source 1..17: note = Description of Artificial Sequence: Synthetic peptide; note = XENP021929 vhCDR2
WIDPYLGDTEYAPKFQG

SEQ ID NO: 28128 - protein, 9 aa, synthetic construct
  source 1..9: note = Description of Artificial Sequence: Synthetic peptide; note = XENP021929 vhCDR3
RGVYQALDY

SEQ ID NO: 28129 - protein, 214 aa, synthetic construct; identical to SEQ ID NO: 22119
  source 1..214: note = Description of Artificial Sequence: Synthetic polypeptide; note = XENP021929 2A11_H1.125_L2.116_Fab Light Chain

SEQ ID NO: 28130 - protein, 107 aa, synthetic construct; identical to SEQ ID NO: 22120
  source 1..107: note = Description of Artificial Sequence: Synthetic polypeptide; note = VL of XENP021929

SEQ ID NO: 28131 - protein, 11 aa, synthetic construct
  source 1..11: note = Description of Artificial Sequence: Synthetic peptide; note = XENP021929 vlCDR1
QASQDIGNYLN

SEQ ID NO: 28132 - protein, 7 aa, synthetic construct
  source 1..7: note = Description of Artificial Sequence: Synthetic peptide; note = XENP021929 vlCDR2
FTSHLHS

SEQ ID NO: 28133 - protein, 9 aa, synthetic construct
  source 1..9: note = Description of Artificial Sequence: Synthetic peptide; note = XENP021929 vlCDR3
QQGHQLPYT

SEQ ID NO: 28134 - protein, 223 aa, synthetic construct; identical to SEQ ID NO: 27464
  source 1..223: note = Description of Artificial Sequence: Synthetic polypeptide; note = XENP021930 2A11_H1.126_L2.116_Fab Heavy Chain

SEQ ID NO: 28135 - protein, 118 aa, synthetic construct; identical to SEQ ID NO: 27465
  source 1..118: note = Description of Artificial Sequence: Synthetic polypeptide; note = VH of XENP021930

SEQ ID NO: 28136 - protein, 5 aa, synthetic construct
  source 1..5: note = Description of Artificial Sequence: Synthetic peptide; note = XENP021930 vhCDR1
HYFMH

SEQ ID NO: 28137 - protein, 17 aa, synthetic construct
  source 1..17: note = Description of Artificial Sequence: Synthetic peptide; note = XENP021930 vhCDR2
WIDPYTGDTEYAPKFQG

SEQ ID NO: 28138 - protein, 9 aa, synthetic construct
  source 1..9: note = Description of Artificial Sequence: Synthetic peptide; note = XENP021930 vhCDR3
RGVYQALDY

SEQ ID NO: 28139 - protein, 214 aa, synthetic construct; identical to SEQ ID NO: 22119
  source 1..214: note = Description of Artificial Sequence: Synthetic polypeptide; note = XENP021930 2A11_H1.126_L2.116_Fab Light Chain

SEQ ID NO: 28140 - protein, 107 aa, synthetic construct; identical to SEQ ID NO: 22120
  source 1..107: note = Description of Artificial Sequence: Synthetic polypeptide; note = VL of XENP021930

SEQ ID NO: 28141 - protein, 11 aa, synthetic construct
  source 1..11: note = Description of Artificial Sequence: Synthetic peptide; note = XENP021930 vlCDR1
QASQDIGNYLN

SEQ ID NO: 28142 - protein, 7 aa, synthetic construct
  source 1..7: note = Description of Artificial Sequence: Synthetic peptide; note = XENP021930 vlCDR2
FTSHLHS

SEQ ID NO: 28143 - protein, 9 aa, synthetic construct
  source 1..9: note = Description of Artificial Sequence: Synthetic peptide; note = XENP021930 vlCDR3
QQGHQLPYT

SEQ ID NO: 28144 - protein, 223 aa, synthetic construct; identical to SEQ ID NO: 27634
  source 1..223: note = Description of Artificial Sequence: Synthetic polypeptide; note = XENP021931 2A11_H1.144_L2.116_Fab Heavy Chain

SEQ ID NO: 28145 - protein, 118 aa, synthetic construct; identical to SEQ ID NO: 22085
  source 1..118: note = Description of Artificial Sequence: Synthetic polypeptide; note = VH of XENP021931

SEQ ID NO: 28146 - protein, 5 aa, synthetic construct
  source 1..5: note = Description of Artificial Sequence: Synthetic peptide; note = XENP021931 vhCDR1
DYFMH

SEQ ID NO: 28147 - protein, 17 aa, synthetic construct
  source 1..17: note = Description of Artificial Sequence: Synthetic peptide; note = XENP021931 vhCDR2
WIDPELGDTEYAPKFQG

SEQ ID NO: 28148 - protein, 9 aa, synthetic construct
  source 1..9: note = Description of Artificial Sequence: Synthetic peptide; note = XENP021931 vhCDR3
RGVYQALDY

SEQ ID NO: 28149 - protein, 214 aa, synthetic construct; identical to SEQ ID NO: 22119
  source 1..214: note = Description of Artificial Sequence: Synthetic polypeptide; note = XENP021931 2A11_H1.144_L2.116_Fab Light Chain

SEQ ID NO: 28150 - protein, 107 aa, synthetic construct; identical to SEQ ID NO: 22120
  source 1..107: note = Description of Artificial Sequence: Synthetic polypeptide; note = VL of XENP021931

SEQ ID NO: 28151 - protein, 11 aa, synthetic construct
  source 1..11: note = Description of Artificial Sequence: Synthetic peptide; note = XENP021931 vlCDR1
QASQDIGNYLN

SEQ ID NO: 28152 - protein, 7 aa, synthetic construct
  source 1..7: note = Description of Artificial Sequence: Synthetic peptide; note = XENP021931 vlCDR2
FTSHLHS

SEQ ID NO: 28153 - protein, 9 aa, synthetic construct
  source 1..9: note = Description of Artificial Sequence: Synthetic peptide; note = XENP021931 vlCDR3
QQGHQLPYT

SEQ ID NO: 28154 - protein, 223 aa, synthetic construct; identical to SEQ ID NO: 27474
  source 1..223: note = Description of Artificial Sequence: Synthetic polypeptide; note = XENP021932 2A11_H1.127_L2.116_Fab Heavy Chain

SEQ ID NO: 28155 - protein, 118 aa, synthetic construct; identical to SEQ ID NO: 27475
  source 1..118: note = Description of Artificial Sequence: Synthetic polypeptide; note = VH of XENP021932

SEQ ID NO: 28156 - protein, 5 aa, synthetic construct
  source 1..5: note = Description of Artificial Sequence: Synthetic peptide; note = XENP021932 vhCDR1
HYFMH

SEQ ID NO: 28157 - protein, 17 aa, synthetic construct
  source 1..17: note = Description of Artificial Sequence: Synthetic peptide; note = XENP021932 vhCDR2
WIDPELGDTEYAPKFQG

SEQ ID NO: 28158 - protein, 9 aa, synthetic construct
  source 1..9: note = Description of Artificial Sequence: Synthetic peptide; note = XENP021932 vhCDR3
RGVYQALDY

SEQ ID NO: 28159 - protein, 214 aa, synthetic construct; identical to SEQ ID NO: 22119
  source 1..214: note = Description of Artificial Sequence: Synthetic polypeptide; note = XENP021932 2A11_H1.127_L2.116_Fab Light Chain

SEQ ID NO: 28160 - protein, 107 aa, synthetic construct; identical to SEQ ID NO: 22120
  source 1..107: note = Description of Artificial Sequence: Synthetic polypeptide; note = VL of XENP021932

SEQ ID NO: 28161 - protein, 11 aa, synthetic construct
  source 1..11: note = Description of Artificial Sequence: Synthetic peptide; note = XENP021932 vlCDR1
QASQDIGNYLN

SEQ ID NO: 28162 - protein, 7 aa, synthetic construct
  source 1..7: note = Description of Artificial Sequence: Synthetic peptide; note = XENP021932 vlCDR2
FTSHLHS

SEQ ID NO: 28163 - protein, 9 aa, synthetic construct
  source 1..9: note = Description of Artificial Sequence: Synthetic peptide; note = XENP021932 vlCDR3
QQGHQLPYT

SEQ ID NO: 28164 - protein, 223 aa, synthetic construct; identical to SEQ ID NO: 27554
  source 1..223: note = Description of Artificial Sequence: Synthetic polypeptide; note = XENP021933 2A11_H1.136_L2.116_Fab Heavy Chain

SEQ ID NO: 28165 - protein, 118 aa, synthetic construct; identical to SEQ ID NO: 27555
  source 1..118: note = Description of Artificial Sequence: Synthetic polypeptide; note = VH of XENP021933

SEQ ID NO: 28166 - protein, 5 aa, synthetic construct
  source 1..5: note = Description of Artificial Sequence: Synthetic peptide; note = XENP021933 vhCDR1
HYYMH

SEQ ID NO: 28167 - protein, 17 aa, synthetic construct
  source 1..17: note = Description of Artificial Sequence: Synthetic peptide; note = XENP021933 vhCDR2
WIDPYLGDTEYAPKFQG

SEQ ID NO: 28168 - protein, 9 aa, synthetic construct
  source 1..9: note = Description of Artificial Sequence: Synthetic peptide; note = XENP021933 vhCDR3
RGVYQALDY

SEQ ID NO: 28169 - protein, 214 aa, synthetic construct; identical to SEQ ID NO: 22119
  source 1..214: note = Description of Artificial Sequence: Synthetic polypeptide; note = XENP021933 2A11_H1.136_L2.116_Fab Light Chain

SEQ ID NO: 28170 - protein, 107 aa, synthetic construct; identical to SEQ ID NO: 22120
  source 1..107: note = Description of Artificial Sequence: Synthetic polypeptide; note = VL of XENP021933

SEQ ID NO: 28171 - protein, 11 aa, synthetic construct
  source 1..11: note = Description of Artificial Sequence: Synthetic peptide; note = XENP021933 vlCDR1
QASQDIGNYLN

SEQ ID NO: 28172 - protein, 7 aa, synthetic construct
  source 1..7: note = Description of Artificial Sequence: Synthetic peptide; note = XENP021933 vlCDR2
FTSHLHS

SEQ ID NO: 28173 - protein, 9 aa, synthetic construct
  source 1..9: note = Description of Artificial Sequence: Synthetic peptide; note = XENP021933 vlCDR3
QQGHQLPYT

SEQ ID NO: 28174 - protein, 223 aa, synthetic construct; identical to SEQ ID NO: 28014
  source 1..223: note = Description of Artificial Sequence: Synthetic polypeptide; note = XENP021934 2A11_H1.154_L2.116_Fab Heavy Chain

SEQ ID NO: 28175 - protein, 118 aa, synthetic construct; identical to SEQ ID NO: 28015
  source 1..118: note = Description of Artificial Sequence: Synthetic polypeptide; note = VH of XENP021934

SEQ ID NO: 28176 - protein, 5 aa, synthetic construct
  source 1..5: note = Description of Artificial Sequence: Synthetic peptide; note = XENP021934 vhCDR1
DYYMH

SEQ ID NO: 28177 - protein, 17 aa, synthetic construct
  source 1..17: note = Description of Artificial Sequence: Synthetic peptide; note = XENP021934 vhCDR2
WIDPELGDTEYAPKFQG

SEQ ID NO: 28178 - protein, 9 aa, synthetic construct
  source 1..9: note = Description of Artificial Sequence: Synthetic peptide; note = XENP021934 vhCDR3
RGVYQALDY

SEQ ID NO: 28179 - protein, 214 aa, synthetic construct; identical to SEQ ID NO: 22119
  source 1..214: note = Description of Artificial Sequence: Synthetic polypeptide; note = XENP021934 2A11_H1.154_L2.116_Fab Light Chain

SEQ ID NO: 28180 - protein, 107 aa, synthetic construct; identical to SEQ ID NO: 22120
  source 1..107: note = Description of Artificial Sequence: Synthetic polypeptide; note = VL of XENP021934

SEQ ID NO: 28181 - protein, 11 aa, synthetic construct
  source 1..11: note = Description of Artificial Sequence: Synthetic peptide; note = XENP021934 vlCDR1
QASQDIGNYLN

SEQ ID NO: 28182 - protein, 7 aa, synthetic construct
  source 1..7: note = Description of Artificial Sequence: Synthetic peptide; note = XENP021934 vlCDR2
FTSHLHS

SEQ ID NO: 28183 - protein, 9 aa, synthetic construct
  source 1..9: note = Description of Artificial Sequence: Synthetic peptide; note = XENP021934 vlCDR3
QQGHQLPYT

SEQ ID NO: 28184 - protein, 223 aa, synthetic construct; identical to SEQ ID NO: 27604
  source 1..223: note = Description of Artificial Sequence: Synthetic polypeptide; note = XENP021935 2A11_H1.141_L2.116_Fab Heavy Chain

SEQ ID NO: 28185 - protein, 118 aa, synthetic construct; identical to SEQ ID NO: 27605
  source 1..118: note = Description of Artificial Sequence: Synthetic polypeptide; note = VH of XENP021935

SEQ ID NO: 28186 - protein, 5 aa, synthetic construct
  source 1..5: note = Description of Artificial Sequence: Synthetic peptide; note = XENP021935 vhCDR1
DYFMH

SEQ ID NO: 28187 - protein, 17 aa, synthetic construct
  source 1..17: note = Description of Artificial Sequence: Synthetic peptide; note = XENP021935 vhCDR2
WIDPELGDTEYAPKFQG

SEQ ID NO: 28188 - protein, 9 aa, synthetic construct
  source 1..9: note = Description of Artificial Sequence: Synthetic peptide; note = XENP021935 vhCDR3
RGVRQALDY

SEQ ID NO: 28189 - protein, 214 aa, synthetic construct; identical to SEQ ID NO: 22119
  source 1..214: note = Description of Artificial Sequence: Synthetic polypeptide; note = XENP021935 2A11_H1.141_L2.116_Fab Light Chain

SEQ ID NO: 28190 - protein, 107 aa, synthetic construct; identical to SEQ ID NO: 22120
  source 1..107: note = Description of Artificial Sequence: Synthetic polypeptide; note = VL of XENP021935

SEQ ID NO: 28191 - protein, 11 aa, synthetic construct
  source 1..11: note = Description of Artificial Sequence: Synthetic peptide; note = XENP021935 vlCDR1
QASQDIGNYLN

SEQ ID NO: 28192 - protein, 7 aa, synthetic construct
  source 1..7: note = Description of Artificial Sequence: Synthetic peptide; note = XENP021935 vlCDR2
FTSHLHS

SEQ ID NO: 28193 - protein, 9 aa, synthetic construct
  source 1..9: note = Description of Artificial Sequence: Synthetic peptide; note = XENP021935 vlCDR3
QQGHQLPYT

SEQ ID NO: 28194 - protein, 223 aa, synthetic construct
  source 1..223: note = Description of Artificial Sequence: Synthetic polypeptide; note = XENP022132 2A11_H1.155_L2.50_Fab Heavy Chain
EVQLVQSGAEVKKPGATVKISCKASGFNIKDYFMHWVQQAPGKGLEWMGWIDPYLGDTEYAPKFQGRVTITADTSTNTAYMELSSLRSEDTAVYYCYARGVYQALDYWGQGTLVTVSSASTKGPSVFPLAPSSKSTSGGTAALGCLVKDYFPEPVTVSWNSGALTSGVHTFPAVLQSSGLYSLSSVVTVPSSSLGTQTYICNVNHKPSNTKVDKKVEPKSCGS

SEQ ID NO: 28195 - protein, 118 aa, synthetic construct
  source 1..118: note = Description of Artificial Sequence: Synthetic polypeptide; note = VH of XENP022132
EVQLVQSGAEVKKPGATVKISCKASGFNIKDYFMHWVQQAPGKGLEWMGWIDPYLGDTEYAPKFQGRVTITADTSTNTAYMELSSLRSEDTAVYYCYARGVYQALDYWGQGTLVTVSS

SEQ ID NO: 28196 - protein, 5 aa, synthetic construct
  source 1..5: note = Description of Artificial Sequence: Synthetic peptide; note = XENP022132 vhCDR1
DYFMH

SEQ ID NO: 28197 - protein, 17 aa, synthetic construct
  source 1..17: note = Description of Artificial Sequence: Synthetic peptide; note = XENP022132 vhCDR2
WIDPYLGDTEYAPKFQG

SEQ ID NO: 28198 - protein, 9 aa, synthetic construct
  source 1..9: note = Description of Artificial Sequence: Synthetic peptide; note = XENP022132 vhCDR3
RGVYQALDY

SEQ ID NO: 28199 - protein, 214 aa, synthetic construct; identical to SEQ ID NO: 22059
  source 1..214: note = Description of Artificial Sequence: Synthetic polypeptide; note = XENP022132 2A11_H1.155_L2.50_Fab Light Chain

SEQ ID NO: 28200 - protein, 107 aa, synthetic construct; identical to SEQ ID NO: 22060
  source 1..107: note = Description of Artificial Sequence: Synthetic polypeptide; note = VL of XENP022132

SEQ ID NO: 28201 - protein, 11 aa, synthetic construct
  source 1..11: note = Description of Artificial Sequence: Synthetic peptide; note = XENP022132 vlCDR1
QASQDIGNYLN

SEQ ID NO: 28202 - protein, 7 aa, synthetic construct
  source 1..7: note = Description of Artificial Sequence: Synthetic peptide; note = XENP022132 vlCDR2
YTSYLHS

SEQ ID NO: 28203 - protein, 9 aa, synthetic construct
  source 1..9: note = Description of Artificial Sequence: Synthetic peptide; note = XENP022132 vlCDR3
QQGNTLPYT

SEQ ID NO: 28204 - protein, 223 aa, synthetic construct
  source 1..223: note = Description of Artificial Sequence: Synthetic polypeptide; note = XENP022133 2A11_H1.156_L2.50_Fab Heavy Chain
EVQLVQSGAEVKKPGATVKISCKASGFNIKDYFMHWVQQAPGKGLEWMGWIDPYLGDTEYAPKFQGRVTITADTSTNTAYMELSSLRSEDTAVYYCYARGVKQALDYWGQGTLVTVSSASTKGPSVFPLAPSSKSTSGGTAALGCLVKDYFPEPVTVSWNSGALTSGVHTFPAVLQSSGLYSLSSVVTVPSSSLGTQTYICNVNHKPSNTKVDKKVEPKSCGS

SEQ ID NO: 28205 - protein, 118 aa, synthetic construct
  source 1..118: note = Description of Artificial Sequence: Synthetic polypeptide; note = VH of XENP022133
EVQLVQSGAEVKKPGATVKISCKASGFNIKDYFMHWVQQAPGKGLEWMGWIDPYLGDTEYAPKFQGRVTITADTSTNTAYMELSSLRSEDTAVYYCYARGVKQALDYWGQGTLVTVSS

SEQ ID NO: 28206 - protein, 5 aa, synthetic construct
  source 1..5: note = Description of Artificial Sequence: Synthetic peptide; note = XENP022133 vhCDR1
DYFMH

SEQ ID NO: 28207 - protein, 17 aa, synthetic construct
  source 1..17: note = Description of Artificial Sequence: Synthetic peptide; note = XENP022133 vhCDR2
WIDPYLGDTEYAPKFQG

SEQ ID NO: 28208 - protein, 9 aa, synthetic construct
  source 1..9: note = Description of Artificial Sequence: Synthetic peptide; note = XENP022133 vhCDR3
RGVKQALDY

SEQ ID NO: 28209 - protein, 214 aa, synthetic construct; identical to SEQ ID NO: 22059
  source 1..214: note = Description of Artificial Sequence: Synthetic polypeptide; note = XENP022133 2A11_H1.156_L2.50_Fab Light Chain

SEQ ID NO: 28210 - protein, 107 aa, synthetic construct; identical to SEQ ID NO: 22060
  source 1..107: note = Description of Artificial Sequence: Synthetic polypeptide; note = VL of XENP022133

SEQ ID NO: 28211 - protein, 11 aa, synthetic construct
  source 1..11: note = Description of Artificial Sequence: Synthetic peptide; note = XENP022133 vlCDR1
QASQDIGNYLN

SEQ ID NO: 28212 - protein, 7 aa, synthetic construct
  source 1..7: note = Description of Artificial Sequence: Synthetic peptide; note = XENP022133 vlCDR2
YTSYLHS

SEQ ID NO: 28213 - protein, 9 aa, synthetic construct
  source 1..9: note = Description of Artificial Sequence: Synthetic peptide; note = XENP022133 vlCDR3
QQGNTLPYT

SEQ ID NO: 28214 - protein, 223 aa, synthetic construct; identical to SEQ ID NO: 28194
  source 1..223: note = Description of Artificial Sequence: Synthetic polypeptide; note = XENP022134 2A11_H1.155_L2.113_Fab Heavy Chain

SEQ ID NO: 28215 - protein, 118 aa, synthetic construct; identical to SEQ ID NO: 28195
  source 1..118: note = Description of Artificial Sequence: Synthetic polypeptide; note = VH of XENP022134

SEQ ID NO: 28216 - protein, 5 aa, synthetic construct
  source 1..5: note = Description of Artificial Sequence: Synthetic peptide; note = XENP022134 vhCDR1
DYFMH

SEQ ID NO: 28217 - protein, 17 aa, synthetic construct
  source 1..17: note = Description of Artificial Sequence: Synthetic peptide; note = XENP022134 vhCDR2
WIDPYLGDTEYAPKFQG

SEQ ID NO: 28218 - protein, 9 aa, synthetic construct
  source 1..9: note = Description of Artificial Sequence: Synthetic peptide; note = XENP022134 vhCDR3
RGVYQALDY

SEQ ID NO: 28219 - protein, 214 aa, synthetic construct; identical to SEQ ID NO: 22079
  source 1..214: note = Description of Artificial Sequence: Synthetic polypeptide; note = XENP022134 2A11_H1.155_L2.113_Fab Light Chain

SEQ ID NO: 28220 - protein, 107 aa, synthetic construct; identical to SEQ ID NO: 22080
  source 1..107: note = Description of Artificial Sequence: Synthetic polypeptide; note = VL of XENP022134

SEQ ID NO: 28221 - protein, 11 aa, synthetic construct
  source 1..11: note = Description of Artificial Sequence: Synthetic peptide; note = XENP022134 vlCDR1
QASQDIGNYLN

SEQ ID NO: 28222 - protein, 7 aa, synthetic construct
  source 1..7: note = Description of Artificial Sequence: Synthetic peptide; note = XENP022134 vlCDR2
FTSYLHS

SEQ ID NO: 28223 - protein, 9 aa, synthetic construct
  source 1..9: note = Description of Artificial Sequence: Synthetic peptide; note = XENP022134 vlCDR3
QQGNTLPYT

SEQ ID NO: 28224 - protein, 223 aa, synthetic construct; identical to SEQ ID NO: 28204
  source 1..223: note = Description of Artificial Sequence: Synthetic polypeptide; note = XENP022135 2A11_H1.156_L2.113_Fab Heavy Chain

SEQ ID NO: 28225 - protein, 118 aa, synthetic construct; identical to SEQ ID NO: 28205
  source 1..118: note = Description of Artificial Sequence: Synthetic polypeptide; note = VH of XENP022135

SEQ ID NO: 28226 - protein, 5 aa, synthetic construct
  source 1..5: note = Description of Artificial Sequence: Synthetic peptide; note = XENP022135 vhCDR1
DYFMH

SEQ ID NO: 28227 - protein, 17 aa, synthetic construct
  source 1..17: note = Description of Artificial Sequence: Synthetic peptide; note = XENP022135 vhCDR2
WIDPYLGDTEYAPKFQG

SEQ ID NO: 28228 - protein, 9 aa, synthetic construct
  source 1..9: note = Description of Artificial Sequence: Synthetic peptide; note = XENP022135 vhCDR3
RGVKQALDY

SEQ ID NO: 28229 - protein, 214 aa, synthetic construct; identical to SEQ ID NO: 22079
  source 1..214: note = Description of Artificial Sequence: Synthetic polypeptide; note = XENP022135 2A11_H1.156_L2.113_Fab Light Chain

SEQ ID NO: 28230 - protein, 107 aa, synthetic construct; identical to SEQ ID NO: 22080
  source 1..107: note = Description of Artificial Sequence: Synthetic polypeptide; note = VL of XENP022135

SEQ ID NO: 28231 - protein, 11 aa, synthetic construct
  source 1..11: note = Description of Artificial Sequence: Synthetic peptide; note = XENP022135 vlCDR1
QASQDIGNYLN

SEQ ID NO: 28232 - protein, 7 aa, synthetic construct
  source 1..7: note = Description of Artificial Sequence: Synthetic peptide; note = XENP022135 vlCDR2
FTSYLHS

SEQ ID NO: 28233 - protein, 9 aa, synthetic construct
  source 1..9: note = Description of Artificial Sequence: Synthetic peptide; note = XENP022135 vlCDR3
QQGNTLPYT

SEQ ID NO: 28234 - protein, 223 aa, synthetic construct; identical to SEQ ID NO: 28194
  source 1..223: note = Description of Artificial Sequence: Synthetic polypeptide; note = XENP022136 2A11_H1.155_L2.116_Fab Heavy Chain

SEQ ID NO: 28235 - protein, 118 aa, synthetic construct; identical to SEQ ID NO: 28195
  source 1..118: note = Description of Artificial Sequence: Synthetic polypeptide; note = VH of XENP022136

SEQ ID NO: 28236 - protein, 5 aa, synthetic construct
  source 1..5: note = Description of Artificial Sequence: Synthetic peptide; note = XENP022136 vhCDR1
DYFMH

SEQ ID NO: 28237 - protein, 17 aa, synthetic construct
  source 1..17: note = Description of Artificial Sequence: Synthetic peptide; note = XENP022136 vhCDR2
WIDPYLGDTEYAPKFQG

SEQ ID NO: 28238 - protein, 9 aa, synthetic construct
  source 1..9: note = Description of Artificial Sequence: Synthetic peptide; note = XENP022136 vhCDR3
RGVYQALDY

SEQ ID NO: 28239 - protein, 214 aa, synthetic construct; identical to SEQ ID NO: 22119
  source 1..214: note = Description of Artificial Sequence: Synthetic polypeptide; note = XENP022136 2A11_H1.155_L2.116_Fab Light Chain

SEQ ID NO: 28240 - protein, 107 aa, synthetic construct; identical to SEQ ID NO: 22120
  source 1..107: note = Description of Artificial Sequence: Synthetic polypeptide; note = VL of XENP022136

SEQ ID NO: 28241 - protein, 11 aa, synthetic construct
  source 1..11: note = Description of Artificial Sequence: Synthetic peptide; note = XENP022136 vlCDR1
QASQDIGNYLN

SEQ ID NO: 28242 - protein, 7 aa, synthetic construct
  source 1..7: note = Description of Artificial Sequence: Synthetic peptide; note = XENP022136 vlCDR2
FTSHLHS

SEQ ID NO: 28243 - protein, 9 aa, synthetic construct
  source 1..9: note = Description of Artificial Sequence: Synthetic peptide; note = XENP022136 vlCDR3
QQGHQLPYT

SEQ ID NO: 28244 - protein, 223 aa, synthetic construct; identical to SEQ ID NO: 28204
  source 1..223: note = Description of Artificial Sequence: Synthetic polypeptide; note = XENP022137 2A11_H1.156_L2.116_Fab Heavy Chain

SEQ ID NO: 28245 - protein, 118 aa, synthetic construct; identical to SEQ ID NO: 28205
  source 1..118: note = Description of Artificial Sequence: Synthetic polypeptide; note = VH of XENP022137

SEQ ID NO: 28246 - protein, 5 aa, synthetic construct
  source 1..5: note = Description of Artificial Sequence: Synthetic peptide; note = XENP022137 vhCDR1
DYFMH

SEQ ID NO: 28247 - protein, 17 aa, synthetic construct
  source 1..17: note = Description of Artificial Sequence: Synthetic peptide; note = XENP022137 vhCDR2
WIDPYLGDTEYAPKFQG

SEQ ID NO: 28248 - protein, 9 aa, synthetic construct
  source 1..9: note = Description of Artificial Sequence: Synthetic peptide; note = XENP022137 vhCDR3
RGVKQALDY

SEQ ID NO: 28249 - protein, 214 aa, synthetic construct; identical to SEQ ID NO: 22119
  source 1..214: note = Description of Artificial Sequence: Synthetic polypeptide; note = XENP022137 2A11_H1.156_L2.116_Fab Light Chain

SEQ ID NO: 28250 - protein, 107 aa, synthetic construct; identical to SEQ ID NO: 22120
  source 1..107: note = Description of Artificial Sequence: Synthetic polypeptide; note = VL of XENP022137

SEQ ID NO: 28251 - protein, 11 aa, synthetic construct
  source 1..11: note = Description of Artificial Sequence: Synthetic peptide; note = XENP022137 vlCDR1
QASQDIGNYLN

SEQ ID NO: 28252 - protein, 7 aa, synthetic construct
  source 1..7: note = Description of Artificial Sequence: Synthetic peptide; note = XENP022137 vlCDR2
FTSHLHS

SEQ ID NO: 28253 - protein, 9 aa, synthetic construct
  source 1..9: note = Description of Artificial Sequence: Synthetic peptide; note = XENP022137 vlCDR3
QQGHQLPYT

SEQ ID NO: 28254 - protein, 223 aa, synthetic construct
  source 1..223: note = Description of Artificial Sequence: Synthetic polypeptide; note = XENP022138 2A11_H1.158_L2.126_Fab Heavy Chain
EVQLVQSGAEVKKPGATVKISCKASGFNIKDYFMHWVQQAPGKGLEWMGWITPELGDTEYAPKFQGRVTITADTSTNTAYMELSSLRSEDTAVYYCYARGVYQALDYWGQGTLVTVSSASTKGPSVFPLAPSSKSTSGGTAALGCLVKDYFPEPVTVSWNSGALTSGVHTFPAVLQSSGLYSLSSVVTVPSSSLGTQTYICNVNHKPSNTKVDKKVEPKSCGS

SEQ ID NO: 28255 - protein, 118 aa, synthetic construct
  source 1..118: note = Description of Artificial Sequence: Synthetic polypeptide; note = VH of XENP022138
EVQLVQSGAEVKKPGATVKISCKASGFNIKDYFMHWVQQAPGKGLEWMGWITPELGDTEYAPKFQGRVTITADTSTNTAYMELSSLRSEDTAVYYCYARGVYQALDYWGQGTLVTVSS

SEQ ID NO: 28256 - protein, 5 aa, synthetic construct
  source 1..5: note = Description of Artificial Sequence: Synthetic peptide; note = XENP022138 vhCDR1
DYFMH

SEQ ID NO: 28257 - protein, 17 aa, synthetic construct
  source 1..17: note = Description of Artificial Sequence: Synthetic peptide; note = XENP022138 vhCDR2
WITPELGDTEYAPKFQG

SEQ ID NO: 28258 - protein, 9 aa, synthetic construct
  source 1..9: note = Description of Artificial Sequence: Synthetic peptide; note = XENP022138 vhCDR3
RGVYQALDY

SEQ ID NO: 28259 - protein, 214 aa, synthetic construct; identical to SEQ ID NO: 22259
  source 1..214: note = Description of Artificial Sequence: Synthetic polypeptide; note = XENP022138 2A11_H1.158_L2.126_Fab Light Chain

SEQ ID NO: 28260 - protein, 107 aa, synthetic construct; identical to SEQ ID NO: 22260
  source 1..107: note = Description of Artificial Sequence: Synthetic polypeptide; note = VL of XENP022138

SEQ ID NO: 28261 - protein, 11 aa, synthetic construct
  source 1..11: note = Description of Artificial Sequence: Synthetic peptide; note = XENP022138 vlCDR1
QASQDIGNYLN

SEQ ID NO: 28262 - protein, 7 aa, synthetic construct
  source 1..7: note = Description of Artificial Sequence: Synthetic peptide; note = XENP022138 vlCDR2
FTSYLHS

SEQ ID NO: 28263 - protein, 9 aa, synthetic construct
  source 1..9: note = Description of Artificial Sequence: Synthetic peptide; note = XENP022138 vlCDR3
QEGNTLPYT

SEQ ID NO: 28264 - protein, 223 aa, synthetic construct
  source 1..223: note = Description of Artificial Sequence: Synthetic polypeptide; note = XENP022139 2A11_H1.159_L2.126_Fab Heavy Chain
EVQLVQSGAEVKKPGATVKISCKASGFNIKDYFMHWVQQAPGKGLEWMGWIVPELGDTEYAPKFQGRVTITADTSTNTAYMELSSLRSEDTAVYYCYARGVYQALDYWGQGTLVTVSSASTKGPSVFPLAPSSKSTSGGTAALGCLVKDYFPEPVTVSWNSGALTSGVHTFPAVLQSSGLYSLSSVVTVPSSSLGTQTYICNVNHKPSNTKVDKKVEPKSCGS

SEQ ID NO: 28265 - protein, 118 aa, synthetic construct
  source 1..118: note = Description of Artificial Sequence: Synthetic polypeptide; note = VH of XENP022139
EVQLVQSGAEVKKPGATVKISCKASGFNIKDYFMHWVQQAPGKGLEWMGWIVPELGDTEYAPKFQGRVTITADTSTNTAYMELSSLRSEDTAVYYCYARGVYQALDYWGQGTLVTVSS

SEQ ID NO: 28266 - protein, 5 aa, synthetic construct
  source 1..5: note = Description of Artificial Sequence: Synthetic peptide; note = XENP022139 vhCDR1
DYFMH

SEQ ID NO: 28267 - protein, 17 aa, synthetic construct
  source 1..17: note = Description of Artificial Sequence: Synthetic peptide; note = XENP022139 vhCDR2
WIVPELGDTEYAPKFQG

SEQ ID NO: 28268 - protein, 9 aa, synthetic construct
  source 1..9: note = Description of Artificial Sequence: Synthetic peptide; note = XENP022139 vhCDR3
RGVYQALDY

SEQ ID NO: 28269 - protein, 214 aa, synthetic construct; identical to SEQ ID NO: 22259
  source 1..214: note = Description of Artificial Sequence: Synthetic polypeptide; note = XENP022139 2A11_H1.159_L2.126_Fab Light Chain

SEQ ID NO: 28270 - protein, 107 aa, synthetic construct; identical to SEQ ID NO: 22260
  source 1..107: note = Description of Artificial Sequence: Synthetic polypeptide; note = VL of XENP022139

SEQ ID NO: 28271 - protein, 11 aa, synthetic construct
  source 1..11: note = Description of Artificial Sequence: Synthetic peptide; note = XENP022139 vlCDR1
QASQDIGNYLN

SEQ ID NO: 28272 - protein, 7 aa, synthetic construct
  source 1..7: note = Description of Artificial Sequence: Synthetic peptide; note = XENP022139 vlCDR2
FTSYLHS

SEQ ID NO: 28273 - protein, 9 aa, synthetic construct
  source 1..9: note = Description of Artificial Sequence: Synthetic peptide; note = XENP022139 vlCDR3
QEGNTLPYT

SEQ ID NO: 28274 - protein, 223 aa, synthetic construct
  source 1..223: note = Description of Artificial Sequence: Synthetic polypeptide; note = XENP022140 2A11_H1.160_L2.126_Fab Heavy Chain
EVQLVQSGAEVKKPGATVKISCKASGFNIKDYFMHWVQQAPGKGLEWMGWIAPELGDTEYAPKFQGRVTITADTSTNTAYMELSSLRSEDTAVYYCYARGVYQALDYWGQGTLVTVSSASTKGPSVFPLAPSSKSTSGGTAALGCLVKDYFPEPVTVSWNSGALTSGVHTFPAVLQSSGLYSLSSVVTVPSSSLGTQTYICNVNHKPSNTKVDKKVEPKSCGS

SEQ ID NO: 28275 - protein, 118 aa, synthetic construct
  source 1..118: note = Description of Artificial Sequence: Synthetic polypeptide; note = VH of XENP022140
EVQLVQSGAEVKKPGATVKISCKASGFNIKDYFMHWVQQAPGKGLEWMGWIAPELGDTEYAPKFQGRVTITADTSTNTAYMELSSLRSEDTAVYYCYARGVYQALDYWGQGTLVTVSS

SEQ ID NO: 28276 - protein, 5 aa, synthetic construct
  source 1..5: note = Description of Artificial Sequence: Synthetic peptide; note = XENP022140 vhCDR1
DYFMH

SEQ ID NO: 28277 - protein, 17 aa, synthetic construct
  source 1..17: note = Description of Artificial Sequence: Synthetic peptide; note = XENP022140 vhCDR2
WIAPELGDTEYAPKFQG

SEQ ID NO: 28278 - protein, 9 aa, synthetic construct
  source 1..9: note = Description of Artificial Sequence: Synthetic peptide; note = XENP022140 vhCDR3
RGVYQALDY

SEQ ID NO: 28279 - protein, 214 aa, synthetic construct; identical to SEQ ID NO: 22259
  source 1..214: note = Description of Artificial Sequence: Synthetic polypeptide; note = XENP022140 2A11_H1.160_L2.126_Fab Light Chain

SEQ ID NO: 28280 - protein, 107 aa, synthetic construct; identical to SEQ ID NO: 22260
  source 1..107: note = Description of Artificial Sequence: Synthetic polypeptide; note = VL of XENP022140

SEQ ID NO: 28281 - protein, 11 aa, synthetic construct
  source 1..11: note = Description of Artificial Sequence: Synthetic peptide; note = XENP022140 vlCDR1
QASQDIGNYLN

SEQ ID NO: 28282 - protein, 7 aa, synthetic construct
  source 1..7: note = Description of Artificial Sequence: Synthetic peptide; note = XENP022140 vlCDR2
FTSYLHS

SEQ ID NO: 28283 - protein, 9 aa, synthetic construct
  source 1..9: note = Description of Artificial Sequence: Synthetic peptide; note = XENP022140 vlCDR3
QEGNTLPYT

SEQ ID NO: 28284 - protein, 223 aa, synthetic construct
  source 1..223: note = Description of Artificial Sequence: Synthetic polypeptide; note = XENP022141 2A11_H1.161_L2.126_Fab Heavy Chain
EVQLVQSGAEVKKPGATVKISCKASGFNIKDYFMHWVQQAPGKGLEWMGWIIPELGDTEYAPKFQGRVTITADTSTNTAYMELSSLRSEDTAVYYCYARGVYQALDYWGQGTLVTVSSASTKGPSVFPLAPSSKSTSGGTAALGCLVKDYFPEPVTVSWNSGALTSGVHTFPAVLQSSGLYSLSSVVTVPSSSLGTQTYICNVNHKPSNTKVDKKVEPKSCGS

SEQ ID NO: 28285 - protein, 118 aa, synthetic construct
  source 1..118: note = Description of Artificial Sequence: Synthetic polypeptide; note = VH of XENP022141
EVQLVQSGAEVKKPGATVKISCKASGFNIKDYFMHWVQQAPGKGLEWMGWIIPELGDTEYAPKFQGRVTITADTSTNTAYMELSSLRSEDTAVYYCYARGVYQALDYWGQGTLVTVSS

SEQ ID NO: 28286 - protein, 5 aa, synthetic construct
  source 1..5: note = Description of Artificial Sequence: Synthetic peptide; note = XENP022141 vhCDR1
DYFMH

SEQ ID NO: 28287 - protein, 17 aa, synthetic construct
  source 1..17: note = Description of Artificial Sequence: Synthetic peptide; note = XENP022141 vhCDR2
WIIPELGDTEYAPKFQG

SEQ ID NO: 28288 - protein, 9 aa, synthetic construct
  source 1..9: note = Description of Artificial Sequence: Synthetic peptide; note = XENP022141 vhCDR3
RGVYQALDY

SEQ ID NO: 28289 - protein, 214 aa, synthetic construct; identical to SEQ ID NO: 22259
  source 1..214: note = Description of Artificial Sequence: Synthetic polypeptide; note = XENP022141 2A11_H1.161_L2.126_Fab Light Chain

SEQ ID NO: 28290 - protein, 107 aa, synthetic construct; identical to SEQ ID NO: 22260
  source 1..107: note = Description of Artificial Sequence: Synthetic polypeptide; note = VL of XENP022141

SEQ ID NO: 28291 - protein, 11 aa, synthetic construct
  source 1..11: note = Description of Artificial Sequence: Synthetic peptide; note = XENP022141 vlCDR1
QASQDIGNYLN

SEQ ID NO: 28292 - protein, 7 aa, synthetic construct
  source 1..7: note = Description of Artificial Sequence: Synthetic peptide; note = XENP022141 vlCDR2
FTSYLHS

SEQ ID NO: 28293 - protein, 9 aa, synthetic construct
  source 1..9: note = Description of Artificial Sequence: Synthetic peptide; note = XENP022141 vlCDR3
QEGNTLPYT

SEQ ID NO: 28294 - protein, 223 aa, synthetic construct
  source 1..223: note = Description of Artificial Sequence: Synthetic polypeptide; note = XENP022142 2A11_H1.162_L2.126_Fab Heavy Chain
EVQLVQSGAEVKKPGATVKISCKASGFNIKDYFMHWVQQAPGKGLEWMGWIGPELGDTEYAPKFQGRVTITADTSTNTAYMELSSLRSEDTAVYYCYARGVYQALDYWGQGTLVTVSSASTKGPSVFPLAPSSKSTSGGTAALGCLVKDYFPEPVTVSWNSGALTSGVHTFPAVLQSSGLYSLSSVVTVPSSSLGTQTYICNVNHKPSNTKVDKKVEPKSCGS

SEQ ID NO: 28295 - protein, 118 aa, synthetic construct
  source 1..118: note = Description of Artificial Sequence: Synthetic polypeptide; note = VH of XENP022142
EVQLVQSGAEVKKPGATVKISCKASGFNIKDYFMHWVQQAPGKGLEWMGWIGPELGDTEYAPKFQGRVTITADTSTNTAYMELSSLRSEDTAVYYCYARGVYQALDYWGQGTLVTVSS

SEQ ID NO: 28296 - protein, 5 aa, synthetic construct
  source 1..5: note = Description of Artificial Sequence: Synthetic peptide; note = XENP022142 vhCDR1
DYFMH

SEQ ID NO: 28297 - protein, 17 aa, synthetic construct
  source 1..17: note = Description of Artificial Sequence: Synthetic peptide; note = XENP022142 vhCDR2
WIGPELGDTEYAPKFQG

SEQ ID NO: 28298 - protein, 9 aa, synthetic construct
  source 1..9: note = Description of Artificial Sequence: Synthetic peptide; note = XENP022142 vhCDR3
RGVYQALDY

SEQ ID NO: 28299 - protein, 214 aa, synthetic construct; identical to SEQ ID NO: 22259
  source 1..214: note = Description of Artificial Sequence: Synthetic polypeptide; note = XENP022142 2A11_H1.162_L2.126_Fab Light Chain

SEQ ID NO: 28300 - protein, 107 aa, synthetic construct; identical to SEQ ID NO: 22260
  source 1..107: note = Description of Artificial Sequence: Synthetic polypeptide; note = VL of XENP022142

SEQ ID NO: 28301 - protein, 11 aa, synthetic construct
  source 1..11: note = Description of Artificial Sequence: Synthetic peptide; note = XENP022142 vlCDR1
QASQDIGNYLN

SEQ ID NO: 28302 - protein, 7 aa, synthetic construct
  source 1..7: note = Description of Artificial Sequence: Synthetic peptide; note = XENP022142 vlCDR2
FTSYLHS

SEQ ID NO: 28303 - protein, 9 aa, synthetic construct
  source 1..9: note = Description of Artificial Sequence: Synthetic peptide; note = XENP022142 vlCDR3
QEGNTLPYT

SEQ ID NO: 28304 - protein, 223 aa, synthetic construct
  source 1..223: note = Description of Artificial Sequence: Synthetic polypeptide; note = XENP022143 2A11_H1.163_L2.126_Fab Heavy Chain
EVQLVQSGAEVKKPGATVKISCKASGFNIKDYFMHWVQQAPGKGLEWMGWILPELGDTEYAPKFQGRVTITADTSTNTAYMELSSLRSEDTAVYYCYARGVYQALDYWGQGTLVTVSSASTKGPSVFPLAPSSKSTSGGTAALGCLVKDYFPEPVTVSWNSGALTSGVHTFPAVLQSSGLYSLSSVVTVPSSSLGTQTYICNVNHKPSNTKVDKKVEPKSCGS

SEQ ID NO: 28305 - protein, 118 aa, synthetic construct
  source 1..118: note = Description of Artificial Sequence: Synthetic polypeptide; note = VH of XENP022143
EVQLVQSGAEVKKPGATVKISCKASGFNIKDYFMHWVQQAPGKGLEWMGWILPELGDTEYAPKFQGRVTITADTSTNTAYMELSSLRSEDTAVYYCYARGVYQALDYWGQGTLVTVSS

SEQ ID NO: 28306 - protein, 5 aa, synthetic construct
  source 1..5: note = Description of Artificial Sequence: Synthetic peptide; note = XENP022143 vhCDR1
DYFMH

SEQ ID NO: 28307 - protein, 17 aa, synthetic construct
  source 1..17: note = Description of Artificial Sequence: Synthetic peptide; note = XENP022143 vhCDR2
WILPELGDTEYAPKFQG

SEQ ID NO: 28308 - protein, 9 aa, synthetic construct
  source 1..9: note = Description of Artificial Sequence: Synthetic peptide; note = XENP022143 vhCDR3
RGVYQALDY

SEQ ID NO: 28309 - protein, 214 aa, synthetic construct; identical to SEQ ID NO: 22259
  source 1..214: note = Description of Artificial Sequence: Synthetic polypeptide; note = XENP022143 2A11_H1.163_L2.126_Fab Light Chain

SEQ ID NO: 28310 - protein, 107 aa, synthetic construct; identical to SEQ ID NO: 22260
  source 1..107: note = Description of Artificial Sequence: Synthetic polypeptide; note = VL of XENP022143

SEQ ID NO: 28311 - protein, 11 aa, synthetic construct
  source 1..11: note = Description of Artificial Sequence: Synthetic peptide; note = XENP022143 vlCDR1
QASQDIGNYLN

SEQ ID NO: 28312 - protein, 7 aa, synthetic construct
  source 1..7: note = Description of Artificial Sequence: Synthetic peptide; note = XENP022143 vlCDR2
FTSYLHS

SEQ ID NO: 28313 - protein, 9 aa, synthetic construct
  source 1..9: note = Description of Artificial Sequence: Synthetic peptide; note = XENP022143 vlCDR3
QEGNTLPYT

SEQ ID NO: 28314 - protein, 223 aa, synthetic construct
  source 1..223: note = Description of Artificial Sequence: Synthetic polypeptide; note = XENP022144 2A11_H1.164_L2.126_Fab Heavy Chain
EVQLVQSGAEVKKPGATVKISCKASGFNIKDYFMHWVQQAPGKGLEWMGWITPETGDTEYAPKFQGRVTITADTSTNTAYMELSSLRSEDTAVYYCYARGVYQALDYWGQGTLVTVSSASTKGPSVFPLAPSSKSTSGGTAALGCLVKDYFPEPVTVSWNSGALTSGVHTFPAVLQSSGLYSLSSVVTVPSSSLGTQTYICNVNHKPSNTKVDKKVEPKSCGS

SEQ ID NO: 28315 - protein, 118 aa, synthetic construct
  source 1..118: note = Description of Artificial Sequence: Synthetic polypeptide; note = VH of XENP022144
EVQLVQSGAEVKKPGATVKISCKASGFNIKDYFMHWVQQAPGKGLEWMGWITPETGDTEYAPKFQGRVTITADTSTNTAYMELSSLRSEDTAVYYCYARGVYQALDYWGQGTLVTVSS

SEQ ID NO: 28316 - protein, 5 aa, synthetic construct
  source 1..5: note = Description of Artificial Sequence: Synthetic peptide; note = XENP022144 vhCDR1
DYFMH

SEQ ID NO: 28317 - protein, 17 aa, synthetic construct
  source 1..17: note = Description of Artificial Sequence: Synthetic peptide; note = XENP022144 vhCDR2
WITPETGDTEYAPKFQG

SEQ ID NO: 28318 - protein, 9 aa, synthetic construct
  source 1..9: note = Description of Artificial Sequence: Synthetic peptide; note = XENP022144 vhCDR3
RGVYQALDY

SEQ ID NO: 28319 - protein, 214 aa, synthetic construct; identical to SEQ ID NO: 22259
  source 1..214: note = Description of Artificial Sequence: Synthetic polypeptide; note = XENP022144 2A11_H1.164_L2.126_Fab Light Chain

SEQ ID NO: 28320 - protein, 107 aa, synthetic construct; identical to SEQ ID NO: 22260
  source 1..107: note = Description of Artificial Sequence: Synthetic polypeptide; note = VL of XENP022144

SEQ ID NO: 28321 - protein, 11 aa, synthetic construct
  source 1..11: note = Description of Artificial Sequence: Synthetic peptide; note = XENP022144 vlCDR1
QASQDIGNYLN

SEQ ID NO: 28322 - protein, 7 aa, synthetic construct
  source 1..7: note = Description of Artificial Sequence: Synthetic peptide; note = XENP022144 vlCDR2
FTSYLHS

SEQ ID NO: 28323 - protein, 9 aa, synthetic construct
  source 1..9: note = Description of Artificial Sequence: Synthetic peptide; note = XENP022144 vlCDR3
QEGNTLPYT

SEQ ID NO: 28324 - protein, 223 aa, synthetic construct
  source 1..223: note = Description of Artificial Sequence: Synthetic polypeptide; note = XENP022145 2A11_H1.165_L2.126_Fab Heavy Chain
EVQLVQSGAEVKKPGATVKISCKASGFNIKDYFMHWVQQAPGKGLEWMGWIVPETGDTEYAPKFQGRVTITADTSTNTAYMELSSLRSEDTAVYYCYARGVYQALDYWGQGTLVTVSSASTKGPSVFPLAPSSKSTSGGTAALGCLVKDYFPEPVTVSWNSGALTSGVHTFPAVLQSSGLYSLSSVVTVPSSSLGTQTYICNVNHKPSNTKVDKKVEPKSCGS

SEQ ID NO: 28325 - protein, 118 aa, synthetic construct
  source 1..118: note = Description of Artificial Sequence: Synthetic polypeptide; note = VH of XENP022145
EVQLVQSGAEVKKPGATVKISCKASGFNIKDYFMHWVQQAPGKGLEWMGWIVPETGDTEYAPKFQGRVTITADTSTNTAYMELSSLRSEDTAVYYCYARGVYQALDYWGQGTLVTVSS

SEQ ID NO: 28326 - protein, 5 aa, synthetic construct
  source 1..5: note = Description of Artificial Sequence: Synthetic peptide; note = XENP022145 vhCDR1
DYFMH

SEQ ID NO: 28327 - protein, 17 aa, synthetic construct
  source 1..17: note = Description of Artificial Sequence: Synthetic peptide; note = XENP022145 vhCDR2
WIVPETGDTEYAPKFQG

SEQ ID NO: 28328 - protein, 9 aa, synthetic construct
  source 1..9: note = Description of Artificial Sequence: Synthetic peptide; note = XENP022145 vhCDR3
RGVYQALDY

SEQ ID NO: 28329 - protein, 214 aa, synthetic construct; identical to SEQ ID NO: 22259
  source 1..214: note = Description of Artificial Sequence: Synthetic polypeptide; note = XENP022145 2A11_H1.165_L2.126_Fab Light Chain

SEQ ID NO: 28330 - protein, 107 aa, synthetic construct; identical to SEQ ID NO: 22260
  source 1..107: note = Description of Artificial Sequence: Synthetic polypeptide; note = VL of XENP022145

SEQ ID NO: 28331 - protein, 11 aa, synthetic construct
  source 1..11: note = Description of Artificial Sequence: Synthetic peptide; note = XENP022145 vlCDR1
QASQDIGNYLN

SEQ ID NO: 28332 - protein, 7 aa, synthetic construct
  source 1..7: note = Description of Artificial Sequence: Synthetic peptide; note = XENP022145 vlCDR2
FTSYLHS

SEQ ID NO: 28333 - protein, 9 aa, synthetic construct
  source 1..9: note = Description of Artificial Sequence: Synthetic peptide; note = XENP022145 vlCDR3
QEGNTLPYT

SEQ ID NO: 28334 - protein, 223 aa, synthetic construct
  source 1..223: note = Description of Artificial Sequence: Synthetic polypeptide; note = XENP022146 2A11_H1.166_L2.126_Fab Heavy Chain
EVQLVQSGAEVKKPGATVKISCKASGFNIKDYFMHWVQQAPGKGLEWMGWIAPETGDTEYAPKFQGRVTITADTSTNTAYMELSSLRSEDTAVYYCYARGVYQALDYWGQGTLVTVSSASTKGPSVFPLAPSSKSTSGGTAALGCLVKDYFPEPVTVSWNSGALTSGVHTFPAVLQSSGLYSLSSVVTVPSSSLGTQTYICNVNHKPSNTKVDKKVEPKSCGS

SEQ ID NO: 28335 - protein, 118 aa, synthetic construct
  source 1..118: note = Description of Artificial Sequence: Synthetic polypeptide; note = VH of XENP022146
EVQLVQSGAEVKKPGATVKISCKASGFNIKDYFMHWVQQAPGKGLEWMGWIAPETGDTEYAPKFQGRVTITADTSTNTAYMELSSLRSEDTAVYYCYARGVYQALDYWGQGTLVTVSS

SEQ ID NO: 28336 - protein, 5 aa, synthetic construct
  source 1..5: note = Description of Artificial Sequence: Synthetic peptide; note = XENP022146 vhCDR1
DYFMH

SEQ ID NO: 28337 - protein, 17 aa, synthetic construct
  source 1..17: note = Description of Artificial Sequence: Synthetic peptide; note = XENP022146 vhCDR2
WIAPETGDTEYAPKFQG

SEQ ID NO: 28338 - protein, 9 aa, synthetic construct
  source 1..9: note = Description of Artificial Sequence: Synthetic peptide; note = XENP022146 vhCDR3
RGVYQALDY

SEQ ID NO: 28339 - protein, 214 aa, synthetic construct; identical to SEQ ID NO: 22259
  source 1..214: note = Description of Artificial Sequence: Synthetic polypeptide; note = XENP022146 2A11_H1.166_L2.126_Fab Light Chain

SEQ ID NO: 28340 - protein, 107 aa, synthetic construct; identical to SEQ ID NO: 22260
  source 1..107: note = Description of Artificial Sequence: Synthetic polypeptide; note = VL of XENP022146

SEQ ID NO: 28341 - protein, 11 aa, synthetic construct
  source 1..11: note = Description of Artificial Sequence: Synthetic peptide; note = XENP022146 vlCDR1
QASQDIGNYLN

SEQ ID NO: 28342 - protein, 7 aa, synthetic construct
  source 1..7: note = Description of Artificial Sequence: Synthetic peptide; note = XENP022146 vlCDR2
FTSYLHS

SEQ ID NO: 28343 - protein, 9 aa, synthetic construct
  source 1..9: note = Description of Artificial Sequence: Synthetic peptide; note = XENP022146 vlCDR3
QEGNTLPYT

SEQ ID NO: 28344 - protein, 223 aa, synthetic construct
  source 1..223: note = Description of Artificial Sequence: Synthetic polypeptide; note = XENP022147 2A11_H1.167_L2.126_Fab Heavy Chain
EVQLVQSGAEVKKPGATVKISCKASGFNIKDYFMHWVQQAPGKGLEWMGWIIPETGDTEYAPKFQGRVTITADTSTNTAYMELSSLRSEDTAVYYCYARGVYQALDYWGQGTLVTVSSASTKGPSVFPLAPSSKSTSGGTAALGCLVKDYFPEPVTVSWNSGALTSGVHTFPAVLQSSGLYSLSSVVTVPSSSLGTQTYICNVNHKPSNTKVDKKVEPKSCGS

SEQ ID NO: 28345 - protein, 118 aa, synthetic construct
  source 1..118: note = Description of Artificial Sequence: Synthetic polypeptide; note = VH of XENP022147
EVQLVQSGAEVKKPGATVKISCKASGFNIKDYFMHWVQQAPGKGLEWMGWIIPETGDTEYAPKFQGRVTITADTSTNTAYMELSSLRSEDTAVYYCYARGVYQALDYWGQGTLVTVSS

SEQ ID NO: 28346 - protein, 5 aa, synthetic construct
  source 1..5: note = Description of Artificial Sequence: Synthetic peptide; note = XENP022147 vhCDR1
DYFMH

SEQ ID NO: 28347 - protein, 17 aa, synthetic construct
  source 1..17: note = Description of Artificial Sequence: Synthetic peptide; note = XENP022147 vhCDR2
WIIPETGDTEYAPKFQG

SEQ ID NO: 28348 - protein, 9 aa, synthetic construct
  source 1..9: note = Description of Artificial Sequence: Synthetic peptide; note = XENP022147 vhCDR3
RGVYQALDY

SEQ ID NO: 28349 - protein, 214 aa, synthetic construct; identical to SEQ ID NO: 22259
  source 1..214: note = Description of Artificial Sequence: Synthetic polypeptide; note = XENP022147 2A11_H1.167_L2.126_Fab Light Chain

SEQ ID NO: 28350 - protein, 107 aa, synthetic construct; identical to SEQ ID NO: 22260
  source 1..107: note = Description of Artificial Sequence: Synthetic polypeptide; note = VL of XENP022147

SEQ ID NO: 28351 - protein, 11 aa, synthetic construct
  source 1..11: note = Description of Artificial Sequence: Synthetic peptide; note = XENP022147 vlCDR1
QASQDIGNYLN

SEQ ID NO: 28352 - protein, 7 aa, synthetic construct
  source 1..7: note = Description of Artificial Sequence: Synthetic peptide; note = XENP022147 vlCDR2
FTSYLHS

SEQ ID NO: 28353 - protein, 9 aa, synthetic construct
  source 1..9: note = Description of Artificial Sequence: Synthetic peptide; note = XENP022147 vlCDR3
QEGNTLPYT

SEQ ID NO: 28354 - protein, 223 aa, synthetic construct
  source 1..223: note = Description of Artificial Sequence: Synthetic polypeptide; note = XENP022148 2A11_H1.168_L2.126_Fab Heavy Chain
EVQLVQSGAEVKKPGATVKISCKASGFNIKDYFMHWVQQAPGKGLEWMGWIGPETGDTEYAPKFQGRVTITADTSTNTAYMELSSLRSEDTAVYYCYARGVYQALDYWGQGTLVTVSSASTKGPSVFPLAPSSKSTSGGTAALGCLVKDYFPEPVTVSWNSGALTSGVHTFPAVLQSSGLYSLSSVVTVPSSSLGTQTYICNVNHKPSNTKVDKKVEPKSCGS

SEQ ID NO: 28355 - protein, 118 aa, synthetic construct
  source 1..118: note = Description of Artificial Sequence: Synthetic polypeptide; note = VH of XENP022148
EVQLVQSGAEVKKPGATVKISCKASGFNIKDYFMHWVQQAPGKGLEWMGWIGPETGDTEYAPKFQGRVTITADTSTNTAYMELSSLRSEDTAVYYCYARGVYQALDYWGQGTLVTVSS

SEQ ID NO: 28356 - protein, 5 aa, synthetic construct
  source 1..5: note = Description of Artificial Sequence: Synthetic peptide; note = XENP022148 vhCDR1
DYFMH

SEQ ID NO: 28357 - protein, 17 aa, synthetic construct
  source 1..17: note = Description of Artificial Sequence: Synthetic peptide; note = XENP022148 vhCDR2
WIGPETGDTEYAPKFQG

SEQ ID NO: 28358 - protein, 9 aa, synthetic construct
  source 1..9: note = Description of Artificial Sequence: Synthetic peptide; note = XENP022148 vhCDR3
RGVYQALDY

SEQ ID NO: 28359 - protein, 214 aa, synthetic construct; identical to SEQ ID NO: 22259
  source 1..214: note = Description of Artificial Sequence: Synthetic polypeptide; note = XENP022148 2A11_H1.168_L2.126_Fab Light Chain

SEQ ID NO: 28360 - protein, 107 aa, synthetic construct; identical to SEQ ID NO: 22260
  source 1..107: note = Description of Artificial Sequence: Synthetic polypeptide; note = VL of XENP022148

SEQ ID NO: 28361 - protein, 11 aa, synthetic construct
  source 1..11: note = Description of Artificial Sequence: Synthetic peptide; note = XENP022148 vlCDR1
QASQDIGNYLN

SEQ ID NO: 28362 - protein, 7 aa, synthetic construct
  source 1..7: note = Description of Artificial Sequence: Synthetic peptide; note = XENP022148 vlCDR2
FTSYLHS

SEQ ID NO: 28363 - protein, 9 aa, synthetic construct
  source 1..9: note = Description of Artificial Sequence: Synthetic peptide; note = XENP022148 vlCDR3
QEGNTLPYT

SEQ ID NO: 28364 - protein, 223 aa, synthetic construct
  source 1..223: note = Description of Artificial Sequence: Synthetic polypeptide; note = XENP022149 2A11_H1.169_L2.126_Fab Heavy Chain
EVQLVQSGAEVKKPGATVKISCKASGFNIKDYFMHWVQQAPGKGLEWMGWILPETGDTEYAPKFQGRVTITADTSTNTAYMELSSLRSEDTAVYYCYARGVYQALDYWGQGTLVTVSSASTKGPSVFPLAPSSKSTSGGTAALGCLVKDYFPEPVTVSWNSGALTSGVHTFPAVLQSSGLYSLSSVVTVPSSSLGTQTYICNVNHKPSNTKVDKKVEPKSCGS

SEQ ID NO: 28365 - protein, 118 aa, synthetic construct
  source 1..118: note = Description of Artificial Sequence: Synthetic polypeptide; note = VH of XENP022149
EVQLVQSGAEVKKPGATVKISCKASGFNIKDYFMHWVQQAPGKGLEWMGWILPETGDTEYAPKFQGRVTITADTSTNTAYMELSSLRSEDTAVYYCYARGVYQALDYWGQGTLVTVSS

SEQ ID NO: 28366 - protein, 5 aa, synthetic construct
  source 1..5: note = Description of Artificial Sequence: Synthetic peptide; note = XENP022149 vhCDR1
DYFMH

SEQ ID NO: 28367 - protein, 17 aa, synthetic construct
  source 1..17: note = Description of Artificial Sequence: Synthetic peptide; note = XENP022149 vhCDR2
WILPETGDTEYAPKFQG

SEQ ID NO: 28368 - protein, 9 aa, synthetic construct
  source 1..9: note = Description of Artificial Sequence: Synthetic peptide; note = XENP022149 vhCDR3
RGVYQALDY

SEQ ID NO: 28369 - protein, 214 aa, synthetic construct; identical to SEQ ID NO: 22259
  source 1..214: note = Description of Artificial Sequence: Synthetic polypeptide; note = XENP022149 2A11_H1.169_L2.126_Fab Light Chain

SEQ ID NO: 28370 - protein, 107 aa, synthetic construct; identical to SEQ ID NO: 22260
  source 1..107: note = Description of Artificial Sequence: Synthetic polypeptide; note = VL of XENP022149

SEQ ID NO: 28371 - protein, 11 aa, synthetic construct
  source 1..11: note = Description of Artificial Sequence: Synthetic peptide; note = XENP022149 vlCDR1
QASQDIGNYLN

SEQ ID NO: 28372 - protein, 7 aa, synthetic construct
  source 1..7: note = Description of Artificial Sequence: Synthetic peptide; note = XENP022149 vlCDR2
FTSYLHS

SEQ ID NO: 28373 - protein, 9 aa, synthetic construct
  source 1..9: note = Description of Artificial Sequence: Synthetic peptide; note = XENP022149 vlCDR3
QEGNTLPYT

SEQ ID NO: 28374 - protein, 223 aa, synthetic construct; identical to SEQ ID NO: 27634
  source 1..223: note = Description of Artificial Sequence: Synthetic polypeptide; note = XENP022450 2A11_H1.144_L2.128_Fab Heavy Chain

SEQ ID NO: 28375 - protein, 118 aa, synthetic construct; identical to SEQ ID NO: 22085
  source 1..118: note = Description of Artificial Sequence: Synthetic polypeptide; note = VH of XENP022450

SEQ ID NO: 28376 - protein, 5 aa, synthetic construct
  source 1..5: note = Description of Artificial Sequence: Synthetic peptide; note = XENP022450 vhCDR1
DYFMH

SEQ ID NO: 28377 - protein, 17 aa, synthetic construct
  source 1..17: note = Description of Artificial Sequence: Synthetic peptide; note = XENP022450 vhCDR2
WIDPELGDTEYAPKFQG

SEQ ID NO: 28378 - protein, 9 aa, synthetic construct
  source 1..9: note = Description of Artificial Sequence: Synthetic peptide; note = XENP022450 vhCDR3
RGVYQALDY

SEQ ID NO: 28379 - protein, 214 aa, synthetic construct
  source 1..214: note = Description of Artificial Sequence: Synthetic polypeptide; note = XENP022450 2A11_H1.144_L2.128_Fab Light Chain
DIQMTQSPAFLSVTPGEKVTITCQASQDIGNYLNWFQQKPGQTVKLLIYYTSYLHSGVPSRFSGSGSGTDYTFTISSLEAEDAATYFCQEGNTLPYTFGGGTKVEIKRTVAAPSVFIFPPSDEQLKSGTASVVCLLNNFYPREAKVQWKVDNALQSGNSQESVTEQDSKDSTYSLSSTLTLSKADYEKHKVYACEVTHQGLSSPVTKSFNRGEC

SEQ ID NO: 28380 - protein, 107 aa, synthetic construct
  source 1..107: note = Description of Artificial Sequence: Synthetic polypeptide; note = VL of XENP022450
DIQMTQSPAFLSVTPGEKVTITCQASQDIGNYLNWFQQKPGQTVKLLIYYTSYLHSGVPSRFSGSGSGTDYTFTISSLEAEDAATYFCQEGNTLPYTFGGGTKVEIK

SEQ ID NO: 28381 - protein, 11 aa, synthetic construct
  source 1..11: note = Description of Artificial Sequence: Synthetic peptide; note = XENP022450 vlCDR1
QASQDIGNYLN

SEQ ID NO: 28382 - protein, 7 aa, synthetic construct
  source 1..7: note = Description of Artificial Sequence: Synthetic peptide; note = XENP022450 vlCDR2
YTSYLHS

SEQ ID NO: 28383 - protein, 9 aa, synthetic construct
  source 1..9: note = Description of Artificial Sequence: Synthetic peptide; note = XENP022450 vlCDR3
QEGNTLPYT

SEQ ID NO: 28384 - protein, 223 aa, synthetic construct; identical to SEQ ID NO: 27634
  source 1..223: note = Description of Artificial Sequence: Synthetic polypeptide; note = XENP022451 2A11_H1.144_L2.129_Fab Heavy Chain

SEQ ID NO: 28385 - protein, 118 aa, synthetic construct; identical to SEQ ID NO: 22085
  source 1..118: note = Description of Artificial Sequence: Synthetic polypeptide; note = VH of XENP022451

SEQ ID NO: 28386 - protein, 5 aa, synthetic construct
  source 1..5: note = Description of Artificial Sequence: Synthetic peptide; note = XENP022451 vhCDR1
DYFMH

SEQ ID NO: 28387 - protein, 17 aa, synthetic construct
  source 1..17: note = Description of Artificial Sequence: Synthetic peptide; note = XENP022451 vhCDR2
WIDPELGDTEYAPKFQG

SEQ ID NO: 28388 - protein, 9 aa, synthetic construct
  source 1..9: note = Description of Artificial Sequence: Synthetic peptide; note = XENP022451 vhCDR3
RGVYQALDY

SEQ ID NO: 28389 - protein, 214 aa, synthetic construct
  source 1..214: note = Description of Artificial Sequence: Synthetic polypeptide; note = XENP022451 2A11_H1.144_L2.129_Fab Light Chain
DIQMTQSPAFLSVTPGEKVTITCQASQDIGNYLNWFQQKPDQTPKLLIYYTSYLHSGVPSRFSGSGSGTDYTFTISSLEAEDAATYFCQEGNTLPYTFGGGTKVEIKRTVAAPSVFIFPPSDEQLKSGTASVVCLLNNFYPREAKVQWKVDNALQSGNSQESVTEQDSKDSTYSLSSTLTLSKADYEKHKVYACEVTHQGLSSPVTKSFNRGEC

SEQ ID NO: 28390 - protein, 107 aa, synthetic construct
  source 1..107: note = Description of Artificial Sequence: Synthetic polypeptide; note = VL of XENP022451
DIQMTQSPAFLSVTPGEKVTITCQASQDIGNYLNWFQQKPDQTPKLLIYYTSYLHSGVPSRFSGSGSGTDYTFTISSLEAEDAATYFCQEGNTLPYTFGGGTKVEIK

SEQ ID NO: 28391 - protein, 11 aa, synthetic construct
  source 1..11: note = Description of Artificial Sequence: Synthetic peptide; note = XENP022451 vlCDR1
QASQDIGNYLN

SEQ ID NO: 28392 - protein, 7 aa, synthetic construct
  source 1..7: note = Description of Artificial Sequence: Synthetic peptide; note = XENP022451 vlCDR2
YTSYLHS

SEQ ID NO: 28393 - protein, 9 aa, synthetic construct
  source 1..9: note = Description of Artificial Sequence: Synthetic peptide; note = XENP022451 vlCDR3
QEGNTLPYT

SEQ ID NO: 28394 - protein, 223 aa, synthetic construct; identical to SEQ ID NO: 27634
  source 1..223: note = Description of Artificial Sequence: Synthetic polypeptide; note = XENP022452 2A11_H1.144_L2.130_Fab Heavy Chain

SEQ ID NO: 28395 - protein, 118 aa, synthetic construct; identical to SEQ ID NO: 22085
  source 1..118: note = Description of Artificial Sequence: Synthetic polypeptide; note = VH of XENP022452

SEQ ID NO: 28396 - protein, 5 aa, synthetic construct
  source 1..5: note = Description of Artificial Sequence: Synthetic peptide; note = XENP022452 vhCDR1
DYFMH

SEQ ID NO: 28397 - protein, 17 aa, synthetic construct
  source 1..17: note = Description of Artificial Sequence: Synthetic peptide; note = XENP022452 vhCDR2
WIDPELGDTEYAPKFQG

SEQ ID NO: 28398 - protein, 9 aa, synthetic construct
  source 1..9: note = Description of Artificial Sequence: Synthetic peptide; note = XENP022452 vhCDR3
RGVYQALDY

SEQ ID NO: 28399 - protein, 214 aa, synthetic construct
  source 1..214: note = Description of Artificial Sequence: Synthetic polypeptide; note = XENP022452 2A11_H1.144_L2.130_Fab Light Chain
DIQMTQSPAFLSVTPGEKVTITCQASQDIGNYLNWFQQKPGQTPKLLIYYTSYLHSGVPSRFSGSGSGTDYTFTISSLEAEDAATYFCQEGNTLPYTFGGGTKVEIKRTVAAPSVFIFPPSDEQLKSGTASVVCLLNNFYPREAKVQWKVDNALQSGNSQESVTEQDSKDSTYSLSSTLTLSKADYEKHKVYACEVTHQGLSSPVTKSFNRGEC

SEQ ID NO: 28400 - protein, 107 aa, synthetic construct
  source 1..107: note = Description of Artificial Sequence: Synthetic polypeptide; note = VL of XENP022452
DIQMTQSPAFLSVTPGEKVTITCQASQDIGNYLNWFQQKPGQTPKLLIYYTSYLHSGVPSRFSGSGSGTDYTFTISSLEAEDAATYFCQEGNTLPYTFGGGTKVEIK

SEQ ID NO: 28401 - protein, 11 aa, synthetic construct
  source 1..11: note = Description of Artificial Sequence: Synthetic peptide; note = XENP022452 vlCDR1
QASQDIGNYLN

SEQ ID NO: 28402 - protein, 7 aa, synthetic construct
  source 1..7: note = Description of Artificial Sequence: Synthetic peptide; note = XENP022452 vlCDR2
YTSYLHS

SEQ ID NO: 28403 - protein, 9 aa, synthetic construct
  source 1..9: note = Description of Artificial Sequence: Synthetic peptide; note = XENP022452 vlCDR3
QEGNTLPYT

SEQ ID NO: 28404 - protein, 223 aa, synthetic construct; identical to SEQ ID NO: 27634
  source 1..223: note = Description of Artificial Sequence: Synthetic polypeptide; note = XENP022453 2A11_H1.144_L2.131_Fab Heavy Chain

SEQ ID NO: 28405 - protein, 118 aa, synthetic construct; identical to SEQ ID NO: 22085
  source 1..118: note = Description of Artificial Sequence: Synthetic polypeptide; note = VH of XENP022453

SEQ ID NO: 28406 - protein, 5 aa, synthetic construct
  source 1..5: note = Description of Artificial Sequence: Synthetic peptide; note = XENP022453 vhCDR1
DYFMH

SEQ ID NO: 28407 - protein, 17 aa, synthetic construct
  source 1..17: note = Description of Artificial Sequence: Synthetic peptide; note = XENP022453 vhCDR2
WIDPELGDTEYAPKFQG

SEQ ID NO: 28408 - protein, 9 aa, synthetic construct
  source 1..9: note = Description of Artificial Sequence: Synthetic peptide; note = XENP022453 vhCDR3
RGVYQALDY

SEQ ID NO: 28409 - protein, 214 aa, synthetic construct
  source 1..214: note = Description of Artificial Sequence: Synthetic polypeptide; note = XENP022453 2A11_H1.144_L2.131_Fab Light Chain
DIQMTQSPAFLSVTPGEKVTITCQASQDIGNYLNWFQQKPGQSPKLLIYYTSYLHSGVPSRFSGSGSGTDYTFTISSLEAEDAATYFCQEGNTLPYTFGGGTKVEIKRTVAAPSVFIFPPSDEQLKSGTASVVCLLNNFYPREAKVQWKVDNALQSGNSQESVTEQDSKDSTYSLSSTLTLSKADYEKHKVYACEVTHQGLSSPVTKSFNRGEC

SEQ ID NO: 28410 - protein, 107 aa, synthetic construct
  source 1..107: note = Description of Artificial Sequence: Synthetic polypeptide; note = VL of XENP022453
DIQMTQSPAFLSVTPGEKVTITCQASQDIGNYLNWFQQKPGQSPKLLIYYTSYLHSGVPSRFSGSGSGTDYTFTISSLEAEDAATYFCQEGNTLPYTFGGGTKVEIK

SEQ ID NO: 28411 - protein, 11 aa, synthetic construct
  source 1..11: note = Description of Artificial Sequence: Synthetic peptide; note = XENP022453 vlCDR1
QASQDIGNYLN

SEQ ID NO: 28412 - protein, 7 aa, synthetic construct
  source 1..7: note = Description of Artificial Sequence: Synthetic peptide; note = XENP022453 vlCDR2
YTSYLHS

SEQ ID NO: 28413 - protein, 9 aa, synthetic construct
  source 1..9: note = Description of Artificial Sequence: Synthetic peptide; note = XENP022453 vlCDR3
QEGNTLPYT

SEQ ID NO: 28414 - protein, 223 aa, synthetic construct; identical to SEQ ID NO: 28344
  source 1..223: note = Description of Artificial Sequence: Synthetic polypeptide; note = XENP022454 2A11_H1.167_L2.128_Fab Heavy Chain

SEQ ID NO: 28415 - protein, 118 aa, synthetic construct; identical to SEQ ID NO: 28345
  source 1..118: note = Description of Artificial Sequence: Synthetic polypeptide; note = VH of XENP022454

SEQ ID NO: 28416 - protein, 5 aa, synthetic construct
  source 1..5: note = Description of Artificial Sequence: Synthetic peptide; note = XENP022454 vhCDR1
DYFMH

SEQ ID NO: 28417 - protein, 17 aa, synthetic construct
  source 1..17: note = Description of Artificial Sequence: Synthetic peptide; note = XENP022454 vhCDR2
WIIPETGDTEYAPKFQG

SEQ ID NO: 28418 - protein, 9 aa, synthetic construct
  source 1..9: note = Description of Artificial Sequence: Synthetic peptide; note = XENP022454 vhCDR3
RGVYQALDY

SEQ ID NO: 28419 - protein, 214 aa, synthetic construct; identical to SEQ ID NO: 28379
  source 1..214: note = Description of Artificial Sequence: Synthetic polypeptide; note = XENP022454 2A11_H1.167_L2.128_Fab Light Chain

SEQ ID NO: 28420 - protein, 107 aa, synthetic construct; identical to SEQ ID NO: 28380
  source 1..107: note = Description of Artificial Sequence: Synthetic polypeptide; note = VL of XENP022454

SEQ ID NO: 28421 - protein, 11 aa, synthetic construct
  source 1..11: note = Description of Artificial Sequence: Synthetic peptide; note = XENP022454 vlCDR1
QASQDIGNYLN

SEQ ID NO: 28422 - protein, 7 aa, synthetic construct
  source 1..7: note = Description of Artificial Sequence: Synthetic peptide; note = XENP022454 vlCDR2
YTSYLHS

SEQ ID NO: 28423 - protein, 9 aa, synthetic construct
  source 1..9: note = Description of Artificial Sequence: Synthetic peptide; note = XENP022454 vlCDR3
QEGNTLPYT

SEQ ID NO: 28424 - protein, 223 aa, synthetic construct; identical to SEQ ID NO: 28344
  source 1..223: note = Description of Artificial Sequence: Synthetic polypeptide; note = XENP022455 2A11_H1.167_L2.129_Fab Heavy Chain

SEQ ID NO: 28425 - protein, 118 aa, synthetic construct; identical to SEQ ID NO: 28345
  source 1..118: note = Description of Artificial Sequence: Synthetic polypeptide; note = VH of XENP022455

SEQ ID NO: 28426 - protein, 5 aa, synthetic construct
  source 1..5: note = Description of Artificial Sequence: Synthetic peptide; note = XENP022455 vhCDR1
DYFMH

SEQ ID NO: 28427 - protein, 17 aa, synthetic construct
  source 1..17: note = Description of Artificial Sequence: Synthetic peptide; note = XENP022455 vhCDR2
WIIPETGDTEYAPKFQG

SEQ ID NO: 28428 - protein, 9 aa, synthetic construct
  source 1..9: note = Description of Artificial Sequence: Synthetic peptide; note = XENP022455 vhCDR3
RGVYQALDY

SEQ ID NO: 28429 - protein, 214 aa, synthetic construct; identical to SEQ ID NO: 28389
  source 1..214: note = Description of Artificial Sequence: Synthetic polypeptide; note = XENP022455 2A11_H1.167_L2.129_Fab Light Chain

SEQ ID NO: 28430 - protein, 107 aa, synthetic construct; identical to SEQ ID NO: 28390
  source 1..107: note = Description of Artificial Sequence: Synthetic polypeptide; note = VL of XENP022455

SEQ ID NO: 28431 - protein, 11 aa, synthetic construct
  source 1..11: note = Description of Artificial Sequence: Synthetic peptide; note = XENP022455 vlCDR1
QASQDIGNYLN

SEQ ID NO: 28432 - protein, 7 aa, synthetic construct
  source 1..7: note = Description of Artificial Sequence: Synthetic peptide; note = XENP022455 vlCDR2
YTSYLHS

SEQ ID NO: 28433 - protein, 9 aa, synthetic construct
  source 1..9: note = Description of Artificial Sequence: Synthetic peptide; note = XENP022455 vlCDR3
QEGNTLPYT

SEQ ID NO: 28434 - protein, 223 aa, synthetic construct; identical to SEQ ID NO: 28344
  source 1..223: note = Description of Artificial Sequence: Synthetic polypeptide; note = XENP022456 2A11_H1.167_L2.130_Fab Heavy Chain

SEQ ID NO: 28435 - protein, 118 aa, synthetic construct; identical to SEQ ID NO: 28345
  source 1..118: note = Description of Artificial Sequence: Synthetic polypeptide; note = VH of XENP022456

SEQ ID NO: 28436 - protein, 5 aa, synthetic construct
  source 1..5: note = Description of Artificial Sequence: Synthetic peptide; note = XENP022456 vhCDR1
DYFMH

SEQ ID NO: 28437 - protein, 17 aa, synthetic construct
  source 1..17: note = Description of Artificial Sequence: Synthetic peptide; note = XENP022456 vhCDR2
WIIPETGDTEYAPKFQG

SEQ ID NO: 28438 - protein, 9 aa, synthetic construct
  source 1..9: note = Description of Artificial Sequence: Synthetic peptide; note = XENP022456 vhCDR3
RGVYQALDY

SEQ ID NO: 28439 - protein, 214 aa, synthetic construct; identical to SEQ ID NO: 28399
  source 1..214: note = Description of Artificial Sequence: Synthetic polypeptide; note = XENP022456 2A11_H1.167_L2.130_Fab Light Chain

SEQ ID NO: 28440 - protein, 107 aa, synthetic construct; identical to SEQ ID NO: 28400
  source 1..107: note = Description of Artificial Sequence: Synthetic polypeptide; note = VL of XENP022456

SEQ ID NO: 28441 - protein, 11 aa, synthetic construct
  source 1..11: note = Description of Artificial Sequence: Synthetic peptide; note = XENP022456 vlCDR1
QASQDIGNYLN

SEQ ID NO: 28442 - protein, 7 aa, synthetic construct
  source 1..7: note = Description of Artificial Sequence: Synthetic peptide; note = XENP022456 vlCDR2
YTSYLHS

SEQ ID NO: 28443 - protein, 9 aa, synthetic construct
  source 1..9: note = Description of Artificial Sequence: Synthetic peptide; note = XENP022456 vlCDR3
QEGNTLPYT

SEQ ID NO: 28444 - protein, 223 aa, synthetic construct; identical to SEQ ID NO: 28344
  source 1..223: note = Description of Artificial Sequence: Synthetic polypeptide; note = XENP022457 2A11_H1.167_L2.131_Fab Heavy Chain

SEQ ID NO: 28445 - protein, 118 aa, synthetic construct; identical to SEQ ID NO: 28345
  source 1..118: note = Description of Artificial Sequence: Synthetic polypeptide; note = VH of XENP022457

SEQ ID NO: 28446 - protein, 5 aa, synthetic construct
  source 1..5: note = Description of Artificial Sequence: Synthetic peptide; note = XENP022457 vhCDR1
DYFMH

SEQ ID NO: 28447 - protein, 17 aa, synthetic construct
  source 1..17: note = Description of Artificial Sequence: Synthetic peptide; note = XENP022457 vhCDR2
WIIPETGDTEYAPKFQG

SEQ ID NO: 28448 - protein, 9 aa, synthetic construct
  source 1..9: note = Description of Artificial Sequence: Synthetic peptide; note = XENP022457 vhCDR3
RGVYQALDY

SEQ ID NO: 28449 - protein, 214 aa, synthetic construct; identical to SEQ ID NO: 28409
  source 1..214: note = Description of Artificial Sequence: Synthetic polypeptide; note = XENP022457 2A11_H1.167_L2.131_Fab Light Chain

SEQ ID NO: 28450 - protein, 107 aa, synthetic construct; identical to SEQ ID NO: 28410
  source 1..107: note = Description of Artificial Sequence: Synthetic polypeptide; note = VL of XENP022457

SEQ ID NO: 28451 - protein, 11 aa, synthetic construct
  source 1..11: note = Description of Artificial Sequence: Synthetic peptide; note = XENP022457 vlCDR1
QASQDIGNYLN

SEQ ID NO: 28452 - protein, 7 aa, synthetic construct
  source 1..7: note = Description of Artificial Sequence: Synthetic peptide; note = XENP022457 vlCDR2
YTSYLHS

SEQ ID NO: 28453 - protein, 9 aa, synthetic construct
  source 1..9: note = Description of Artificial Sequence: Synthetic peptide; note = XENP022457 vlCDR3
QEGNTLPYT

SEQ ID NO: 28454 - protein, 223 aa, synthetic construct; identical to SEQ ID NO: 27734
  source 1..223: note = Description of Artificial Sequence: Synthetic polypeptide; note = XENP022458 2A11_H1.125_L2.128_Fab Heavy Chain

SEQ ID NO: 28455 - protein, 118 aa, synthetic construct; identical to SEQ ID NO: 22065
  source 1..118: note = Description of Artificial Sequence: Synthetic polypeptide; note = VH of XENP022458

SEQ ID NO: 28456 - protein, 5 aa, synthetic construct
  source 1..5: note = Description of Artificial Sequence: Synthetic peptide; note = XENP022458 vhCDR1
HYFMH

SEQ ID NO: 28457 - protein, 17 aa, synthetic construct
  source 1..17: note = Description of Artificial Sequence: Synthetic peptide; note = XENP022458 vhCDR2
WIDPYLGDTEYAPKFQG

SEQ ID NO: 28458 - protein, 9 aa, synthetic construct
  source 1..9: note = Description of Artificial Sequence: Synthetic peptide; note = XENP022458 vhCDR3
RGVYQALDY

SEQ ID NO: 28459 - protein, 214 aa, synthetic construct; identical to SEQ ID NO: 28379
  source 1..214: note = Description of Artificial Sequence: Synthetic polypeptide; note = XENP022458 2A11_H1.125_L2.128_Fab Light Chain

SEQ ID NO: 28460 - protein, 107 aa, synthetic construct; identical to SEQ ID NO: 28380
  source 1..107: note = Description of Artificial Sequence: Synthetic polypeptide; note = VL of XENP022458

SEQ ID NO: 28461 - protein, 11 aa, synthetic construct
  source 1..11: note = Description of Artificial Sequence: Synthetic peptide; note = XENP022458 vlCDR1
QASQDIGNYLN

SEQ ID NO: 28462 - protein, 7 aa, synthetic construct
  source 1..7: note = Description of Artificial Sequence: Synthetic peptide; note = XENP022458 vlCDR2
YTSYLHS

SEQ ID NO: 28463 - protein, 9 aa, synthetic construct
  source 1..9: note = Description of Artificial Sequence: Synthetic peptide; note = XENP022458 vlCDR3
QEGNTLPYT

SEQ ID NO: 28464 - protein, 223 aa, synthetic construct; identical to SEQ ID NO: 27734
  source 1..223: note = Description of Artificial Sequence: Synthetic polypeptide; note = XENP022459 2A11_H1.125_L2.129_Fab Heavy Chain

SEQ ID NO: 28465 - protein, 118 aa, synthetic construct; identical to SEQ ID NO: 22065
  source 1..118: note = Description of Artificial Sequence: Synthetic polypeptide; note = VH of XENP022459

SEQ ID NO: 28466 - protein, 5 aa, synthetic construct
  source 1..5: note = Description of Artificial Sequence: Synthetic peptide; note = XENP022459 vhCDR1
HYFMH

SEQ ID NO: 28467 - protein, 17 aa, synthetic construct
  source 1..17: note = Description of Artificial Sequence: Synthetic peptide; note = XENP022459 vhCDR2
WIDPYLGDTEYAPKFQG

SEQ ID NO: 28468 - protein, 9 aa, synthetic construct
  source 1..9: note = Description of Artificial Sequence: Synthetic peptide; note = XENP022459 vhCDR3
RGVYQALDY

SEQ ID NO: 28469 - protein, 214 aa, synthetic construct; identical to SEQ ID NO: 28389
  source 1..214: note = Description of Artificial Sequence: Synthetic polypeptide; note = XENP022459 2A11_H1.125_L2.129_Fab Light Chain

SEQ ID NO: 28470 - protein, 107 aa, synthetic construct; identical to SEQ ID NO: 28390
  source 1..107: note = Description of Artificial Sequence: Synthetic polypeptide; note = VL of XENP022459

SEQ ID NO: 28471 - protein, 11 aa, synthetic construct
  source 1..11: note = Description of Artificial Sequence: Synthetic peptide; note = XENP022459 vlCDR1
QASQDIGNYLN

SEQ ID NO: 28472 - protein, 7 aa, synthetic construct
  source 1..7: note = Description of Artificial Sequence: Synthetic peptide; note = XENP022459 vlCDR2
YTSYLHS

SEQ ID NO: 28473 - protein, 9 aa, synthetic construct
  source 1..9: note = Description of Artificial Sequence: Synthetic peptide; note = XENP022459 vlCDR3
QEGNTLPYT

SEQ ID NO: 28474 - protein, 223 aa, synthetic construct; identical to SEQ ID NO: 27734
  source 1..223: note = Description of Artificial Sequence: Synthetic polypeptide; note = XENP022460 2A11_H1.125_L2.130_Fab Heavy Chain

SEQ ID NO: 28475 - protein, 118 aa, synthetic construct; identical to SEQ ID NO: 22065
  source 1..118: note = Description of Artificial Sequence: Synthetic polypeptide; note = VH of XENP022460

SEQ ID NO: 28476 - protein, 5 aa, synthetic construct
  source 1..5: note = Description of Artificial Sequence: Synthetic peptide; note = XENP022460 vhCDR1
HYFMH

SEQ ID NO: 28477 - protein, 17 aa, synthetic construct
  source 1..17: note = Description of Artificial Sequence: Synthetic peptide; note = XENP022460 vhCDR2
WIDPYLGDTEYAPKFQG

SEQ ID NO: 28478 - protein, 9 aa, synthetic construct
  source 1..9: note = Description of Artificial Sequence: Synthetic peptide; note = XENP022460 vhCDR3
RGVYQALDY

SEQ ID NO: 28479 - protein, 214 aa, synthetic construct; identical to SEQ ID NO: 28399
  source 1..214: note = Description of Artificial Sequence: Synthetic polypeptide; note = XENP022460 2A11_H1.125_L2.130_Fab Light Chain

SEQ ID NO: 28480 - protein, 107 aa, synthetic construct; identical to SEQ ID NO: 28400
  source 1..107: note = Description of Artificial Sequence: Synthetic polypeptide; note = VL of XENP022460

SEQ ID NO: 28481 - protein, 11 aa, synthetic construct
  source 1..11: note = Description of Artificial Sequence: Synthetic peptide; note = XENP022460 vlCDR1
QASQDIGNYLN

SEQ ID NO: 28482 - protein, 7 aa, synthetic construct
  source 1..7: note = Description of Artificial Sequence: Synthetic peptide; note = XENP022460 vlCDR2
YTSYLHS

SEQ ID NO: 28483 - protein, 9 aa, synthetic construct
  source 1..9: note = Description of Artificial Sequence: Synthetic peptide; note = XENP022460 vlCDR3
QEGNTLPYT

SEQ ID NO: 28484 - protein, 223 aa, synthetic construct; identical to SEQ ID NO: 27734
  source 1..223: note = Description of Artificial Sequence: Synthetic polypeptide; note = XENP022461 2A11_H1.125_L2.131_Fab Heavy Chain

SEQ ID NO: 28485 - protein, 118 aa, synthetic construct; identical to SEQ ID NO: 22065
  source 1..118: note = Description of Artificial Sequence: Synthetic polypeptide; note = VH of XENP022461

SEQ ID NO: 28486 - protein, 5 aa, synthetic construct
  source 1..5: note = Description of Artificial Sequence: Synthetic peptide; note = XENP022461 vhCDR1
HYFMH

SEQ ID NO: 28487 - protein, 17 aa, synthetic construct
  source 1..17: note = Description of Artificial Sequence: Synthetic peptide; note = XENP022461 vhCDR2
WIDPYLGDTEYAPKFQG

SEQ ID NO: 28488 - protein, 9 aa, synthetic construct
  source 1..9: note = Description of Artificial Sequence: Synthetic peptide; note = XENP022461 vhCDR3
RGVYQALDY

SEQ ID NO: 28489 - protein, 214 aa, synthetic construct; identical to SEQ ID NO: 28409
  source 1..214: note = Description of Artificial Sequence: Synthetic polypeptide; note = XENP022461 2A11_H1.125_L2.131_Fab Light Chain

SEQ ID NO: 28490 - protein, 107 aa, synthetic construct; identical to SEQ ID NO: 28410
  source 1..107: note = Description of Artificial Sequence: Synthetic polypeptide; note = VL of XENP022461

SEQ ID NO: 28491 - protein, 11 aa, synthetic construct
  source 1..11: note = Description of Artificial Sequence: Synthetic peptide; note = XENP022461 vlCDR1
QASQDIGNYLN

SEQ ID NO: 28492 - protein, 7 aa, synthetic construct
  source 1..7: note = Description of Artificial Sequence: Synthetic peptide; note = XENP022461 vlCDR2
YTSYLHS

SEQ ID NO: 28493 - protein, 9 aa, synthetic construct
  source 1..9: note = Description of Artificial Sequence: Synthetic peptide; note = XENP022461 vlCDR3
QEGNTLPYT

SEQ ID NO: 28494 - protein, 223 aa, synthetic construct; identical to SEQ ID NO: 27634
  source 1..223: note = Description of Artificial Sequence: Synthetic polypeptide; note = XENP022570 2A11_H1.144_L2.132_Fab Heavy Chain

SEQ ID NO: 28495 - protein, 118 aa, synthetic construct; identical to SEQ ID NO: 22085
  source 1..118: note = Description of Artificial Sequence: Synthetic polypeptide; note = VH of XENP022570

SEQ ID NO: 28496 - protein, 5 aa, synthetic construct
  source 1..5: note = Description of Artificial Sequence: Synthetic peptide; note = XENP022570 vhCDR1
DYFMH

SEQ ID NO: 28497 - protein, 17 aa, synthetic construct
  source 1..17: note = Description of Artificial Sequence: Synthetic peptide; note = XENP022570 vhCDR2
WIDPELGDTEYAPKFQG

SEQ ID NO: 28498 - protein, 9 aa, synthetic construct
  source 1..9: note = Description of Artificial Sequence: Synthetic peptide; note = XENP022570 vhCDR3
RGVYQALDY

SEQ ID NO: 28499 - protein, 214 aa, synthetic construct; identical to SEQ ID NO: 22219
  source 1..214: note = Description of Artificial Sequence: Synthetic polypeptide; note = XENP022570 2A11_H1.144_L2.132_Fab Light Chain

SEQ ID NO: 28500 - protein, 107 aa, synthetic construct; identical to SEQ ID NO: 22220
  source 1..107: note = Description of Artificial Sequence: Synthetic polypeptide; note = VL of XENP022570

SEQ ID NO: 28501 - protein, 11 aa, synthetic construct
  source 1..11: note = Description of Artificial Sequence: Synthetic peptide; note = XENP022570 vlCDR1
QASQDIGNYLN

SEQ ID NO: 28502 - protein, 7 aa, synthetic construct
  source 1..7: note = Description of Artificial Sequence: Synthetic peptide; note = XENP022570 vlCDR2
FTSYLHS

SEQ ID NO: 28503 - protein, 9 aa, synthetic construct
  source 1..9: note = Description of Artificial Sequence: Synthetic peptide; note = XENP022570 vlCDR3
QEGNTLPYT

SEQ ID NO: 28504 - protein, 223 aa, synthetic construct; identical to SEQ ID NO: 27634
  source 1..223: note = Description of Artificial Sequence: Synthetic polypeptide; note = XENP022571 2A11_H1.144_L2.133_Fab Heavy Chain

SEQ ID NO: 28505 - protein, 118 aa, synthetic construct; identical to SEQ ID NO: 22085
  source 1..118: note = Description of Artificial Sequence: Synthetic polypeptide; note = VH of XENP022571

SEQ ID NO: 28506 - protein, 5 aa, synthetic construct
  source 1..5: note = Description of Artificial Sequence: Synthetic peptide; note = XENP022571 vhCDR1
DYFMH

SEQ ID NO: 28507 - protein, 17 aa, synthetic construct
  source 1..17: note = Description of Artificial Sequence: Synthetic peptide; note = XENP022571 vhCDR2
WIDPELGDTEYAPKFQG

SEQ ID NO: 28508 - protein, 9 aa, synthetic construct
  source 1..9: note = Description of Artificial Sequence: Synthetic peptide; note = XENP022571 vhCDR3
RGVYQALDY

SEQ ID NO: 28509 - protein, 214 aa, synthetic construct; identical to SEQ ID NO: 22199
  source 1..214: note = Description of Artificial Sequence: Synthetic polypeptide; note = XENP022571 2A11_H1.144_L2.133_Fab Light Chain

SEQ ID NO: 28510 - protein, 107 aa, synthetic construct; identical to SEQ ID NO: 22200
  source 1..107: note = Description of Artificial Sequence: Synthetic polypeptide; note = VL of XENP022571

SEQ ID NO: 28511 - protein, 11 aa, synthetic construct
  source 1..11: note = Description of Artificial Sequence: Synthetic peptide; note = XENP022571 vlCDR1
QASQDIGNYLN

SEQ ID NO: 28512 - protein, 7 aa, synthetic construct
  source 1..7: note = Description of Artificial Sequence: Synthetic peptide; note = XENP022571 vlCDR2
FTSYLHS

SEQ ID NO: 28513 - protein, 9 aa, synthetic construct
  source 1..9: note = Description of Artificial Sequence: Synthetic peptide; note = XENP022571 vlCDR3
QEGNTLPYT

SEQ ID NO: 28514 - protein, 223 aa, synthetic construct; identical to SEQ ID NO: 27634
  source 1..223: note = Description of Artificial Sequence: Synthetic polypeptide; note = XENP022572 2A11_H1.144_L2.134_Fab Heavy Chain

SEQ ID NO: 28515 - protein, 118 aa, synthetic construct; identical to SEQ ID NO: 22085
  source 1..118: note = Description of Artificial Sequence: Synthetic polypeptide; note = VH of XENP022572

SEQ ID NO: 28516 - protein, 5 aa, synthetic construct
  source 1..5: note = Description of Artificial Sequence: Synthetic peptide; note = XENP022572 vhCDR1
DYFMH

SEQ ID NO: 28517 - protein, 17 aa, synthetic construct
  source 1..17: note = Description of Artificial Sequence: Synthetic peptide; note = XENP022572 vhCDR2
WIDPELGDTEYAPKFQG

SEQ ID NO: 28518 - protein, 9 aa, synthetic construct
  source 1..9: note = Description of Artificial Sequence: Synthetic peptide; note = XENP022572 vhCDR3
RGVYQALDY

SEQ ID NO: 28519 - protein, 214 aa, synthetic construct
  source 1..214: note = Description of Artificial Sequence: Synthetic polypeptide; note = XENP022572 2A11_H1.144_L2.134_Fab Light Chain
DIQMTQSPAFLSVTPGEKVTITCQASQDIGNYLNWFQQKPGQTPKLLIYFTSYLHSGVPSRFSGSGSGTDYTFTISSLEAEDAATYFCQEGNTLPYTFGGGTKVEIKRTVAAPSVFIFPPSDEQLKSGTASVVCLLNNFYPREAKVQWKVDNALQSGNSQESVTEQDSKDSTYSLSSTLTLSKADYEKHKVYACEVTHQGLSSPVTKSFNRGEC

SEQ ID NO: 28520 - protein, 107 aa, synthetic construct
  source 1..107: note = Description of Artificial Sequence: Synthetic polypeptide; note = VL of XENP022572
DIQMTQSPAFLSVTPGEKVTITCQASQDIGNYLNWFQQKPGQTPKLLIYFTSYLHSGVPSRFSGSGSGTDYTFTISSLEAEDAATYFCQEGNTLPYTFGGGTKVEIK

SEQ ID NO: 28521 - protein, 11 aa, synthetic construct
  source 1..11: note = Description of Artificial Sequence: Synthetic peptide; note = XENP022572 vlCDR1
QASQDIGNYLN

SEQ ID NO: 28522 - protein, 7 aa, synthetic construct
  source 1..7: note = Description of Artificial Sequence: Synthetic peptide; note = XENP022572 vlCDR2
FTSYLHS

SEQ ID NO: 28523 - protein, 9 aa, synthetic construct
  source 1..9: note = Description of Artificial Sequence: Synthetic peptide; note = XENP022572 vlCDR3
QEGNTLPYT

SEQ ID NO: 28524 - protein, 223 aa, synthetic construct; identical to SEQ ID NO: 27634
  source 1..223: note = Description of Artificial Sequence: Synthetic polypeptide; note = XENP022573 2A11_H1.144_L2.135_Fab Heavy Chain

SEQ ID NO: 28525 - protein, 118 aa, synthetic construct; identical to SEQ ID NO: 22085
  source 1..118: note = Description of Artificial Sequence: Synthetic polypeptide; note = VH of XENP022573

SEQ ID NO: 28526 - protein, 5 aa, synthetic construct
  source 1..5: note = Description of Artificial Sequence: Synthetic peptide; note = XENP022573 vhCDR1
DYFMH

SEQ ID NO: 28527 - protein, 17 aa, synthetic construct
  source 1..17: note = Description of Artificial Sequence: Synthetic peptide; note = XENP022573 vhCDR2
WIDPELGDTEYAPKFQG

SEQ ID NO: 28528 - protein, 9 aa, synthetic construct
  source 1..9: note = Description of Artificial Sequence: Synthetic peptide; note = XENP022573 vhCDR3
RGVYQALDY

SEQ ID NO: 28529 - protein, 214 aa, synthetic construct
  source 1..214: note = Description of Artificial Sequence: Synthetic polypeptide; note = XENP022573 2A11_H1.144_L2.135_Fab Light Chain
DIQMTQSPAFLSVTPGEKVTITCQASQDIGNYLNWFQQKPGQSPKLLIYFTSYLHSGVPSRFSGSGSGTDYTFTISSLEAEDAATYFCQEGNTLPYTFGGGTKVEIKRTVAAPSVFIFPPSDEQLKSGTASVVCLLNNFYPREAKVQWKVDNALQSGNSQESVTEQDSKDSTYSLSSTLTLSKADYEKHKVYACEVTHQGLSSPVTKSFNRGEC

SEQ ID NO: 28530 - protein, 107 aa, synthetic construct
  source 1..107: note = Description of Artificial Sequence: Synthetic polypeptide; note = VL of XENP022573
DIQMTQSPAFLSVTPGEKVTITCQASQDIGNYLNWFQQKPGQSPKLLIYFTSYLHSGVPSRFSGSGSGTDYTFTISSLEAEDAATYFCQEGNTLPYTFGGGTKVEIK

SEQ ID NO: 28531 - protein, 11 aa, synthetic construct
  source 1..11: note = Description of Artificial Sequence: Synthetic peptide; note = XENP022573 vlCDR1
QASQDIGNYLN

SEQ ID NO: 28532 - protein, 7 aa, synthetic construct
  source 1..7: note = Description of Artificial Sequence: Synthetic peptide; note = XENP022573 vlCDR2
FTSYLHS

SEQ ID NO: 28533 - protein, 9 aa, synthetic construct
  source 1..9: note = Description of Artificial Sequence: Synthetic peptide; note = XENP022573 vlCDR3
QEGNTLPYT

SEQ ID NO: 28534 - protein, 223 aa, synthetic construct; identical to SEQ ID NO: 27734
  source 1..223: note = Description of Artificial Sequence: Synthetic polypeptide; note = XENP022574 2A11_H1.125_L2.132_Fab Heavy Chain

SEQ ID NO: 28535 - protein, 118 aa, synthetic construct; identical to SEQ ID NO: 22065
  source 1..118: note = Description of Artificial Sequence: Synthetic polypeptide; note = VH of XENP022574

SEQ ID NO: 28536 - protein, 5 aa, synthetic construct
  source 1..5: note = Description of Artificial Sequence: Synthetic peptide; note = XENP022574 vhCDR1
HYFMH

SEQ ID NO: 28537 - protein, 17 aa, synthetic construct
  source 1..17: note = Description of Artificial Sequence: Synthetic peptide; note = XENP022574 vhCDR2
WIDPYLGDTEYAPKFQG

SEQ ID NO: 28538 - protein, 9 aa, synthetic construct
  source 1..9: note = Description of Artificial Sequence: Synthetic peptide; note = XENP022574 vhCDR3
RGVYQALDY

SEQ ID NO: 28539 - protein, 214 aa, synthetic construct; identical to SEQ ID NO: 22219
  source 1..214: note = Description of Artificial Sequence: Synthetic polypeptide; note = XENP022574 2A11_H1.125_L2.132_Fab Light Chain

SEQ ID NO: 28540 - protein, 107 aa, synthetic construct; identical to SEQ ID NO: 22220
  source 1..107: note = Description of Artificial Sequence: Synthetic polypeptide; note = VL of XENP022574

SEQ ID NO: 28541 - protein, 11 aa, synthetic construct
  source 1..11: note = Description of Artificial Sequence: Synthetic peptide; note = XENP022574 vlCDR1
QASQDIGNYLN

SEQ ID NO: 28542 - protein, 7 aa, synthetic construct
  source 1..7: note = Description of Artificial Sequence: Synthetic peptide; note = XENP022574 vlCDR2
FTSYLHS

SEQ ID NO: 28543 - protein, 9 aa, synthetic construct
  source 1..9: note = Description of Artificial Sequence: Synthetic peptide; note = XENP022574 vlCDR3
QEGNTLPYT

SEQ ID NO: 28544 - protein, 223 aa, synthetic construct; identical to SEQ ID NO: 27734
  source 1..223: note = Description of Artificial Sequence: Synthetic polypeptide; note = XENP022575 2A11_H1.125_L2.133_Fab Heavy Chain

SEQ ID NO: 28545 - protein, 118 aa, synthetic construct; identical to SEQ ID NO: 22065
  source 1..118: note = Description of Artificial Sequence: Synthetic polypeptide; note = VH of XENP022575

SEQ ID NO: 28546 - protein, 5 aa, synthetic construct
  source 1..5: note = Description of Artificial Sequence: Synthetic peptide; note = XENP022575 vhCDR1
HYFMH

SEQ ID NO: 28547 - protein, 17 aa, synthetic construct
  source 1..17: note = Description of Artificial Sequence: Synthetic peptide; note = XENP022575 vhCDR2
WIDPYLGDTEYAPKFQG

SEQ ID NO: 28548 - protein, 9 aa, synthetic construct
  source 1..9: note = Description of Artificial Sequence: Synthetic peptide; note = XENP022575 vhCDR3
RGVYQALDY

SEQ ID NO: 28549 - protein, 214 aa, synthetic construct; identical to SEQ ID NO: 22199
  source 1..214: note = Description of Artificial Sequence: Synthetic polypeptide; note = XENP022575 2A11_H1.125_L2.133_Fab Light Chain

SEQ ID NO: 28550 - protein, 107 aa, synthetic construct; identical to SEQ ID NO: 22200
  source 1..107: note = Description of Artificial Sequence: Synthetic polypeptide; note = VL of XENP022575

SEQ ID NO: 28551 - protein, 11 aa, synthetic construct
  source 1..11: note = Description of Artificial Sequence: Synthetic peptide; note = XENP022575 vlCDR1
QASQDIGNYLN

SEQ ID NO: 28552 - protein, 7 aa, synthetic construct
  source 1..7: note = Description of Artificial Sequence: Synthetic peptide; note = XENP022575 vlCDR2
FTSYLHS

SEQ ID NO: 28553 - protein, 9 aa, synthetic construct
  source 1..9: note = Description of Artificial Sequence: Synthetic peptide; note = XENP022575 vlCDR3
QEGNTLPYT

SEQ ID NO: 28554 - protein, 223 aa, synthetic construct; identical to SEQ ID NO: 27734
  source 1..223: note = Description of Artificial Sequence: Synthetic polypeptide; note = XENP022576 2A11_H1.125_L2.134_Fab Heavy Chain

SEQ ID NO: 28555 - protein, 118 aa, synthetic construct; identical to SEQ ID NO: 22065
  source 1..118: note = Description of Artificial Sequence: Synthetic polypeptide; note = VH of XENP022576

SEQ ID NO: 28556 - protein, 5 aa, synthetic construct
  source 1..5: note = Description of Artificial Sequence: Synthetic peptide; note = XENP022576 vhCDR1
HYFMH

SEQ ID NO: 28557 - protein, 17 aa, synthetic construct
  source 1..17: note = Description of Artificial Sequence: Synthetic peptide; note = XENP022576 vhCDR2
WIDPYLGDTEYAPKFQG

SEQ ID NO: 28558 - protein, 9 aa, synthetic construct
  source 1..9: note = Description of Artificial Sequence: Synthetic peptide; note = XENP022576 vhCDR3
RGVYQALDY

SEQ ID NO: 28559 - protein, 214 aa, synthetic construct; identical to SEQ ID NO: 28519
  source 1..214: note = Description of Artificial Sequence: Synthetic polypeptide; note = XENP022576 2A11_H1.125_L2.134_Fab Light Chain

SEQ ID NO: 28560 - protein, 107 aa, synthetic construct; identical to SEQ ID NO: 28520
  source 1..107: note = Description of Artificial Sequence: Synthetic polypeptide; note = VL of XENP022576

SEQ ID NO: 28561 - protein, 11 aa, synthetic construct
  source 1..11: note = Description of Artificial Sequence: Synthetic peptide; note = XENP022576 vlCDR1
QASQDIGNYLN

SEQ ID NO: 28562 - protein, 7 aa, synthetic construct
  source 1..7: note = Description of Artificial Sequence: Synthetic peptide; note = XENP022576 vlCDR2
FTSYLHS

SEQ ID NO: 28563 - protein, 9 aa, synthetic construct
  source 1..9: note = Description of Artificial Sequence: Synthetic peptide; note = XENP022576 vlCDR3
QEGNTLPYT

SEQ ID NO: 28564 - protein, 223 aa, synthetic construct; identical to SEQ ID NO: 27734
  source 1..223: note = Description of Artificial Sequence: Synthetic polypeptide; note = XENP022577 2A11_H1.125_L2.135_Fab Heavy Chain

SEQ ID NO: 28565 - protein, 118 aa, synthetic construct; identical to SEQ ID NO: 22065
  source 1..118: note = Description of Artificial Sequence: Synthetic polypeptide; note = VH of XENP022577

SEQ ID NO: 28566 - protein, 5 aa, synthetic construct
  source 1..5: note = Description of Artificial Sequence: Synthetic peptide; note = XENP022577 vhCDR1
HYFMH

SEQ ID NO: 28567 - protein, 17 aa, synthetic construct
  source 1..17: note = Description of Artificial Sequence: Synthetic peptide; note = XENP022577 vhCDR2
WIDPYLGDTEYAPKFQG

SEQ ID NO: 28568 - protein, 9 aa, synthetic construct
  source 1..9: note = Description of Artificial Sequence: Synthetic peptide; note = XENP022577 vhCDR3
RGVYQALDY

SEQ ID NO: 28569 - protein, 214 aa, synthetic construct; identical to SEQ ID NO: 28529
  source 1..214: note = Description of Artificial Sequence: Synthetic polypeptide; note = XENP022577 2A11_H1.125_L2.135_Fab Light Chain

SEQ ID NO: 28570 - protein, 107 aa, synthetic construct; identical to SEQ ID NO: 28530
  source 1..107: note = Description of Artificial Sequence: Synthetic polypeptide; note = VL of XENP022577

SEQ ID NO: 28571 - protein, 11 aa, synthetic construct
  source 1..11: note = Description of Artificial Sequence: Synthetic peptide; note = XENP022577 vlCDR1
QASQDIGNYLN

SEQ ID NO: 28572 - protein, 7 aa, synthetic construct
  source 1..7: note = Description of Artificial Sequence: Synthetic peptide; note = XENP022577 vlCDR2
FTSYLHS

SEQ ID NO: 28573 - protein, 9 aa, synthetic construct
  source 1..9: note = Description of Artificial Sequence: Synthetic peptide; note = XENP022577 vlCDR3
QEGNTLPYT

SEQ ID NO: 28574 - protein, 223 aa, synthetic construct; identical to SEQ ID NO: 27604
  source 1..223: note = Description of Artificial Sequence: Synthetic polypeptide; note = XENP022578 2A11_H1.141_L2.132_Fab Heavy Chain

SEQ ID NO: 28575 - protein, 118 aa, synthetic construct; identical to SEQ ID NO: 27605
  source 1..118: note = Description of Artificial Sequence: Synthetic polypeptide; note = VH of XENP022578

SEQ ID NO: 28576 - protein, 5 aa, synthetic construct
  source 1..5: note = Description of Artificial Sequence: Synthetic peptide; note = XENP022578 vhCDR1
DYFMH

SEQ ID NO: 28577 - protein, 17 aa, synthetic construct
  source 1..17: note = Description of Artificial Sequence: Synthetic peptide; note = XENP022578 vhCDR2
WIDPELGDTEYAPKFQG

SEQ ID NO: 28578 - protein, 9 aa, synthetic construct
  source 1..9: note = Description of Artificial Sequence: Synthetic peptide; note = XENP022578 vhCDR3
RGVRQALDY

SEQ ID NO: 28579 - protein, 214 aa, synthetic construct; identical to SEQ ID NO: 22219
  source 1..214: note = Description of Artificial Sequence: Synthetic polypeptide; note = XENP022578 2A11_H1.141_L2.132_Fab Light Chain

SEQ ID NO: 28580 - protein, 107 aa, synthetic construct; identical to SEQ ID NO: 22220
  source 1..107: note = Description of Artificial Sequence: Synthetic polypeptide; note = VL of XENP022578

SEQ ID NO: 28581 - protein, 11 aa, synthetic construct
  source 1..11: note = Description of Artificial Sequence: Synthetic peptide; note = XENP022578 vlCDR1
QASQDIGNYLN

SEQ ID NO: 28582 - protein, 7 aa, synthetic construct
  source 1..7: note = Description of Artificial Sequence: Synthetic peptide; note = XENP022578 vlCDR2
FTSYLHS

SEQ ID NO: 28583 - protein, 9 aa, synthetic construct
  source 1..9: note = Description of Artificial Sequence: Synthetic peptide; note = XENP022578 vlCDR3
QEGNTLPYT

SEQ ID NO: 28584 - protein, 223 aa, synthetic construct; identical to SEQ ID NO: 27604
  source 1..223: note = Description of Artificial Sequence: Synthetic polypeptide; note = XENP022579 2A11_H1.141_L2.133_Fab Heavy Chain

SEQ ID NO: 28585 - protein, 118 aa, synthetic construct; identical to SEQ ID NO: 27605
  source 1..118: note = Description of Artificial Sequence: Synthetic polypeptide; note = VH of XENP022579

SEQ ID NO: 28586 - protein, 5 aa, synthetic construct
  source 1..5: note = Description of Artificial Sequence: Synthetic peptide; note = XENP022579 vhCDR1
DYFMH

SEQ ID NO: 28587 - protein, 17 aa, synthetic construct
  source 1..17: note = Description of Artificial Sequence: Synthetic peptide; note = XENP022579 vhCDR2
WIDPELGDTEYAPKFQG

SEQ ID NO: 28588 - protein, 9 aa, synthetic construct
  source 1..9: note = Description of Artificial Sequence: Synthetic peptide; note = XENP022579 vhCDR3
RGVRQALDY

SEQ ID NO: 28589 - protein, 214 aa, synthetic construct; identical to SEQ ID NO: 22199
  source 1..214: note = Description of Artificial Sequence: Synthetic polypeptide; note = XENP022579 2A11_H1.141_L2.133_Fab Light Chain

SEQ ID NO: 28590 - protein, 107 aa, synthetic construct; identical to SEQ ID NO: 22200
  source 1..107: note = Description of Artificial Sequence: Synthetic polypeptide; note = VL of XENP022579

SEQ ID NO: 28591 - protein, 11 aa, synthetic construct
  source 1..11: note = Description of Artificial Sequence: Synthetic peptide; note = XENP022579 vlCDR1
QASQDIGNYLN

SEQ ID NO: 28592 - protein, 7 aa, synthetic construct
  source 1..7: note = Description of Artificial Sequence: Synthetic peptide; note = XENP022579 vlCDR2
FTSYLHS

SEQ ID NO: 28593 - protein, 9 aa, synthetic construct
  source 1..9: note = Description of Artificial Sequence: Synthetic peptide; note = XENP022579 vlCDR3
QEGNTLPYT

SEQ ID NO: 28594 - protein, 223 aa, synthetic construct; identical to SEQ ID NO: 27604
  source 1..223: note = Description of Artificial Sequence: Synthetic polypeptide; note = XENP022580 2A11_H1.141_L2.134_Fab Heavy Chain

SEQ ID NO: 28595 - protein, 118 aa, synthetic construct; identical to SEQ ID NO: 27605
  source 1..118: note = Description of Artificial Sequence: Synthetic polypeptide; note = VH of XENP022580

SEQ ID NO: 28596 - protein, 5 aa, synthetic construct
  source 1..5: note = Description of Artificial Sequence: Synthetic peptide; note = XENP022580 vhCDR1
DYFMH

SEQ ID NO: 28597 - protein, 17 aa, synthetic construct
  source 1..17: note = Description of Artificial Sequence: Synthetic peptide; note = XENP022580 vhCDR2
WIDPELGDTEYAPKFQG

SEQ ID NO: 28598 - protein, 9 aa, synthetic construct
  source 1..9: note = Description of Artificial Sequence: Synthetic peptide; note = XENP022580 vhCDR3
RGVRQALDY

SEQ ID NO: 28599 - protein, 214 aa, synthetic construct; identical to SEQ ID NO: 28519
  source 1..214: note = Description of Artificial Sequence: Synthetic polypeptide; note = XENP022580 2A11_H1.141_L2.134_Fab Light Chain

SEQ ID NO: 28600 - protein, 107 aa, synthetic construct; identical to SEQ ID NO: 28520
  source 1..107: note = Description of Artificial Sequence: Synthetic polypeptide; note = VL of XENP022580

SEQ ID NO: 28601 - protein, 11 aa, synthetic construct
  source 1..11: note = Description of Artificial Sequence: Synthetic peptide; note = XENP022580 vlCDR1
QASQDIGNYLN

SEQ ID NO: 28602 - protein, 7 aa, synthetic construct
  source 1..7: note = Description of Artificial Sequence: Synthetic peptide; note = XENP022580 vlCDR2
FTSYLHS

SEQ ID NO: 28603 - protein, 9 aa, synthetic construct
  source 1..9: note = Description of Artificial Sequence: Synthetic peptide; note = XENP022580 vlCDR3
QEGNTLPYT

SEQ ID NO: 28604 - protein, 223 aa, synthetic construct; identical to SEQ ID NO: 27604
  source 1..223: note = Description of Artificial Sequence: Synthetic polypeptide; note = XENP022581 2A11_H1.141_L2.135_Fab Heavy Chain

SEQ ID NO: 28605 - protein, 118 aa, synthetic construct; identical to SEQ ID NO: 27605
  source 1..118: note = Description of Artificial Sequence: Synthetic polypeptide; note = VH of XENP022581

SEQ ID NO: 28606 - protein, 5 aa, synthetic construct
  source 1..5: note = Description of Artificial Sequence: Synthetic peptide; note = XENP022581 vhCDR1
DYFMH

SEQ ID NO: 28607 - protein, 17 aa, synthetic construct
  source 1..17: note = Description of Artificial Sequence: Synthetic peptide; note = XENP022581 vhCDR2
WIDPELGDTEYAPKFQG

SEQ ID NO: 28608 - protein, 9 aa, synthetic construct
  source 1..9: note = Description of Artificial Sequence: Synthetic peptide; note = XENP022581 vhCDR3
RGVRQALDY

SEQ ID NO: 28609 - protein, 214 aa, synthetic construct; identical to SEQ ID NO: 28529
  source 1..214: note = Description of Artificial Sequence: Synthetic polypeptide; note = XENP022581 2A11_H1.141_L2.135_Fab Light Chain

SEQ ID NO: 28610 - protein, 107 aa, synthetic construct; identical to SEQ ID NO: 28530
  source 1..107: note = Description of Artificial Sequence: Synthetic polypeptide; note = VL of XENP022581

SEQ ID NO: 28611 - protein, 11 aa, synthetic construct
  source 1..11: note = Description of Artificial Sequence: Synthetic peptide; note = XENP022581 vlCDR1
QASQDIGNYLN

SEQ ID NO: 28612 - protein, 7 aa, synthetic construct
  source 1..7: note = Description of Artificial Sequence: Synthetic peptide; note = XENP022581 vlCDR2
FTSYLHS

SEQ ID NO: 28613 - protein, 9 aa, synthetic construct
  source 1..9: note = Description of Artificial Sequence: Synthetic peptide; note = XENP022581 vlCDR3
QEGNTLPYT

SEQ ID NO: 28614 - protein, 223 aa, synthetic construct; identical to SEQ ID NO: 27634
  source 1..223: note = Description of Artificial Sequence: Synthetic polypeptide; note = XENP022609 2A11_H1.144_L2.136_Fab Heavy Chain

SEQ ID NO: 28615 - protein, 118 aa, synthetic construct; identical to SEQ ID NO: 22085
  source 1..118: note = Description of Artificial Sequence: Synthetic polypeptide; note = VH of XENP022609

SEQ ID NO: 28616 - protein, 5 aa, synthetic construct
  source 1..5: note = Description of Artificial Sequence: Synthetic peptide; note = XENP022609 vhCDR1
DYFMH

SEQ ID NO: 28617 - protein, 17 aa, synthetic construct
  source 1..17: note = Description of Artificial Sequence: Synthetic peptide; note = XENP022609 vhCDR2
WIDPELGDTEYAPKFQG

SEQ ID NO: 28618 - protein, 9 aa, synthetic construct
  source 1..9: note = Description of Artificial Sequence: Synthetic peptide; note = XENP022609 vhCDR3
RGVYQALDY

SEQ ID NO: 28619 - protein, 214 aa, synthetic construct
  source 1..214: note = Description of Artificial Sequence: Synthetic polypeptide; note = XENP022609 2A11_H1.144_L2.136_Fab Light Chain
DIQMTQSPAFLSVTPGEKVTITCQASQDIGNYLNWFQQKPGKVPKLLIYYTSYLHSGVPSRFSGSGSGTDYTFTISSLEAEDAATYFCQEGNTLPYTFGGGTKVEIKRTVAAPSVFIFPPSDEQLKSGTASVVCLLNNFYPREAKVQWKVDNALQSGNSQESVTEQDSKDSTYSLSSTLTLSKADYEKHKVYACEVTHQGLSSPVTKSFNRGEC

SEQ ID NO: 28620 - protein, 107 aa, synthetic construct
  source 1..107: note = Description of Artificial Sequence: Synthetic polypeptide; note = VL of XENP022609
DIQMTQSPAFLSVTPGEKVTITCQASQDIGNYLNWFQQKPGKVPKLLIYYTSYLHSGVPSRFSGSGSGTDYTFTISSLEAEDAATYFCQEGNTLPYTFGGGTKVEIK

SEQ ID NO: 28621 - protein, 11 aa, synthetic construct
  source 1..11: note = Description of Artificial Sequence: Synthetic peptide; note = XENP022609 vlCDR1
QASQDIGNYLN

SEQ ID NO: 28622 - protein, 7 aa, synthetic construct
  source 1..7: note = Description of Artificial Sequence: Synthetic peptide; note = XENP022609 vlCDR2
YTSYLHS

SEQ ID NO: 28623 - protein, 9 aa, synthetic construct
  source 1..9: note = Description of Artificial Sequence: Synthetic peptide; note = XENP022609 vlCDR3
QEGNTLPYT

SEQ ID NO: 28624 - protein, 223 aa, synthetic construct; identical to SEQ ID NO: 27734
  source 1..223: note = Description of Artificial Sequence: Synthetic polypeptide; note = XENP022610 2A11_H1.125_L2.136_Fab Heavy Chain

SEQ ID NO: 28625 - protein, 118 aa, synthetic construct; identical to SEQ ID NO: 22065
  source 1..118: note = Description of Artificial Sequence: Synthetic polypeptide; note = VH of XENP022610

SEQ ID NO: 28626 - protein, 5 aa, synthetic construct
  source 1..5: note = Description of Artificial Sequence: Synthetic peptide; note = XENP022610 vhCDR1
HYFMH

SEQ ID NO: 28627 - protein, 17 aa, synthetic construct
  source 1..17: note = Description of Artificial Sequence: Synthetic peptide; note = XENP022610 vhCDR2
WIDPYLGDTEYAPKFQG

SEQ ID NO: 28628 - protein, 9 aa, synthetic construct
  source 1..9: note = Description of Artificial Sequence: Synthetic peptide; note = XENP022610 vhCDR3
RGVYQALDY

SEQ ID NO: 28629 - protein, 214 aa, synthetic construct; identical to SEQ ID NO: 28619
  source 1..214: note = Description of Artificial Sequence: Synthetic polypeptide; note = XENP022610 2A11_H1.125_L2.136_Fab Light Chain

SEQ ID NO: 28630 - protein, 107 aa, synthetic construct; identical to SEQ ID NO: 28620
  source 1..107: note = Description of Artificial Sequence: Synthetic polypeptide; note = VL of XENP022610

SEQ ID NO: 28631 - protein, 11 aa, synthetic construct
  source 1..11: note = Description of Artificial Sequence: Synthetic peptide; note = XENP022610 vlCDR1
QASQDIGNYLN

SEQ ID NO: 28632 - protein, 7 aa, synthetic construct
  source 1..7: note = Description of Artificial Sequence: Synthetic peptide; note = XENP022610 vlCDR2
YTSYLHS

SEQ ID NO: 28633 - protein, 9 aa, synthetic construct
  source 1..9: note = Description of Artificial Sequence: Synthetic peptide; note = XENP022610 vlCDR3
QEGNTLPYT

SEQ ID NO: 28634 - protein, 223 aa, synthetic construct; identical to SEQ ID NO: 27604
  source 1..223: note = Description of Artificial Sequence: Synthetic polypeptide; note = XENP022611 2A11_H1.141_L2.136_Fab Heavy Chain

SEQ ID NO: 28635 - protein, 118 aa, synthetic construct; identical to SEQ ID NO: 27605
  source 1..118: note = Description of Artificial Sequence: Synthetic polypeptide; note = VH of XENP022611

SEQ ID NO: 28636 - protein, 5 aa, synthetic construct
  source 1..5: note = Description of Artificial Sequence: Synthetic peptide; note = XENP022611 vhCDR1
DYFMH

SEQ ID NO: 28637 - protein, 17 aa, synthetic construct
  source 1..17: note = Description of Artificial Sequence: Synthetic peptide; note = XENP022611 vhCDR2
WIDPELGDTEYAPKFQG

SEQ ID NO: 28638 - protein, 9 aa, synthetic construct
  source 1..9: note = Description of Artificial Sequence: Synthetic peptide; note = XENP022611 vhCDR3
RGVRQALDY

SEQ ID NO: 28639 - protein, 214 aa, synthetic construct; identical to SEQ ID NO: 28619
  source 1..214: note = Description of Artificial Sequence: Synthetic polypeptide; note = XENP022611 2A11_H1.141_L2.136_Fab Light Chain

SEQ ID NO: 28640 - protein, 107 aa, synthetic construct; identical to SEQ ID NO: 28620
  source 1..107: note = Description of Artificial Sequence: Synthetic polypeptide; note = VL of XENP022611

SEQ ID NO: 28641 - protein, 11 aa, synthetic construct
  source 1..11: note = Description of Artificial Sequence: Synthetic peptide; note = XENP022611 vlCDR1
QASQDIGNYLN

SEQ ID NO: 28642 - protein, 7 aa, synthetic construct
  source 1..7: note = Description of Artificial Sequence: Synthetic peptide; note = XENP022611 vlCDR2
YTSYLHS

SEQ ID NO: 28643 - protein, 9 aa, synthetic construct
  source 1..9: note = Description of Artificial Sequence: Synthetic peptide; note = XENP022611 vlCDR3
QEGNTLPYT

SEQ ID NO: 28644 - protein, 223 aa, synthetic construct; identical to SEQ ID NO: 27634
  source 1..223: note = Description of Artificial Sequence: Synthetic polypeptide; note = XENP022612 2A11_H1.144_L2.137_Fab Heavy Chain

SEQ ID NO: 28645 - protein, 118 aa, synthetic construct; identical to SEQ ID NO: 22085
  source 1..118: note = Description of Artificial Sequence: Synthetic polypeptide; note = VH of XENP022612

SEQ ID NO: 28646 - protein, 5 aa, synthetic construct
  source 1..5: note = Description of Artificial Sequence: Synthetic peptide; note = XENP022612 vhCDR1
DYFMH

SEQ ID NO: 28647 - protein, 17 aa, synthetic construct
  source 1..17: note = Description of Artificial Sequence: Synthetic peptide; note = XENP022612 vhCDR2
WIDPELGDTEYAPKFQG

SEQ ID NO: 28648 - protein, 9 aa, synthetic construct
  source 1..9: note = Description of Artificial Sequence: Synthetic peptide; note = XENP022612 vhCDR3
RGVYQALDY

SEQ ID NO: 28649 - protein, 214 aa, synthetic construct; identical to SEQ ID NO: 22239
  source 1..214: note = Description of Artificial Sequence: Synthetic polypeptide; note = XENP022612 2A11_H1.144_L2.137_Fab Light Chain

SEQ ID NO: 28650 - protein, 107 aa, synthetic construct; identical to SEQ ID NO: 22240
  source 1..107: note = Description of Artificial Sequence: Synthetic polypeptide; note = VL of XENP022612

SEQ ID NO: 28651 - protein, 11 aa, synthetic construct
  source 1..11: note = Description of Artificial Sequence: Synthetic peptide; note = XENP022612 vlCDR1
QASQDIGNYLN

SEQ ID NO: 28652 - protein, 7 aa, synthetic construct
  source 1..7: note = Description of Artificial Sequence: Synthetic peptide; note = XENP022612 vlCDR2
FTSYLHS

SEQ ID NO: 28653 - protein, 9 aa, synthetic construct
  source 1..9: note = Description of Artificial Sequence: Synthetic peptide; note = XENP022612 vlCDR3
QEGNTLPYT

SEQ ID NO: 28654 - protein, 223 aa, synthetic construct; identical to SEQ ID NO: 27734
  source 1..223: note = Description of Artificial Sequence: Synthetic polypeptide; note = XENP022613 2A11_H1.125_L2.137_Fab Heavy Chain

SEQ ID NO: 28655 - protein, 118 aa, synthetic construct; identical to SEQ ID NO: 22065
  source 1..118: note = Description of Artificial Sequence: Synthetic polypeptide; note = VH of XENP022613

SEQ ID NO: 28656 - protein, 5 aa, synthetic construct
  source 1..5: note = Description of Artificial Sequence: Synthetic peptide; note = XENP022613 vhCDR1
HYFMH

SEQ ID NO: 28657 - protein, 17 aa, synthetic construct
  source 1..17: note = Description of Artificial Sequence: Synthetic peptide; note = XENP022613 vhCDR2
WIDPYLGDTEYAPKFQG

SEQ ID NO: 28658 - protein, 9 aa, synthetic construct
  source 1..9: note = Description of Artificial Sequence: Synthetic peptide; note = XENP022613 vhCDR3
RGVYQALDY

SEQ ID NO: 28659 - protein, 214 aa, synthetic construct; identical to SEQ ID NO: 22239
  source 1..214: note = Description of Artificial Sequence: Synthetic polypeptide; note = XENP022613 2A11_H1.125_L2.137_Fab Light Chain

SEQ ID NO: 28660 - protein, 107 aa, synthetic construct; identical to SEQ ID NO: 22240
  source 1..107: note = Description of Artificial Sequence: Synthetic polypeptide; note = VL of XENP022613

SEQ ID NO: 28661 - protein, 11 aa, synthetic construct
  source 1..11: note = Description of Artificial Sequence: Synthetic peptide; note = XENP022613 vlCDR1
QASQDIGNYLN

SEQ ID NO: 28662 - protein, 7 aa, synthetic construct
  source 1..7: note = Description of Artificial Sequence: Synthetic peptide; note = XENP022613 vlCDR2
FTSYLHS

SEQ ID NO: 28663 - protein, 9 aa, synthetic construct
  source 1..9: note = Description of Artificial Sequence: Synthetic peptide; note = XENP022613 vlCDR3
QEGNTLPYT

SEQ ID NO: 28664 - protein, 223 aa, synthetic construct; identical to SEQ ID NO: 27604
  source 1..223: note = Description of Artificial Sequence: Synthetic polypeptide; note = XENP022614 2A11_H1.141_L2.137_Fab Heavy Chain

SEQ ID NO: 28665 - protein, 118 aa, synthetic construct; identical to SEQ ID NO: 27605
  source 1..118: note = Description of Artificial Sequence: Synthetic polypeptide; note = VH of XENP022614

SEQ ID NO: 28666 - protein, 5 aa, synthetic construct
  source 1..5: note = Description of Artificial Sequence: Synthetic peptide; note = XENP022614 vhCDR1
DYFMH

SEQ ID NO: 28667 - protein, 17 aa, synthetic construct
  source 1..17: note = Description of Artificial Sequence: Synthetic peptide; note = XENP022614 vhCDR2
WIDPELGDTEYAPKFQG

SEQ ID NO: 28668 - protein, 9 aa, synthetic construct
  source 1..9: note = Description of Artificial Sequence: Synthetic peptide; note = XENP022614 vhCDR3
RGVRQALDY

SEQ ID NO: 28669 - protein, 214 aa, synthetic construct; identical to SEQ ID NO: 22239
  source 1..214: note = Description of Artificial Sequence: Synthetic polypeptide; note = XENP022614 2A11_H1.141_L2.137_Fab Light Chain

SEQ ID NO: 28670 - protein, 107 aa, synthetic construct; identical to SEQ ID NO: 22240
  source 1..107: note = Description of Artificial Sequence: Synthetic polypeptide; note = VL of XENP022614

SEQ ID NO: 28671 - protein, 11 aa, synthetic construct
  source 1..11: note = Description of Artificial Sequence: Synthetic peptide; note = XENP022614 vlCDR1
QASQDIGNYLN

SEQ ID NO: 28672 - protein, 7 aa, synthetic construct
  source 1..7: note = Description of Artificial Sequence: Synthetic peptide; note = XENP022614 vlCDR2
FTSYLHS

SEQ ID NO: 28673 - protein, 9 aa, synthetic construct
  source 1..9: note = Description of Artificial Sequence: Synthetic peptide; note = XENP022614 vlCDR3
QEGNTLPYT

SEQ ID NO: 28674 - protein, 223 aa, synthetic construct; identical to SEQ ID NO: 27634
  source 1..223: note = Description of Artificial Sequence: Synthetic polypeptide; note = XENP022615 2A11_H1.144_L2.126_Fab Heavy Chain

SEQ ID NO: 28675 - protein, 118 aa, synthetic construct; identical to SEQ ID NO: 22085
  source 1..118: note = Description of Artificial Sequence: Synthetic polypeptide; note = VH of XENP022615

SEQ ID NO: 28676 - protein, 5 aa, synthetic construct
  source 1..5: note = Description of Artificial Sequence: Synthetic peptide; note = XENP022615 vhCDR1
DYFMH

SEQ ID NO: 28677 - protein, 17 aa, synthetic construct
  source 1..17: note = Description of Artificial Sequence: Synthetic peptide; note = XENP022615 vhCDR2
WIDPELGDTEYAPKFQG

SEQ ID NO: 28678 - protein, 9 aa, synthetic construct
  source 1..9: note = Description of Artificial Sequence: Synthetic peptide; note = XENP022615 vhCDR3
RGVYQALDY

SEQ ID NO: 28679 - protein, 214 aa, synthetic construct; identical to SEQ ID NO: 22259
  source 1..214: note = Description of Artificial Sequence: Synthetic polypeptide; note = XENP022615 2A11_H1.144_L2.126_Fab Light Chain

SEQ ID NO: 28680 - protein, 107 aa, synthetic construct; identical to SEQ ID NO: 22260
  source 1..107: note = Description of Artificial Sequence: Synthetic polypeptide; note = VL of XENP022615

SEQ ID NO: 28681 - protein, 11 aa, synthetic construct
  source 1..11: note = Description of Artificial Sequence: Synthetic peptide; note = XENP022615 vlCDR1
QASQDIGNYLN

SEQ ID NO: 28682 - protein, 7 aa, synthetic construct
  source 1..7: note = Description of Artificial Sequence: Synthetic peptide; note = XENP022615 vlCDR2
FTSYLHS

SEQ ID NO: 28683 - protein, 9 aa, synthetic construct
  source 1..9: note = Description of Artificial Sequence: Synthetic peptide; note = XENP022615 vlCDR3
QEGNTLPYT

SEQ ID NO: 28684 - protein, 223 aa, synthetic construct; identical to SEQ ID NO: 27634
  source 1..223: note = Description of Artificial Sequence: Synthetic polypeptide; note = XENP022616 2A11_H1.144_L2.91_Fab Heavy Chain

SEQ ID NO: 28685 - protein, 118 aa, synthetic construct; identical to SEQ ID NO: 22085
  source 1..118: note = Description of Artificial Sequence: Synthetic polypeptide; note = VH of XENP022616

SEQ ID NO: 28686 - protein, 5 aa, synthetic construct
  source 1..5: note = Description of Artificial Sequence: Synthetic peptide; note = XENP022616 vhCDR1
DYFMH

SEQ ID NO: 28687 - protein, 17 aa, synthetic construct
  source 1..17: note = Description of Artificial Sequence: Synthetic peptide; note = XENP022616 vhCDR2
WIDPELGDTEYAPKFQG

SEQ ID NO: 28688 - protein, 9 aa, synthetic construct
  source 1..9: note = Description of Artificial Sequence: Synthetic peptide; note = XENP022616 vhCDR3
RGVYQALDY

SEQ ID NO: 28689 - protein, 321 aa, synthetic construct
  source 1..321: note = Description of Artificial Sequence: Synthetic polypeptide; note = XENP022616 2A11_H1.144_L2.91_Fab Light Chain
DIQMTQSPAFLSVTPGEKVTITCQASQDIGNYLNWFQQKPGQTVKLLIYYTSRLHSGVPSRFSGSGSGTDYTFTISSLEAEDAATYFCQQGNTLPYTFGGGTKVEIKDIQMTQSPAFLSVTPGEKVTITCQASQDIGNYLNWYQQKPDQTVKLLIYYTSRLHSGVPSRFSGSGSGTDYTFTISSLEAEDAATYFCQQGNTLPYTFGGGTKVEIKRTVAAPSVFIFPPSDEQLKSGTASVVCLLNNFYPREAKVQWKVDNALQSGNSQESVTEQDSKDSTYSLSSTLTLSKADYEKHKVYACEVTHQGLSSPVTKSFNRGEC

SEQ ID NO: 28690 - protein, 214 aa, synthetic construct
  source 1..214: note = Description of Artificial Sequence: Synthetic polypeptide; note = VL of XENP022616
DIQMTQSPAFLSVTPGEKVTITCQASQDIGNYLNWFQQKPGQTVKLLIYYTSRLHSGVPSRFSGSGSGTDYTFTISSLEAEDAATYFCQQGNTLPYTFGGGTKVEIKDIQMTQSPAFLSVTPGEKVTITCQASQDIGNYLNWYQQKPDQTVKLLIYYTSRLHSGVPSRFSGSGSGTDYTFTISSLEAEDAATYFCQQGNTLPYTFGGGTKVEIK

SEQ ID NO: 28691 - protein, 11 aa, synthetic construct
  source 1..11: note = Description of Artificial Sequence: Synthetic peptide; note = XENP022616 vlCDR1
QASQDIGNYLN

SEQ ID NO: 28692 - protein, 7 aa, synthetic construct
  source 1..7: note = Description of Artificial Sequence: Synthetic peptide; note = XENP022616 vlCDR2
YTSRLHS

SEQ ID NO: 28693 - protein, 9 aa, synthetic construct
  source 1..9: note = Description of Artificial Sequence: Synthetic peptide; note = XENP022616 vlCDR3
QQGNTLPYT

SEQ ID NO: 28694 - protein, 223 aa, synthetic construct; identical to SEQ ID NO: 27634
  source 1..223: note = Description of Artificial Sequence: Synthetic polypeptide; note = XENP022617 2A11_H1.144_L2.93_Fab Heavy Chain

SEQ ID NO: 28695 - protein, 118 aa, synthetic construct; identical to SEQ ID NO: 22085
  source 1..118: note = Description of Artificial Sequence: Synthetic polypeptide; note = VH of XENP022617

SEQ ID NO: 28696 - protein, 5 aa, synthetic construct
  source 1..5: note = Description of Artificial Sequence: Synthetic peptide; note = XENP022617 vhCDR1
DYFMH

SEQ ID NO: 28697 - protein, 17 aa, synthetic construct
  source 1..17: note = Description of Artificial Sequence: Synthetic peptide; note = XENP022617 vhCDR2
WIDPELGDTEYAPKFQG

SEQ ID NO: 28698 - protein, 9 aa, synthetic construct
  source 1..9: note = Description of Artificial Sequence: Synthetic peptide; note = XENP022617 vhCDR3
RGVYQALDY

SEQ ID NO: 28699 - protein, 535 aa, synthetic construct
  source 1..535: note = Description of Artificial Sequence: Synthetic polypeptide; note = XENP022617 2A11_H1.144_L2.93_Fab Light Chain
DIQMTQSPAFLSVTPGEKVTITCQASQDIGNYLNWFQQKPDQTPKLLIYYTSRLHSGVPSRFSGSGSGTDYTFTISSLEAEDAATYFCQQGNTLPYTFGGGTKVEIKDIQMTQSPAFLSVTPGEKVTITCQASQDIGNYLNWFQQKPDQSVKLLIYYTSRLHSGVPSRFSGSGSGTDYTFTISSLEAEDAATYFCQQGNTLPYTFGGGTKVEIKDIQMTQSPAFLSVTPGEKVTITCQASQDIGNYLNWFQQKPGQTVKLLIYYTSRLHSGVPSRFSGSGSGTDYTFTISSLEAEDAATYFCQQGNTLPYTFGGGTKVEIKDIQMTQSPAFLSVTPGEKVTITCQASQDIGNYLNWYQQKPDQTVKLLIYYTSRLHSGVPSRFSGSGSGTDYTFTISSLEAEDAATYFCQQGNTLPYTFGGGTKVEIKRTVAAPSVFIFPPSDEQLKSGTASVVCLLNNFYPREAKVQWKVDNALQSGNSQESVTEQDSKDSTYSLSSTLTLSKADYEKHKVYACEVTHQGLSSPVTKSFNRGEC

SEQ ID NO: 28700 - protein, 428 aa, synthetic construct
  source 1..428: note = Description of Artificial Sequence: Synthetic polypeptide; note = VL of XENP022617
DIQMTQSPAFLSVTPGEKVTITCQASQDIGNYLNWFQQKPDQTPKLLIYYTSRLHSGVPSRFSGSGSGTDYTFTISSLEAEDAATYFCQQGNTLPYTFGGGTKVEIKDIQMTQSPAFLSVTPGEKVTITCQASQDIGNYLNWFQQKPDQSVKLLIYYTSRLHSGVPSRFSGSGSGTDYTFTISSLEAEDAATYFCQQGNTLPYTFGGGTKVEIKDIQMTQSPAFLSVTPGEKVTITCQASQDIGNYLNWFQQKPGQTVKLLIYYTSRLHSGVPSRFSGSGSGTDYTFTISSLEAEDAATYFCQQGNTLPYTFGGGTKVEIKDIQMTQSPAFLSVTPGEKVTITCQASQDIGNYLNWYQQKPDQTVKLLIYYTSRLHSGVPSRFSGSGSGTDYTFTISSLEAEDAATYFCQQGNTLPYTFGGGTKVEIK

SEQ ID NO: 28701 - protein, 11 aa, synthetic construct
  source 1..11: note = Description of Artificial Sequence: Synthetic peptide; note = XENP022617 vlCDR1
QASQDIGNYLN

SEQ ID NO: 28702 - protein, 7 aa, synthetic construct
  source 1..7: note = Description of Artificial Sequence: Synthetic peptide; note = XENP022617 vlCDR2
YTSRLHS

SEQ ID NO: 28703 - protein, 9 aa, synthetic construct
  source 1..9: note = Description of Artificial Sequence: Synthetic peptide; note = XENP022617 vlCDR3
QQGNTLPYT

SEQ ID NO: 28704 - protein, 223 aa, synthetic construct; identical to SEQ ID NO: 27634
  source 1..223: note = Description of Artificial Sequence: Synthetic polypeptide; note = XENP022618 2A11_H1.144_L2.122_Fab Heavy Chain

SEQ ID NO: 28705 - protein, 118 aa, synthetic construct; identical to SEQ ID NO: 22085
  source 1..118: note = Description of Artificial Sequence: Synthetic polypeptide; note = VH of XENP022618

SEQ ID NO: 28706 - protein, 5 aa, synthetic construct
  source 1..5: note = Description of Artificial Sequence: Synthetic peptide; note = XENP022618 vhCDR1
DYFMH

SEQ ID NO: 28707 - protein, 17 aa, synthetic construct
  source 1..17: note = Description of Artificial Sequence: Synthetic peptide; note = XENP022618 vhCDR2
WIDPELGDTEYAPKFQG

SEQ ID NO: 28708 - protein, 9 aa, synthetic construct
  source 1..9: note = Description of Artificial Sequence: Synthetic peptide; note = XENP022618 vhCDR3
RGVYQALDY

SEQ ID NO: 28709 - protein, 214 aa, synthetic construct; identical to SEQ ID NO: 24690
  source 1..214: note = Description of Artificial Sequence: Synthetic polypeptide; note = XENP022618 2A11_H1.144_L2.122_Fab Light Chain

SEQ ID NO: 28710 - protein, 107 aa, synthetic construct; identical to SEQ ID NO: 24691
  source 1..107: note = Description of Artificial Sequence: Synthetic polypeptide; note = VL of XENP022618

SEQ ID NO: 28711 - protein, 11 aa, synthetic construct
  source 1..11: note = Description of Artificial Sequence: Synthetic peptide; note = XENP022618 vlCDR1
QASQDIGNYLN

SEQ ID NO: 28712 - protein, 7 aa, synthetic construct
  source 1..7: note = Description of Artificial Sequence: Synthetic peptide; note = XENP022618 vlCDR2
YTSRLHS

SEQ ID NO: 28713 - protein, 9 aa, synthetic construct
  source 1..9: note = Description of Artificial Sequence: Synthetic peptide; note = XENP022618 vlCDR3
QQGNTLPYT

SEQ ID NO: 28714 - protein, 223 aa, synthetic construct; identical to SEQ ID NO: 27634
  source 1..223: note = Description of Artificial Sequence: Synthetic polypeptide; note = XENP022619 2A11_H1.144_L2.124_Fab Heavy Chain

SEQ ID NO: 28715 - protein, 118 aa, synthetic construct; identical to SEQ ID NO: 22085
  source 1..118: note = Description of Artificial Sequence: Synthetic polypeptide; note = VH of XENP022619

SEQ ID NO: 28716 - protein, 5 aa, synthetic construct
  source 1..5: note = Description of Artificial Sequence: Synthetic peptide; note = XENP022619 vhCDR1
DYFMH

SEQ ID NO: 28717 - protein, 17 aa, synthetic construct
  source 1..17: note = Description of Artificial Sequence: Synthetic peptide; note = XENP022619 vhCDR2
WIDPELGDTEYAPKFQG

SEQ ID NO: 28718 - protein, 9 aa, synthetic construct
  source 1..9: note = Description of Artificial Sequence: Synthetic peptide; note = XENP022619 vhCDR3
RGVYQALDY

SEQ ID NO: 28719 - protein, 214 aa, synthetic construct; identical to SEQ ID NO: 24730
  source 1..214: note = Description of Artificial Sequence: Synthetic polypeptide; note = XENP022619 2A11_H1.144_L2.124_Fab Light Chain

SEQ ID NO: 28720 - protein, 107 aa, synthetic construct; identical to SEQ ID NO: 24731
  source 1..107: note = Description of Artificial Sequence: Synthetic polypeptide; note = VL of XENP022619

SEQ ID NO: 28721 - protein, 11 aa, synthetic construct
  source 1..11: note = Description of Artificial Sequence: Synthetic peptide; note = XENP022619 vlCDR1
QASQDIGNYLN

SEQ ID NO: 28722 - protein, 7 aa, synthetic construct
  source 1..7: note = Description of Artificial Sequence: Synthetic peptide; note = XENP022619 vlCDR2
YTSRLHS

SEQ ID NO: 28723 - protein, 9 aa, synthetic construct
  source 1..9: note = Description of Artificial Sequence: Synthetic peptide; note = XENP022619 vlCDR3
QQGNTLPYT

SEQ ID NO: 28724 - protein, 223 aa, synthetic construct; identical to SEQ ID NO: 27734
  source 1..223: note = Description of Artificial Sequence: Synthetic polypeptide; note = XENP022620 2A11_H1.125_L2.126_Fab Heavy Chain

SEQ ID NO: 28725 - protein, 118 aa, synthetic construct; identical to SEQ ID NO: 22065
  source 1..118: note = Description of Artificial Sequence: Synthetic polypeptide; note = VH of XENP022620

SEQ ID NO: 28726 - protein, 5 aa, synthetic construct
  source 1..5: note = Description of Artificial Sequence: Synthetic peptide; note = XENP022620 vhCDR1
HYFMH

SEQ ID NO: 28727 - protein, 17 aa, synthetic construct
  source 1..17: note = Description of Artificial Sequence: Synthetic peptide; note = XENP022620 vhCDR2
WIDPYLGDTEYAPKFQG

SEQ ID NO: 28728 - protein, 9 aa, synthetic construct
  source 1..9: note = Description of Artificial Sequence: Synthetic peptide; note = XENP022620 vhCDR3
RGVYQALDY

SEQ ID NO: 28729 - protein, 214 aa, synthetic construct; identical to SEQ ID NO: 22259
  source 1..214: note = Description of Artificial Sequence: Synthetic polypeptide; note = XENP022620 2A11_H1.125_L2.126_Fab Light Chain

SEQ ID NO: 28730 - protein, 107 aa, synthetic construct; identical to SEQ ID NO: 22260
  source 1..107: note = Description of Artificial Sequence: Synthetic polypeptide; note = VL of XENP022620

SEQ ID NO: 28731 - protein, 11 aa, synthetic construct
  source 1..11: note = Description of Artificial Sequence: Synthetic peptide; note = XENP022620 vlCDR1
QASQDIGNYLN

SEQ ID NO: 28732 - protein, 7 aa, synthetic construct
  source 1..7: note = Description of Artificial Sequence: Synthetic peptide; note = XENP022620 vlCDR2
FTSYLHS

SEQ ID NO: 28733 - protein, 9 aa, synthetic construct
  source 1..9: note = Description of Artificial Sequence: Synthetic peptide; note = XENP022620 vlCDR3
QEGNTLPYT

SEQ ID NO: 28734 - protein, 223 aa, synthetic construct; identical to SEQ ID NO: 27734
  source 1..223: note = Description of Artificial Sequence: Synthetic polypeptide; note = XENP022621 2A11_H1.125_L2.91_Fab Heavy Chain

SEQ ID NO: 28735 - protein, 118 aa, synthetic construct; identical to SEQ ID NO: 22065
  source 1..118: note = Description of Artificial Sequence: Synthetic polypeptide; note = VH of XENP022621

SEQ ID NO: 28736 - protein, 5 aa, synthetic construct
  source 1..5: note = Description of Artificial Sequence: Synthetic peptide; note = XENP022621 vhCDR1
HYFMH

SEQ ID NO: 28737 - protein, 17 aa, synthetic construct
  source 1..17: note = Description of Artificial Sequence: Synthetic peptide; note = XENP022621 vhCDR2
WIDPYLGDTEYAPKFQG

SEQ ID NO: 28738 - protein, 9 aa, synthetic construct
  source 1..9: note = Description of Artificial Sequence: Synthetic peptide; note = XENP022621 vhCDR3
RGVYQALDY

SEQ ID NO: 28739 - protein, 321 aa, synthetic construct; identical to SEQ ID NO: 28689
  source 1..321: note = Description of Artificial Sequence: Synthetic polypeptide; note = XENP022621 2A11_H1.125_L2.91_Fab Light Chain

SEQ ID NO: 28740 - protein, 214 aa, synthetic construct; identical to SEQ ID NO: 28690
  source 1..214: note = Description of Artificial Sequence: Synthetic polypeptide; note = VL of XENP022621

SEQ ID NO: 28741 - protein, 11 aa, synthetic construct
  source 1..11: note = Description of Artificial Sequence: Synthetic peptide; note = XENP022621 vlCDR1
QASQDIGNYLN

SEQ ID NO: 28742 - protein, 7 aa, synthetic construct
  source 1..7: note = Description of Artificial Sequence: Synthetic peptide; note = XENP022621 vlCDR2
YTSRLHS

SEQ ID NO: 28743 - protein, 9 aa, synthetic construct
  source 1..9: note = Description of Artificial Sequence: Synthetic peptide; note = XENP022621 vlCDR3
QQGNTLPYT

SEQ ID NO: 28744 - protein, 223 aa, synthetic construct; identical to SEQ ID NO: 27734
  source 1..223: note = Description of Artificial Sequence: Synthetic polypeptide; note = XENP022622 2A11_H1.125_L2.93_Fab Heavy Chain

SEQ ID NO: 28745 - protein, 118 aa, synthetic construct; identical to SEQ ID NO: 22065
  source 1..118: note = Description of Artificial Sequence: Synthetic polypeptide; note = VH of XENP022622

SEQ ID NO: 28746 - protein, 5 aa, synthetic construct
  source 1..5: note = Description of Artificial Sequence: Synthetic peptide; note = XENP022622 vhCDR1
HYFMH

SEQ ID NO: 28747 - protein, 17 aa, synthetic construct
  source 1..17: note = Description of Artificial Sequence: Synthetic peptide; note = XENP022622 vhCDR2
WIDPYLGDTEYAPKFQG

SEQ ID NO: 28748 - protein, 9 aa, synthetic construct
  source 1..9: note = Description of Artificial Sequence: Synthetic peptide; note = XENP022622 vhCDR3
RGVYQALDY

SEQ ID NO: 28749 - protein, 535 aa, synthetic construct; identical to SEQ ID NO: 28699
  source 1..535: note = Description of Artificial Sequence: Synthetic polypeptide; note = XENP022622 2A11_H1.125_L2.93_Fab Light Chain

SEQ ID NO: 28750 - protein, 428 aa, synthetic construct; identical to SEQ ID NO: 28700
  source 1..428: note = Description of Artificial Sequence: Synthetic polypeptide; note = VL of XENP022622

SEQ ID NO: 28751 - protein, 11 aa, synthetic construct
  source 1..11: note = Description of Artificial Sequence: Synthetic peptide; note = XENP022622 vlCDR1
QASQDIGNYLN

SEQ ID NO: 28752 - protein, 7 aa, synthetic construct
  source 1..7: note = Description of Artificial Sequence: Synthetic peptide; note = XENP022622 vlCDR2
YTSRLHS

SEQ ID NO: 28753 - protein, 9 aa, synthetic construct
  source 1..9: note = Description of Artificial Sequence: Synthetic peptide; note = XENP022622 vlCDR3
QQGNTLPYT

SEQ ID NO: 28754 - protein, 223 aa, synthetic construct; identical to SEQ ID NO: 27734
  source 1..223: note = Description of Artificial Sequence: Synthetic polypeptide; note = XENP022623 2A11_H1.125_L2.122_Fab Heavy Chain

SEQ ID NO: 28755 - protein, 118 aa, synthetic construct; identical to SEQ ID NO: 22065
  source 1..118: note = Description of Artificial Sequence: Synthetic polypeptide; note = VH of XENP022623

SEQ ID NO: 28756 - protein, 5 aa, synthetic construct
  source 1..5: note = Description of Artificial Sequence: Synthetic peptide; note = XENP022623 vhCDR1
HYFMH

SEQ ID NO: 28757 - protein, 17 aa, synthetic construct
  source 1..17: note = Description of Artificial Sequence: Synthetic peptide; note = XENP022623 vhCDR2
WIDPYLGDTEYAPKFQG

SEQ ID NO: 28758 - protein, 9 aa, synthetic construct
  source 1..9: note = Description of Artificial Sequence: Synthetic peptide; note = XENP022623 vhCDR3
RGVYQALDY

SEQ ID NO: 28759 - protein, 214 aa, synthetic construct; identical to SEQ ID NO: 24690
  source 1..214: note = Description of Artificial Sequence: Synthetic polypeptide; note = XENP022623 2A11_H1.125_L2.122_Fab Light Chain

SEQ ID NO: 28760 - protein, 107 aa, synthetic construct; identical to SEQ ID NO: 24691
  source 1..107: note = Description of Artificial Sequence: Synthetic polypeptide; note = VL of XENP022623

SEQ ID NO: 28761 - protein, 11 aa, synthetic construct
  source 1..11: note = Description of Artificial Sequence: Synthetic peptide; note = XENP022623 vlCDR1
QASQDIGNYLN

SEQ ID NO: 28762 - protein, 7 aa, synthetic construct
  source 1..7: note = Description of Artificial Sequence: Synthetic peptide; note = XENP022623 vlCDR2
YTSRLHS

SEQ ID NO: 28763 - protein, 9 aa, synthetic construct
  source 1..9: note = Description of Artificial Sequence: Synthetic peptide; note = XENP022623 vlCDR3
QQGNTLPYT

SEQ ID NO: 28764 - protein, 223 aa, synthetic construct; identical to SEQ ID NO: 27734
  source 1..223: note = Description of Artificial Sequence: Synthetic polypeptide; note = XENP022624 2A11_H1.125_L2.124_Fab Heavy Chain

SEQ ID NO: 28765 - protein, 118 aa, synthetic construct; identical to SEQ ID NO: 22065
  source 1..118: note = Description of Artificial Sequence: Synthetic polypeptide; note = VH of XENP022624

SEQ ID NO: 28766 - protein, 5 aa, synthetic construct
  source 1..5: note = Description of Artificial Sequence: Synthetic peptide; note = XENP022624 vhCDR1
HYFMH

SEQ ID NO: 28767 - protein, 17 aa, synthetic construct
  source 1..17: note = Description of Artificial Sequence: Synthetic peptide; note = XENP022624 vhCDR2
WIDPYLGDTEYAPKFQG

SEQ ID NO: 28768 - protein, 9 aa, synthetic construct
  source 1..9: note = Description of Artificial Sequence: Synthetic peptide; note = XENP022624 vhCDR3
RGVYQALDY

SEQ ID NO: 28769 - protein, 214 aa, synthetic construct; identical to SEQ ID NO: 24730
  source 1..214: note = Description of Artificial Sequence: Synthetic polypeptide; note = XENP022624 2A11_H1.125_L2.124_Fab Light Chain

SEQ ID NO: 28770 - protein, 107 aa, synthetic construct; identical to SEQ ID NO: 24731
  source 1..107: note = Description of Artificial Sequence: Synthetic polypeptide; note = VL of XENP022624

SEQ ID NO: 28771 - protein, 11 aa, synthetic construct
  source 1..11: note = Description of Artificial Sequence: Synthetic peptide; note = XENP022624 vlCDR1
QASQDIGNYLN

SEQ ID NO: 28772 - protein, 7 aa, synthetic construct
  source 1..7: note = Description of Artificial Sequence: Synthetic peptide; note = XENP022624 vlCDR2
YTSRLHS

SEQ ID NO: 28773 - protein, 9 aa, synthetic construct
  source 1..9: note = Description of Artificial Sequence: Synthetic peptide; note = XENP022624 vlCDR3
QQGNTLPYT

SEQ ID NO: 28774 - protein, 223 aa, synthetic construct; identical to SEQ ID NO: 27634
  source 1..223: note = Description of Artificial Sequence: Synthetic polypeptide; note = XENP022652 2A11_H1.144_L2.138_Fab Heavy Chain

SEQ ID NO: 28775 - protein, 118 aa, synthetic construct; identical to SEQ ID NO: 22085
  source 1..118: note = Description of Artificial Sequence: Synthetic polypeptide; note = VH of XENP022652

SEQ ID NO: 28776 - protein, 5 aa, synthetic construct
  source 1..5: note = Description of Artificial Sequence: Synthetic peptide; note = XENP022652 vhCDR1
DYFMH

SEQ ID NO: 28777 - protein, 17 aa, synthetic construct
  source 1..17: note = Description of Artificial Sequence: Synthetic peptide; note = XENP022652 vhCDR2
WIDPELGDTEYAPKFQG

SEQ ID NO: 28778 - protein, 9 aa, synthetic construct
  source 1..9: note = Description of Artificial Sequence: Synthetic peptide; note = XENP022652 vhCDR3
RGVYQALDY

SEQ ID NO: 28779 - protein, 214 aa, synthetic construct
  source 1..214: note = Description of Artificial Sequence: Synthetic polypeptide; note = XENP022652 2A11_H1.144_L2.138_Fab Light Chain
DIQMTQSPAFLSVTPGEKVTITCQASQDIGNYLNWFQQKPGQTVKLLIYYTSYLHSGVPSRFSGSGSGTDYTFTISSLEAEDAATYFCQQGNTLPYTFGGGTKVEIKRTVAAPSVFIFPPSDEQLKSGTASVVCLLNNFYPREAKVQWKVDNALQSGNSQESVTEQDSKDSTYSLSSTLTLSKADYEKHKVYACEVTHQGLSSPVTKSFNRGEC

SEQ ID NO: 28780 - protein, 107 aa, synthetic construct
  source 1..107: note = Description of Artificial Sequence: Synthetic polypeptide; note = VL of XENP022652
DIQMTQSPAFLSVTPGEKVTITCQASQDIGNYLNWFQQKPGQTVKLLIYYTSYLHSGVPSRFSGSGSGTDYTFTISSLEAEDAATYFCQQGNTLPYTFGGGTKVEIK

SEQ ID NO: 28781 - protein, 11 aa, synthetic construct
  source 1..11: note = Description of Artificial Sequence: Synthetic peptide; note = XENP022652 vlCDR1
QASQDIGNYLN

SEQ ID NO: 28782 - protein, 7 aa, synthetic construct
  source 1..7: note = Description of Artificial Sequence: Synthetic peptide; note = XENP022652 vlCDR2
YTSYLHS

SEQ ID NO: 28783 - protein, 9 aa, synthetic construct
  source 1..9: note = Description of Artificial Sequence: Synthetic peptide; note = XENP022652 vlCDR3
QQGNTLPYT

SEQ ID NO: 28784 - protein, 223 aa, synthetic construct; identical to SEQ ID NO: 27634
  source 1..223: note = Description of Artificial Sequence: Synthetic polypeptide; note = XENP022653 2A11_H1.144_L2.139_Fab Heavy Chain

SEQ ID NO: 28785 - protein, 118 aa, synthetic construct; identical to SEQ ID NO: 22085
  source 1..118: note = Description of Artificial Sequence: Synthetic polypeptide; note = VH of XENP022653

SEQ ID NO: 28786 - protein, 5 aa, synthetic construct
  source 1..5: note = Description of Artificial Sequence: Synthetic peptide; note = XENP022653 vhCDR1
DYFMH

SEQ ID NO: 28787 - protein, 17 aa, synthetic construct
  source 1..17: note = Description of Artificial Sequence: Synthetic peptide; note = XENP022653 vhCDR2
WIDPELGDTEYAPKFQG

SEQ ID NO: 28788 - protein, 9 aa, synthetic construct
  source 1..9: note = Description of Artificial Sequence: Synthetic peptide; note = XENP022653 vhCDR3
RGVYQALDY

SEQ ID NO: 28789 - protein, 214 aa, synthetic construct
  source 1..214: note = Description of Artificial Sequence: Synthetic polypeptide; note = XENP022653 2A11_H1.144_L2.139_Fab Light Chain
DIQMTQSPAFLSVTPGEKVTITCQASQDIGNYLNWFQQKPDQTPKLLIYYTSYLHSGVPSRFSGSGSGTDYTFTISSLEAEDAATYFCQQGNTLPYTFGGGTKVEIKRTVAAPSVFIFPPSDEQLKSGTASVVCLLNNFYPREAKVQWKVDNALQSGNSQESVTEQDSKDSTYSLSSTLTLSKADYEKHKVYACEVTHQGLSSPVTKSFNRGEC

SEQ ID NO: 28790 - protein, 107 aa, synthetic construct
  source 1..107: note = Description of Artificial Sequence: Synthetic polypeptide; note = VL of XENP022653
DIQMTQSPAFLSVTPGEKVTITCQASQDIGNYLNWFQQKPDQTPKLLIYYTSYLHSGVPSRFSGSGSGTDYTFTISSLEAEDAATYFCQQGNTLPYTFGGGTKVEIK

SEQ ID NO: 28791 - protein, 11 aa, synthetic construct
  source 1..11: note = Description of Artificial Sequence: Synthetic peptide; note = XENP022653 vlCDR1
QASQDIGNYLN

SEQ ID NO: 28792 - protein, 7 aa, synthetic construct
  source 1..7: note = Description of Artificial Sequence: Synthetic peptide; note = XENP022653 vlCDR2
YTSYLHS

SEQ ID NO: 28793 - protein, 9 aa, synthetic construct
  source 1..9: note = Description of Artificial Sequence: Synthetic peptide; note = XENP022653 vlCDR3
QQGNTLPYT

SEQ ID NO: 28794 - protein, 223 aa, synthetic construct; identical to SEQ ID NO: 27634
  source 1..223: note = Description of Artificial Sequence: Synthetic polypeptide; note = XENP022654 2A11_H1.144_L2.140_Fab Heavy Chain

SEQ ID NO: 28795 - protein, 118 aa, synthetic construct; identical to SEQ ID NO: 22085
  source 1..118: note = Description of Artificial Sequence: Synthetic polypeptide; note = VH of XENP022654

SEQ ID NO: 28796 - protein, 5 aa, synthetic construct
  source 1..5: note = Description of Artificial Sequence: Synthetic peptide; note = XENP022654 vhCDR1
DYFMH

SEQ ID NO: 28797 - protein, 17 aa, synthetic construct
  source 1..17: note = Description of Artificial Sequence: Synthetic peptide; note = XENP022654 vhCDR2
WIDPELGDTEYAPKFQG

SEQ ID NO: 28798 - protein, 9 aa, synthetic construct
  source 1..9: note = Description of Artificial Sequence: Synthetic peptide; note = XENP022654 vhCDR3
RGVYQALDY

SEQ ID NO: 28799 - protein, 214 aa, synthetic construct
  source 1..214: note = Description of Artificial Sequence: Synthetic polypeptide; note = XENP022654 2A11_H1.144_L2.140_Fab Light Chain
DIQMTQSPAFLSVTPGEKVTITCQASQDIGNYLNWFQQKPGQTPKLLIYYTSYLHSGVPSRFSGSGSGTDYTFTISSLEAEDAATYFCQQGNTLPYTFGGGTKVEIKRTVAAPSVFIFPPSDEQLKSGTASVVCLLNNFYPREAKVQWKVDNALQSGNSQESVTEQDSKDSTYSLSSTLTLSKADYEKHKVYACEVTHQGLSSPVTKSFNRGEC

SEQ ID NO: 28800 - protein, 107 aa, synthetic construct
  source 1..107: note = Description of Artificial Sequence: Synthetic polypeptide; note = VL of XENP022654
DIQMTQSPAFLSVTPGEKVTITCQASQDIGNYLNWFQQKPGQTPKLLIYYTSYLHSGVPSRFSGSGSGTDYTFTISSLEAEDAATYFCQQGNTLPYTFGGGTKVEIK

SEQ ID NO: 28801 - protein, 11 aa, synthetic construct
  source 1..11: note = Description of Artificial Sequence: Synthetic peptide; note = XENP022654 vlCDR1
QASQDIGNYLN

SEQ ID NO: 28802 - protein, 7 aa, synthetic construct
  source 1..7: note = Description of Artificial Sequence: Synthetic peptide; note = XENP022654 vlCDR2
YTSYLHS

SEQ ID NO: 28803 - protein, 9 aa, synthetic construct
  source 1..9: note = Description of Artificial Sequence: Synthetic peptide; note = XENP022654 vlCDR3
QQGNTLPYT

SEQ ID NO: 28804 - protein, 223 aa, synthetic construct; identical to SEQ ID NO: 27634
  source 1..223: note = Description of Artificial Sequence: Synthetic polypeptide; note = XENP022655 2A11_H1.144_L2.141_Fab Heavy Chain

SEQ ID NO: 28805 - protein, 118 aa, synthetic construct; identical to SEQ ID NO: 22085
  source 1..118: note = Description of Artificial Sequence: Synthetic polypeptide; note = VH of XENP022655

SEQ ID NO: 28806 - protein, 5 aa, synthetic construct
  source 1..5: note = Description of Artificial Sequence: Synthetic peptide; note = XENP022655 vhCDR1
DYFMH

SEQ ID NO: 28807 - protein, 17 aa, synthetic construct
  source 1..17: note = Description of Artificial Sequence: Synthetic peptide; note = XENP022655 vhCDR2
WIDPELGDTEYAPKFQG

SEQ ID NO: 28808 - protein, 9 aa, synthetic construct
  source 1..9: note = Description of Artificial Sequence: Synthetic peptide; note = XENP022655 vhCDR3
RGVYQALDY

SEQ ID NO: 28809 - protein, 214 aa, synthetic construct
  source 1..214: note = Description of Artificial Sequence: Synthetic polypeptide; note = XENP022655 2A11_H1.144_L2.141_Fab Light Chain
DIQMTQSPAFLSVTPGEKVTITCQASQDIGNYLNWFQQKPGKVPKLLIYYTSYLHSGVPSRFSGSGSGTDYTFTISSLEAEDAATYFCQQGNTLPYTFGGGTKVEIKRTVAAPSVFIFPPSDEQLKSGTASVVCLLNNFYPREAKVQWKVDNALQSGNSQESVTEQDSKDSTYSLSSTLTLSKADYEKHKVYACEVTHQGLSSPVTKSFNRGEC

SEQ ID NO: 28810 - protein, 107 aa, synthetic construct
  source 1..107: note = Description of Artificial Sequence: Synthetic polypeptide; note = VL of XENP022655
DIQMTQSPAFLSVTPGEKVTITCQASQDIGNYLNWFQQKPGKVPKLLIYYTSYLHSGVPSRFSGSGSGTDYTFTISSLEAEDAATYFCQQGNTLPYTFGGGTKVEIK

SEQ ID NO: 28811 - protein, 11 aa, synthetic construct
  source 1..11: note = Description of Artificial Sequence: Synthetic peptide; note = XENP022655 vlCDR1
QASQDIGNYLN

SEQ ID NO: 28812 - protein, 7 aa, synthetic construct
  source 1..7: note = Description of Artificial Sequence: Synthetic peptide; note = XENP022655 vlCDR2
YTSYLHS

SEQ ID NO: 28813 - protein, 9 aa, synthetic construct
  source 1..9: note = Description of Artificial Sequence: Synthetic peptide; note = XENP022655 vlCDR3
QQGNTLPYT

SEQ ID NO: 28814 - protein, 223 aa, synthetic construct; identical to SEQ ID NO: 27634
  source 1..223: note = Description of Artificial Sequence: Synthetic polypeptide; note = XENP022656 2A11_H1.144_L2.142_Fab Heavy Chain

SEQ ID NO: 28815 - protein, 118 aa, synthetic construct; identical to SEQ ID NO: 22085
  source 1..118: note = Description of Artificial Sequence: Synthetic polypeptide; note = VH of XENP022656

SEQ ID NO: 28816 - protein, 5 aa, synthetic construct
  source 1..5: note = Description of Artificial Sequence: Synthetic peptide; note = XENP022656 vhCDR1
DYFMH

SEQ ID NO: 28817 - protein, 17 aa, synthetic construct
  source 1..17: note = Description of Artificial Sequence: Synthetic peptide; note = XENP022656 vhCDR2
WIDPELGDTEYAPKFQG

SEQ ID NO: 28818 - protein, 9 aa, synthetic construct
  source 1..9: note = Description of Artificial Sequence: Synthetic peptide; note = XENP022656 vhCDR3
RGVYQALDY

SEQ ID NO: 28819 - protein, 214 aa, synthetic construct; identical to SEQ ID NO: 22279
  source 1..214: note = Description of Artificial Sequence: Synthetic polypeptide; note = XENP022656 2A11_H1.144_L2.142_Fab Light Chain

SEQ ID NO: 28820 - protein, 107 aa, synthetic construct; identical to SEQ ID NO: 22280
  source 1..107: note = Description of Artificial Sequence: Synthetic polypeptide; note = VL of XENP022656

SEQ ID NO: 28821 - protein, 11 aa, synthetic construct
  source 1..11: note = Description of Artificial Sequence: Synthetic peptide; note = XENP022656 vlCDR1
QASQDIGNYLN

SEQ ID NO: 28822 - protein, 7 aa, synthetic construct
  source 1..7: note = Description of Artificial Sequence: Synthetic peptide; note = XENP022656 vlCDR2
FTSYLHS

SEQ ID NO: 28823 - protein, 9 aa, synthetic construct
  source 1..9: note = Description of Artificial Sequence: Synthetic peptide; note = XENP022656 vlCDR3
QQGNTLPYT

SEQ ID NO: 28824 - protein, 223 aa, synthetic construct; identical to SEQ ID NO: 27634
  source 1..223: note = Description of Artificial Sequence: Synthetic polypeptide; note = XENP022657 2A11_H1.144_L2.143_Fab Heavy Chain

SEQ ID NO: 28825 - protein, 118 aa, synthetic construct; identical to SEQ ID NO: 22085
  source 1..118: note = Description of Artificial Sequence: Synthetic polypeptide; note = VH of XENP022657

SEQ ID NO: 28826 - protein, 5 aa, synthetic construct
  source 1..5: note = Description of Artificial Sequence: Synthetic peptide; note = XENP022657 vhCDR1
DYFMH

SEQ ID NO: 28827 - protein, 17 aa, synthetic construct
  source 1..17: note = Description of Artificial Sequence: Synthetic peptide; note = XENP022657 vhCDR2
WIDPELGDTEYAPKFQG

SEQ ID NO: 28828 - protein, 9 aa, synthetic construct
  source 1..9: note = Description of Artificial Sequence: Synthetic peptide; note = XENP022657 vhCDR3
RGVYQALDY

SEQ ID NO: 28829 - protein, 214 aa, synthetic construct
  source 1..214: note = Description of Artificial Sequence: Synthetic polypeptide; note = XENP022657 2A11_H1.144_L2.143_Fab Light Chain
DIQMTQSPAFLSVTPGEKVTITCQASQDIGNYLNWFQQKPDQTPKLLIYFTSYLHSGVPSRFSGSGSGTDYTFTISSLEAEDAATYFCQQGNTLPYTFGGGTKVEIKRTVAAPSVFIFPPSDEQLKSGTASVVCLLNNFYPREAKVQWKVDNALQSGNSQESVTEQDSKDSTYSLSSTLTLSKADYEKHKVYACEVTHQGLSSPVTKSFNRGEC

SEQ ID NO: 28830 - protein, 107 aa, synthetic construct
  source 1..107: note = Description of Artificial Sequence: Synthetic polypeptide; note = VL of XENP022657
DIQMTQSPAFLSVTPGEKVTITCQASQDIGNYLNWFQQKPDQTPKLLIYFTSYLHSGVPSRFSGSGSGTDYTFTISSLEAEDAATYFCQQGNTLPYTFGGGTKVEIK

SEQ ID NO: 28831 - protein, 11 aa, synthetic construct
  source 1..11: note = Description of Artificial Sequence: Synthetic peptide; note = XENP022657 vlCDR1
QASQDIGNYLN

SEQ ID NO: 28832 - protein, 7 aa, synthetic construct
  source 1..7: note = Description of Artificial Sequence: Synthetic peptide; note = XENP022657 vlCDR2
FTSYLHS

SEQ ID NO: 28833 - protein, 9 aa, synthetic construct
  source 1..9: note = Description of Artificial Sequence: Synthetic peptide; note = XENP022657 vlCDR3
QQGNTLPYT

SEQ ID NO: 28834 - protein, 223 aa, synthetic construct; identical to SEQ ID NO: 27634
  source 1..223: note = Description of Artificial Sequence: Synthetic polypeptide; note = XENP022658 2A11_H1.144_L2.144_Fab Heavy Chain

SEQ ID NO: 28835 - protein, 118 aa, synthetic construct; identical to SEQ ID NO: 22085
  source 1..118: note = Description of Artificial Sequence: Synthetic polypeptide; note = VH of XENP022658

SEQ ID NO: 28836 - protein, 5 aa, synthetic construct
  source 1..5: note = Description of Artificial Sequence: Synthetic peptide; note = XENP022658 vhCDR1
DYFMH

SEQ ID NO: 28837 - protein, 17 aa, synthetic construct
  source 1..17: note = Description of Artificial Sequence: Synthetic peptide; note = XENP022658 vhCDR2
WIDPELGDTEYAPKFQG

SEQ ID NO: 28838 - protein, 9 aa, synthetic construct
  source 1..9: note = Description of Artificial Sequence: Synthetic peptide; note = XENP022658 vhCDR3
RGVYQALDY

SEQ ID NO: 28839 - protein, 214 aa, synthetic construct
  source 1..214: note = Description of Artificial Sequence: Synthetic polypeptide; note = XENP022658 2A11_H1.144_L2.144_Fab Light Chain
DIQMTQSPAFLSVTPGEKVTITCQASQDIGNYLNWFQQKPGQTPKLLIYFTSYLHSGVPSRFSGSGSGTDYTFTISSLEAEDAATYFCQQGNTLPYTFGGGTKVEIKRTVAAPSVFIFPPSDEQLKSGTASVVCLLNNFYPREAKVQWKVDNALQSGNSQESVTEQDSKDSTYSLSSTLTLSKADYEKHKVYACEVTHQGLSSPVTKSFNRGEC

SEQ ID NO: 28840 - protein, 107 aa, synthetic construct
  source 1..107: note = Description of Artificial Sequence: Synthetic polypeptide; note = VL of XENP022658
DIQMTQSPAFLSVTPGEKVTITCQASQDIGNYLNWFQQKPGQTPKLLIYFTSYLHSGVPSRFSGSGSGTDYTFTISSLEAEDAATYFCQQGNTLPYTFGGGTKVEIK

SEQ ID NO: 28841 - protein, 11 aa, synthetic construct
  source 1..11: note = Description of Artificial Sequence: Synthetic peptide; note = XENP022658 vlCDR1
QASQDIGNYLN

SEQ ID NO: 28842 - protein, 7 aa, synthetic construct
  source 1..7: note = Description of Artificial Sequence: Synthetic peptide; note = XENP022658 vlCDR2
FTSYLHS

SEQ ID NO: 28843 - protein, 9 aa, synthetic construct
  source 1..9: note = Description of Artificial Sequence: Synthetic peptide; note = XENP022658 vlCDR3
QQGNTLPYT

SEQ ID NO: 28844 - protein, 223 aa, synthetic construct; identical to SEQ ID NO: 27634
  source 1..223: note = Description of Artificial Sequence: Synthetic polypeptide; note = XENP022659 2A11_H1.144_L2.145_Fab Heavy Chain

SEQ ID NO: 28845 - protein, 118 aa, synthetic construct; identical to SEQ ID NO: 22085
  source 1..118: note = Description of Artificial Sequence: Synthetic polypeptide; note = VH of XENP022659

SEQ ID NO: 28846 - protein, 5 aa, synthetic construct
  source 1..5: note = Description of Artificial Sequence: Synthetic peptide; note = XENP022659 vhCDR1
DYFMH

SEQ ID NO: 28847 - protein, 17 aa, synthetic construct
  source 1..17: note = Description of Artificial Sequence: Synthetic peptide; note = XENP022659 vhCDR2
WIDPELGDTEYAPKFQG

SEQ ID NO: 28848 - protein, 9 aa, synthetic construct
  source 1..9: note = Description of Artificial Sequence: Synthetic peptide; note = XENP022659 vhCDR3
RGVYQALDY

SEQ ID NO: 28849 - protein, 214 aa, synthetic construct
  source 1..214: note = Description of Artificial Sequence: Synthetic polypeptide; note = XENP022659 2A11_H1.144_L2.145_Fab Light Chain
DIQMTQSPAFLSVTPGEKVTITCQASQDIGNYLNWFQQKPGKVPKLLIYFTSYLHSGVPSRFSGSGSGTDYTFTISSLEAEDAATYFCQQGNTLPYTFGGGTKVEIKRTVAAPSVFIFPPSDEQLKSGTASVVCLLNNFYPREAKVQWKVDNALQSGNSQESVTEQDSKDSTYSLSSTLTLSKADYEKHKVYACEVTHQGLSSPVTKSFNRGEC

SEQ ID NO: 28850 - protein, 107 aa, synthetic construct
  source 1..107: note = Description of Artificial Sequence: Synthetic polypeptide; note = VL of XENP022659
DIQMTQSPAFLSVTPGEKVTITCQASQDIGNYLNWFQQKPGKVPKLLIYFTSYLHSGVPSRFSGSGSGTDYTFTISSLEAEDAATYFCQQGNTLPYTFGGGTKVEIK

SEQ ID NO: 28851 - protein, 11 aa, synthetic construct
  source 1..11: note = Description of Artificial Sequence: Synthetic peptide; note = XENP022659 vlCDR1
QASQDIGNYLN

SEQ ID NO: 28852 - protein, 7 aa, synthetic construct
  source 1..7: note = Description of Artificial Sequence: Synthetic peptide; note = XENP022659 vlCDR2
FTSYLHS

SEQ ID NO: 28853 - protein, 9 aa, synthetic construct
  source 1..9: note = Description of Artificial Sequence: Synthetic peptide; note = XENP022659 vlCDR3
QQGNTLPYT

SEQ ID NO: 28854 - protein, 223 aa, synthetic construct; identical to SEQ ID NO: 27734
  source 1..223: note = Description of Artificial Sequence: Synthetic polypeptide; note = XENP022660 2A11_H1.125_L2.138_Fab Heavy Chain

SEQ ID NO: 28855 - protein, 118 aa, synthetic construct; identical to SEQ ID NO: 22065
  source 1..118: note = Description of Artificial Sequence: Synthetic polypeptide; note = VH of XENP022660

SEQ ID NO: 28856 - protein, 5 aa, synthetic construct
  source 1..5: note = Description of Artificial Sequence: Synthetic peptide; note = XENP022660 vhCDR1
HYFMH

SEQ ID NO: 28857 - protein, 17 aa, synthetic construct
  source 1..17: note = Description of Artificial Sequence: Synthetic peptide; note = XENP022660 vhCDR2
WIDPYLGDTEYAPKFQG

SEQ ID NO: 28858 - protein, 9 aa, synthetic construct
  source 1..9: note = Description of Artificial Sequence: Synthetic peptide; note = XENP022660 vhCDR3
RGVYQALDY

SEQ ID NO: 28859 - protein, 214 aa, synthetic construct; identical to SEQ ID NO: 28779
  source 1..214: note = Description of Artificial Sequence: Synthetic polypeptide; note = XENP022660 2A11_H1.125_L2.138_Fab Light Chain

SEQ ID NO: 28860 - protein, 107 aa, synthetic construct; identical to SEQ ID NO: 28780
  source 1..107: note = Description of Artificial Sequence: Synthetic polypeptide; note = VL of XENP022660

SEQ ID NO: 28861 - protein, 11 aa, synthetic construct
  source 1..11: note = Description of Artificial Sequence: Synthetic peptide; note = XENP022660 vlCDR1
QASQDIGNYLN

SEQ ID NO: 28862 - protein, 7 aa, synthetic construct
  source 1..7: note = Description of Artificial Sequence: Synthetic peptide; note = XENP022660 vlCDR2
YTSYLHS

SEQ ID NO: 28863 - protein, 9 aa, synthetic construct
  source 1..9: note = Description of Artificial Sequence: Synthetic peptide; note = XENP022660 vlCDR3
QQGNTLPYT

SEQ ID NO: 28864 - protein, 223 aa, synthetic construct; identical to SEQ ID NO: 27734
  source 1..223: note = Description of Artificial Sequence: Synthetic polypeptide; note = XENP022661 2A11_H1.125_L2.139_Fab Heavy Chain

SEQ ID NO: 28865 - protein, 118 aa, synthetic construct; identical to SEQ ID NO: 22065
  source 1..118: note = Description of Artificial Sequence: Synthetic polypeptide; note = VH of XENP022661

SEQ ID NO: 28866 - protein, 5 aa, synthetic construct
  source 1..5: note = Description of Artificial Sequence: Synthetic peptide; note = XENP022661 vhCDR1
HYFMH

SEQ ID NO: 28867 - protein, 17 aa, synthetic construct
  source 1..17: note = Description of Artificial Sequence: Synthetic peptide; note = XENP022661 vhCDR2
WIDPYLGDTEYAPKFQG

SEQ ID NO: 28868 - protein, 9 aa, synthetic construct
  source 1..9: note = Description of Artificial Sequence: Synthetic peptide; note = XENP022661 vhCDR3
RGVYQALDY

SEQ ID NO: 28869 - protein, 214 aa, synthetic construct; identical to SEQ ID NO: 28789
  source 1..214: note = Description of Artificial Sequence: Synthetic polypeptide; note = XENP022661 2A11_H1.125_L2.139_Fab Light Chain

SEQ ID NO: 28870 - protein, 107 aa, synthetic construct; identical to SEQ ID NO: 28790
  source 1..107: note = Description of Artificial Sequence: Synthetic polypeptide; note = VL of XENP022661

SEQ ID NO: 28871 - protein, 11 aa, synthetic construct
  source 1..11: note = Description of Artificial Sequence: Synthetic peptide; note = XENP022661 vlCDR1
QASQDIGNYLN

SEQ ID NO: 28872 - protein, 7 aa, synthetic construct
  source 1..7: note = Description of Artificial Sequence: Synthetic peptide; note = XENP022661 vlCDR2
YTSYLHS

SEQ ID NO: 28873 - protein, 9 aa, synthetic construct
  source 1..9: note = Description of Artificial Sequence: Synthetic peptide; note = XENP022661 vlCDR3
QQGNTLPYT

SEQ ID NO: 28874 - protein, 223 aa, synthetic construct; identical to SEQ ID NO: 27734
  source 1..223: note = Description of Artificial Sequence: Synthetic polypeptide; note = XENP022662 2A11_H1.125_L2.140_Fab Heavy Chain

SEQ ID NO: 28875 - protein, 118 aa, synthetic construct; identical to SEQ ID NO: 22065
  source 1..118: note = Description of Artificial Sequence: Synthetic polypeptide; note = VH of XENP022662

SEQ ID NO: 28876 - protein, 5 aa, synthetic construct
  source 1..5: note = Description of Artificial Sequence: Synthetic peptide; note = XENP022662 vhCDR1
HYFMH

SEQ ID NO: 28877 - protein, 17 aa, synthetic construct
  source 1..17: note = Description of Artificial Sequence: Synthetic peptide; note = XENP022662 vhCDR2
WIDPYLGDTEYAPKFQG

SEQ ID NO: 28878 - protein, 9 aa, synthetic construct
  source 1..9: note = Description of Artificial Sequence: Synthetic peptide; note = XENP022662 vhCDR3
RGVYQALDY

SEQ ID NO: 28879 - protein, 214 aa, synthetic construct; identical to SEQ ID NO: 28799
  source 1..214: note = Description of Artificial Sequence: Synthetic polypeptide; note = XENP022662 2A11_H1.125_L2.140_Fab Light Chain

SEQ ID NO: 28880 - protein, 107 aa, synthetic construct; identical to SEQ ID NO: 28800
  source 1..107: note = Description of Artificial Sequence: Synthetic polypeptide; note = VL of XENP022662

SEQ ID NO: 28881 - protein, 11 aa, synthetic construct
  source 1..11: note = Description of Artificial Sequence: Synthetic peptide; note = XENP022662 vlCDR1
QASQDIGNYLN

SEQ ID NO: 28882 - protein, 7 aa, synthetic construct
  source 1..7: note = Description of Artificial Sequence: Synthetic peptide; note = XENP022662 vlCDR2
YTSYLHS

SEQ ID NO: 28883 - protein, 9 aa, synthetic construct
  source 1..9: note = Description of Artificial Sequence: Synthetic peptide; note = XENP022662 vlCDR3
QQGNTLPYT

SEQ ID NO: 28884 - protein, 223 aa, synthetic construct; identical to SEQ ID NO: 27734
  source 1..223: note = Description of Artificial Sequence: Synthetic polypeptide; note = XENP022663 2A11_H1.125_L2.141_Fab Heavy Chain

SEQ ID NO: 28885 - protein, 118 aa, synthetic construct; identical to SEQ ID NO: 22065
  source 1..118: note = Description of Artificial Sequence: Synthetic polypeptide; note = VH of XENP022663

SEQ ID NO: 28886 - protein, 5 aa, synthetic construct
  source 1..5: note = Description of Artificial Sequence: Synthetic peptide; note = XENP022663 vhCDR1
HYFMH

SEQ ID NO: 28887 - protein, 17 aa, synthetic construct
  source 1..17: note = Description of Artificial Sequence: Synthetic peptide; note = XENP022663 vhCDR2
WIDPYLGDTEYAPKFQG

SEQ ID NO: 28888 - protein, 9 aa, synthetic construct
  source 1..9: note = Description of Artificial Sequence: Synthetic peptide; note = XENP022663 vhCDR3
RGVYQALDY

SEQ ID NO: 28889 - protein, 214 aa, synthetic construct; identical to SEQ ID NO: 28809
  source 1..214: note = Description of Artificial Sequence: Synthetic polypeptide; note = XENP022663 2A11_H1.125_L2.141_Fab Light Chain

SEQ ID NO: 28890 - protein, 107 aa, synthetic construct; identical to SEQ ID NO: 28810
  source 1..107: note = Description of Artificial Sequence: Synthetic polypeptide; note = VL of XENP022663

SEQ ID NO: 28891 - protein, 11 aa, synthetic construct
  source 1..11: note = Description of Artificial Sequence: Synthetic peptide; note = XENP022663 vlCDR1
QASQDIGNYLN

SEQ ID NO: 28892 - protein, 7 aa, synthetic construct
  source 1..7: note = Description of Artificial Sequence: Synthetic peptide; note = XENP022663 vlCDR2
YTSYLHS

SEQ ID NO: 28893 - protein, 9 aa, synthetic construct
  source 1..9: note = Description of Artificial Sequence: Synthetic peptide; note = XENP022663 vlCDR3
QQGNTLPYT

SEQ ID NO: 28894 - protein, 223 aa, synthetic construct; identical to SEQ ID NO: 27734
  source 1..223: note = Description of Artificial Sequence: Synthetic polypeptide; note = XENP022664 2A11_H1.125_L2.142_Fab Heavy Chain

SEQ ID NO: 28895 - protein, 118 aa, synthetic construct; identical to SEQ ID NO: 22065
  source 1..118: note = Description of Artificial Sequence: Synthetic polypeptide; note = VH of XENP022664

SEQ ID NO: 28896 - protein, 5 aa, synthetic construct
  source 1..5: note = Description of Artificial Sequence: Synthetic peptide; note = XENP022664 vhCDR1
HYFMH

SEQ ID NO: 28897 - protein, 17 aa, synthetic construct
  source 1..17: note = Description of Artificial Sequence: Synthetic peptide; note = XENP022664 vhCDR2
WIDPYLGDTEYAPKFQG

SEQ ID NO: 28898 - protein, 9 aa, synthetic construct
  source 1..9: note = Description of Artificial Sequence: Synthetic peptide; note = XENP022664 vhCDR3
RGVYQALDY

SEQ ID NO: 28899 - protein, 214 aa, synthetic construct; identical to SEQ ID NO: 22279
  source 1..214: note = Description of Artificial Sequence: Synthetic polypeptide; note = XENP022664 2A11_H1.125_L2.142_Fab Light Chain

SEQ ID NO: 28900 - protein, 107 aa, synthetic construct; identical to SEQ ID NO: 22280
  source 1..107: note = Description of Artificial Sequence: Synthetic polypeptide; note = VL of XENP022664

SEQ ID NO: 28901 - protein, 11 aa, synthetic construct
  source 1..11: note = Description of Artificial Sequence: Synthetic peptide; note = XENP022664 vlCDR1
QASQDIGNYLN

SEQ ID NO: 28902 - protein, 7 aa, synthetic construct
  source 1..7: note = Description of Artificial Sequence: Synthetic peptide; note = XENP022664 vlCDR2
FTSYLHS

SEQ ID NO: 28903 - protein, 9 aa, synthetic construct
  source 1..9: note = Description of Artificial Sequence: Synthetic peptide; note = XENP022664 vlCDR3
QQGNTLPYT

SEQ ID NO: 28904 - protein, 223 aa, synthetic construct; identical to SEQ ID NO: 27734
  source 1..223: note = Description of Artificial Sequence: Synthetic polypeptide; note = XENP022665 2A11_H1.125_L2.143_Fab Heavy Chain

SEQ ID NO: 28905 - protein, 118 aa, synthetic construct; identical to SEQ ID NO: 22065
  source 1..118: note = Description of Artificial Sequence: Synthetic polypeptide; note = VH of XENP022665

SEQ ID NO: 28906 - protein, 5 aa, synthetic construct
  source 1..5: note = Description of Artificial Sequence: Synthetic peptide; note = XENP022665 vhCDR1
HYFMH

SEQ ID NO: 28907 - protein, 17 aa, synthetic construct
  source 1..17: note = Description of Artificial Sequence: Synthetic peptide; note = XENP022665 vhCDR2
WIDPYLGDTEYAPKFQG

SEQ ID NO: 28908 - protein, 9 aa, synthetic construct
  source 1..9: note = Description of Artificial Sequence: Synthetic peptide; note = XENP022665 vhCDR3
RGVYQALDY

SEQ ID NO: 28909 - protein, 214 aa, synthetic construct; identical to SEQ ID NO: 28829
  source 1..214: note = Description of Artificial Sequence: Synthetic polypeptide; note = XENP022665 2A11_H1.125_L2.143_Fab Light Chain

SEQ ID NO: 28910 - protein, 107 aa, synthetic construct; identical to SEQ ID NO: 28830
  source 1..107: note = Description of Artificial Sequence: Synthetic polypeptide; note = VL of XENP022665

SEQ ID NO: 28911 - protein, 11 aa, synthetic construct
  source 1..11: note = Description of Artificial Sequence: Synthetic peptide; note = XENP022665 vlCDR1
QASQDIGNYLN

SEQ ID NO: 28912 - protein, 7 aa, synthetic construct
  source 1..7: note = Description of Artificial Sequence: Synthetic peptide; note = XENP022665 vlCDR2
FTSYLHS

SEQ ID NO: 28913 - protein, 9 aa, synthetic construct
  source 1..9: note = Description of Artificial Sequence: Synthetic peptide; note = XENP022665 vlCDR3
QQGNTLPYT

SEQ ID NO: 28914 - protein, 223 aa, synthetic construct; identical to SEQ ID NO: 27734
  source 1..223: note = Description of Artificial Sequence: Synthetic polypeptide; note = XENP022666 2A11_H1.125_L2.144_Fab Heavy Chain

SEQ ID NO: 28915 - protein, 118 aa, synthetic construct; identical to SEQ ID NO: 22065
  source 1..118: note = Description of Artificial Sequence: Synthetic polypeptide; note = VH of XENP022666

SEQ ID NO: 28916 - protein, 5 aa, synthetic construct
  source 1..5: note = Description of Artificial Sequence: Synthetic peptide; note = XENP022666 vhCDR1
HYFMH

SEQ ID NO: 28917 - protein, 17 aa, synthetic construct
  source 1..17: note = Description of Artificial Sequence: Synthetic peptide; note = XENP022666 vhCDR2
WIDPYLGDTEYAPKFQG

SEQ ID NO: 28918 - protein, 9 aa, synthetic construct
  source 1..9: note = Description of Artificial Sequence: Synthetic peptide; note = XENP022666 vhCDR3
RGVYQALDY

SEQ ID NO: 28919 - protein, 214 aa, synthetic construct; identical to SEQ ID NO: 28839
  source 1..214: note = Description of Artificial Sequence: Synthetic polypeptide; note = XENP022666 2A11_H1.125_L2.144_Fab Light Chain

SEQ ID NO: 28920 - protein, 107 aa, synthetic construct; identical to SEQ ID NO: 28840
  source 1..107: note = Description of Artificial Sequence: Synthetic polypeptide; note = VL of XENP022666

SEQ ID NO: 28921 - protein, 11 aa, synthetic construct
  source 1..11: note = Description of Artificial Sequence: Synthetic peptide; note = XENP022666 vlCDR1
QASQDIGNYLN

SEQ ID NO: 28922 - protein, 7 aa, synthetic construct
  source 1..7: note = Description of Artificial Sequence: Synthetic peptide; note = XENP022666 vlCDR2
FTSYLHS

SEQ ID NO: 28923 - protein, 9 aa, synthetic construct
  source 1..9: note = Description of Artificial Sequence: Synthetic peptide; note = XENP022666 vlCDR3
QQGNTLPYT

SEQ ID NO: 28924 - protein, 223 aa, synthetic construct; identical to SEQ ID NO: 27734
  source 1..223: note = Description of Artificial Sequence: Synthetic polypeptide; note = XENP022667 2A11_H1.125_L2.145_Fab Heavy Chain

SEQ ID NO: 28925 - protein, 118 aa, synthetic construct; identical to SEQ ID NO: 22065
  source 1..118: note = Description of Artificial Sequence: Synthetic polypeptide; note = VH of XENP022667

SEQ ID NO: 28926 - protein, 5 aa, synthetic construct
  source 1..5: note = Description of Artificial Sequence: Synthetic peptide; note = XENP022667 vhCDR1
HYFMH

SEQ ID NO: 28927 - protein, 17 aa, synthetic construct
  source 1..17: note = Description of Artificial Sequence: Synthetic peptide; note = XENP022667 vhCDR2
WIDPYLGDTEYAPKFQG

SEQ ID NO: 28928 - protein, 9 aa, synthetic construct
  source 1..9: note = Description of Artificial Sequence: Synthetic peptide; note = XENP022667 vhCDR3
RGVYQALDY

SEQ ID NO: 28929 - protein, 214 aa, synthetic construct; identical to SEQ ID NO: 28849
  source 1..214: note = Description of Artificial Sequence: Synthetic polypeptide; note = XENP022667 2A11_H1.125_L2.145_Fab Light Chain

SEQ ID NO: 28930 - protein, 107 aa, synthetic construct; identical to SEQ ID NO: 28850
  source 1..107: note = Description of Artificial Sequence: Synthetic polypeptide; note = VL of XENP022667

SEQ ID NO: 28931 - protein, 11 aa, synthetic construct
  source 1..11: note = Description of Artificial Sequence: Synthetic peptide; note = XENP022667 vlCDR1
QASQDIGNYLN

SEQ ID NO: 28932 - protein, 7 aa, synthetic construct
  source 1..7: note = Description of Artificial Sequence: Synthetic peptide; note = XENP022667 vlCDR2
FTSYLHS

SEQ ID NO: 28933 - protein, 9 aa, synthetic construct
  source 1..9: note = Description of Artificial Sequence: Synthetic peptide; note = XENP022667 vlCDR3
QQGNTLPYT

SEQ ID NO: 28934 - protein, 226 aa, synthetic construct
  source 1..226: note = Description of Artificial Sequence: Synthetic polypeptide; note = XENP020844 7G8_H3L1_Fab Heavy Chain
EVQLVESGGGLVQPGGSLRLSCAASGFTFSDAWMDWVRQAPGKGLEWVAEIRTKANNHATYYAESVKGRFTISRDDSKSSVYLQMNSLRAEDTAVYYCTRLANWDWYFDVWGQGTTVTVSSASTKGPSVFPLAPSSKSTSGGTAALGCLVKDYFPEPVTVSWNSGALTSGVHTFPAVLQSSGLYSLSSVVTVPSSSLGTQTYICNVNHKPSNTKVDKKVEPKSCGS

SEQ ID NO: 28935 - protein, 121 aa, synthetic construct; identical to SEQ ID NO: 17806
  source 1..121: note = Description of Artificial Sequence: Synthetic polypeptide; note = VH of XENP020844

SEQ ID NO: 28936 - protein, 5 aa, synthetic construct
  source 1..5: note = Description of Artificial Sequence: Synthetic peptide; note = XENP020844 vhCDR1
DAWMD

SEQ ID NO: 28937 - protein, 19 aa, synthetic construct
  source 1..19: note = Description of Artificial Sequence: Synthetic peptide; note = XENP020844 vhCDR2
EIRTKANNHATYYAESVKG

SEQ ID NO: 28938 - protein, 10 aa, synthetic construct
  source 1..10: note = Description of Artificial Sequence: Synthetic peptide; note = XENP020844 vhCDR3
LANWDWYFDV

SEQ ID NO: 28939 - protein, 218 aa, synthetic construct; identical to SEQ ID NO: 17600
  source 1..218: note = Description of Artificial Sequence: Synthetic polypeptide; note = XENP020844 7G8_H3L1_Fab Light Chain

SEQ ID NO: 28940 - protein, 111 aa, synthetic construct; identical to SEQ ID NO: 17601
  source 1..111: note = Description of Artificial Sequence: Synthetic polypeptide; note = VL of XENP020844

SEQ ID NO: 28941 - protein, 15 aa, synthetic construct
  source 1..15: note = Description of Artificial Sequence: Synthetic peptide; note = XENP020844 vlCDR1
RASQSVDYDGDSYMN

SEQ ID NO: 28942 - protein, 7 aa, synthetic construct
  source 1..7: note = Description of Artificial Sequence: Synthetic peptide; note = XENP020844 vlCDR2
AASNLES

SEQ ID NO: 28943 - protein, 9 aa, synthetic construct
  source 1..9: note = Description of Artificial Sequence: Synthetic peptide; note = XENP020844 vlCDR3
QQSNEDPFT

SEQ ID NO: 28944 - protein, 226 aa, synthetic construct
  source 1..226: note = Description of Artificial Sequence: Synthetic polypeptide; note = XENP020911 7G8_H3.1_L1_Fab Heavy Chain
EVQLVESGGGLVQPGGSLRLSCAASGDTFDDAWMDWVRQAPGKGLEWVAEIRTKANNHATYYAESVKGRFTISRDDSKSSVYLQMNSLRAEDTAVYYCTRLATWDWYFDVWGQGTTVTVSSASTKGPSVFPLAPSSKSTSGGTAALGCLVKDYFPEPVTVSWNSGALTSGVHTFPAVLQSSGLYSLSSVVTVPSSSLGTQTYICNVNHKPSNTKVDKKVEPKSCGS

SEQ ID NO: 28945 - protein, 121 aa, synthetic construct
  source 1..121: note = Description of Artificial Sequence: Synthetic polypeptide; note = VH of XENP020911
EVQLVESGGGLVQPGGSLRLSCAASGDTFDDAWMDWVRQAPGKGLEWVAEIRTKANNHATYYAESVKGRFTISRDDSKSSVYLQMNSLRAEDTAVYYCTRLATWDWYFDVWGQGTTVTVSS

SEQ ID NO: 28946 - protein, 5 aa, synthetic construct
  source 1..5: note = Description of Artificial Sequence: Synthetic peptide; note = XENP020911 vhCDR1
DAWMD

SEQ ID NO: 28947 - protein, 19 aa, synthetic construct
  source 1..19: note = Description of Artificial Sequence: Synthetic peptide; note = XENP020911 vhCDR2
EIRTKANNHATYYAESVKG

SEQ ID NO: 28948 - protein, 10 aa, synthetic construct
  source 1..10: note = Description of Artificial Sequence: Synthetic peptide; note = XENP020911 vhCDR3
LATWDWYFDV

SEQ ID NO: 28949 - protein, 218 aa, synthetic construct; identical to SEQ ID NO: 17600
  source 1..218: note = Description of Artificial Sequence: Synthetic polypeptide; note = XENP020911 7G8_H3.1_L1_Fab Light Chain

SEQ ID NO: 28950 - protein, 111 aa, synthetic construct; identical to SEQ ID NO: 17601
  source 1..111: note = Description of Artificial Sequence: Synthetic polypeptide; note = VL of XENP020911

SEQ ID NO: 28951 - protein, 15 aa, synthetic construct
  source 1..15: note = Description of Artificial Sequence: Synthetic peptide; note = XENP020911 vlCDR1
RASQSVDYDGDSYMN

SEQ ID NO: 28952 - protein, 7 aa, synthetic construct
  source 1..7: note = Description of Artificial Sequence: Synthetic peptide; note = XENP020911 vlCDR2
AASNLES

SEQ ID NO: 28953 - protein, 9 aa, synthetic construct
  source 1..9: note = Description of Artificial Sequence: Synthetic peptide; note = XENP020911 vlCDR3
QQSNEDPFT

SEQ ID NO: 28954 - protein, 226 aa, synthetic construct
  source 1..226: note = Description of Artificial Sequence: Synthetic polypeptide; note = XENP020912 7G8_H3.2_L1_Fab Heavy Chain
EVQLVESGGGLVQPGGSLRLSCAASGDTFDDAWMDWVRQAPGKGLEWVAEIRTKANNHATYYAESVKGRFTISRDDSKSSVYLQMNSLRAEDTAVYYCTRLANWDWYFDVWGQGTTVTVSSASTKGPSVFPLAPSSKSTSGGTAALGCLVKDYFPEPVTVSWNSGALTSGVHTFPAVLQSSGLYSLSSVVTVPSSSLGTQTYICNVNHKPSNTKVDKKVEPKSCGS

SEQ ID NO: 28955 - protein, 121 aa, synthetic construct
  source 1..121: note = Description of Artificial Sequence: Synthetic polypeptide; note = VH of XENP020912
EVQLVESGGGLVQPGGSLRLSCAASGDTFDDAWMDWVRQAPGKGLEWVAEIRTKANNHATYYAESVKGRFTISRDDSKSSVYLQMNSLRAEDTAVYYCTRLANWDWYFDVWGQGTTVTVSS

SEQ ID NO: 28956 - protein, 5 aa, synthetic construct
  source 1..5: note = Description of Artificial Sequence: Synthetic peptide; note = XENP020912 vhCDR1
DAWMD

SEQ ID NO: 28957 - protein, 19 aa, synthetic construct
  source 1..19: note = Description of Artificial Sequence: Synthetic peptide; note = XENP020912 vhCDR2
EIRTKANNHATYYAESVKG

SEQ ID NO: 28958 - protein, 10 aa, synthetic construct
  source 1..10: note = Description of Artificial Sequence: Synthetic peptide; note = XENP020912 vhCDR3
LANWDWYFDV

SEQ ID NO: 28959 - protein, 218 aa, synthetic construct; identical to SEQ ID NO: 17600
  source 1..218: note = Description of Artificial Sequence: Synthetic polypeptide; note = XENP020912 7G8_H3.2_L1_Fab Light Chain

SEQ ID NO: 28960 - protein, 111 aa, synthetic construct; identical to SEQ ID NO: 17601
  source 1..111: note = Description of Artificial Sequence: Synthetic polypeptide; note = VL of XENP020912

SEQ ID NO: 28961 - protein, 15 aa, synthetic construct
  source 1..15: note = Description of Artificial Sequence: Synthetic peptide; note = XENP020912 vlCDR1
RASQSVDYDGDSYMN

SEQ ID NO: 28962 - protein, 7 aa, synthetic construct
  source 1..7: note = Description of Artificial Sequence: Synthetic peptide; note = XENP020912 vlCDR2
AASNLES

SEQ ID NO: 28963 - protein, 9 aa, synthetic construct
  source 1..9: note = Description of Artificial Sequence: Synthetic peptide; note = XENP020912 vlCDR3
QQSNEDPFT

SEQ ID NO: 28964 - protein, 226 aa, synthetic construct
  source 1..226: note = Description of Artificial Sequence: Synthetic polypeptide; note = XENP020913 7G8_H3.3_L1_Fab Heavy Chain
EVQLVESGGGLVQPGGSLRLSCAASGDTFSDAWMDWVRQAPGKGLEWVAEIRTKANNHATYYAESVKGRFTISRDDSKSSVYLQMNSLRAEDTAVYYCTRLATWDWYFDVWGQGTTVTVSSASTKGPSVFPLAPSSKSTSGGTAALGCLVKDYFPEPVTVSWNSGALTSGVHTFPAVLQSSGLYSLSSVVTVPSSSLGTQTYICNVNHKPSNTKVDKKVEPKSCGS

SEQ ID NO: 28965 - protein, 121 aa, synthetic construct
  source 1..121: note = Description of Artificial Sequence: Synthetic polypeptide; note = VH of XENP020913
EVQLVESGGGLVQPGGSLRLSCAASGDTFSDAWMDWVRQAPGKGLEWVAEIRTKANNHATYYAESVKGRFTISRDDSKSSVYLQMNSLRAEDTAVYYCTRLATWDWYFDVWGQGTTVTVSS

SEQ ID NO: 28966 - protein, 5 aa, synthetic construct
  source 1..5: note = Description of Artificial Sequence: Synthetic peptide; note = XENP020913 vhCDR1
DAWMD

SEQ ID NO: 28967 - protein, 19 aa, synthetic construct
  source 1..19: note = Description of Artificial Sequence: Synthetic peptide; note = XENP020913 vhCDR2
EIRTKANNHATYYAESVKG

SEQ ID NO: 28968 - protein, 10 aa, synthetic construct
  source 1..10: note = Description of Artificial Sequence: Synthetic peptide; note = XENP020913 vhCDR3
LATWDWYFDV

SEQ ID NO: 28969 - protein, 218 aa, synthetic construct; identical to SEQ ID NO: 17600
  source 1..218: note = Description of Artificial Sequence: Synthetic polypeptide; note = XENP020913 7G8_H3.3_L1_Fab Light Chain

SEQ ID NO: 28970 - protein, 111 aa, synthetic construct; identical to SEQ ID NO: 17601
  source 1..111: note = Description of Artificial Sequence: Synthetic polypeptide; note = VL of XENP020913

SEQ ID NO: 28971 - protein, 15 aa, synthetic construct
  source 1..15: note = Description of Artificial Sequence: Synthetic peptide; note = XENP020913 vlCDR1
RASQSVDYDGDSYMN

SEQ ID NO: 28972 - protein, 7 aa, synthetic construct
  source 1..7: note = Description of Artificial Sequence: Synthetic peptide; note = XENP020913 vlCDR2
AASNLES

SEQ ID NO: 28973 - protein, 9 aa, synthetic construct
  source 1..9: note = Description of Artificial Sequence: Synthetic peptide; note = XENP020913 vlCDR3
QQSNEDPFT

SEQ ID NO: 28974 - protein, 226 aa, synthetic construct
  source 1..226: note = Description of Artificial Sequence: Synthetic polypeptide; note = XENP020914 7G8_H3.4_L1_Fab Heavy Chain
EVQLVESGGGLVQPGGSLRLSCAASGFTFDDAWMDWVRQAPGKGLEWVAEIRTKANNHATYYAESVKGRFTISRDDSKSSVYLQMNSLRAEDTAVYYCTRLATWDWYFDVWGQGTTVTVSSASTKGPSVFPLAPSSKSTSGGTAALGCLVKDYFPEPVTVSWNSGALTSGVHTFPAVLQSSGLYSLSSVVTVPSSSLGTQTYICNVNHKPSNTKVDKKVEPKSCGS

SEQ ID NO: 28975 - protein, 121 aa, synthetic construct
  source 1..121: note = Description of Artificial Sequence: Synthetic polypeptide; note = VH of XENP020914
EVQLVESGGGLVQPGGSLRLSCAASGFTFDDAWMDWVRQAPGKGLEWVAEIRTKANNHATYYAESVKGRFTISRDDSKSSVYLQMNSLRAEDTAVYYCTRLATWDWYFDVWGQGTTVTVSS

SEQ ID NO: 28976 - protein, 5 aa, synthetic construct
  source 1..5: note = Description of Artificial Sequence: Synthetic peptide; note = XENP020914 vhCDR1
DAWMD

SEQ ID NO: 28977 - protein, 19 aa, synthetic construct
  source 1..19: note = Description of Artificial Sequence: Synthetic peptide; note = XENP020914 vhCDR2
EIRTKANNHATYYAESVKG

SEQ ID NO: 28978 - protein, 10 aa, synthetic construct
  source 1..10: note = Description of Artificial Sequence: Synthetic peptide; note = XENP020914 vhCDR3
LATWDWYFDV

SEQ ID NO: 28979 - protein, 218 aa, synthetic construct; identical to SEQ ID NO: 17600
  source 1..218: note = Description of Artificial Sequence: Synthetic polypeptide; note = XENP020914 7G8_H3.4_L1_Fab Light Chain

SEQ ID NO: 28980 - protein, 111 aa, synthetic construct; identical to SEQ ID NO: 17601
  source 1..111: note = Description of Artificial Sequence: Synthetic polypeptide; note = VL of XENP020914

SEQ ID NO: 28981 - protein, 15 aa, synthetic construct
  source 1..15: note = Description of Artificial Sequence: Synthetic peptide; note = XENP020914 vlCDR1
RASQSVDYDGDSYMN

SEQ ID NO: 28982 - protein, 7 aa, synthetic construct
  source 1..7: note = Description of Artificial Sequence: Synthetic peptide; note = XENP020914 vlCDR2
AASNLES

SEQ ID NO: 28983 - protein, 9 aa, synthetic construct
  source 1..9: note = Description of Artificial Sequence: Synthetic peptide; note = XENP020914 vlCDR3
QQSNEDPFT

SEQ ID NO: 28984 - protein, 226 aa, synthetic construct
  source 1..226: note = Description of Artificial Sequence: Synthetic polypeptide; note = XENP020915 7G8_H3.5_L1_Fab Heavy Chain
EVQLVESGGGLVQPGGSLRLSCAASGDTFTDAWMDWVRQAPGKGLEWVAEIRTKANNHATYYAESVKGRFTISRDDSKSSVYLQMNSLRAEDTAVYYCTRLATWDWYFDVWGQGTTVTVSSASTKGPSVFPLAPSSKSTSGGTAALGCLVKDYFPEPVTVSWNSGALTSGVHTFPAVLQSSGLYSLSSVVTVPSSSLGTQTYICNVNHKPSNTKVDKKVEPKSCGS

SEQ ID NO: 28985 - protein, 121 aa, synthetic construct
  source 1..121: note = Description of Artificial Sequence: Synthetic polypeptide; note = VH of XENP020915
EVQLVESGGGLVQPGGSLRLSCAASGDTFTDAWMDWVRQAPGKGLEWVAEIRTKANNHATYYAESVKGRFTISRDDSKSSVYLQMNSLRAEDTAVYYCTRLATWDWYFDVWGQGTTVTVSS

SEQ ID NO: 28986 - protein, 5 aa, synthetic construct
  source 1..5: note = Description of Artificial Sequence: Synthetic peptide; note = XENP020915 vhCDR1
DAWMD

SEQ ID NO: 28987 - protein, 19 aa, synthetic construct
  source 1..19: note = Description of Artificial Sequence: Synthetic peptide; note = XENP020915 vhCDR2
EIRTKANNHATYYAESVKG

SEQ ID NO: 28988 - protein, 10 aa, synthetic construct
  source 1..10: note = Description of Artificial Sequence: Synthetic peptide; note = XENP020915 vhCDR3
LATWDWYFDV

SEQ ID NO: 28989 - protein, 218 aa, synthetic construct; identical to SEQ ID NO: 17600
  source 1..218: note = Description of Artificial Sequence: Synthetic polypeptide; note = XENP020915 7G8_H3.5_L1_Fab Light Chain

SEQ ID NO: 28990 - protein, 111 aa, synthetic construct; identical to SEQ ID NO: 17601
  source 1..111: note = Description of Artificial Sequence: Synthetic polypeptide; note = VL of XENP020915

SEQ ID NO: 28991 - protein, 15 aa, synthetic construct
  source 1..15: note = Description of Artificial Sequence: Synthetic peptide; note = XENP020915 vlCDR1
RASQSVDYDGDSYMN

SEQ ID NO: 28992 - protein, 7 aa, synthetic construct
  source 1..7: note = Description of Artificial Sequence: Synthetic peptide; note = XENP020915 vlCDR2
AASNLES

SEQ ID NO: 28993 - protein, 9 aa, synthetic construct
  source 1..9: note = Description of Artificial Sequence: Synthetic peptide; note = XENP020915 vlCDR3
QQSNEDPFT

SEQ ID NO: 28994 - protein, 226 aa, synthetic construct
  source 1..226: note = Description of Artificial Sequence: Synthetic polypeptide; note = XENP020916 7G8_H3.6_L1_Fab Heavy Chain
EVQLVESGGGLVQPGGSLRLSCAASGDTFTDAWMDWVRQAPGKGLEWVAEIRTKANNHATYYAESVKGRFTISRDDSKSSVYLQMNSLRAEDTAVYYCTRLANWDWYFDVWGQGTTVTVSSASTKGPSVFPLAPSSKSTSGGTAALGCLVKDYFPEPVTVSWNSGALTSGVHTFPAVLQSSGLYSLSSVVTVPSSSLGTQTYICNVNHKPSNTKVDKKVEPKSCGS

SEQ ID NO: 28995 - protein, 121 aa, synthetic construct
  source 1..121: note = Description of Artificial Sequence: Synthetic polypeptide; note = VH of XENP020916
EVQLVESGGGLVQPGGSLRLSCAASGDTFTDAWMDWVRQAPGKGLEWVAEIRTKANNHATYYAESVKGRFTISRDDSKSSVYLQMNSLRAEDTAVYYCTRLANWDWYFDVWGQGTTVTVSS

SEQ ID NO: 28996 - protein, 5 aa, synthetic construct
  source 1..5: note = Description of Artificial Sequence: Synthetic peptide; note = XENP020916 vhCDR1
DAWMD

SEQ ID NO: 28997 - protein, 19 aa, synthetic construct
  source 1..19: note = Description of Artificial Sequence: Synthetic peptide; note = XENP020916 vhCDR2
EIRTKANNHATYYAESVKG

SEQ ID NO: 28998 - protein, 10 aa, synthetic construct
  source 1..10: note = Description of Artificial Sequence: Synthetic peptide; note = XENP020916 vhCDR3
LANWDWYFDV

SEQ ID NO: 28999 - protein, 218 aa, synthetic construct; identical to SEQ ID NO: 17600
  source 1..218: note = Description of Artificial Sequence: Synthetic polypeptide; note = XENP020916 7G8_H3.6_L1_Fab Light Chain

SEQ ID NO: 29000 - protein, 111 aa, synthetic construct; identical to SEQ ID NO: 17601
  source 1..111: note = Description of Artificial Sequence: Synthetic polypeptide; note = VL of XENP020916

SEQ ID NO: 29001 - protein, 15 aa, synthetic construct
  source 1..15: note = Description of Artificial Sequence: Synthetic peptide; note = XENP020916 vlCDR1
RASQSVDYDGDSYMN

SEQ ID NO: 29002 - protein, 7 aa, synthetic construct
  source 1..7: note = Description of Artificial Sequence: Synthetic peptide; note = XENP020916 vlCDR2
AASNLES

SEQ ID NO: 29003 - protein, 9 aa, synthetic construct
  source 1..9: note = Description of Artificial Sequence: Synthetic peptide; note = XENP020916 vlCDR3
QQSNEDPFT

SEQ ID NO: 29004 - protein, 226 aa, synthetic construct
  source 1..226: note = Description of Artificial Sequence: Synthetic polypeptide; note = XENP020917 7G8_H3.8_L1_Fab Heavy Chain
EVQLVESGGGLVQPGGSLRLSCAASGFTFTDAWMDWVRQAPGKGLEWVAEIRTKANNHATYYAESVKGRFTISRDDSKSSVYLQMNSLRAEDTAVYYCTRLATWDWYFDVWGQGTTVTVSSASTKGPSVFPLAPSSKSTSGGTAALGCLVKDYFPEPVTVSWNSGALTSGVHTFPAVLQSSGLYSLSSVVTVPSSSLGTQTYICNVNHKPSNTKVDKKVEPKSCGS

SEQ ID NO: 29005 - protein, 121 aa, synthetic construct
  source 1..121: note = Description of Artificial Sequence: Synthetic polypeptide; note = VH of XENP020917
EVQLVESGGGLVQPGGSLRLSCAASGFTFTDAWMDWVRQAPGKGLEWVAEIRTKANNHATYYAESVKGRFTISRDDSKSSVYLQMNSLRAEDTAVYYCTRLATWDWYFDVWGQGTTVTVSS

SEQ ID NO: 29006 - protein, 5 aa, synthetic construct
  source 1..5: note = Description of Artificial Sequence: Synthetic peptide; note = XENP020917 vhCDR1
DAWMD

SEQ ID NO: 29007 - protein, 19 aa, synthetic construct
  source 1..19: note = Description of Artificial Sequence: Synthetic peptide; note = XENP020917 vhCDR2
EIRTKANNHATYYAESVKG

SEQ ID NO: 29008 - protein, 10 aa, synthetic construct
  source 1..10: note = Description of Artificial Sequence: Synthetic peptide; note = XENP020917 vhCDR3
LATWDWYFDV

SEQ ID NO: 29009 - protein, 218 aa, synthetic construct; identical to SEQ ID NO: 17600
  source 1..218: note = Description of Artificial Sequence: Synthetic polypeptide; note = XENP020917 7G8_H3.8_L1_Fab Light Chain

SEQ ID NO: 29010 - protein, 111 aa, synthetic construct; identical to SEQ ID NO: 17601
  source 1..111: note = Description of Artificial Sequence: Synthetic polypeptide; note = VL of XENP020917

SEQ ID NO: 29011 - protein, 15 aa, synthetic construct
  source 1..15: note = Description of Artificial Sequence: Synthetic peptide; note = XENP020917 vlCDR1
RASQSVDYDGDSYMN

SEQ ID NO: 29012 - protein, 7 aa, synthetic construct
  source 1..7: note = Description of Artificial Sequence: Synthetic peptide; note = XENP020917 vlCDR2
AASNLES

SEQ ID NO: 29013 - protein, 9 aa, synthetic construct
  source 1..9: note = Description of Artificial Sequence: Synthetic peptide; note = XENP020917 vlCDR3
QQSNEDPFT

SEQ ID NO: 29014 - protein, 226 aa, synthetic construct; identical to SEQ ID NO: 28934
  source 1..226: note = Description of Artificial Sequence: Synthetic polypeptide; note = XENP020918 7G8_H3_L1.1_Fab Heavy Chain

SEQ ID NO: 29015 - protein, 121 aa, synthetic construct; identical to SEQ ID NO: 17806
  source 1..121: note = Description of Artificial Sequence: Synthetic polypeptide; note = VH of XENP020918

SEQ ID NO: 29016 - protein, 5 aa, synthetic construct
  source 1..5: note = Description of Artificial Sequence: Synthetic peptide; note = XENP020918 vhCDR1
DAWMD

SEQ ID NO: 29017 - protein, 19 aa, synthetic construct
  source 1..19: note = Description of Artificial Sequence: Synthetic peptide; note = XENP020918 vhCDR2
EIRTKANNHATYYAESVKG

SEQ ID NO: 29018 - protein, 10 aa, synthetic construct
  source 1..10: note = Description of Artificial Sequence: Synthetic peptide; note = XENP020918 vhCDR3
LANWDWYFDV

SEQ ID NO: 29019 - protein, 218 aa, synthetic construct
  source 1..218: note = Description of Artificial Sequence: Synthetic polypeptide; note = XENP020918 7G8_H3_L1.1_Fab Light Chain
DTVLTQSPSSLSASVGDRVTITCRASQSVDYDDDSYMNWYQQKPGKPPKLLIYGASELESGIPARLSGSGSGTDFTLTISSLQPEDFATYYCQQSNEDPFTFGSGTKLEIKRTVAAPSVFIFPPSDEQLKSGTASVVCLLNNFYPREAKVQWKVDNALQSGNSQESVTEQDSKDSTYSLSSTLTLSKADYEKHKVYACEVTHQGLSSPVTKSFNRGEC

SEQ ID NO: 29020 - protein, 111 aa, synthetic construct
  source 1..111: note = Description of Artificial Sequence: Synthetic polypeptide; note = VL of XENP020918
DTVLTQSPSSLSASVGDRVTITCRASQSVDYDDDSYMNWYQQKPGKPPKLLIYGASELESGIPARLSGSGSGTDFTLTISSLQPEDFATYYCQQSNEDPFTFGSGTKLEIK

SEQ ID NO: 29021 - protein, 15 aa, synthetic construct
  source 1..15: note = Description of Artificial Sequence: Synthetic peptide; note = XENP020918 vlCDR1
RASQSVDYDDDSYMN

SEQ ID NO: 29022 - protein, 7 aa, synthetic construct
  source 1..7: note = Description of Artificial Sequence: Synthetic peptide; note = XENP020918 vlCDR2
GASELES

SEQ ID NO: 29023 - protein, 9 aa, synthetic construct
  source 1..9: note = Description of Artificial Sequence: Synthetic peptide; note = XENP020918 vlCDR3
QQSNEDPFT

SEQ ID NO: 29024 - protein, 226 aa, synthetic construct; identical to SEQ ID NO: 28934
  source 1..226: note = Description of Artificial Sequence: Synthetic polypeptide; note = XENP020919 7G8_H3_L1.2_Fab Heavy Chain

SEQ ID NO: 29025 - protein, 121 aa, synthetic construct; identical to SEQ ID NO: 17806
  source 1..121: note = Description of Artificial Sequence: Synthetic polypeptide; note = VH of XENP020919

SEQ ID NO: 29026 - protein, 5 aa, synthetic construct
  source 1..5: note = Description of Artificial Sequence: Synthetic peptide; note = XENP020919 vhCDR1
DAWMD

SEQ ID NO: 29027 - protein, 19 aa, synthetic construct
  source 1..19: note = Description of Artificial Sequence: Synthetic peptide; note = XENP020919 vhCDR2
EIRTKANNHATYYAESVKG

SEQ ID NO: 29028 - protein, 10 aa, synthetic construct
  source 1..10: note = Description of Artificial Sequence: Synthetic peptide; note = XENP020919 vhCDR3
LANWDWYFDV

SEQ ID NO: 29029 - protein, 218 aa, synthetic construct
  source 1..218: note = Description of Artificial Sequence: Synthetic polypeptide; note = XENP020919 7G8_H3_L1.2_Fab Light Chain
DTVLTQSPSSLSASVGDRVTITCRASQSVDYDDDSYMNWYQQKPGKPPKLLIYGASNLESGIPARLSGSGSGTDFTLTISSLQPEDFATYYCQQSNEDPFTFGSGTKLEIKRTVAAPSVFIFPPSDEQLKSGTASVVCLLNNFYPREAKVQWKVDNALQSGNSQESVTEQDSKDSTYSLSSTLTLSKADYEKHKVYACEVTHQGLSSPVTKSFNRGEC

SEQ ID NO: 29030 - protein, 111 aa, synthetic construct
  source 1..111: note = Description of Artificial Sequence: Synthetic polypeptide; note = VL of XENP020919
DTVLTQSPSSLSASVGDRVTITCRASQSVDYDDDSYMNWYQQKPGKPPKLLIYGASNLESGIPARLSGSGSGTDFTLTISSLQPEDFATYYCQQSNEDPFTFGSGTKLEIK

SEQ ID NO: 29031 - protein, 15 aa, synthetic construct
  source 1..15: note = Description of Artificial Sequence: Synthetic peptide; note = XENP020919 vlCDR1
RASQSVDYDDDSYMN

SEQ ID NO: 29032 - protein, 7 aa, synthetic construct
  source 1..7: note = Description of Artificial Sequence: Synthetic peptide; note = XENP020919 vlCDR2
GASNLES

SEQ ID NO: 29033 - protein, 9 aa, synthetic construct
  source 1..9: note = Description of Artificial Sequence: Synthetic peptide; note = XENP020919 vlCDR3
QQSNEDPFT

SEQ ID NO: 29034 - protein, 226 aa, synthetic construct; identical to SEQ ID NO: 28934
  source 1..226: note = Description of Artificial Sequence: Synthetic polypeptide; note = XENP020920 7G8_H3_L1.3_Fab Heavy Chain

SEQ ID NO: 29035 - protein, 121 aa, synthetic construct; identical to SEQ ID NO: 17806
  source 1..121: note = Description of Artificial Sequence: Synthetic polypeptide; note = VH of XENP020920

SEQ ID NO: 29036 - protein, 5 aa, synthetic construct
  source 1..5: note = Description of Artificial Sequence: Synthetic peptide; note = XENP020920 vhCDR1
DAWMD

SEQ ID NO: 29037 - protein, 19 aa, synthetic construct
  source 1..19: note = Description of Artificial Sequence: Synthetic peptide; note = XENP020920 vhCDR2
EIRTKANNHATYYAESVKG

SEQ ID NO: 29038 - protein, 10 aa, synthetic construct
  source 1..10: note = Description of Artificial Sequence: Synthetic peptide; note = XENP020920 vhCDR3
LANWDWYFDV

SEQ ID NO: 29039 - protein, 218 aa, synthetic construct
  source 1..218: note = Description of Artificial Sequence: Synthetic polypeptide; note = XENP020920 7G8_H3_L1.3_Fab Light Chain
DTVLTQSPSSLSASVGDRVTITCRASQSVDYDDDSYMNWYQQKPGKPPKLLIYAASELESGIPARLSGSGSGTDFTLTISSLQPEDFATYYCQQSNEDPFTFGSGTKLEIKRTVAAPSVFIFPPSDEQLKSGTASVVCLLNNFYPREAKVQWKVDNALQSGNSQESVTEQDSKDSTYSLSSTLTLSKADYEKHKVYACEVTHQGLSSPVTKSFNRGEC

SEQ ID NO: 29040 - protein, 111 aa, synthetic construct
  source 1..111: note = Description of Artificial Sequence: Synthetic polypeptide; note = VL of XENP020920
DTVLTQSPSSLSASVGDRVTITCRASQSVDYDDDSYMNWYQQKPGKPPKLLIYAASELESGIPARLSGSGSGTDFTLTISSLQPEDFATYYCQQSNEDPFTFGSGTKLEIK

SEQ ID NO: 29041 - protein, 15 aa, synthetic construct
  source 1..15: note = Description of Artificial Sequence: Synthetic peptide; note = XENP020920 vlCDR1
RASQSVDYDDDSYMN

SEQ ID NO: 29042 - protein, 7 aa, synthetic construct
  source 1..7: note = Description of Artificial Sequence: Synthetic peptide; note = XENP020920 vlCDR2
AASELES

SEQ ID NO: 29043 - protein, 9 aa, synthetic construct
  source 1..9: note = Description of Artificial Sequence: Synthetic peptide; note = XENP020920 vlCDR3
QQSNEDPFT

SEQ ID NO: 29044 - protein, 226 aa, synthetic construct; identical to SEQ ID NO: 28934
  source 1..226: note = Description of Artificial Sequence: Synthetic polypeptide; note = XENP020921 7G8_H3_L1.4_Fab Heavy Chain

SEQ ID NO: 29045 - protein, 121 aa, synthetic construct; identical to SEQ ID NO: 17806
  source 1..121: note = Description of Artificial Sequence: Synthetic polypeptide; note = VH of XENP020921

SEQ ID NO: 29046 - protein, 5 aa, synthetic construct
  source 1..5: note = Description of Artificial Sequence: Synthetic peptide; note = XENP020921 vhCDR1
DAWMD

SEQ ID NO: 29047 - protein, 19 aa, synthetic construct
  source 1..19: note = Description of Artificial Sequence: Synthetic peptide; note = XENP020921 vhCDR2
EIRTKANNHATYYAESVKG

SEQ ID NO: 29048 - protein, 10 aa, synthetic construct
  source 1..10: note = Description of Artificial Sequence: Synthetic peptide; note = XENP020921 vhCDR3
LANWDWYFDV

SEQ ID NO: 29049 - protein, 218 aa, synthetic construct
  source 1..218: note = Description of Artificial Sequence: Synthetic polypeptide; note = XENP020921 7G8_H3_L1.4_Fab Light Chain
DTVLTQSPSSLSASVGDRVTITCRASQSVDYDGDSYMNWYQQKPGKPPKLLIYGASELESGIPARLSGSGSGTDFTLTISSLQPEDFATYYCQQSNEDPFTFGSGTKLEIKRTVAAPSVFIFPPSDEQLKSGTASVVCLLNNFYPREAKVQWKVDNALQSGNSQESVTEQDSKDSTYSLSSTLTLSKADYEKHKVYACEVTHQGLSSPVTKSFNRGEC

SEQ ID NO: 29050 - protein, 111 aa, synthetic construct
  source 1..111: note = Description of Artificial Sequence: Synthetic polypeptide; note = VL of XENP020921
DTVLTQSPSSLSASVGDRVTITCRASQSVDYDGDSYMNWYQQKPGKPPKLLIYGASELESGIPARLSGSGSGTDFTLTISSLQPEDFATYYCQQSNEDPFTFGSGTKLEIK

SEQ ID NO: 29051 - protein, 15 aa, synthetic construct
  source 1..15: note = Description of Artificial Sequence: Synthetic peptide; note = XENP020921 vlCDR1
RASQSVDYDGDSYMN

SEQ ID NO: 29052 - protein, 7 aa, synthetic construct
  source 1..7: note = Description of Artificial Sequence: Synthetic peptide; note = XENP020921 vlCDR2
GASELES

SEQ ID NO: 29053 - protein, 9 aa, synthetic construct
  source 1..9: note = Description of Artificial Sequence: Synthetic peptide; note = XENP020921 vlCDR3
QQSNEDPFT

SEQ ID NO: 29054 - protein, 226 aa, synthetic construct; identical to SEQ ID NO: 28934
  source 1..226: note = Description of Artificial Sequence: Synthetic polypeptide; note = XENP020922 7G8_H3_L1.5_Fab Heavy Chain

SEQ ID NO: 29055 - protein, 121 aa, synthetic construct; identical to SEQ ID NO: 17806
  source 1..121: note = Description of Artificial Sequence: Synthetic polypeptide; note = VH of XENP020922

SEQ ID NO: 29056 - protein, 5 aa, synthetic construct
  source 1..5: note = Description of Artificial Sequence: Synthetic peptide; note = XENP020922 vhCDR1
DAWMD

SEQ ID NO: 29057 - protein, 19 aa, synthetic construct
  source 1..19: note = Description of Artificial Sequence: Synthetic peptide; note = XENP020922 vhCDR2
EIRTKANNHATYYAESVKG

SEQ ID NO: 29058 - protein, 10 aa, synthetic construct
  source 1..10: note = Description of Artificial Sequence: Synthetic peptide; note = XENP020922 vhCDR3
LANWDWYFDV

SEQ ID NO: 29059 - protein, 218 aa, synthetic construct
  source 1..218: note = Description of Artificial Sequence: Synthetic polypeptide; note = XENP020922 7G8_H3_L1.5_Fab Light Chain
DTVLTQSPSSLSASVGDRVTITCRASQSVDYDDDSYMNWYQQKPGKPPKLLIYSASELESGIPARLSGSGSGTDFTLTISSLQPEDFATYYCQQSNEDPFTFGSGTKLEIKRTVAAPSVFIFPPSDEQLKSGTASVVCLLNNFYPREAKVQWKVDNALQSGNSQESVTEQDSKDSTYSLSSTLTLSKADYEKHKVYACEVTHQGLSSPVTKSFNRGEC

SEQ ID NO: 29060 - protein, 111 aa, synthetic construct
  source 1..111: note = Description of Artificial Sequence: Synthetic polypeptide; note = VL of XENP020922
DTVLTQSPSSLSASVGDRVTITCRASQSVDYDDDSYMNWYQQKPGKPPKLLIYSASELESGIPARLSGSGSGTDFTLTISSLQPEDFATYYCQQSNEDPFTFGSGTKLEIK

SEQ ID NO: 29061 - protein, 15 aa, synthetic construct
  source 1..15: note = Description of Artificial Sequence: Synthetic peptide; note = XENP020922 vlCDR1
RASQSVDYDDDSYMN

SEQ ID NO: 29062 - protein, 7 aa, synthetic construct
  source 1..7: note = Description of Artificial Sequence: Synthetic peptide; note = XENP020922 vlCDR2
SASELES

SEQ ID NO: 29063 - protein, 9 aa, synthetic construct
  source 1..9: note = Description of Artificial Sequence: Synthetic peptide; note = XENP020922 vlCDR3
QQSNEDPFT

SEQ ID NO: 29064 - protein, 226 aa, synthetic construct; identical to SEQ ID NO: 28934
  source 1..226: note = Description of Artificial Sequence: Synthetic polypeptide; note = XENP020923 7G8_H3_L1.6_Fab Heavy Chain

SEQ ID NO: 29065 - protein, 121 aa, synthetic construct; identical to SEQ ID NO: 17806
  source 1..121: note = Description of Artificial Sequence: Synthetic polypeptide; note = VH of XENP020923

SEQ ID NO: 29066 - protein, 5 aa, synthetic construct
  source 1..5: note = Description of Artificial Sequence: Synthetic peptide; note = XENP020923 vhCDR1
DAWMD

SEQ ID NO: 29067 - protein, 19 aa, synthetic construct
  source 1..19: note = Description of Artificial Sequence: Synthetic peptide; note = XENP020923 vhCDR2
EIRTKANNHATYYAESVKG

SEQ ID NO: 29068 - protein, 10 aa, synthetic construct
  source 1..10: note = Description of Artificial Sequence: Synthetic peptide; note = XENP020923 vhCDR3
LANWDWYFDV

SEQ ID NO: 29069 - protein, 218 aa, synthetic construct
  source 1..218: note = Description of Artificial Sequence: Synthetic polypeptide; note = XENP020923 7G8_H3_L1.6_Fab Light Chain
DTVLTQSPSSLSASVGDRVTITCRASQSVDYDDDSYMNWYQQKPGKPPKLLIYSASNLESGIPARLSGSGSGTDFTLTISSLQPEDFATYYCQQSNEDPFTFGSGTKLEIKRTVAAPSVFIFPPSDEQLKSGTASVVCLLNNFYPREAKVQWKVDNALQSGNSQESVTEQDSKDSTYSLSSTLTLSKADYEKHKVYACEVTHQGLSSPVTKSFNRGEC

SEQ ID NO: 29070 - protein, 111 aa, synthetic construct
  source 1..111: note = Description of Artificial Sequence: Synthetic polypeptide; note = VL of XENP020923
DTVLTQSPSSLSASVGDRVTITCRASQSVDYDDDSYMNWYQQKPGKPPKLLIYSASNLESGIPARLSGSGSGTDFTLTISSLQPEDFATYYCQQSNEDPFTFGSGTKLEIK

SEQ ID NO: 29071 - protein, 15 aa, synthetic construct
  source 1..15: note = Description of Artificial Sequence: Synthetic peptide; note = XENP020923 vlCDR1
RASQSVDYDDDSYMN

SEQ ID NO: 29072 - protein, 7 aa, synthetic construct
  source 1..7: note = Description of Artificial Sequence: Synthetic peptide; note = XENP020923 vlCDR2
SASNLES

SEQ ID NO: 29073 - protein, 9 aa, synthetic construct
  source 1..9: note = Description of Artificial Sequence: Synthetic peptide; note = XENP020923 vlCDR3
QQSNEDPFT

SEQ ID NO: 29074 - protein, 226 aa, synthetic construct; identical to SEQ ID NO: 28934
  source 1..226: note = Description of Artificial Sequence: Synthetic polypeptide; note = XENP020924 7G8_H3_L1.8_Fab Heavy Chain

SEQ ID NO: 29075 - protein, 121 aa, synthetic construct; identical to SEQ ID NO: 17806
  source 1..121: note = Description of Artificial Sequence: Synthetic polypeptide; note = VH of XENP020924

SEQ ID NO: 29076 - protein, 5 aa, synthetic construct
  source 1..5: note = Description of Artificial Sequence: Synthetic peptide; note = XENP020924 vhCDR1
DAWMD

SEQ ID NO: 29077 - protein, 19 aa, synthetic construct
  source 1..19: note = Description of Artificial Sequence: Synthetic peptide; note = XENP020924 vhCDR2
EIRTKANNHATYYAESVKG

SEQ ID NO: 29078 - protein, 10 aa, synthetic construct
  source 1..10: note = Description of Artificial Sequence: Synthetic peptide; note = XENP020924 vhCDR3
LANWDWYFDV

SEQ ID NO: 29079 - protein, 218 aa, synthetic construct
  source 1..218: note = Description of Artificial Sequence: Synthetic polypeptide; note = XENP020924 7G8_H3_L1.8_Fab Light Chain
DTVLTQSPSSLSASVGDRVTITCRASQSVDYDGDSYMNWYQQKPGKPPKLLIYSASELESGIPARLSGSGSGTDFTLTISSLQPEDFATYYCQQSNEDPFTFGSGTKLEIKRTVAAPSVFIFPPSDEQLKSGTASVVCLLNNFYPREAKVQWKVDNALQSGNSQESVTEQDSKDSTYSLSSTLTLSKADYEKHKVYACEVTHQGLSSPVTKSFNRGEC

SEQ ID NO: 29080 - protein, 111 aa, synthetic construct
  source 1..111: note = Description of Artificial Sequence: Synthetic polypeptide; note = VL of XENP020924
DTVLTQSPSSLSASVGDRVTITCRASQSVDYDGDSYMNWYQQKPGKPPKLLIYSASELESGIPARLSGSGSGTDFTLTISSLQPEDFATYYCQQSNEDPFTFGSGTKLEIK

SEQ ID NO: 29081 - protein, 15 aa, synthetic construct
  source 1..15: note = Description of Artificial Sequence: Synthetic peptide; note = XENP020924 vlCDR1
RASQSVDYDGDSYMN

SEQ ID NO: 29082 - protein, 7 aa, synthetic construct
  source 1..7: note = Description of Artificial Sequence: Synthetic peptide; note = XENP020924 vlCDR2
SASELES

SEQ ID NO: 29083 - protein, 9 aa, synthetic construct
  source 1..9: note = Description of Artificial Sequence: Synthetic peptide; note = XENP020924 vlCDR3
QQSNEDPFT

SEQ ID NO: 29084 - protein, 226 aa, synthetic construct; identical to SEQ ID NO: 28944
  source 1..226: note = Description of Artificial Sequence: Synthetic polypeptide; note = XENP020925 7G8_H3.1_L1.1_Fab Heavy Chain

SEQ ID NO: 29085 - protein, 121 aa, synthetic construct; identical to SEQ ID NO: 28945
  source 1..121: note = Description of Artificial Sequence: Synthetic polypeptide; note = VH of XENP020925

SEQ ID NO: 29086 - protein, 5 aa, synthetic construct
  source 1..5: note = Description of Artificial Sequence: Synthetic peptide; note = XENP020925 vhCDR1
DAWMD

SEQ ID NO: 29087 - protein, 19 aa, synthetic construct
  source 1..19: note = Description of Artificial Sequence: Synthetic peptide; note = XENP020925 vhCDR2
EIRTKANNHATYYAESVKG

SEQ ID NO: 29088 - protein, 10 aa, synthetic construct
  source 1..10: note = Description of Artificial Sequence: Synthetic peptide; note = XENP020925 vhCDR3
LATWDWYFDV

SEQ ID NO: 29089 - protein, 218 aa, synthetic construct; identical to SEQ ID NO: 29019
  source 1..218: note = Description of Artificial Sequence: Synthetic polypeptide; note = XENP020925 7G8_H3.1_L1.1_Fab Light Chain

SEQ ID NO: 29090 - protein, 111 aa, synthetic construct; identical to SEQ ID NO: 29020
  source 1..111: note = Description of Artificial Sequence: Synthetic polypeptide; note = VL of XENP020925

SEQ ID NO: 29091 - protein, 15 aa, synthetic construct
  source 1..15: note = Description of Artificial Sequence: Synthetic peptide; note = XENP020925 vlCDR1
RASQSVDYDDDSYMN

SEQ ID NO: 29092 - protein, 7 aa, synthetic construct
  source 1..7: note = Description of Artificial Sequence: Synthetic peptide; note = XENP020925 vlCDR2
GASELES

SEQ ID NO: 29093 - protein, 9 aa, synthetic construct
  source 1..9: note = Description of Artificial Sequence: Synthetic peptide; note = XENP020925 vlCDR3
QQSNEDPFT

SEQ ID NO: 29094 - protein, 226 aa, synthetic construct; identical to SEQ ID NO: 28944
  source 1..226: note = Description of Artificial Sequence: Synthetic polypeptide; note = XENP020926 7G8_H3.1_L1.5_Fab Heavy Chain

SEQ ID NO: 29095 - protein, 121 aa, synthetic construct; identical to SEQ ID NO: 28945
  source 1..121: note = Description of Artificial Sequence: Synthetic polypeptide; note = VH of XENP020926

SEQ ID NO: 29096 - protein, 5 aa, synthetic construct
  source 1..5: note = Description of Artificial Sequence: Synthetic peptide; note = XENP020926 vhCDR1
DAWMD

SEQ ID NO: 29097 - protein, 19 aa, synthetic construct
  source 1..19: note = Description of Artificial Sequence: Synthetic peptide; note = XENP020926 vhCDR2
EIRTKANNHATYYAESVKG

SEQ ID NO: 29098 - protein, 10 aa, synthetic construct
  source 1..10: note = Description of Artificial Sequence: Synthetic peptide; note = XENP020926 vhCDR3
LATWDWYFDV

SEQ ID NO: 29099 - protein, 218 aa, synthetic construct; identical to SEQ ID NO: 29059
  source 1..218: note = Description of Artificial Sequence: Synthetic polypeptide; note = XENP020926 7G8_H3.1_L1.5_Fab Light Chain

SEQ ID NO: 29100 - protein, 111 aa, synthetic construct; identical to SEQ ID NO: 29060
  source 1..111: note = Description of Artificial Sequence: Synthetic polypeptide; note = VL of XENP020926

SEQ ID NO: 29101 - protein, 15 aa, synthetic construct
  source 1..15: note = Description of Artificial Sequence: Synthetic peptide; note = XENP020926 vlCDR1
RASQSVDYDDDSYMN

SEQ ID NO: 29102 - protein, 7 aa, synthetic construct
  source 1..7: note = Description of Artificial Sequence: Synthetic peptide; note = XENP020926 vlCDR2
SASELES

SEQ ID NO: 29103 - protein, 9 aa, synthetic construct
  source 1..9: note = Description of Artificial Sequence: Synthetic peptide; note = XENP020926 vlCDR3
QQSNEDPFT

SEQ ID NO: 29104 - protein, 226 aa, synthetic construct; identical to SEQ ID NO: 28984
  source 1..226: note = Description of Artificial Sequence: Synthetic polypeptide; note = XENP020927 7G8_H3.5_L1.1_Fab Heavy Chain

SEQ ID NO: 29105 - protein, 121 aa, synthetic construct; identical to SEQ ID NO: 28985
  source 1..121: note = Description of Artificial Sequence: Synthetic polypeptide; note = VH of XENP020927

SEQ ID NO: 29106 - protein, 5 aa, synthetic construct
  source 1..5: note = Description of Artificial Sequence: Synthetic peptide; note = XENP020927 vhCDR1
DAWMD

SEQ ID NO: 29107 - protein, 19 aa, synthetic construct
  source 1..19: note = Description of Artificial Sequence: Synthetic peptide; note = XENP020927 vhCDR2
EIRTKANNHATYYAESVKG

SEQ ID NO: 29108 - protein, 10 aa, synthetic construct
  source 1..10: note = Description of Artificial Sequence: Synthetic peptide; note = XENP020927 vhCDR3
LATWDWYFDV

SEQ ID NO: 29109 - protein, 218 aa, synthetic construct; identical to SEQ ID NO: 29019
  source 1..218: note = Description of Artificial Sequence: Synthetic polypeptide; note = XENP020927 7G8_H3.5_L1.1_Fab Light Chain

SEQ ID NO: 29110 - protein, 111 aa, synthetic construct; identical to SEQ ID NO: 29020
  source 1..111: note = Description of Artificial Sequence: Synthetic polypeptide; note = VL of XENP020927

SEQ ID NO: 29111 - protein, 15 aa, synthetic construct
  source 1..15: note = Description of Artificial Sequence: Synthetic peptide; note = XENP020927 vlCDR1
RASQSVDYDDDSYMN

SEQ ID NO: 29112 - protein, 7 aa, synthetic construct
  source 1..7: note = Description of Artificial Sequence: Synthetic peptide; note = XENP020927 vlCDR2
GASELES

SEQ ID NO: 29113 - protein, 9 aa, synthetic construct
  source 1..9: note = Description of Artificial Sequence: Synthetic peptide; note = XENP020927 vlCDR3
QQSNEDPFT

SEQ ID NO: 29114 - protein, 226 aa, synthetic construct; identical to SEQ ID NO: 28984
  source 1..226: note = Description of Artificial Sequence: Synthetic polypeptide; note = XENP020928 7G8_H3.5_L1.5_Fab Heavy Chain

SEQ ID NO: 29115 - protein, 121 aa, synthetic construct; identical to SEQ ID NO: 28985
  source 1..121: note = Description of Artificial Sequence: Synthetic polypeptide; note = VH of XENP020928

SEQ ID NO: 29116 - protein, 5 aa, synthetic construct
  source 1..5: note = Description of Artificial Sequence: Synthetic peptide; note = XENP020928 vhCDR1
DAWMD

SEQ ID NO: 29117 - protein, 19 aa, synthetic construct
  source 1..19: note = Description of Artificial Sequence: Synthetic peptide; note = XENP020928 vhCDR2
EIRTKANNHATYYAESVKG

SEQ ID NO: 29118 - protein, 10 aa, synthetic construct
  source 1..10: note = Description of Artificial Sequence: Synthetic peptide; note = XENP020928 vhCDR3
LATWDWYFDV

SEQ ID NO: 29119 - protein, 218 aa, synthetic construct; identical to SEQ ID NO: 29059
  source 1..218: note = Description of Artificial Sequence: Synthetic polypeptide; note = XENP020928 7G8_H3.5_L1.5_Fab Light Chain

SEQ ID NO: 29120 - protein, 111 aa, synthetic construct; identical to SEQ ID NO: 29060
  source 1..111: note = Description of Artificial Sequence: Synthetic polypeptide; note = VL of XENP020928

SEQ ID NO: 29121 - protein, 15 aa, synthetic construct
  source 1..15: note = Description of Artificial Sequence: Synthetic peptide; note = XENP020928 vlCDR1
RASQSVDYDDDSYMN

SEQ ID NO: 29122 - protein, 7 aa, synthetic construct
  source 1..7: note = Description of Artificial Sequence: Synthetic peptide; note = XENP020928 vlCDR2
SASELES

SEQ ID NO: 29123 - protein, 9 aa, synthetic construct
  source 1..9: note = Description of Artificial Sequence: Synthetic peptide; note = XENP020928 vlCDR3
QQSNEDPFT

SEQ ID NO: 29124 - protein, 226 aa, synthetic construct; identical to SEQ ID NO: 28934
  source 1..226: note = Description of Artificial Sequence: Synthetic polypeptide; note = XENP020929 7G8_H3L0_Fab Heavy Chain

SEQ ID NO: 29125 - protein, 121 aa, synthetic construct; identical to SEQ ID NO: 17806
  source 1..121: note = Description of Artificial Sequence: Synthetic polypeptide; note = VH of XENP020929

SEQ ID NO: 29126 - protein, 5 aa, synthetic construct
  source 1..5: note = Description of Artificial Sequence: Synthetic peptide; note = XENP020929 vhCDR1
DAWMD

SEQ ID NO: 29127 - protein, 19 aa, synthetic construct
  source 1..19: note = Description of Artificial Sequence: Synthetic peptide; note = XENP020929 vhCDR2
EIRTKANNHATYYAESVKG

SEQ ID NO: 29128 - protein, 10 aa, synthetic construct
  source 1..10: note = Description of Artificial Sequence: Synthetic peptide; note = XENP020929 vhCDR3
LANWDWYFDV

SEQ ID NO: 29129 - protein, 218 aa, synthetic construct; identical to SEQ ID NO: 17590
  source 1..218: note = Description of Artificial Sequence: Synthetic polypeptide; note = XENP020929 7G8_H3L0_Fab Light Chain

SEQ ID NO: 29130 - protein, 111 aa, synthetic construct; identical to SEQ ID NO: 17591
  source 1..111: note = Description of Artificial Sequence: Synthetic polypeptide; note = VL of XENP020929

SEQ ID NO: 29131 - protein, 15 aa, synthetic construct
  source 1..15: note = Description of Artificial Sequence: Synthetic peptide; note = XENP020929 vlCDR1
KASQSVDYDGDSYMN

SEQ ID NO: 29132 - protein, 7 aa, synthetic construct
  source 1..7: note = Description of Artificial Sequence: Synthetic peptide; note = XENP020929 vlCDR2
AASNLES

SEQ ID NO: 29133 - protein, 9 aa, synthetic construct
  source 1..9: note = Description of Artificial Sequence: Synthetic peptide; note = XENP020929 vlCDR3
QQSNEDPFT

SEQ ID NO: 29134 - protein, 226 aa, synthetic construct
  source 1..226: note = Description of Artificial Sequence: Synthetic polypeptide; note = XENP020930 7G8_H0L0_Fab Heavy Chain
EVKLEESGGGLVQPGGSMKLSCAASGFTFSDAWMDWVRQSPEKGLEWVAEIRTKANNHATYYAESVKGRFTISRDDSKSSVYLQMNSLRAEDTGIYYCTRLANWDWYFDVWGAGTTVTVSSASTKGPSVFPLAPSSKSTSGGTAALGCLVKDYFPEPVTVSWNSGALTSGVHTFPAVLQSSGLYSLSSVVTVPSSSLGTQTYICNVNHKPSNTKVDKKVEPKSCGS

SEQ ID NO: 29135 - protein, 121 aa, synthetic construct; identical to SEQ ID NO: 17586
  source 1..121: note = Description of Artificial Sequence: Synthetic polypeptide; note = VH of XENP020930

SEQ ID NO: 29136 - protein, 5 aa, synthetic construct
  source 1..5: note = Description of Artificial Sequence: Synthetic peptide; note = XENP020930 vhCDR1
DAWMD

SEQ ID NO: 29137 - protein, 19 aa, synthetic construct
  source 1..19: note = Description of Artificial Sequence: Synthetic peptide; note = XENP020930 vhCDR2
EIRTKANNHATYYAESVKG

SEQ ID NO: 29138 - protein, 10 aa, synthetic construct
  source 1..10: note = Description of Artificial Sequence: Synthetic peptide; note = XENP020930 vhCDR3
LANWDWYFDV

SEQ ID NO: 29139 - protein, 218 aa, synthetic construct; identical to SEQ ID NO: 17590
  source 1..218: note = Description of Artificial Sequence: Synthetic polypeptide; note = XENP020930 7G8_H0L0_Fab Light Chain

SEQ ID NO: 29140 - protein, 111 aa, synthetic construct; identical to SEQ ID NO: 17591
  source 1..111: note = Description of Artificial Sequence: Synthetic polypeptide; note = VL of XENP020930

SEQ ID NO: 29141 - protein, 15 aa, synthetic construct
  source 1..15: note = Description of Artificial Sequence: Synthetic peptide; note = XENP020930 vlCDR1
KASQSVDYDGDSYMN

SEQ ID NO: 29142 - protein, 7 aa, synthetic construct
  source 1..7: note = Description of Artificial Sequence: Synthetic peptide; note = XENP020930 vlCDR2
AASNLES

SEQ ID NO: 29143 - protein, 9 aa, synthetic construct
  source 1..9: note = Description of Artificial Sequence: Synthetic peptide; note = XENP020930 vlCDR3
QQSNEDPFT

SEQ ID NO: 29144 - protein, 226 aa, synthetic construct
  source 1..226: note = Description of Artificial Sequence: Synthetic polypeptide; note = XENP020931 7G8_H1L0_Fab Heavy Chain
QVQLVQSGAEVKKPGASVKVSCKASGFTFSDAWMDWVRQAPGQGLEWMGEIRTKANNHATYYAEKFQGRVTMTRDDSTSTVYMELSSLRSEDTAVYYCTRLANWDWYFDVWGAGTTVTVSSASTKGPSVFPLAPSSKSTSGGTAALGCLVKDYFPEPVTVSWNSGALTSGVHTFPAVLQSSGLYSLSSVVTVPSSSLGTQTYICNVNHKPSNTKVDKKVEPKSCGS

SEQ ID NO: 29145 - protein, 121 aa, synthetic construct; identical to SEQ ID NO: 17596
  source 1..121: note = Description of Artificial Sequence: Synthetic polypeptide; note = VH of XENP020931

SEQ ID NO: 29146 - protein, 5 aa, synthetic construct
  source 1..5: note = Description of Artificial Sequence: Synthetic peptide; note = XENP020931 vhCDR1
DAWMD

SEQ ID NO: 29147 - protein, 19 aa, synthetic construct
  source 1..19: note = Description of Artificial Sequence: Synthetic peptide; note = XENP020931 vhCDR2
EIRTKANNHATYYAEKFQG

SEQ ID NO: 29148 - protein, 10 aa, synthetic construct
  source 1..10: note = Description of Artificial Sequence: Synthetic peptide; note = XENP020931 vhCDR3
LANWDWYFDV

SEQ ID NO: 29149 - protein, 218 aa, synthetic construct; identical to SEQ ID NO: 17590
  source 1..218: note = Description of Artificial Sequence: Synthetic polypeptide; note = XENP020931 7G8_H1L0_Fab Light Chain

SEQ ID NO: 29150 - protein, 111 aa, synthetic construct; identical to SEQ ID NO: 17591
  source 1..111: note = Description of Artificial Sequence: Synthetic polypeptide; note = VL of XENP020931

SEQ ID NO: 29151 - protein, 15 aa, synthetic construct
  source 1..15: note = Description of Artificial Sequence: Synthetic peptide; note = XENP020931 vlCDR1
KASQSVDYDGDSYMN

SEQ ID NO: 29152 - protein, 7 aa, synthetic construct
  source 1..7: note = Description of Artificial Sequence: Synthetic peptide; note = XENP020931 vlCDR2
AASNLES

SEQ ID NO: 29153 - protein, 9 aa, synthetic construct
  source 1..9: note = Description of Artificial Sequence: Synthetic peptide; note = XENP020931 vlCDR3
QQSNEDPFT

SEQ ID NO: 29154 - protein, 226 aa, synthetic construct
  source 1..226: note = Description of Artificial Sequence: Synthetic polypeptide; note = XENP020932 7G8_H2L0_Fab Heavy Chain
EVQLVESGGGLVQPGGSLRLSCAASGFTFSDAWMDWVRQAPGKGLEWVGEIRTKANNHATYYAESVKGRFTISRDDSKSSVYLQMNSLKTEDTAVYYCTRLANWDWYFDVWGAGTTVTVSSASTKGPSVFPLAPSSKSTSGGTAALGCLVKDYFPEPVTVSWNSGALTSGVHTFPAVLQSSGLYSLSSVVTVPSSSLGTQTYICNVNHKPSNTKVDKKVEPKSCGS

SEQ ID NO: 29155 - protein, 121 aa, synthetic construct; identical to SEQ ID NO: 17626
  source 1..121: note = Description of Artificial Sequence: Synthetic polypeptide; note = VH of XENP020932

SEQ ID NO: 29156 - protein, 5 aa, synthetic construct
  source 1..5: note = Description of Artificial Sequence: Synthetic peptide; note = XENP020932 vhCDR1
DAWMD

SEQ ID NO: 29157 - protein, 19 aa, synthetic construct
  source 1..19: note = Description of Artificial Sequence: Synthetic peptide; note = XENP020932 vhCDR2
EIRTKANNHATYYAESVKG

SEQ ID NO: 29158 - protein, 10 aa, synthetic construct
  source 1..10: note = Description of Artificial Sequence: Synthetic peptide; note = XENP020932 vhCDR3
LANWDWYFDV

SEQ ID NO: 29159 - protein, 218 aa, synthetic construct; identical to SEQ ID NO: 17590
  source 1..218: note = Description of Artificial Sequence: Synthetic polypeptide; note = XENP020932 7G8_H2L0_Fab Light Chain

SEQ ID NO: 29160 - protein, 111 aa, synthetic construct; identical to SEQ ID NO: 17591
  source 1..111: note = Description of Artificial Sequence: Synthetic polypeptide; note = VL of XENP020932

SEQ ID NO: 29161 - protein, 15 aa, synthetic construct
  source 1..15: note = Description of Artificial Sequence: Synthetic peptide; note = XENP020932 vlCDR1
KASQSVDYDGDSYMN

SEQ ID NO: 29162 - protein, 7 aa, synthetic construct
  source 1..7: note = Description of Artificial Sequence: Synthetic peptide; note = XENP020932 vlCDR2
AASNLES

SEQ ID NO: 29163 - protein, 9 aa, synthetic construct
  source 1..9: note = Description of Artificial Sequence: Synthetic peptide; note = XENP020932 vlCDR3
QQSNEDPFT

SEQ ID NO: 29164 - protein, 226 aa, synthetic construct
  source 1..226: note = Description of Artificial Sequence: Synthetic polypeptide; note = XENP020933 7G8_H0.1_L0_Fab Heavy Chain
EVKLEESGGGLVQPGGSMKLSCAASGYTFSDAWMDWVRQSPEKGLEWVAEIRTKANNHATYYAESVKGRFTISRDDSKSSVYLQMNSLRAEDTGIYYCTRLANWDWYFDVWGAGTTVTVSSASTKGPSVFPLAPSSKSTSGGTAALGCLVKDYFPEPVTVSWNSGALTSGVHTFPAVLQSSGLYSLSSVVTVPSSSLGTQTYICNVNHKPSNTKVDKKVEPKSCGS

SEQ ID NO: 29165 - protein, 121 aa, synthetic construct; identical to SEQ ID NO: 18216
  source 1..121: note = Description of Artificial Sequence: Synthetic polypeptide; note = VH of XENP020933

SEQ ID NO: 29166 - protein, 5 aa, synthetic construct
  source 1..5: note = Description of Artificial Sequence: Synthetic peptide; note = XENP020933 vhCDR1
DAWMD

SEQ ID NO: 29167 - protein, 19 aa, synthetic construct
  source 1..19: note = Description of Artificial Sequence: Synthetic peptide; note = XENP020933 vhCDR2
EIRTKANNHATYYAESVKG

SEQ ID NO: 29168 - protein, 10 aa, synthetic construct
  source 1..10: note = Description of Artificial Sequence: Synthetic peptide; note = XENP020933 vhCDR3
LANWDWYFDV

SEQ ID NO: 29169 - protein, 218 aa, synthetic construct; identical to SEQ ID NO: 17590
  source 1..218: note = Description of Artificial Sequence: Synthetic polypeptide; note = XENP020933 7G8_H0.1_L0_Fab Light Chain

SEQ ID NO: 29170 - protein, 111 aa, synthetic construct; identical to SEQ ID NO: 17591
  source 1..111: note = Description of Artificial Sequence: Synthetic polypeptide; note = VL of XENP020933

SEQ ID NO: 29171 - protein, 15 aa, synthetic construct
  source 1..15: note = Description of Artificial Sequence: Synthetic peptide; note = XENP020933 vlCDR1
KASQSVDYDGDSYMN

SEQ ID NO: 29172 - protein, 7 aa, synthetic construct
  source 1..7: note = Description of Artificial Sequence: Synthetic peptide; note = XENP020933 vlCDR2
AASNLES

SEQ ID NO: 29173 - protein, 9 aa, synthetic construct
  source 1..9: note = Description of Artificial Sequence: Synthetic peptide; note = XENP020933 vlCDR3
QQSNEDPFT

SEQ ID NO: 29174 - protein, 226 aa, synthetic construct
  source 1..226: note = Description of Artificial Sequence: Synthetic polypeptide; note = XENP020934 7G8_H0.2_L0_Fab Heavy Chain
EVKLEESGGGLVQPGGSMKLSCAASGGTFSDAWMDWVRQSPEKGLEWVAEIRTKANNHATYYAESVKGRFTISRDDSKSSVYLQMNSLRAEDTGIYYCTRLANWDWYFDVWGAGTTVTVSSASTKGPSVFPLAPSSKSTSGGTAALGCLVKDYFPEPVTVSWNSGALTSGVHTFPAVLQSSGLYSLSSVVTVPSSSLGTQTYICNVNHKPSNTKVDKKVEPKSCGS

SEQ ID NO: 29175 - protein, 121 aa, synthetic construct; identical to SEQ ID NO: 18226
  source 1..121: note = Description of Artificial Sequence: Synthetic polypeptide; note = VH of XENP020934

SEQ ID NO: 29176 - protein, 5 aa, synthetic construct
  source 1..5: note = Description of Artificial Sequence: Synthetic peptide; note = XENP020934 vhCDR1
DAWMD

SEQ ID NO: 29177 - protein, 19 aa, synthetic construct
  source 1..19: note = Description of Artificial Sequence: Synthetic peptide; note = XENP020934 vhCDR2
EIRTKANNHATYYAESVKG

SEQ ID NO: 29178 - protein, 10 aa, synthetic construct
  source 1..10: note = Description of Artificial Sequence: Synthetic peptide; note = XENP020934 vhCDR3
LANWDWYFDV

SEQ ID NO: 29179 - protein, 218 aa, synthetic construct; identical to SEQ ID NO: 17590
  source 1..218: note = Description of Artificial Sequence: Synthetic polypeptide; note = XENP020934 7G8_H0.2_L0_Fab Light Chain

SEQ ID NO: 29180 - protein, 111 aa, synthetic construct; identical to SEQ ID NO: 17591
  source 1..111: note = Description of Artificial Sequence: Synthetic polypeptide; note = VL of XENP020934

SEQ ID NO: 29181 - protein, 15 aa, synthetic construct
  source 1..15: note = Description of Artificial Sequence: Synthetic peptide; note = XENP020934 vlCDR1
KASQSVDYDGDSYMN

SEQ ID NO: 29182 - protein, 7 aa, synthetic construct
  source 1..7: note = Description of Artificial Sequence: Synthetic peptide; note = XENP020934 vlCDR2
AASNLES

SEQ ID NO: 29183 - protein, 9 aa, synthetic construct
  source 1..9: note = Description of Artificial Sequence: Synthetic peptide; note = XENP020934 vlCDR3
QQSNEDPFT

SEQ ID NO: 29184 - protein, 226 aa, synthetic construct
  source 1..226: note = Description of Artificial Sequence: Synthetic polypeptide; note = XENP020935 7G8_H0.3_L0_Fab Heavy Chain
EVKLEESGGGLVQPGGSMKLSCAASGDTFSDAWMDWVRQSPEKGLEWVAEIRTKANNHATYYAESVKGRFTISRDDSKSSVYLQMNSLRAEDTGIYYCTRLANWDWYFDVWGAGTTVTVSSASTKGPSVFPLAPSSKSTSGGTAALGCLVKDYFPEPVTVSWNSGALTSGVHTFPAVLQSSGLYSLSSVVTVPSSSLGTQTYICNVNHKPSNTKVDKKVEPKSCGS

SEQ ID NO: 29185 - protein, 121 aa, synthetic construct; identical to SEQ ID NO: 18236
  source 1..121: note = Description of Artificial Sequence: Synthetic polypeptide; note = VH of XENP020935

SEQ ID NO: 29186 - protein, 5 aa, synthetic construct
  source 1..5: note = Description of Artificial Sequence: Synthetic peptide; note = XENP020935 vhCDR1
DAWMD

SEQ ID NO: 29187 - protein, 19 aa, synthetic construct
  source 1..19: note = Description of Artificial Sequence: Synthetic peptide; note = XENP020935 vhCDR2
EIRTKANNHATYYAESVKG

SEQ ID NO: 29188 - protein, 10 aa, synthetic construct
  source 1..10: note = Description of Artificial Sequence: Synthetic peptide; note = XENP020935 vhCDR3
LANWDWYFDV

SEQ ID NO: 29189 - protein, 218 aa, synthetic construct; identical to SEQ ID NO: 17590
  source 1..218: note = Description of Artificial Sequence: Synthetic polypeptide; note = XENP020935 7G8_H0.3_L0_Fab Light Chain

SEQ ID NO: 29190 - protein, 111 aa, synthetic construct; identical to SEQ ID NO: 17591
  source 1..111: note = Description of Artificial Sequence: Synthetic polypeptide; note = VL of XENP020935

SEQ ID NO: 29191 - protein, 15 aa, synthetic construct
  source 1..15: note = Description of Artificial Sequence: Synthetic peptide; note = XENP020935 vlCDR1
KASQSVDYDGDSYMN

SEQ ID NO: 29192 - protein, 7 aa, synthetic construct
  source 1..7: note = Description of Artificial Sequence: Synthetic peptide; note = XENP020935 vlCDR2
AASNLES

SEQ ID NO: 29193 - protein, 9 aa, synthetic construct
  source 1..9: note = Description of Artificial Sequence: Synthetic peptide; note = XENP020935 vlCDR3
QQSNEDPFT

SEQ ID NO: 29194 - protein, 226 aa, synthetic construct
  source 1..226: note = Description of Artificial Sequence: Synthetic polypeptide; note = XENP020936 7G8_H0.4_L0_Fab Heavy Chain
EVKLEESGGGLVQPGGSMKLSCAASGFSFSDAWMDWVRQSPEKGLEWVAEIRTKANNHATYYAESVKGRFTISRDDSKSSVYLQMNSLRAEDTGIYYCTRLANWDWYFDVWGAGTTVTVSSASTKGPSVFPLAPSSKSTSGGTAALGCLVKDYFPEPVTVSWNSGALTSGVHTFPAVLQSSGLYSLSSVVTVPSSSLGTQTYICNVNHKPSNTKVDKKVEPKSCGS

SEQ ID NO: 29195 - protein, 121 aa, synthetic construct; identical to SEQ ID NO: 18246
  source 1..121: note = Description of Artificial Sequence: Synthetic polypeptide; note = VH of XENP020936

SEQ ID NO: 29196 - protein, 5 aa, synthetic construct
  source 1..5: note = Description of Artificial Sequence: Synthetic peptide; note = XENP020936 vhCDR1
DAWMD

SEQ ID NO: 29197 - protein, 19 aa, synthetic construct
  source 1..19: note = Description of Artificial Sequence: Synthetic peptide; note = XENP020936 vhCDR2
EIRTKANNHATYYAESVKG

SEQ ID NO: 29198 - protein, 10 aa, synthetic construct
  source 1..10: note = Description of Artificial Sequence: Synthetic peptide; note = XENP020936 vhCDR3
LANWDWYFDV

SEQ ID NO: 29199 - protein, 218 aa, synthetic construct; identical to SEQ ID NO: 17590
  source 1..218: note = Description of Artificial Sequence: Synthetic polypeptide; note = XENP020936 7G8_H0.4_L0_Fab Light Chain

SEQ ID NO: 29200 - protein, 111 aa, synthetic construct; identical to SEQ ID NO: 17591
  source 1..111: note = Description of Artificial Sequence: Synthetic polypeptide; note = VL of XENP020936

SEQ ID NO: 29201 - protein, 15 aa, synthetic construct
  source 1..15: note = Description of Artificial Sequence: Synthetic peptide; note = XENP020936 vlCDR1
KASQSVDYDGDSYMN

SEQ ID NO: 29202 - protein, 7 aa, synthetic construct
  source 1..7: note = Description of Artificial Sequence: Synthetic peptide; note = XENP020936 vlCDR2
AASNLES

SEQ ID NO: 29203 - protein, 9 aa, synthetic construct
  source 1..9: note = Description of Artificial Sequence: Synthetic peptide; note = XENP020936 vlCDR3
QQSNEDPFT

SEQ ID NO: 29204 - protein, 226 aa, synthetic construct
  source 1..226: note = Description of Artificial Sequence: Synthetic polypeptide; note = XENP020937 7G8_H0.5_L0_Fab Heavy Chain
EVKLEESGGGLVQPGGSMKLSCAASGFTFTDAWMDWVRQSPEKGLEWVAEIRTKANNHATYYAESVKGRFTISRDDSKSSVYLQMNSLRAEDTGIYYCTRLANWDWYFDVWGAGTTVTVSSASTKGPSVFPLAPSSKSTSGGTAALGCLVKDYFPEPVTVSWNSGALTSGVHTFPAVLQSSGLYSLSSVVTVPSSSLGTQTYICNVNHKPSNTKVDKKVEPKSCGS

SEQ ID NO: 29205 - protein, 121 aa, synthetic construct; identical to SEQ ID NO: 18256
  source 1..121: note = Description of Artificial Sequence: Synthetic polypeptide; note = VH of XENP020937

SEQ ID NO: 29206 - protein, 5 aa, synthetic construct
  source 1..5: note = Description of Artificial Sequence: Synthetic peptide; note = XENP020937 vhCDR1
DAWMD

SEQ ID NO: 29207 - protein, 19 aa, synthetic construct
  source 1..19: note = Description of Artificial Sequence: Synthetic peptide; note = XENP020937 vhCDR2
EIRTKANNHATYYAESVKG

SEQ ID NO: 29208 - protein, 10 aa, synthetic construct
  source 1..10: note = Description of Artificial Sequence: Synthetic peptide; note = XENP020937 vhCDR3
LANWDWYFDV

SEQ ID NO: 29209 - protein, 218 aa, synthetic construct; identical to SEQ ID NO: 17590
  source 1..218: note = Description of Artificial Sequence: Synthetic polypeptide; note = XENP020937 7G8_H0.5_L0_Fab Light Chain

SEQ ID NO: 29210 - protein, 111 aa, synthetic construct; identical to SEQ ID NO: 17591
  source 1..111: note = Description of Artificial Sequence: Synthetic polypeptide; note = VL of XENP020937

SEQ ID NO: 29211 - protein, 15 aa, synthetic construct
  source 1..15: note = Description of Artificial Sequence: Synthetic peptide; note = XENP020937 vlCDR1
KASQSVDYDGDSYMN

SEQ ID NO: 29212 - protein, 7 aa, synthetic construct
  source 1..7: note = Description of Artificial Sequence: Synthetic peptide; note = XENP020937 vlCDR2
AASNLES

SEQ ID NO: 29213 - protein, 9 aa, synthetic construct
  source 1..9: note = Description of Artificial Sequence: Synthetic peptide; note = XENP020937 vlCDR3
QQSNEDPFT

SEQ ID NO: 29214 - protein, 226 aa, synthetic construct
  source 1..226: note = Description of Artificial Sequence: Synthetic polypeptide; note = XENP020938 7G8_H0.6_L0_Fab Heavy Chain
EVKLEESGGGLVQPGGSMKLSCAASGFTFDDAWMDWVRQSPEKGLEWVAEIRTKANNHATYYAESVKGRFTISRDDSKSSVYLQMNSLRAEDTGIYYCTRLANWDWYFDVWGAGTTVTVSSASTKGPSVFPLAPSSKSTSGGTAALGCLVKDYFPEPVTVSWNSGALTSGVHTFPAVLQSSGLYSLSSVVTVPSSSLGTQTYICNVNHKPSNTKVDKKVEPKSCGS

SEQ ID NO: 29215 - protein, 121 aa, synthetic construct; identical to SEQ ID NO: 18266
  source 1..121: note = Description of Artificial Sequence: Synthetic polypeptide; note = VH of XENP020938

SEQ ID NO: 29216 - protein, 5 aa, synthetic construct
  source 1..5: note = Description of Artificial Sequence: Synthetic peptide; note = XENP020938 vhCDR1
DAWMD

SEQ ID NO: 29217 - protein, 19 aa, synthetic construct
  source 1..19: note = Description of Artificial Sequence: Synthetic peptide; note = XENP020938 vhCDR2
EIRTKANNHATYYAESVKG

SEQ ID NO: 29218 - protein, 10 aa, synthetic construct
  source 1..10: note = Description of Artificial Sequence: Synthetic peptide; note = XENP020938 vhCDR3
LANWDWYFDV

SEQ ID NO: 29219 - protein, 218 aa, synthetic construct; identical to SEQ ID NO: 17590
  source 1..218: note = Description of Artificial Sequence: Synthetic polypeptide; note = XENP020938 7G8_H0.6_L0_Fab Light Chain

SEQ ID NO: 29220 - protein, 111 aa, synthetic construct; identical to SEQ ID NO: 17591
  source 1..111: note = Description of Artificial Sequence: Synthetic polypeptide; note = VL of XENP020938

SEQ ID NO: 29221 - protein, 15 aa, synthetic construct
  source 1..15: note = Description of Artificial Sequence: Synthetic peptide; note = XENP020938 vlCDR1
KASQSVDYDGDSYMN

SEQ ID NO: 29222 - protein, 7 aa, synthetic construct
  source 1..7: note = Description of Artificial Sequence: Synthetic peptide; note = XENP020938 vlCDR2
AASNLES

SEQ ID NO: 29223 - protein, 9 aa, synthetic construct
  source 1..9: note = Description of Artificial Sequence: Synthetic peptide; note = XENP020938 vlCDR3
QQSNEDPFT

SEQ ID NO: 29224 - protein, 226 aa, synthetic construct
  source 1..226: note = Description of Artificial Sequence: Synthetic polypeptide; note = XENP020939 7G8_H0.7_L0_Fab Heavy Chain
EVKLEESGGGLVQPGGSMKLSCAASGFTFGDAWMDWVRQSPEKGLEWVAEIRTKANNHATYYAESVKGRFTISRDDSKSSVYLQMNSLRAEDTGIYYCTRLANWDWYFDVWGAGTTVTVSSASTKGPSVFPLAPSSKSTSGGTAALGCLVKDYFPEPVTVSWNSGALTSGVHTFPAVLQSSGLYSLSSVVTVPSSSLGTQTYICNVNHKPSNTKVDKKVEPKSCGS

SEQ ID NO: 29225 - protein, 121 aa, synthetic construct; identical to SEQ ID NO: 18276
  source 1..121: note = Description of Artificial Sequence: Synthetic polypeptide; note = VH of XENP020939

SEQ ID NO: 29226 - protein, 5 aa, synthetic construct
  source 1..5: note = Description of Artificial Sequence: Synthetic peptide; note = XENP020939 vhCDR1
DAWMD

SEQ ID NO: 29227 - protein, 19 aa, synthetic construct
  source 1..19: note = Description of Artificial Sequence: Synthetic peptide; note = XENP020939 vhCDR2
EIRTKANNHATYYAESVKG

SEQ ID NO: 29228 - protein, 10 aa, synthetic construct
  source 1..10: note = Description of Artificial Sequence: Synthetic peptide; note = XENP020939 vhCDR3
LANWDWYFDV

SEQ ID NO: 29229 - protein, 218 aa, synthetic construct; identical to SEQ ID NO: 17590
  source 1..218: note = Description of Artificial Sequence: Synthetic polypeptide; note = XENP020939 7G8_H0.7_L0_Fab Light Chain

SEQ ID NO: 29230 - protein, 111 aa, synthetic construct; identical to SEQ ID NO: 17591
  source 1..111: note = Description of Artificial Sequence: Synthetic polypeptide; note = VL of XENP020939

SEQ ID NO: 29231 - protein, 15 aa, synthetic construct
  source 1..15: note = Description of Artificial Sequence: Synthetic peptide; note = XENP020939 vlCDR1
KASQSVDYDGDSYMN

SEQ ID NO: 29232 - protein, 7 aa, synthetic construct
  source 1..7: note = Description of Artificial Sequence: Synthetic peptide; note = XENP020939 vlCDR2
AASNLES

SEQ ID NO: 29233 - protein, 9 aa, synthetic construct
  source 1..9: note = Description of Artificial Sequence: Synthetic peptide; note = XENP020939 vlCDR3
QQSNEDPFT

SEQ ID NO: 29234 - protein, 226 aa, synthetic construct
  source 1..226: note = Description of Artificial Sequence: Synthetic polypeptide; note = XENP020940 7G8_H0.8_L0_Fab Heavy Chain
EVKLEESGGGLVQPGGSMKLSCAASGFTFSNAWMDWVRQSPEKGLEWVAEIRTKANNHATYYAESVKGRFTISRDDSKSSVYLQMNSLRAEDTGIYYCTRLANWDWYFDVWGAGTTVTVSSASTKGPSVFPLAPSSKSTSGGTAALGCLVKDYFPEPVTVSWNSGALTSGVHTFPAVLQSSGLYSLSSVVTVPSSSLGTQTYICNVNHKPSNTKVDKKVEPKSCGS

SEQ ID NO: 29235 - protein, 121 aa, synthetic construct; identical to SEQ ID NO: 18286
  source 1..121: note = Description of Artificial Sequence: Synthetic polypeptide; note = VH of XENP020940

SEQ ID NO: 29236 - protein, 5 aa, synthetic construct
  source 1..5: note = Description of Artificial Sequence: Synthetic peptide; note = XENP020940 vhCDR1
NAWMD

SEQ ID NO: 29237 - protein, 19 aa, synthetic construct
  source 1..19: note = Description of Artificial Sequence: Synthetic peptide; note = XENP020940 vhCDR2
EIRTKANNHATYYAESVKG

SEQ ID NO: 29238 - protein, 10 aa, synthetic construct
  source 1..10: note = Description of Artificial Sequence: Synthetic peptide; note = XENP020940 vhCDR3
LANWDWYFDV

SEQ ID NO: 29239 - protein, 218 aa, synthetic construct; identical to SEQ ID NO: 17590
  source 1..218: note = Description of Artificial Sequence: Synthetic polypeptide; note = XENP020940 7G8_H0.8_L0_Fab Light Chain

SEQ ID NO: 29240 - protein, 111 aa, synthetic construct; identical to SEQ ID NO: 17591
  source 1..111: note = Description of Artificial Sequence: Synthetic polypeptide; note = VL of XENP020940

SEQ ID NO: 29241 - protein, 15 aa, synthetic construct
  source 1..15: note = Description of Artificial Sequence: Synthetic peptide; note = XENP020940 vlCDR1
KASQSVDYDGDSYMN

SEQ ID NO: 29242 - protein, 7 aa, synthetic construct
  source 1..7: note = Description of Artificial Sequence: Synthetic peptide; note = XENP020940 vlCDR2
AASNLES

SEQ ID NO: 29243 - protein, 9 aa, synthetic construct
  source 1..9: note = Description of Artificial Sequence: Synthetic peptide; note = XENP020940 vlCDR3
QQSNEDPFT

SEQ ID NO: 29244 - protein, 226 aa, synthetic construct
  source 1..226: note = Description of Artificial Sequence: Synthetic polypeptide; note = XENP020941 7G8_H0.9_L0_Fab Heavy Chain
EVKLEESGGGLVQPGGSMKLSCAASGFTFSEAWMDWVRQSPEKGLEWVAEIRTKANNHATYYAESVKGRFTISRDDSKSSVYLQMNSLRAEDTGIYYCTRLANWDWYFDVWGAGTTVTVSSASTKGPSVFPLAPSSKSTSGGTAALGCLVKDYFPEPVTVSWNSGALTSGVHTFPAVLQSSGLYSLSSVVTVPSSSLGTQTYICNVNHKPSNTKVDKKVEPKSCGS

SEQ ID NO: 29245 - protein, 121 aa, synthetic construct; identical to SEQ ID NO: 18296
  source 1..121: note = Description of Artificial Sequence: Synthetic polypeptide; note = VH of XENP020941

SEQ ID NO: 29246 - protein, 5 aa, synthetic construct
  source 1..5: note = Description of Artificial Sequence: Synthetic peptide; note = XENP020941 vhCDR1
EAWMD

SEQ ID NO: 29247 - protein, 19 aa, synthetic construct
  source 1..19: note = Description of Artificial Sequence: Synthetic peptide; note = XENP020941 vhCDR2
EIRTKANNHATYYAESVKG

SEQ ID NO: 29248 - protein, 10 aa, synthetic construct
  source 1..10: note = Description of Artificial Sequence: Synthetic peptide; note = XENP020941 vhCDR3
LANWDWYFDV

SEQ ID NO: 29249 - protein, 218 aa, synthetic construct; identical to SEQ ID NO: 17590
  source 1..218: note = Description of Artificial Sequence: Synthetic polypeptide; note = XENP020941 7G8_H0.9_L0_Fab Light Chain

SEQ ID NO: 29250 - protein, 111 aa, synthetic construct; identical to SEQ ID NO: 17591
  source 1..111: note = Description of Artificial Sequence: Synthetic polypeptide; note = VL of XENP020941

SEQ ID NO: 29251 - protein, 15 aa, synthetic construct
  source 1..15: note = Description of Artificial Sequence: Synthetic peptide; note = XENP020941 vlCDR1
KASQSVDYDGDSYMN

SEQ ID NO: 29252 - protein, 7 aa, synthetic construct
  source 1..7: note = Description of Artificial Sequence: Synthetic peptide; note = XENP020941 vlCDR2
AASNLES

SEQ ID NO: 29253 - protein, 9 aa, synthetic construct
  source 1..9: note = Description of Artificial Sequence: Synthetic peptide; note = XENP020941 vlCDR3
QQSNEDPFT

SEQ ID NO: 29254 - protein, 226 aa, synthetic construct
  source 1..226: note = Description of Artificial Sequence: Synthetic polypeptide; note = XENP020942 7G8_H0.10_L0_Fab Heavy Chain
EVKLEESGGGLVQPGGSMKLSCAASGFTFSHAWMDWVRQSPEKGLEWVAEIRTKANNHATYYAESVKGRFTISRDDSKSSVYLQMNSLRAEDTGIYYCTRLANWDWYFDVWGAGTTVTVSSASTKGPSVFPLAPSSKSTSGGTAALGCLVKDYFPEPVTVSWNSGALTSGVHTFPAVLQSSGLYSLSSVVTVPSSSLGTQTYICNVNHKPSNTKVDKKVEPKSCGS

SEQ ID NO: 29255 - protein, 121 aa, synthetic construct; identical to SEQ ID NO: 18306
  source 1..121: note = Description of Artificial Sequence: Synthetic polypeptide; note = VH of XENP020942

SEQ ID NO: 29256 - protein, 5 aa, synthetic construct
  source 1..5: note = Description of Artificial Sequence: Synthetic peptide; note = XENP020942 vhCDR1
HAWMD

SEQ ID NO: 29257 - protein, 19 aa, synthetic construct
  source 1..19: note = Description of Artificial Sequence: Synthetic peptide; note = XENP020942 vhCDR2
EIRTKANNHATYYAESVKG

SEQ ID NO: 29258 - protein, 10 aa, synthetic construct
  source 1..10: note = Description of Artificial Sequence: Synthetic peptide; note = XENP020942 vhCDR3
LANWDWYFDV

SEQ ID NO: 29259 - protein, 218 aa, synthetic construct; identical to SEQ ID NO: 17590
  source 1..218: note = Description of Artificial Sequence: Synthetic polypeptide; note = XENP020942 7G8_H0.10_L0_Fab Light Chain

SEQ ID NO: 29260 - protein, 111 aa, synthetic construct; identical to SEQ ID NO: 17591
  source 1..111: note = Description of Artificial Sequence: Synthetic polypeptide; note = VL of XENP020942

SEQ ID NO: 29261 - protein, 15 aa, synthetic construct
  source 1..15: note = Description of Artificial Sequence: Synthetic peptide; note = XENP020942 vlCDR1
KASQSVDYDGDSYMN

SEQ ID NO: 29262 - protein, 7 aa, synthetic construct
  source 1..7: note = Description of Artificial Sequence: Synthetic peptide; note = XENP020942 vlCDR2
AASNLES

SEQ ID NO: 29263 - protein, 9 aa, synthetic construct
  source 1..9: note = Description of Artificial Sequence: Synthetic peptide; note = XENP020942 vlCDR3
QQSNEDPFT

SEQ ID NO: 29264 - protein, 226 aa, synthetic construct
  source 1..226: note = Description of Artificial Sequence: Synthetic polypeptide; note = XENP020943 7G8_H0.11_L0_Fab Heavy Chain
EVKLEESGGGLVQPGGSMKLSCAASGFTFSSAWMDWVRQSPEKGLEWVAEIRTKANNHATYYAESVKGRFTISRDDSKSSVYLQMNSLRAEDTGIYYCTRLANWDWYFDVWGAGTTVTVSSASTKGPSVFPLAPSSKSTSGGTAALGCLVKDYFPEPVTVSWNSGALTSGVHTFPAVLQSSGLYSLSSVVTVPSSSLGTQTYICNVNHKPSNTKVDKKVEPKSCGS

SEQ ID NO: 29265 - protein, 121 aa, synthetic construct; identical to SEQ ID NO: 18316
  source 1..121: note = Description of Artificial Sequence: Synthetic polypeptide; note = VH of XENP020943

SEQ ID NO: 29266 - protein, 5 aa, synthetic construct
  source 1..5: note = Description of Artificial Sequence: Synthetic peptide; note = XENP020943 vhCDR1
SAWMD

SEQ ID NO: 29267 - protein, 19 aa, synthetic construct
  source 1..19: note = Description of Artificial Sequence: Synthetic peptide; note = XENP020943 vhCDR2
EIRTKANNHATYYAESVKG

SEQ ID NO: 29268 - protein, 10 aa, synthetic construct
  source 1..10: note = Description of Artificial Sequence: Synthetic peptide; note = XENP020943 vhCDR3
LANWDWYFDV

SEQ ID NO: 29269 - protein, 218 aa, synthetic construct; identical to SEQ ID NO: 17590
  source 1..218: note = Description of Artificial Sequence: Synthetic polypeptide; note = XENP020943 7G8_H0.11_L0_Fab Light Chain

SEQ ID NO: 29270 - protein, 111 aa, synthetic construct; identical to SEQ ID NO: 17591
  source 1..111: note = Description of Artificial Sequence: Synthetic polypeptide; note = VL of XENP020943

SEQ ID NO: 29271 - protein, 15 aa, synthetic construct
  source 1..15: note = Description of Artificial Sequence: Synthetic peptide; note = XENP020943 vlCDR1
KASQSVDYDGDSYMN

SEQ ID NO: 29272 - protein, 7 aa, synthetic construct
  source 1..7: note = Description of Artificial Sequence: Synthetic peptide; note = XENP020943 vlCDR2
AASNLES

SEQ ID NO: 29273 - protein, 9 aa, synthetic construct
  source 1..9: note = Description of Artificial Sequence: Synthetic peptide; note = XENP020943 vlCDR3
QQSNEDPFT

SEQ ID NO: 29274 - protein, 226 aa, synthetic construct
  source 1..226: note = Description of Artificial Sequence: Synthetic polypeptide; note = XENP020944 7G8_H0.12_L0_Fab Heavy Chain
EVKLEESGGGLVQPGGSMKLSCAASGFTFSRAWMDWVRQSPEKGLEWVAEIRTKANNHATYYAESVKGRFTISRDDSKSSVYLQMNSLRAEDTGIYYCTRLANWDWYFDVWGAGTTVTVSSASTKGPSVFPLAPSSKSTSGGTAALGCLVKDYFPEPVTVSWNSGALTSGVHTFPAVLQSSGLYSLSSVVTVPSSSLGTQTYICNVNHKPSNTKVDKKVEPKSCGS

SEQ ID NO: 29275 - protein, 121 aa, synthetic construct; identical to SEQ ID NO: 18326
  source 1..121: note = Description of Artificial Sequence: Synthetic polypeptide; note = VH of XENP020944

SEQ ID NO: 29276 - protein, 5 aa, synthetic construct
  source 1..5: note = Description of Artificial Sequence: Synthetic peptide; note = XENP020944 vhCDR1
RAWMD

SEQ ID NO: 29277 - protein, 19 aa, synthetic construct
  source 1..19: note = Description of Artificial Sequence: Synthetic peptide; note = XENP020944 vhCDR2
EIRTKANNHATYYAESVKG

SEQ ID NO: 29278 - protein, 10 aa, synthetic construct
  source 1..10: note = Description of Artificial Sequence: Synthetic peptide; note = XENP020944 vhCDR3
LANWDWYFDV

SEQ ID NO: 29279 - protein, 218 aa, synthetic construct; identical to SEQ ID NO: 17590
  source 1..218: note = Description of Artificial Sequence: Synthetic polypeptide; note = XENP020944 7G8_H0.12_L0_Fab Light Chain

SEQ ID NO: 29280 - protein, 111 aa, synthetic construct; identical to SEQ ID NO: 17591
  source 1..111: note = Description of Artificial Sequence: Synthetic polypeptide; note = VL of XENP020944

SEQ ID NO: 29281 - protein, 15 aa, synthetic construct
  source 1..15: note = Description of Artificial Sequence: Synthetic peptide; note = XENP020944 vlCDR1
KASQSVDYDGDSYMN

SEQ ID NO: 29282 - protein, 7 aa, synthetic construct
  source 1..7: note = Description of Artificial Sequence: Synthetic peptide; note = XENP020944 vlCDR2
AASNLES

SEQ ID NO: 29283 - protein, 9 aa, synthetic construct
  source 1..9: note = Description of Artificial Sequence: Synthetic peptide; note = XENP020944 vlCDR3
QQSNEDPFT

SEQ ID NO: 29284 - protein, 226 aa, synthetic construct
  source 1..226: note = Description of Artificial Sequence: Synthetic polypeptide; note = XENP020945 7G8_H0.13_L0_Fab Heavy Chain
EVKLEESGGGLVQPGGSMKLSCAASGFTFSLAWMDWVRQSPEKGLEWVAEIRTKANNHATYYAESVKGRFTISRDDSKSSVYLQMNSLRAEDTGIYYCTRLANWDWYFDVWGAGTTVTVSSASTKGPSVFPLAPSSKSTSGGTAALGCLVKDYFPEPVTVSWNSGALTSGVHTFPAVLQSSGLYSLSSVVTVPSSSLGTQTYICNVNHKPSNTKVDKKVEPKSCGS

SEQ ID NO: 29285 - protein, 121 aa, synthetic construct; identical to SEQ ID NO: 18336
  source 1..121: note = Description of Artificial Sequence: Synthetic polypeptide; note = VH of XENP020945

SEQ ID NO: 29286 - protein, 5 aa, synthetic construct
  source 1..5: note = Description of Artificial Sequence: Synthetic peptide; note = XENP020945 vhCDR1
LAWMD

SEQ ID NO: 29287 - protein, 19 aa, synthetic construct
  source 1..19: note = Description of Artificial Sequence: Synthetic peptide; note = XENP020945 vhCDR2
EIRTKANNHATYYAESVKG

SEQ ID NO: 29288 - protein, 10 aa, synthetic construct
  source 1..10: note = Description of Artificial Sequence: Synthetic peptide; note = XENP020945 vhCDR3
LANWDWYFDV

SEQ ID NO: 29289 - protein, 218 aa, synthetic construct; identical to SEQ ID NO: 17590
  source 1..218: note = Description of Artificial Sequence: Synthetic polypeptide; note = XENP020945 7G8_H0.13_L0_Fab Light Chain

SEQ ID NO: 29290 - protein, 111 aa, synthetic construct; identical to SEQ ID NO: 17591
  source 1..111: note = Description of Artificial Sequence: Synthetic polypeptide; note = VL of XENP020945

SEQ ID NO: 29291 - protein, 15 aa, synthetic construct
  source 1..15: note = Description of Artificial Sequence: Synthetic peptide; note = XENP020945 vlCDR1
KASQSVDYDGDSYMN

SEQ ID NO: 29292 - protein, 7 aa, synthetic construct
  source 1..7: note = Description of Artificial Sequence: Synthetic peptide; note = XENP020945 vlCDR2
AASNLES

SEQ ID NO: 29293 - protein, 9 aa, synthetic construct
  source 1..9: note = Description of Artificial Sequence: Synthetic peptide; note = XENP020945 vlCDR3
QQSNEDPFT

SEQ ID NO: 29294 - protein, 226 aa, synthetic construct
  source 1..226: note = Description of Artificial Sequence: Synthetic polypeptide; note = XENP020946 7G8_H0.14_L0_Fab Heavy Chain
EVKLEESGGGLVQPGGSMKLSCAASGFTFSTAWMDWVRQSPEKGLEWVAEIRTKANNHATYYAESVKGRFTISRDDSKSSVYLQMNSLRAEDTGIYYCTRLANWDWYFDVWGAGTTVTVSSASTKGPSVFPLAPSSKSTSGGTAALGCLVKDYFPEPVTVSWNSGALTSGVHTFPAVLQSSGLYSLSSVVTVPSSSLGTQTYICNVNHKPSNTKVDKKVEPKSCGS

SEQ ID NO: 29295 - protein, 121 aa, synthetic construct; identical to SEQ ID NO: 18346
  source 1..121: note = Description of Artificial Sequence: Synthetic polypeptide; note = VH of XENP020946

SEQ ID NO: 29296 - protein, 5 aa, synthetic construct
  source 1..5: note = Description of Artificial Sequence: Synthetic peptide; note = XENP020946 vhCDR1
TAWMD

SEQ ID NO: 29297 - protein, 19 aa, synthetic construct
  source 1..19: note = Description of Artificial Sequence: Synthetic peptide; note = XENP020946 vhCDR2
EIRTKANNHATYYAESVKG

SEQ ID NO: 29298 - protein, 10 aa, synthetic construct
  source 1..10: note = Description of Artificial Sequence: Synthetic peptide; note = XENP020946 vhCDR3
LANWDWYFDV

SEQ ID NO: 29299 - protein, 218 aa, synthetic construct; identical to SEQ ID NO: 17590
  source 1..218: note = Description of Artificial Sequence: Synthetic polypeptide; note = XENP020946 7G8_H0.14_L0_Fab Light Chain

SEQ ID NO: 29300 - protein, 111 aa, synthetic construct; identical to SEQ ID NO: 17591
  source 1..111: note = Description of Artificial Sequence: Synthetic polypeptide; note = VL of XENP020946

SEQ ID NO: 29301 - protein, 15 aa, synthetic construct
  source 1..15: note = Description of Artificial Sequence: Synthetic peptide; note = XENP020946 vlCDR1
KASQSVDYDGDSYMN

SEQ ID NO: 29302 - protein, 7 aa, synthetic construct
  source 1..7: note = Description of Artificial Sequence: Synthetic peptide; note = XENP020946 vlCDR2
AASNLES

SEQ ID NO: 29303 - protein, 9 aa, synthetic construct
  source 1..9: note = Description of Artificial Sequence: Synthetic peptide; note = XENP020946 vlCDR3
QQSNEDPFT

SEQ ID NO: 29304 - protein, 226 aa, synthetic construct
  source 1..226: note = Description of Artificial Sequence: Synthetic polypeptide; note = XENP020947 7G8_H0.15_L0_Fab Heavy Chain
EVKLEESGGGLVQPGGSMKLSCAASGFTFSGAWMDWVRQSPEKGLEWVAEIRTKANNHATYYAESVKGRFTISRDDSKSSVYLQMNSLRAEDTGIYYCTRLANWDWYFDVWGAGTTVTVSSASTKGPSVFPLAPSSKSTSGGTAALGCLVKDYFPEPVTVSWNSGALTSGVHTFPAVLQSSGLYSLSSVVTVPSSSLGTQTYICNVNHKPSNTKVDKKVEPKSCGS

SEQ ID NO: 29305 - protein, 121 aa, synthetic construct; identical to SEQ ID NO: 18356
  source 1..121: note = Description of Artificial Sequence: Synthetic polypeptide; note = VH of XENP020947

SEQ ID NO: 29306 - protein, 5 aa, synthetic construct
  source 1..5: note = Description of Artificial Sequence: Synthetic peptide; note = XENP020947 vhCDR1
GAWMD

SEQ ID NO: 29307 - protein, 19 aa, synthetic construct
  source 1..19: note = Description of Artificial Sequence: Synthetic peptide; note = XENP020947 vhCDR2
EIRTKANNHATYYAESVKG

SEQ ID NO: 29308 - protein, 10 aa, synthetic construct
  source 1..10: note = Description of Artificial Sequence: Synthetic peptide; note = XENP020947 vhCDR3
LANWDWYFDV

SEQ ID NO: 29309 - protein, 218 aa, synthetic construct; identical to SEQ ID NO: 17590
  source 1..218: note = Description of Artificial Sequence: Synthetic polypeptide; note = XENP020947 7G8_H0.15_L0_Fab Light Chain

SEQ ID NO: 29310 - protein, 111 aa, synthetic construct; identical to SEQ ID NO: 17591
  source 1..111: note = Description of Artificial Sequence: Synthetic polypeptide; note = VL of XENP020947

SEQ ID NO: 29311 - protein, 15 aa, synthetic construct
  source 1..15: note = Description of Artificial Sequence: Synthetic peptide; note = XENP020947 vlCDR1
KASQSVDYDGDSYMN

SEQ ID NO: 29312 - protein, 7 aa, synthetic construct
  source 1..7: note = Description of Artificial Sequence: Synthetic peptide; note = XENP020947 vlCDR2
AASNLES

SEQ ID NO: 29313 - protein, 9 aa, synthetic construct
  source 1..9: note = Description of Artificial Sequence: Synthetic peptide; note = XENP020947 vlCDR3
QQSNEDPFT

SEQ ID NO: 29314 - protein, 226 aa, synthetic construct
  source 1..226: note = Description of Artificial Sequence: Synthetic polypeptide; note = XENP020948 7G8_H0.17_L0_Fab Heavy Chain
EVKLEESGGGLVQPGGSMKLSCAASGFTFSDSWMDWVRQSPEKGLEWVAEIRTKANNHATYYAESVKGRFTISRDDSKSSVYLQMNSLRAEDTGIYYCTRLANWDWYFDVWGAGTTVTVSSASTKGPSVFPLAPSSKSTSGGTAALGCLVKDYFPEPVTVSWNSGALTSGVHTFPAVLQSSGLYSLSSVVTVPSSSLGTQTYICNVNHKPSNTKVDKKVEPKSCGS

SEQ ID NO: 29315 - protein, 121 aa, synthetic construct; identical to SEQ ID NO: 18376
  source 1..121: note = Description of Artificial Sequence: Synthetic polypeptide; note = VH of XENP020948

SEQ ID NO: 29316 - protein, 5 aa, synthetic construct
  source 1..5: note = Description of Artificial Sequence: Synthetic peptide; note = XENP020948 vhCDR1
DSWMD

SEQ ID NO: 29317 - protein, 19 aa, synthetic construct
  source 1..19: note = Description of Artificial Sequence: Synthetic peptide; note = XENP020948 vhCDR2
EIRTKANNHATYYAESVKG

SEQ ID NO: 29318 - protein, 10 aa, synthetic construct
  source 1..10: note = Description of Artificial Sequence: Synthetic peptide; note = XENP020948 vhCDR3
LANWDWYFDV

SEQ ID NO: 29319 - protein, 218 aa, synthetic construct; identical to SEQ ID NO: 17590
  source 1..218: note = Description of Artificial Sequence: Synthetic polypeptide; note = XENP020948 7G8_H0.17_L0_Fab Light Chain

SEQ ID NO: 29320 - protein, 111 aa, synthetic construct; identical to SEQ ID NO: 17591
  source 1..111: note = Description of Artificial Sequence: Synthetic polypeptide; note = VL of XENP020948

SEQ ID NO: 29321 - protein, 15 aa, synthetic construct
  source 1..15: note = Description of Artificial Sequence: Synthetic peptide; note = XENP020948 vlCDR1
KASQSVDYDGDSYMN

SEQ ID NO: 29322 - protein, 7 aa, synthetic construct
  source 1..7: note = Description of Artificial Sequence: Synthetic peptide; note = XENP020948 vlCDR2
AASNLES

SEQ ID NO: 29323 - protein, 9 aa, synthetic construct
  source 1..9: note = Description of Artificial Sequence: Synthetic peptide; note = XENP020948 vlCDR3
QQSNEDPFT

SEQ ID NO: 29324 - protein, 226 aa, synthetic construct
  source 1..226: note = Description of Artificial Sequence: Synthetic polypeptide; note = XENP020949 7G8_H0.18_L0_Fab Heavy Chain
EVKLEESGGGLVQPGGSMKLSCAASGFTFSDTWMDWVRQSPEKGLEWVAEIRTKANNHATYYAESVKGRFTISRDDSKSSVYLQMNSLRAEDTGIYYCTRLANWDWYFDVWGAGTTVTVSSASTKGPSVFPLAPSSKSTSGGTAALGCLVKDYFPEPVTVSWNSGALTSGVHTFPAVLQSSGLYSLSSVVTVPSSSLGTQTYICNVNHKPSNTKVDKKVEPKSCGS

SEQ ID NO: 29325 - protein, 121 aa, synthetic construct; identical to SEQ ID NO: 18386
  source 1..121: note = Description of Artificial Sequence: Synthetic polypeptide; note = VH of XENP020949

SEQ ID NO: 29326 - protein, 5 aa, synthetic construct
  source 1..5: note = Description of Artificial Sequence: Synthetic peptide; note = XENP020949 vhCDR1
DTWMD

SEQ ID NO: 29327 - protein, 19 aa, synthetic construct
  source 1..19: note = Description of Artificial Sequence: Synthetic peptide; note = XENP020949 vhCDR2
EIRTKANNHATYYAESVKG

SEQ ID NO: 29328 - protein, 10 aa, synthetic construct
  source 1..10: note = Description of Artificial Sequence: Synthetic peptide; note = XENP020949 vhCDR3
LANWDWYFDV

SEQ ID NO: 29329 - protein, 218 aa, synthetic construct; identical to SEQ ID NO: 17590
  source 1..218: note = Description of Artificial Sequence: Synthetic polypeptide; note = XENP020949 7G8_H0.18_L0_Fab Light Chain

SEQ ID NO: 29330 - protein, 111 aa, synthetic construct; identical to SEQ ID NO: 17591
  source 1..111: note = Description of Artificial Sequence: Synthetic polypeptide; note = VL of XENP020949

SEQ ID NO: 29331 - protein, 15 aa, synthetic construct
  source 1..15: note = Description of Artificial Sequence: Synthetic peptide; note = XENP020949 vlCDR1
KASQSVDYDGDSYMN

SEQ ID NO: 29332 - protein, 7 aa, synthetic construct
  source 1..7: note = Description of Artificial Sequence: Synthetic peptide; note = XENP020949 vlCDR2
AASNLES

SEQ ID NO: 29333 - protein, 9 aa, synthetic construct
  source 1..9: note = Description of Artificial Sequence: Synthetic peptide; note = XENP020949 vlCDR3
QQSNEDPFT

SEQ ID NO: 29334 - protein, 226 aa, synthetic construct
  source 1..226: note = Description of Artificial Sequence: Synthetic polypeptide; note = XENP020950 7G8_H0.19_L0_Fab Heavy Chain
EVKLEESGGGLVQPGGSMKLSCAASGFTFSDGWMDWVRQSPEKGLEWVAEIRTKANNHATYYAESVKGRFTISRDDSKSSVYLQMNSLRAEDTGIYYCTRLANWDWYFDVWGAGTTVTVSSASTKGPSVFPLAPSSKSTSGGTAALGCLVKDYFPEPVTVSWNSGALTSGVHTFPAVLQSSGLYSLSSVVTVPSSSLGTQTYICNVNHKPSNTKVDKKVEPKSCGS

SEQ ID NO: 29335 - protein, 121 aa, synthetic construct; identical to SEQ ID NO: 18396
  source 1..121: note = Description of Artificial Sequence: Synthetic polypeptide; note = VH of XENP020950

SEQ ID NO: 29336 - protein, 5 aa, synthetic construct
  source 1..5: note = Description of Artificial Sequence: Synthetic peptide; note = XENP020950 vhCDR1
DGWMD

SEQ ID NO: 29337 - protein, 19 aa, synthetic construct
  source 1..19: note = Description of Artificial Sequence: Synthetic peptide; note = XENP020950 vhCDR2
EIRTKANNHATYYAESVKG

SEQ ID NO: 29338 - protein, 10 aa, synthetic construct
  source 1..10: note = Description of Artificial Sequence: Synthetic peptide; note = XENP020950 vhCDR3
LANWDWYFDV

SEQ ID NO: 29339 - protein, 218 aa, synthetic construct; identical to SEQ ID NO: 17590
  source 1..218: note = Description of Artificial Sequence: Synthetic polypeptide; note = XENP020950 7G8_H0.19_L0_Fab Light Chain

SEQ ID NO: 29340 - protein, 111 aa, synthetic construct; identical to SEQ ID NO: 17591
  source 1..111: note = Description of Artificial Sequence: Synthetic polypeptide; note = VL of XENP020950

SEQ ID NO: 29341 - protein, 15 aa, synthetic construct
  source 1..15: note = Description of Artificial Sequence: Synthetic peptide; note = XENP020950 vlCDR1
KASQSVDYDGDSYMN

SEQ ID NO: 29342 - protein, 7 aa, synthetic construct
  source 1..7: note = Description of Artificial Sequence: Synthetic peptide; note = XENP020950 vlCDR2
AASNLES

SEQ ID NO: 29343 - protein, 9 aa, synthetic construct
  source 1..9: note = Description of Artificial Sequence: Synthetic peptide; note = XENP020950 vlCDR3
QQSNEDPFT

SEQ ID NO: 29344 - protein, 226 aa, synthetic construct
  source 1..226: note = Description of Artificial Sequence: Synthetic polypeptide; note = XENP020951 7G8_H0.20_L0_Fab Heavy Chain
EVKLEESGGGLVQPGGSMKLSCAASGFTFSDHWMDWVRQSPEKGLEWVAEIRTKANNHATYYAESVKGRFTISRDDSKSSVYLQMNSLRAEDTGIYYCTRLANWDWYFDVWGAGTTVTVSSASTKGPSVFPLAPSSKSTSGGTAALGCLVKDYFPEPVTVSWNSGALTSGVHTFPAVLQSSGLYSLSSVVTVPSSSLGTQTYICNVNHKPSNTKVDKKVEPKSCGS

SEQ ID NO: 29345 - protein, 121 aa, synthetic construct; identical to SEQ ID NO: 18406
  source 1..121: note = Description of Artificial Sequence: Synthetic polypeptide; note = VH of XENP020951

SEQ ID NO: 29346 - protein, 5 aa, synthetic construct
  source 1..5: note = Description of Artificial Sequence: Synthetic peptide; note = XENP020951 vhCDR1
DHWMD

SEQ ID NO: 29347 - protein, 19 aa, synthetic construct
  source 1..19: note = Description of Artificial Sequence: Synthetic peptide; note = XENP020951 vhCDR2
EIRTKANNHATYYAESVKG

SEQ ID NO: 29348 - protein, 10 aa, synthetic construct
  source 1..10: note = Description of Artificial Sequence: Synthetic peptide; note = XENP020951 vhCDR3
LANWDWYFDV

SEQ ID NO: 29349 - protein, 218 aa, synthetic construct; identical to SEQ ID NO: 17590
  source 1..218: note = Description of Artificial Sequence: Synthetic polypeptide; note = XENP020951 7G8_H0.20_L0_Fab Light Chain

SEQ ID NO: 29350 - protein, 111 aa, synthetic construct; identical to SEQ ID NO: 17591
  source 1..111: note = Description of Artificial Sequence: Synthetic polypeptide; note = VL of XENP020951

SEQ ID NO: 29351 - protein, 15 aa, synthetic construct
  source 1..15: note = Description of Artificial Sequence: Synthetic peptide; note = XENP020951 vlCDR1
KASQSVDYDGDSYMN

SEQ ID NO: 29352 - protein, 7 aa, synthetic construct
  source 1..7: note = Description of Artificial Sequence: Synthetic peptide; note = XENP020951 vlCDR2
AASNLES

SEQ ID NO: 29353 - protein, 9 aa, synthetic construct
  source 1..9: note = Description of Artificial Sequence: Synthetic peptide; note = XENP020951 vlCDR3
QQSNEDPFT

SEQ ID NO: 29354 - protein, 226 aa, synthetic construct
  source 1..226: note = Description of Artificial Sequence: Synthetic polypeptide; note = XENP020952 7G8_H0.21_L0_Fab Heavy Chain
EVKLEESGGGLVQPGGSMKLSCAASGFTFSDDWMDWVRQSPEKGLEWVAEIRTKANNHATYYAESVKGRFTISRDDSKSSVYLQMNSLRAEDTGIYYCTRLANWDWYFDVWGAGTTVTVSSASTKGPSVFPLAPSSKSTSGGTAALGCLVKDYFPEPVTVSWNSGALTSGVHTFPAVLQSSGLYSLSSVVTVPSSSLGTQTYICNVNHKPSNTKVDKKVEPKSCGS

SEQ ID NO: 29355 - protein, 121 aa, synthetic construct; identical to SEQ ID NO: 18416
  source 1..121: note = Description of Artificial Sequence: Synthetic polypeptide; note = VH of XENP020952

SEQ ID NO: 29356 - protein, 5 aa, synthetic construct
  source 1..5: note = Description of Artificial Sequence: Synthetic peptide; note = XENP020952 vhCDR1
DDWMD

SEQ ID NO: 29357 - protein, 19 aa, synthetic construct
  source 1..19: note = Description of Artificial Sequence: Synthetic peptide; note = XENP020952 vhCDR2
EIRTKANNHATYYAESVKG

SEQ ID NO: 29358 - protein, 10 aa, synthetic construct
  source 1..10: note = Description of Artificial Sequence: Synthetic peptide; note = XENP020952 vhCDR3
LANWDWYFDV

SEQ ID NO: 29359 - protein, 218 aa, synthetic construct; identical to SEQ ID NO: 17590
  source 1..218: note = Description of Artificial Sequence: Synthetic polypeptide; note = XENP020952 7G8_H0.21_L0_Fab Light Chain

SEQ ID NO: 29360 - protein, 111 aa, synthetic construct; identical to SEQ ID NO: 17591
  source 1..111: note = Description of Artificial Sequence: Synthetic polypeptide; note = VL of XENP020952

SEQ ID NO: 29361 - protein, 15 aa, synthetic construct
  source 1..15: note = Description of Artificial Sequence: Synthetic peptide; note = XENP020952 vlCDR1
KASQSVDYDGDSYMN

SEQ ID NO: 29362 - protein, 7 aa, synthetic construct
  source 1..7: note = Description of Artificial Sequence: Synthetic peptide; note = XENP020952 vlCDR2
AASNLES

SEQ ID NO: 29363 - protein, 9 aa, synthetic construct
  source 1..9: note = Description of Artificial Sequence: Synthetic peptide; note = XENP020952 vlCDR3
QQSNEDPFT

SEQ ID NO: 29364 - protein, 226 aa, synthetic construct
  source 1..226: note = Description of Artificial Sequence: Synthetic polypeptide; note = XENP020953 7G8_H0.22_L0_Fab Heavy Chain
EVKLEESGGGLVQPGGSMKLSCAASGFTFSDLWMDWVRQSPEKGLEWVAEIRTKANNHATYYAESVKGRFTISRDDSKSSVYLQMNSLRAEDTGIYYCTRLANWDWYFDVWGAGTTVTVSSASTKGPSVFPLAPSSKSTSGGTAALGCLVKDYFPEPVTVSWNSGALTSGVHTFPAVLQSSGLYSLSSVVTVPSSSLGTQTYICNVNHKPSNTKVDKKVEPKSCGS

SEQ ID NO: 29365 - protein, 121 aa, synthetic construct; identical to SEQ ID NO: 18426
  source 1..121: note = Description of Artificial Sequence: Synthetic polypeptide; note = VH of XENP020953

SEQ ID NO: 29366 - protein, 5 aa, synthetic construct
  source 1..5: note = Description of Artificial Sequence: Synthetic peptide; note = XENP020953 vhCDR1
DLWMD

SEQ ID NO: 29367 - protein, 19 aa, synthetic construct
  source 1..19: note = Description of Artificial Sequence: Synthetic peptide; note = XENP020953 vhCDR2
EIRTKANNHATYYAESVKG

SEQ ID NO: 29368 - protein, 10 aa, synthetic construct
  source 1..10: note = Description of Artificial Sequence: Synthetic peptide; note = XENP020953 vhCDR3
LANWDWYFDV

SEQ ID NO: 29369 - protein, 218 aa, synthetic construct; identical to SEQ ID NO: 17590
  source 1..218: note = Description of Artificial Sequence: Synthetic polypeptide; note = XENP020953 7G8_H0.22_L0_Fab Light Chain

SEQ ID NO: 29370 - protein, 111 aa, synthetic construct; identical to SEQ ID NO: 17591
  source 1..111: note = Description of Artificial Sequence: Synthetic polypeptide; note = VL of XENP020953

SEQ ID NO: 29371 - protein, 15 aa, synthetic construct
  source 1..15: note = Description of Artificial Sequence: Synthetic peptide; note = XENP020953 vlCDR1
KASQSVDYDGDSYMN

SEQ ID NO: 29372 - protein, 7 aa, synthetic construct
  source 1..7: note = Description of Artificial Sequence: Synthetic peptide; note = XENP020953 vlCDR2
AASNLES

SEQ ID NO: 29373 - protein, 9 aa, synthetic construct
  source 1..9: note = Description of Artificial Sequence: Synthetic peptide; note = XENP020953 vlCDR3
QQSNEDPFT

SEQ ID NO: 29374 - protein, 226 aa, synthetic construct
  source 1..226: note = Description of Artificial Sequence: Synthetic polypeptide; note = XENP020954 7G8_H0.23_L0_Fab Heavy Chain
EVKLEESGGGLVQPGGSMKLSCAASGFTFSDKWMDWVRQSPEKGLEWVAEIRTKANNHATYYAESVKGRFTISRDDSKSSVYLQMNSLRAEDTGIYYCTRLANWDWYFDVWGAGTTVTVSSASTKGPSVFPLAPSSKSTSGGTAALGCLVKDYFPEPVTVSWNSGALTSGVHTFPAVLQSSGLYSLSSVVTVPSSSLGTQTYICNVNHKPSNTKVDKKVEPKSCGS

SEQ ID NO: 29375 - protein, 121 aa, synthetic construct; identical to SEQ ID NO: 18436
  source 1..121: note = Description of Artificial Sequence: Synthetic polypeptide; note = VH of XENP020954

SEQ ID NO: 29376 - protein, 5 aa, synthetic construct
  source 1..5: note = Description of Artificial Sequence: Synthetic peptide; note = XENP020954 vhCDR1
DKWMD

SEQ ID NO: 29377 - protein, 19 aa, synthetic construct
  source 1..19: note = Description of Artificial Sequence: Synthetic peptide; note = XENP020954 vhCDR2
EIRTKANNHATYYAESVKG

SEQ ID NO: 29378 - protein, 10 aa, synthetic construct
  source 1..10: note = Description of Artificial Sequence: Synthetic peptide; note = XENP020954 vhCDR3
LANWDWYFDV

SEQ ID NO: 29379 - protein, 218 aa, synthetic construct; identical to SEQ ID NO: 17590
  source 1..218: note = Description of Artificial Sequence: Synthetic polypeptide; note = XENP020954 7G8_H0.23_L0_Fab Light Chain

SEQ ID NO: 29380 - protein, 111 aa, synthetic construct; identical to SEQ ID NO: 17591
  source 1..111: note = Description of Artificial Sequence: Synthetic polypeptide; note = VL of XENP020954

SEQ ID NO: 29381 - protein, 15 aa, synthetic construct
  source 1..15: note = Description of Artificial Sequence: Synthetic peptide; note = XENP020954 vlCDR1
KASQSVDYDGDSYMN

SEQ ID NO: 29382 - protein, 7 aa, synthetic construct
  source 1..7: note = Description of Artificial Sequence: Synthetic peptide; note = XENP020954 vlCDR2
AASNLES

SEQ ID NO: 29383 - protein, 9 aa, synthetic construct
  source 1..9: note = Description of Artificial Sequence: Synthetic peptide; note = XENP020954 vlCDR3
QQSNEDPFT

SEQ ID NO: 29384 - protein, 226 aa, synthetic construct
  source 1..226: note = Description of Artificial Sequence: Synthetic polypeptide; note = XENP020955 7G8_H0.24_L0_Fab Heavy Chain
EVKLEESGGGLVQPGGSMKLSCAASGFTFSDYWMDWVRQSPEKGLEWVAEIRTKANNHATYYAESVKGRFTISRDDSKSSVYLQMNSLRAEDTGIYYCTRLANWDWYFDVWGAGTTVTVSSASTKGPSVFPLAPSSKSTSGGTAALGCLVKDYFPEPVTVSWNSGALTSGVHTFPAVLQSSGLYSLSSVVTVPSSSLGTQTYICNVNHKPSNTKVDKKVEPKSCGS

SEQ ID NO: 29385 - protein, 121 aa, synthetic construct; identical to SEQ ID NO: 18446
  source 1..121: note = Description of Artificial Sequence: Synthetic polypeptide; note = VH of XENP020955

SEQ ID NO: 29386 - protein, 5 aa, synthetic construct
  source 1..5: note = Description of Artificial Sequence: Synthetic peptide; note = XENP020955 vhCDR1
DYWMD

SEQ ID NO: 29387 - protein, 19 aa, synthetic construct
  source 1..19: note = Description of Artificial Sequence: Synthetic peptide; note = XENP020955 vhCDR2
EIRTKANNHATYYAESVKG

SEQ ID NO: 29388 - protein, 10 aa, synthetic construct
  source 1..10: note = Description of Artificial Sequence: Synthetic peptide; note = XENP020955 vhCDR3
LANWDWYFDV

SEQ ID NO: 29389 - protein, 218 aa, synthetic construct; identical to SEQ ID NO: 17590
  source 1..218: note = Description of Artificial Sequence: Synthetic polypeptide; note = XENP020955 7G8_H0.24_L0_Fab Light Chain

SEQ ID NO: 29390 - protein, 111 aa, synthetic construct; identical to SEQ ID NO: 17591
  source 1..111: note = Description of Artificial Sequence: Synthetic polypeptide; note = VL of XENP020955

SEQ ID NO: 29391 - protein, 15 aa, synthetic construct
  source 1..15: note = Description of Artificial Sequence: Synthetic peptide; note = XENP020955 vlCDR1
KASQSVDYDGDSYMN

SEQ ID NO: 29392 - protein, 7 aa, synthetic construct
  source 1..7: note = Description of Artificial Sequence: Synthetic peptide; note = XENP020955 vlCDR2
AASNLES

SEQ ID NO: 29393 - protein, 9 aa, synthetic construct
  source 1..9: note = Description of Artificial Sequence: Synthetic peptide; note = XENP020955 vlCDR3
QQSNEDPFT

SEQ ID NO: 29394 - protein, 226 aa, synthetic construct
  source 1..226: note = Description of Artificial Sequence: Synthetic polypeptide; note = XENP020956 7G8_H0.25_L0_Fab Heavy Chain
EVKLEESGGGLVQPGGSMKLSCAASGFTFSDAYMDWVRQSPEKGLEWVAEIRTKANNHATYYAESVKGRFTISRDDSKSSVYLQMNSLRAEDTGIYYCTRLANWDWYFDVWGAGTTVTVSSASTKGPSVFPLAPSSKSTSGGTAALGCLVKDYFPEPVTVSWNSGALTSGVHTFPAVLQSSGLYSLSSVVTVPSSSLGTQTYICNVNHKPSNTKVDKKVEPKSCGS

SEQ ID NO: 29395 - protein, 121 aa, synthetic construct; identical to SEQ ID NO: 18456
  source 1..121: note = Description of Artificial Sequence: Synthetic polypeptide; note = VH of XENP020956

SEQ ID NO: 29396 - protein, 5 aa, synthetic construct
  source 1..5: note = Description of Artificial Sequence: Synthetic peptide; note = XENP020956 vhCDR1
DAYMD

SEQ ID NO: 29397 - protein, 19 aa, synthetic construct
  source 1..19: note = Description of Artificial Sequence: Synthetic peptide; note = XENP020956 vhCDR2
EIRTKANNHATYYAESVKG

SEQ ID NO: 29398 - protein, 10 aa, synthetic construct
  source 1..10: note = Description of Artificial Sequence: Synthetic peptide; note = XENP020956 vhCDR3
LANWDWYFDV

SEQ ID NO: 29399 - protein, 218 aa, synthetic construct; identical to SEQ ID NO: 17590
  source 1..218: note = Description of Artificial Sequence: Synthetic polypeptide; note = XENP020956 7G8_H0.25_L0_Fab Light Chain

SEQ ID NO: 29400 - protein, 111 aa, synthetic construct; identical to SEQ ID NO: 17591
  source 1..111: note = Description of Artificial Sequence: Synthetic polypeptide; note = VL of XENP020956

SEQ ID NO: 29401 - protein, 15 aa, synthetic construct
  source 1..15: note = Description of Artificial Sequence: Synthetic peptide; note = XENP020956 vlCDR1
KASQSVDYDGDSYMN

SEQ ID NO: 29402 - protein, 7 aa, synthetic construct
  source 1..7: note = Description of Artificial Sequence: Synthetic peptide; note = XENP020956 vlCDR2
AASNLES

SEQ ID NO: 29403 - protein, 9 aa, synthetic construct
  source 1..9: note = Description of Artificial Sequence: Synthetic peptide; note = XENP020956 vlCDR3
QQSNEDPFT

SEQ ID NO: 29404 - protein, 226 aa, synthetic construct
  source 1..226: note = Description of Artificial Sequence: Synthetic polypeptide; note = XENP020957 7G8_H0.26_L0_Fab Heavy Chain
EVKLEESGGGLVQPGGSMKLSCAASGFTFSDAFMDWVRQSPEKGLEWVAEIRTKANNHATYYAESVKGRFTISRDDSKSSVYLQMNSLRAEDTGIYYCTRLANWDWYFDVWGAGTTVTVSSASTKGPSVFPLAPSSKSTSGGTAALGCLVKDYFPEPVTVSWNSGALTSGVHTFPAVLQSSGLYSLSSVVTVPSSSLGTQTYICNVNHKPSNTKVDKKVEPKSCGS

SEQ ID NO: 29405 - protein, 121 aa, synthetic construct; identical to SEQ ID NO: 18466
  source 1..121: note = Description of Artificial Sequence: Synthetic polypeptide; note = VH of XENP020957

SEQ ID NO: 29406 - protein, 5 aa, synthetic construct
  source 1..5: note = Description of Artificial Sequence: Synthetic peptide; note = XENP020957 vhCDR1
DAFMD

SEQ ID NO: 29407 - protein, 19 aa, synthetic construct
  source 1..19: note = Description of Artificial Sequence: Synthetic peptide; note = XENP020957 vhCDR2
EIRTKANNHATYYAESVKG

SEQ ID NO: 29408 - protein, 10 aa, synthetic construct
  source 1..10: note = Description of Artificial Sequence: Synthetic peptide; note = XENP020957 vhCDR3
LANWDWYFDV

SEQ ID NO: 29409 - protein, 218 aa, synthetic construct; identical to SEQ ID NO: 17590
  source 1..218: note = Description of Artificial Sequence: Synthetic polypeptide; note = XENP020957 7G8_H0.26_L0_Fab Light Chain

SEQ ID NO: 29410 - protein, 111 aa, synthetic construct; identical to SEQ ID NO: 17591
  source 1..111: note = Description of Artificial Sequence: Synthetic polypeptide; note = VL of XENP020957

SEQ ID NO: 29411 - protein, 15 aa, synthetic construct
  source 1..15: note = Description of Artificial Sequence: Synthetic peptide; note = XENP020957 vlCDR1
KASQSVDYDGDSYMN

SEQ ID NO: 29412 - protein, 7 aa, synthetic construct
  source 1..7: note = Description of Artificial Sequence: Synthetic peptide; note = XENP020957 vlCDR2
AASNLES

SEQ ID NO: 29413 - protein, 9 aa, synthetic construct
  source 1..9: note = Description of Artificial Sequence: Synthetic peptide; note = XENP020957 vlCDR3
QQSNEDPFT

SEQ ID NO: 29414 - protein, 226 aa, synthetic construct
  source 1..226: note = Description of Artificial Sequence: Synthetic polypeptide; note = XENP020958 7G8_H0.27_L0_Fab Heavy Chain
EVKLEESGGGLVQPGGSMKLSCAASGFTFSDAWMDWVRQSPEKGLEWVAEIKTKANNHATYYAESVKGRFTISRDDSKSSVYLQMNSLRAEDTGIYYCTRLANWDWYFDVWGAGTTVTVSSASTKGPSVFPLAPSSKSTSGGTAALGCLVKDYFPEPVTVSWNSGALTSGVHTFPAVLQSSGLYSLSSVVTVPSSSLGTQTYICNVNHKPSNTKVDKKVEPKSCGS

SEQ ID NO: 29415 - protein, 121 aa, synthetic construct; identical to SEQ ID NO: 18476
  source 1..121: note = Description of Artificial Sequence: Synthetic polypeptide; note = VH of XENP020958

SEQ ID NO: 29416 - protein, 5 aa, synthetic construct
  source 1..5: note = Description of Artificial Sequence: Synthetic peptide; note = XENP020958 vhCDR1
DAWMD

SEQ ID NO: 29417 - protein, 19 aa, synthetic construct
  source 1..19: note = Description of Artificial Sequence: Synthetic peptide; note = XENP020958 vhCDR2
EIKTKANNHATYYAESVKG

SEQ ID NO: 29418 - protein, 10 aa, synthetic construct
  source 1..10: note = Description of Artificial Sequence: Synthetic peptide; note = XENP020958 vhCDR3
LANWDWYFDV

SEQ ID NO: 29419 - protein, 218 aa, synthetic construct; identical to SEQ ID NO: 17590
  source 1..218: note = Description of Artificial Sequence: Synthetic polypeptide; note = XENP020958 7G8_H0.27_L0_Fab Light Chain

SEQ ID NO: 29420 - protein, 111 aa, synthetic construct; identical to SEQ ID NO: 17591
  source 1..111: note = Description of Artificial Sequence: Synthetic polypeptide; note = VL of XENP020958

SEQ ID NO: 29421 - protein, 15 aa, synthetic construct
  source 1..15: note = Description of Artificial Sequence: Synthetic peptide; note = XENP020958 vlCDR1
KASQSVDYDGDSYMN

SEQ ID NO: 29422 - protein, 7 aa, synthetic construct
  source 1..7: note = Description of Artificial Sequence: Synthetic peptide; note = XENP020958 vlCDR2
AASNLES

SEQ ID NO: 29423 - protein, 9 aa, synthetic construct
  source 1..9: note = Description of Artificial Sequence: Synthetic peptide; note = XENP020958 vlCDR3
QQSNEDPFT

SEQ ID NO: 29424 - protein, 226 aa, synthetic construct
  source 1..226: note = Description of Artificial Sequence: Synthetic polypeptide; note = XENP020959 7G8_H0.28_L0_Fab Heavy Chain
EVKLEESGGGLVQPGGSMKLSCAASGFTFSDAWMDWVRQSPEKGLEWVAEIETKANNHATYYAESVKGRFTISRDDSKSSVYLQMNSLRAEDTGIYYCTRLANWDWYFDVWGAGTTVTVSSASTKGPSVFPLAPSSKSTSGGTAALGCLVKDYFPEPVTVSWNSGALTSGVHTFPAVLQSSGLYSLSSVVTVPSSSLGTQTYICNVNHKPSNTKVDKKVEPKSCGS

SEQ ID NO: 29425 - protein, 121 aa, synthetic construct; identical to SEQ ID NO: 18486
  source 1..121: note = Description of Artificial Sequence: Synthetic polypeptide; note = VH of XENP020959

SEQ ID NO: 29426 - protein, 5 aa, synthetic construct
  source 1..5: note = Description of Artificial Sequence: Synthetic peptide; note = XENP020959 vhCDR1
DAWMD

SEQ ID NO: 29427 - protein, 19 aa, synthetic construct
  source 1..19: note = Description of Artificial Sequence: Synthetic peptide; note = XENP020959 vhCDR2
EIETKANNHATYYAESVKG

SEQ ID NO: 29428 - protein, 10 aa, synthetic construct
  source 1..10: note = Description of Artificial Sequence: Synthetic peptide; note = XENP020959 vhCDR3
LANWDWYFDV

SEQ ID NO: 29429 - protein, 218 aa, synthetic construct; identical to SEQ ID NO: 17590
  source 1..218: note = Description of Artificial Sequence: Synthetic polypeptide; note = XENP020959 7G8_H0.28_L0_Fab Light Chain

SEQ ID NO: 29430 - protein, 111 aa, synthetic construct; identical to SEQ ID NO: 17591
  source 1..111: note = Description of Artificial Sequence: Synthetic polypeptide; note = VL of XENP020959

SEQ ID NO: 29431 - protein, 15 aa, synthetic construct
  source 1..15: note = Description of Artificial Sequence: Synthetic peptide; note = XENP020959 vlCDR1
KASQSVDYDGDSYMN

SEQ ID NO: 29432 - protein, 7 aa, synthetic construct
  source 1..7: note = Description of Artificial Sequence: Synthetic peptide; note = XENP020959 vlCDR2
AASNLES

SEQ ID NO: 29433 - protein, 9 aa, synthetic construct
  source 1..9: note = Description of Artificial Sequence: Synthetic peptide; note = XENP020959 vlCDR3
QQSNEDPFT

SEQ ID NO: 29434 - protein, 226 aa, synthetic construct
  source 1..226: note = Description of Artificial Sequence: Synthetic polypeptide; note = XENP020960 7G8_H0.29_L0_Fab Heavy Chain
EVKLEESGGGLVQPGGSMKLSCAASGFTFSDAWMDWVRQSPEKGLEWVAEIDTKANNHATYYAESVKGRFTISRDDSKSSVYLQMNSLRAEDTGIYYCTRLANWDWYFDVWGAGTTVTVSSASTKGPSVFPLAPSSKSTSGGTAALGCLVKDYFPEPVTVSWNSGALTSGVHTFPAVLQSSGLYSLSSVVTVPSSSLGTQTYICNVNHKPSNTKVDKKVEPKSCGS

SEQ ID NO: 29435 - protein, 121 aa, synthetic construct; identical to SEQ ID NO: 18496
  source 1..121: note = Description of Artificial Sequence: Synthetic polypeptide; note = VH of XENP020960

SEQ ID NO: 29436 - protein, 5 aa, synthetic construct
  source 1..5: note = Description of Artificial Sequence: Synthetic peptide; note = XENP020960 vhCDR1
DAWMD

SEQ ID NO: 29437 - protein, 19 aa, synthetic construct
  source 1..19: note = Description of Artificial Sequence: Synthetic peptide; note = XENP020960 vhCDR2
EIDTKANNHATYYAESVKG

SEQ ID NO: 29438 - protein, 10 aa, synthetic construct
  source 1..10: note = Description of Artificial Sequence: Synthetic peptide; note = XENP020960 vhCDR3
LANWDWYFDV

SEQ ID NO: 29439 - protein, 218 aa, synthetic construct; identical to SEQ ID NO: 17590
  source 1..218: note = Description of Artificial Sequence: Synthetic polypeptide; note = XENP020960 7G8_H0.29_L0_Fab Light Chain

SEQ ID NO: 29440 - protein, 111 aa, synthetic construct; identical to SEQ ID NO: 17591
  source 1..111: note = Description of Artificial Sequence: Synthetic polypeptide; note = VL of XENP020960

SEQ ID NO: 29441 - protein, 15 aa, synthetic construct
  source 1..15: note = Description of Artificial Sequence: Synthetic peptide; note = XENP020960 vlCDR1
KASQSVDYDGDSYMN

SEQ ID NO: 29442 - protein, 7 aa, synthetic construct
  source 1..7: note = Description of Artificial Sequence: Synthetic peptide; note = XENP020960 vlCDR2
AASNLES

SEQ ID NO: 29443 - protein, 9 aa, synthetic construct
  source 1..9: note = Description of Artificial Sequence: Synthetic peptide; note = XENP020960 vlCDR3
QQSNEDPFT

SEQ ID NO: 29444 - protein, 226 aa, synthetic construct
  source 1..226: note = Description of Artificial Sequence: Synthetic polypeptide; note = XENP020961 7G8_H0.30_L0_Fab Heavy Chain
EVKLEESGGGLVQPGGSMKLSCAASGFTFSDAWMDWVRQSPEKGLEWVAEIHTKANNHATYYAESVKGRFTISRDDSKSSVYLQMNSLRAEDTGIYYCTRLANWDWYFDVWGAGTTVTVSSASTKGPSVFPLAPSSKSTSGGTAALGCLVKDYFPEPVTVSWNSGALTSGVHTFPAVLQSSGLYSLSSVVTVPSSSLGTQTYICNVNHKPSNTKVDKKVEPKSCGS

SEQ ID NO: 29445 - protein, 121 aa, synthetic construct; identical to SEQ ID NO: 18506
  source 1..121: note = Description of Artificial Sequence: Synthetic polypeptide; note = VH of XENP020961

SEQ ID NO: 29446 - protein, 5 aa, synthetic construct
  source 1..5: note = Description of Artificial Sequence: Synthetic peptide; note = XENP020961 vhCDR1
DAWMD

SEQ ID NO: 29447 - protein, 19 aa, synthetic construct
  source 1..19: note = Description of Artificial Sequence: Synthetic peptide; note = XENP020961 vhCDR2
EIHTKANNHATYYAESVKG

SEQ ID NO: 29448 - protein, 10 aa, synthetic construct
  source 1..10: note = Description of Artificial Sequence: Synthetic peptide; note = XENP020961 vhCDR3
LANWDWYFDV

SEQ ID NO: 29449 - protein, 218 aa, synthetic construct; identical to SEQ ID NO: 17590
  source 1..218: note = Description of Artificial Sequence: Synthetic polypeptide; note = XENP020961 7G8_H0.30_L0_Fab Light Chain

SEQ ID NO: 29450 - protein, 111 aa, synthetic construct; identical to SEQ ID NO: 17591
  source 1..111: note = Description of Artificial Sequence: Synthetic polypeptide; note = VL of XENP020961

SEQ ID NO: 29451 - protein, 15 aa, synthetic construct
  source 1..15: note = Description of Artificial Sequence: Synthetic peptide; note = XENP020961 vlCDR1
KASQSVDYDGDSYMN

SEQ ID NO: 29452 - protein, 7 aa, synthetic construct
  source 1..7: note = Description of Artificial Sequence: Synthetic peptide; note = XENP020961 vlCDR2
AASNLES

SEQ ID NO: 29453 - protein, 9 aa, synthetic construct
  source 1..9: note = Description of Artificial Sequence: Synthetic peptide; note = XENP020961 vlCDR3
QQSNEDPFT

SEQ ID NO: 29454 - protein, 226 aa, synthetic construct
  source 1..226: note = Description of Artificial Sequence: Synthetic polypeptide; note = XENP020962 7G8_H0.31_L0_Fab Heavy Chain
EVKLEESGGGLVQPGGSMKLSCAASGFTFSDAWMDWVRQSPEKGLEWVAEISTKANNHATYYAESVKGRFTISRDDSKSSVYLQMNSLRAEDTGIYYCTRLANWDWYFDVWGAGTTVTVSSASTKGPSVFPLAPSSKSTSGGTAALGCLVKDYFPEPVTVSWNSGALTSGVHTFPAVLQSSGLYSLSSVVTVPSSSLGTQTYICNVNHKPSNTKVDKKVEPKSCGS

SEQ ID NO: 29455 - protein, 121 aa, synthetic construct; identical to SEQ ID NO: 18516
  source 1..121: note = Description of Artificial Sequence: Synthetic polypeptide; note = VH of XENP020962

SEQ ID NO: 29456 - protein, 5 aa, synthetic construct
  source 1..5: note = Description of Artificial Sequence: Synthetic peptide; note = XENP020962 vhCDR1
DAWMD

SEQ ID NO: 29457 - protein, 19 aa, synthetic construct
  source 1..19: note = Description of Artificial Sequence: Synthetic peptide; note = XENP020962 vhCDR2
EISTKANNHATYYAESVKG

SEQ ID NO: 29458 - protein, 10 aa, synthetic construct
  source 1..10: note = Description of Artificial Sequence: Synthetic peptide; note = XENP020962 vhCDR3
LANWDWYFDV

SEQ ID NO: 29459 - protein, 218 aa, synthetic construct; identical to SEQ ID NO: 17590
  source 1..218: note = Description of Artificial Sequence: Synthetic polypeptide; note = XENP020962 7G8_H0.31_L0_Fab Light Chain

SEQ ID NO: 29460 - protein, 111 aa, synthetic construct; identical to SEQ ID NO: 17591
  source 1..111: note = Description of Artificial Sequence: Synthetic polypeptide; note = VL of XENP020962

SEQ ID NO: 29461 - protein, 15 aa, synthetic construct
  source 1..15: note = Description of Artificial Sequence: Synthetic peptide; note = XENP020962 vlCDR1
KASQSVDYDGDSYMN

SEQ ID NO: 29462 - protein, 7 aa, synthetic construct
  source 1..7: note = Description of Artificial Sequence: Synthetic peptide; note = XENP020962 vlCDR2
AASNLES

SEQ ID NO: 29463 - protein, 9 aa, synthetic construct
  source 1..9: note = Description of Artificial Sequence: Synthetic peptide; note = XENP020962 vlCDR3
QQSNEDPFT

SEQ ID NO: 29464 - protein, 226 aa, synthetic construct
  source 1..226: note = Description of Artificial Sequence: Synthetic polypeptide; note = XENP020963 7G8_H0.32_L0_Fab Heavy Chain
EVKLEESGGGLVQPGGSMKLSCAASGFTFSDAWMDWVRQSPEKGLEWVAEIGTKANNHATYYAESVKGRFTISRDDSKSSVYLQMNSLRAEDTGIYYCTRLANWDWYFDVWGAGTTVTVSSASTKGPSVFPLAPSSKSTSGGTAALGCLVKDYFPEPVTVSWNSGALTSGVHTFPAVLQSSGLYSLSSVVTVPSSSLGTQTYICNVNHKPSNTKVDKKVEPKSCGS

SEQ ID NO: 29465 - protein, 121 aa, synthetic construct; identical to SEQ ID NO: 18526
  source 1..121: note = Description of Artificial Sequence: Synthetic polypeptide; note = VH of XENP020963

SEQ ID NO: 29466 - protein, 5 aa, synthetic construct
  source 1..5: note = Description of Artificial Sequence: Synthetic peptide; note = XENP020963 vhCDR1
DAWMD

SEQ ID NO: 29467 - protein, 19 aa, synthetic construct
  source 1..19: note = Description of Artificial Sequence: Synthetic peptide; note = XENP020963 vhCDR2
EIGTKANNHATYYAESVKG

SEQ ID NO: 29468 - protein, 10 aa, synthetic construct
  source 1..10: note = Description of Artificial Sequence: Synthetic peptide; note = XENP020963 vhCDR3
LANWDWYFDV

SEQ ID NO: 29469 - protein, 218 aa, synthetic construct; identical to SEQ ID NO: 17590
  source 1..218: note = Description of Artificial Sequence: Synthetic polypeptide; note = XENP020963 7G8_H0.32_L0_Fab Light Chain

SEQ ID NO: 29470 - protein, 111 aa, synthetic construct; identical to SEQ ID NO: 17591
  source 1..111: note = Description of Artificial Sequence: Synthetic polypeptide; note = VL of XENP020963

SEQ ID NO: 29471 - protein, 15 aa, synthetic construct
  source 1..15: note = Description of Artificial Sequence: Synthetic peptide; note = XENP020963 vlCDR1
KASQSVDYDGDSYMN

SEQ ID NO: 29472 - protein, 7 aa, synthetic construct
  source 1..7: note = Description of Artificial Sequence: Synthetic peptide; note = XENP020963 vlCDR2
AASNLES

SEQ ID NO: 29473 - protein, 9 aa, synthetic construct
  source 1..9: note = Description of Artificial Sequence: Synthetic peptide; note = XENP020963 vlCDR3
QQSNEDPFT

SEQ ID NO: 29474 - protein, 226 aa, synthetic construct
  source 1..226: note = Description of Artificial Sequence: Synthetic polypeptide; note = XENP020964 7G8_H0.33_L0_Fab Heavy Chain
EVKLEESGGGLVQPGGSMKLSCAASGFTFSDAWMDWVRQSPEKGLEWVAEIYTKANNHATYYAESVKGRFTISRDDSKSSVYLQMNSLRAEDTGIYYCTRLANWDWYFDVWGAGTTVTVSSASTKGPSVFPLAPSSKSTSGGTAALGCLVKDYFPEPVTVSWNSGALTSGVHTFPAVLQSSGLYSLSSVVTVPSSSLGTQTYICNVNHKPSNTKVDKKVEPKSCGS

SEQ ID NO: 29475 - protein, 121 aa, synthetic construct; identical to SEQ ID NO: 18536
  source 1..121: note = Description of Artificial Sequence: Synthetic polypeptide; note = VH of XENP020964

SEQ ID NO: 29476 - protein, 5 aa, synthetic construct
  source 1..5: note = Description of Artificial Sequence: Synthetic peptide; note = XENP020964 vhCDR1
DAWMD

SEQ ID NO: 29477 - protein, 19 aa, synthetic construct
  source 1..19: note = Description of Artificial Sequence: Synthetic peptide; note = XENP020964 vhCDR2
EIYTKANNHATYYAESVKG

SEQ ID NO: 29478 - protein, 10 aa, synthetic construct
  source 1..10: note = Description of Artificial Sequence: Synthetic peptide; note = XENP020964 vhCDR3
LANWDWYFDV

SEQ ID NO: 29479 - protein, 218 aa, synthetic construct; identical to SEQ ID NO: 17590
  source 1..218: note = Description of Artificial Sequence: Synthetic polypeptide; note = XENP020964 7G8_H0.33_L0_Fab Light Chain

SEQ ID NO: 29480 - protein, 111 aa, synthetic construct; identical to SEQ ID NO: 17591
  source 1..111: note = Description of Artificial Sequence: Synthetic polypeptide; note = VL of XENP020964

SEQ ID NO: 29481 - protein, 15 aa, synthetic construct
  source 1..15: note = Description of Artificial Sequence: Synthetic peptide; note = XENP020964 vlCDR1
KASQSVDYDGDSYMN

SEQ ID NO: 29482 - protein, 7 aa, synthetic construct
  source 1..7: note = Description of Artificial Sequence: Synthetic peptide; note = XENP020964 vlCDR2
AASNLES

SEQ ID NO: 29483 - protein, 9 aa, synthetic construct
  source 1..9: note = Description of Artificial Sequence: Synthetic peptide; note = XENP020964 vlCDR3
QQSNEDPFT

SEQ ID NO: 29484 - protein, 226 aa, synthetic construct
  source 1..226: note = Description of Artificial Sequence: Synthetic polypeptide; note = XENP020965 7G8_H0.34_L0_Fab Heavy Chain
EVKLEESGGGLVQPGGSMKLSCAASGFTFSDAWMDWVRQSPEKGLEWVAEIITKANNHATYYAESVKGRFTISRDDSKSSVYLQMNSLRAEDTGIYYCTRLANWDWYFDVWGAGTTVTVSSASTKGPSVFPLAPSSKSTSGGTAALGCLVKDYFPEPVTVSWNSGALTSGVHTFPAVLQSSGLYSLSSVVTVPSSSLGTQTYICNVNHKPSNTKVDKKVEPKSCGS

SEQ ID NO: 29485 - protein, 121 aa, synthetic construct; identical to SEQ ID NO: 18546
  source 1..121: note = Description of Artificial Sequence: Synthetic polypeptide; note = VH of XENP020965

SEQ ID NO: 29486 - protein, 5 aa, synthetic construct
  source 1..5: note = Description of Artificial Sequence: Synthetic peptide; note = XENP020965 vhCDR1
DAWMD

SEQ ID NO: 29487 - protein, 19 aa, synthetic construct
  source 1..19: note = Description of Artificial Sequence: Synthetic peptide; note = XENP020965 vhCDR2
EIITKANNHATYYAESVKG

SEQ ID NO: 29488 - protein, 10 aa, synthetic construct
  source 1..10: note = Description of Artificial Sequence: Synthetic peptide; note = XENP020965 vhCDR3
LANWDWYFDV

SEQ ID NO: 29489 - protein, 218 aa, synthetic construct; identical to SEQ ID NO: 17590
  source 1..218: note = Description of Artificial Sequence: Synthetic polypeptide; note = XENP020965 7G8_H0.34_L0_Fab Light Chain

SEQ ID NO: 29490 - protein, 111 aa, synthetic construct; identical to SEQ ID NO: 17591
  source 1..111: note = Description of Artificial Sequence: Synthetic polypeptide; note = VL of XENP020965

SEQ ID NO: 29491 - protein, 15 aa, synthetic construct
  source 1..15: note = Description of Artificial Sequence: Synthetic peptide; note = XENP020965 vlCDR1
KASQSVDYDGDSYMN

SEQ ID NO: 29492 - protein, 7 aa, synthetic construct
  source 1..7: note = Description of Artificial Sequence: Synthetic peptide; note = XENP020965 vlCDR2
AASNLES

SEQ ID NO: 29493 - protein, 9 aa, synthetic construct
  source 1..9: note = Description of Artificial Sequence: Synthetic peptide; note = XENP020965 vlCDR3
QQSNEDPFT

SEQ ID NO: 29494 - protein, 226 aa, synthetic construct
  source 1..226: note = Description of Artificial Sequence: Synthetic polypeptide; note = XENP020966 7G8_H0.35_L0_Fab Heavy Chain
EVKLEESGGGLVQPGGSMKLSCAASGFTFSDAWMDWVRQSPEKGLEWVAEIWTKANNHATYYAESVKGRFTISRDDSKSSVYLQMNSLRAEDTGIYYCTRLANWDWYFDVWGAGTTVTVSSASTKGPSVFPLAPSSKSTSGGTAALGCLVKDYFPEPVTVSWNSGALTSGVHTFPAVLQSSGLYSLSSVVTVPSSSLGTQTYICNVNHKPSNTKVDKKVEPKSCGS

SEQ ID NO: 29495 - protein, 121 aa, synthetic construct; identical to SEQ ID NO: 18556
  source 1..121: note = Description of Artificial Sequence: Synthetic polypeptide; note = VH of XENP020966

SEQ ID NO: 29496 - protein, 5 aa, synthetic construct
  source 1..5: note = Description of Artificial Sequence: Synthetic peptide; note = XENP020966 vhCDR1
DAWMD

SEQ ID NO: 29497 - protein, 19 aa, synthetic construct
  source 1..19: note = Description of Artificial Sequence: Synthetic peptide; note = XENP020966 vhCDR2
EIWTKANNHATYYAESVKG

SEQ ID NO: 29498 - protein, 10 aa, synthetic construct
  source 1..10: note = Description of Artificial Sequence: Synthetic peptide; note = XENP020966 vhCDR3
LANWDWYFDV

SEQ ID NO: 29499 - protein, 218 aa, synthetic construct; identical to SEQ ID NO: 17590
  source 1..218: note = Description of Artificial Sequence: Synthetic polypeptide; note = XENP020966 7G8_H0.35_L0_Fab Light Chain

SEQ ID NO: 29500 - protein, 111 aa, synthetic construct; identical to SEQ ID NO: 17591
  source 1..111: note = Description of Artificial Sequence: Synthetic polypeptide; note = VL of XENP020966

SEQ ID NO: 29501 - protein, 15 aa, synthetic construct
  source 1..15: note = Description of Artificial Sequence: Synthetic peptide; note = XENP020966 vlCDR1
KASQSVDYDGDSYMN

SEQ ID NO: 29502 - protein, 7 aa, synthetic construct
  source 1..7: note = Description of Artificial Sequence: Synthetic peptide; note = XENP020966 vlCDR2
AASNLES

SEQ ID NO: 29503 - protein, 9 aa, synthetic construct
  source 1..9: note = Description of Artificial Sequence: Synthetic peptide; note = XENP020966 vlCDR3
QQSNEDPFT

SEQ ID NO: 29504 - protein, 226 aa, synthetic construct
  source 1..226: note = Description of Artificial Sequence: Synthetic polypeptide; note = XENP020967 7G8_H0.36_L0_Fab Heavy Chain
EVKLEESGGGLVQPGGSMKLSCAASGFTFSDAWMDWVRQSPEKGLEWVAEIRVKANNHATYYAESVKGRFTISRDDSKSSVYLQMNSLRAEDTGIYYCTRLANWDWYFDVWGAGTTVTVSSASTKGPSVFPLAPSSKSTSGGTAALGCLVKDYFPEPVTVSWNSGALTSGVHTFPAVLQSSGLYSLSSVVTVPSSSLGTQTYICNVNHKPSNTKVDKKVEPKSCGS

SEQ ID NO: 29505 - protein, 121 aa, synthetic construct; identical to SEQ ID NO: 18566
  source 1..121: note = Description of Artificial Sequence: Synthetic polypeptide; note = VH of XENP020967

SEQ ID NO: 29506 - protein, 5 aa, synthetic construct
  source 1..5: note = Description of Artificial Sequence: Synthetic peptide; note = XENP020967 vhCDR1
DAWMD

SEQ ID NO: 29507 - protein, 19 aa, synthetic construct
  source 1..19: note = Description of Artificial Sequence: Synthetic peptide; note = XENP020967 vhCDR2
EIRVKANNHATYYAESVKG

SEQ ID NO: 29508 - protein, 10 aa, synthetic construct
  source 1..10: note = Description of Artificial Sequence: Synthetic peptide; note = XENP020967 vhCDR3
LANWDWYFDV

SEQ ID NO: 29509 - protein, 218 aa, synthetic construct; identical to SEQ ID NO: 17590
  source 1..218: note = Description of Artificial Sequence: Synthetic polypeptide; note = XENP020967 7G8_H0.36_L0_Fab Light Chain

SEQ ID NO: 29510 - protein, 111 aa, synthetic construct; identical to SEQ ID NO: 17591
  source 1..111: note = Description of Artificial Sequence: Synthetic polypeptide; note = VL of XENP020967

SEQ ID NO: 29511 - protein, 15 aa, synthetic construct
  source 1..15: note = Description of Artificial Sequence: Synthetic peptide; note = XENP020967 vlCDR1
KASQSVDYDGDSYMN

SEQ ID NO: 29512 - protein, 7 aa, synthetic construct
  source 1..7: note = Description of Artificial Sequence: Synthetic peptide; note = XENP020967 vlCDR2
AASNLES

SEQ ID NO: 29513 - protein, 9 aa, synthetic construct
  source 1..9: note = Description of Artificial Sequence: Synthetic peptide; note = XENP020967 vlCDR3
QQSNEDPFT

SEQ ID NO: 29514 - protein, 226 aa, synthetic construct
  source 1..226: note = Description of Artificial Sequence: Synthetic polypeptide; note = XENP020968 7G8_H0.37_L0_Fab Heavy Chain
EVKLEESGGGLVQPGGSMKLSCAASGFTFSDAWMDWVRQSPEKGLEWVAEIRSKANNHATYYAESVKGRFTISRDDSKSSVYLQMNSLRAEDTGIYYCTRLANWDWYFDVWGAGTTVTVSSASTKGPSVFPLAPSSKSTSGGTAALGCLVKDYFPEPVTVSWNSGALTSGVHTFPAVLQSSGLYSLSSVVTVPSSSLGTQTYICNVNHKPSNTKVDKKVEPKSCGS

SEQ ID NO: 29515 - protein, 121 aa, synthetic construct; identical to SEQ ID NO: 18576
  source 1..121: note = Description of Artificial Sequence: Synthetic polypeptide; note = VH of XENP020968

SEQ ID NO: 29516 - protein, 5 aa, synthetic construct
  source 1..5: note = Description of Artificial Sequence: Synthetic peptide; note = XENP020968 vhCDR1
DAWMD

SEQ ID NO: 29517 - protein, 19 aa, synthetic construct
  source 1..19: note = Description of Artificial Sequence: Synthetic peptide; note = XENP020968 vhCDR2
EIRSKANNHATYYAESVKG

SEQ ID NO: 29518 - protein, 10 aa, synthetic construct
  source 1..10: note = Description of Artificial Sequence: Synthetic peptide; note = XENP020968 vhCDR3
LANWDWYFDV

SEQ ID NO: 29519 - protein, 218 aa, synthetic construct; identical to SEQ ID NO: 17590
  source 1..218: note = Description of Artificial Sequence: Synthetic polypeptide; note = XENP020968 7G8_H0.37_L0_Fab Light Chain

SEQ ID NO: 29520 - protein, 111 aa, synthetic construct; identical to SEQ ID NO: 17591
  source 1..111: note = Description of Artificial Sequence: Synthetic polypeptide; note = VL of XENP020968

SEQ ID NO: 29521 - protein, 15 aa, synthetic construct
  source 1..15: note = Description of Artificial Sequence: Synthetic peptide; note = XENP020968 vlCDR1
KASQSVDYDGDSYMN

SEQ ID NO: 29522 - protein, 7 aa, synthetic construct
  source 1..7: note = Description of Artificial Sequence: Synthetic peptide; note = XENP020968 vlCDR2
AASNLES

SEQ ID NO: 29523 - protein, 9 aa, synthetic construct
  source 1..9: note = Description of Artificial Sequence: Synthetic peptide; note = XENP020968 vlCDR3
QQSNEDPFT

SEQ ID NO: 29524 - protein, 226 aa, synthetic construct
  source 1..226: note = Description of Artificial Sequence: Synthetic polypeptide; note = XENP020969 7G8_H0.38_L0_Fab Heavy Chain
EVKLEESGGGLVQPGGSMKLSCAASGFTFSDAWMDWVRQSPEKGLEWVAEIRAKANNHATYYAESVKGRFTISRDDSKSSVYLQMNSLRAEDTGIYYCTRLANWDWYFDVWGAGTTVTVSSASTKGPSVFPLAPSSKSTSGGTAALGCLVKDYFPEPVTVSWNSGALTSGVHTFPAVLQSSGLYSLSSVVTVPSSSLGTQTYICNVNHKPSNTKVDKKVEPKSCGS

SEQ ID NO: 29525 - protein, 121 aa, synthetic construct; identical to SEQ ID NO: 18586
  source 1..121: note = Description of Artificial Sequence: Synthetic polypeptide; note = VH of XENP020969

SEQ ID NO: 29526 - protein, 5 aa, synthetic construct
  source 1..5: note = Description of Artificial Sequence: Synthetic peptide; note = XENP020969 vhCDR1
DAWMD

SEQ ID NO: 29527 - protein, 19 aa, synthetic construct
  source 1..19: note = Description of Artificial Sequence: Synthetic peptide; note = XENP020969 vhCDR2
EIRAKANNHATYYAESVKG

SEQ ID NO: 29528 - protein, 10 aa, synthetic construct
  source 1..10: note = Description of Artificial Sequence: Synthetic peptide; note = XENP020969 vhCDR3
LANWDWYFDV

SEQ ID NO: 29529 - protein, 218 aa, synthetic construct; identical to SEQ ID NO: 17590
  source 1..218: note = Description of Artificial Sequence: Synthetic polypeptide; note = XENP020969 7G8_H0.38_L0_Fab Light Chain

SEQ ID NO: 29530 - protein, 111 aa, synthetic construct; identical to SEQ ID NO: 17591
  source 1..111: note = Description of Artificial Sequence: Synthetic polypeptide; note = VL of XENP020969

SEQ ID NO: 29531 - protein, 15 aa, synthetic construct
  source 1..15: note = Description of Artificial Sequence: Synthetic peptide; note = XENP020969 vlCDR1
KASQSVDYDGDSYMN

SEQ ID NO: 29532 - protein, 7 aa, synthetic construct
  source 1..7: note = Description of Artificial Sequence: Synthetic peptide; note = XENP020969 vlCDR2
AASNLES

SEQ ID NO: 29533 - protein, 9 aa, synthetic construct
  source 1..9: note = Description of Artificial Sequence: Synthetic peptide; note = XENP020969 vlCDR3
QQSNEDPFT

SEQ ID NO: 29534 - protein, 226 aa, synthetic construct
  source 1..226: note = Description of Artificial Sequence: Synthetic polypeptide; note = XENP020970 7G8_H0.39_L0_Fab Heavy Chain
EVKLEESGGGLVQPGGSMKLSCAASGFTFSDAWMDWVRQSPEKGLEWVAEIRIKANNHATYYAESVKGRFTISRDDSKSSVYLQMNSLRAEDTGIYYCTRLANWDWYFDVWGAGTTVTVSSASTKGPSVFPLAPSSKSTSGGTAALGCLVKDYFPEPVTVSWNSGALTSGVHTFPAVLQSSGLYSLSSVVTVPSSSLGTQTYICNVNHKPSNTKVDKKVEPKSCGS

SEQ ID NO: 29535 - protein, 121 aa, synthetic construct; identical to SEQ ID NO: 18596
  source 1..121: note = Description of Artificial Sequence: Synthetic polypeptide; note = VH of XENP020970

SEQ ID NO: 29536 - protein, 5 aa, synthetic construct
  source 1..5: note = Description of Artificial Sequence: Synthetic peptide; note = XENP020970 vhCDR1
DAWMD

SEQ ID NO: 29537 - protein, 19 aa, synthetic construct
  source 1..19: note = Description of Artificial Sequence: Synthetic peptide; note = XENP020970 vhCDR2
EIRIKANNHATYYAESVKG

SEQ ID NO: 29538 - protein, 10 aa, synthetic construct
  source 1..10: note = Description of Artificial Sequence: Synthetic peptide; note = XENP020970 vhCDR3
LANWDWYFDV

SEQ ID NO: 29539 - protein, 218 aa, synthetic construct; identical to SEQ ID NO: 17590
  source 1..218: note = Description of Artificial Sequence: Synthetic polypeptide; note = XENP020970 7G8_H0.39_L0_Fab Light Chain

SEQ ID NO: 29540 - protein, 111 aa, synthetic construct; identical to SEQ ID NO: 17591
  source 1..111: note = Description of Artificial Sequence: Synthetic polypeptide; note = VL of XENP020970

SEQ ID NO: 29541 - protein, 15 aa, synthetic construct
  source 1..15: note = Description of Artificial Sequence: Synthetic peptide; note = XENP020970 vlCDR1
KASQSVDYDGDSYMN

SEQ ID NO: 29542 - protein, 7 aa, synthetic construct
  source 1..7: note = Description of Artificial Sequence: Synthetic peptide; note = XENP020970 vlCDR2
AASNLES

SEQ ID NO: 29543 - protein, 9 aa, synthetic construct
  source 1..9: note = Description of Artificial Sequence: Synthetic peptide; note = XENP020970 vlCDR3
QQSNEDPFT

SEQ ID NO: 29544 - protein, 226 aa, synthetic construct
  source 1..226: note = Description of Artificial Sequence: Synthetic polypeptide; note = XENP020971 7G8_H0.40_L0_Fab Heavy Chain
EVKLEESGGGLVQPGGSMKLSCAASGFTFSDAWMDWVRQSPEKGLEWVAEIRQKANNHATYYAESVKGRFTISRDDSKSSVYLQMNSLRAEDTGIYYCTRLANWDWYFDVWGAGTTVTVSSASTKGPSVFPLAPSSKSTSGGTAALGCLVKDYFPEPVTVSWNSGALTSGVHTFPAVLQSSGLYSLSSVVTVPSSSLGTQTYICNVNHKPSNTKVDKKVEPKSCGS

SEQ ID NO: 29545 - protein, 121 aa, synthetic construct; identical to SEQ ID NO: 18606
  source 1..121: note = Description of Artificial Sequence: Synthetic polypeptide; note = VH of XENP020971

SEQ ID NO: 29546 - protein, 5 aa, synthetic construct
  source 1..5: note = Description of Artificial Sequence: Synthetic peptide; note = XENP020971 vhCDR1
DAWMD

SEQ ID NO: 29547 - protein, 19 aa, synthetic construct
  source 1..19: note = Description of Artificial Sequence: Synthetic peptide; note = XENP020971 vhCDR2
EIRQKANNHATYYAESVKG

SEQ ID NO: 29548 - protein, 10 aa, synthetic construct
  source 1..10: note = Description of Artificial Sequence: Synthetic peptide; note = XENP020971 vhCDR3
LANWDWYFDV

SEQ ID NO: 29549 - protein, 218 aa, synthetic construct; identical to SEQ ID NO: 17590
  source 1..218: note = Description of Artificial Sequence: Synthetic polypeptide; note = XENP020971 7G8_H0.40_L0_Fab Light Chain

SEQ ID NO: 29550 - protein, 111 aa, synthetic construct; identical to SEQ ID NO: 17591
  source 1..111: note = Description of Artificial Sequence: Synthetic polypeptide; note = VL of XENP020971

SEQ ID NO: 29551 - protein, 15 aa, synthetic construct
  source 1..15: note = Description of Artificial Sequence: Synthetic peptide; note = XENP020971 vlCDR1
KASQSVDYDGDSYMN

SEQ ID NO: 29552 - protein, 7 aa, synthetic construct
  source 1..7: note = Description of Artificial Sequence: Synthetic peptide; note = XENP020971 vlCDR2
AASNLES

SEQ ID NO: 29553 - protein, 9 aa, synthetic construct
  source 1..9: note = Description of Artificial Sequence: Synthetic peptide; note = XENP020971 vlCDR3
QQSNEDPFT

SEQ ID NO: 29554 - protein, 226 aa, synthetic construct
  source 1..226: note = Description of Artificial Sequence: Synthetic polypeptide; note = XENP020972 7G8_H0.41_L0_Fab Heavy Chain
EVKLEESGGGLVQPGGSMKLSCAASGFTFSDAWMDWVRQSPEKGLEWVAEIRHKANNHATYYAESVKGRFTISRDDSKSSVYLQMNSLRAEDTGIYYCTRLANWDWYFDVWGAGTTVTVSSASTKGPSVFPLAPSSKSTSGGTAALGCLVKDYFPEPVTVSWNSGALTSGVHTFPAVLQSSGLYSLSSVVTVPSSSLGTQTYICNVNHKPSNTKVDKKVEPKSCGS

SEQ ID NO: 29555 - protein, 121 aa, synthetic construct; identical to SEQ ID NO: 18616
  source 1..121: note = Description of Artificial Sequence: Synthetic polypeptide; note = VH of XENP020972

SEQ ID NO: 29556 - protein, 5 aa, synthetic construct
  source 1..5: note = Description of Artificial Sequence: Synthetic peptide; note = XENP020972 vhCDR1
DAWMD

SEQ ID NO: 29557 - protein, 19 aa, synthetic construct
  source 1..19: note = Description of Artificial Sequence: Synthetic peptide; note = XENP020972 vhCDR2
EIRHKANNHATYYAESVKG

SEQ ID NO: 29558 - protein, 10 aa, synthetic construct
  source 1..10: note = Description of Artificial Sequence: Synthetic peptide; note = XENP020972 vhCDR3
LANWDWYFDV

SEQ ID NO: 29559 - protein, 218 aa, synthetic construct; identical to SEQ ID NO: 17590
  source 1..218: note = Description of Artificial Sequence: Synthetic polypeptide; note = XENP020972 7G8_H0.41_L0_Fab Light Chain

SEQ ID NO: 29560 - protein, 111 aa, synthetic construct; identical to SEQ ID NO: 17591
  source 1..111: note = Description of Artificial Sequence: Synthetic polypeptide; note = VL of XENP020972

SEQ ID NO: 29561 - protein, 15 aa, synthetic construct
  source 1..15: note = Description of Artificial Sequence: Synthetic peptide; note = XENP020972 vlCDR1
KASQSVDYDGDSYMN

SEQ ID NO: 29562 - protein, 7 aa, synthetic construct
  source 1..7: note = Description of Artificial Sequence: Synthetic peptide; note = XENP020972 vlCDR2
AASNLES

SEQ ID NO: 29563 - protein, 9 aa, synthetic construct
  source 1..9: note = Description of Artificial Sequence: Synthetic peptide; note = XENP020972 vlCDR3
QQSNEDPFT

SEQ ID NO: 29564 - protein, 226 aa, synthetic construct
  source 1..226: note = Description of Artificial Sequence: Synthetic polypeptide; note = XENP020973 7G8_H0.42_L0_Fab Heavy Chain
EVKLEESGGGLVQPGGSMKLSCAASGFTFSDAWMDWVRQSPEKGLEWVAEIRDKANNHATYYAESVKGRFTISRDDSKSSVYLQMNSLRAEDTGIYYCTRLANWDWYFDVWGAGTTVTVSSASTKGPSVFPLAPSSKSTSGGTAALGCLVKDYFPEPVTVSWNSGALTSGVHTFPAVLQSSGLYSLSSVVTVPSSSLGTQTYICNVNHKPSNTKVDKKVEPKSCGS

SEQ ID NO: 29565 - protein, 121 aa, synthetic construct; identical to SEQ ID NO: 18626
  source 1..121: note = Description of Artificial Sequence: Synthetic polypeptide; note = VH of XENP020973

SEQ ID NO: 29566 - protein, 5 aa, synthetic construct
  source 1..5: note = Description of Artificial Sequence: Synthetic peptide; note = XENP020973 vhCDR1
DAWMD

SEQ ID NO: 29567 - protein, 19 aa, synthetic construct
  source 1..19: note = Description of Artificial Sequence: Synthetic peptide; note = XENP020973 vhCDR2
EIRDKANNHATYYAESVKG

SEQ ID NO: 29568 - protein, 10 aa, synthetic construct
  source 1..10: note = Description of Artificial Sequence: Synthetic peptide; note = XENP020973 vhCDR3
LANWDWYFDV

SEQ ID NO: 29569 - protein, 218 aa, synthetic construct; identical to SEQ ID NO: 17590
  source 1..218: note = Description of Artificial Sequence: Synthetic polypeptide; note = XENP020973 7G8_H0.42_L0_Fab Light Chain

SEQ ID NO: 29570 - protein, 111 aa, synthetic construct; identical to SEQ ID NO: 17591
  source 1..111: note = Description of Artificial Sequence: Synthetic polypeptide; note = VL of XENP020973

SEQ ID NO: 29571 - protein, 15 aa, synthetic construct
  source 1..15: note = Description of Artificial Sequence: Synthetic peptide; note = XENP020973 vlCDR1
KASQSVDYDGDSYMN

SEQ ID NO: 29572 - protein, 7 aa, synthetic construct
  source 1..7: note = Description of Artificial Sequence: Synthetic peptide; note = XENP020973 vlCDR2
AASNLES

SEQ ID NO: 29573 - protein, 9 aa, synthetic construct
  source 1..9: note = Description of Artificial Sequence: Synthetic peptide; note = XENP020973 vlCDR3
QQSNEDPFT

SEQ ID NO: 29574 - protein, 226 aa, synthetic construct
  source 1..226: note = Description of Artificial Sequence: Synthetic polypeptide; note = XENP020974 7G8_H0.43_L0_Fab Heavy Chain
EVKLEESGGGLVQPGGSMKLSCAASGFTFSDAWMDWVRQSPEKGLEWVAEIRKKANNHATYYAESVKGRFTISRDDSKSSVYLQMNSLRAEDTGIYYCTRLANWDWYFDVWGAGTTVTVSSASTKGPSVFPLAPSSKSTSGGTAALGCLVKDYFPEPVTVSWNSGALTSGVHTFPAVLQSSGLYSLSSVVTVPSSSLGTQTYICNVNHKPSNTKVDKKVEPKSCGS

SEQ ID NO: 29575 - protein, 121 aa, synthetic construct; identical to SEQ ID NO: 18636
  source 1..121: note = Description of Artificial Sequence: Synthetic polypeptide; note = VH of XENP020974

SEQ ID NO: 29576 - protein, 5 aa, synthetic construct
  source 1..5: note = Description of Artificial Sequence: Synthetic peptide; note = XENP020974 vhCDR1
DAWMD

SEQ ID NO: 29577 - protein, 19 aa, synthetic construct
  source 1..19: note = Description of Artificial Sequence: Synthetic peptide; note = XENP020974 vhCDR2
EIRKKANNHATYYAESVKG

SEQ ID NO: 29578 - protein, 10 aa, synthetic construct
  source 1..10: note = Description of Artificial Sequence: Synthetic peptide; note = XENP020974 vhCDR3
LANWDWYFDV

SEQ ID NO: 29579 - protein, 218 aa, synthetic construct; identical to SEQ ID NO: 17590
  source 1..218: note = Description of Artificial Sequence: Synthetic polypeptide; note = XENP020974 7G8_H0.43_L0_Fab Light Chain

SEQ ID NO: 29580 - protein, 111 aa, synthetic construct; identical to SEQ ID NO: 17591
  source 1..111: note = Description of Artificial Sequence: Synthetic polypeptide; note = VL of XENP020974

SEQ ID NO: 29581 - protein, 15 aa, synthetic construct
  source 1..15: note = Description of Artificial Sequence: Synthetic peptide; note = XENP020974 vlCDR1
KASQSVDYDGDSYMN

SEQ ID NO: 29582 - protein, 7 aa, synthetic construct
  source 1..7: note = Description of Artificial Sequence: Synthetic peptide; note = XENP020974 vlCDR2
AASNLES

SEQ ID NO: 29583 - protein, 9 aa, synthetic construct
  source 1..9: note = Description of Artificial Sequence: Synthetic peptide; note = XENP020974 vlCDR3
QQSNEDPFT

SEQ ID NO: 29584 - protein, 226 aa, synthetic construct
  source 1..226: note = Description of Artificial Sequence: Synthetic polypeptide; note = XENP020975 7G8_H0.44_L0_Fab Heavy Chain
EVKLEESGGGLVQPGGSMKLSCAASGFTFSDAWMDWVRQSPEKGLEWVAEIRYKANNHATYYAESVKGRFTISRDDSKSSVYLQMNSLRAEDTGIYYCTRLANWDWYFDVWGAGTTVTVSSASTKGPSVFPLAPSSKSTSGGTAALGCLVKDYFPEPVTVSWNSGALTSGVHTFPAVLQSSGLYSLSSVVTVPSSSLGTQTYICNVNHKPSNTKVDKKVEPKSCGS

SEQ ID NO: 29585 - protein, 121 aa, synthetic construct; identical to SEQ ID NO: 18646
  source 1..121: note = Description of Artificial Sequence: Synthetic polypeptide; note = VH of XENP020975

SEQ ID NO: 29586 - protein, 5 aa, synthetic construct
  source 1..5: note = Description of Artificial Sequence: Synthetic peptide; note = XENP020975 vhCDR1
DAWMD

SEQ ID NO: 29587 - protein, 19 aa, synthetic construct
  source 1..19: note = Description of Artificial Sequence: Synthetic peptide; note = XENP020975 vhCDR2
EIRYKANNHATYYAESVKG

SEQ ID NO: 29588 - protein, 10 aa, synthetic construct
  source 1..10: note = Description of Artificial Sequence: Synthetic peptide; note = XENP020975 vhCDR3
LANWDWYFDV

SEQ ID NO: 29589 - protein, 218 aa, synthetic construct; identical to SEQ ID NO: 17590
  source 1..218: note = Description of Artificial Sequence: Synthetic polypeptide; note = XENP020975 7G8_H0.44_L0_Fab Light Chain

SEQ ID NO: 29590 - protein, 111 aa, synthetic construct; identical to SEQ ID NO: 17591
  source 1..111: note = Description of Artificial Sequence: Synthetic polypeptide; note = VL of XENP020975

SEQ ID NO: 29591 - protein, 15 aa, synthetic construct
  source 1..15: note = Description of Artificial Sequence: Synthetic peptide; note = XENP020975 vlCDR1
KASQSVDYDGDSYMN

SEQ ID NO: 29592 - protein, 7 aa, synthetic construct
  source 1..7: note = Description of Artificial Sequence: Synthetic peptide; note = XENP020975 vlCDR2
AASNLES

SEQ ID NO: 29593 - protein, 9 aa, synthetic construct
  source 1..9: note = Description of Artificial Sequence: Synthetic peptide; note = XENP020975 vlCDR3
QQSNEDPFT

SEQ ID NO: 29594 - protein, 226 aa, synthetic construct
  source 1..226: note = Description of Artificial Sequence: Synthetic polypeptide; note = XENP020976 7G8_H0.45_L0_Fab Heavy Chain
EVKLEESGGGLVQPGGSMKLSCAASGFTFSDAWMDWVRQSPEKGLEWVAEIRTRANNHATYYAESVKGRFTISRDDSKSSVYLQMNSLRAEDTGIYYCTRLANWDWYFDVWGAGTTVTVSSASTKGPSVFPLAPSSKSTSGGTAALGCLVKDYFPEPVTVSWNSGALTSGVHTFPAVLQSSGLYSLSSVVTVPSSSLGTQTYICNVNHKPSNTKVDKKVEPKSCGS

SEQ ID NO: 29595 - protein, 121 aa, synthetic construct; identical to SEQ ID NO: 18656
  source 1..121: note = Description of Artificial Sequence: Synthetic polypeptide; note = VH of XENP020976

SEQ ID NO: 29596 - protein, 5 aa, synthetic construct
  source 1..5: note = Description of Artificial Sequence: Synthetic peptide; note = XENP020976 vhCDR1
DAWMD

SEQ ID NO: 29597 - protein, 19 aa, synthetic construct
  source 1..19: note = Description of Artificial Sequence: Synthetic peptide; note = XENP020976 vhCDR2
EIRTRANNHATYYAESVKG

SEQ ID NO: 29598 - protein, 10 aa, synthetic construct
  source 1..10: note = Description of Artificial Sequence: Synthetic peptide; note = XENP020976 vhCDR3
LANWDWYFDV

SEQ ID NO: 29599 - protein, 218 aa, synthetic construct; identical to SEQ ID NO: 17590
  source 1..218: note = Description of Artificial Sequence: Synthetic polypeptide; note = XENP020976 7G8_H0.45_L0_Fab Light Chain

SEQ ID NO: 29600 - protein, 111 aa, synthetic construct; identical to SEQ ID NO: 17591
  source 1..111: note = Description of Artificial Sequence: Synthetic polypeptide; note = VL of XENP020976

SEQ ID NO: 29601 - protein, 15 aa, synthetic construct
  source 1..15: note = Description of Artificial Sequence: Synthetic peptide; note = XENP020976 vlCDR1
KASQSVDYDGDSYMN

SEQ ID NO: 29602 - protein, 7 aa, synthetic construct
  source 1..7: note = Description of Artificial Sequence: Synthetic peptide; note = XENP020976 vlCDR2
AASNLES

SEQ ID NO: 29603 - protein, 9 aa, synthetic construct
  source 1..9: note = Description of Artificial Sequence: Synthetic peptide; note = XENP020976 vlCDR3
QQSNEDPFT

SEQ ID NO: 29604 - protein, 226 aa, synthetic construct
  source 1..226: note = Description of Artificial Sequence: Synthetic polypeptide; note = XENP020977 7G8_H0.46_L0_Fab Heavy Chain
EVKLEESGGGLVQPGGSMKLSCAASGFTFSDAWMDWVRQSPEKGLEWVAEIRTEANNHATYYAESVKGRFTISRDDSKSSVYLQMNSLRAEDTGIYYCTRLANWDWYFDVWGAGTTVTVSSASTKGPSVFPLAPSSKSTSGGTAALGCLVKDYFPEPVTVSWNSGALTSGVHTFPAVLQSSGLYSLSSVVTVPSSSLGTQTYICNVNHKPSNTKVDKKVEPKSCGS

SEQ ID NO: 29605 - protein, 121 aa, synthetic construct; identical to SEQ ID NO: 18666
  source 1..121: note = Description of Artificial Sequence: Synthetic polypeptide; note = VH of XENP020977

SEQ ID NO: 29606 - protein, 5 aa, synthetic construct
  source 1..5: note = Description of Artificial Sequence: Synthetic peptide; note = XENP020977 vhCDR1
DAWMD

SEQ ID NO: 29607 - protein, 19 aa, synthetic construct
  source 1..19: note = Description of Artificial Sequence: Synthetic peptide; note = XENP020977 vhCDR2
EIRTEANNHATYYAESVKG

SEQ ID NO: 29608 - protein, 10 aa, synthetic construct
  source 1..10: note = Description of Artificial Sequence: Synthetic peptide; note = XENP020977 vhCDR3
LANWDWYFDV

SEQ ID NO: 29609 - protein, 218 aa, synthetic construct; identical to SEQ ID NO: 17590
  source 1..218: note = Description of Artificial Sequence: Synthetic polypeptide; note = XENP020977 7G8_H0.46_L0_Fab Light Chain

SEQ ID NO: 29610 - protein, 111 aa, synthetic construct; identical to SEQ ID NO: 17591
  source 1..111: note = Description of Artificial Sequence: Synthetic polypeptide; note = VL of XENP020977

SEQ ID NO: 29611 - protein, 15 aa, synthetic construct
  source 1..15: note = Description of Artificial Sequence: Synthetic peptide; note = XENP020977 vlCDR1
KASQSVDYDGDSYMN

SEQ ID NO: 29612 - protein, 7 aa, synthetic construct
  source 1..7: note = Description of Artificial Sequence: Synthetic peptide; note = XENP020977 vlCDR2
AASNLES

SEQ ID NO: 29613 - protein, 9 aa, synthetic construct
  source 1..9: note = Description of Artificial Sequence: Synthetic peptide; note = XENP020977 vlCDR3
QQSNEDPFT

SEQ ID NO: 29614 - protein, 226 aa, synthetic construct
  source 1..226: note = Description of Artificial Sequence: Synthetic polypeptide; note = XENP020978 7G8_H0.47_L0_Fab Heavy Chain
EVKLEESGGGLVQPGGSMKLSCAASGFTFSDAWMDWVRQSPEKGLEWVAEIRTHANNHATYYAESVKGRFTISRDDSKSSVYLQMNSLRAEDTGIYYCTRLANWDWYFDVWGAGTTVTVSSASTKGPSVFPLAPSSKSTSGGTAALGCLVKDYFPEPVTVSWNSGALTSGVHTFPAVLQSSGLYSLSSVVTVPSSSLGTQTYICNVNHKPSNTKVDKKVEPKSCGS

SEQ ID NO: 29615 - protein, 121 aa, synthetic construct; identical to SEQ ID NO: 18676
  source 1..121: note = Description of Artificial Sequence: Synthetic polypeptide; note = VH of XENP020978

SEQ ID NO: 29616 - protein, 5 aa, synthetic construct
  source 1..5: note = Description of Artificial Sequence: Synthetic peptide; note = XENP020978 vhCDR1
DAWMD

SEQ ID NO: 29617 - protein, 19 aa, synthetic construct
  source 1..19: note = Description of Artificial Sequence: Synthetic peptide; note = XENP020978 vhCDR2
EIRTHANNHATYYAESVKG

SEQ ID NO: 29618 - protein, 10 aa, synthetic construct
  source 1..10: note = Description of Artificial Sequence: Synthetic peptide; note = XENP020978 vhCDR3
LANWDWYFDV

SEQ ID NO: 29619 - protein, 218 aa, synthetic construct; identical to SEQ ID NO: 17590
  source 1..218: note = Description of Artificial Sequence: Synthetic polypeptide; note = XENP020978 7G8_H0.47_L0_Fab Light Chain

SEQ ID NO: 29620 - protein, 111 aa, synthetic construct; identical to SEQ ID NO: 17591
  source 1..111: note = Description of Artificial Sequence: Synthetic polypeptide; note = VL of XENP020978

SEQ ID NO: 29621 - protein, 15 aa, synthetic construct
  source 1..15: note = Description of Artificial Sequence: Synthetic peptide; note = XENP020978 vlCDR1
KASQSVDYDGDSYMN

SEQ ID NO: 29622 - protein, 7 aa, synthetic construct
  source 1..7: note = Description of Artificial Sequence: Synthetic peptide; note = XENP020978 vlCDR2
AASNLES

SEQ ID NO: 29623 - protein, 9 aa, synthetic construct
  source 1..9: note = Description of Artificial Sequence: Synthetic peptide; note = XENP020978 vlCDR3
QQSNEDPFT

SEQ ID NO: 29624 - protein, 226 aa, synthetic construct
  source 1..226: note = Description of Artificial Sequence: Synthetic polypeptide; note = XENP020979 7G8_H0.48_L0_Fab Heavy Chain
EVKLEESGGGLVQPGGSMKLSCAASGFTFSDAWMDWVRQSPEKGLEWVAEIRTSANNHATYYAESVKGRFTISRDDSKSSVYLQMNSLRAEDTGIYYCTRLANWDWYFDVWGAGTTVTVSSASTKGPSVFPLAPSSKSTSGGTAALGCLVKDYFPEPVTVSWNSGALTSGVHTFPAVLQSSGLYSLSSVVTVPSSSLGTQTYICNVNHKPSNTKVDKKVEPKSCGS

SEQ ID NO: 29625 - protein, 121 aa, synthetic construct; identical to SEQ ID NO: 18686
  source 1..121: note = Description of Artificial Sequence: Synthetic polypeptide; note = VH of XENP020979

SEQ ID NO: 29626 - protein, 5 aa, synthetic construct
  source 1..5: note = Description of Artificial Sequence: Synthetic peptide; note = XENP020979 vhCDR1
DAWMD

SEQ ID NO: 29627 - protein, 19 aa, synthetic construct
  source 1..19: note = Description of Artificial Sequence: Synthetic peptide; note = XENP020979 vhCDR2
EIRTSANNHATYYAESVKG

SEQ ID NO: 29628 - protein, 10 aa, synthetic construct
  source 1..10: note = Description of Artificial Sequence: Synthetic peptide; note = XENP020979 vhCDR3
LANWDWYFDV

SEQ ID NO: 29629 - protein, 218 aa, synthetic construct; identical to SEQ ID NO: 17590
  source 1..218: note = Description of Artificial Sequence: Synthetic polypeptide; note = XENP020979 7G8_H0.48_L0_Fab Light Chain

SEQ ID NO: 29630 - protein, 111 aa, synthetic construct; identical to SEQ ID NO: 17591
  source 1..111: note = Description of Artificial Sequence: Synthetic polypeptide; note = VL of XENP020979

SEQ ID NO: 29631 - protein, 15 aa, synthetic construct
  source 1..15: note = Description of Artificial Sequence: Synthetic peptide; note = XENP020979 vlCDR1
KASQSVDYDGDSYMN

SEQ ID NO: 29632 - protein, 7 aa, synthetic construct
  source 1..7: note = Description of Artificial Sequence: Synthetic peptide; note = XENP020979 vlCDR2
AASNLES

SEQ ID NO: 29633 - protein, 9 aa, synthetic construct
  source 1..9: note = Description of Artificial Sequence: Synthetic peptide; note = XENP020979 vlCDR3
QQSNEDPFT

SEQ ID NO: 29634 - protein, 226 aa, synthetic construct
  source 1..226: note = Description of Artificial Sequence: Synthetic polypeptide; note = XENP020980 7G8_H0.49_L0_Fab Heavy Chain
EVKLEESGGGLVQPGGSMKLSCAASGFTFSDAWMDWVRQSPEKGLEWVAEIRTDANNHATYYAESVKGRFTISRDDSKSSVYLQMNSLRAEDTGIYYCTRLANWDWYFDVWGAGTTVTVSSASTKGPSVFPLAPSSKSTSGGTAALGCLVKDYFPEPVTVSWNSGALTSGVHTFPAVLQSSGLYSLSSVVTVPSSSLGTQTYICNVNHKPSNTKVDKKVEPKSCGS

SEQ ID NO: 29635 - protein, 121 aa, synthetic construct; identical to SEQ ID NO: 18696
  source 1..121: note = Description of Artificial Sequence: Synthetic polypeptide; note = VH of XENP020980

SEQ ID NO: 29636 - protein, 5 aa, synthetic construct
  source 1..5: note = Description of Artificial Sequence: Synthetic peptide; note = XENP020980 vhCDR1
DAWMD

SEQ ID NO: 29637 - protein, 19 aa, synthetic construct
  source 1..19: note = Description of Artificial Sequence: Synthetic peptide; note = XENP020980 vhCDR2
EIRTDANNHATYYAESVKG

SEQ ID NO: 29638 - protein, 10 aa, synthetic construct
  source 1..10: note = Description of Artificial Sequence: Synthetic peptide; note = XENP020980 vhCDR3
LANWDWYFDV

SEQ ID NO: 29639 - protein, 218 aa, synthetic construct; identical to SEQ ID NO: 17590
  source 1..218: note = Description of Artificial Sequence: Synthetic polypeptide; note = XENP020980 7G8_H0.49_L0_Fab Light Chain

SEQ ID NO: 29640 - protein, 111 aa, synthetic construct; identical to SEQ ID NO: 17591
  source 1..111: note = Description of Artificial Sequence: Synthetic polypeptide; note = VL of XENP020980

SEQ ID NO: 29641 - protein, 15 aa, synthetic construct
  source 1..15: note = Description of Artificial Sequence: Synthetic peptide; note = XENP020980 vlCDR1
KASQSVDYDGDSYMN

SEQ ID NO: 29642 - protein, 7 aa, synthetic construct
  source 1..7: note = Description of Artificial Sequence: Synthetic peptide; note = XENP020980 vlCDR2
AASNLES

SEQ ID NO: 29643 - protein, 9 aa, synthetic construct
  source 1..9: note = Description of Artificial Sequence: Synthetic peptide; note = XENP020980 vlCDR3
QQSNEDPFT

SEQ ID NO: 29644 - protein, 226 aa, synthetic construct
  source 1..226: note = Description of Artificial Sequence: Synthetic polypeptide; note = XENP020981 7G8_H0.50_L0_Fab Heavy Chain
EVKLEESGGGLVQPGGSMKLSCAASGFTFSDAWMDWVRQSPEKGLEWVAEIRTAANNHATYYAESVKGRFTISRDDSKSSVYLQMNSLRAEDTGIYYCTRLANWDWYFDVWGAGTTVTVSSASTKGPSVFPLAPSSKSTSGGTAALGCLVKDYFPEPVTVSWNSGALTSGVHTFPAVLQSSGLYSLSSVVTVPSSSLGTQTYICNVNHKPSNTKVDKKVEPKSCGS

SEQ ID NO: 29645 - protein, 121 aa, synthetic construct; identical to SEQ ID NO: 18706
  source 1..121: note = Description of Artificial Sequence: Synthetic polypeptide; note = VH of XENP020981

SEQ ID NO: 29646 - protein, 5 aa, synthetic construct
  source 1..5: note = Description of Artificial Sequence: Synthetic peptide; note = XENP020981 vhCDR1
DAWMD

SEQ ID NO: 29647 - protein, 19 aa, synthetic construct
  source 1..19: note = Description of Artificial Sequence: Synthetic peptide; note = XENP020981 vhCDR2
EIRTAANNHATYYAESVKG

SEQ ID NO: 29648 - protein, 10 aa, synthetic construct
  source 1..10: note = Description of Artificial Sequence: Synthetic peptide; note = XENP020981 vhCDR3
LANWDWYFDV

SEQ ID NO: 29649 - protein, 218 aa, synthetic construct; identical to SEQ ID NO: 17590
  source 1..218: note = Description of Artificial Sequence: Synthetic polypeptide; note = XENP020981 7G8_H0.50_L0_Fab Light Chain

SEQ ID NO: 29650 - protein, 111 aa, synthetic construct; identical to SEQ ID NO: 17591
  source 1..111: note = Description of Artificial Sequence: Synthetic polypeptide; note = VL of XENP020981

SEQ ID NO: 29651 - protein, 15 aa, synthetic construct
  source 1..15: note = Description of Artificial Sequence: Synthetic peptide; note = XENP020981 vlCDR1
KASQSVDYDGDSYMN

SEQ ID NO: 29652 - protein, 7 aa, synthetic construct
  source 1..7: note = Description of Artificial Sequence: Synthetic peptide; note = XENP020981 vlCDR2
AASNLES

SEQ ID NO: 29653 - protein, 9 aa, synthetic construct
  source 1..9: note = Description of Artificial Sequence: Synthetic peptide; note = XENP020981 vlCDR3
QQSNEDPFT

SEQ ID NO: 29654 - protein, 226 aa, synthetic construct
  source 1..226: note = Description of Artificial Sequence: Synthetic polypeptide; note = XENP020982 7G8_H0.51_L0_Fab Heavy Chain
EVKLEESGGGLVQPGGSMKLSCAASGFTFSDAWMDWVRQSPEKGLEWVAEIRTGANNHATYYAESVKGRFTISRDDSKSSVYLQMNSLRAEDTGIYYCTRLANWDWYFDVWGAGTTVTVSSASTKGPSVFPLAPSSKSTSGGTAALGCLVKDYFPEPVTVSWNSGALTSGVHTFPAVLQSSGLYSLSSVVTVPSSSLGTQTYICNVNHKPSNTKVDKKVEPKSCGS

SEQ ID NO: 29655 - protein, 121 aa, synthetic construct; identical to SEQ ID NO: 18716
  source 1..121: note = Description of Artificial Sequence: Synthetic polypeptide; note = VH of XENP020982

SEQ ID NO: 29656 - protein, 5 aa, synthetic construct
  source 1..5: note = Description of Artificial Sequence: Synthetic peptide; note = XENP020982 vhCDR1
DAWMD

SEQ ID NO: 29657 - protein, 19 aa, synthetic construct
  source 1..19: note = Description of Artificial Sequence: Synthetic peptide; note = XENP020982 vhCDR2
EIRTGANNHATYYAESVKG

SEQ ID NO: 29658 - protein, 10 aa, synthetic construct
  source 1..10: note = Description of Artificial Sequence: Synthetic peptide; note = XENP020982 vhCDR3
LANWDWYFDV

SEQ ID NO: 29659 - protein, 218 aa, synthetic construct; identical to SEQ ID NO: 17590
  source 1..218: note = Description of Artificial Sequence: Synthetic polypeptide; note = XENP020982 7G8_H0.51_L0_Fab Light Chain

SEQ ID NO: 29660 - protein, 111 aa, synthetic construct; identical to SEQ ID NO: 17591
  source 1..111: note = Description of Artificial Sequence: Synthetic polypeptide; note = VL of XENP020982

SEQ ID NO: 29661 - protein, 15 aa, synthetic construct
  source 1..15: note = Description of Artificial Sequence: Synthetic peptide; note = XENP020982 vlCDR1
KASQSVDYDGDSYMN

SEQ ID NO: 29662 - protein, 7 aa, synthetic construct
  source 1..7: note = Description of Artificial Sequence: Synthetic peptide; note = XENP020982 vlCDR2
AASNLES

SEQ ID NO: 29663 - protein, 9 aa, synthetic construct
  source 1..9: note = Description of Artificial Sequence: Synthetic peptide; note = XENP020982 vlCDR3
QQSNEDPFT

SEQ ID NO: 29664 - protein, 226 aa, synthetic construct
  source 1..226: note = Description of Artificial Sequence: Synthetic polypeptide; note = XENP020983 7G8_H0.52_L0_Fab Heavy Chain
EVKLEESGGGLVQPGGSMKLSCAASGFTFSDAWMDWVRQSPEKGLEWVAEIRTYANNHATYYAESVKGRFTISRDDSKSSVYLQMNSLRAEDTGIYYCTRLANWDWYFDVWGAGTTVTVSSASTKGPSVFPLAPSSKSTSGGTAALGCLVKDYFPEPVTVSWNSGALTSGVHTFPAVLQSSGLYSLSSVVTVPSSSLGTQTYICNVNHKPSNTKVDKKVEPKSCGS

SEQ ID NO: 29665 - protein, 121 aa, synthetic construct; identical to SEQ ID NO: 18726
  source 1..121: note = Description of Artificial Sequence: Synthetic polypeptide; note = VH of XENP020983

SEQ ID NO: 29666 - protein, 5 aa, synthetic construct
  source 1..5: note = Description of Artificial Sequence: Synthetic peptide; note = XENP020983 vhCDR1
DAWMD

SEQ ID NO: 29667 - protein, 19 aa, synthetic construct
  source 1..19: note = Description of Artificial Sequence: Synthetic peptide; note = XENP020983 vhCDR2
EIRTYANNHATYYAESVKG

SEQ ID NO: 29668 - protein, 10 aa, synthetic construct
  source 1..10: note = Description of Artificial Sequence: Synthetic peptide; note = XENP020983 vhCDR3
LANWDWYFDV

SEQ ID NO: 29669 - protein, 218 aa, synthetic construct; identical to SEQ ID NO: 17590
  source 1..218: note = Description of Artificial Sequence: Synthetic polypeptide; note = XENP020983 7G8_H0.52_L0_Fab Light Chain

SEQ ID NO: 29670 - protein, 111 aa, synthetic construct; identical to SEQ ID NO: 17591
  source 1..111: note = Description of Artificial Sequence: Synthetic polypeptide; note = VL of XENP020983

SEQ ID NO: 29671 - protein, 15 aa, synthetic construct
  source 1..15: note = Description of Artificial Sequence: Synthetic peptide; note = XENP020983 vlCDR1
KASQSVDYDGDSYMN

SEQ ID NO: 29672 - protein, 7 aa, synthetic construct
  source 1..7: note = Description of Artificial Sequence: Synthetic peptide; note = XENP020983 vlCDR2
AASNLES

SEQ ID NO: 29673 - protein, 9 aa, synthetic construct
  source 1..9: note = Description of Artificial Sequence: Synthetic peptide; note = XENP020983 vlCDR3
QQSNEDPFT

SEQ ID NO: 29674 - protein, 226 aa, synthetic construct
  source 1..226: note = Description of Artificial Sequence: Synthetic polypeptide; note = XENP020984 7G8_H0.53_L0_Fab Heavy Chain
EVKLEESGGGLVQPGGSMKLSCAASGFTFSDAWMDWVRQSPEKGLEWVAEIRTIANNHATYYAESVKGRFTISRDDSKSSVYLQMNSLRAEDTGIYYCTRLANWDWYFDVWGAGTTVTVSSASTKGPSVFPLAPSSKSTSGGTAALGCLVKDYFPEPVTVSWNSGALTSGVHTFPAVLQSSGLYSLSSVVTVPSSSLGTQTYICNVNHKPSNTKVDKKVEPKSCGS

SEQ ID NO: 29675 - protein, 121 aa, synthetic construct; identical to SEQ ID NO: 18736
  source 1..121: note = Description of Artificial Sequence: Synthetic polypeptide; note = VH of XENP020984

SEQ ID NO: 29676 - protein, 5 aa, synthetic construct
  source 1..5: note = Description of Artificial Sequence: Synthetic peptide; note = XENP020984 vhCDR1
DAWMD

SEQ ID NO: 29677 - protein, 19 aa, synthetic construct
  source 1..19: note = Description of Artificial Sequence: Synthetic peptide; note = XENP020984 vhCDR2
EIRTIANNHATYYAESVKG

SEQ ID NO: 29678 - protein, 10 aa, synthetic construct
  source 1..10: note = Description of Artificial Sequence: Synthetic peptide; note = XENP020984 vhCDR3
LANWDWYFDV

SEQ ID NO: 29679 - protein, 218 aa, synthetic construct; identical to SEQ ID NO: 17590
  source 1..218: note = Description of Artificial Sequence: Synthetic polypeptide; note = XENP020984 7G8_H0.53_L0_Fab Light Chain

SEQ ID NO: 29680 - protein, 111 aa, synthetic construct; identical to SEQ ID NO: 17591
  source 1..111: note = Description of Artificial Sequence: Synthetic polypeptide; note = VL of XENP020984

SEQ ID NO: 29681 - protein, 15 aa, synthetic construct
  source 1..15: note = Description of Artificial Sequence: Synthetic peptide; note = XENP020984 vlCDR1
KASQSVDYDGDSYMN

SEQ ID NO: 29682 - protein, 7 aa, synthetic construct
  source 1..7: note = Description of Artificial Sequence: Synthetic peptide; note = XENP020984 vlCDR2
AASNLES

SEQ ID NO: 29683 - protein, 9 aa, synthetic construct
  source 1..9: note = Description of Artificial Sequence: Synthetic peptide; note = XENP020984 vlCDR3
QQSNEDPFT

SEQ ID NO: 29684 - protein, 226 aa, synthetic construct
  source 1..226: note = Description of Artificial Sequence: Synthetic polypeptide; note = XENP020985 7G8_H0.54_L0_Fab Heavy Chain
EVKLEESGGGLVQPGGSMKLSCAASGFTFSDAWMDWVRQSPEKGLEWVAEIRTKSNNHATYYAESVKGRFTISRDDSKSSVYLQMNSLRAEDTGIYYCTRLANWDWYFDVWGAGTTVTVSSASTKGPSVFPLAPSSKSTSGGTAALGCLVKDYFPEPVTVSWNSGALTSGVHTFPAVLQSSGLYSLSSVVTVPSSSLGTQTYICNVNHKPSNTKVDKKVEPKSCGS

SEQ ID NO: 29685 - protein, 121 aa, synthetic construct; identical to SEQ ID NO: 18746
  source 1..121: note = Description of Artificial Sequence: Synthetic polypeptide; note = VH of XENP020985

SEQ ID NO: 29686 - protein, 5 aa, synthetic construct
  source 1..5: note = Description of Artificial Sequence: Synthetic peptide; note = XENP020985 vhCDR1
DAWMD

SEQ ID NO: 29687 - protein, 19 aa, synthetic construct
  source 1..19: note = Description of Artificial Sequence: Synthetic peptide; note = XENP020985 vhCDR2
EIRTKSNNHATYYAESVKG

SEQ ID NO: 29688 - protein, 10 aa, synthetic construct
  source 1..10: note = Description of Artificial Sequence: Synthetic peptide; note = XENP020985 vhCDR3
LANWDWYFDV

SEQ ID NO: 29689 - protein, 218 aa, synthetic construct; identical to SEQ ID NO: 17590
  source 1..218: note = Description of Artificial Sequence: Synthetic polypeptide; note = XENP020985 7G8_H0.54_L0_Fab Light Chain

SEQ ID NO: 29690 - protein, 111 aa, synthetic construct; identical to SEQ ID NO: 17591
  source 1..111: note = Description of Artificial Sequence: Synthetic polypeptide; note = VL of XENP020985

SEQ ID NO: 29691 - protein, 15 aa, synthetic construct
  source 1..15: note = Description of Artificial Sequence: Synthetic peptide; note = XENP020985 vlCDR1
KASQSVDYDGDSYMN

SEQ ID NO: 29692 - protein, 7 aa, synthetic construct
  source 1..7: note = Description of Artificial Sequence: Synthetic peptide; note = XENP020985 vlCDR2
AASNLES

SEQ ID NO: 29693 - protein, 9 aa, synthetic construct
  source 1..9: note = Description of Artificial Sequence: Synthetic peptide; note = XENP020985 vlCDR3
QQSNEDPFT

SEQ ID NO: 29694 - protein, 226 aa, synthetic construct
  source 1..226: note = Description of Artificial Sequence: Synthetic polypeptide; note = XENP020986 7G8_H0.55_L0_Fab Heavy Chain
EVKLEESGGGLVQPGGSMKLSCAASGFTFSDAWMDWVRQSPEKGLEWVAEIRTKTNNHATYYAESVKGRFTISRDDSKSSVYLQMNSLRAEDTGIYYCTRLANWDWYFDVWGAGTTVTVSSASTKGPSVFPLAPSSKSTSGGTAALGCLVKDYFPEPVTVSWNSGALTSGVHTFPAVLQSSGLYSLSSVVTVPSSSLGTQTYICNVNHKPSNTKVDKKVEPKSCGS

SEQ ID NO: 29695 - protein, 121 aa, synthetic construct; identical to SEQ ID NO: 18756
  source 1..121: note = Description of Artificial Sequence: Synthetic polypeptide; note = VH of XENP020986

SEQ ID NO: 29696 - protein, 5 aa, synthetic construct
  source 1..5: note = Description of Artificial Sequence: Synthetic peptide; note = XENP020986 vhCDR1
DAWMD

SEQ ID NO: 29697 - protein, 19 aa, synthetic construct
  source 1..19: note = Description of Artificial Sequence: Synthetic peptide; note = XENP020986 vhCDR2
EIRTKTNNHATYYAESVKG

SEQ ID NO: 29698 - protein, 10 aa, synthetic construct
  source 1..10: note = Description of Artificial Sequence: Synthetic peptide; note = XENP020986 vhCDR3
LANWDWYFDV

SEQ ID NO: 29699 - protein, 218 aa, synthetic construct; identical to SEQ ID NO: 17590
  source 1..218: note = Description of Artificial Sequence: Synthetic polypeptide; note = XENP020986 7G8_H0.55_L0_Fab Light Chain

SEQ ID NO: 29700 - protein, 111 aa, synthetic construct; identical to SEQ ID NO: 17591
  source 1..111: note = Description of Artificial Sequence: Synthetic polypeptide; note = VL of XENP020986

SEQ ID NO: 29701 - protein, 15 aa, synthetic construct
  source 1..15: note = Description of Artificial Sequence: Synthetic peptide; note = XENP020986 vlCDR1
KASQSVDYDGDSYMN

SEQ ID NO: 29702 - protein, 7 aa, synthetic construct
  source 1..7: note = Description of Artificial Sequence: Synthetic peptide; note = XENP020986 vlCDR2
AASNLES

SEQ ID NO: 29703 - protein, 9 aa, synthetic construct
  source 1..9: note = Description of Artificial Sequence: Synthetic peptide; note = XENP020986 vlCDR3
QQSNEDPFT

SEQ ID NO: 29704 - protein, 226 aa, synthetic construct
  source 1..226: note = Description of Artificial Sequence: Synthetic polypeptide; note = XENP020987 7G8_H0.56_L0_Fab Heavy Chain
EVKLEESGGGLVQPGGSMKLSCAASGFTFSDAWMDWVRQSPEKGLEWVAEIRTKGNNHATYYAESVKGRFTISRDDSKSSVYLQMNSLRAEDTGIYYCTRLANWDWYFDVWGAGTTVTVSSASTKGPSVFPLAPSSKSTSGGTAALGCLVKDYFPEPVTVSWNSGALTSGVHTFPAVLQSSGLYSLSSVVTVPSSSLGTQTYICNVNHKPSNTKVDKKVEPKSCGS

SEQ ID NO: 29705 - protein, 121 aa, synthetic construct; identical to SEQ ID NO: 18766
  source 1..121: note = Description of Artificial Sequence: Synthetic polypeptide; note = VH of XENP020987

SEQ ID NO: 29706 - protein, 5 aa, synthetic construct
  source 1..5: note = Description of Artificial Sequence: Synthetic peptide; note = XENP020987 vhCDR1
DAWMD

SEQ ID NO: 29707 - protein, 19 aa, synthetic construct
  source 1..19: note = Description of Artificial Sequence: Synthetic peptide; note = XENP020987 vhCDR2
EIRTKGNNHATYYAESVKG

SEQ ID NO: 29708 - protein, 10 aa, synthetic construct
  source 1..10: note = Description of Artificial Sequence: Synthetic peptide; note = XENP020987 vhCDR3
LANWDWYFDV

SEQ ID NO: 29709 - protein, 218 aa, synthetic construct; identical to SEQ ID NO: 17590
  source 1..218: note = Description of Artificial Sequence: Synthetic polypeptide; note = XENP020987 7G8_H0.56_L0_Fab Light Chain

SEQ ID NO: 29710 - protein, 111 aa, synthetic construct; identical to SEQ ID NO: 17591
  source 1..111: note = Description of Artificial Sequence: Synthetic polypeptide; note = VL of XENP020987

SEQ ID NO: 29711 - protein, 15 aa, synthetic construct
  source 1..15: note = Description of Artificial Sequence: Synthetic peptide; note = XENP020987 vlCDR1
KASQSVDYDGDSYMN

SEQ ID NO: 29712 - protein, 7 aa, synthetic construct
  source 1..7: note = Description of Artificial Sequence: Synthetic peptide; note = XENP020987 vlCDR2
AASNLES

SEQ ID NO: 29713 - protein, 9 aa, synthetic construct
  source 1..9: note = Description of Artificial Sequence: Synthetic peptide; note = XENP020987 vlCDR3
QQSNEDPFT

SEQ ID NO: 29714 - protein, 226 aa, synthetic construct
  source 1..226: note = Description of Artificial Sequence: Synthetic polypeptide; note = XENP020988 7G8_H0.57_L0_Fab Heavy Chain
EVKLEESGGGLVQPGGSMKLSCAASGFTFSDAWMDWVRQSPEKGLEWVAEIRTKHNNHATYYAESVKGRFTISRDDSKSSVYLQMNSLRAEDTGIYYCTRLANWDWYFDVWGAGTTVTVSSASTKGPSVFPLAPSSKSTSGGTAALGCLVKDYFPEPVTVSWNSGALTSGVHTFPAVLQSSGLYSLSSVVTVPSSSLGTQTYICNVNHKPSNTKVDKKVEPKSCGS

SEQ ID NO: 29715 - protein, 121 aa, synthetic construct; identical to SEQ ID NO: 18776
  source 1..121: note = Description of Artificial Sequence: Synthetic polypeptide; note = VH of XENP020988

SEQ ID NO: 29716 - protein, 5 aa, synthetic construct
  source 1..5: note = Description of Artificial Sequence: Synthetic peptide; note = XENP020988 vhCDR1
DAWMD

SEQ ID NO: 29717 - protein, 19 aa, synthetic construct
  source 1..19: note = Description of Artificial Sequence: Synthetic peptide; note = XENP020988 vhCDR2
EIRTKHNNHATYYAESVKG

SEQ ID NO: 29718 - protein, 10 aa, synthetic construct
  source 1..10: note = Description of Artificial Sequence: Synthetic peptide; note = XENP020988 vhCDR3
LANWDWYFDV

SEQ ID NO: 29719 - protein, 218 aa, synthetic construct; identical to SEQ ID NO: 17590
  source 1..218: note = Description of Artificial Sequence: Synthetic polypeptide; note = XENP020988 7G8_H0.57_L0_Fab Light Chain

SEQ ID NO: 29720 - protein, 111 aa, synthetic construct; identical to SEQ ID NO: 17591
  source 1..111: note = Description of Artificial Sequence: Synthetic polypeptide; note = VL of XENP020988

SEQ ID NO: 29721 - protein, 15 aa, synthetic construct
  source 1..15: note = Description of Artificial Sequence: Synthetic peptide; note = XENP020988 vlCDR1
KASQSVDYDGDSYMN

SEQ ID NO: 29722 - protein, 7 aa, synthetic construct
  source 1..7: note = Description of Artificial Sequence: Synthetic peptide; note = XENP020988 vlCDR2
AASNLES

SEQ ID NO: 29723 - protein, 9 aa, synthetic construct
  source 1..9: note = Description of Artificial Sequence: Synthetic peptide; note = XENP020988 vlCDR3
QQSNEDPFT

SEQ ID NO: 29724 - protein, 226 aa, synthetic construct
  source 1..226: note = Description of Artificial Sequence: Synthetic polypeptide; note = XENP020989 7G8_H0.58_L0_Fab Heavy Chain
EVKLEESGGGLVQPGGSMKLSCAASGFTFSDAWMDWVRQSPEKGLEWVAEIRTKQNNHATYYAESVKGRFTISRDDSKSSVYLQMNSLRAEDTGIYYCTRLANWDWYFDVWGAGTTVTVSSASTKGPSVFPLAPSSKSTSGGTAALGCLVKDYFPEPVTVSWNSGALTSGVHTFPAVLQSSGLYSLSSVVTVPSSSLGTQTYICNVNHKPSNTKVDKKVEPKSCGS

SEQ ID NO: 29725 - protein, 121 aa, synthetic construct; identical to SEQ ID NO: 18786
  source 1..121: note = Description of Artificial Sequence: Synthetic polypeptide; note = VH of XENP020989

SEQ ID NO: 29726 - protein, 5 aa, synthetic construct
  source 1..5: note = Description of Artificial Sequence: Synthetic peptide; note = XENP020989 vhCDR1
DAWMD

SEQ ID NO: 29727 - protein, 19 aa, synthetic construct
  source 1..19: note = Description of Artificial Sequence: Synthetic peptide; note = XENP020989 vhCDR2
EIRTKQNNHATYYAESVKG

SEQ ID NO: 29728 - protein, 10 aa, synthetic construct
  source 1..10: note = Description of Artificial Sequence: Synthetic peptide; note = XENP020989 vhCDR3
LANWDWYFDV

SEQ ID NO: 29729 - protein, 218 aa, synthetic construct; identical to SEQ ID NO: 17590
  source 1..218: note = Description of Artificial Sequence: Synthetic polypeptide; note = XENP020989 7G8_H0.58_L0_Fab Light Chain

SEQ ID NO: 29730 - protein, 111 aa, synthetic construct; identical to SEQ ID NO: 17591
  source 1..111: note = Description of Artificial Sequence: Synthetic polypeptide; note = VL of XENP020989

SEQ ID NO: 29731 - protein, 15 aa, synthetic construct
  source 1..15: note = Description of Artificial Sequence: Synthetic peptide; note = XENP020989 vlCDR1
KASQSVDYDGDSYMN

SEQ ID NO: 29732 - protein, 7 aa, synthetic construct
  source 1..7: note = Description of Artificial Sequence: Synthetic peptide; note = XENP020989 vlCDR2
AASNLES

SEQ ID NO: 29733 - protein, 9 aa, synthetic construct
  source 1..9: note = Description of Artificial Sequence: Synthetic peptide; note = XENP020989 vlCDR3
QQSNEDPFT

SEQ ID NO: 29734 - protein, 226 aa, synthetic construct
  source 1..226: note = Description of Artificial Sequence: Synthetic polypeptide; note = XENP020990 7G8_H0.59_L0_Fab Heavy Chain
EVKLEESGGGLVQPGGSMKLSCAASGFTFSDAWMDWVRQSPEKGLEWVAEIRTKDNNHATYYAESVKGRFTISRDDSKSSVYLQMNSLRAEDTGIYYCTRLANWDWYFDVWGAGTTVTVSSASTKGPSVFPLAPSSKSTSGGTAALGCLVKDYFPEPVTVSWNSGALTSGVHTFPAVLQSSGLYSLSSVVTVPSSSLGTQTYICNVNHKPSNTKVDKKVEPKSCGS

SEQ ID NO: 29735 - protein, 121 aa, synthetic construct; identical to SEQ ID NO: 18796
  source 1..121: note = Description of Artificial Sequence: Synthetic polypeptide; note = VH of XENP020990

SEQ ID NO: 29736 - protein, 5 aa, synthetic construct
  source 1..5: note = Description of Artificial Sequence: Synthetic peptide; note = XENP020990 vhCDR1
DAWMD

SEQ ID NO: 29737 - protein, 19 aa, synthetic construct
  source 1..19: note = Description of Artificial Sequence: Synthetic peptide; note = XENP020990 vhCDR2
EIRTKDNNHATYYAESVKG

SEQ ID NO: 29738 - protein, 10 aa, synthetic construct
  source 1..10: note = Description of Artificial Sequence: Synthetic peptide; note = XENP020990 vhCDR3
LANWDWYFDV

SEQ ID NO: 29739 - protein, 218 aa, synthetic construct; identical to SEQ ID NO: 17590
  source 1..218: note = Description of Artificial Sequence: Synthetic polypeptide; note = XENP020990 7G8_H0.59_L0_Fab Light Chain

SEQ ID NO: 29740 - protein, 111 aa, synthetic construct; identical to SEQ ID NO: 17591
  source 1..111: note = Description of Artificial Sequence: Synthetic polypeptide; note = VL of XENP020990

SEQ ID NO: 29741 - protein, 15 aa, synthetic construct
  source 1..15: note = Description of Artificial Sequence: Synthetic peptide; note = XENP020990 vlCDR1
KASQSVDYDGDSYMN

SEQ ID NO: 29742 - protein, 7 aa, synthetic construct
  source 1..7: note = Description of Artificial Sequence: Synthetic peptide; note = XENP020990 vlCDR2
AASNLES

SEQ ID NO: 29743 - protein, 9 aa, synthetic construct
  source 1..9: note = Description of Artificial Sequence: Synthetic peptide; note = XENP020990 vlCDR3
QQSNEDPFT

SEQ ID NO: 29744 - protein, 226 aa, synthetic construct
  source 1..226: note = Description of Artificial Sequence: Synthetic polypeptide; note = XENP020991 7G8_H0.60_L0_Fab Heavy Chain
EVKLEESGGGLVQPGGSMKLSCAASGFTFSDAWMDWVRQSPEKGLEWVAEIRTKLNNHATYYAESVKGRFTISRDDSKSSVYLQMNSLRAEDTGIYYCTRLANWDWYFDVWGAGTTVTVSSASTKGPSVFPLAPSSKSTSGGTAALGCLVKDYFPEPVTVSWNSGALTSGVHTFPAVLQSSGLYSLSSVVTVPSSSLGTQTYICNVNHKPSNTKVDKKVEPKSCGS

SEQ ID NO: 29745 - protein, 121 aa, synthetic construct; identical to SEQ ID NO: 18806
  source 1..121: note = Description of Artificial Sequence: Synthetic polypeptide; note = VH of XENP020991

SEQ ID NO: 29746 - protein, 5 aa, synthetic construct
  source 1..5: note = Description of Artificial Sequence: Synthetic peptide; note = XENP020991 vhCDR1
DAWMD

SEQ ID NO: 29747 - protein, 19 aa, synthetic construct
  source 1..19: note = Description of Artificial Sequence: Synthetic peptide; note = XENP020991 vhCDR2
EIRTKLNNHATYYAESVKG

SEQ ID NO: 29748 - protein, 10 aa, synthetic construct
  source 1..10: note = Description of Artificial Sequence: Synthetic peptide; note = XENP020991 vhCDR3
LANWDWYFDV

SEQ ID NO: 29749 - protein, 218 aa, synthetic construct; identical to SEQ ID NO: 17590
  source 1..218: note = Description of Artificial Sequence: Synthetic polypeptide; note = XENP020991 7G8_H0.60_L0_Fab Light Chain

SEQ ID NO: 29750 - protein, 111 aa, synthetic construct; identical to SEQ ID NO: 17591
  source 1..111: note = Description of Artificial Sequence: Synthetic polypeptide; note = VL of XENP020991

SEQ ID NO: 29751 - protein, 15 aa, synthetic construct
  source 1..15: note = Description of Artificial Sequence: Synthetic peptide; note = XENP020991 vlCDR1
KASQSVDYDGDSYMN

SEQ ID NO: 29752 - protein, 7 aa, synthetic construct
  source 1..7: note = Description of Artificial Sequence: Synthetic peptide; note = XENP020991 vlCDR2
AASNLES

SEQ ID NO: 29753 - protein, 9 aa, synthetic construct
  source 1..9: note = Description of Artificial Sequence: Synthetic peptide; note = XENP020991 vlCDR3
QQSNEDPFT

SEQ ID NO: 29754 - protein, 226 aa, synthetic construct
  source 1..226: note = Description of Artificial Sequence: Synthetic polypeptide; note = XENP020992 7G8_H0.61_L0_Fab Heavy Chain
EVKLEESGGGLVQPGGSMKLSCAASGFTFSDAWMDWVRQSPEKGLEWVAEIRTKKNNHATYYAESVKGRFTISRDDSKSSVYLQMNSLRAEDTGIYYCTRLANWDWYFDVWGAGTTVTVSSASTKGPSVFPLAPSSKSTSGGTAALGCLVKDYFPEPVTVSWNSGALTSGVHTFPAVLQSSGLYSLSSVVTVPSSSLGTQTYICNVNHKPSNTKVDKKVEPKSCGS

SEQ ID NO: 29755 - protein, 121 aa, synthetic construct; identical to SEQ ID NO: 18816
  source 1..121: note = Description of Artificial Sequence: Synthetic polypeptide; note = VH of XENP020992

SEQ ID NO: 29756 - protein, 5 aa, synthetic construct
  source 1..5: note = Description of Artificial Sequence: Synthetic peptide; note = XENP020992 vhCDR1
DAWMD

SEQ ID NO: 29757 - protein, 19 aa, synthetic construct
  source 1..19: note = Description of Artificial Sequence: Synthetic peptide; note = XENP020992 vhCDR2
EIRTKKNNHATYYAESVKG

SEQ ID NO: 29758 - protein, 10 aa, synthetic construct
  source 1..10: note = Description of Artificial Sequence: Synthetic peptide; note = XENP020992 vhCDR3
LANWDWYFDV

SEQ ID NO: 29759 - protein, 218 aa, synthetic construct; identical to SEQ ID NO: 17590
  source 1..218: note = Description of Artificial Sequence: Synthetic polypeptide; note = XENP020992 7G8_H0.61_L0_Fab Light Chain

SEQ ID NO: 29760 - protein, 111 aa, synthetic construct; identical to SEQ ID NO: 17591
  source 1..111: note = Description of Artificial Sequence: Synthetic polypeptide; note = VL of XENP020992

SEQ ID NO: 29761 - protein, 15 aa, synthetic construct
  source 1..15: note = Description of Artificial Sequence: Synthetic peptide; note = XENP020992 vlCDR1
KASQSVDYDGDSYMN

SEQ ID NO: 29762 - protein, 7 aa, synthetic construct
  source 1..7: note = Description of Artificial Sequence: Synthetic peptide; note = XENP020992 vlCDR2
AASNLES

SEQ ID NO: 29763 - protein, 9 aa, synthetic construct
  source 1..9: note = Description of Artificial Sequence: Synthetic peptide; note = XENP020992 vlCDR3
QQSNEDPFT

SEQ ID NO: 29764 - protein, 226 aa, synthetic construct
  source 1..226: note = Description of Artificial Sequence: Synthetic polypeptide; note = XENP020993 7G8_H0.62_L0_Fab Heavy Chain
EVKLEESGGGLVQPGGSMKLSCAASGFTFSDAWMDWVRQSPEKGLEWVAEIRTKYNNHATYYAESVKGRFTISRDDSKSSVYLQMNSLRAEDTGIYYCTRLANWDWYFDVWGAGTTVTVSSASTKGPSVFPLAPSSKSTSGGTAALGCLVKDYFPEPVTVSWNSGALTSGVHTFPAVLQSSGLYSLSSVVTVPSSSLGTQTYICNVNHKPSNTKVDKKVEPKSCGS

SEQ ID NO: 29765 - protein, 121 aa, synthetic construct; identical to SEQ ID NO: 18826
  source 1..121: note = Description of Artificial Sequence: Synthetic polypeptide; note = VH of XENP020993

SEQ ID NO: 29766 - protein, 5 aa, synthetic construct
  source 1..5: note = Description of Artificial Sequence: Synthetic peptide; note = XENP020993 vhCDR1
DAWMD

SEQ ID NO: 29767 - protein, 19 aa, synthetic construct
  source 1..19: note = Description of Artificial Sequence: Synthetic peptide; note = XENP020993 vhCDR2
EIRTKYNNHATYYAESVKG

SEQ ID NO: 29768 - protein, 10 aa, synthetic construct
  source 1..10: note = Description of Artificial Sequence: Synthetic peptide; note = XENP020993 vhCDR3
LANWDWYFDV

SEQ ID NO: 29769 - protein, 218 aa, synthetic construct; identical to SEQ ID NO: 17590
  source 1..218: note = Description of Artificial Sequence: Synthetic polypeptide; note = XENP020993 7G8_H0.62_L0_Fab Light Chain

SEQ ID NO: 29770 - protein, 111 aa, synthetic construct; identical to SEQ ID NO: 17591
  source 1..111: note = Description of Artificial Sequence: Synthetic polypeptide; note = VL of XENP020993

SEQ ID NO: 29771 - protein, 15 aa, synthetic construct
  source 1..15: note = Description of Artificial Sequence: Synthetic peptide; note = XENP020993 vlCDR1
KASQSVDYDGDSYMN

SEQ ID NO: 29772 - protein, 7 aa, synthetic construct
  source 1..7: note = Description of Artificial Sequence: Synthetic peptide; note = XENP020993 vlCDR2
AASNLES

SEQ ID NO: 29773 - protein, 9 aa, synthetic construct
  source 1..9: note = Description of Artificial Sequence: Synthetic peptide; note = XENP020993 vlCDR3
QQSNEDPFT

SEQ ID NO: 29774 - protein, 226 aa, synthetic construct
  source 1..226: note = Description of Artificial Sequence: Synthetic polypeptide; note = XENP020994 7G8_H0.63_L0_Fab Heavy Chain
EVKLEESGGGLVQPGGSMKLSCAASGFTFSDAWMDWVRQSPEKGLEWVAEIRTKADNHATYYAESVKGRFTISRDDSKSSVYLQMNSLRAEDTGIYYCTRLANWDWYFDVWGAGTTVTVSSASTKGPSVFPLAPSSKSTSGGTAALGCLVKDYFPEPVTVSWNSGALTSGVHTFPAVLQSSGLYSLSSVVTVPSSSLGTQTYICNVNHKPSNTKVDKKVEPKSCGS

SEQ ID NO: 29775 - protein, 121 aa, synthetic construct; identical to SEQ ID NO: 18836
  source 1..121: note = Description of Artificial Sequence: Synthetic polypeptide; note = VH of XENP020994

SEQ ID NO: 29776 - protein, 5 aa, synthetic construct
  source 1..5: note = Description of Artificial Sequence: Synthetic peptide; note = XENP020994 vhCDR1
DAWMD

SEQ ID NO: 29777 - protein, 19 aa, synthetic construct
  source 1..19: note = Description of Artificial Sequence: Synthetic peptide; note = XENP020994 vhCDR2
EIRTKADNHATYYAESVKG

SEQ ID NO: 29778 - protein, 10 aa, synthetic construct
  source 1..10: note = Description of Artificial Sequence: Synthetic peptide; note = XENP020994 vhCDR3
LANWDWYFDV

SEQ ID NO: 29779 - protein, 218 aa, synthetic construct; identical to SEQ ID NO: 17590
  source 1..218: note = Description of Artificial Sequence: Synthetic polypeptide; note = XENP020994 7G8_H0.63_L0_Fab Light Chain

SEQ ID NO: 29780 - protein, 111 aa, synthetic construct; identical to SEQ ID NO: 17591
  source 1..111: note = Description of Artificial Sequence: Synthetic polypeptide; note = VL of XENP020994

SEQ ID NO: 29781 - protein, 15 aa, synthetic construct
  source 1..15: note = Description of Artificial Sequence: Synthetic peptide; note = XENP020994 vlCDR1
KASQSVDYDGDSYMN

SEQ ID NO: 29782 - protein, 7 aa, synthetic construct
  source 1..7: note = Description of Artificial Sequence: Synthetic peptide; note = XENP020994 vlCDR2
AASNLES

SEQ ID NO: 29783 - protein, 9 aa, synthetic construct
  source 1..9: note = Description of Artificial Sequence: Synthetic peptide; note = XENP020994 vlCDR3
QQSNEDPFT

SEQ ID NO: 29784 - protein, 226 aa, synthetic construct
  source 1..226: note = Description of Artificial Sequence: Synthetic polypeptide; note = XENP020995 7G8_H0.64_L0_Fab Heavy Chain
EVKLEESGGGLVQPGGSMKLSCAASGFTFSDAWMDWVRQSPEKGLEWVAEIRTKAHNHATYYAESVKGRFTISRDDSKSSVYLQMNSLRAEDTGIYYCTRLANWDWYFDVWGAGTTVTVSSASTKGPSVFPLAPSSKSTSGGTAALGCLVKDYFPEPVTVSWNSGALTSGVHTFPAVLQSSGLYSLSSVVTVPSSSLGTQTYICNVNHKPSNTKVDKKVEPKSCGS

SEQ ID NO: 29785 - protein, 121 aa, synthetic construct; identical to SEQ ID NO: 18846
  source 1..121: note = Description of Artificial Sequence: Synthetic polypeptide; note = VH of XENP020995

SEQ ID NO: 29786 - protein, 5 aa, synthetic construct
  source 1..5: note = Description of Artificial Sequence: Synthetic peptide; note = XENP020995 vhCDR1
DAWMD

SEQ ID NO: 29787 - protein, 19 aa, synthetic construct
  source 1..19: note = Description of Artificial Sequence: Synthetic peptide; note = XENP020995 vhCDR2
EIRTKAHNHATYYAESVKG

SEQ ID NO: 29788 - protein, 10 aa, synthetic construct
  source 1..10: note = Description of Artificial Sequence: Synthetic peptide; note = XENP020995 vhCDR3
LANWDWYFDV

SEQ ID NO: 29789 - protein, 218 aa, synthetic construct; identical to SEQ ID NO: 17590
  source 1..218: note = Description of Artificial Sequence: Synthetic polypeptide; note = XENP020995 7G8_H0.64_L0_Fab Light Chain

SEQ ID NO: 29790 - protein, 111 aa, synthetic construct; identical to SEQ ID NO: 17591
  source 1..111: note = Description of Artificial Sequence: Synthetic polypeptide; note = VL of XENP020995

SEQ ID NO: 29791 - protein, 15 aa, synthetic construct
  source 1..15: note = Description of Artificial Sequence: Synthetic peptide; note = XENP020995 vlCDR1
KASQSVDYDGDSYMN

SEQ ID NO: 29792 - protein, 7 aa, synthetic construct
  source 1..7: note = Description of Artificial Sequence: Synthetic peptide; note = XENP020995 vlCDR2
AASNLES

SEQ ID NO: 29793 - protein, 9 aa, synthetic construct
  source 1..9: note = Description of Artificial Sequence: Synthetic peptide; note = XENP020995 vlCDR3
QQSNEDPFT

SEQ ID NO: 29794 - protein, 226 aa, synthetic construct
  source 1..226: note = Description of Artificial Sequence: Synthetic polypeptide; note = XENP020996 7G8_H0.65_L0_Fab Heavy Chain
EVKLEESGGGLVQPGGSMKLSCAASGFTFSDAWMDWVRQSPEKGLEWVAEIRTKAENHATYYAESVKGRFTISRDDSKSSVYLQMNSLRAEDTGIYYCTRLANWDWYFDVWGAGTTVTVSSASTKGPSVFPLAPSSKSTSGGTAALGCLVKDYFPEPVTVSWNSGALTSGVHTFPAVLQSSGLYSLSSVVTVPSSSLGTQTYICNVNHKPSNTKVDKKVEPKSCGS

SEQ ID NO: 29795 - protein, 121 aa, synthetic construct; identical to SEQ ID NO: 18856
  source 1..121: note = Description of Artificial Sequence: Synthetic polypeptide; note = VH of XENP020996

SEQ ID NO: 29796 - protein, 5 aa, synthetic construct
  source 1..5: note = Description of Artificial Sequence: Synthetic peptide; note = XENP020996 vhCDR1
DAWMD

SEQ ID NO: 29797 - protein, 19 aa, synthetic construct
  source 1..19: note = Description of Artificial Sequence: Synthetic peptide; note = XENP020996 vhCDR2
EIRTKAENHATYYAESVKG

SEQ ID NO: 29798 - protein, 10 aa, synthetic construct
  source 1..10: note = Description of Artificial Sequence: Synthetic peptide; note = XENP020996 vhCDR3
LANWDWYFDV

SEQ ID NO: 29799 - protein, 218 aa, synthetic construct; identical to SEQ ID NO: 17590
  source 1..218: note = Description of Artificial Sequence: Synthetic polypeptide; note = XENP020996 7G8_H0.65_L0_Fab Light Chain

SEQ ID NO: 29800 - protein, 111 aa, synthetic construct; identical to SEQ ID NO: 17591
  source 1..111: note = Description of Artificial Sequence: Synthetic polypeptide; note = VL of XENP020996

SEQ ID NO: 29801 - protein, 15 aa, synthetic construct
  source 1..15: note = Description of Artificial Sequence: Synthetic peptide; note = XENP020996 vlCDR1
KASQSVDYDGDSYMN

SEQ ID NO: 29802 - protein, 7 aa, synthetic construct
  source 1..7: note = Description of Artificial Sequence: Synthetic peptide; note = XENP020996 vlCDR2
AASNLES

SEQ ID NO: 29803 - protein, 9 aa, synthetic construct
  source 1..9: note = Description of Artificial Sequence: Synthetic peptide; note = XENP020996 vlCDR3
QQSNEDPFT

SEQ ID NO: 29804 - protein, 226 aa, synthetic construct
  source 1..226: note = Description of Artificial Sequence: Synthetic polypeptide; note = XENP021001 7G8_H0.66_L0_Fab Heavy Chain
EVKLEESGGGLVQPGGSMKLSCAASGFTFSDAWMDWVRQSPEKGLEWVAEIRTKASNHATYYAESVKGRFTISRDDSKSSVYLQMNSLRAEDTGIYYCTRLANWDWYFDVWGAGTTVTVSSASTKGPSVFPLAPSSKSTSGGTAALGCLVKDYFPEPVTVSWNSGALTSGVHTFPAVLQSSGLYSLSSVVTVPSSSLGTQTYICNVNHKPSNTKVDKKVEPKSCGS

SEQ ID NO: 29805 - protein, 121 aa, synthetic construct; identical to SEQ ID NO: 18866
  source 1..121: note = Description of Artificial Sequence: Synthetic polypeptide; note = VH of XENP021001

SEQ ID NO: 29806 - protein, 5 aa, synthetic construct
  source 1..5: note = Description of Artificial Sequence: Synthetic peptide; note = XENP021001 vhCDR1
DAWMD

SEQ ID NO: 29807 - protein, 19 aa, synthetic construct
  source 1..19: note = Description of Artificial Sequence: Synthetic peptide; note = XENP021001 vhCDR2
EIRTKASNHATYYAESVKG

SEQ ID NO: 29808 - protein, 10 aa, synthetic construct
  source 1..10: note = Description of Artificial Sequence: Synthetic peptide; note = XENP021001 vhCDR3
LANWDWYFDV

SEQ ID NO: 29809 - protein, 218 aa, synthetic construct; identical to SEQ ID NO: 17590
  source 1..218: note = Description of Artificial Sequence: Synthetic polypeptide; note = XENP021001 7G8_H0.66_L0_Fab Light Chain

SEQ ID NO: 29810 - protein, 111 aa, synthetic construct; identical to SEQ ID NO: 17591
  source 1..111: note = Description of Artificial Sequence: Synthetic polypeptide; note = VL of XENP021001

SEQ ID NO: 29811 - protein, 15 aa, synthetic construct
  source 1..15: note = Description of Artificial Sequence: Synthetic peptide; note = XENP021001 vlCDR1
KASQSVDYDGDSYMN

SEQ ID NO: 29812 - protein, 7 aa, synthetic construct
  source 1..7: note = Description of Artificial Sequence: Synthetic peptide; note = XENP021001 vlCDR2
AASNLES

SEQ ID NO: 29813 - protein, 9 aa, synthetic construct
  source 1..9: note = Description of Artificial Sequence: Synthetic peptide; note = XENP021001 vlCDR3
QQSNEDPFT

SEQ ID NO: 29814 - protein, 226 aa, synthetic construct
  source 1..226: note = Description of Artificial Sequence: Synthetic polypeptide; note = XENP021002 7G8_H0.67_L0_Fab Heavy Chain
EVKLEESGGGLVQPGGSMKLSCAASGFTFSDAWMDWVRQSPEKGLEWVAEIRTKARNHATYYAESVKGRFTISRDDSKSSVYLQMNSLRAEDTGIYYCTRLANWDWYFDVWGAGTTVTVSSASTKGPSVFPLAPSSKSTSGGTAALGCLVKDYFPEPVTVSWNSGALTSGVHTFPAVLQSSGLYSLSSVVTVPSSSLGTQTYICNVNHKPSNTKVDKKVEPKSCGS

SEQ ID NO: 29815 - protein, 121 aa, synthetic construct; identical to SEQ ID NO: 18876
  source 1..121: note = Description of Artificial Sequence: Synthetic polypeptide; note = VH of XENP021002

SEQ ID NO: 29816 - protein, 5 aa, synthetic construct
  source 1..5: note = Description of Artificial Sequence: Synthetic peptide; note = XENP021002 vhCDR1
DAWMD

SEQ ID NO: 29817 - protein, 19 aa, synthetic construct
  source 1..19: note = Description of Artificial Sequence: Synthetic peptide; note = XENP021002 vhCDR2
EIRTKARNHATYYAESVKG

SEQ ID NO: 29818 - protein, 10 aa, synthetic construct
  source 1..10: note = Description of Artificial Sequence: Synthetic peptide; note = XENP021002 vhCDR3
LANWDWYFDV

SEQ ID NO: 29819 - protein, 218 aa, synthetic construct; identical to SEQ ID NO: 17590
  source 1..218: note = Description of Artificial Sequence: Synthetic polypeptide; note = XENP021002 7G8_H0.67_L0_Fab Light Chain

SEQ ID NO: 29820 - protein, 111 aa, synthetic construct; identical to SEQ ID NO: 17591
  source 1..111: note = Description of Artificial Sequence: Synthetic polypeptide; note = VL of XENP021002

SEQ ID NO: 29821 - protein, 15 aa, synthetic construct
  source 1..15: note = Description of Artificial Sequence: Synthetic peptide; note = XENP021002 vlCDR1
KASQSVDYDGDSYMN

SEQ ID NO: 29822 - protein, 7 aa, synthetic construct
  source 1..7: note = Description of Artificial Sequence: Synthetic peptide; note = XENP021002 vlCDR2
AASNLES

SEQ ID NO: 29823 - protein, 9 aa, synthetic construct
  source 1..9: note = Description of Artificial Sequence: Synthetic peptide; note = XENP021002 vlCDR3
QQSNEDPFT

SEQ ID NO: 29824 - protein, 226 aa, synthetic construct
  source 1..226: note = Description of Artificial Sequence: Synthetic polypeptide; note = XENP021003 7G8_H0.68_L0_Fab Heavy Chain
EVKLEESGGGLVQPGGSMKLSCAASGFTFSDAWMDWVRQSPEKGLEWVAEIRTKALNHATYYAESVKGRFTISRDDSKSSVYLQMNSLRAEDTGIYYCTRLANWDWYFDVWGAGTTVTVSSASTKGPSVFPLAPSSKSTSGGTAALGCLVKDYFPEPVTVSWNSGALTSGVHTFPAVLQSSGLYSLSSVVTVPSSSLGTQTYICNVNHKPSNTKVDKKVEPKSCGS

SEQ ID NO: 29825 - protein, 121 aa, synthetic construct; identical to SEQ ID NO: 18886
  source 1..121: note = Description of Artificial Sequence: Synthetic polypeptide; note = VH of XENP021003

SEQ ID NO: 29826 - protein, 5 aa, synthetic construct
  source 1..5: note = Description of Artificial Sequence: Synthetic peptide; note = XENP021003 vhCDR1
DAWMD

SEQ ID NO: 29827 - protein, 19 aa, synthetic construct
  source 1..19: note = Description of Artificial Sequence: Synthetic peptide; note = XENP021003 vhCDR2
EIRTKALNHATYYAESVKG

SEQ ID NO: 29828 - protein, 10 aa, synthetic construct
  source 1..10: note = Description of Artificial Sequence: Synthetic peptide; note = XENP021003 vhCDR3
LANWDWYFDV

SEQ ID NO: 29829 - protein, 218 aa, synthetic construct; identical to SEQ ID NO: 17590
  source 1..218: note = Description of Artificial Sequence: Synthetic polypeptide; note = XENP021003 7G8_H0.68_L0_Fab Light Chain

SEQ ID NO: 29830 - protein, 111 aa, synthetic construct; identical to SEQ ID NO: 17591
  source 1..111: note = Description of Artificial Sequence: Synthetic polypeptide; note = VL of XENP021003

SEQ ID NO: 29831 - protein, 15 aa, synthetic construct
  source 1..15: note = Description of Artificial Sequence: Synthetic peptide; note = XENP021003 vlCDR1
KASQSVDYDGDSYMN

SEQ ID NO: 29832 - protein, 7 aa, synthetic construct
  source 1..7: note = Description of Artificial Sequence: Synthetic peptide; note = XENP021003 vlCDR2
AASNLES

SEQ ID NO: 29833 - protein, 9 aa, synthetic construct
  source 1..9: note = Description of Artificial Sequence: Synthetic peptide; note = XENP021003 vlCDR3
QQSNEDPFT

SEQ ID NO: 29834 - protein, 226 aa, synthetic construct
  source 1..226: note = Description of Artificial Sequence: Synthetic polypeptide; note = XENP021004 7G8_H0.69_L0_Fab Heavy Chain
EVKLEESGGGLVQPGGSMKLSCAASGFTFSDAWMDWVRQSPEKGLEWVAEIRTKATNHATYYAESVKGRFTISRDDSKSSVYLQMNSLRAEDTGIYYCTRLANWDWYFDVWGAGTTVTVSSASTKGPSVFPLAPSSKSTSGGTAALGCLVKDYFPEPVTVSWNSGALTSGVHTFPAVLQSSGLYSLSSVVTVPSSSLGTQTYICNVNHKPSNTKVDKKVEPKSCGS

SEQ ID NO: 29835 - protein, 121 aa, synthetic construct; identical to SEQ ID NO: 18896
  source 1..121: note = Description of Artificial Sequence: Synthetic polypeptide; note = VH of XENP021004

SEQ ID NO: 29836 - protein, 5 aa, synthetic construct
  source 1..5: note = Description of Artificial Sequence: Synthetic peptide; note = XENP021004 vhCDR1
DAWMD

SEQ ID NO: 29837 - protein, 19 aa, synthetic construct
  source 1..19: note = Description of Artificial Sequence: Synthetic peptide; note = XENP021004 vhCDR2
EIRTKATNHATYYAESVKG

SEQ ID NO: 29838 - protein, 10 aa, synthetic construct
  source 1..10: note = Description of Artificial Sequence: Synthetic peptide; note = XENP021004 vhCDR3
LANWDWYFDV

SEQ ID NO: 29839 - protein, 218 aa, synthetic construct; identical to SEQ ID NO: 17590
  source 1..218: note = Description of Artificial Sequence: Synthetic polypeptide; note = XENP021004 7G8_H0.69_L0_Fab Light Chain

SEQ ID NO: 29840 - protein, 111 aa, synthetic construct; identical to SEQ ID NO: 17591
  source 1..111: note = Description of Artificial Sequence: Synthetic polypeptide; note = VL of XENP021004

SEQ ID NO: 29841 - protein, 15 aa, synthetic construct
  source 1..15: note = Description of Artificial Sequence: Synthetic peptide; note = XENP021004 vlCDR1
KASQSVDYDGDSYMN

SEQ ID NO: 29842 - protein, 7 aa, synthetic construct
  source 1..7: note = Description of Artificial Sequence: Synthetic peptide; note = XENP021004 vlCDR2
AASNLES

SEQ ID NO: 29843 - protein, 9 aa, synthetic construct
  source 1..9: note = Description of Artificial Sequence: Synthetic peptide; note = XENP021004 vlCDR3
QQSNEDPFT

SEQ ID NO: 29844 - protein, 226 aa, synthetic construct
  source 1..226: note = Description of Artificial Sequence: Synthetic polypeptide; note = XENP021005 7G8_H0.70_L0_Fab Heavy Chain
EVKLEESGGGLVQPGGSMKLSCAASGFTFSDAWMDWVRQSPEKGLEWVAEIRTKAGNHATYYAESVKGRFTISRDDSKSSVYLQMNSLRAEDTGIYYCTRLANWDWYFDVWGAGTTVTVSSASTKGPSVFPLAPSSKSTSGGTAALGCLVKDYFPEPVTVSWNSGALTSGVHTFPAVLQSSGLYSLSSVVTVPSSSLGTQTYICNVNHKPSNTKVDKKVEPKSCGS

SEQ ID NO: 29845 - protein, 121 aa, synthetic construct; identical to SEQ ID NO: 18906
  source 1..121: note = Description of Artificial Sequence: Synthetic polypeptide; note = VH of XENP021005

SEQ ID NO: 29846 - protein, 5 aa, synthetic construct
  source 1..5: note = Description of Artificial Sequence: Synthetic peptide; note = XENP021005 vhCDR1
DAWMD

SEQ ID NO: 29847 - protein, 19 aa, synthetic construct
  source 1..19: note = Description of Artificial Sequence: Synthetic peptide; note = XENP021005 vhCDR2
EIRTKAGNHATYYAESVKG

SEQ ID NO: 29848 - protein, 10 aa, synthetic construct
  source 1..10: note = Description of Artificial Sequence: Synthetic peptide; note = XENP021005 vhCDR3
LANWDWYFDV

SEQ ID NO: 29849 - protein, 218 aa, synthetic construct; identical to SEQ ID NO: 17590
  source 1..218: note = Description of Artificial Sequence: Synthetic polypeptide; note = XENP021005 7G8_H0.70_L0_Fab Light Chain

SEQ ID NO: 29850 - protein, 111 aa, synthetic construct; identical to SEQ ID NO: 17591
  source 1..111: note = Description of Artificial Sequence: Synthetic polypeptide; note = VL of XENP021005

SEQ ID NO: 29851 - protein, 15 aa, synthetic construct
  source 1..15: note = Description of Artificial Sequence: Synthetic peptide; note = XENP021005 vlCDR1
KASQSVDYDGDSYMN

SEQ ID NO: 29852 - protein, 7 aa, synthetic construct
  source 1..7: note = Description of Artificial Sequence: Synthetic peptide; note = XENP021005 vlCDR2
AASNLES

SEQ ID NO: 29853 - protein, 9 aa, synthetic construct
  source 1..9: note = Description of Artificial Sequence: Synthetic peptide; note = XENP021005 vlCDR3
QQSNEDPFT

SEQ ID NO: 29854 - protein, 226 aa, synthetic construct
  source 1..226: note = Description of Artificial Sequence: Synthetic polypeptide; note = XENP021006 7G8_H0.71_L0_Fab Heavy Chain
EVKLEESGGGLVQPGGSMKLSCAASGFTFSDAWMDWVRQSPEKGLEWVAEIRTKAYNHATYYAESVKGRFTISRDDSKSSVYLQMNSLRAEDTGIYYCTRLANWDWYFDVWGAGTTVTVSSASTKGPSVFPLAPSSKSTSGGTAALGCLVKDYFPEPVTVSWNSGALTSGVHTFPAVLQSSGLYSLSSVVTVPSSSLGTQTYICNVNHKPSNTKVDKKVEPKSCGS

SEQ ID NO: 29855 - protein, 121 aa, synthetic construct; identical to SEQ ID NO: 18916
  source 1..121: note = Description of Artificial Sequence: Synthetic polypeptide; note = VH of XENP021006

SEQ ID NO: 29856 - protein, 5 aa, synthetic construct
  source 1..5: note = Description of Artificial Sequence: Synthetic peptide; note = XENP021006 vhCDR1
DAWMD

SEQ ID NO: 29857 - protein, 19 aa, synthetic construct
  source 1..19: note = Description of Artificial Sequence: Synthetic peptide; note = XENP021006 vhCDR2
EIRTKAYNHATYYAESVKG

SEQ ID NO: 29858 - protein, 10 aa, synthetic construct
  source 1..10: note = Description of Artificial Sequence: Synthetic peptide; note = XENP021006 vhCDR3
LANWDWYFDV

SEQ ID NO: 29859 - protein, 218 aa, synthetic construct; identical to SEQ ID NO: 17590
  source 1..218: note = Description of Artificial Sequence: Synthetic polypeptide; note = XENP021006 7G8_H0.71_L0_Fab Light Chain

SEQ ID NO: 29860 - protein, 111 aa, synthetic construct; identical to SEQ ID NO: 17591
  source 1..111: note = Description of Artificial Sequence: Synthetic polypeptide; note = VL of XENP021006

SEQ ID NO: 29861 - protein, 15 aa, synthetic construct
  source 1..15: note = Description of Artificial Sequence: Synthetic peptide; note = XENP021006 vlCDR1
KASQSVDYDGDSYMN

SEQ ID NO: 29862 - protein, 7 aa, synthetic construct
  source 1..7: note = Description of Artificial Sequence: Synthetic peptide; note = XENP021006 vlCDR2
AASNLES

SEQ ID NO: 29863 - protein, 9 aa, synthetic construct
  source 1..9: note = Description of Artificial Sequence: Synthetic peptide; note = XENP021006 vlCDR3
QQSNEDPFT

SEQ ID NO: 29864 - protein, 226 aa, synthetic construct
  source 1..226: note = Description of Artificial Sequence: Synthetic polypeptide; note = XENP021007 7G8_H0.72_L0_Fab Heavy Chain
EVKLEESGGGLVQPGGSMKLSCAASGFTFSDAWMDWVRQSPEKGLEWVAEIRTKANDHATYYAESVKGRFTISRDDSKSSVYLQMNSLRAEDTGIYYCTRLANWDWYFDVWGAGTTVTVSSASTKGPSVFPLAPSSKSTSGGTAALGCLVKDYFPEPVTVSWNSGALTSGVHTFPAVLQSSGLYSLSSVVTVPSSSLGTQTYICNVNHKPSNTKVDKKVEPKSCGS

SEQ ID NO: 29865 - protein, 121 aa, synthetic construct; identical to SEQ ID NO: 18926
  source 1..121: note = Description of Artificial Sequence: Synthetic polypeptide; note = VH of XENP021007

SEQ ID NO: 29866 - protein, 5 aa, synthetic construct
  source 1..5: note = Description of Artificial Sequence: Synthetic peptide; note = XENP021007 vhCDR1
DAWMD

SEQ ID NO: 29867 - protein, 19 aa, synthetic construct
  source 1..19: note = Description of Artificial Sequence: Synthetic peptide; note = XENP021007 vhCDR2
EIRTKANDHATYYAESVKG

SEQ ID NO: 29868 - protein, 10 aa, synthetic construct
  source 1..10: note = Description of Artificial Sequence: Synthetic peptide; note = XENP021007 vhCDR3
LANWDWYFDV

SEQ ID NO: 29869 - protein, 218 aa, synthetic construct; identical to SEQ ID NO: 17590
  source 1..218: note = Description of Artificial Sequence: Synthetic polypeptide; note = XENP021007 7G8_H0.72_L0_Fab Light Chain

SEQ ID NO: 29870 - protein, 111 aa, synthetic construct; identical to SEQ ID NO: 17591
  source 1..111: note = Description of Artificial Sequence: Synthetic polypeptide; note = VL of XENP021007

SEQ ID NO: 29871 - protein, 15 aa, synthetic construct
  source 1..15: note = Description of Artificial Sequence: Synthetic peptide; note = XENP021007 vlCDR1
KASQSVDYDGDSYMN

SEQ ID NO: 29872 - protein, 7 aa, synthetic construct
  source 1..7: note = Description of Artificial Sequence: Synthetic peptide; note = XENP021007 vlCDR2
AASNLES

SEQ ID NO: 29873 - protein, 9 aa, synthetic construct
  source 1..9: note = Description of Artificial Sequence: Synthetic peptide; note = XENP021007 vlCDR3
QQSNEDPFT

SEQ ID NO: 29874 - protein, 226 aa, synthetic construct
  source 1..226: note = Description of Artificial Sequence: Synthetic polypeptide; note = XENP021008 7G8_H0.73_L0_Fab Heavy Chain
EVKLEESGGGLVQPGGSMKLSCAASGFTFSDAWMDWVRQSPEKGLEWVAEIRTKANHHATYYAESVKGRFTISRDDSKSSVYLQMNSLRAEDTGIYYCTRLANWDWYFDVWGAGTTVTVSSASTKGPSVFPLAPSSKSTSGGTAALGCLVKDYFPEPVTVSWNSGALTSGVHTFPAVLQSSGLYSLSSVVTVPSSSLGTQTYICNVNHKPSNTKVDKKVEPKSCGS

SEQ ID NO: 29875 - protein, 121 aa, synthetic construct; identical to SEQ ID NO: 18936
  source 1..121: note = Description of Artificial Sequence: Synthetic polypeptide; note = VH of XENP021008

SEQ ID NO: 29876 - protein, 5 aa, synthetic construct
  source 1..5: note = Description of Artificial Sequence: Synthetic peptide; note = XENP021008 vhCDR1
DAWMD

SEQ ID NO: 29877 - protein, 19 aa, synthetic construct
  source 1..19: note = Description of Artificial Sequence: Synthetic peptide; note = XENP021008 vhCDR2
EIRTKANHHATYYAESVKG

SEQ ID NO: 29878 - protein, 10 aa, synthetic construct
  source 1..10: note = Description of Artificial Sequence: Synthetic peptide; note = XENP021008 vhCDR3
LANWDWYFDV

SEQ ID NO: 29879 - protein, 218 aa, synthetic construct; identical to SEQ ID NO: 17590
  source 1..218: note = Description of Artificial Sequence: Synthetic polypeptide; note = XENP021008 7G8_H0.73_L0_Fab Light Chain

SEQ ID NO: 29880 - protein, 111 aa, synthetic construct; identical to SEQ ID NO: 17591
  source 1..111: note = Description of Artificial Sequence: Synthetic polypeptide; note = VL of XENP021008

SEQ ID NO: 29881 - protein, 15 aa, synthetic construct
  source 1..15: note = Description of Artificial Sequence: Synthetic peptide; note = XENP021008 vlCDR1
KASQSVDYDGDSYMN

SEQ ID NO: 29882 - protein, 7 aa, synthetic construct
  source 1..7: note = Description of Artificial Sequence: Synthetic peptide; note = XENP021008 vlCDR2
AASNLES

SEQ ID NO: 29883 - protein, 9 aa, synthetic construct
  source 1..9: note = Description of Artificial Sequence: Synthetic peptide; note = XENP021008 vlCDR3
QQSNEDPFT

SEQ ID NO: 29884 - protein, 226 aa, synthetic construct
  source 1..226: note = Description of Artificial Sequence: Synthetic polypeptide; note = XENP021009 7G8_H0.74_L0_Fab Heavy Chain
EVKLEESGGGLVQPGGSMKLSCAASGFTFSDAWMDWVRQSPEKGLEWVAEIRTKANEHATYYAESVKGRFTISRDDSKSSVYLQMNSLRAEDTGIYYCTRLANWDWYFDVWGAGTTVTVSSASTKGPSVFPLAPSSKSTSGGTAALGCLVKDYFPEPVTVSWNSGALTSGVHTFPAVLQSSGLYSLSSVVTVPSSSLGTQTYICNVNHKPSNTKVDKKVEPKSCGS

SEQ ID NO: 29885 - protein, 121 aa, synthetic construct; identical to SEQ ID NO: 18946
  source 1..121: note = Description of Artificial Sequence: Synthetic polypeptide; note = VH of XENP021009

SEQ ID NO: 29886 - protein, 5 aa, synthetic construct
  source 1..5: note = Description of Artificial Sequence: Synthetic peptide; note = XENP021009 vhCDR1
DAWMD

SEQ ID NO: 29887 - protein, 19 aa, synthetic construct
  source 1..19: note = Description of Artificial Sequence: Synthetic peptide; note = XENP021009 vhCDR2
EIRTKANEHATYYAESVKG

SEQ ID NO: 29888 - protein, 10 aa, synthetic construct
  source 1..10: note = Description of Artificial Sequence: Synthetic peptide; note = XENP021009 vhCDR3
LANWDWYFDV

SEQ ID NO: 29889 - protein, 218 aa, synthetic construct; identical to SEQ ID NO: 17590
  source 1..218: note = Description of Artificial Sequence: Synthetic polypeptide; note = XENP021009 7G8_H0.74_L0_Fab Light Chain

SEQ ID NO: 29890 - protein, 111 aa, synthetic construct; identical to SEQ ID NO: 17591
  source 1..111: note = Description of Artificial Sequence: Synthetic polypeptide; note = VL of XENP021009

SEQ ID NO: 29891 - protein, 15 aa, synthetic construct
  source 1..15: note = Description of Artificial Sequence: Synthetic peptide; note = XENP021009 vlCDR1
KASQSVDYDGDSYMN

SEQ ID NO: 29892 - protein, 7 aa, synthetic construct
  source 1..7: note = Description of Artificial Sequence: Synthetic peptide; note = XENP021009 vlCDR2
AASNLES

SEQ ID NO: 29893 - protein, 9 aa, synthetic construct
  source 1..9: note = Description of Artificial Sequence: Synthetic peptide; note = XENP021009 vlCDR3
QQSNEDPFT

SEQ ID NO: 29894 - protein, 226 aa, synthetic construct
  source 1..226: note = Description of Artificial Sequence: Synthetic polypeptide; note = XENP021010 7G8_H0.75_L0_Fab Heavy Chain
EVKLEESGGGLVQPGGSMKLSCAASGFTFSDAWMDWVRQSPEKGLEWVAEIRTKANSHATYYAESVKGRFTISRDDSKSSVYLQMNSLRAEDTGIYYCTRLANWDWYFDVWGAGTTVTVSSASTKGPSVFPLAPSSKSTSGGTAALGCLVKDYFPEPVTVSWNSGALTSGVHTFPAVLQSSGLYSLSSVVTVPSSSLGTQTYICNVNHKPSNTKVDKKVEPKSCGS

SEQ ID NO: 29895 - protein, 121 aa, synthetic construct; identical to SEQ ID NO: 18956
  source 1..121: note = Description of Artificial Sequence: Synthetic polypeptide; note = VH of XENP021010

SEQ ID NO: 29896 - protein, 5 aa, synthetic construct
  source 1..5: note = Description of Artificial Sequence: Synthetic peptide; note = XENP021010 vhCDR1
DAWMD

SEQ ID NO: 29897 - protein, 19 aa, synthetic construct
  source 1..19: note = Description of Artificial Sequence: Synthetic peptide; note = XENP021010 vhCDR2
EIRTKANSHATYYAESVKG

SEQ ID NO: 29898 - protein, 10 aa, synthetic construct
  source 1..10: note = Description of Artificial Sequence: Synthetic peptide; note = XENP021010 vhCDR3
LANWDWYFDV

SEQ ID NO: 29899 - protein, 218 aa, synthetic construct; identical to SEQ ID NO: 17590
  source 1..218: note = Description of Artificial Sequence: Synthetic polypeptide; note = XENP021010 7G8_H0.75_L0_Fab Light Chain

SEQ ID NO: 29900 - protein, 111 aa, synthetic construct; identical to SEQ ID NO: 17591
  source 1..111: note = Description of Artificial Sequence: Synthetic polypeptide; note = VL of XENP021010

SEQ ID NO: 29901 - protein, 15 aa, synthetic construct
  source 1..15: note = Description of Artificial Sequence: Synthetic peptide; note = XENP021010 vlCDR1
KASQSVDYDGDSYMN

SEQ ID NO: 29902 - protein, 7 aa, synthetic construct
  source 1..7: note = Description of Artificial Sequence: Synthetic peptide; note = XENP021010 vlCDR2
AASNLES

SEQ ID NO: 29903 - protein, 9 aa, synthetic construct
  source 1..9: note = Description of Artificial Sequence: Synthetic peptide; note = XENP021010 vlCDR3
QQSNEDPFT

SEQ ID NO: 29904 - protein, 226 aa, synthetic construct
  source 1..226: note = Description of Artificial Sequence: Synthetic polypeptide; note = XENP021011 7G8_H0.76_L0_Fab Heavy Chain
EVKLEESGGGLVQPGGSMKLSCAASGFTFSDAWMDWVRQSPEKGLEWVAEIRTKANRHATYYAESVKGRFTISRDDSKSSVYLQMNSLRAEDTGIYYCTRLANWDWYFDVWGAGTTVTVSSASTKGPSVFPLAPSSKSTSGGTAALGCLVKDYFPEPVTVSWNSGALTSGVHTFPAVLQSSGLYSLSSVVTVPSSSLGTQTYICNVNHKPSNTKVDKKVEPKSCGS

SEQ ID NO: 29905 - protein, 121 aa, synthetic construct; identical to SEQ ID NO: 18966
  source 1..121: note = Description of Artificial Sequence: Synthetic polypeptide; note = VH of XENP021011

SEQ ID NO: 29906 - protein, 5 aa, synthetic construct
  source 1..5: note = Description of Artificial Sequence: Synthetic peptide; note = XENP021011 vhCDR1
DAWMD

SEQ ID NO: 29907 - protein, 19 aa, synthetic construct
  source 1..19: note = Description of Artificial Sequence: Synthetic peptide; note = XENP021011 vhCDR2
EIRTKANRHATYYAESVKG

SEQ ID NO: 29908 - protein, 10 aa, synthetic construct
  source 1..10: note = Description of Artificial Sequence: Synthetic peptide; note = XENP021011 vhCDR3
LANWDWYFDV

SEQ ID NO: 29909 - protein, 218 aa, synthetic construct; identical to SEQ ID NO: 17590
  source 1..218: note = Description of Artificial Sequence: Synthetic polypeptide; note = XENP021011 7G8_H0.76_L0_Fab Light Chain

SEQ ID NO: 29910 - protein, 111 aa, synthetic construct; identical to SEQ ID NO: 17591
  source 1..111: note = Description of Artificial Sequence: Synthetic polypeptide; note = VL of XENP021011

SEQ ID NO: 29911 - protein, 15 aa, synthetic construct
  source 1..15: note = Description of Artificial Sequence: Synthetic peptide; note = XENP021011 vlCDR1
KASQSVDYDGDSYMN

SEQ ID NO: 29912 - protein, 7 aa, synthetic construct
  source 1..7: note = Description of Artificial Sequence: Synthetic peptide; note = XENP021011 vlCDR2
AASNLES

SEQ ID NO: 29913 - protein, 9 aa, synthetic construct
  source 1..9: note = Description of Artificial Sequence: Synthetic peptide; note = XENP021011 vlCDR3
QQSNEDPFT

SEQ ID NO: 29914 - protein, 226 aa, synthetic construct
  source 1..226: note = Description of Artificial Sequence: Synthetic polypeptide; note = XENP021012 7G8_H0.77_L0_Fab Heavy Chain
EVKLEESGGGLVQPGGSMKLSCAASGFTFSDAWMDWVRQSPEKGLEWVAEIRTKANLHATYYAESVKGRFTISRDDSKSSVYLQMNSLRAEDTGIYYCTRLANWDWYFDVWGAGTTVTVSSASTKGPSVFPLAPSSKSTSGGTAALGCLVKDYFPEPVTVSWNSGALTSGVHTFPAVLQSSGLYSLSSVVTVPSSSLGTQTYICNVNHKPSNTKVDKKVEPKSCGS

SEQ ID NO: 29915 - protein, 121 aa, synthetic construct; identical to SEQ ID NO: 18976
  source 1..121: note = Description of Artificial Sequence: Synthetic polypeptide; note = VH of XENP021012

SEQ ID NO: 29916 - protein, 5 aa, synthetic construct
  source 1..5: note = Description of Artificial Sequence: Synthetic peptide; note = XENP021012 vhCDR1
DAWMD

SEQ ID NO: 29917 - protein, 19 aa, synthetic construct
  source 1..19: note = Description of Artificial Sequence: Synthetic peptide; note = XENP021012 vhCDR2
EIRTKANLHATYYAESVKG

SEQ ID NO: 29918 - protein, 10 aa, synthetic construct
  source 1..10: note = Description of Artificial Sequence: Synthetic peptide; note = XENP021012 vhCDR3
LANWDWYFDV

SEQ ID NO: 29919 - protein, 218 aa, synthetic construct; identical to SEQ ID NO: 17590
  source 1..218: note = Description of Artificial Sequence: Synthetic polypeptide; note = XENP021012 7G8_H0.77_L0_Fab Light Chain

SEQ ID NO: 29920 - protein, 111 aa, synthetic construct; identical to SEQ ID NO: 17591
  source 1..111: note = Description of Artificial Sequence: Synthetic polypeptide; note = VL of XENP021012

SEQ ID NO: 29921 - protein, 15 aa, synthetic construct
  source 1..15: note = Description of Artificial Sequence: Synthetic peptide; note = XENP021012 vlCDR1
KASQSVDYDGDSYMN

SEQ ID NO: 29922 - protein, 7 aa, synthetic construct
  source 1..7: note = Description of Artificial Sequence: Synthetic peptide; note = XENP021012 vlCDR2
AASNLES

SEQ ID NO: 29923 - protein, 9 aa, synthetic construct
  source 1..9: note = Description of Artificial Sequence: Synthetic peptide; note = XENP021012 vlCDR3
QQSNEDPFT

SEQ ID NO: 29924 - protein, 226 aa, synthetic construct
  source 1..226: note = Description of Artificial Sequence: Synthetic polypeptide; note = XENP021013 7G8_H0.78_L0_Fab Heavy Chain
EVKLEESGGGLVQPGGSMKLSCAASGFTFSDAWMDWVRQSPEKGLEWVAEIRTKANTHATYYAESVKGRFTISRDDSKSSVYLQMNSLRAEDTGIYYCTRLANWDWYFDVWGAGTTVTVSSASTKGPSVFPLAPSSKSTSGGTAALGCLVKDYFPEPVTVSWNSGALTSGVHTFPAVLQSSGLYSLSSVVTVPSSSLGTQTYICNVNHKPSNTKVDKKVEPKSCGS

SEQ ID NO: 29925 - protein, 121 aa, synthetic construct; identical to SEQ ID NO: 18986
  source 1..121: note = Description of Artificial Sequence: Synthetic polypeptide; note = VH of XENP021013

SEQ ID NO: 29926 - protein, 5 aa, synthetic construct
  source 1..5: note = Description of Artificial Sequence: Synthetic peptide; note = XENP021013 vhCDR1
DAWMD

SEQ ID NO: 29927 - protein, 19 aa, synthetic construct
  source 1..19: note = Description of Artificial Sequence: Synthetic peptide; note = XENP021013 vhCDR2
EIRTKANTHATYYAESVKG

SEQ ID NO: 29928 - protein, 10 aa, synthetic construct
  source 1..10: note = Description of Artificial Sequence: Synthetic peptide; note = XENP021013 vhCDR3
LANWDWYFDV

SEQ ID NO: 29929 - protein, 218 aa, synthetic construct; identical to SEQ ID NO: 17590
  source 1..218: note = Description of Artificial Sequence: Synthetic polypeptide; note = XENP021013 7G8_H0.78_L0_Fab Light Chain

SEQ ID NO: 29930 - protein, 111 aa, synthetic construct; identical to SEQ ID NO: 17591
  source 1..111: note = Description of Artificial Sequence: Synthetic polypeptide; note = VL of XENP021013

SEQ ID NO: 29931 - protein, 15 aa, synthetic construct
  source 1..15: note = Description of Artificial Sequence: Synthetic peptide; note = XENP021013 vlCDR1
KASQSVDYDGDSYMN

SEQ ID NO: 29932 - protein, 7 aa, synthetic construct
  source 1..7: note = Description of Artificial Sequence: Synthetic peptide; note = XENP021013 vlCDR2
AASNLES

SEQ ID NO: 29933 - protein, 9 aa, synthetic construct
  source 1..9: note = Description of Artificial Sequence: Synthetic peptide; note = XENP021013 vlCDR3
QQSNEDPFT

SEQ ID NO: 29934 - protein, 226 aa, synthetic construct
  source 1..226: note = Description of Artificial Sequence: Synthetic polypeptide; note = XENP021014 7G8_H0.79_L0_Fab Heavy Chain
EVKLEESGGGLVQPGGSMKLSCAASGFTFSDAWMDWVRQSPEKGLEWVAEIRTKANGHATYYAESVKGRFTISRDDSKSSVYLQMNSLRAEDTGIYYCTRLANWDWYFDVWGAGTTVTVSSASTKGPSVFPLAPSSKSTSGGTAALGCLVKDYFPEPVTVSWNSGALTSGVHTFPAVLQSSGLYSLSSVVTVPSSSLGTQTYICNVNHKPSNTKVDKKVEPKSCGS

SEQ ID NO: 29935 - protein, 121 aa, synthetic construct; identical to SEQ ID NO: 18996
  source 1..121: note = Description of Artificial Sequence: Synthetic polypeptide; note = VH of XENP021014

SEQ ID NO: 29936 - protein, 5 aa, synthetic construct
  source 1..5: note = Description of Artificial Sequence: Synthetic peptide; note = XENP021014 vhCDR1
DAWMD

SEQ ID NO: 29937 - protein, 19 aa, synthetic construct
  source 1..19: note = Description of Artificial Sequence: Synthetic peptide; note = XENP021014 vhCDR2
EIRTKANGHATYYAESVKG

SEQ ID NO: 29938 - protein, 10 aa, synthetic construct
  source 1..10: note = Description of Artificial Sequence: Synthetic peptide; note = XENP021014 vhCDR3
LANWDWYFDV

SEQ ID NO: 29939 - protein, 218 aa, synthetic construct; identical to SEQ ID NO: 17590
  source 1..218: note = Description of Artificial Sequence: Synthetic polypeptide; note = XENP021014 7G8_H0.79_L0_Fab Light Chain

SEQ ID NO: 29940 - protein, 111 aa, synthetic construct; identical to SEQ ID NO: 17591
  source 1..111: note = Description of Artificial Sequence: Synthetic polypeptide; note = VL of XENP021014

SEQ ID NO: 29941 - protein, 15 aa, synthetic construct
  source 1..15: note = Description of Artificial Sequence: Synthetic peptide; note = XENP021014 vlCDR1
KASQSVDYDGDSYMN

SEQ ID NO: 29942 - protein, 7 aa, synthetic construct
  source 1..7: note = Description of Artificial Sequence: Synthetic peptide; note = XENP021014 vlCDR2
AASNLES

SEQ ID NO: 29943 - protein, 9 aa, synthetic construct
  source 1..9: note = Description of Artificial Sequence: Synthetic peptide; note = XENP021014 vlCDR3
QQSNEDPFT

SEQ ID NO: 29944 - protein, 226 aa, synthetic construct
  source 1..226: note = Description of Artificial Sequence: Synthetic polypeptide; note = XENP021015 7G8_H0.80_L0_Fab Heavy Chain
EVKLEESGGGLVQPGGSMKLSCAASGFTFSDAWMDWVRQSPEKGLEWVAEIRTKANYHATYYAESVKGRFTISRDDSKSSVYLQMNSLRAEDTGIYYCTRLANWDWYFDVWGAGTTVTVSSASTKGPSVFPLAPSSKSTSGGTAALGCLVKDYFPEPVTVSWNSGALTSGVHTFPAVLQSSGLYSLSSVVTVPSSSLGTQTYICNVNHKPSNTKVDKKVEPKSCGS

SEQ ID NO: 29945 - protein, 121 aa, synthetic construct; identical to SEQ ID NO: 19006
  source 1..121: note = Description of Artificial Sequence: Synthetic polypeptide; note = VH of XENP021015

SEQ ID NO: 29946 - protein, 5 aa, synthetic construct
  source 1..5: note = Description of Artificial Sequence: Synthetic peptide; note = XENP021015 vhCDR1
DAWMD

SEQ ID NO: 29947 - protein, 19 aa, synthetic construct
  source 1..19: note = Description of Artificial Sequence: Synthetic peptide; note = XENP021015 vhCDR2
EIRTKANYHATYYAESVKG

SEQ ID NO: 29948 - protein, 10 aa, synthetic construct
  source 1..10: note = Description of Artificial Sequence: Synthetic peptide; note = XENP021015 vhCDR3
LANWDWYFDV

SEQ ID NO: 29949 - protein, 218 aa, synthetic construct; identical to SEQ ID NO: 17590
  source 1..218: note = Description of Artificial Sequence: Synthetic polypeptide; note = XENP021015 7G8_H0.80_L0_Fab Light Chain

SEQ ID NO: 29950 - protein, 111 aa, synthetic construct; identical to SEQ ID NO: 17591
  source 1..111: note = Description of Artificial Sequence: Synthetic polypeptide; note = VL of XENP021015

SEQ ID NO: 29951 - protein, 15 aa, synthetic construct
  source 1..15: note = Description of Artificial Sequence: Synthetic peptide; note = XENP021015 vlCDR1
KASQSVDYDGDSYMN

SEQ ID NO: 29952 - protein, 7 aa, synthetic construct
  source 1..7: note = Description of Artificial Sequence: Synthetic peptide; note = XENP021015 vlCDR2
AASNLES

SEQ ID NO: 29953 - protein, 9 aa, synthetic construct
  source 1..9: note = Description of Artificial Sequence: Synthetic peptide; note = XENP021015 vlCDR3
QQSNEDPFT

SEQ ID NO: 29954 - protein, 226 aa, synthetic construct
  source 1..226: note = Description of Artificial Sequence: Synthetic polypeptide; note = XENP021016 7G8_H0.81_L0_Fab Heavy Chain
EVKLEESGGGLVQPGGSMKLSCAASGFTFSDAWMDWVRQSPEKGLEWVAEIRTKANNYATYYAESVKGRFTISRDDSKSSVYLQMNSLRAEDTGIYYCTRLANWDWYFDVWGAGTTVTVSSASTKGPSVFPLAPSSKSTSGGTAALGCLVKDYFPEPVTVSWNSGALTSGVHTFPAVLQSSGLYSLSSVVTVPSSSLGTQTYICNVNHKPSNTKVDKKVEPKSCGS

SEQ ID NO: 29955 - protein, 121 aa, synthetic construct; identical to SEQ ID NO: 19016
  source 1..121: note = Description of Artificial Sequence: Synthetic polypeptide; note = VH of XENP021016

SEQ ID NO: 29956 - protein, 5 aa, synthetic construct
  source 1..5: note = Description of Artificial Sequence: Synthetic peptide; note = XENP021016 vhCDR1
DAWMD

SEQ ID NO: 29957 - protein, 19 aa, synthetic construct
  source 1..19: note = Description of Artificial Sequence: Synthetic peptide; note = XENP021016 vhCDR2
EIRTKANNYATYYAESVKG

SEQ ID NO: 29958 - protein, 10 aa, synthetic construct
  source 1..10: note = Description of Artificial Sequence: Synthetic peptide; note = XENP021016 vhCDR3
LANWDWYFDV

SEQ ID NO: 29959 - protein, 218 aa, synthetic construct; identical to SEQ ID NO: 17590
  source 1..218: note = Description of Artificial Sequence: Synthetic polypeptide; note = XENP021016 7G8_H0.81_L0_Fab Light Chain

SEQ ID NO: 29960 - protein, 111 aa, synthetic construct; identical to SEQ ID NO: 17591
  source 1..111: note = Description of Artificial Sequence: Synthetic polypeptide; note = VL of XENP021016

SEQ ID NO: 29961 - protein, 15 aa, synthetic construct
  source 1..15: note = Description of Artificial Sequence: Synthetic peptide; note = XENP021016 vlCDR1
KASQSVDYDGDSYMN

SEQ ID NO: 29962 - protein, 7 aa, synthetic construct
  source 1..7: note = Description of Artificial Sequence: Synthetic peptide; note = XENP021016 vlCDR2
AASNLES

SEQ ID NO: 29963 - protein, 9 aa, synthetic construct
  source 1..9: note = Description of Artificial Sequence: Synthetic peptide; note = XENP021016 vlCDR3
QQSNEDPFT

SEQ ID NO: 29964 - protein, 226 aa, synthetic construct
  source 1..226: note = Description of Artificial Sequence: Synthetic polypeptide; note = XENP021017 7G8_H0.82_L0_Fab Heavy Chain
EVKLEESGGGLVQPGGSMKLSCAASGFTFSDAWMDWVRQSPEKGLEWVAEIRTKANNQATYYAESVKGRFTISRDDSKSSVYLQMNSLRAEDTGIYYCTRLANWDWYFDVWGAGTTVTVSSASTKGPSVFPLAPSSKSTSGGTAALGCLVKDYFPEPVTVSWNSGALTSGVHTFPAVLQSSGLYSLSSVVTVPSSSLGTQTYICNVNHKPSNTKVDKKVEPKSCGS

SEQ ID NO: 29965 - protein, 121 aa, synthetic construct; identical to SEQ ID NO: 19026
  source 1..121: note = Description of Artificial Sequence: Synthetic polypeptide; note = VH of XENP021017

SEQ ID NO: 29966 - protein, 5 aa, synthetic construct
  source 1..5: note = Description of Artificial Sequence: Synthetic peptide; note = XENP021017 vhCDR1
DAWMD

SEQ ID NO: 29967 - protein, 19 aa, synthetic construct
  source 1..19: note = Description of Artificial Sequence: Synthetic peptide; note = XENP021017 vhCDR2
EIRTKANNQATYYAESVKG

SEQ ID NO: 29968 - protein, 10 aa, synthetic construct
  source 1..10: note = Description of Artificial Sequence: Synthetic peptide; note = XENP021017 vhCDR3
LANWDWYFDV

SEQ ID NO: 29969 - protein, 218 aa, synthetic construct; identical to SEQ ID NO: 17590
  source 1..218: note = Description of Artificial Sequence: Synthetic polypeptide; note = XENP021017 7G8_H0.82_L0_Fab Light Chain

SEQ ID NO: 29970 - protein, 111 aa, synthetic construct; identical to SEQ ID NO: 17591
  source 1..111: note = Description of Artificial Sequence: Synthetic polypeptide; note = VL of XENP021017

SEQ ID NO: 29971 - protein, 15 aa, synthetic construct
  source 1..15: note = Description of Artificial Sequence: Synthetic peptide; note = XENP021017 vlCDR1
KASQSVDYDGDSYMN

SEQ ID NO: 29972 - protein, 7 aa, synthetic construct
  source 1..7: note = Description of Artificial Sequence: Synthetic peptide; note = XENP021017 vlCDR2
AASNLES

SEQ ID NO: 29973 - protein, 9 aa, synthetic construct
  source 1..9: note = Description of Artificial Sequence: Synthetic peptide; note = XENP021017 vlCDR3
QQSNEDPFT

SEQ ID NO: 29974 - protein, 226 aa, synthetic construct
  source 1..226: note = Description of Artificial Sequence: Synthetic polypeptide; note = XENP021018 7G8_H0.83_L0_Fab Heavy Chain
EVKLEESGGGLVQPGGSMKLSCAASGFTFSDAWMDWVRQSPEKGLEWVAEIRTKANNDATYYAESVKGRFTISRDDSKSSVYLQMNSLRAEDTGIYYCTRLANWDWYFDVWGAGTTVTVSSASTKGPSVFPLAPSSKSTSGGTAALGCLVKDYFPEPVTVSWNSGALTSGVHTFPAVLQSSGLYSLSSVVTVPSSSLGTQTYICNVNHKPSNTKVDKKVEPKSCGS

SEQ ID NO: 29975 - protein, 121 aa, synthetic construct; identical to SEQ ID NO: 19036
  source 1..121: note = Description of Artificial Sequence: Synthetic polypeptide; note = VH of XENP021018

SEQ ID NO: 29976 - protein, 5 aa, synthetic construct
  source 1..5: note = Description of Artificial Sequence: Synthetic peptide; note = XENP021018 vhCDR1
DAWMD

SEQ ID NO: 29977 - protein, 19 aa, synthetic construct
  source 1..19: note = Description of Artificial Sequence: Synthetic peptide; note = XENP021018 vhCDR2
EIRTKANNDATYYAESVKG

SEQ ID NO: 29978 - protein, 10 aa, synthetic construct
  source 1..10: note = Description of Artificial Sequence: Synthetic peptide; note = XENP021018 vhCDR3
LANWDWYFDV

SEQ ID NO: 29979 - protein, 218 aa, synthetic construct; identical to SEQ ID NO: 17590
  source 1..218: note = Description of Artificial Sequence: Synthetic polypeptide; note = XENP021018 7G8_H0.83_L0_Fab Light Chain

SEQ ID NO: 29980 - protein, 111 aa, synthetic construct; identical to SEQ ID NO: 17591
  source 1..111: note = Description of Artificial Sequence: Synthetic polypeptide; note = VL of XENP021018

SEQ ID NO: 29981 - protein, 15 aa, synthetic construct
  source 1..15: note = Description of Artificial Sequence: Synthetic peptide; note = XENP021018 vlCDR1
KASQSVDYDGDSYMN

SEQ ID NO: 29982 - protein, 7 aa, synthetic construct
  source 1..7: note = Description of Artificial Sequence: Synthetic peptide; note = XENP021018 vlCDR2
AASNLES

SEQ ID NO: 29983 - protein, 9 aa, synthetic construct
  source 1..9: note = Description of Artificial Sequence: Synthetic peptide; note = XENP021018 vlCDR3
QQSNEDPFT

SEQ ID NO: 29984 - protein, 226 aa, synthetic construct
  source 1..226: note = Description of Artificial Sequence: Synthetic polypeptide; note = XENP021019 7G8_H0.84_L0_Fab Heavy Chain
EVKLEESGGGLVQPGGSMKLSCAASGFTFSDAWMDWVRQSPEKGLEWVAEIRTKANNFATYYAESVKGRFTISRDDSKSSVYLQMNSLRAEDTGIYYCTRLANWDWYFDVWGAGTTVTVSSASTKGPSVFPLAPSSKSTSGGTAALGCLVKDYFPEPVTVSWNSGALTSGVHTFPAVLQSSGLYSLSSVVTVPSSSLGTQTYICNVNHKPSNTKVDKKVEPKSCGS

SEQ ID NO: 29985 - protein, 121 aa, synthetic construct; identical to SEQ ID NO: 19046
  source 1..121: note = Description of Artificial Sequence: Synthetic polypeptide; note = VH of XENP021019

SEQ ID NO: 29986 - protein, 5 aa, synthetic construct
  source 1..5: note = Description of Artificial Sequence: Synthetic peptide; note = XENP021019 vhCDR1
DAWMD

SEQ ID NO: 29987 - protein, 19 aa, synthetic construct
  source 1..19: note = Description of Artificial Sequence: Synthetic peptide; note = XENP021019 vhCDR2
EIRTKANNFATYYAESVKG

SEQ ID NO: 29988 - protein, 10 aa, synthetic construct
  source 1..10: note = Description of Artificial Sequence: Synthetic peptide; note = XENP021019 vhCDR3
LANWDWYFDV

SEQ ID NO: 29989 - protein, 218 aa, synthetic construct; identical to SEQ ID NO: 17590
  source 1..218: note = Description of Artificial Sequence: Synthetic polypeptide; note = XENP021019 7G8_H0.84_L0_Fab Light Chain

SEQ ID NO: 29990 - protein, 111 aa, synthetic construct; identical to SEQ ID NO: 17591
  source 1..111: note = Description of Artificial Sequence: Synthetic polypeptide; note = VL of XENP021019

SEQ ID NO: 29991 - protein, 15 aa, synthetic construct
  source 1..15: note = Description of Artificial Sequence: Synthetic peptide; note = XENP021019 vlCDR1
KASQSVDYDGDSYMN

SEQ ID NO: 29992 - protein, 7 aa, synthetic construct
  source 1..7: note = Description of Artificial Sequence: Synthetic peptide; note = XENP021019 vlCDR2
AASNLES

SEQ ID NO: 29993 - protein, 9 aa, synthetic construct
  source 1..9: note = Description of Artificial Sequence: Synthetic peptide; note = XENP021019 vlCDR3
QQSNEDPFT

SEQ ID NO: 29994 - protein, 226 aa, synthetic construct
  source 1..226: note = Description of Artificial Sequence: Synthetic polypeptide; note = XENP021020 7G8_H0.85_L0_Fab Heavy Chain
EVKLEESGGGLVQPGGSMKLSCAASGFTFSDAWMDWVRQSPEKGLEWVAEIRTKANNAATYYAESVKGRFTISRDDSKSSVYLQMNSLRAEDTGIYYCTRLANWDWYFDVWGAGTTVTVSSASTKGPSVFPLAPSSKSTSGGTAALGCLVKDYFPEPVTVSWNSGALTSGVHTFPAVLQSSGLYSLSSVVTVPSSSLGTQTYICNVNHKPSNTKVDKKVEPKSCGS

SEQ ID NO: 29995 - protein, 121 aa, synthetic construct; identical to SEQ ID NO: 19056
  source 1..121: note = Description of Artificial Sequence: Synthetic polypeptide; note = VH of XENP021020

SEQ ID NO: 29996 - protein, 5 aa, synthetic construct
  source 1..5: note = Description of Artificial Sequence: Synthetic peptide; note = XENP021020 vhCDR1
DAWMD

SEQ ID NO: 29997 - protein, 19 aa, synthetic construct
  source 1..19: note = Description of Artificial Sequence: Synthetic peptide; note = XENP021020 vhCDR2
EIRTKANNAATYYAESVKG

SEQ ID NO: 29998 - protein, 10 aa, synthetic construct
  source 1..10: note = Description of Artificial Sequence: Synthetic peptide; note = XENP021020 vhCDR3
LANWDWYFDV

SEQ ID NO: 29999 - protein, 218 aa, synthetic construct; identical to SEQ ID NO: 17590
  source 1..218: note = Description of Artificial Sequence: Synthetic polypeptide; note = XENP021020 7G8_H0.85_L0_Fab Light Chain

SEQ ID NO: 30000 - protein, 111 aa, synthetic construct; identical to SEQ ID NO: 17591
  source 1..111: note = Description of Artificial Sequence: Synthetic polypeptide; note = VL of XENP021020

SEQ ID NO: 30001 - protein, 15 aa, synthetic construct
  source 1..15: note = Description of Artificial Sequence: Synthetic peptide; note = XENP021020 vlCDR1
KASQSVDYDGDSYMN

SEQ ID NO: 30002 - protein, 7 aa, synthetic construct
  source 1..7: note = Description of Artificial Sequence: Synthetic peptide; note = XENP021020 vlCDR2
AASNLES

SEQ ID NO: 30003 - protein, 9 aa, synthetic construct
  source 1..9: note = Description of Artificial Sequence: Synthetic peptide; note = XENP021020 vlCDR3
QQSNEDPFT

SEQ ID NO: 30004 - protein, 226 aa, synthetic construct
  source 1..226: note = Description of Artificial Sequence: Synthetic polypeptide; note = XENP021021 7G8_H0.86_L0_Fab Heavy Chain
EVKLEESGGGLVQPGGSMKLSCAASGFTFSDAWMDWVRQSPEKGLEWVAEIRTKANNKATYYAESVKGRFTISRDDSKSSVYLQMNSLRAEDTGIYYCTRLANWDWYFDVWGAGTTVTVSSASTKGPSVFPLAPSSKSTSGGTAALGCLVKDYFPEPVTVSWNSGALTSGVHTFPAVLQSSGLYSLSSVVTVPSSSLGTQTYICNVNHKPSNTKVDKKVEPKSCGS

SEQ ID NO: 30005 - protein, 121 aa, synthetic construct; identical to SEQ ID NO: 19066
  source 1..121: note = Description of Artificial Sequence: Synthetic polypeptide; note = VH of XENP021021

SEQ ID NO: 30006 - protein, 5 aa, synthetic construct
  source 1..5: note = Description of Artificial Sequence: Synthetic peptide; note = XENP021021 vhCDR1
DAWMD

SEQ ID NO: 30007 - protein, 19 aa, synthetic construct
  source 1..19: note = Description of Artificial Sequence: Synthetic peptide; note = XENP021021 vhCDR2
EIRTKANNKATYYAESVKG

SEQ ID NO: 30008 - protein, 10 aa, synthetic construct
  source 1..10: note = Description of Artificial Sequence: Synthetic peptide; note = XENP021021 vhCDR3
LANWDWYFDV

SEQ ID NO: 30009 - protein, 218 aa, synthetic construct; identical to SEQ ID NO: 17590
  source 1..218: note = Description of Artificial Sequence: Synthetic polypeptide; note = XENP021021 7G8_H0.86_L0_Fab Light Chain

SEQ ID NO: 30010 - protein, 111 aa, synthetic construct; identical to SEQ ID NO: 17591
  source 1..111: note = Description of Artificial Sequence: Synthetic polypeptide; note = VL of XENP021021

SEQ ID NO: 30011 - protein, 15 aa, synthetic construct
  source 1..15: note = Description of Artificial Sequence: Synthetic peptide; note = XENP021021 vlCDR1
KASQSVDYDGDSYMN

SEQ ID NO: 30012 - protein, 7 aa, synthetic construct
  source 1..7: note = Description of Artificial Sequence: Synthetic peptide; note = XENP021021 vlCDR2
AASNLES

SEQ ID NO: 30013 - protein, 9 aa, synthetic construct
  source 1..9: note = Description of Artificial Sequence: Synthetic peptide; note = XENP021021 vlCDR3
QQSNEDPFT

SEQ ID NO: 30014 - protein, 226 aa, synthetic construct
  source 1..226: note = Description of Artificial Sequence: Synthetic polypeptide; note = XENP021022 7G8_H0.87_L0_Fab Heavy Chain
EVKLEESGGGLVQPGGSMKLSCAASGFTFSDAWMDWVRQSPEKGLEWVAEIRTKANNGATYYAESVKGRFTISRDDSKSSVYLQMNSLRAEDTGIYYCTRLANWDWYFDVWGAGTTVTVSSASTKGPSVFPLAPSSKSTSGGTAALGCLVKDYFPEPVTVSWNSGALTSGVHTFPAVLQSSGLYSLSSVVTVPSSSLGTQTYICNVNHKPSNTKVDKKVEPKSCGS

SEQ ID NO: 30015 - protein, 121 aa, synthetic construct; identical to SEQ ID NO: 19076
  source 1..121: note = Description of Artificial Sequence: Synthetic polypeptide; note = VH of XENP021022

SEQ ID NO: 30016 - protein, 5 aa, synthetic construct
  source 1..5: note = Description of Artificial Sequence: Synthetic peptide; note = XENP021022 vhCDR1
DAWMD

SEQ ID NO: 30017 - protein, 19 aa, synthetic construct
  source 1..19: note = Description of Artificial Sequence: Synthetic peptide; note = XENP021022 vhCDR2
EIRTKANNGATYYAESVKG

SEQ ID NO: 30018 - protein, 10 aa, synthetic construct
  source 1..10: note = Description of Artificial Sequence: Synthetic peptide; note = XENP021022 vhCDR3
LANWDWYFDV

SEQ ID NO: 30019 - protein, 218 aa, synthetic construct; identical to SEQ ID NO: 17590
  source 1..218: note = Description of Artificial Sequence: Synthetic polypeptide; note = XENP021022 7G8_H0.87_L0_Fab Light Chain

SEQ ID NO: 30020 - protein, 111 aa, synthetic construct; identical to SEQ ID NO: 17591
  source 1..111: note = Description of Artificial Sequence: Synthetic polypeptide; note = VL of XENP021022

SEQ ID NO: 30021 - protein, 15 aa, synthetic construct
  source 1..15: note = Description of Artificial Sequence: Synthetic peptide; note = XENP021022 vlCDR1
KASQSVDYDGDSYMN

SEQ ID NO: 30022 - protein, 7 aa, synthetic construct
  source 1..7: note = Description of Artificial Sequence: Synthetic peptide; note = XENP021022 vlCDR2
AASNLES

SEQ ID NO: 30023 - protein, 9 aa, synthetic construct
  source 1..9: note = Description of Artificial Sequence: Synthetic peptide; note = XENP021022 vlCDR3
QQSNEDPFT

SEQ ID NO: 30024 - protein, 226 aa, synthetic construct
  source 1..226: note = Description of Artificial Sequence: Synthetic polypeptide; note = XENP021023 7G8_H0.88_L0_Fab Heavy Chain
EVKLEESGGGLVQPGGSMKLSCAASGFTFSDAWMDWVRQSPEKGLEWVAEIRTKANNLATYYAESVKGRFTISRDDSKSSVYLQMNSLRAEDTGIYYCTRLANWDWYFDVWGAGTTVTVSSASTKGPSVFPLAPSSKSTSGGTAALGCLVKDYFPEPVTVSWNSGALTSGVHTFPAVLQSSGLYSLSSVVTVPSSSLGTQTYICNVNHKPSNTKVDKKVEPKSCGS

SEQ ID NO: 30025 - protein, 121 aa, synthetic construct; identical to SEQ ID NO: 19086
  source 1..121: note = Description of Artificial Sequence: Synthetic polypeptide; note = VH of XENP021023

SEQ ID NO: 30026 - protein, 5 aa, synthetic construct
  source 1..5: note = Description of Artificial Sequence: Synthetic peptide; note = XENP021023 vhCDR1
DAWMD

SEQ ID NO: 30027 - protein, 19 aa, synthetic construct
  source 1..19: note = Description of Artificial Sequence: Synthetic peptide; note = XENP021023 vhCDR2
EIRTKANNLATYYAESVKG

SEQ ID NO: 30028 - protein, 10 aa, synthetic construct
  source 1..10: note = Description of Artificial Sequence: Synthetic peptide; note = XENP021023 vhCDR3
LANWDWYFDV

SEQ ID NO: 30029 - protein, 218 aa, synthetic construct; identical to SEQ ID NO: 17590
  source 1..218: note = Description of Artificial Sequence: Synthetic polypeptide; note = XENP021023 7G8_H0.88_L0_Fab Light Chain

SEQ ID NO: 30030 - protein, 111 aa, synthetic construct; identical to SEQ ID NO: 17591
  source 1..111: note = Description of Artificial Sequence: Synthetic polypeptide; note = VL of XENP021023

SEQ ID NO: 30031 - protein, 15 aa, synthetic construct
  source 1..15: note = Description of Artificial Sequence: Synthetic peptide; note = XENP021023 vlCDR1
KASQSVDYDGDSYMN

SEQ ID NO: 30032 - protein, 7 aa, synthetic construct
  source 1..7: note = Description of Artificial Sequence: Synthetic peptide; note = XENP021023 vlCDR2
AASNLES

SEQ ID NO: 30033 - protein, 9 aa, synthetic construct
  source 1..9: note = Description of Artificial Sequence: Synthetic peptide; note = XENP021023 vlCDR3
QQSNEDPFT

SEQ ID NO: 30034 - protein, 226 aa, synthetic construct
  source 1..226: note = Description of Artificial Sequence: Synthetic polypeptide; note = XENP021024 7G8_H0.89_L0_Fab Heavy Chain
EVKLEESGGGLVQPGGSMKLSCAASGFTFSDAWMDWVRQSPEKGLEWVAEIRTKANNHGTYYAESVKGRFTISRDDSKSSVYLQMNSLRAEDTGIYYCTRLANWDWYFDVWGAGTTVTVSSASTKGPSVFPLAPSSKSTSGGTAALGCLVKDYFPEPVTVSWNSGALTSGVHTFPAVLQSSGLYSLSSVVTVPSSSLGTQTYICNVNHKPSNTKVDKKVEPKSCGS

SEQ ID NO: 30035 - protein, 121 aa, synthetic construct; identical to SEQ ID NO: 19096
  source 1..121: note = Description of Artificial Sequence: Synthetic polypeptide; note = VH of XENP021024

SEQ ID NO: 30036 - protein, 5 aa, synthetic construct
  source 1..5: note = Description of Artificial Sequence: Synthetic peptide; note = XENP021024 vhCDR1
DAWMD

SEQ ID NO: 30037 - protein, 19 aa, synthetic construct
  source 1..19: note = Description of Artificial Sequence: Synthetic peptide; note = XENP021024 vhCDR2
EIRTKANNHGTYYAESVKG

SEQ ID NO: 30038 - protein, 10 aa, synthetic construct
  source 1..10: note = Description of Artificial Sequence: Synthetic peptide; note = XENP021024 vhCDR3
LANWDWYFDV

SEQ ID NO: 30039 - protein, 218 aa, synthetic construct; identical to SEQ ID NO: 17590
  source 1..218: note = Description of Artificial Sequence: Synthetic polypeptide; note = XENP021024 7G8_H0.89_L0_Fab Light Chain

SEQ ID NO: 30040 - protein, 111 aa, synthetic construct; identical to SEQ ID NO: 17591
  source 1..111: note = Description of Artificial Sequence: Synthetic polypeptide; note = VL of XENP021024

SEQ ID NO: 30041 - protein, 15 aa, synthetic construct
  source 1..15: note = Description of Artificial Sequence: Synthetic peptide; note = XENP021024 vlCDR1
KASQSVDYDGDSYMN

SEQ ID NO: 30042 - protein, 7 aa, synthetic construct
  source 1..7: note = Description of Artificial Sequence: Synthetic peptide; note = XENP021024 vlCDR2
AASNLES

SEQ ID NO: 30043 - protein, 9 aa, synthetic construct
  source 1..9: note = Description of Artificial Sequence: Synthetic peptide; note = XENP021024 vlCDR3
QQSNEDPFT

SEQ ID NO: 30044 - protein, 226 aa, synthetic construct
  source 1..226: note = Description of Artificial Sequence: Synthetic polypeptide; note = XENP021025 7G8_H0.90_L0_Fab Heavy Chain
EVKLEESGGGLVQPGGSMKLSCAASGFTFSDAWMDWVRQSPEKGLEWVAEIRTKANNHHTYYAESVKGRFTISRDDSKSSVYLQMNSLRAEDTGIYYCTRLANWDWYFDVWGAGTTVTVSSASTKGPSVFPLAPSSKSTSGGTAALGCLVKDYFPEPVTVSWNSGALTSGVHTFPAVLQSSGLYSLSSVVTVPSSSLGTQTYICNVNHKPSNTKVDKKVEPKSCGS

SEQ ID NO: 30045 - protein, 121 aa, synthetic construct; identical to SEQ ID NO: 19106
  source 1..121: note = Description of Artificial Sequence: Synthetic polypeptide; note = VH of XENP021025

SEQ ID NO: 30046 - protein, 5 aa, synthetic construct
  source 1..5: note = Description of Artificial Sequence: Synthetic peptide; note = XENP021025 vhCDR1
DAWMD

SEQ ID NO: 30047 - protein, 19 aa, synthetic construct
  source 1..19: note = Description of Artificial Sequence: Synthetic peptide; note = XENP021025 vhCDR2
EIRTKANNHHTYYAESVKG

SEQ ID NO: 30048 - protein, 10 aa, synthetic construct
  source 1..10: note = Description of Artificial Sequence: Synthetic peptide; note = XENP021025 vhCDR3
LANWDWYFDV

SEQ ID NO: 30049 - protein, 218 aa, synthetic construct; identical to SEQ ID NO: 17590
  source 1..218: note = Description of Artificial Sequence: Synthetic polypeptide; note = XENP021025 7G8_H0.90_L0_Fab Light Chain

SEQ ID NO: 30050 - protein, 111 aa, synthetic construct; identical to SEQ ID NO: 17591
  source 1..111: note = Description of Artificial Sequence: Synthetic polypeptide; note = VL of XENP021025

SEQ ID NO: 30051 - protein, 15 aa, synthetic construct
  source 1..15: note = Description of Artificial Sequence: Synthetic peptide; note = XENP021025 vlCDR1
KASQSVDYDGDSYMN

SEQ ID NO: 30052 - protein, 7 aa, synthetic construct
  source 1..7: note = Description of Artificial Sequence: Synthetic peptide; note = XENP021025 vlCDR2
AASNLES

SEQ ID NO: 30053 - protein, 9 aa, synthetic construct
  source 1..9: note = Description of Artificial Sequence: Synthetic peptide; note = XENP021025 vlCDR3
QQSNEDPFT

SEQ ID NO: 30054 - protein, 226 aa, synthetic construct
  source 1..226: note = Description of Artificial Sequence: Synthetic polypeptide; note = XENP021026 7G8_H0.91_L0_Fab Heavy Chain
EVKLEESGGGLVQPGGSMKLSCAASGFTFSDAWMDWVRQSPEKGLEWVAEIRTKANNHQTYYAESVKGRFTISRDDSKSSVYLQMNSLRAEDTGIYYCTRLANWDWYFDVWGAGTTVTVSSASTKGPSVFPLAPSSKSTSGGTAALGCLVKDYFPEPVTVSWNSGALTSGVHTFPAVLQSSGLYSLSSVVTVPSSSLGTQTYICNVNHKPSNTKVDKKVEPKSCGS

SEQ ID NO: 30055 - protein, 121 aa, synthetic construct; identical to SEQ ID NO: 19116
  source 1..121: note = Description of Artificial Sequence: Synthetic polypeptide; note = VH of XENP021026

SEQ ID NO: 30056 - protein, 5 aa, synthetic construct
  source 1..5: note = Description of Artificial Sequence: Synthetic peptide; note = XENP021026 vhCDR1
DAWMD

SEQ ID NO: 30057 - protein, 19 aa, synthetic construct
  source 1..19: note = Description of Artificial Sequence: Synthetic peptide; note = XENP021026 vhCDR2
EIRTKANNHQTYYAESVKG

SEQ ID NO: 30058 - protein, 10 aa, synthetic construct
  source 1..10: note = Description of Artificial Sequence: Synthetic peptide; note = XENP021026 vhCDR3
LANWDWYFDV

SEQ ID NO: 30059 - protein, 218 aa, synthetic construct; identical to SEQ ID NO: 17590
  source 1..218: note = Description of Artificial Sequence: Synthetic polypeptide; note = XENP021026 7G8_H0.91_L0_Fab Light Chain

SEQ ID NO: 30060 - protein, 111 aa, synthetic construct; identical to SEQ ID NO: 17591
  source 1..111: note = Description of Artificial Sequence: Synthetic polypeptide; note = VL of XENP021026

SEQ ID NO: 30061 - protein, 15 aa, synthetic construct
  source 1..15: note = Description of Artificial Sequence: Synthetic peptide; note = XENP021026 vlCDR1
KASQSVDYDGDSYMN

SEQ ID NO: 30062 - protein, 7 aa, synthetic construct
  source 1..7: note = Description of Artificial Sequence: Synthetic peptide; note = XENP021026 vlCDR2
AASNLES

SEQ ID NO: 30063 - protein, 9 aa, synthetic construct
  source 1..9: note = Description of Artificial Sequence: Synthetic peptide; note = XENP021026 vlCDR3
QQSNEDPFT

SEQ ID NO: 30064 - protein, 226 aa, synthetic construct
  source 1..226: note = Description of Artificial Sequence: Synthetic polypeptide; note = XENP021027 7G8_H0.92_L0_Fab Heavy Chain
EVKLEESGGGLVQPGGSMKLSCAASGFTFSDAWMDWVRQSPEKGLEWVAEIRTKANNHDTYYAESVKGRFTISRDDSKSSVYLQMNSLRAEDTGIYYCTRLANWDWYFDVWGAGTTVTVSSASTKGPSVFPLAPSSKSTSGGTAALGCLVKDYFPEPVTVSWNSGALTSGVHTFPAVLQSSGLYSLSSVVTVPSSSLGTQTYICNVNHKPSNTKVDKKVEPKSCGS

SEQ ID NO: 30065 - protein, 121 aa, synthetic construct; identical to SEQ ID NO: 19126
  source 1..121: note = Description of Artificial Sequence: Synthetic polypeptide; note = VH of XENP021027

SEQ ID NO: 30066 - protein, 5 aa, synthetic construct
  source 1..5: note = Description of Artificial Sequence: Synthetic peptide; note = XENP021027 vhCDR1
DAWMD

SEQ ID NO: 30067 - protein, 19 aa, synthetic construct
  source 1..19: note = Description of Artificial Sequence: Synthetic peptide; note = XENP021027 vhCDR2
EIRTKANNHDTYYAESVKG

SEQ ID NO: 30068 - protein, 10 aa, synthetic construct
  source 1..10: note = Description of Artificial Sequence: Synthetic peptide; note = XENP021027 vhCDR3
LANWDWYFDV

SEQ ID NO: 30069 - protein, 218 aa, synthetic construct; identical to SEQ ID NO: 17590
  source 1..218: note = Description of Artificial Sequence: Synthetic polypeptide; note = XENP021027 7G8_H0.92_L0_Fab Light Chain

SEQ ID NO: 30070 - protein, 111 aa, synthetic construct; identical to SEQ ID NO: 17591
  source 1..111: note = Description of Artificial Sequence: Synthetic polypeptide; note = VL of XENP021027

SEQ ID NO: 30071 - protein, 15 aa, synthetic construct
  source 1..15: note = Description of Artificial Sequence: Synthetic peptide; note = XENP021027 vlCDR1
KASQSVDYDGDSYMN

SEQ ID NO: 30072 - protein, 7 aa, synthetic construct
  source 1..7: note = Description of Artificial Sequence: Synthetic peptide; note = XENP021027 vlCDR2
AASNLES

SEQ ID NO: 30073 - protein, 9 aa, synthetic construct
  source 1..9: note = Description of Artificial Sequence: Synthetic peptide; note = XENP021027 vlCDR3
QQSNEDPFT

SEQ ID NO: 30074 - protein, 226 aa, synthetic construct
  source 1..226: note = Description of Artificial Sequence: Synthetic polypeptide; note = XENP021028 7G8_H0.93_L0_Fab Heavy Chain
EVKLEESGGGLVQPGGSMKLSCAASGFTFSDAWMDWVRQSPEKGLEWVAEIRTKANNHLTYYAESVKGRFTISRDDSKSSVYLQMNSLRAEDTGIYYCTRLANWDWYFDVWGAGTTVTVSSASTKGPSVFPLAPSSKSTSGGTAALGCLVKDYFPEPVTVSWNSGALTSGVHTFPAVLQSSGLYSLSSVVTVPSSSLGTQTYICNVNHKPSNTKVDKKVEPKSCGS

SEQ ID NO: 30075 - protein, 121 aa, synthetic construct; identical to SEQ ID NO: 19136
  source 1..121: note = Description of Artificial Sequence: Synthetic polypeptide; note = VH of XENP021028

SEQ ID NO: 30076 - protein, 5 aa, synthetic construct
  source 1..5: note = Description of Artificial Sequence: Synthetic peptide; note = XENP021028 vhCDR1
DAWMD

SEQ ID NO: 30077 - protein, 19 aa, synthetic construct
  source 1..19: note = Description of Artificial Sequence: Synthetic peptide; note = XENP021028 vhCDR2
EIRTKANNHLTYYAESVKG

SEQ ID NO: 30078 - protein, 10 aa, synthetic construct
  source 1..10: note = Description of Artificial Sequence: Synthetic peptide; note = XENP021028 vhCDR3
LANWDWYFDV

SEQ ID NO: 30079 - protein, 218 aa, synthetic construct; identical to SEQ ID NO: 17590
  source 1..218: note = Description of Artificial Sequence: Synthetic polypeptide; note = XENP021028 7G8_H0.93_L0_Fab Light Chain

SEQ ID NO: 30080 - protein, 111 aa, synthetic construct; identical to SEQ ID NO: 17591
  source 1..111: note = Description of Artificial Sequence: Synthetic polypeptide; note = VL of XENP021028

SEQ ID NO: 30081 - protein, 15 aa, synthetic construct
  source 1..15: note = Description of Artificial Sequence: Synthetic peptide; note = XENP021028 vlCDR1
KASQSVDYDGDSYMN

SEQ ID NO: 30082 - protein, 7 aa, synthetic construct
  source 1..7: note = Description of Artificial Sequence: Synthetic peptide; note = XENP021028 vlCDR2
AASNLES

SEQ ID NO: 30083 - protein, 9 aa, synthetic construct
  source 1..9: note = Description of Artificial Sequence: Synthetic peptide; note = XENP021028 vlCDR3
QQSNEDPFT

SEQ ID NO: 30084 - protein, 226 aa, synthetic construct
  source 1..226: note = Description of Artificial Sequence: Synthetic polypeptide; note = XENP021029 7G8_H0.94_L0_Fab Heavy Chain
EVKLEESGGGLVQPGGSMKLSCAASGFTFSDAWMDWVRQSPEKGLEWVAEIRTKANNHKTYYAESVKGRFTISRDDSKSSVYLQMNSLRAEDTGIYYCTRLANWDWYFDVWGAGTTVTVSSASTKGPSVFPLAPSSKSTSGGTAALGCLVKDYFPEPVTVSWNSGALTSGVHTFPAVLQSSGLYSLSSVVTVPSSSLGTQTYICNVNHKPSNTKVDKKVEPKSCGS

SEQ ID NO: 30085 - protein, 121 aa, synthetic construct; identical to SEQ ID NO: 19146
  source 1..121: note = Description of Artificial Sequence: Synthetic polypeptide; note = VH of XENP021029

SEQ ID NO: 30086 - protein, 5 aa, synthetic construct
  source 1..5: note = Description of Artificial Sequence: Synthetic peptide; note = XENP021029 vhCDR1
DAWMD

SEQ ID NO: 30087 - protein, 19 aa, synthetic construct
  source 1..19: note = Description of Artificial Sequence: Synthetic peptide; note = XENP021029 vhCDR2
EIRTKANNHKTYYAESVKG

SEQ ID NO: 30088 - protein, 10 aa, synthetic construct
  source 1..10: note = Description of Artificial Sequence: Synthetic peptide; note = XENP021029 vhCDR3
LANWDWYFDV

SEQ ID NO: 30089 - protein, 218 aa, synthetic construct; identical to SEQ ID NO: 17590
  source 1..218: note = Description of Artificial Sequence: Synthetic polypeptide; note = XENP021029 7G8_H0.94_L0_Fab Light Chain

SEQ ID NO: 30090 - protein, 111 aa, synthetic construct; identical to SEQ ID NO: 17591
  source 1..111: note = Description of Artificial Sequence: Synthetic polypeptide; note = VL of XENP021029

SEQ ID NO: 30091 - protein, 15 aa, synthetic construct
  source 1..15: note = Description of Artificial Sequence: Synthetic peptide; note = XENP021029 vlCDR1
KASQSVDYDGDSYMN

SEQ ID NO: 30092 - protein, 7 aa, synthetic construct
  source 1..7: note = Description of Artificial Sequence: Synthetic peptide; note = XENP021029 vlCDR2
AASNLES

SEQ ID NO: 30093 - protein, 9 aa, synthetic construct
  source 1..9: note = Description of Artificial Sequence: Synthetic peptide; note = XENP021029 vlCDR3
QQSNEDPFT

SEQ ID NO: 30094 - protein, 226 aa, synthetic construct
  source 1..226: note = Description of Artificial Sequence: Synthetic polypeptide; note = XENP021030 7G8_H0.95_L0_Fab Heavy Chain
EVKLEESGGGLVQPGGSMKLSCAASGFTFSDAWMDWVRQSPEKGLEWVAEIRTKANNHYTYYAESVKGRFTISRDDSKSSVYLQMNSLRAEDTGIYYCTRLANWDWYFDVWGAGTTVTVSSASTKGPSVFPLAPSSKSTSGGTAALGCLVKDYFPEPVTVSWNSGALTSGVHTFPAVLQSSGLYSLSSVVTVPSSSLGTQTYICNVNHKPSNTKVDKKVEPKSCGS

SEQ ID NO: 30095 - protein, 121 aa, synthetic construct; identical to SEQ ID NO: 19156
  source 1..121: note = Description of Artificial Sequence: Synthetic polypeptide; note = VH of XENP021030

SEQ ID NO: 30096 - protein, 5 aa, synthetic construct
  source 1..5: note = Description of Artificial Sequence: Synthetic peptide; note = XENP021030 vhCDR1
DAWMD

SEQ ID NO: 30097 - protein, 19 aa, synthetic construct
  source 1..19: note = Description of Artificial Sequence: Synthetic peptide; note = XENP021030 vhCDR2
EIRTKANNHYTYYAESVKG

SEQ ID NO: 30098 - protein, 10 aa, synthetic construct
  source 1..10: note = Description of Artificial Sequence: Synthetic peptide; note = XENP021030 vhCDR3
LANWDWYFDV

SEQ ID NO: 30099 - protein, 218 aa, synthetic construct; identical to SEQ ID NO: 17590
  source 1..218: note = Description of Artificial Sequence: Synthetic polypeptide; note = XENP021030 7G8_H0.95_L0_Fab Light Chain

SEQ ID NO: 30100 - protein, 111 aa, synthetic construct; identical to SEQ ID NO: 17591
  source 1..111: note = Description of Artificial Sequence: Synthetic polypeptide; note = VL of XENP021030

SEQ ID NO: 30101 - protein, 15 aa, synthetic construct
  source 1..15: note = Description of Artificial Sequence: Synthetic peptide; note = XENP021030 vlCDR1
KASQSVDYDGDSYMN

SEQ ID NO: 30102 - protein, 7 aa, synthetic construct
  source 1..7: note = Description of Artificial Sequence: Synthetic peptide; note = XENP021030 vlCDR2
AASNLES

SEQ ID NO: 30103 - protein, 9 aa, synthetic construct
  source 1..9: note = Description of Artificial Sequence: Synthetic peptide; note = XENP021030 vlCDR3
QQSNEDPFT

SEQ ID NO: 30104 - protein, 226 aa, synthetic construct
  source 1..226: note = Description of Artificial Sequence: Synthetic polypeptide; note = XENP021031 7G8_H0.96_L0_Fab Heavy Chain
EVKLEESGGGLVQPGGSMKLSCAASGFTFSDAWMDWVRQSPEKGLEWVAEIRTKANNHATFYAESVKGRFTISRDDSKSSVYLQMNSLRAEDTGIYYCTRLANWDWYFDVWGAGTTVTVSSASTKGPSVFPLAPSSKSTSGGTAALGCLVKDYFPEPVTVSWNSGALTSGVHTFPAVLQSSGLYSLSSVVTVPSSSLGTQTYICNVNHKPSNTKVDKKVEPKSCGS

SEQ ID NO: 30105 - protein, 121 aa, synthetic construct; identical to SEQ ID NO: 19166
  source 1..121: note = Description of Artificial Sequence: Synthetic polypeptide; note = VH of XENP021031

SEQ ID NO: 30106 - protein, 5 aa, synthetic construct
  source 1..5: note = Description of Artificial Sequence: Synthetic peptide; note = XENP021031 vhCDR1
DAWMD

SEQ ID NO: 30107 - protein, 19 aa, synthetic construct
  source 1..19: note = Description of Artificial Sequence: Synthetic peptide; note = XENP021031 vhCDR2
EIRTKANNHATFYAESVKG

SEQ ID NO: 30108 - protein, 10 aa, synthetic construct
  source 1..10: note = Description of Artificial Sequence: Synthetic peptide; note = XENP021031 vhCDR3
LANWDWYFDV

SEQ ID NO: 30109 - protein, 218 aa, synthetic construct; identical to SEQ ID NO: 17590
  source 1..218: note = Description of Artificial Sequence: Synthetic polypeptide; note = XENP021031 7G8_H0.96_L0_Fab Light Chain

SEQ ID NO: 30110 - protein, 111 aa, synthetic construct; identical to SEQ ID NO: 17591
  source 1..111: note = Description of Artificial Sequence: Synthetic polypeptide; note = VL of XENP021031

SEQ ID NO: 30111 - protein, 15 aa, synthetic construct
  source 1..15: note = Description of Artificial Sequence: Synthetic peptide; note = XENP021031 vlCDR1
KASQSVDYDGDSYMN

SEQ ID NO: 30112 - protein, 7 aa, synthetic construct
  source 1..7: note = Description of Artificial Sequence: Synthetic peptide; note = XENP021031 vlCDR2
AASNLES

SEQ ID NO: 30113 - protein, 9 aa, synthetic construct
  source 1..9: note = Description of Artificial Sequence: Synthetic peptide; note = XENP021031 vlCDR3
QQSNEDPFT

SEQ ID NO: 30114 - protein, 226 aa, synthetic construct
  source 1..226: note = Description of Artificial Sequence: Synthetic polypeptide; note = XENP021032 7G8_H0.97_L0_Fab Heavy Chain
EVKLEESGGGLVQPGGSMKLSCAASGFTFSDAWMDWVRQSPEKGLEWVAEIRTKANNHATHYAESVKGRFTISRDDSKSSVYLQMNSLRAEDTGIYYCTRLANWDWYFDVWGAGTTVTVSSASTKGPSVFPLAPSSKSTSGGTAALGCLVKDYFPEPVTVSWNSGALTSGVHTFPAVLQSSGLYSLSSVVTVPSSSLGTQTYICNVNHKPSNTKVDKKVEPKSCGS

SEQ ID NO: 30115 - protein, 121 aa, synthetic construct; identical to SEQ ID NO: 19176
  source 1..121: note = Description of Artificial Sequence: Synthetic polypeptide; note = VH of XENP021032

SEQ ID NO: 30116 - protein, 5 aa, synthetic construct
  source 1..5: note = Description of Artificial Sequence: Synthetic peptide; note = XENP021032 vhCDR1
DAWMD

SEQ ID NO: 30117 - protein, 19 aa, synthetic construct
  source 1..19: note = Description of Artificial Sequence: Synthetic peptide; note = XENP021032 vhCDR2
EIRTKANNHATHYAESVKG

SEQ ID NO: 30118 - protein, 10 aa, synthetic construct
  source 1..10: note = Description of Artificial Sequence: Synthetic peptide; note = XENP021032 vhCDR3
LANWDWYFDV

SEQ ID NO: 30119 - protein, 218 aa, synthetic construct; identical to SEQ ID NO: 17590
  source 1..218: note = Description of Artificial Sequence: Synthetic polypeptide; note = XENP021032 7G8_H0.97_L0_Fab Light Chain

SEQ ID NO: 30120 - protein, 111 aa, synthetic construct; identical to SEQ ID NO: 17591
  source 1..111: note = Description of Artificial Sequence: Synthetic polypeptide; note = VL of XENP021032

SEQ ID NO: 30121 - protein, 15 aa, synthetic construct
  source 1..15: note = Description of Artificial Sequence: Synthetic peptide; note = XENP021032 vlCDR1
KASQSVDYDGDSYMN

SEQ ID NO: 30122 - protein, 7 aa, synthetic construct
  source 1..7: note = Description of Artificial Sequence: Synthetic peptide; note = XENP021032 vlCDR2
AASNLES

SEQ ID NO: 30123 - protein, 9 aa, synthetic construct
  source 1..9: note = Description of Artificial Sequence: Synthetic peptide; note = XENP021032 vlCDR3
QQSNEDPFT

SEQ ID NO: 30124 - protein, 226 aa, synthetic construct
  source 1..226: note = Description of Artificial Sequence: Synthetic polypeptide; note = XENP021033 7G8_H0.98_L0_Fab Heavy Chain
EVKLEESGGGLVQPGGSMKLSCAASGFTFSDAWMDWVRQSPEKGLEWVAEIRTKANNHATLYAESVKGRFTISRDDSKSSVYLQMNSLRAEDTGIYYCTRLANWDWYFDVWGAGTTVTVSSASTKGPSVFPLAPSSKSTSGGTAALGCLVKDYFPEPVTVSWNSGALTSGVHTFPAVLQSSGLYSLSSVVTVPSSSLGTQTYICNVNHKPSNTKVDKKVEPKSCGS

SEQ ID NO: 30125 - protein, 121 aa, synthetic construct; identical to SEQ ID NO: 19186
  source 1..121: note = Description of Artificial Sequence: Synthetic polypeptide; note = VH of XENP021033

SEQ ID NO: 30126 - protein, 5 aa, synthetic construct
  source 1..5: note = Description of Artificial Sequence: Synthetic peptide; note = XENP021033 vhCDR1
DAWMD

SEQ ID NO: 30127 - protein, 19 aa, synthetic construct
  source 1..19: note = Description of Artificial Sequence: Synthetic peptide; note = XENP021033 vhCDR2
EIRTKANNHATLYAESVKG

SEQ ID NO: 30128 - protein, 10 aa, synthetic construct
  source 1..10: note = Description of Artificial Sequence: Synthetic peptide; note = XENP021033 vhCDR3
LANWDWYFDV

SEQ ID NO: 30129 - protein, 218 aa, synthetic construct; identical to SEQ ID NO: 17590
  source 1..218: note = Description of Artificial Sequence: Synthetic polypeptide; note = XENP021033 7G8_H0.98_L0_Fab Light Chain

SEQ ID NO: 30130 - protein, 111 aa, synthetic construct; identical to SEQ ID NO: 17591
  source 1..111: note = Description of Artificial Sequence: Synthetic polypeptide; note = VL of XENP021033

SEQ ID NO: 30131 - protein, 15 aa, synthetic construct
  source 1..15: note = Description of Artificial Sequence: Synthetic peptide; note = XENP021033 vlCDR1
KASQSVDYDGDSYMN

SEQ ID NO: 30132 - protein, 7 aa, synthetic construct
  source 1..7: note = Description of Artificial Sequence: Synthetic peptide; note = XENP021033 vlCDR2
AASNLES

SEQ ID NO: 30133 - protein, 9 aa, synthetic construct
  source 1..9: note = Description of Artificial Sequence: Synthetic peptide; note = XENP021033 vlCDR3
QQSNEDPFT

SEQ ID NO: 30134 - protein, 226 aa, synthetic construct
  source 1..226: note = Description of Artificial Sequence: Synthetic polypeptide; note = XENP021034 7G8_H0.99_L0_Fab Heavy Chain
EVKLEESGGGLVQPGGSMKLSCAASGFTFSDAWMDWVRQSPEKGLEWVAEIRTKANNHATWYAESVKGRFTISRDDSKSSVYLQMNSLRAEDTGIYYCTRLANWDWYFDVWGAGTTVTVSSASTKGPSVFPLAPSSKSTSGGTAALGCLVKDYFPEPVTVSWNSGALTSGVHTFPAVLQSSGLYSLSSVVTVPSSSLGTQTYICNVNHKPSNTKVDKKVEPKSCGS

SEQ ID NO: 30135 - protein, 121 aa, synthetic construct; identical to SEQ ID NO: 19196
  source 1..121: note = Description of Artificial Sequence: Synthetic polypeptide; note = VH of XENP021034

SEQ ID NO: 30136 - protein, 5 aa, synthetic construct
  source 1..5: note = Description of Artificial Sequence: Synthetic peptide; note = XENP021034 vhCDR1
DAWMD

SEQ ID NO: 30137 - protein, 19 aa, synthetic construct
  source 1..19: note = Description of Artificial Sequence: Synthetic peptide; note = XENP021034 vhCDR2
EIRTKANNHATWYAESVKG

SEQ ID NO: 30138 - protein, 10 aa, synthetic construct
  source 1..10: note = Description of Artificial Sequence: Synthetic peptide; note = XENP021034 vhCDR3
LANWDWYFDV

SEQ ID NO: 30139 - protein, 218 aa, synthetic construct; identical to SEQ ID NO: 17590
  source 1..218: note = Description of Artificial Sequence: Synthetic polypeptide; note = XENP021034 7G8_H0.99_L0_Fab Light Chain

SEQ ID NO: 30140 - protein, 111 aa, synthetic construct; identical to SEQ ID NO: 17591
  source 1..111: note = Description of Artificial Sequence: Synthetic polypeptide; note = VL of XENP021034

SEQ ID NO: 30141 - protein, 15 aa, synthetic construct
  source 1..15: note = Description of Artificial Sequence: Synthetic peptide; note = XENP021034 vlCDR1
KASQSVDYDGDSYMN

SEQ ID NO: 30142 - protein, 7 aa, synthetic construct
  source 1..7: note = Description of Artificial Sequence: Synthetic peptide; note = XENP021034 vlCDR2
AASNLES

SEQ ID NO: 30143 - protein, 9 aa, synthetic construct
  source 1..9: note = Description of Artificial Sequence: Synthetic peptide; note = XENP021034 vlCDR3
QQSNEDPFT

SEQ ID NO: 30144 - protein, 226 aa, synthetic construct
  source 1..226: note = Description of Artificial Sequence: Synthetic polypeptide; note = XENP021035 7G8_H0.100_L0_Fab Heavy Chain
EVKLEESGGGLVQPGGSMKLSCAASGFTFSDAWMDWVRQSPEKGLEWVAEIRTKANNHATVYAESVKGRFTISRDDSKSSVYLQMNSLRAEDTGIYYCTRLANWDWYFDVWGAGTTVTVSSASTKGPSVFPLAPSSKSTSGGTAALGCLVKDYFPEPVTVSWNSGALTSGVHTFPAVLQSSGLYSLSSVVTVPSSSLGTQTYICNVNHKPSNTKVDKKVEPKSCGS

SEQ ID NO: 30145 - protein, 121 aa, synthetic construct; identical to SEQ ID NO: 19206
  source 1..121: note = Description of Artificial Sequence: Synthetic polypeptide; note = VH of XENP021035

SEQ ID NO: 30146 - protein, 5 aa, synthetic construct
  source 1..5: note = Description of Artificial Sequence: Synthetic peptide; note = XENP021035 vhCDR1
DAWMD

SEQ ID NO: 30147 - protein, 19 aa, synthetic construct
  source 1..19: note = Description of Artificial Sequence: Synthetic peptide; note = XENP021035 vhCDR2
EIRTKANNHATVYAESVKG

SEQ ID NO: 30148 - protein, 10 aa, synthetic construct
  source 1..10: note = Description of Artificial Sequence: Synthetic peptide; note = XENP021035 vhCDR3
LANWDWYFDV

SEQ ID NO: 30149 - protein, 218 aa, synthetic construct; identical to SEQ ID NO: 17590
  source 1..218: note = Description of Artificial Sequence: Synthetic polypeptide; note = XENP021035 7G8_H0.100_L0_Fab Light Chain

SEQ ID NO: 30150 - protein, 111 aa, synthetic construct; identical to SEQ ID NO: 17591
  source 1..111: note = Description of Artificial Sequence: Synthetic polypeptide; note = VL of XENP021035

SEQ ID NO: 30151 - protein, 15 aa, synthetic construct
  source 1..15: note = Description of Artificial Sequence: Synthetic peptide; note = XENP021035 vlCDR1
KASQSVDYDGDSYMN

SEQ ID NO: 30152 - protein, 7 aa, synthetic construct
  source 1..7: note = Description of Artificial Sequence: Synthetic peptide; note = XENP021035 vlCDR2
AASNLES

SEQ ID NO: 30153 - protein, 9 aa, synthetic construct
  source 1..9: note = Description of Artificial Sequence: Synthetic peptide; note = XENP021035 vlCDR3
QQSNEDPFT

SEQ ID NO: 30154 - protein, 226 aa, synthetic construct
  source 1..226: note = Description of Artificial Sequence: Synthetic polypeptide; note = XENP021036 7G8_H0.101_L0_Fab Heavy Chain
EVKLEESGGGLVQPGGSMKLSCAASGFTFSDAWMDWVRQSPEKGLEWVAEIRTKANNHATAYAESVKGRFTISRDDSKSSVYLQMNSLRAEDTGIYYCTRLANWDWYFDVWGAGTTVTVSSASTKGPSVFPLAPSSKSTSGGTAALGCLVKDYFPEPVTVSWNSGALTSGVHTFPAVLQSSGLYSLSSVVTVPSSSLGTQTYICNVNHKPSNTKVDKKVEPKSCGS

SEQ ID NO: 30155 - protein, 121 aa, synthetic construct; identical to SEQ ID NO: 19216
  source 1..121: note = Description of Artificial Sequence: Synthetic polypeptide; note = VH of XENP021036

SEQ ID NO: 30156 - protein, 5 aa, synthetic construct
  source 1..5: note = Description of Artificial Sequence: Synthetic peptide; note = XENP021036 vhCDR1
DAWMD

SEQ ID NO: 30157 - protein, 19 aa, synthetic construct
  source 1..19: note = Description of Artificial Sequence: Synthetic peptide; note = XENP021036 vhCDR2
EIRTKANNHATAYAESVKG

SEQ ID NO: 30158 - protein, 10 aa, synthetic construct
  source 1..10: note = Description of Artificial Sequence: Synthetic peptide; note = XENP021036 vhCDR3
LANWDWYFDV

SEQ ID NO: 30159 - protein, 218 aa, synthetic construct; identical to SEQ ID NO: 17590
  source 1..218: note = Description of Artificial Sequence: Synthetic polypeptide; note = XENP021036 7G8_H0.101_L0_Fab Light Chain

SEQ ID NO: 30160 - protein, 111 aa, synthetic construct; identical to SEQ ID NO: 17591
  source 1..111: note = Description of Artificial Sequence: Synthetic polypeptide; note = VL of XENP021036

SEQ ID NO: 30161 - protein, 15 aa, synthetic construct
  source 1..15: note = Description of Artificial Sequence: Synthetic peptide; note = XENP021036 vlCDR1
KASQSVDYDGDSYMN

SEQ ID NO: 30162 - protein, 7 aa, synthetic construct
  source 1..7: note = Description of Artificial Sequence: Synthetic peptide; note = XENP021036 vlCDR2
AASNLES

SEQ ID NO: 30163 - protein, 9 aa, synthetic construct
  source 1..9: note = Description of Artificial Sequence: Synthetic peptide; note = XENP021036 vlCDR3
QQSNEDPFT

SEQ ID NO: 30164 - protein, 226 aa, synthetic construct
  source 1..226: note = Description of Artificial Sequence: Synthetic polypeptide; note = XENP021037 7G8_H0.102_L0_Fab Heavy Chain
EVKLEESGGGLVQPGGSMKLSCAASGFTFSDAWMDWVRQSPEKGLEWVAEIRTKANNHATQYAESVKGRFTISRDDSKSSVYLQMNSLRAEDTGIYYCTRLANWDWYFDVWGAGTTVTVSSASTKGPSVFPLAPSSKSTSGGTAALGCLVKDYFPEPVTVSWNSGALTSGVHTFPAVLQSSGLYSLSSVVTVPSSSLGTQTYICNVNHKPSNTKVDKKVEPKSCGS

SEQ ID NO: 30165 - protein, 121 aa, synthetic construct; identical to SEQ ID NO: 19226
  source 1..121: note = Description of Artificial Sequence: Synthetic polypeptide; note = VH of XENP021037

SEQ ID NO: 30166 - protein, 5 aa, synthetic construct
  source 1..5: note = Description of Artificial Sequence: Synthetic peptide; note = XENP021037 vhCDR1
DAWMD

SEQ ID NO: 30167 - protein, 19 aa, synthetic construct
  source 1..19: note = Description of Artificial Sequence: Synthetic peptide; note = XENP021037 vhCDR2
EIRTKANNHATQYAESVKG

SEQ ID NO: 30168 - protein, 10 aa, synthetic construct
  source 1..10: note = Description of Artificial Sequence: Synthetic peptide; note = XENP021037 vhCDR3
LANWDWYFDV

SEQ ID NO: 30169 - protein, 218 aa, synthetic construct; identical to SEQ ID NO: 17590
  source 1..218: note = Description of Artificial Sequence: Synthetic polypeptide; note = XENP021037 7G8_H0.102_L0_Fab Light Chain

SEQ ID NO: 30170 - protein, 111 aa, synthetic construct; identical to SEQ ID NO: 17591
  source 1..111: note = Description of Artificial Sequence: Synthetic polypeptide; note = VL of XENP021037

SEQ ID NO: 30171 - protein, 15 aa, synthetic construct
  source 1..15: note = Description of Artificial Sequence: Synthetic peptide; note = XENP021037 vlCDR1
KASQSVDYDGDSYMN

SEQ ID NO: 30172 - protein, 7 aa, synthetic construct
  source 1..7: note = Description of Artificial Sequence: Synthetic peptide; note = XENP021037 vlCDR2
AASNLES

SEQ ID NO: 30173 - protein, 9 aa, synthetic construct
  source 1..9: note = Description of Artificial Sequence: Synthetic peptide; note = XENP021037 vlCDR3
QQSNEDPFT

SEQ ID NO: 30174 - protein, 226 aa, synthetic construct
  source 1..226: note = Description of Artificial Sequence: Synthetic polypeptide; note = XENP021038 7G8_H0.103_L0_Fab Heavy Chain
EVKLEESGGGLVQPGGSMKLSCAASGFTFSDAWMDWVRQSPEKGLEWVAEIRTKANNHATDYAESVKGRFTISRDDSKSSVYLQMNSLRAEDTGIYYCTRLANWDWYFDVWGAGTTVTVSSASTKGPSVFPLAPSSKSTSGGTAALGCLVKDYFPEPVTVSWNSGALTSGVHTFPAVLQSSGLYSLSSVVTVPSSSLGTQTYICNVNHKPSNTKVDKKVEPKSCGS

SEQ ID NO: 30175 - protein, 121 aa, synthetic construct; identical to SEQ ID NO: 19236
  source 1..121: note = Description of Artificial Sequence: Synthetic polypeptide; note = VH of XENP021038

SEQ ID NO: 30176 - protein, 5 aa, synthetic construct
  source 1..5: note = Description of Artificial Sequence: Synthetic peptide; note = XENP021038 vhCDR1
DAWMD

SEQ ID NO: 30177 - protein, 19 aa, synthetic construct
  source 1..19: note = Description of Artificial Sequence: Synthetic peptide; note = XENP021038 vhCDR2
EIRTKANNHATDYAESVKG

SEQ ID NO: 30178 - protein, 10 aa, synthetic construct
  source 1..10: note = Description of Artificial Sequence: Synthetic peptide; note = XENP021038 vhCDR3
LANWDWYFDV

SEQ ID NO: 30179 - protein, 218 aa, synthetic construct; identical to SEQ ID NO: 17590
  source 1..218: note = Description of Artificial Sequence: Synthetic polypeptide; note = XENP021038 7G8_H0.103_L0_Fab Light Chain

SEQ ID NO: 30180 - protein, 111 aa, synthetic construct; identical to SEQ ID NO: 17591
  source 1..111: note = Description of Artificial Sequence: Synthetic polypeptide; note = VL of XENP021038

SEQ ID NO: 30181 - protein, 15 aa, synthetic construct
  source 1..15: note = Description of Artificial Sequence: Synthetic peptide; note = XENP021038 vlCDR1
KASQSVDYDGDSYMN

SEQ ID NO: 30182 - protein, 7 aa, synthetic construct
  source 1..7: note = Description of Artificial Sequence: Synthetic peptide; note = XENP021038 vlCDR2
AASNLES

SEQ ID NO: 30183 - protein, 9 aa, synthetic construct
  source 1..9: note = Description of Artificial Sequence: Synthetic peptide; note = XENP021038 vlCDR3
QQSNEDPFT

SEQ ID NO: 30184 - protein, 226 aa, synthetic construct
  source 1..226: note = Description of Artificial Sequence: Synthetic polypeptide; note = XENP021039 7G8_H0.104_L0_Fab Heavy Chain
EVKLEESGGGLVQPGGSMKLSCAASGFTFSDAWMDWVRQSPEKGLEWVAEIRTKANNHATKYAESVKGRFTISRDDSKSSVYLQMNSLRAEDTGIYYCTRLANWDWYFDVWGAGTTVTVSSASTKGPSVFPLAPSSKSTSGGTAALGCLVKDYFPEPVTVSWNSGALTSGVHTFPAVLQSSGLYSLSSVVTVPSSSLGTQTYICNVNHKPSNTKVDKKVEPKSCGS

SEQ ID NO: 30185 - protein, 121 aa, synthetic construct; identical to SEQ ID NO: 19246
  source 1..121: note = Description of Artificial Sequence: Synthetic polypeptide; note = VH of XENP021039

SEQ ID NO: 30186 - protein, 5 aa, synthetic construct
  source 1..5: note = Description of Artificial Sequence: Synthetic peptide; note = XENP021039 vhCDR1
DAWMD

SEQ ID NO: 30187 - protein, 19 aa, synthetic construct
  source 1..19: note = Description of Artificial Sequence: Synthetic peptide; note = XENP021039 vhCDR2
EIRTKANNHATKYAESVKG

SEQ ID NO: 30188 - protein, 10 aa, synthetic construct
  source 1..10: note = Description of Artificial Sequence: Synthetic peptide; note = XENP021039 vhCDR3
LANWDWYFDV

SEQ ID NO: 30189 - protein, 218 aa, synthetic construct; identical to SEQ ID NO: 17590
  source 1..218: note = Description of Artificial Sequence: Synthetic polypeptide; note = XENP021039 7G8_H0.104_L0_Fab Light Chain

SEQ ID NO: 30190 - protein, 111 aa, synthetic construct; identical to SEQ ID NO: 17591
  source 1..111: note = Description of Artificial Sequence: Synthetic polypeptide; note = VL of XENP021039

SEQ ID NO: 30191 - protein, 15 aa, synthetic construct
  source 1..15: note = Description of Artificial Sequence: Synthetic peptide; note = XENP021039 vlCDR1
KASQSVDYDGDSYMN

SEQ ID NO: 30192 - protein, 7 aa, synthetic construct
  source 1..7: note = Description of Artificial Sequence: Synthetic peptide; note = XENP021039 vlCDR2
AASNLES

SEQ ID NO: 30193 - protein, 9 aa, synthetic construct
  source 1..9: note = Description of Artificial Sequence: Synthetic peptide; note = XENP021039 vlCDR3
QQSNEDPFT

SEQ ID NO: 30194 - protein, 226 aa, synthetic construct
  source 1..226: note = Description of Artificial Sequence: Synthetic polypeptide; note = XENP021040 7G8_H0.105_L0_Fab Heavy Chain
EVKLEESGGGLVQPGGSMKLSCAASGFTFSDAWMDWVRQSPEKGLEWVAEIRTKANNHATYYAESVKGRFTISRDDSKSSVYLQMNSLRAEDTGIYYCTRIANWDWYFDVWGAGTTVTVSSASTKGPSVFPLAPSSKSTSGGTAALGCLVKDYFPEPVTVSWNSGALTSGVHTFPAVLQSSGLYSLSSVVTVPSSSLGTQTYICNVNHKPSNTKVDKKVEPKSCGS

SEQ ID NO: 30195 - protein, 121 aa, synthetic construct; identical to SEQ ID NO: 19256
  source 1..121: note = Description of Artificial Sequence: Synthetic polypeptide; note = VH of XENP021040

SEQ ID NO: 30196 - protein, 5 aa, synthetic construct
  source 1..5: note = Description of Artificial Sequence: Synthetic peptide; note = XENP021040 vhCDR1
DAWMD

SEQ ID NO: 30197 - protein, 19 aa, synthetic construct
  source 1..19: note = Description of Artificial Sequence: Synthetic peptide; note = XENP021040 vhCDR2
EIRTKANNHATYYAESVKG

SEQ ID NO: 30198 - protein, 10 aa, synthetic construct
  source 1..10: note = Description of Artificial Sequence: Synthetic peptide; note = XENP021040 vhCDR3
IANWDWYFDV

SEQ ID NO: 30199 - protein, 218 aa, synthetic construct; identical to SEQ ID NO: 17590
  source 1..218: note = Description of Artificial Sequence: Synthetic polypeptide; note = XENP021040 7G8_H0.105_L0_Fab Light Chain

SEQ ID NO: 30200 - protein, 111 aa, synthetic construct; identical to SEQ ID NO: 17591
  source 1..111: note = Description of Artificial Sequence: Synthetic polypeptide; note = VL of XENP021040

SEQ ID NO: 30201 - protein, 15 aa, synthetic construct
  source 1..15: note = Description of Artificial Sequence: Synthetic peptide; note = XENP021040 vlCDR1
KASQSVDYDGDSYMN

SEQ ID NO: 30202 - protein, 7 aa, synthetic construct
  source 1..7: note = Description of Artificial Sequence: Synthetic peptide; note = XENP021040 vlCDR2
AASNLES

SEQ ID NO: 30203 - protein, 9 aa, synthetic construct
  source 1..9: note = Description of Artificial Sequence: Synthetic peptide; note = XENP021040 vlCDR3
QQSNEDPFT

SEQ ID NO: 30204 - protein, 226 aa, synthetic construct
  source 1..226: note = Description of Artificial Sequence: Synthetic polypeptide; note = XENP021041 7G8_H0.106_L0_Fab Heavy Chain
EVKLEESGGGLVQPGGSMKLSCAASGFTFSDAWMDWVRQSPEKGLEWVAEIRTKANNHATYYAESVKGRFTISRDDSKSSVYLQMNSLRAEDTGIYYCTRFANWDWYFDVWGAGTTVTVSSASTKGPSVFPLAPSSKSTSGGTAALGCLVKDYFPEPVTVSWNSGALTSGVHTFPAVLQSSGLYSLSSVVTVPSSSLGTQTYICNVNHKPSNTKVDKKVEPKSCGS

SEQ ID NO: 30205 - protein, 121 aa, synthetic construct; identical to SEQ ID NO: 19266
  source 1..121: note = Description of Artificial Sequence: Synthetic polypeptide; note = VH of XENP021041

SEQ ID NO: 30206 - protein, 5 aa, synthetic construct
  source 1..5: note = Description of Artificial Sequence: Synthetic peptide; note = XENP021041 vhCDR1
DAWMD

SEQ ID NO: 30207 - protein, 19 aa, synthetic construct
  source 1..19: note = Description of Artificial Sequence: Synthetic peptide; note = XENP021041 vhCDR2
EIRTKANNHATYYAESVKG

SEQ ID NO: 30208 - protein, 10 aa, synthetic construct
  source 1..10: note = Description of Artificial Sequence: Synthetic peptide; note = XENP021041 vhCDR3
FANWDWYFDV

SEQ ID NO: 30209 - protein, 218 aa, synthetic construct; identical to SEQ ID NO: 17590
  source 1..218: note = Description of Artificial Sequence: Synthetic polypeptide; note = XENP021041 7G8_H0.106_L0_Fab Light Chain

SEQ ID NO: 30210 - protein, 111 aa, synthetic construct; identical to SEQ ID NO: 17591
  source 1..111: note = Description of Artificial Sequence: Synthetic polypeptide; note = VL of XENP021041

SEQ ID NO: 30211 - protein, 15 aa, synthetic construct
  source 1..15: note = Description of Artificial Sequence: Synthetic peptide; note = XENP021041 vlCDR1
KASQSVDYDGDSYMN

SEQ ID NO: 30212 - protein, 7 aa, synthetic construct
  source 1..7: note = Description of Artificial Sequence: Synthetic peptide; note = XENP021041 vlCDR2
AASNLES

SEQ ID NO: 30213 - protein, 9 aa, synthetic construct
  source 1..9: note = Description of Artificial Sequence: Synthetic peptide; note = XENP021041 vlCDR3
QQSNEDPFT

SEQ ID NO: 30214 - protein, 226 aa, synthetic construct
  source 1..226: note = Description of Artificial Sequence: Synthetic polypeptide; note = XENP021042 7G8_H0.107_L0_Fab Heavy Chain
EVKLEESGGGLVQPGGSMKLSCAASGFTFSDAWMDWVRQSPEKGLEWVAEIRTKANNHATYYAESVKGRFTISRDDSKSSVYLQMNSLRAEDTGIYYCTRVANWDWYFDVWGAGTTVTVSSASTKGPSVFPLAPSSKSTSGGTAALGCLVKDYFPEPVTVSWNSGALTSGVHTFPAVLQSSGLYSLSSVVTVPSSSLGTQTYICNVNHKPSNTKVDKKVEPKSCGS

SEQ ID NO: 30215 - protein, 121 aa, synthetic construct; identical to SEQ ID NO: 19276
  source 1..121: note = Description of Artificial Sequence: Synthetic polypeptide; note = VH of XENP021042

SEQ ID NO: 30216 - protein, 5 aa, synthetic construct
  source 1..5: note = Description of Artificial Sequence: Synthetic peptide; note = XENP021042 vhCDR1
DAWMD

SEQ ID NO: 30217 - protein, 19 aa, synthetic construct
  source 1..19: note = Description of Artificial Sequence: Synthetic peptide; note = XENP021042 vhCDR2
EIRTKANNHATYYAESVKG

SEQ ID NO: 30218 - protein, 10 aa, synthetic construct
  source 1..10: note = Description of Artificial Sequence: Synthetic peptide; note = XENP021042 vhCDR3
VANWDWYFDV

SEQ ID NO: 30219 - protein, 218 aa, synthetic construct; identical to SEQ ID NO: 17590
  source 1..218: note = Description of Artificial Sequence: Synthetic polypeptide; note = XENP021042 7G8_H0.107_L0_Fab Light Chain

SEQ ID NO: 30220 - protein, 111 aa, synthetic construct; identical to SEQ ID NO: 17591
  source 1..111: note = Description of Artificial Sequence: Synthetic polypeptide; note = VL of XENP021042

SEQ ID NO: 30221 - protein, 15 aa, synthetic construct
  source 1..15: note = Description of Artificial Sequence: Synthetic peptide; note = XENP021042 vlCDR1
KASQSVDYDGDSYMN

SEQ ID NO: 30222 - protein, 7 aa, synthetic construct
  source 1..7: note = Description of Artificial Sequence: Synthetic peptide; note = XENP021042 vlCDR2
AASNLES

SEQ ID NO: 30223 - protein, 9 aa, synthetic construct
  source 1..9: note = Description of Artificial Sequence: Synthetic peptide; note = XENP021042 vlCDR3
QQSNEDPFT

SEQ ID NO: 30224 - protein, 226 aa, synthetic construct
  source 1..226: note = Description of Artificial Sequence: Synthetic polypeptide; note = XENP021043 7G8_H0.110_L0_Fab Heavy Chain
EVKLEESGGGLVQPGGSMKLSCAASGFTFSDAWMDWVRQSPEKGLEWVAEIRTKANNHATYYAESVKGRFTISRDDSKSSVYLQMNSLRAEDTGIYYCTRDANWDWYFDVWGAGTTVTVSSASTKGPSVFPLAPSSKSTSGGTAALGCLVKDYFPEPVTVSWNSGALTSGVHTFPAVLQSSGLYSLSSVVTVPSSSLGTQTYICNVNHKPSNTKVDKKVEPKSCGS

SEQ ID NO: 30225 - protein, 121 aa, synthetic construct; identical to SEQ ID NO: 19306
  source 1..121: note = Description of Artificial Sequence: Synthetic polypeptide; note = VH of XENP021043

SEQ ID NO: 30226 - protein, 5 aa, synthetic construct
  source 1..5: note = Description of Artificial Sequence: Synthetic peptide; note = XENP021043 vhCDR1
DAWMD

SEQ ID NO: 30227 - protein, 19 aa, synthetic construct
  source 1..19: note = Description of Artificial Sequence: Synthetic peptide; note = XENP021043 vhCDR2
EIRTKANNHATYYAESVKG

SEQ ID NO: 30228 - protein, 10 aa, synthetic construct
  source 1..10: note = Description of Artificial Sequence: Synthetic peptide; note = XENP021043 vhCDR3
DANWDWYFDV

SEQ ID NO: 30229 - protein, 218 aa, synthetic construct; identical to SEQ ID NO: 17590
  source 1..218: note = Description of Artificial Sequence: Synthetic polypeptide; note = XENP021043 7G8_H0.110_L0_Fab Light Chain

SEQ ID NO: 30230 - protein, 111 aa, synthetic construct; identical to SEQ ID NO: 17591
  source 1..111: note = Description of Artificial Sequence: Synthetic polypeptide; note = VL of XENP021043

SEQ ID NO: 30231 - protein, 15 aa, synthetic construct
  source 1..15: note = Description of Artificial Sequence: Synthetic peptide; note = XENP021043 vlCDR1
KASQSVDYDGDSYMN

SEQ ID NO: 30232 - protein, 7 aa, synthetic construct
  source 1..7: note = Description of Artificial Sequence: Synthetic peptide; note = XENP021043 vlCDR2
AASNLES

SEQ ID NO: 30233 - protein, 9 aa, synthetic construct
  source 1..9: note = Description of Artificial Sequence: Synthetic peptide; note = XENP021043 vlCDR3
QQSNEDPFT

SEQ ID NO: 30234 - protein, 226 aa, synthetic construct
  source 1..226: note = Description of Artificial Sequence: Synthetic polypeptide; note = XENP021044 7G8_H0.111_L0_Fab Heavy Chain
EVKLEESGGGLVQPGGSMKLSCAASGFTFSDAWMDWVRQSPEKGLEWVAEIRTKANNHATYYAESVKGRFTISRDDSKSSVYLQMNSLRAEDTGIYYCTRAANWDWYFDVWGAGTTVTVSSASTKGPSVFPLAPSSKSTSGGTAALGCLVKDYFPEPVTVSWNSGALTSGVHTFPAVLQSSGLYSLSSVVTVPSSSLGTQTYICNVNHKPSNTKVDKKVEPKSCGS

SEQ ID NO: 30235 - protein, 121 aa, synthetic construct; identical to SEQ ID NO: 19316
  source 1..121: note = Description of Artificial Sequence: Synthetic polypeptide; note = VH of XENP021044

SEQ ID NO: 30236 - protein, 5 aa, synthetic construct
  source 1..5: note = Description of Artificial Sequence: Synthetic peptide; note = XENP021044 vhCDR1
DAWMD

SEQ ID NO: 30237 - protein, 19 aa, synthetic construct
  source 1..19: note = Description of Artificial Sequence: Synthetic peptide; note = XENP021044 vhCDR2
EIRTKANNHATYYAESVKG

SEQ ID NO: 30238 - protein, 10 aa, synthetic construct
  source 1..10: note = Description of Artificial Sequence: Synthetic peptide; note = XENP021044 vhCDR3
AANWDWYFDV

SEQ ID NO: 30239 - protein, 218 aa, synthetic construct; identical to SEQ ID NO: 17590
  source 1..218: note = Description of Artificial Sequence: Synthetic polypeptide; note = XENP021044 7G8_H0.111_L0_Fab Light Chain

SEQ ID NO: 30240 - protein, 111 aa, synthetic construct; identical to SEQ ID NO: 17591
  source 1..111: note = Description of Artificial Sequence: Synthetic polypeptide; note = VL of XENP021044

SEQ ID NO: 30241 - protein, 15 aa, synthetic construct
  source 1..15: note = Description of Artificial Sequence: Synthetic peptide; note = XENP021044 vlCDR1
KASQSVDYDGDSYMN

SEQ ID NO: 30242 - protein, 7 aa, synthetic construct
  source 1..7: note = Description of Artificial Sequence: Synthetic peptide; note = XENP021044 vlCDR2
AASNLES

SEQ ID NO: 30243 - protein, 9 aa, synthetic construct
  source 1..9: note = Description of Artificial Sequence: Synthetic peptide; note = XENP021044 vlCDR3
QQSNEDPFT

SEQ ID NO: 30244 - protein, 226 aa, synthetic construct
  source 1..226: note = Description of Artificial Sequence: Synthetic polypeptide; note = XENP021045 7G8_H0.112_L0_Fab Heavy Chain
EVKLEESGGGLVQPGGSMKLSCAASGFTFSDAWMDWVRQSPEKGLEWVAEIRTKANNHATYYAESVKGRFTISRDDSKSSVYLQMNSLRAEDTGIYYCTRQANWDWYFDVWGAGTTVTVSSASTKGPSVFPLAPSSKSTSGGTAALGCLVKDYFPEPVTVSWNSGALTSGVHTFPAVLQSSGLYSLSSVVTVPSSSLGTQTYICNVNHKPSNTKVDKKVEPKSCGS

SEQ ID NO: 30245 - protein, 121 aa, synthetic construct; identical to SEQ ID NO: 19326
  source 1..121: note = Description of Artificial Sequence: Synthetic polypeptide; note = VH of XENP021045

SEQ ID NO: 30246 - protein, 5 aa, synthetic construct
  source 1..5: note = Description of Artificial Sequence: Synthetic peptide; note = XENP021045 vhCDR1
DAWMD

SEQ ID NO: 30247 - protein, 19 aa, synthetic construct
  source 1..19: note = Description of Artificial Sequence: Synthetic peptide; note = XENP021045 vhCDR2
EIRTKANNHATYYAESVKG

SEQ ID NO: 30248 - protein, 10 aa, synthetic construct
  source 1..10: note = Description of Artificial Sequence: Synthetic peptide; note = XENP021045 vhCDR3
QANWDWYFDV

SEQ ID NO: 30249 - protein, 218 aa, synthetic construct; identical to SEQ ID NO: 17590
  source 1..218: note = Description of Artificial Sequence: Synthetic polypeptide; note = XENP021045 7G8_H0.112_L0_Fab Light Chain

SEQ ID NO: 30250 - protein, 111 aa, synthetic construct; identical to SEQ ID NO: 17591
  source 1..111: note = Description of Artificial Sequence: Synthetic polypeptide; note = VL of XENP021045

SEQ ID NO: 30251 - protein, 15 aa, synthetic construct
  source 1..15: note = Description of Artificial Sequence: Synthetic peptide; note = XENP021045 vlCDR1
KASQSVDYDGDSYMN

SEQ ID NO: 30252 - protein, 7 aa, synthetic construct
  source 1..7: note = Description of Artificial Sequence: Synthetic peptide; note = XENP021045 vlCDR2
AASNLES

SEQ ID NO: 30253 - protein, 9 aa, synthetic construct
  source 1..9: note = Description of Artificial Sequence: Synthetic peptide; note = XENP021045 vlCDR3
QQSNEDPFT

SEQ ID NO: 30254 - protein, 226 aa, synthetic construct
  source 1..226: note = Description of Artificial Sequence: Synthetic polypeptide; note = XENP021046 7G8_H0.114_L0_Fab Heavy Chain
EVKLEESGGGLVQPGGSMKLSCAASGFTFSDAWMDWVRQSPEKGLEWVAEIRTKANNHATYYAESVKGRFTISRDDSKSSVYLQMNSLRAEDTGIYYCTRLSNWDWYFDVWGAGTTVTVSSASTKGPSVFPLAPSSKSTSGGTAALGCLVKDYFPEPVTVSWNSGALTSGVHTFPAVLQSSGLYSLSSVVTVPSSSLGTQTYICNVNHKPSNTKVDKKVEPKSCGS

SEQ ID NO: 30255 - protein, 121 aa, synthetic construct; identical to SEQ ID NO: 19346
  source 1..121: note = Description of Artificial Sequence: Synthetic polypeptide; note = VH of XENP021046

SEQ ID NO: 30256 - protein, 5 aa, synthetic construct
  source 1..5: note = Description of Artificial Sequence: Synthetic peptide; note = XENP021046 vhCDR1
DAWMD

SEQ ID NO: 30257 - protein, 19 aa, synthetic construct
  source 1..19: note = Description of Artificial Sequence: Synthetic peptide; note = XENP021046 vhCDR2
EIRTKANNHATYYAESVKG

SEQ ID NO: 30258 - protein, 10 aa, synthetic construct
  source 1..10: note = Description of Artificial Sequence: Synthetic peptide; note = XENP021046 vhCDR3
LSNWDWYFDV

SEQ ID NO: 30259 - protein, 218 aa, synthetic construct; identical to SEQ ID NO: 17590
  source 1..218: note = Description of Artificial Sequence: Synthetic polypeptide; note = XENP021046 7G8_H0.114_L0_Fab Light Chain

SEQ ID NO: 30260 - protein, 111 aa, synthetic construct; identical to SEQ ID NO: 17591
  source 1..111: note = Description of Artificial Sequence: Synthetic polypeptide; note = VL of XENP021046

SEQ ID NO: 30261 - protein, 15 aa, synthetic construct
  source 1..15: note = Description of Artificial Sequence: Synthetic peptide; note = XENP021046 vlCDR1
KASQSVDYDGDSYMN

SEQ ID NO: 30262 - protein, 7 aa, synthetic construct
  source 1..7: note = Description of Artificial Sequence: Synthetic peptide; note = XENP021046 vlCDR2
AASNLES

SEQ ID NO: 30263 - protein, 9 aa, synthetic construct
  source 1..9: note = Description of Artificial Sequence: Synthetic peptide; note = XENP021046 vlCDR3
QQSNEDPFT

SEQ ID NO: 30264 - protein, 226 aa, synthetic construct
  source 1..226: note = Description of Artificial Sequence: Synthetic polypeptide; note = XENP021047 7G8_H0.115_L0_Fab Heavy Chain
EVKLEESGGGLVQPGGSMKLSCAASGFTFSDAWMDWVRQSPEKGLEWVAEIRTKANNHATYYAESVKGRFTISRDDSKSSVYLQMNSLRAEDTGIYYCTRLTNWDWYFDVWGAGTTVTVSSASTKGPSVFPLAPSSKSTSGGTAALGCLVKDYFPEPVTVSWNSGALTSGVHTFPAVLQSSGLYSLSSVVTVPSSSLGTQTYICNVNHKPSNTKVDKKVEPKSCGS

SEQ ID NO: 30265 - protein, 121 aa, synthetic construct; identical to SEQ ID NO: 19356
  source 1..121: note = Description of Artificial Sequence: Synthetic polypeptide; note = VH of XENP021047

SEQ ID NO: 30266 - protein, 5 aa, synthetic construct
  source 1..5: note = Description of Artificial Sequence: Synthetic peptide; note = XENP021047 vhCDR1
DAWMD

SEQ ID NO: 30267 - protein, 19 aa, synthetic construct
  source 1..19: note = Description of Artificial Sequence: Synthetic peptide; note = XENP021047 vhCDR2
EIRTKANNHATYYAESVKG

SEQ ID NO: 30268 - protein, 10 aa, synthetic construct
  source 1..10: note = Description of Artificial Sequence: Synthetic peptide; note = XENP021047 vhCDR3
LTNWDWYFDV

SEQ ID NO: 30269 - protein, 218 aa, synthetic construct; identical to SEQ ID NO: 17590
  source 1..218: note = Description of Artificial Sequence: Synthetic polypeptide; note = XENP021047 7G8_H0.115_L0_Fab Light Chain

SEQ ID NO: 30270 - protein, 111 aa, synthetic construct; identical to SEQ ID NO: 17591
  source 1..111: note = Description of Artificial Sequence: Synthetic polypeptide; note = VL of XENP021047

SEQ ID NO: 30271 - protein, 15 aa, synthetic construct
  source 1..15: note = Description of Artificial Sequence: Synthetic peptide; note = XENP021047 vlCDR1
KASQSVDYDGDSYMN

SEQ ID NO: 30272 - protein, 7 aa, synthetic construct
  source 1..7: note = Description of Artificial Sequence: Synthetic peptide; note = XENP021047 vlCDR2
AASNLES

SEQ ID NO: 30273 - protein, 9 aa, synthetic construct
  source 1..9: note = Description of Artificial Sequence: Synthetic peptide; note = XENP021047 vlCDR3
QQSNEDPFT

SEQ ID NO: 30274 - protein, 226 aa, synthetic construct
  source 1..226: note = Description of Artificial Sequence: Synthetic polypeptide; note = XENP021048 7G8_H0.116_L0_Fab Heavy Chain
EVKLEESGGGLVQPGGSMKLSCAASGFTFSDAWMDWVRQSPEKGLEWVAEIRTKANNHATYYAESVKGRFTISRDDSKSSVYLQMNSLRAEDTGIYYCTRLGNWDWYFDVWGAGTTVTVSSASTKGPSVFPLAPSSKSTSGGTAALGCLVKDYFPEPVTVSWNSGALTSGVHTFPAVLQSSGLYSLSSVVTVPSSSLGTQTYICNVNHKPSNTKVDKKVEPKSCGS

SEQ ID NO: 30275 - protein, 121 aa, synthetic construct; identical to SEQ ID NO: 19366
  source 1..121: note = Description of Artificial Sequence: Synthetic polypeptide; note = VH of XENP021048

SEQ ID NO: 30276 - protein, 5 aa, synthetic construct
  source 1..5: note = Description of Artificial Sequence: Synthetic peptide; note = XENP021048 vhCDR1
DAWMD

SEQ ID NO: 30277 - protein, 19 aa, synthetic construct
  source 1..19: note = Description of Artificial Sequence: Synthetic peptide; note = XENP021048 vhCDR2
EIRTKANNHATYYAESVKG

SEQ ID NO: 30278 - protein, 10 aa, synthetic construct
  source 1..10: note = Description of Artificial Sequence: Synthetic peptide; note = XENP021048 vhCDR3
LGNWDWYFDV

SEQ ID NO: 30279 - protein, 218 aa, synthetic construct; identical to SEQ ID NO: 17590
  source 1..218: note = Description of Artificial Sequence: Synthetic polypeptide; note = XENP021048 7G8_H0.116_L0_Fab Light Chain

SEQ ID NO: 30280 - protein, 111 aa, synthetic construct; identical to SEQ ID NO: 17591
  source 1..111: note = Description of Artificial Sequence: Synthetic polypeptide; note = VL of XENP021048

SEQ ID NO: 30281 - protein, 15 aa, synthetic construct
  source 1..15: note = Description of Artificial Sequence: Synthetic peptide; note = XENP021048 vlCDR1
KASQSVDYDGDSYMN

SEQ ID NO: 30282 - protein, 7 aa, synthetic construct
  source 1..7: note = Description of Artificial Sequence: Synthetic peptide; note = XENP021048 vlCDR2
AASNLES

SEQ ID NO: 30283 - protein, 9 aa, synthetic construct
  source 1..9: note = Description of Artificial Sequence: Synthetic peptide; note = XENP021048 vlCDR3
QQSNEDPFT

SEQ ID NO: 30284 - protein, 226 aa, synthetic construct
  source 1..226: note = Description of Artificial Sequence: Synthetic polypeptide; note = XENP021049 7G8_H0.117_L0_Fab Heavy Chain
EVKLEESGGGLVQPGGSMKLSCAASGFTFSDAWMDWVRQSPEKGLEWVAEIRTKANNHATYYAESVKGRFTISRDDSKSSVYLQMNSLRAEDTGIYYCTRLHNWDWYFDVWGAGTTVTVSSASTKGPSVFPLAPSSKSTSGGTAALGCLVKDYFPEPVTVSWNSGALTSGVHTFPAVLQSSGLYSLSSVVTVPSSSLGTQTYICNVNHKPSNTKVDKKVEPKSCGS

SEQ ID NO: 30285 - protein, 121 aa, synthetic construct; identical to SEQ ID NO: 19376
  source 1..121: note = Description of Artificial Sequence: Synthetic polypeptide; note = VH of XENP021049

SEQ ID NO: 30286 - protein, 5 aa, synthetic construct
  source 1..5: note = Description of Artificial Sequence: Synthetic peptide; note = XENP021049 vhCDR1
DAWMD

SEQ ID NO: 30287 - protein, 19 aa, synthetic construct
  source 1..19: note = Description of Artificial Sequence: Synthetic peptide; note = XENP021049 vhCDR2
EIRTKANNHATYYAESVKG

SEQ ID NO: 30288 - protein, 10 aa, synthetic construct
  source 1..10: note = Description of Artificial Sequence: Synthetic peptide; note = XENP021049 vhCDR3
LHNWDWYFDV

SEQ ID NO: 30289 - protein, 218 aa, synthetic construct; identical to SEQ ID NO: 17590
  source 1..218: note = Description of Artificial Sequence: Synthetic polypeptide; note = XENP021049 7G8_H0.117_L0_Fab Light Chain

SEQ ID NO: 30290 - protein, 111 aa, synthetic construct; identical to SEQ ID NO: 17591
  source 1..111: note = Description of Artificial Sequence: Synthetic polypeptide; note = VL of XENP021049

SEQ ID NO: 30291 - protein, 15 aa, synthetic construct
  source 1..15: note = Description of Artificial Sequence: Synthetic peptide; note = XENP021049 vlCDR1
KASQSVDYDGDSYMN

SEQ ID NO: 30292 - protein, 7 aa, synthetic construct
  source 1..7: note = Description of Artificial Sequence: Synthetic peptide; note = XENP021049 vlCDR2
AASNLES

SEQ ID NO: 30293 - protein, 9 aa, synthetic construct
  source 1..9: note = Description of Artificial Sequence: Synthetic peptide; note = XENP021049 vlCDR3
QQSNEDPFT

SEQ ID NO: 30294 - protein, 226 aa, synthetic construct
  source 1..226: note = Description of Artificial Sequence: Synthetic polypeptide; note = XENP021050 7G8_H0.118_L0_Fab Heavy Chain
EVKLEESGGGLVQPGGSMKLSCAASGFTFSDAWMDWVRQSPEKGLEWVAEIRTKANNHATYYAESVKGRFTISRDDSKSSVYLQMNSLRAEDTGIYYCTRLQNWDWYFDVWGAGTTVTVSSASTKGPSVFPLAPSSKSTSGGTAALGCLVKDYFPEPVTVSWNSGALTSGVHTFPAVLQSSGLYSLSSVVTVPSSSLGTQTYICNVNHKPSNTKVDKKVEPKSCGS

SEQ ID NO: 30295 - protein, 121 aa, synthetic construct; identical to SEQ ID NO: 19386
  source 1..121: note = Description of Artificial Sequence: Synthetic polypeptide; note = VH of XENP021050

SEQ ID NO: 30296 - protein, 5 aa, synthetic construct
  source 1..5: note = Description of Artificial Sequence: Synthetic peptide; note = XENP021050 vhCDR1
DAWMD

SEQ ID NO: 30297 - protein, 19 aa, synthetic construct
  source 1..19: note = Description of Artificial Sequence: Synthetic peptide; note = XENP021050 vhCDR2
EIRTKANNHATYYAESVKG

SEQ ID NO: 30298 - protein, 10 aa, synthetic construct
  source 1..10: note = Description of Artificial Sequence: Synthetic peptide; note = XENP021050 vhCDR3
LQNWDWYFDV

SEQ ID NO: 30299 - protein, 218 aa, synthetic construct; identical to SEQ ID NO: 17590
  source 1..218: note = Description of Artificial Sequence: Synthetic polypeptide; note = XENP021050 7G8_H0.118_L0_Fab Light Chain

SEQ ID NO: 30300 - protein, 111 aa, synthetic construct; identical to SEQ ID NO: 17591
  source 1..111: note = Description of Artificial Sequence: Synthetic polypeptide; note = VL of XENP021050

SEQ ID NO: 30301 - protein, 15 aa, synthetic construct
  source 1..15: note = Description of Artificial Sequence: Synthetic peptide; note = XENP021050 vlCDR1
KASQSVDYDGDSYMN

SEQ ID NO: 30302 - protein, 7 aa, synthetic construct
  source 1..7: note = Description of Artificial Sequence: Synthetic peptide; note = XENP021050 vlCDR2
AASNLES

SEQ ID NO: 30303 - protein, 9 aa, synthetic construct
  source 1..9: note = Description of Artificial Sequence: Synthetic peptide; note = XENP021050 vlCDR3
QQSNEDPFT

SEQ ID NO: 30304 - protein, 226 aa, synthetic construct
  source 1..226: note = Description of Artificial Sequence: Synthetic polypeptide; note = XENP021051 7G8_H0.119_L0_Fab Heavy Chain
EVKLEESGGGLVQPGGSMKLSCAASGFTFSDAWMDWVRQSPEKGLEWVAEIRTKANNHATYYAESVKGRFTISRDDSKSSVYLQMNSLRAEDTGIYYCTRLDNWDWYFDVWGAGTTVTVSSASTKGPSVFPLAPSSKSTSGGTAALGCLVKDYFPEPVTVSWNSGALTSGVHTFPAVLQSSGLYSLSSVVTVPSSSLGTQTYICNVNHKPSNTKVDKKVEPKSCGS

SEQ ID NO: 30305 - protein, 121 aa, synthetic construct; identical to SEQ ID NO: 19396
  source 1..121: note = Description of Artificial Sequence: Synthetic polypeptide; note = VH of XENP021051

SEQ ID NO: 30306 - protein, 5 aa, synthetic construct
  source 1..5: note = Description of Artificial Sequence: Synthetic peptide; note = XENP021051 vhCDR1
DAWMD

SEQ ID NO: 30307 - protein, 19 aa, synthetic construct
  source 1..19: note = Description of Artificial Sequence: Synthetic peptide; note = XENP021051 vhCDR2
EIRTKANNHATYYAESVKG

SEQ ID NO: 30308 - protein, 10 aa, synthetic construct
  source 1..10: note = Description of Artificial Sequence: Synthetic peptide; note = XENP021051 vhCDR3
LDNWDWYFDV

SEQ ID NO: 30309 - protein, 218 aa, synthetic construct; identical to SEQ ID NO: 17590
  source 1..218: note = Description of Artificial Sequence: Synthetic polypeptide; note = XENP021051 7G8_H0.119_L0_Fab Light Chain

SEQ ID NO: 30310 - protein, 111 aa, synthetic construct; identical to SEQ ID NO: 17591
  source 1..111: note = Description of Artificial Sequence: Synthetic polypeptide; note = VL of XENP021051

SEQ ID NO: 30311 - protein, 15 aa, synthetic construct
  source 1..15: note = Description of Artificial Sequence: Synthetic peptide; note = XENP021051 vlCDR1
KASQSVDYDGDSYMN

SEQ ID NO: 30312 - protein, 7 aa, synthetic construct
  source 1..7: note = Description of Artificial Sequence: Synthetic peptide; note = XENP021051 vlCDR2
AASNLES

SEQ ID NO: 30313 - protein, 9 aa, synthetic construct
  source 1..9: note = Description of Artificial Sequence: Synthetic peptide; note = XENP021051 vlCDR3
QQSNEDPFT

SEQ ID NO: 30314 - protein, 226 aa, synthetic construct
  source 1..226: note = Description of Artificial Sequence: Synthetic polypeptide; note = XENP021052 7G8_H0.120_L0_Fab Heavy Chain
EVKLEESGGGLVQPGGSMKLSCAASGFTFSDAWMDWVRQSPEKGLEWVAEIRTKANNHATYYAESVKGRFTISRDDSKSSVYLQMNSLRAEDTGIYYCTRLLNWDWYFDVWGAGTTVTVSSASTKGPSVFPLAPSSKSTSGGTAALGCLVKDYFPEPVTVSWNSGALTSGVHTFPAVLQSSGLYSLSSVVTVPSSSLGTQTYICNVNHKPSNTKVDKKVEPKSCGS

SEQ ID NO: 30315 - protein, 121 aa, synthetic construct; identical to SEQ ID NO: 19406
  source 1..121: note = Description of Artificial Sequence: Synthetic polypeptide; note = VH of XENP021052

SEQ ID NO: 30316 - protein, 5 aa, synthetic construct
  source 1..5: note = Description of Artificial Sequence: Synthetic peptide; note = XENP021052 vhCDR1
DAWMD

SEQ ID NO: 30317 - protein, 19 aa, synthetic construct
  source 1..19: note = Description of Artificial Sequence: Synthetic peptide; note = XENP021052 vhCDR2
EIRTKANNHATYYAESVKG

SEQ ID NO: 30318 - protein, 10 aa, synthetic construct
  source 1..10: note = Description of Artificial Sequence: Synthetic peptide; note = XENP021052 vhCDR3
LLNWDWYFDV

SEQ ID NO: 30319 - protein, 218 aa, synthetic construct; identical to SEQ ID NO: 17590
  source 1..218: note = Description of Artificial Sequence: Synthetic polypeptide; note = XENP021052 7G8_H0.120_L0_Fab Light Chain

SEQ ID NO: 30320 - protein, 111 aa, synthetic construct; identical to SEQ ID NO: 17591
  source 1..111: note = Description of Artificial Sequence: Synthetic polypeptide; note = VL of XENP021052

SEQ ID NO: 30321 - protein, 15 aa, synthetic construct
  source 1..15: note = Description of Artificial Sequence: Synthetic peptide; note = XENP021052 vlCDR1
KASQSVDYDGDSYMN

SEQ ID NO: 30322 - protein, 7 aa, synthetic construct
  source 1..7: note = Description of Artificial Sequence: Synthetic peptide; note = XENP021052 vlCDR2
AASNLES

SEQ ID NO: 30323 - protein, 9 aa, synthetic construct
  source 1..9: note = Description of Artificial Sequence: Synthetic peptide; note = XENP021052 vlCDR3
QQSNEDPFT

SEQ ID NO: 30324 - protein, 226 aa, synthetic construct
  source 1..226: note = Description of Artificial Sequence: Synthetic polypeptide; note = XENP021053 7G8_H0.121_L0_Fab Heavy Chain
EVKLEESGGGLVQPGGSMKLSCAASGFTFSDAWMDWVRQSPEKGLEWVAEIRTKANNHATYYAESVKGRFTISRDDSKSSVYLQMNSLRAEDTGIYYCTRLKNWDWYFDVWGAGTTVTVSSASTKGPSVFPLAPSSKSTSGGTAALGCLVKDYFPEPVTVSWNSGALTSGVHTFPAVLQSSGLYSLSSVVTVPSSSLGTQTYICNVNHKPSNTKVDKKVEPKSCGS

SEQ ID NO: 30325 - protein, 121 aa, synthetic construct; identical to SEQ ID NO: 19416
  source 1..121: note = Description of Artificial Sequence: Synthetic polypeptide; note = VH of XENP021053

SEQ ID NO: 30326 - protein, 5 aa, synthetic construct
  source 1..5: note = Description of Artificial Sequence: Synthetic peptide; note = XENP021053 vhCDR1
DAWMD

SEQ ID NO: 30327 - protein, 19 aa, synthetic construct
  source 1..19: note = Description of Artificial Sequence: Synthetic peptide; note = XENP021053 vhCDR2
EIRTKANNHATYYAESVKG

SEQ ID NO: 30328 - protein, 10 aa, synthetic construct
  source 1..10: note = Description of Artificial Sequence: Synthetic peptide; note = XENP021053 vhCDR3
LKNWDWYFDV

SEQ ID NO: 30329 - protein, 218 aa, synthetic construct; identical to SEQ ID NO: 17590
  source 1..218: note = Description of Artificial Sequence: Synthetic polypeptide; note = XENP021053 7G8_H0.121_L0_Fab Light Chain

SEQ ID NO: 30330 - protein, 111 aa, synthetic construct; identical to SEQ ID NO: 17591
  source 1..111: note = Description of Artificial Sequence: Synthetic polypeptide; note = VL of XENP021053

SEQ ID NO: 30331 - protein, 15 aa, synthetic construct
  source 1..15: note = Description of Artificial Sequence: Synthetic peptide; note = XENP021053 vlCDR1
KASQSVDYDGDSYMN

SEQ ID NO: 30332 - protein, 7 aa, synthetic construct
  source 1..7: note = Description of Artificial Sequence: Synthetic peptide; note = XENP021053 vlCDR2
AASNLES

SEQ ID NO: 30333 - protein, 9 aa, synthetic construct
  source 1..9: note = Description of Artificial Sequence: Synthetic peptide; note = XENP021053 vlCDR3
QQSNEDPFT

SEQ ID NO: 30334 - protein, 226 aa, synthetic construct
  source 1..226: note = Description of Artificial Sequence: Synthetic polypeptide; note = XENP021054 7G8_H0.122_L0_Fab Heavy Chain
EVKLEESGGGLVQPGGSMKLSCAASGFTFSDAWMDWVRQSPEKGLEWVAEIRTKANNHATYYAESVKGRFTISRDDSKSSVYLQMNSLRAEDTGIYYCTRLYNWDWYFDVWGAGTTVTVSSASTKGPSVFPLAPSSKSTSGGTAALGCLVKDYFPEPVTVSWNSGALTSGVHTFPAVLQSSGLYSLSSVVTVPSSSLGTQTYICNVNHKPSNTKVDKKVEPKSCGS

SEQ ID NO: 30335 - protein, 121 aa, synthetic construct; identical to SEQ ID NO: 19426
  source 1..121: note = Description of Artificial Sequence: Synthetic polypeptide; note = VH of XENP021054

SEQ ID NO: 30336 - protein, 5 aa, synthetic construct
  source 1..5: note = Description of Artificial Sequence: Synthetic peptide; note = XENP021054 vhCDR1
DAWMD

SEQ ID NO: 30337 - protein, 19 aa, synthetic construct
  source 1..19: note = Description of Artificial Sequence: Synthetic peptide; note = XENP021054 vhCDR2
EIRTKANNHATYYAESVKG

SEQ ID NO: 30338 - protein, 10 aa, synthetic construct
  source 1..10: note = Description of Artificial Sequence: Synthetic peptide; note = XENP021054 vhCDR3
LYNWDWYFDV

SEQ ID NO: 30339 - protein, 218 aa, synthetic construct; identical to SEQ ID NO: 17590
  source 1..218: note = Description of Artificial Sequence: Synthetic polypeptide; note = XENP021054 7G8_H0.122_L0_Fab Light Chain

SEQ ID NO: 30340 - protein, 111 aa, synthetic construct; identical to SEQ ID NO: 17591
  source 1..111: note = Description of Artificial Sequence: Synthetic polypeptide; note = VL of XENP021054

SEQ ID NO: 30341 - protein, 15 aa, synthetic construct
  source 1..15: note = Description of Artificial Sequence: Synthetic peptide; note = XENP021054 vlCDR1
KASQSVDYDGDSYMN

SEQ ID NO: 30342 - protein, 7 aa, synthetic construct
  source 1..7: note = Description of Artificial Sequence: Synthetic peptide; note = XENP021054 vlCDR2
AASNLES

SEQ ID NO: 30343 - protein, 9 aa, synthetic construct
  source 1..9: note = Description of Artificial Sequence: Synthetic peptide; note = XENP021054 vlCDR3
QQSNEDPFT

SEQ ID NO: 30344 - protein, 226 aa, synthetic construct
  source 1..226: note = Description of Artificial Sequence: Synthetic polypeptide; note = XENP021055 7G8_H0.123_L0_Fab Heavy Chain
EVKLEESGGGLVQPGGSMKLSCAASGFTFSDAWMDWVRQSPEKGLEWVAEIRTKANNHATYYAESVKGRFTISRDDSKSSVYLQMNSLRAEDTGIYYCTRLADWDWYFDVWGAGTTVTVSSASTKGPSVFPLAPSSKSTSGGTAALGCLVKDYFPEPVTVSWNSGALTSGVHTFPAVLQSSGLYSLSSVVTVPSSSLGTQTYICNVNHKPSNTKVDKKVEPKSCGS

SEQ ID NO: 30345 - protein, 121 aa, synthetic construct; identical to SEQ ID NO: 19436
  source 1..121: note = Description of Artificial Sequence: Synthetic polypeptide; note = VH of XENP021055

SEQ ID NO: 30346 - protein, 5 aa, synthetic construct
  source 1..5: note = Description of Artificial Sequence: Synthetic peptide; note = XENP021055 vhCDR1
DAWMD

SEQ ID NO: 30347 - protein, 19 aa, synthetic construct
  source 1..19: note = Description of Artificial Sequence: Synthetic peptide; note = XENP021055 vhCDR2
EIRTKANNHATYYAESVKG

SEQ ID NO: 30348 - protein, 10 aa, synthetic construct
  source 1..10: note = Description of Artificial Sequence: Synthetic peptide; note = XENP021055 vhCDR3
LADWDWYFDV

SEQ ID NO: 30349 - protein, 218 aa, synthetic construct; identical to SEQ ID NO: 17590
  source 1..218: note = Description of Artificial Sequence: Synthetic polypeptide; note = XENP021055 7G8_H0.123_L0_Fab Light Chain

SEQ ID NO: 30350 - protein, 111 aa, synthetic construct; identical to SEQ ID NO: 17591
  source 1..111: note = Description of Artificial Sequence: Synthetic polypeptide; note = VL of XENP021055

SEQ ID NO: 30351 - protein, 15 aa, synthetic construct
  source 1..15: note = Description of Artificial Sequence: Synthetic peptide; note = XENP021055 vlCDR1
KASQSVDYDGDSYMN

SEQ ID NO: 30352 - protein, 7 aa, synthetic construct
  source 1..7: note = Description of Artificial Sequence: Synthetic peptide; note = XENP021055 vlCDR2
AASNLES

SEQ ID NO: 30353 - protein, 9 aa, synthetic construct
  source 1..9: note = Description of Artificial Sequence: Synthetic peptide; note = XENP021055 vlCDR3
QQSNEDPFT

SEQ ID NO: 30354 - protein, 226 aa, synthetic construct
  source 1..226: note = Description of Artificial Sequence: Synthetic polypeptide; note = XENP021056 7G8_H0.124_L0_Fab Heavy Chain
EVKLEESGGGLVQPGGSMKLSCAASGFTFSDAWMDWVRQSPEKGLEWVAEIRTKANNHATYYAESVKGRFTISRDDSKSSVYLQMNSLRAEDTGIYYCTRLAHWDWYFDVWGAGTTVTVSSASTKGPSVFPLAPSSKSTSGGTAALGCLVKDYFPEPVTVSWNSGALTSGVHTFPAVLQSSGLYSLSSVVTVPSSSLGTQTYICNVNHKPSNTKVDKKVEPKSCGS

SEQ ID NO: 30355 - protein, 121 aa, synthetic construct; identical to SEQ ID NO: 19446
  source 1..121: note = Description of Artificial Sequence: Synthetic polypeptide; note = VH of XENP021056

SEQ ID NO: 30356 - protein, 5 aa, synthetic construct
  source 1..5: note = Description of Artificial Sequence: Synthetic peptide; note = XENP021056 vhCDR1
DAWMD

SEQ ID NO: 30357 - protein, 19 aa, synthetic construct
  source 1..19: note = Description of Artificial Sequence: Synthetic peptide; note = XENP021056 vhCDR2
EIRTKANNHATYYAESVKG

SEQ ID NO: 30358 - protein, 10 aa, synthetic construct
  source 1..10: note = Description of Artificial Sequence: Synthetic peptide; note = XENP021056 vhCDR3
LAHWDWYFDV

SEQ ID NO: 30359 - protein, 218 aa, synthetic construct; identical to SEQ ID NO: 17590
  source 1..218: note = Description of Artificial Sequence: Synthetic polypeptide; note = XENP021056 7G8_H0.124_L0_Fab Light Chain

SEQ ID NO: 30360 - protein, 111 aa, synthetic construct; identical to SEQ ID NO: 17591
  source 1..111: note = Description of Artificial Sequence: Synthetic polypeptide; note = VL of XENP021056

SEQ ID NO: 30361 - protein, 15 aa, synthetic construct
  source 1..15: note = Description of Artificial Sequence: Synthetic peptide; note = XENP021056 vlCDR1
KASQSVDYDGDSYMN

SEQ ID NO: 30362 - protein, 7 aa, synthetic construct
  source 1..7: note = Description of Artificial Sequence: Synthetic peptide; note = XENP021056 vlCDR2
AASNLES

SEQ ID NO: 30363 - protein, 9 aa, synthetic construct
  source 1..9: note = Description of Artificial Sequence: Synthetic peptide; note = XENP021056 vlCDR3
QQSNEDPFT

SEQ ID NO: 30364 - protein, 226 aa, synthetic construct
  source 1..226: note = Description of Artificial Sequence: Synthetic polypeptide; note = XENP021057 7G8_H0.125_L0_Fab Heavy Chain
EVKLEESGGGLVQPGGSMKLSCAASGFTFSDAWMDWVRQSPEKGLEWVAEIRTKANNHATYYAESVKGRFTISRDDSKSSVYLQMNSLRAEDTGIYYCTRLAEWDWYFDVWGAGTTVTVSSASTKGPSVFPLAPSSKSTSGGTAALGCLVKDYFPEPVTVSWNSGALTSGVHTFPAVLQSSGLYSLSSVVTVPSSSLGTQTYICNVNHKPSNTKVDKKVEPKSCGS

SEQ ID NO: 30365 - protein, 121 aa, synthetic construct; identical to SEQ ID NO: 19456
  source 1..121: note = Description of Artificial Sequence: Synthetic polypeptide; note = VH of XENP021057

SEQ ID NO: 30366 - protein, 5 aa, synthetic construct
  source 1..5: note = Description of Artificial Sequence: Synthetic peptide; note = XENP021057 vhCDR1
DAWMD

SEQ ID NO: 30367 - protein, 19 aa, synthetic construct
  source 1..19: note = Description of Artificial Sequence: Synthetic peptide; note = XENP021057 vhCDR2
EIRTKANNHATYYAESVKG

SEQ ID NO: 30368 - protein, 10 aa, synthetic construct
  source 1..10: note = Description of Artificial Sequence: Synthetic peptide; note = XENP021057 vhCDR3
LAEWDWYFDV

SEQ ID NO: 30369 - protein, 218 aa, synthetic construct; identical to SEQ ID NO: 17590
  source 1..218: note = Description of Artificial Sequence: Synthetic polypeptide; note = XENP021057 7G8_H0.125_L0_Fab Light Chain

SEQ ID NO: 30370 - protein, 111 aa, synthetic construct; identical to SEQ ID NO: 17591
  source 1..111: note = Description of Artificial Sequence: Synthetic polypeptide; note = VL of XENP021057

SEQ ID NO: 30371 - protein, 15 aa, synthetic construct
  source 1..15: note = Description of Artificial Sequence: Synthetic peptide; note = XENP021057 vlCDR1
KASQSVDYDGDSYMN

SEQ ID NO: 30372 - protein, 7 aa, synthetic construct
  source 1..7: note = Description of Artificial Sequence: Synthetic peptide; note = XENP021057 vlCDR2
AASNLES

SEQ ID NO: 30373 - protein, 9 aa, synthetic construct
  source 1..9: note = Description of Artificial Sequence: Synthetic peptide; note = XENP021057 vlCDR3
QQSNEDPFT

SEQ ID NO: 30374 - protein, 226 aa, synthetic construct
  source 1..226: note = Description of Artificial Sequence: Synthetic polypeptide; note = XENP021058 7G8_H0.126_L0_Fab Heavy Chain
EVKLEESGGGLVQPGGSMKLSCAASGFTFSDAWMDWVRQSPEKGLEWVAEIRTKANNHATYYAESVKGRFTISRDDSKSSVYLQMNSLRAEDTGIYYCTRLASWDWYFDVWGAGTTVTVSSASTKGPSVFPLAPSSKSTSGGTAALGCLVKDYFPEPVTVSWNSGALTSGVHTFPAVLQSSGLYSLSSVVTVPSSSLGTQTYICNVNHKPSNTKVDKKVEPKSCGS

SEQ ID NO: 30375 - protein, 121 aa, synthetic construct; identical to SEQ ID NO: 19466
  source 1..121: note = Description of Artificial Sequence: Synthetic polypeptide; note = VH of XENP021058

SEQ ID NO: 30376 - protein, 5 aa, synthetic construct
  source 1..5: note = Description of Artificial Sequence: Synthetic peptide; note = XENP021058 vhCDR1
DAWMD

SEQ ID NO: 30377 - protein, 19 aa, synthetic construct
  source 1..19: note = Description of Artificial Sequence: Synthetic peptide; note = XENP021058 vhCDR2
EIRTKANNHATYYAESVKG

SEQ ID NO: 30378 - protein, 10 aa, synthetic construct
  source 1..10: note = Description of Artificial Sequence: Synthetic peptide; note = XENP021058 vhCDR3
LASWDWYFDV

SEQ ID NO: 30379 - protein, 218 aa, synthetic construct; identical to SEQ ID NO: 17590
  source 1..218: note = Description of Artificial Sequence: Synthetic polypeptide; note = XENP021058 7G8_H0.126_L0_Fab Light Chain

SEQ ID NO: 30380 - protein, 111 aa, synthetic construct; identical to SEQ ID NO: 17591
  source 1..111: note = Description of Artificial Sequence: Synthetic polypeptide; note = VL of XENP021058

SEQ ID NO: 30381 - protein, 15 aa, synthetic construct
  source 1..15: note = Description of Artificial Sequence: Synthetic peptide; note = XENP021058 vlCDR1
KASQSVDYDGDSYMN

SEQ ID NO: 30382 - protein, 7 aa, synthetic construct
  source 1..7: note = Description of Artificial Sequence: Synthetic peptide; note = XENP021058 vlCDR2
AASNLES

SEQ ID NO: 30383 - protein, 9 aa, synthetic construct
  source 1..9: note = Description of Artificial Sequence: Synthetic peptide; note = XENP021058 vlCDR3
QQSNEDPFT

SEQ ID NO: 30384 - protein, 226 aa, synthetic construct
  source 1..226: note = Description of Artificial Sequence: Synthetic polypeptide; note = XENP021059 7G8_H0.127_L0_Fab Heavy Chain
EVKLEESGGGLVQPGGSMKLSCAASGFTFSDAWMDWVRQSPEKGLEWVAEIRTKANNHATYYAESVKGRFTISRDDSKSSVYLQMNSLRAEDTGIYYCTRLARWDWYFDVWGAGTTVTVSSASTKGPSVFPLAPSSKSTSGGTAALGCLVKDYFPEPVTVSWNSGALTSGVHTFPAVLQSSGLYSLSSVVTVPSSSLGTQTYICNVNHKPSNTKVDKKVEPKSCGS

SEQ ID NO: 30385 - protein, 121 aa, synthetic construct; identical to SEQ ID NO: 19476
  source 1..121: note = Description of Artificial Sequence: Synthetic polypeptide; note = VH of XENP021059

SEQ ID NO: 30386 - protein, 5 aa, synthetic construct
  source 1..5: note = Description of Artificial Sequence: Synthetic peptide; note = XENP021059 vhCDR1
DAWMD

SEQ ID NO: 30387 - protein, 19 aa, synthetic construct
  source 1..19: note = Description of Artificial Sequence: Synthetic peptide; note = XENP021059 vhCDR2
EIRTKANNHATYYAESVKG

SEQ ID NO: 30388 - protein, 10 aa, synthetic construct
  source 1..10: note = Description of Artificial Sequence: Synthetic peptide; note = XENP021059 vhCDR3
LARWDWYFDV

SEQ ID NO: 30389 - protein, 218 aa, synthetic construct; identical to SEQ ID NO: 17590
  source 1..218: note = Description of Artificial Sequence: Synthetic polypeptide; note = XENP021059 7G8_H0.127_L0_Fab Light Chain

SEQ ID NO: 30390 - protein, 111 aa, synthetic construct; identical to SEQ ID NO: 17591
  source 1..111: note = Description of Artificial Sequence: Synthetic polypeptide; note = VL of XENP021059

SEQ ID NO: 30391 - protein, 15 aa, synthetic construct
  source 1..15: note = Description of Artificial Sequence: Synthetic peptide; note = XENP021059 vlCDR1
KASQSVDYDGDSYMN

SEQ ID NO: 30392 - protein, 7 aa, synthetic construct
  source 1..7: note = Description of Artificial Sequence: Synthetic peptide; note = XENP021059 vlCDR2
AASNLES

SEQ ID NO: 30393 - protein, 9 aa, synthetic construct
  source 1..9: note = Description of Artificial Sequence: Synthetic peptide; note = XENP021059 vlCDR3
QQSNEDPFT

SEQ ID NO: 30394 - protein, 226 aa, synthetic construct
  source 1..226: note = Description of Artificial Sequence: Synthetic polypeptide; note = XENP021060 7G8_H0.128_L0_Fab Heavy Chain
EVKLEESGGGLVQPGGSMKLSCAASGFTFSDAWMDWVRQSPEKGLEWVAEIRTKANNHATYYAESVKGRFTISRDDSKSSVYLQMNSLRAEDTGIYYCTRLALWDWYFDVWGAGTTVTVSSASTKGPSVFPLAPSSKSTSGGTAALGCLVKDYFPEPVTVSWNSGALTSGVHTFPAVLQSSGLYSLSSVVTVPSSSLGTQTYICNVNHKPSNTKVDKKVEPKSCGS

SEQ ID NO: 30395 - protein, 121 aa, synthetic construct; identical to SEQ ID NO: 19486
  source 1..121: note = Description of Artificial Sequence: Synthetic polypeptide; note = VH of XENP021060

SEQ ID NO: 30396 - protein, 5 aa, synthetic construct
  source 1..5: note = Description of Artificial Sequence: Synthetic peptide; note = XENP021060 vhCDR1
DAWMD

SEQ ID NO: 30397 - protein, 19 aa, synthetic construct
  source 1..19: note = Description of Artificial Sequence: Synthetic peptide; note = XENP021060 vhCDR2
EIRTKANNHATYYAESVKG

SEQ ID NO: 30398 - protein, 10 aa, synthetic construct
  source 1..10: note = Description of Artificial Sequence: Synthetic peptide; note = XENP021060 vhCDR3
LALWDWYFDV

SEQ ID NO: 30399 - protein, 218 aa, synthetic construct; identical to SEQ ID NO: 17590
  source 1..218: note = Description of Artificial Sequence: Synthetic polypeptide; note = XENP021060 7G8_H0.128_L0_Fab Light Chain

SEQ ID NO: 30400 - protein, 111 aa, synthetic construct; identical to SEQ ID NO: 17591
  source 1..111: note = Description of Artificial Sequence: Synthetic polypeptide; note = VL of XENP021060

SEQ ID NO: 30401 - protein, 15 aa, synthetic construct
  source 1..15: note = Description of Artificial Sequence: Synthetic peptide; note = XENP021060 vlCDR1
KASQSVDYDGDSYMN

SEQ ID NO: 30402 - protein, 7 aa, synthetic construct
  source 1..7: note = Description of Artificial Sequence: Synthetic peptide; note = XENP021060 vlCDR2
AASNLES

SEQ ID NO: 30403 - protein, 9 aa, synthetic construct
  source 1..9: note = Description of Artificial Sequence: Synthetic peptide; note = XENP021060 vlCDR3
QQSNEDPFT

SEQ ID NO: 30404 - protein, 226 aa, synthetic construct
  source 1..226: note = Description of Artificial Sequence: Synthetic polypeptide; note = XENP021061 7G8_H0.129_L0_Fab Heavy Chain
EVKLEESGGGLVQPGGSMKLSCAASGFTFSDAWMDWVRQSPEKGLEWVAEIRTKANNHATYYAESVKGRFTISRDDSKSSVYLQMNSLRAEDTGIYYCTRLATWDWYFDVWGAGTTVTVSSASTKGPSVFPLAPSSKSTSGGTAALGCLVKDYFPEPVTVSWNSGALTSGVHTFPAVLQSSGLYSLSSVVTVPSSSLGTQTYICNVNHKPSNTKVDKKVEPKSCGS

SEQ ID NO: 30405 - protein, 121 aa, synthetic construct; identical to SEQ ID NO: 19496
  source 1..121: note = Description of Artificial Sequence: Synthetic polypeptide; note = VH of XENP021061

SEQ ID NO: 30406 - protein, 5 aa, synthetic construct
  source 1..5: note = Description of Artificial Sequence: Synthetic peptide; note = XENP021061 vhCDR1
DAWMD

SEQ ID NO: 30407 - protein, 19 aa, synthetic construct
  source 1..19: note = Description of Artificial Sequence: Synthetic peptide; note = XENP021061 vhCDR2
EIRTKANNHATYYAESVKG

SEQ ID NO: 30408 - protein, 10 aa, synthetic construct
  source 1..10: note = Description of Artificial Sequence: Synthetic peptide; note = XENP021061 vhCDR3
LATWDWYFDV

SEQ ID NO: 30409 - protein, 218 aa, synthetic construct; identical to SEQ ID NO: 17590
  source 1..218: note = Description of Artificial Sequence: Synthetic polypeptide; note = XENP021061 7G8_H0.129_L0_Fab Light Chain

SEQ ID NO: 30410 - protein, 111 aa, synthetic construct; identical to SEQ ID NO: 17591
  source 1..111: note = Description of Artificial Sequence: Synthetic polypeptide; note = VL of XENP021061

SEQ ID NO: 30411 - protein, 15 aa, synthetic construct
  source 1..15: note = Description of Artificial Sequence: Synthetic peptide; note = XENP021061 vlCDR1
KASQSVDYDGDSYMN

SEQ ID NO: 30412 - protein, 7 aa, synthetic construct
  source 1..7: note = Description of Artificial Sequence: Synthetic peptide; note = XENP021061 vlCDR2
AASNLES

SEQ ID NO: 30413 - protein, 9 aa, synthetic construct
  source 1..9: note = Description of Artificial Sequence: Synthetic peptide; note = XENP021061 vlCDR3
QQSNEDPFT

SEQ ID NO: 30414 - protein, 226 aa, synthetic construct
  source 1..226: note = Description of Artificial Sequence: Synthetic polypeptide; note = XENP021062 7G8_H0.130_L0_Fab Heavy Chain
EVKLEESGGGLVQPGGSMKLSCAASGFTFSDAWMDWVRQSPEKGLEWVAEIRTKANNHATYYAESVKGRFTISRDDSKSSVYLQMNSLRAEDTGIYYCTRLAGWDWYFDVWGAGTTVTVSSASTKGPSVFPLAPSSKSTSGGTAALGCLVKDYFPEPVTVSWNSGALTSGVHTFPAVLQSSGLYSLSSVVTVPSSSLGTQTYICNVNHKPSNTKVDKKVEPKSCGS

SEQ ID NO: 30415 - protein, 121 aa, synthetic construct; identical to SEQ ID NO: 19506
  source 1..121: note = Description of Artificial Sequence: Synthetic polypeptide; note = VH of XENP021062

SEQ ID NO: 30416 - protein, 5 aa, synthetic construct
  source 1..5: note = Description of Artificial Sequence: Synthetic peptide; note = XENP021062 vhCDR1
DAWMD

SEQ ID NO: 30417 - protein, 19 aa, synthetic construct
  source 1..19: note = Description of Artificial Sequence: Synthetic peptide; note = XENP021062 vhCDR2
EIRTKANNHATYYAESVKG

SEQ ID NO: 30418 - protein, 10 aa, synthetic construct
  source 1..10: note = Description of Artificial Sequence: Synthetic peptide; note = XENP021062 vhCDR3
LAGWDWYFDV

SEQ ID NO: 30419 - protein, 218 aa, synthetic construct; identical to SEQ ID NO: 17590
  source 1..218: note = Description of Artificial Sequence: Synthetic polypeptide; note = XENP021062 7G8_H0.130_L0_Fab Light Chain

SEQ ID NO: 30420 - protein, 111 aa, synthetic construct; identical to SEQ ID NO: 17591
  source 1..111: note = Description of Artificial Sequence: Synthetic polypeptide; note = VL of XENP021062

SEQ ID NO: 30421 - protein, 15 aa, synthetic construct
  source 1..15: note = Description of Artificial Sequence: Synthetic peptide; note = XENP021062 vlCDR1
KASQSVDYDGDSYMN

SEQ ID NO: 30422 - protein, 7 aa, synthetic construct
  source 1..7: note = Description of Artificial Sequence: Synthetic peptide; note = XENP021062 vlCDR2
AASNLES

SEQ ID NO: 30423 - protein, 9 aa, synthetic construct
  source 1..9: note = Description of Artificial Sequence: Synthetic peptide; note = XENP021062 vlCDR3
QQSNEDPFT

SEQ ID NO: 30424 - protein, 226 aa, synthetic construct
  source 1..226: note = Description of Artificial Sequence: Synthetic polypeptide; note = XENP021063 7G8_H0.131_L0_Fab Heavy Chain
EVKLEESGGGLVQPGGSMKLSCAASGFTFSDAWMDWVRQSPEKGLEWVAEIRTKANNHATYYAESVKGRFTISRDDSKSSVYLQMNSLRAEDTGIYYCTRLAYWDWYFDVWGAGTTVTVSSASTKGPSVFPLAPSSKSTSGGTAALGCLVKDYFPEPVTVSWNSGALTSGVHTFPAVLQSSGLYSLSSVVTVPSSSLGTQTYICNVNHKPSNTKVDKKVEPKSCGS

SEQ ID NO: 30425 - protein, 121 aa, synthetic construct; identical to SEQ ID NO: 19516
  source 1..121: note = Description of Artificial Sequence: Synthetic polypeptide; note = VH of XENP021063

SEQ ID NO: 30426 - protein, 5 aa, synthetic construct
  source 1..5: note = Description of Artificial Sequence: Synthetic peptide; note = XENP021063 vhCDR1
DAWMD

SEQ ID NO: 30427 - protein, 19 aa, synthetic construct
  source 1..19: note = Description of Artificial Sequence: Synthetic peptide; note = XENP021063 vhCDR2
EIRTKANNHATYYAESVKG

SEQ ID NO: 30428 - protein, 10 aa, synthetic construct
  source 1..10: note = Description of Artificial Sequence: Synthetic peptide; note = XENP021063 vhCDR3
LAYWDWYFDV

SEQ ID NO: 30429 - protein, 218 aa, synthetic construct; identical to SEQ ID NO: 17590
  source 1..218: note = Description of Artificial Sequence: Synthetic polypeptide; note = XENP021063 7G8_H0.131_L0_Fab Light Chain

SEQ ID NO: 30430 - protein, 111 aa, synthetic construct; identical to SEQ ID NO: 17591
  source 1..111: note = Description of Artificial Sequence: Synthetic polypeptide; note = VL of XENP021063

SEQ ID NO: 30431 - protein, 15 aa, synthetic construct
  source 1..15: note = Description of Artificial Sequence: Synthetic peptide; note = XENP021063 vlCDR1
KASQSVDYDGDSYMN

SEQ ID NO: 30432 - protein, 7 aa, synthetic construct
  source 1..7: note = Description of Artificial Sequence: Synthetic peptide; note = XENP021063 vlCDR2
AASNLES

SEQ ID NO: 30433 - protein, 9 aa, synthetic construct
  source 1..9: note = Description of Artificial Sequence: Synthetic peptide; note = XENP021063 vlCDR3
QQSNEDPFT

SEQ ID NO: 30434 - protein, 226 aa, synthetic construct
  source 1..226: note = Description of Artificial Sequence: Synthetic polypeptide; note = XENP021064 7G8_H0.132_L0_Fab Heavy Chain
EVKLEESGGGLVQPGGSMKLSCAASGFTFSDAWMDWVRQSPEKGLEWVAEIRTKANNHATYYAESVKGRFTISRDDSKSSVYLQMNSLRAEDTGIYYCTRLANFDWYFDVWGAGTTVTVSSASTKGPSVFPLAPSSKSTSGGTAALGCLVKDYFPEPVTVSWNSGALTSGVHTFPAVLQSSGLYSLSSVVTVPSSSLGTQTYICNVNHKPSNTKVDKKVEPKSCGS

SEQ ID NO: 30435 - protein, 121 aa, synthetic construct; identical to SEQ ID NO: 19526
  source 1..121: note = Description of Artificial Sequence: Synthetic polypeptide; note = VH of XENP021064

SEQ ID NO: 30436 - protein, 5 aa, synthetic construct
  source 1..5: note = Description of Artificial Sequence: Synthetic peptide; note = XENP021064 vhCDR1
DAWMD

SEQ ID NO: 30437 - protein, 19 aa, synthetic construct
  source 1..19: note = Description of Artificial Sequence: Synthetic peptide; note = XENP021064 vhCDR2
EIRTKANNHATYYAESVKG

SEQ ID NO: 30438 - protein, 10 aa, synthetic construct
  source 1..10: note = Description of Artificial Sequence: Synthetic peptide; note = XENP021064 vhCDR3
LANFDWYFDV

SEQ ID NO: 30439 - protein, 218 aa, synthetic construct; identical to SEQ ID NO: 17590
  source 1..218: note = Description of Artificial Sequence: Synthetic polypeptide; note = XENP021064 7G8_H0.132_L0_Fab Light Chain

SEQ ID NO: 30440 - protein, 111 aa, synthetic construct; identical to SEQ ID NO: 17591
  source 1..111: note = Description of Artificial Sequence: Synthetic polypeptide; note = VL of XENP021064

SEQ ID NO: 30441 - protein, 15 aa, synthetic construct
  source 1..15: note = Description of Artificial Sequence: Synthetic peptide; note = XENP021064 vlCDR1
KASQSVDYDGDSYMN

SEQ ID NO: 30442 - protein, 7 aa, synthetic construct
  source 1..7: note = Description of Artificial Sequence: Synthetic peptide; note = XENP021064 vlCDR2
AASNLES

SEQ ID NO: 30443 - protein, 9 aa, synthetic construct
  source 1..9: note = Description of Artificial Sequence: Synthetic peptide; note = XENP021064 vlCDR3
QQSNEDPFT

SEQ ID NO: 30444 - protein, 226 aa, synthetic construct
  source 1..226: note = Description of Artificial Sequence: Synthetic polypeptide; note = XENP021065 7G8_H0.134_L0_Fab Heavy Chain
EVKLEESGGGLVQPGGSMKLSCAASGFTFSDAWMDWVRQSPEKGLEWVAEIRTKANNHATYYAESVKGRFTISRDDSKSSVYLQMNSLRAEDTGIYYCTRLANYDWYFDVWGAGTTVTVSSASTKGPSVFPLAPSSKSTSGGTAALGCLVKDYFPEPVTVSWNSGALTSGVHTFPAVLQSSGLYSLSSVVTVPSSSLGTQTYICNVNHKPSNTKVDKKVEPKSCGS

SEQ ID NO: 30445 - protein, 121 aa, synthetic construct; identical to SEQ ID NO: 19546
  source 1..121: note = Description of Artificial Sequence: Synthetic polypeptide; note = VH of XENP021065

SEQ ID NO: 30446 - protein, 5 aa, synthetic construct
  source 1..5: note = Description of Artificial Sequence: Synthetic peptide; note = XENP021065 vhCDR1
DAWMD

SEQ ID NO: 30447 - protein, 19 aa, synthetic construct
  source 1..19: note = Description of Artificial Sequence: Synthetic peptide; note = XENP021065 vhCDR2
EIRTKANNHATYYAESVKG

SEQ ID NO: 30448 - protein, 10 aa, synthetic construct
  source 1..10: note = Description of Artificial Sequence: Synthetic peptide; note = XENP021065 vhCDR3
LANYDWYFDV

SEQ ID NO: 30449 - protein, 218 aa, synthetic construct; identical to SEQ ID NO: 17590
  source 1..218: note = Description of Artificial Sequence: Synthetic polypeptide; note = XENP021065 7G8_H0.134_L0_Fab Light Chain

SEQ ID NO: 30450 - protein, 111 aa, synthetic construct; identical to SEQ ID NO: 17591
  source 1..111: note = Description of Artificial Sequence: Synthetic polypeptide; note = VL of XENP021065

SEQ ID NO: 30451 - protein, 15 aa, synthetic construct
  source 1..15: note = Description of Artificial Sequence: Synthetic peptide; note = XENP021065 vlCDR1
KASQSVDYDGDSYMN

SEQ ID NO: 30452 - protein, 7 aa, synthetic construct
  source 1..7: note = Description of Artificial Sequence: Synthetic peptide; note = XENP021065 vlCDR2
AASNLES

SEQ ID NO: 30453 - protein, 9 aa, synthetic construct
  source 1..9: note = Description of Artificial Sequence: Synthetic peptide; note = XENP021065 vlCDR3
QQSNEDPFT

SEQ ID NO: 30454 - protein, 226 aa, synthetic construct
  source 1..226: note = Description of Artificial Sequence: Synthetic polypeptide; note = XENP021066 7G8_H0.141_L0_Fab Heavy Chain
EVKLEESGGGLVQPGGSMKLSCAASGFTFSDAWMDWVRQSPEKGLEWVAEIRTKANNHATYYAESVKGRFTISRDDSKSSVYLQMNSLRAEDTGIYYCTRLANWNWYFDVWGAGTTVTVSSASTKGPSVFPLAPSSKSTSGGTAALGCLVKDYFPEPVTVSWNSGALTSGVHTFPAVLQSSGLYSLSSVVTVPSSSLGTQTYICNVNHKPSNTKVDKKVEPKSCGS

SEQ ID NO: 30455 - protein, 121 aa, synthetic construct; identical to SEQ ID NO: 19616
  source 1..121: note = Description of Artificial Sequence: Synthetic polypeptide; note = VH of XENP021066

SEQ ID NO: 30456 - protein, 5 aa, synthetic construct
  source 1..5: note = Description of Artificial Sequence: Synthetic peptide; note = XENP021066 vhCDR1
DAWMD

SEQ ID NO: 30457 - protein, 19 aa, synthetic construct
  source 1..19: note = Description of Artificial Sequence: Synthetic peptide; note = XENP021066 vhCDR2
EIRTKANNHATYYAESVKG

SEQ ID NO: 30458 - protein, 10 aa, synthetic construct
  source 1..10: note = Description of Artificial Sequence: Synthetic peptide; note = XENP021066 vhCDR3
LANWNWYFDV

SEQ ID NO: 30459 - protein, 218 aa, synthetic construct; identical to SEQ ID NO: 17590
  source 1..218: note = Description of Artificial Sequence: Synthetic polypeptide; note = XENP021066 7G8_H0.141_L0_Fab Light Chain

SEQ ID NO: 30460 - protein, 111 aa, synthetic construct; identical to SEQ ID NO: 17591
  source 1..111: note = Description of Artificial Sequence: Synthetic polypeptide; note = VL of XENP021066

SEQ ID NO: 30461 - protein, 15 aa, synthetic construct
  source 1..15: note = Description of Artificial Sequence: Synthetic peptide; note = XENP021066 vlCDR1
KASQSVDYDGDSYMN

SEQ ID NO: 30462 - protein, 7 aa, synthetic construct
  source 1..7: note = Description of Artificial Sequence: Synthetic peptide; note = XENP021066 vlCDR2
AASNLES

SEQ ID NO: 30463 - protein, 9 aa, synthetic construct
  source 1..9: note = Description of Artificial Sequence: Synthetic peptide; note = XENP021066 vlCDR3
QQSNEDPFT

SEQ ID NO: 30464 - protein, 226 aa, synthetic construct
  source 1..226: note = Description of Artificial Sequence: Synthetic polypeptide; note = XENP021067 7G8_H0.142_L0_Fab Heavy Chain
EVKLEESGGGLVQPGGSMKLSCAASGFTFSDAWMDWVRQSPEKGLEWVAEIRTKANNHATYYAESVKGRFTISRDDSKSSVYLQMNSLRAEDTGIYYCTRLANWEWYFDVWGAGTTVTVSSASTKGPSVFPLAPSSKSTSGGTAALGCLVKDYFPEPVTVSWNSGALTSGVHTFPAVLQSSGLYSLSSVVTVPSSSLGTQTYICNVNHKPSNTKVDKKVEPKSCGS

SEQ ID NO: 30465 - protein, 121 aa, synthetic construct; identical to SEQ ID NO: 19626
  source 1..121: note = Description of Artificial Sequence: Synthetic polypeptide; note = VH of XENP021067

SEQ ID NO: 30466 - protein, 5 aa, synthetic construct
  source 1..5: note = Description of Artificial Sequence: Synthetic peptide; note = XENP021067 vhCDR1
DAWMD

SEQ ID NO: 30467 - protein, 19 aa, synthetic construct
  source 1..19: note = Description of Artificial Sequence: Synthetic peptide; note = XENP021067 vhCDR2
EIRTKANNHATYYAESVKG

SEQ ID NO: 30468 - protein, 10 aa, synthetic construct
  source 1..10: note = Description of Artificial Sequence: Synthetic peptide; note = XENP021067 vhCDR3
LANWEWYFDV

SEQ ID NO: 30469 - protein, 218 aa, synthetic construct; identical to SEQ ID NO: 17590
  source 1..218: note = Description of Artificial Sequence: Synthetic polypeptide; note = XENP021067 7G8_H0.142_L0_Fab Light Chain

SEQ ID NO: 30470 - protein, 111 aa, synthetic construct; identical to SEQ ID NO: 17591
  source 1..111: note = Description of Artificial Sequence: Synthetic polypeptide; note = VL of XENP021067

SEQ ID NO: 30471 - protein, 15 aa, synthetic construct
  source 1..15: note = Description of Artificial Sequence: Synthetic peptide; note = XENP021067 vlCDR1
KASQSVDYDGDSYMN

SEQ ID NO: 30472 - protein, 7 aa, synthetic construct
  source 1..7: note = Description of Artificial Sequence: Synthetic peptide; note = XENP021067 vlCDR2
AASNLES

SEQ ID NO: 30473 - protein, 9 aa, synthetic construct
  source 1..9: note = Description of Artificial Sequence: Synthetic peptide; note = XENP021067 vlCDR3
QQSNEDPFT

SEQ ID NO: 30474 - protein, 226 aa, synthetic construct
  source 1..226: note = Description of Artificial Sequence: Synthetic polypeptide; note = XENP021068 7G8_H0.143_L0_Fab Heavy Chain
EVKLEESGGGLVQPGGSMKLSCAASGFTFSDAWMDWVRQSPEKGLEWVAEIRTKANNHATYYAESVKGRFTISRDDSKSSVYLQMNSLRAEDTGIYYCTRLANWHWYFDVWGAGTTVTVSSASTKGPSVFPLAPSSKSTSGGTAALGCLVKDYFPEPVTVSWNSGALTSGVHTFPAVLQSSGLYSLSSVVTVPSSSLGTQTYICNVNHKPSNTKVDKKVEPKSCGS

SEQ ID NO: 30475 - protein, 121 aa, synthetic construct; identical to SEQ ID NO: 19636
  source 1..121: note = Description of Artificial Sequence: Synthetic polypeptide; note = VH of XENP021068

SEQ ID NO: 30476 - protein, 5 aa, synthetic construct
  source 1..5: note = Description of Artificial Sequence: Synthetic peptide; note = XENP021068 vhCDR1
DAWMD

SEQ ID NO: 30477 - protein, 19 aa, synthetic construct
  source 1..19: note = Description of Artificial Sequence: Synthetic peptide; note = XENP021068 vhCDR2
EIRTKANNHATYYAESVKG

SEQ ID NO: 30478 - protein, 10 aa, synthetic construct
  source 1..10: note = Description of Artificial Sequence: Synthetic peptide; note = XENP021068 vhCDR3
LANWHWYFDV

SEQ ID NO: 30479 - protein, 218 aa, synthetic construct; identical to SEQ ID NO: 17590
  source 1..218: note = Description of Artificial Sequence: Synthetic polypeptide; note = XENP021068 7G8_H0.143_L0_Fab Light Chain

SEQ ID NO: 30480 - protein, 111 aa, synthetic construct; identical to SEQ ID NO: 17591
  source 1..111: note = Description of Artificial Sequence: Synthetic polypeptide; note = VL of XENP021068

SEQ ID NO: 30481 - protein, 15 aa, synthetic construct
  source 1..15: note = Description of Artificial Sequence: Synthetic peptide; note = XENP021068 vlCDR1
KASQSVDYDGDSYMN

SEQ ID NO: 30482 - protein, 7 aa, synthetic construct
  source 1..7: note = Description of Artificial Sequence: Synthetic peptide; note = XENP021068 vlCDR2
AASNLES

SEQ ID NO: 30483 - protein, 9 aa, synthetic construct
  source 1..9: note = Description of Artificial Sequence: Synthetic peptide; note = XENP021068 vlCDR3
QQSNEDPFT

SEQ ID NO: 30484 - protein, 226 aa, synthetic construct
  source 1..226: note = Description of Artificial Sequence: Synthetic polypeptide; note = XENP021069 7G8_H0.145_L0_Fab Heavy Chain
EVKLEESGGGLVQPGGSMKLSCAASGFTFSDAWMDWVRQSPEKGLEWVAEIRTKANNHATYYAESVKGRFTISRDDSKSSVYLQMNSLRAEDTGIYYCTRLANWLWYFDVWGAGTTVTVSSASTKGPSVFPLAPSSKSTSGGTAALGCLVKDYFPEPVTVSWNSGALTSGVHTFPAVLQSSGLYSLSSVVTVPSSSLGTQTYICNVNHKPSNTKVDKKVEPKSCGS

SEQ ID NO: 30485 - protein, 121 aa, synthetic construct; identical to SEQ ID NO: 19656
  source 1..121: note = Description of Artificial Sequence: Synthetic polypeptide; note = VH of XENP021069

SEQ ID NO: 30486 - protein, 5 aa, synthetic construct
  source 1..5: note = Description of Artificial Sequence: Synthetic peptide; note = XENP021069 vhCDR1
DAWMD

SEQ ID NO: 30487 - protein, 19 aa, synthetic construct
  source 1..19: note = Description of Artificial Sequence: Synthetic peptide; note = XENP021069 vhCDR2
EIRTKANNHATYYAESVKG

SEQ ID NO: 30488 - protein, 10 aa, synthetic construct
  source 1..10: note = Description of Artificial Sequence: Synthetic peptide; note = XENP021069 vhCDR3
LANWLWYFDV

SEQ ID NO: 30489 - protein, 218 aa, synthetic construct; identical to SEQ ID NO: 17590
  source 1..218: note = Description of Artificial Sequence: Synthetic polypeptide; note = XENP021069 7G8_H0.145_L0_Fab Light Chain

SEQ ID NO: 30490 - protein, 111 aa, synthetic construct; identical to SEQ ID NO: 17591
  source 1..111: note = Description of Artificial Sequence: Synthetic polypeptide; note = VL of XENP021069

SEQ ID NO: 30491 - protein, 15 aa, synthetic construct
  source 1..15: note = Description of Artificial Sequence: Synthetic peptide; note = XENP021069 vlCDR1
KASQSVDYDGDSYMN

SEQ ID NO: 30492 - protein, 7 aa, synthetic construct
  source 1..7: note = Description of Artificial Sequence: Synthetic peptide; note = XENP021069 vlCDR2
AASNLES

SEQ ID NO: 30493 - protein, 9 aa, synthetic construct
  source 1..9: note = Description of Artificial Sequence: Synthetic peptide; note = XENP021069 vlCDR3
QQSNEDPFT

SEQ ID NO: 30494 - protein, 226 aa, synthetic construct
  source 1..226: note = Description of Artificial Sequence: Synthetic polypeptide; note = XENP021070 7G8_H0.146_L0_Fab Heavy Chain
EVKLEESGGGLVQPGGSMKLSCAASGFTFSDAWMDWVRQSPEKGLEWVAEIRTKANNHATYYAESVKGRFTISRDDSKSSVYLQMNSLRAEDTGIYYCTRLANWGWYFDVWGAGTTVTVSSASTKGPSVFPLAPSSKSTSGGTAALGCLVKDYFPEPVTVSWNSGALTSGVHTFPAVLQSSGLYSLSSVVTVPSSSLGTQTYICNVNHKPSNTKVDKKVEPKSCGS

SEQ ID NO: 30495 - protein, 121 aa, synthetic construct; identical to SEQ ID NO: 19666
  source 1..121: note = Description of Artificial Sequence: Synthetic polypeptide; note = VH of XENP021070

SEQ ID NO: 30496 - protein, 5 aa, synthetic construct
  source 1..5: note = Description of Artificial Sequence: Synthetic peptide; note = XENP021070 vhCDR1
DAWMD

SEQ ID NO: 30497 - protein, 19 aa, synthetic construct
  source 1..19: note = Description of Artificial Sequence: Synthetic peptide; note = XENP021070 vhCDR2
EIRTKANNHATYYAESVKG

SEQ ID NO: 30498 - protein, 10 aa, synthetic construct
  source 1..10: note = Description of Artificial Sequence: Synthetic peptide; note = XENP021070 vhCDR3
LANWGWYFDV

SEQ ID NO: 30499 - protein, 218 aa, synthetic construct; identical to SEQ ID NO: 17590
  source 1..218: note = Description of Artificial Sequence: Synthetic polypeptide; note = XENP021070 7G8_H0.146_L0_Fab Light Chain

SEQ ID NO: 30500 - protein, 111 aa, synthetic construct; identical to SEQ ID NO: 17591
  source 1..111: note = Description of Artificial Sequence: Synthetic polypeptide; note = VL of XENP021070

SEQ ID NO: 30501 - protein, 15 aa, synthetic construct
  source 1..15: note = Description of Artificial Sequence: Synthetic peptide; note = XENP021070 vlCDR1
KASQSVDYDGDSYMN

SEQ ID NO: 30502 - protein, 7 aa, synthetic construct
  source 1..7: note = Description of Artificial Sequence: Synthetic peptide; note = XENP021070 vlCDR2
AASNLES

SEQ ID NO: 30503 - protein, 9 aa, synthetic construct
  source 1..9: note = Description of Artificial Sequence: Synthetic peptide; note = XENP021070 vlCDR3
QQSNEDPFT

SEQ ID NO: 30504 - protein, 226 aa, synthetic construct
  source 1..226: note = Description of Artificial Sequence: Synthetic polypeptide; note = XENP021071 7G8_H0.147_L0_Fab Heavy Chain
EVKLEESGGGLVQPGGSMKLSCAASGFTFSDAWMDWVRQSPEKGLEWVAEIRTKANNHATYYAESVKGRFTISRDDSKSSVYLQMNSLRAEDTGIYYCTRLANWYWYFDVWGAGTTVTVSSASTKGPSVFPLAPSSKSTSGGTAALGCLVKDYFPEPVTVSWNSGALTSGVHTFPAVLQSSGLYSLSSVVTVPSSSLGTQTYICNVNHKPSNTKVDKKVEPKSCGS

SEQ ID NO: 30505 - protein, 121 aa, synthetic construct; identical to SEQ ID NO: 19676
  source 1..121: note = Description of Artificial Sequence: Synthetic polypeptide; note = VH of XENP021071

SEQ ID NO: 30506 - protein, 5 aa, synthetic construct
  source 1..5: note = Description of Artificial Sequence: Synthetic peptide; note = XENP021071 vhCDR1
DAWMD

SEQ ID NO: 30507 - protein, 19 aa, synthetic construct
  source 1..19: note = Description of Artificial Sequence: Synthetic peptide; note = XENP021071 vhCDR2
EIRTKANNHATYYAESVKG

SEQ ID NO: 30508 - protein, 10 aa, synthetic construct
  source 1..10: note = Description of Artificial Sequence: Synthetic peptide; note = XENP021071 vhCDR3
LANWYWYFDV

SEQ ID NO: 30509 - protein, 218 aa, synthetic construct; identical to SEQ ID NO: 17590
  source 1..218: note = Description of Artificial Sequence: Synthetic polypeptide; note = XENP021071 7G8_H0.147_L0_Fab Light Chain

SEQ ID NO: 30510 - protein, 111 aa, synthetic construct; identical to SEQ ID NO: 17591
  source 1..111: note = Description of Artificial Sequence: Synthetic polypeptide; note = VL of XENP021071

SEQ ID NO: 30511 - protein, 15 aa, synthetic construct
  source 1..15: note = Description of Artificial Sequence: Synthetic peptide; note = XENP021071 vlCDR1
KASQSVDYDGDSYMN

SEQ ID NO: 30512 - protein, 7 aa, synthetic construct
  source 1..7: note = Description of Artificial Sequence: Synthetic peptide; note = XENP021071 vlCDR2
AASNLES

SEQ ID NO: 30513 - protein, 9 aa, synthetic construct
  source 1..9: note = Description of Artificial Sequence: Synthetic peptide; note = XENP021071 vlCDR3
QQSNEDPFT

SEQ ID NO: 30514 - protein, 226 aa, synthetic construct
  source 1..226: note = Description of Artificial Sequence: Synthetic polypeptide; note = XENP021072 7G8_H0.148_L0_Fab Heavy Chain
EVKLEESGGGLVQPGGSMKLSCAASGFTFSDAWMDWVRQSPEKGLEWVAEIRTKANNHATYYAESVKGRFTISRDDSKSSVYLQMNSLRAEDTGIYYCTRLANWDYYFDVWGAGTTVTVSSASTKGPSVFPLAPSSKSTSGGTAALGCLVKDYFPEPVTVSWNSGALTSGVHTFPAVLQSSGLYSLSSVVTVPSSSLGTQTYICNVNHKPSNTKVDKKVEPKSCGS

SEQ ID NO: 30515 - protein, 121 aa, synthetic construct; identical to SEQ ID NO: 19686
  source 1..121: note = Description of Artificial Sequence: Synthetic polypeptide; note = VH of XENP021072

SEQ ID NO: 30516 - protein, 5 aa, synthetic construct
  source 1..5: note = Description of Artificial Sequence: Synthetic peptide; note = XENP021072 vhCDR1
DAWMD

SEQ ID NO: 30517 - protein, 19 aa, synthetic construct
  source 1..19: note = Description of Artificial Sequence: Synthetic peptide; note = XENP021072 vhCDR2
EIRTKANNHATYYAESVKG

SEQ ID NO: 30518 - protein, 10 aa, synthetic construct
  source 1..10: note = Description of Artificial Sequence: Synthetic peptide; note = XENP021072 vhCDR3
LANWDYYFDV

SEQ ID NO: 30519 - protein, 218 aa, synthetic construct; identical to SEQ ID NO: 17590
  source 1..218: note = Description of Artificial Sequence: Synthetic polypeptide; note = XENP021072 7G8_H0.148_L0_Fab Light Chain

SEQ ID NO: 30520 - protein, 111 aa, synthetic construct; identical to SEQ ID NO: 17591
  source 1..111: note = Description of Artificial Sequence: Synthetic polypeptide; note = VL of XENP021072

SEQ ID NO: 30521 - protein, 15 aa, synthetic construct
  source 1..15: note = Description of Artificial Sequence: Synthetic peptide; note = XENP021072 vlCDR1
KASQSVDYDGDSYMN

SEQ ID NO: 30522 - protein, 7 aa, synthetic construct
  source 1..7: note = Description of Artificial Sequence: Synthetic peptide; note = XENP021072 vlCDR2
AASNLES

SEQ ID NO: 30523 - protein, 9 aa, synthetic construct
  source 1..9: note = Description of Artificial Sequence: Synthetic peptide; note = XENP021072 vlCDR3
QQSNEDPFT

SEQ ID NO: 30524 - protein, 226 aa, synthetic construct; identical to SEQ ID NO: 29134
  source 1..226: note = Description of Artificial Sequence: Synthetic polypeptide; note = XENP021074 7G8_H0_L0.1_Fab Heavy Chain

SEQ ID NO: 30525 - protein, 121 aa, synthetic construct; identical to SEQ ID NO: 17586
  source 1..121: note = Description of Artificial Sequence: Synthetic polypeptide; note = VH of XENP021074

SEQ ID NO: 30526 - protein, 5 aa, synthetic construct
  source 1..5: note = Description of Artificial Sequence: Synthetic peptide; note = XENP021074 vhCDR1
DAWMD

SEQ ID NO: 30527 - protein, 19 aa, synthetic construct
  source 1..19: note = Description of Artificial Sequence: Synthetic peptide; note = XENP021074 vhCDR2
EIRTKANNHATYYAESVKG

SEQ ID NO: 30528 - protein, 10 aa, synthetic construct
  source 1..10: note = Description of Artificial Sequence: Synthetic peptide; note = XENP021074 vhCDR3
LANWDWYFDV

SEQ ID NO: 30529 - protein, 218 aa, synthetic construct; identical to SEQ ID NO: 19700
  source 1..218: note = Description of Artificial Sequence: Synthetic polypeptide; note = XENP021074 7G8_H0_L0.1_Fab Light Chain

SEQ ID NO: 30530 - protein, 111 aa, synthetic construct; identical to SEQ ID NO: 19701
  source 1..111: note = Description of Artificial Sequence: Synthetic polypeptide; note = VL of XENP021074

SEQ ID NO: 30531 - protein, 15 aa, synthetic construct
  source 1..15: note = Description of Artificial Sequence: Synthetic peptide; note = XENP021074 vlCDR1
KASQSVNYDGDSYMN

SEQ ID NO: 30532 - protein, 7 aa, synthetic construct
  source 1..7: note = Description of Artificial Sequence: Synthetic peptide; note = XENP021074 vlCDR2
AASNLES

SEQ ID NO: 30533 - protein, 9 aa, synthetic construct
  source 1..9: note = Description of Artificial Sequence: Synthetic peptide; note = XENP021074 vlCDR3
QQSNEDPFT

SEQ ID NO: 30534 - protein, 226 aa, synthetic construct; identical to SEQ ID NO: 29134
  source 1..226: note = Description of Artificial Sequence: Synthetic polypeptide; note = XENP021075 7G8_H0_L0.2_Fab Heavy Chain

SEQ ID NO: 30535 - protein, 121 aa, synthetic construct; identical to SEQ ID NO: 17586
  source 1..121: note = Description of Artificial Sequence: Synthetic polypeptide; note = VH of XENP021075

SEQ ID NO: 30536 - protein, 5 aa, synthetic construct
  source 1..5: note = Description of Artificial Sequence: Synthetic peptide; note = XENP021075 vhCDR1
DAWMD

SEQ ID NO: 30537 - protein, 19 aa, synthetic construct
  source 1..19: note = Description of Artificial Sequence: Synthetic peptide; note = XENP021075 vhCDR2
EIRTKANNHATYYAESVKG

SEQ ID NO: 30538 - protein, 10 aa, synthetic construct
  source 1..10: note = Description of Artificial Sequence: Synthetic peptide; note = XENP021075 vhCDR3
LANWDWYFDV

SEQ ID NO: 30539 - protein, 218 aa, synthetic construct; identical to SEQ ID NO: 19710
  source 1..218: note = Description of Artificial Sequence: Synthetic polypeptide; note = XENP021075 7G8_H0_L0.2_Fab Light Chain

SEQ ID NO: 30540 - protein, 111 aa, synthetic construct; identical to SEQ ID NO: 19711
  source 1..111: note = Description of Artificial Sequence: Synthetic polypeptide; note = VL of XENP021075

SEQ ID NO: 30541 - protein, 15 aa, synthetic construct
  source 1..15: note = Description of Artificial Sequence: Synthetic peptide; note = XENP021075 vlCDR1
KASQSVEYDGDSYMN

SEQ ID NO: 30542 - protein, 7 aa, synthetic construct
  source 1..7: note = Description of Artificial Sequence: Synthetic peptide; note = XENP021075 vlCDR2
AASNLES

SEQ ID NO: 30543 - protein, 9 aa, synthetic construct
  source 1..9: note = Description of Artificial Sequence: Synthetic peptide; note = XENP021075 vlCDR3
QQSNEDPFT

SEQ ID NO: 30544 - protein, 226 aa, synthetic construct; identical to SEQ ID NO: 29134
  source 1..226: note = Description of Artificial Sequence: Synthetic polypeptide; note = XENP021076 7G8_H0_L0.3_Fab Heavy Chain

SEQ ID NO: 30545 - protein, 121 aa, synthetic construct; identical to SEQ ID NO: 17586
  source 1..121: note = Description of Artificial Sequence: Synthetic polypeptide; note = VH of XENP021076

SEQ ID NO: 30546 - protein, 5 aa, synthetic construct
  source 1..5: note = Description of Artificial Sequence: Synthetic peptide; note = XENP021076 vhCDR1
DAWMD

SEQ ID NO: 30547 - protein, 19 aa, synthetic construct
  source 1..19: note = Description of Artificial Sequence: Synthetic peptide; note = XENP021076 vhCDR2
EIRTKANNHATYYAESVKG

SEQ ID NO: 30548 - protein, 10 aa, synthetic construct
  source 1..10: note = Description of Artificial Sequence: Synthetic peptide; note = XENP021076 vhCDR3
LANWDWYFDV

SEQ ID NO: 30549 - protein, 218 aa, synthetic construct; identical to SEQ ID NO: 19720
  source 1..218: note = Description of Artificial Sequence: Synthetic polypeptide; note = XENP021076 7G8_H0_L0.3_Fab Light Chain

SEQ ID NO: 30550 - protein, 111 aa, synthetic construct; identical to SEQ ID NO: 19721
  source 1..111: note = Description of Artificial Sequence: Synthetic polypeptide; note = VL of XENP021076

SEQ ID NO: 30551 - protein, 15 aa, synthetic construct
  source 1..15: note = Description of Artificial Sequence: Synthetic peptide; note = XENP021076 vlCDR1
KASQSVHYDGDSYMN

SEQ ID NO: 30552 - protein, 7 aa, synthetic construct
  source 1..7: note = Description of Artificial Sequence: Synthetic peptide; note = XENP021076 vlCDR2
AASNLES

SEQ ID NO: 30553 - protein, 9 aa, synthetic construct
  source 1..9: note = Description of Artificial Sequence: Synthetic peptide; note = XENP021076 vlCDR3
QQSNEDPFT

SEQ ID NO: 30554 - protein, 226 aa, synthetic construct; identical to SEQ ID NO: 29134
  source 1..226: note = Description of Artificial Sequence: Synthetic polypeptide; note = XENP021077 7G8_H0_L0.4_Fab Heavy Chain

SEQ ID NO: 30555 - protein, 121 aa, synthetic construct; identical to SEQ ID NO: 17586
  source 1..121: note = Description of Artificial Sequence: Synthetic polypeptide; note = VH of XENP021077

SEQ ID NO: 30556 - protein, 5 aa, synthetic construct
  source 1..5: note = Description of Artificial Sequence: Synthetic peptide; note = XENP021077 vhCDR1
DAWMD

SEQ ID NO: 30557 - protein, 19 aa, synthetic construct
  source 1..19: note = Description of Artificial Sequence: Synthetic peptide; note = XENP021077 vhCDR2
EIRTKANNHATYYAESVKG

SEQ ID NO: 30558 - protein, 10 aa, synthetic construct
  source 1..10: note = Description of Artificial Sequence: Synthetic peptide; note = XENP021077 vhCDR3
LANWDWYFDV

SEQ ID NO: 30559 - protein, 218 aa, synthetic construct; identical to SEQ ID NO: 19730
  source 1..218: note = Description of Artificial Sequence: Synthetic polypeptide; note = XENP021077 7G8_H0_L0.4_Fab Light Chain

SEQ ID NO: 30560 - protein, 111 aa, synthetic construct; identical to SEQ ID NO: 19731
  source 1..111: note = Description of Artificial Sequence: Synthetic polypeptide; note = VL of XENP021077

SEQ ID NO: 30561 - protein, 15 aa, synthetic construct
  source 1..15: note = Description of Artificial Sequence: Synthetic peptide; note = XENP021077 vlCDR1
KASQSVSYDGDSYMN

SEQ ID NO: 30562 - protein, 7 aa, synthetic construct
  source 1..7: note = Description of Artificial Sequence: Synthetic peptide; note = XENP021077 vlCDR2
AASNLES

SEQ ID NO: 30563 - protein, 9 aa, synthetic construct
  source 1..9: note = Description of Artificial Sequence: Synthetic peptide; note = XENP021077 vlCDR3
QQSNEDPFT

SEQ ID NO: 30564 - protein, 226 aa, synthetic construct; identical to SEQ ID NO: 29134
  source 1..226: note = Description of Artificial Sequence: Synthetic polypeptide; note = XENP021078 7G8_H0_L0.5_Fab Heavy Chain

SEQ ID NO: 30565 - protein, 121 aa, synthetic construct; identical to SEQ ID NO: 17586
  source 1..121: note = Description of Artificial Sequence: Synthetic polypeptide; note = VH of XENP021078

SEQ ID NO: 30566 - protein, 5 aa, synthetic construct
  source 1..5: note = Description of Artificial Sequence: Synthetic peptide; note = XENP021078 vhCDR1
DAWMD

SEQ ID NO: 30567 - protein, 19 aa, synthetic construct
  source 1..19: note = Description of Artificial Sequence: Synthetic peptide; note = XENP021078 vhCDR2
EIRTKANNHATYYAESVKG

SEQ ID NO: 30568 - protein, 10 aa, synthetic construct
  source 1..10: note = Description of Artificial Sequence: Synthetic peptide; note = XENP021078 vhCDR3
LANWDWYFDV

SEQ ID NO: 30569 - protein, 218 aa, synthetic construct; identical to SEQ ID NO: 19740
  source 1..218: note = Description of Artificial Sequence: Synthetic polypeptide; note = XENP021078 7G8_H0_L0.5_Fab Light Chain

SEQ ID NO: 30570 - protein, 111 aa, synthetic construct; identical to SEQ ID NO: 19741
  source 1..111: note = Description of Artificial Sequence: Synthetic polypeptide; note = VL of XENP021078

SEQ ID NO: 30571 - protein, 15 aa, synthetic construct
  source 1..15: note = Description of Artificial Sequence: Synthetic peptide; note = XENP021078 vlCDR1
KASQSVRYDGDSYMN

SEQ ID NO: 30572 - protein, 7 aa, synthetic construct
  source 1..7: note = Description of Artificial Sequence: Synthetic peptide; note = XENP021078 vlCDR2
AASNLES

SEQ ID NO: 30573 - protein, 9 aa, synthetic construct
  source 1..9: note = Description of Artificial Sequence: Synthetic peptide; note = XENP021078 vlCDR3
QQSNEDPFT

SEQ ID NO: 30574 - protein, 226 aa, synthetic construct; identical to SEQ ID NO: 29134
  source 1..226: note = Description of Artificial Sequence: Synthetic polypeptide; note = XENP021079 7G8_H0_L0.6_Fab Heavy Chain

SEQ ID NO: 30575 - protein, 121 aa, synthetic construct; identical to SEQ ID NO: 17586
  source 1..121: note = Description of Artificial Sequence: Synthetic polypeptide; note = VH of XENP021079

SEQ ID NO: 30576 - protein, 5 aa, synthetic construct
  source 1..5: note = Description of Artificial Sequence: Synthetic peptide; note = XENP021079 vhCDR1
DAWMD

SEQ ID NO: 30577 - protein, 19 aa, synthetic construct
  source 1..19: note = Description of Artificial Sequence: Synthetic peptide; note = XENP021079 vhCDR2
EIRTKANNHATYYAESVKG

SEQ ID NO: 30578 - protein, 10 aa, synthetic construct
  source 1..10: note = Description of Artificial Sequence: Synthetic peptide; note = XENP021079 vhCDR3
LANWDWYFDV

SEQ ID NO: 30579 - protein, 218 aa, synthetic construct; identical to SEQ ID NO: 19750
  source 1..218: note = Description of Artificial Sequence: Synthetic polypeptide; note = XENP021079 7G8_H0_L0.6_Fab Light Chain

SEQ ID NO: 30580 - protein, 111 aa, synthetic construct; identical to SEQ ID NO: 19751
  source 1..111: note = Description of Artificial Sequence: Synthetic polypeptide; note = VL of XENP021079

SEQ ID NO: 30581 - protein, 15 aa, synthetic construct
  source 1..15: note = Description of Artificial Sequence: Synthetic peptide; note = XENP021079 vlCDR1
KASQSVLYDGDSYMN

SEQ ID NO: 30582 - protein, 7 aa, synthetic construct
  source 1..7: note = Description of Artificial Sequence: Synthetic peptide; note = XENP021079 vlCDR2
AASNLES

SEQ ID NO: 30583 - protein, 9 aa, synthetic construct
  source 1..9: note = Description of Artificial Sequence: Synthetic peptide; note = XENP021079 vlCDR3
QQSNEDPFT

SEQ ID NO: 30584 - protein, 226 aa, synthetic construct; identical to SEQ ID NO: 29134
  source 1..226: note = Description of Artificial Sequence: Synthetic polypeptide; note = XENP021080 7G8_H0_L0.7_Fab Heavy Chain

SEQ ID NO: 30585 - protein, 121 aa, synthetic construct; identical to SEQ ID NO: 17586
  source 1..121: note = Description of Artificial Sequence: Synthetic polypeptide; note = VH of XENP021080

SEQ ID NO: 30586 - protein, 5 aa, synthetic construct
  source 1..5: note = Description of Artificial Sequence: Synthetic peptide; note = XENP021080 vhCDR1
DAWMD

SEQ ID NO: 30587 - protein, 19 aa, synthetic construct
  source 1..19: note = Description of Artificial Sequence: Synthetic peptide; note = XENP021080 vhCDR2
EIRTKANNHATYYAESVKG

SEQ ID NO: 30588 - protein, 10 aa, synthetic construct
  source 1..10: note = Description of Artificial Sequence: Synthetic peptide; note = XENP021080 vhCDR3
LANWDWYFDV

SEQ ID NO: 30589 - protein, 218 aa, synthetic construct; identical to SEQ ID NO: 19760
  source 1..218: note = Description of Artificial Sequence: Synthetic polypeptide; note = XENP021080 7G8_H0_L0.7_Fab Light Chain

SEQ ID NO: 30590 - protein, 111 aa, synthetic construct; identical to SEQ ID NO: 19761
  source 1..111: note = Description of Artificial Sequence: Synthetic polypeptide; note = VL of XENP021080

SEQ ID NO: 30591 - protein, 15 aa, synthetic construct
  source 1..15: note = Description of Artificial Sequence: Synthetic peptide; note = XENP021080 vlCDR1
KASQSVTYDGDSYMN

SEQ ID NO: 30592 - protein, 7 aa, synthetic construct
  source 1..7: note = Description of Artificial Sequence: Synthetic peptide; note = XENP021080 vlCDR2
AASNLES

SEQ ID NO: 30593 - protein, 9 aa, synthetic construct
  source 1..9: note = Description of Artificial Sequence: Synthetic peptide; note = XENP021080 vlCDR3
QQSNEDPFT

SEQ ID NO: 30594 - protein, 226 aa, synthetic construct; identical to SEQ ID NO: 29134
  source 1..226: note = Description of Artificial Sequence: Synthetic polypeptide; note = XENP021081 7G8_H0_L0.8_Fab Heavy Chain

SEQ ID NO: 30595 - protein, 121 aa, synthetic construct; identical to SEQ ID NO: 17586
  source 1..121: note = Description of Artificial Sequence: Synthetic polypeptide; note = VH of XENP021081

SEQ ID NO: 30596 - protein, 5 aa, synthetic construct
  source 1..5: note = Description of Artificial Sequence: Synthetic peptide; note = XENP021081 vhCDR1
DAWMD

SEQ ID NO: 30597 - protein, 19 aa, synthetic construct
  source 1..19: note = Description of Artificial Sequence: Synthetic peptide; note = XENP021081 vhCDR2
EIRTKANNHATYYAESVKG

SEQ ID NO: 30598 - protein, 10 aa, synthetic construct
  source 1..10: note = Description of Artificial Sequence: Synthetic peptide; note = XENP021081 vhCDR3
LANWDWYFDV

SEQ ID NO: 30599 - protein, 218 aa, synthetic construct; identical to SEQ ID NO: 19770
  source 1..218: note = Description of Artificial Sequence: Synthetic polypeptide; note = XENP021081 7G8_H0_L0.8_Fab Light Chain

SEQ ID NO: 30600 - protein, 111 aa, synthetic construct; identical to SEQ ID NO: 19771
  source 1..111: note = Description of Artificial Sequence: Synthetic polypeptide; note = VL of XENP021081

SEQ ID NO: 30601 - protein, 15 aa, synthetic construct
  source 1..15: note = Description of Artificial Sequence: Synthetic peptide; note = XENP021081 vlCDR1
KASQSVGYDGDSYMN

SEQ ID NO: 30602 - protein, 7 aa, synthetic construct
  source 1..7: note = Description of Artificial Sequence: Synthetic peptide; note = XENP021081 vlCDR2
AASNLES

SEQ ID NO: 30603 - protein, 9 aa, synthetic construct
  source 1..9: note = Description of Artificial Sequence: Synthetic peptide; note = XENP021081 vlCDR3
QQSNEDPFT

SEQ ID NO: 30604 - protein, 226 aa, synthetic construct; identical to SEQ ID NO: 29134
  source 1..226: note = Description of Artificial Sequence: Synthetic polypeptide; note = XENP021082 7G8_H0_L0.9_Fab Heavy Chain

SEQ ID NO: 30605 - protein, 121 aa, synthetic construct; identical to SEQ ID NO: 17586
  source 1..121: note = Description of Artificial Sequence: Synthetic polypeptide; note = VH of XENP021082

SEQ ID NO: 30606 - protein, 5 aa, synthetic construct
  source 1..5: note = Description of Artificial Sequence: Synthetic peptide; note = XENP021082 vhCDR1
DAWMD

SEQ ID NO: 30607 - protein, 19 aa, synthetic construct
  source 1..19: note = Description of Artificial Sequence: Synthetic peptide; note = XENP021082 vhCDR2
EIRTKANNHATYYAESVKG

SEQ ID NO: 30608 - protein, 10 aa, synthetic construct
  source 1..10: note = Description of Artificial Sequence: Synthetic peptide; note = XENP021082 vhCDR3
LANWDWYFDV

SEQ ID NO: 30609 - protein, 218 aa, synthetic construct; identical to SEQ ID NO: 19780
  source 1..218: note = Description of Artificial Sequence: Synthetic polypeptide; note = XENP021082 7G8_H0_L0.9_Fab Light Chain

SEQ ID NO: 30610 - protein, 111 aa, synthetic construct; identical to SEQ ID NO: 19781
  source 1..111: note = Description of Artificial Sequence: Synthetic polypeptide; note = VL of XENP021082

SEQ ID NO: 30611 - protein, 15 aa, synthetic construct
  source 1..15: note = Description of Artificial Sequence: Synthetic peptide; note = XENP021082 vlCDR1
KASQSVYYDGDSYMN

SEQ ID NO: 30612 - protein, 7 aa, synthetic construct
  source 1..7: note = Description of Artificial Sequence: Synthetic peptide; note = XENP021082 vlCDR2
AASNLES

SEQ ID NO: 30613 - protein, 9 aa, synthetic construct
  source 1..9: note = Description of Artificial Sequence: Synthetic peptide; note = XENP021082 vlCDR3
QQSNEDPFT

SEQ ID NO: 30614 - protein, 226 aa, synthetic construct; identical to SEQ ID NO: 29134
  source 1..226: note = Description of Artificial Sequence: Synthetic polypeptide; note = XENP021083 7G8_H0_L0.10_Fab Heavy Chain

SEQ ID NO: 30615 - protein, 121 aa, synthetic construct; identical to SEQ ID NO: 17586
  source 1..121: note = Description of Artificial Sequence: Synthetic polypeptide; note = VH of XENP021083

SEQ ID NO: 30616 - protein, 5 aa, synthetic construct
  source 1..5: note = Description of Artificial Sequence: Synthetic peptide; note = XENP021083 vhCDR1
DAWMD

SEQ ID NO: 30617 - protein, 19 aa, synthetic construct
  source 1..19: note = Description of Artificial Sequence: Synthetic peptide; note = XENP021083 vhCDR2
EIRTKANNHATYYAESVKG

SEQ ID NO: 30618 - protein, 10 aa, synthetic construct
  source 1..10: note = Description of Artificial Sequence: Synthetic peptide; note = XENP021083 vhCDR3
LANWDWYFDV

SEQ ID NO: 30619 - protein, 218 aa, synthetic construct; identical to SEQ ID NO: 19790
  source 1..218: note = Description of Artificial Sequence: Synthetic polypeptide; note = XENP021083 7G8_H0_L0.10_Fab Light Chain

SEQ ID NO: 30620 - protein, 111 aa, synthetic construct; identical to SEQ ID NO: 19791
  source 1..111: note = Description of Artificial Sequence: Synthetic polypeptide; note = VL of XENP021083

SEQ ID NO: 30621 - protein, 15 aa, synthetic construct
  source 1..15: note = Description of Artificial Sequence: Synthetic peptide; note = XENP021083 vlCDR1
KASQSVDFDGDSYMN

SEQ ID NO: 30622 - protein, 7 aa, synthetic construct
  source 1..7: note = Description of Artificial Sequence: Synthetic peptide; note = XENP021083 vlCDR2
AASNLES

SEQ ID NO: 30623 - protein, 9 aa, synthetic construct
  source 1..9: note = Description of Artificial Sequence: Synthetic peptide; note = XENP021083 vlCDR3
QQSNEDPFT

SEQ ID NO: 30624 - protein, 226 aa, synthetic construct; identical to SEQ ID NO: 29134
  source 1..226: note = Description of Artificial Sequence: Synthetic polypeptide; note = XENP021084 7G8_H0_L0.11_Fab Heavy Chain

SEQ ID NO: 30625 - protein, 121 aa, synthetic construct; identical to SEQ ID NO: 17586
  source 1..121: note = Description of Artificial Sequence: Synthetic polypeptide; note = VH of XENP021084

SEQ ID NO: 30626 - protein, 5 aa, synthetic construct
  source 1..5: note = Description of Artificial Sequence: Synthetic peptide; note = XENP021084 vhCDR1
DAWMD

SEQ ID NO: 30627 - protein, 19 aa, synthetic construct
  source 1..19: note = Description of Artificial Sequence: Synthetic peptide; note = XENP021084 vhCDR2
EIRTKANNHATYYAESVKG

SEQ ID NO: 30628 - protein, 10 aa, synthetic construct
  source 1..10: note = Description of Artificial Sequence: Synthetic peptide; note = XENP021084 vhCDR3
LANWDWYFDV

SEQ ID NO: 30629 - protein, 218 aa, synthetic construct; identical to SEQ ID NO: 19800
  source 1..218: note = Description of Artificial Sequence: Synthetic polypeptide; note = XENP021084 7G8_H0_L0.11_Fab Light Chain

SEQ ID NO: 30630 - protein, 111 aa, synthetic construct; identical to SEQ ID NO: 19801
  source 1..111: note = Description of Artificial Sequence: Synthetic polypeptide; note = VL of XENP021084

SEQ ID NO: 30631 - protein, 15 aa, synthetic construct
  source 1..15: note = Description of Artificial Sequence: Synthetic peptide; note = XENP021084 vlCDR1
KASQSVDHDGDSYMN

SEQ ID NO: 30632 - protein, 7 aa, synthetic construct
  source 1..7: note = Description of Artificial Sequence: Synthetic peptide; note = XENP021084 vlCDR2
AASNLES

SEQ ID NO: 30633 - protein, 9 aa, synthetic construct
  source 1..9: note = Description of Artificial Sequence: Synthetic peptide; note = XENP021084 vlCDR3
QQSNEDPFT

SEQ ID NO: 30634 - protein, 226 aa, synthetic construct; identical to SEQ ID NO: 29134
  source 1..226: note = Description of Artificial Sequence: Synthetic polypeptide; note = XENP021085 7G8_H0_L0.12_Fab Heavy Chain

SEQ ID NO: 30635 - protein, 121 aa, synthetic construct; identical to SEQ ID NO: 17586
  source 1..121: note = Description of Artificial Sequence: Synthetic polypeptide; note = VH of XENP021085

SEQ ID NO: 30636 - protein, 5 aa, synthetic construct
  source 1..5: note = Description of Artificial Sequence: Synthetic peptide; note = XENP021085 vhCDR1
DAWMD

SEQ ID NO: 30637 - protein, 19 aa, synthetic construct
  source 1..19: note = Description of Artificial Sequence: Synthetic peptide; note = XENP021085 vhCDR2
EIRTKANNHATYYAESVKG

SEQ ID NO: 30638 - protein, 10 aa, synthetic construct
  source 1..10: note = Description of Artificial Sequence: Synthetic peptide; note = XENP021085 vhCDR3
LANWDWYFDV

SEQ ID NO: 30639 - protein, 218 aa, synthetic construct; identical to SEQ ID NO: 19810
  source 1..218: note = Description of Artificial Sequence: Synthetic polypeptide; note = XENP021085 7G8_H0_L0.12_Fab Light Chain

SEQ ID NO: 30640 - protein, 111 aa, synthetic construct; identical to SEQ ID NO: 19811
  source 1..111: note = Description of Artificial Sequence: Synthetic polypeptide; note = VL of XENP021085

SEQ ID NO: 30641 - protein, 15 aa, synthetic construct
  source 1..15: note = Description of Artificial Sequence: Synthetic peptide; note = XENP021085 vlCDR1
KASQSVDLDGDSYMN

SEQ ID NO: 30642 - protein, 7 aa, synthetic construct
  source 1..7: note = Description of Artificial Sequence: Synthetic peptide; note = XENP021085 vlCDR2
AASNLES

SEQ ID NO: 30643 - protein, 9 aa, synthetic construct
  source 1..9: note = Description of Artificial Sequence: Synthetic peptide; note = XENP021085 vlCDR3
QQSNEDPFT

SEQ ID NO: 30644 - protein, 226 aa, synthetic construct; identical to SEQ ID NO: 29134
  source 1..226: note = Description of Artificial Sequence: Synthetic polypeptide; note = XENP021086 7G8_H0_L0.13_Fab Heavy Chain

SEQ ID NO: 30645 - protein, 121 aa, synthetic construct; identical to SEQ ID NO: 17586
  source 1..121: note = Description of Artificial Sequence: Synthetic polypeptide; note = VH of XENP021086

SEQ ID NO: 30646 - protein, 5 aa, synthetic construct
  source 1..5: note = Description of Artificial Sequence: Synthetic peptide; note = XENP021086 vhCDR1
DAWMD

SEQ ID NO: 30647 - protein, 19 aa, synthetic construct
  source 1..19: note = Description of Artificial Sequence: Synthetic peptide; note = XENP021086 vhCDR2
EIRTKANNHATYYAESVKG

SEQ ID NO: 30648 - protein, 10 aa, synthetic construct
  source 1..10: note = Description of Artificial Sequence: Synthetic peptide; note = XENP021086 vhCDR3
LANWDWYFDV

SEQ ID NO: 30649 - protein, 218 aa, synthetic construct; identical to SEQ ID NO: 19820
  source 1..218: note = Description of Artificial Sequence: Synthetic polypeptide; note = XENP021086 7G8_H0_L0.13_Fab Light Chain

SEQ ID NO: 30650 - protein, 111 aa, synthetic construct; identical to SEQ ID NO: 19821
  source 1..111: note = Description of Artificial Sequence: Synthetic polypeptide; note = VL of XENP021086

SEQ ID NO: 30651 - protein, 15 aa, synthetic construct
  source 1..15: note = Description of Artificial Sequence: Synthetic peptide; note = XENP021086 vlCDR1
KASQSVDWDGDSYMN

SEQ ID NO: 30652 - protein, 7 aa, synthetic construct
  source 1..7: note = Description of Artificial Sequence: Synthetic peptide; note = XENP021086 vlCDR2
AASNLES

SEQ ID NO: 30653 - protein, 9 aa, synthetic construct
  source 1..9: note = Description of Artificial Sequence: Synthetic peptide; note = XENP021086 vlCDR3
QQSNEDPFT

SEQ ID NO: 30654 - protein, 226 aa, synthetic construct; identical to SEQ ID NO: 29134
  source 1..226: note = Description of Artificial Sequence: Synthetic polypeptide; note = XENP021087 7G8_H0_L0.14_Fab Heavy Chain

SEQ ID NO: 30655 - protein, 121 aa, synthetic construct; identical to SEQ ID NO: 17586
  source 1..121: note = Description of Artificial Sequence: Synthetic polypeptide; note = VH of XENP021087

SEQ ID NO: 30656 - protein, 5 aa, synthetic construct
  source 1..5: note = Description of Artificial Sequence: Synthetic peptide; note = XENP021087 vhCDR1
DAWMD

SEQ ID NO: 30657 - protein, 19 aa, synthetic construct
  source 1..19: note = Description of Artificial Sequence: Synthetic peptide; note = XENP021087 vhCDR2
EIRTKANNHATYYAESVKG

SEQ ID NO: 30658 - protein, 10 aa, synthetic construct
  source 1..10: note = Description of Artificial Sequence: Synthetic peptide; note = XENP021087 vhCDR3
LANWDWYFDV

SEQ ID NO: 30659 - protein, 218 aa, synthetic construct; identical to SEQ ID NO: 19830
  source 1..218: note = Description of Artificial Sequence: Synthetic polypeptide; note = XENP021087 7G8_H0_L0.14_Fab Light Chain

SEQ ID NO: 30660 - protein, 111 aa, synthetic construct; identical to SEQ ID NO: 19831
  source 1..111: note = Description of Artificial Sequence: Synthetic polypeptide; note = VL of XENP021087

SEQ ID NO: 30661 - protein, 15 aa, synthetic construct
  source 1..15: note = Description of Artificial Sequence: Synthetic peptide; note = XENP021087 vlCDR1
KASQSVDVDGDSYMN

SEQ ID NO: 30662 - protein, 7 aa, synthetic construct
  source 1..7: note = Description of Artificial Sequence: Synthetic peptide; note = XENP021087 vlCDR2
AASNLES

SEQ ID NO: 30663 - protein, 9 aa, synthetic construct
  source 1..9: note = Description of Artificial Sequence: Synthetic peptide; note = XENP021087 vlCDR3
QQSNEDPFT

SEQ ID NO: 30664 - protein, 226 aa, synthetic construct; identical to SEQ ID NO: 29134
  source 1..226: note = Description of Artificial Sequence: Synthetic polypeptide; note = XENP021088 7G8_H0_L0.15_Fab Heavy Chain

SEQ ID NO: 30665 - protein, 121 aa, synthetic construct; identical to SEQ ID NO: 17586
  source 1..121: note = Description of Artificial Sequence: Synthetic polypeptide; note = VH of XENP021088

SEQ ID NO: 30666 - protein, 5 aa, synthetic construct
  source 1..5: note = Description of Artificial Sequence: Synthetic peptide; note = XENP021088 vhCDR1
DAWMD

SEQ ID NO: 30667 - protein, 19 aa, synthetic construct
  source 1..19: note = Description of Artificial Sequence: Synthetic peptide; note = XENP021088 vhCDR2
EIRTKANNHATYYAESVKG

SEQ ID NO: 30668 - protein, 10 aa, synthetic construct
  source 1..10: note = Description of Artificial Sequence: Synthetic peptide; note = XENP021088 vhCDR3
LANWDWYFDV

SEQ ID NO: 30669 - protein, 218 aa, synthetic construct; identical to SEQ ID NO: 19840
  source 1..218: note = Description of Artificial Sequence: Synthetic polypeptide; note = XENP021088 7G8_H0_L0.15_Fab Light Chain

SEQ ID NO: 30670 - protein, 111 aa, synthetic construct; identical to SEQ ID NO: 19841
  source 1..111: note = Description of Artificial Sequence: Synthetic polypeptide; note = VL of XENP021088

SEQ ID NO: 30671 - protein, 15 aa, synthetic construct
  source 1..15: note = Description of Artificial Sequence: Synthetic peptide; note = XENP021088 vlCDR1
KASQSVDADGDSYMN

SEQ ID NO: 30672 - protein, 7 aa, synthetic construct
  source 1..7: note = Description of Artificial Sequence: Synthetic peptide; note = XENP021088 vlCDR2
AASNLES

SEQ ID NO: 30673 - protein, 9 aa, synthetic construct
  source 1..9: note = Description of Artificial Sequence: Synthetic peptide; note = XENP021088 vlCDR3
QQSNEDPFT

SEQ ID NO: 30674 - protein, 226 aa, synthetic construct; identical to SEQ ID NO: 29134
  source 1..226: note = Description of Artificial Sequence: Synthetic polypeptide; note = XENP021089 7G8_H0_L0.16_Fab Heavy Chain

SEQ ID NO: 30675 - protein, 121 aa, synthetic construct; identical to SEQ ID NO: 17586
  source 1..121: note = Description of Artificial Sequence: Synthetic polypeptide; note = VH of XENP021089

SEQ ID NO: 30676 - protein, 5 aa, synthetic construct
  source 1..5: note = Description of Artificial Sequence: Synthetic peptide; note = XENP021089 vhCDR1
DAWMD

SEQ ID NO: 30677 - protein, 19 aa, synthetic construct
  source 1..19: note = Description of Artificial Sequence: Synthetic peptide; note = XENP021089 vhCDR2
EIRTKANNHATYYAESVKG

SEQ ID NO: 30678 - protein, 10 aa, synthetic construct
  source 1..10: note = Description of Artificial Sequence: Synthetic peptide; note = XENP021089 vhCDR3
LANWDWYFDV

SEQ ID NO: 30679 - protein, 218 aa, synthetic construct; identical to SEQ ID NO: 19850
  source 1..218: note = Description of Artificial Sequence: Synthetic polypeptide; note = XENP021089 7G8_H0_L0.16_Fab Light Chain

SEQ ID NO: 30680 - protein, 111 aa, synthetic construct; identical to SEQ ID NO: 19851
  source 1..111: note = Description of Artificial Sequence: Synthetic polypeptide; note = VL of XENP021089

SEQ ID NO: 30681 - protein, 15 aa, synthetic construct
  source 1..15: note = Description of Artificial Sequence: Synthetic peptide; note = XENP021089 vlCDR1
KASQSVDQDGDSYMN

SEQ ID NO: 30682 - protein, 7 aa, synthetic construct
  source 1..7: note = Description of Artificial Sequence: Synthetic peptide; note = XENP021089 vlCDR2
AASNLES

SEQ ID NO: 30683 - protein, 9 aa, synthetic construct
  source 1..9: note = Description of Artificial Sequence: Synthetic peptide; note = XENP021089 vlCDR3
QQSNEDPFT

SEQ ID NO: 30684 - protein, 226 aa, synthetic construct; identical to SEQ ID NO: 29134
  source 1..226: note = Description of Artificial Sequence: Synthetic polypeptide; note = XENP021090 7G8_H0_L0.17_Fab Heavy Chain

SEQ ID NO: 30685 - protein, 121 aa, synthetic construct; identical to SEQ ID NO: 17586
  source 1..121: note = Description of Artificial Sequence: Synthetic polypeptide; note = VH of XENP021090

SEQ ID NO: 30686 - protein, 5 aa, synthetic construct
  source 1..5: note = Description of Artificial Sequence: Synthetic peptide; note = XENP021090 vhCDR1
DAWMD

SEQ ID NO: 30687 - protein, 19 aa, synthetic construct
  source 1..19: note = Description of Artificial Sequence: Synthetic peptide; note = XENP021090 vhCDR2
EIRTKANNHATYYAESVKG

SEQ ID NO: 30688 - protein, 10 aa, synthetic construct
  source 1..10: note = Description of Artificial Sequence: Synthetic peptide; note = XENP021090 vhCDR3
LANWDWYFDV

SEQ ID NO: 30689 - protein, 218 aa, synthetic construct; identical to SEQ ID NO: 19860
  source 1..218: note = Description of Artificial Sequence: Synthetic polypeptide; note = XENP021090 7G8_H0_L0.17_Fab Light Chain

SEQ ID NO: 30690 - protein, 111 aa, synthetic construct; identical to SEQ ID NO: 19861
  source 1..111: note = Description of Artificial Sequence: Synthetic polypeptide; note = VL of XENP021090

SEQ ID NO: 30691 - protein, 15 aa, synthetic construct
  source 1..15: note = Description of Artificial Sequence: Synthetic peptide; note = XENP021090 vlCDR1
KASQSVDDDGDSYMN

SEQ ID NO: 30692 - protein, 7 aa, synthetic construct
  source 1..7: note = Description of Artificial Sequence: Synthetic peptide; note = XENP021090 vlCDR2
AASNLES

SEQ ID NO: 30693 - protein, 9 aa, synthetic construct
  source 1..9: note = Description of Artificial Sequence: Synthetic peptide; note = XENP021090 vlCDR3
QQSNEDPFT

SEQ ID NO: 30694 - protein, 226 aa, synthetic construct; identical to SEQ ID NO: 29134
  source 1..226: note = Description of Artificial Sequence: Synthetic polypeptide; note = XENP021091 7G8_H0_L0.18_Fab Heavy Chain

SEQ ID NO: 30695 - protein, 121 aa, synthetic construct; identical to SEQ ID NO: 17586
  source 1..121: note = Description of Artificial Sequence: Synthetic polypeptide; note = VH of XENP021091

SEQ ID NO: 30696 - protein, 5 aa, synthetic construct
  source 1..5: note = Description of Artificial Sequence: Synthetic peptide; note = XENP021091 vhCDR1
DAWMD

SEQ ID NO: 30697 - protein, 19 aa, synthetic construct
  source 1..19: note = Description of Artificial Sequence: Synthetic peptide; note = XENP021091 vhCDR2
EIRTKANNHATYYAESVKG

SEQ ID NO: 30698 - protein, 10 aa, synthetic construct
  source 1..10: note = Description of Artificial Sequence: Synthetic peptide; note = XENP021091 vhCDR3
LANWDWYFDV

SEQ ID NO: 30699 - protein, 218 aa, synthetic construct; identical to SEQ ID NO: 19870
  source 1..218: note = Description of Artificial Sequence: Synthetic polypeptide; note = XENP021091 7G8_H0_L0.18_Fab Light Chain

SEQ ID NO: 30700 - protein, 111 aa, synthetic construct; identical to SEQ ID NO: 19871
  source 1..111: note = Description of Artificial Sequence: Synthetic polypeptide; note = VL of XENP021091

SEQ ID NO: 30701 - protein, 15 aa, synthetic construct
  source 1..15: note = Description of Artificial Sequence: Synthetic peptide; note = XENP021091 vlCDR1
KASQSVDKDGDSYMN

SEQ ID NO: 30702 - protein, 7 aa, synthetic construct
  source 1..7: note = Description of Artificial Sequence: Synthetic peptide; note = XENP021091 vlCDR2
AASNLES

SEQ ID NO: 30703 - protein, 9 aa, synthetic construct
  source 1..9: note = Description of Artificial Sequence: Synthetic peptide; note = XENP021091 vlCDR3
QQSNEDPFT

SEQ ID NO: 30704 - protein, 226 aa, synthetic construct; identical to SEQ ID NO: 29134
  source 1..226: note = Description of Artificial Sequence: Synthetic polypeptide; note = XENP021092 7G8_H0_L0.19_Fab Heavy Chain

SEQ ID NO: 30705 - protein, 121 aa, synthetic construct; identical to SEQ ID NO: 17586
  source 1..121: note = Description of Artificial Sequence: Synthetic polypeptide; note = VH of XENP021092

SEQ ID NO: 30706 - protein, 5 aa, synthetic construct
  source 1..5: note = Description of Artificial Sequence: Synthetic peptide; note = XENP021092 vhCDR1
DAWMD

SEQ ID NO: 30707 - protein, 19 aa, synthetic construct
  source 1..19: note = Description of Artificial Sequence: Synthetic peptide; note = XENP021092 vhCDR2
EIRTKANNHATYYAESVKG

SEQ ID NO: 30708 - protein, 10 aa, synthetic construct
  source 1..10: note = Description of Artificial Sequence: Synthetic peptide; note = XENP021092 vhCDR3
LANWDWYFDV

SEQ ID NO: 30709 - protein, 218 aa, synthetic construct; identical to SEQ ID NO: 19880
  source 1..218: note = Description of Artificial Sequence: Synthetic polypeptide; note = XENP021092 7G8_H0_L0.19_Fab Light Chain

SEQ ID NO: 30710 - protein, 111 aa, synthetic construct; identical to SEQ ID NO: 19881
  source 1..111: note = Description of Artificial Sequence: Synthetic polypeptide; note = VL of XENP021092

SEQ ID NO: 30711 - protein, 15 aa, synthetic construct
  source 1..15: note = Description of Artificial Sequence: Synthetic peptide; note = XENP021092 vlCDR1
KASQSVDNDGDSYMN

SEQ ID NO: 30712 - protein, 7 aa, synthetic construct
  source 1..7: note = Description of Artificial Sequence: Synthetic peptide; note = XENP021092 vlCDR2
AASNLES

SEQ ID NO: 30713 - protein, 9 aa, synthetic construct
  source 1..9: note = Description of Artificial Sequence: Synthetic peptide; note = XENP021092 vlCDR3
QQSNEDPFT

SEQ ID NO: 30714 - protein, 226 aa, synthetic construct; identical to SEQ ID NO: 29134
  source 1..226: note = Description of Artificial Sequence: Synthetic polypeptide; note = XENP021093 7G8_H0_L0.20_Fab Heavy Chain

SEQ ID NO: 30715 - protein, 121 aa, synthetic construct; identical to SEQ ID NO: 17586
  source 1..121: note = Description of Artificial Sequence: Synthetic polypeptide; note = VH of XENP021093

SEQ ID NO: 30716 - protein, 5 aa, synthetic construct
  source 1..5: note = Description of Artificial Sequence: Synthetic peptide; note = XENP021093 vhCDR1
DAWMD

SEQ ID NO: 30717 - protein, 19 aa, synthetic construct
  source 1..19: note = Description of Artificial Sequence: Synthetic peptide; note = XENP021093 vhCDR2
EIRTKANNHATYYAESVKG

SEQ ID NO: 30718 - protein, 10 aa, synthetic construct
  source 1..10: note = Description of Artificial Sequence: Synthetic peptide; note = XENP021093 vhCDR3
LANWDWYFDV

SEQ ID NO: 30719 - protein, 218 aa, synthetic construct; identical to SEQ ID NO: 19890
  source 1..218: note = Description of Artificial Sequence: Synthetic polypeptide; note = XENP021093 7G8_H0_L0.20_Fab Light Chain

SEQ ID NO: 30720 - protein, 111 aa, synthetic construct; identical to SEQ ID NO: 19891
  source 1..111: note = Description of Artificial Sequence: Synthetic polypeptide; note = VL of XENP021093

SEQ ID NO: 30721 - protein, 15 aa, synthetic construct
  source 1..15: note = Description of Artificial Sequence: Synthetic peptide; note = XENP021093 vlCDR1
KASQSVDYNGDSYMN

SEQ ID NO: 30722 - protein, 7 aa, synthetic construct
  source 1..7: note = Description of Artificial Sequence: Synthetic peptide; note = XENP021093 vlCDR2
AASNLES

SEQ ID NO: 30723 - protein, 9 aa, synthetic construct
  source 1..9: note = Description of Artificial Sequence: Synthetic peptide; note = XENP021093 vlCDR3
QQSNEDPFT

SEQ ID NO: 30724 - protein, 226 aa, synthetic construct; identical to SEQ ID NO: 29134
  source 1..226: note = Description of Artificial Sequence: Synthetic polypeptide; note = XENP021094 7G8_H0_L0.21_Fab Heavy Chain

SEQ ID NO: 30725 - protein, 121 aa, synthetic construct; identical to SEQ ID NO: 17586
  source 1..121: note = Description of Artificial Sequence: Synthetic polypeptide; note = VH of XENP021094

SEQ ID NO: 30726 - protein, 5 aa, synthetic construct
  source 1..5: note = Description of Artificial Sequence: Synthetic peptide; note = XENP021094 vhCDR1
DAWMD

SEQ ID NO: 30727 - protein, 19 aa, synthetic construct
  source 1..19: note = Description of Artificial Sequence: Synthetic peptide; note = XENP021094 vhCDR2
EIRTKANNHATYYAESVKG

SEQ ID NO: 30728 - protein, 10 aa, synthetic construct
  source 1..10: note = Description of Artificial Sequence: Synthetic peptide; note = XENP021094 vhCDR3
LANWDWYFDV

SEQ ID NO: 30729 - protein, 218 aa, synthetic construct; identical to SEQ ID NO: 19900
  source 1..218: note = Description of Artificial Sequence: Synthetic polypeptide; note = XENP021094 7G8_H0_L0.21_Fab Light Chain

SEQ ID NO: 30730 - protein, 111 aa, synthetic construct; identical to SEQ ID NO: 19901
  source 1..111: note = Description of Artificial Sequence: Synthetic polypeptide; note = VL of XENP021094

SEQ ID NO: 30731 - protein, 15 aa, synthetic construct
  source 1..15: note = Description of Artificial Sequence: Synthetic peptide; note = XENP021094 vlCDR1
KASQSVDYEGDSYMN

SEQ ID NO: 30732 - protein, 7 aa, synthetic construct
  source 1..7: note = Description of Artificial Sequence: Synthetic peptide; note = XENP021094 vlCDR2
AASNLES

SEQ ID NO: 30733 - protein, 9 aa, synthetic construct
  source 1..9: note = Description of Artificial Sequence: Synthetic peptide; note = XENP021094 vlCDR3
QQSNEDPFT

SEQ ID NO: 30734 - protein, 226 aa, synthetic construct; identical to SEQ ID NO: 29134
  source 1..226: note = Description of Artificial Sequence: Synthetic polypeptide; note = XENP021095 7G8_H0_L0.22_Fab Heavy Chain

SEQ ID NO: 30735 - protein, 121 aa, synthetic construct; identical to SEQ ID NO: 17586
  source 1..121: note = Description of Artificial Sequence: Synthetic polypeptide; note = VH of XENP021095

SEQ ID NO: 30736 - protein, 5 aa, synthetic construct
  source 1..5: note = Description of Artificial Sequence: Synthetic peptide; note = XENP021095 vhCDR1
DAWMD

SEQ ID NO: 30737 - protein, 19 aa, synthetic construct
  source 1..19: note = Description of Artificial Sequence: Synthetic peptide; note = XENP021095 vhCDR2
EIRTKANNHATYYAESVKG

SEQ ID NO: 30738 - protein, 10 aa, synthetic construct
  source 1..10: note = Description of Artificial Sequence: Synthetic peptide; note = XENP021095 vhCDR3
LANWDWYFDV

SEQ ID NO: 30739 - protein, 218 aa, synthetic construct; identical to SEQ ID NO: 19910
  source 1..218: note = Description of Artificial Sequence: Synthetic polypeptide; note = XENP021095 7G8_H0_L0.22_Fab Light Chain

SEQ ID NO: 30740 - protein, 111 aa, synthetic construct; identical to SEQ ID NO: 19911
  source 1..111: note = Description of Artificial Sequence: Synthetic polypeptide; note = VL of XENP021095

SEQ ID NO: 30741 - protein, 15 aa, synthetic construct
  source 1..15: note = Description of Artificial Sequence: Synthetic peptide; note = XENP021095 vlCDR1
KASQSVDYHGDSYMN

SEQ ID NO: 30742 - protein, 7 aa, synthetic construct
  source 1..7: note = Description of Artificial Sequence: Synthetic peptide; note = XENP021095 vlCDR2
AASNLES

SEQ ID NO: 30743 - protein, 9 aa, synthetic construct
  source 1..9: note = Description of Artificial Sequence: Synthetic peptide; note = XENP021095 vlCDR3
QQSNEDPFT

SEQ ID NO: 30744 - protein, 226 aa, synthetic construct; identical to SEQ ID NO: 29134
  source 1..226: note = Description of Artificial Sequence: Synthetic polypeptide; note = XENP021096 7G8_H0_L0.23_Fab Heavy Chain

SEQ ID NO: 30745 - protein, 121 aa, synthetic construct; identical to SEQ ID NO: 17586
  source 1..121: note = Description of Artificial Sequence: Synthetic polypeptide; note = VH of XENP021096

SEQ ID NO: 30746 - protein, 5 aa, synthetic construct
  source 1..5: note = Description of Artificial Sequence: Synthetic peptide; note = XENP021096 vhCDR1
DAWMD

SEQ ID NO: 30747 - protein, 19 aa, synthetic construct
  source 1..19: note = Description of Artificial Sequence: Synthetic peptide; note = XENP021096 vhCDR2
EIRTKANNHATYYAESVKG

SEQ ID NO: 30748 - protein, 10 aa, synthetic construct
  source 1..10: note = Description of Artificial Sequence: Synthetic peptide; note = XENP021096 vhCDR3
LANWDWYFDV

SEQ ID NO: 30749 - protein, 218 aa, synthetic construct; identical to SEQ ID NO: 19920
  source 1..218: note = Description of Artificial Sequence: Synthetic polypeptide; note = XENP021096 7G8_H0_L0.23_Fab Light Chain

SEQ ID NO: 30750 - protein, 111 aa, synthetic construct; identical to SEQ ID NO: 19921
  source 1..111: note = Description of Artificial Sequence: Synthetic polypeptide; note = VL of XENP021096

SEQ ID NO: 30751 - protein, 15 aa, synthetic construct
  source 1..15: note = Description of Artificial Sequence: Synthetic peptide; note = XENP021096 vlCDR1
KASQSVDYSGDSYMN

SEQ ID NO: 30752 - protein, 7 aa, synthetic construct
  source 1..7: note = Description of Artificial Sequence: Synthetic peptide; note = XENP021096 vlCDR2
AASNLES

SEQ ID NO: 30753 - protein, 9 aa, synthetic construct
  source 1..9: note = Description of Artificial Sequence: Synthetic peptide; note = XENP021096 vlCDR3
QQSNEDPFT

SEQ ID NO: 30754 - protein, 226 aa, synthetic construct; identical to SEQ ID NO: 29134
  source 1..226: note = Description of Artificial Sequence: Synthetic polypeptide; note = XENP021101 7G8_H0_L0.24_Fab Heavy Chain

SEQ ID NO: 30755 - protein, 121 aa, synthetic construct; identical to SEQ ID NO: 17586
  source 1..121: note = Description of Artificial Sequence: Synthetic polypeptide; note = VH of XENP021101

SEQ ID NO: 30756 - protein, 5 aa, synthetic construct
  source 1..5: note = Description of Artificial Sequence: Synthetic peptide; note = XENP021101 vhCDR1
DAWMD

SEQ ID NO: 30757 - protein, 19 aa, synthetic construct
  source 1..19: note = Description of Artificial Sequence: Synthetic peptide; note = XENP021101 vhCDR2
EIRTKANNHATYYAESVKG

SEQ ID NO: 30758 - protein, 10 aa, synthetic construct
  source 1..10: note = Description of Artificial Sequence: Synthetic peptide; note = XENP021101 vhCDR3
LANWDWYFDV

SEQ ID NO: 30759 - protein, 218 aa, synthetic construct; identical to SEQ ID NO: 19930
  source 1..218: note = Description of Artificial Sequence: Synthetic polypeptide; note = XENP021101 7G8_H0_L0.24_Fab Light Chain

SEQ ID NO: 30760 - protein, 111 aa, synthetic construct; identical to SEQ ID NO: 19931
  source 1..111: note = Description of Artificial Sequence: Synthetic polypeptide; note = VL of XENP021101

SEQ ID NO: 30761 - protein, 15 aa, synthetic construct
  source 1..15: note = Description of Artificial Sequence: Synthetic peptide; note = XENP021101 vlCDR1
KASQSVDYRGDSYMN

SEQ ID NO: 30762 - protein, 7 aa, synthetic construct
  source 1..7: note = Description of Artificial Sequence: Synthetic peptide; note = XENP021101 vlCDR2
AASNLES

SEQ ID NO: 30763 - protein, 9 aa, synthetic construct
  source 1..9: note = Description of Artificial Sequence: Synthetic peptide; note = XENP021101 vlCDR3
QQSNEDPFT

SEQ ID NO: 30764 - protein, 226 aa, synthetic construct; identical to SEQ ID NO: 29134
  source 1..226: note = Description of Artificial Sequence: Synthetic polypeptide; note = XENP021102 7G8_H0_L0.25_Fab Heavy Chain

SEQ ID NO: 30765 - protein, 121 aa, synthetic construct; identical to SEQ ID NO: 17586
  source 1..121: note = Description of Artificial Sequence: Synthetic polypeptide; note = VH of XENP021102

SEQ ID NO: 30766 - protein, 5 aa, synthetic construct
  source 1..5: note = Description of Artificial Sequence: Synthetic peptide; note = XENP021102 vhCDR1
DAWMD

SEQ ID NO: 30767 - protein, 19 aa, synthetic construct
  source 1..19: note = Description of Artificial Sequence: Synthetic peptide; note = XENP021102 vhCDR2
EIRTKANNHATYYAESVKG

SEQ ID NO: 30768 - protein, 10 aa, synthetic construct
  source 1..10: note = Description of Artificial Sequence: Synthetic peptide; note = XENP021102 vhCDR3
LANWDWYFDV

SEQ ID NO: 30769 - protein, 218 aa, synthetic construct; identical to SEQ ID NO: 19940
  source 1..218: note = Description of Artificial Sequence: Synthetic polypeptide; note = XENP021102 7G8_H0_L0.25_Fab Light Chain

SEQ ID NO: 30770 - protein, 111 aa, synthetic construct; identical to SEQ ID NO: 19941
  source 1..111: note = Description of Artificial Sequence: Synthetic polypeptide; note = VL of XENP021102

SEQ ID NO: 30771 - protein, 15 aa, synthetic construct
  source 1..15: note = Description of Artificial Sequence: Synthetic peptide; note = XENP021102 vlCDR1
KASQSVDYLGDSYMN

SEQ ID NO: 30772 - protein, 7 aa, synthetic construct
  source 1..7: note = Description of Artificial Sequence: Synthetic peptide; note = XENP021102 vlCDR2
AASNLES

SEQ ID NO: 30773 - protein, 9 aa, synthetic construct
  source 1..9: note = Description of Artificial Sequence: Synthetic peptide; note = XENP021102 vlCDR3
QQSNEDPFT

SEQ ID NO: 30774 - protein, 226 aa, synthetic construct; identical to SEQ ID NO: 29134
  source 1..226: note = Description of Artificial Sequence: Synthetic polypeptide; note = XENP021103 7G8_H0_L0.26_Fab Heavy Chain

SEQ ID NO: 30775 - protein, 121 aa, synthetic construct; identical to SEQ ID NO: 17586
  source 1..121: note = Description of Artificial Sequence: Synthetic polypeptide; note = VH of XENP021103

SEQ ID NO: 30776 - protein, 5 aa, synthetic construct
  source 1..5: note = Description of Artificial Sequence: Synthetic peptide; note = XENP021103 vhCDR1
DAWMD

SEQ ID NO: 30777 - protein, 19 aa, synthetic construct
  source 1..19: note = Description of Artificial Sequence: Synthetic peptide; note = XENP021103 vhCDR2
EIRTKANNHATYYAESVKG

SEQ ID NO: 30778 - protein, 10 aa, synthetic construct
  source 1..10: note = Description of Artificial Sequence: Synthetic peptide; note = XENP021103 vhCDR3
LANWDWYFDV

SEQ ID NO: 30779 - protein, 218 aa, synthetic construct; identical to SEQ ID NO: 19950
  source 1..218: note = Description of Artificial Sequence: Synthetic polypeptide; note = XENP021103 7G8_H0_L0.26_Fab Light Chain

SEQ ID NO: 30780 - protein, 111 aa, synthetic construct; identical to SEQ ID NO: 19951
  source 1..111: note = Description of Artificial Sequence: Synthetic polypeptide; note = VL of XENP021103

SEQ ID NO: 30781 - protein, 15 aa, synthetic construct
  source 1..15: note = Description of Artificial Sequence: Synthetic peptide; note = XENP021103 vlCDR1
KASQSVDYTGDSYMN

SEQ ID NO: 30782 - protein, 7 aa, synthetic construct
  source 1..7: note = Description of Artificial Sequence: Synthetic peptide; note = XENP021103 vlCDR2
AASNLES

SEQ ID NO: 30783 - protein, 9 aa, synthetic construct
  source 1..9: note = Description of Artificial Sequence: Synthetic peptide; note = XENP021103 vlCDR3
QQSNEDPFT

SEQ ID NO: 30784 - protein, 226 aa, synthetic construct; identical to SEQ ID NO: 29134
  source 1..226: note = Description of Artificial Sequence: Synthetic polypeptide; note = XENP021104 7G8_H0_L0.27_Fab Heavy Chain

SEQ ID NO: 30785 - protein, 121 aa, synthetic construct; identical to SEQ ID NO: 17586
  source 1..121: note = Description of Artificial Sequence: Synthetic polypeptide; note = VH of XENP021104

SEQ ID NO: 30786 - protein, 5 aa, synthetic construct
  source 1..5: note = Description of Artificial Sequence: Synthetic peptide; note = XENP021104 vhCDR1
DAWMD

SEQ ID NO: 30787 - protein, 19 aa, synthetic construct
  source 1..19: note = Description of Artificial Sequence: Synthetic peptide; note = XENP021104 vhCDR2
EIRTKANNHATYYAESVKG

SEQ ID NO: 30788 - protein, 10 aa, synthetic construct
  source 1..10: note = Description of Artificial Sequence: Synthetic peptide; note = XENP021104 vhCDR3
LANWDWYFDV

SEQ ID NO: 30789 - protein, 218 aa, synthetic construct; identical to SEQ ID NO: 19960
  source 1..218: note = Description of Artificial Sequence: Synthetic polypeptide; note = XENP021104 7G8_H0_L0.27_Fab Light Chain

SEQ ID NO: 30790 - protein, 111 aa, synthetic construct; identical to SEQ ID NO: 19961
  source 1..111: note = Description of Artificial Sequence: Synthetic polypeptide; note = VL of XENP021104

SEQ ID NO: 30791 - protein, 15 aa, synthetic construct
  source 1..15: note = Description of Artificial Sequence: Synthetic peptide; note = XENP021104 vlCDR1
KASQSVDYGGDSYMN

SEQ ID NO: 30792 - protein, 7 aa, synthetic construct
  source 1..7: note = Description of Artificial Sequence: Synthetic peptide; note = XENP021104 vlCDR2
AASNLES

SEQ ID NO: 30793 - protein, 9 aa, synthetic construct
  source 1..9: note = Description of Artificial Sequence: Synthetic peptide; note = XENP021104 vlCDR3
QQSNEDPFT

SEQ ID NO: 30794 - protein, 226 aa, synthetic construct; identical to SEQ ID NO: 29134
  source 1..226: note = Description of Artificial Sequence: Synthetic polypeptide; note = XENP021105 7G8_H0_L0.28_Fab Heavy Chain

SEQ ID NO: 30795 - protein, 121 aa, synthetic construct; identical to SEQ ID NO: 17586
  source 1..121: note = Description of Artificial Sequence: Synthetic polypeptide; note = VH of XENP021105

SEQ ID NO: 30796 - protein, 5 aa, synthetic construct
  source 1..5: note = Description of Artificial Sequence: Synthetic peptide; note = XENP021105 vhCDR1
DAWMD

SEQ ID NO: 30797 - protein, 19 aa, synthetic construct
  source 1..19: note = Description of Artificial Sequence: Synthetic peptide; note = XENP021105 vhCDR2
EIRTKANNHATYYAESVKG

SEQ ID NO: 30798 - protein, 10 aa, synthetic construct
  source 1..10: note = Description of Artificial Sequence: Synthetic peptide; note = XENP021105 vhCDR3
LANWDWYFDV

SEQ ID NO: 30799 - protein, 218 aa, synthetic construct; identical to SEQ ID NO: 19970
  source 1..218: note = Description of Artificial Sequence: Synthetic polypeptide; note = XENP021105 7G8_H0_L0.28_Fab Light Chain

SEQ ID NO: 30800 - protein, 111 aa, synthetic construct; identical to SEQ ID NO: 19971
  source 1..111: note = Description of Artificial Sequence: Synthetic polypeptide; note = VL of XENP021105

SEQ ID NO: 30801 - protein, 15 aa, synthetic construct
  source 1..15: note = Description of Artificial Sequence: Synthetic peptide; note = XENP021105 vlCDR1
KASQSVDYYGDSYMN

SEQ ID NO: 30802 - protein, 7 aa, synthetic construct
  source 1..7: note = Description of Artificial Sequence: Synthetic peptide; note = XENP021105 vlCDR2
AASNLES

SEQ ID NO: 30803 - protein, 9 aa, synthetic construct
  source 1..9: note = Description of Artificial Sequence: Synthetic peptide; note = XENP021105 vlCDR3
QQSNEDPFT

SEQ ID NO: 30804 - protein, 226 aa, synthetic construct; identical to SEQ ID NO: 29134
  source 1..226: note = Description of Artificial Sequence: Synthetic polypeptide; note = XENP021106 7G8_H0_L0.29_Fab Heavy Chain

SEQ ID NO: 30805 - protein, 121 aa, synthetic construct; identical to SEQ ID NO: 17586
  source 1..121: note = Description of Artificial Sequence: Synthetic polypeptide; note = VH of XENP021106

SEQ ID NO: 30806 - protein, 5 aa, synthetic construct
  source 1..5: note = Description of Artificial Sequence: Synthetic peptide; note = XENP021106 vhCDR1
DAWMD

SEQ ID NO: 30807 - protein, 19 aa, synthetic construct
  source 1..19: note = Description of Artificial Sequence: Synthetic peptide; note = XENP021106 vhCDR2
EIRTKANNHATYYAESVKG

SEQ ID NO: 30808 - protein, 10 aa, synthetic construct
  source 1..10: note = Description of Artificial Sequence: Synthetic peptide; note = XENP021106 vhCDR3
LANWDWYFDV

SEQ ID NO: 30809 - protein, 218 aa, synthetic construct; identical to SEQ ID NO: 19980
  source 1..218: note = Description of Artificial Sequence: Synthetic polypeptide; note = XENP021106 7G8_H0_L0.29_Fab Light Chain

SEQ ID NO: 30810 - protein, 111 aa, synthetic construct; identical to SEQ ID NO: 19981
  source 1..111: note = Description of Artificial Sequence: Synthetic polypeptide; note = VL of XENP021106

SEQ ID NO: 30811 - protein, 15 aa, synthetic construct
  source 1..15: note = Description of Artificial Sequence: Synthetic peptide; note = XENP021106 vlCDR1
KASQSVDYDADSYMN

SEQ ID NO: 30812 - protein, 7 aa, synthetic construct
  source 1..7: note = Description of Artificial Sequence: Synthetic peptide; note = XENP021106 vlCDR2
AASNLES

SEQ ID NO: 30813 - protein, 9 aa, synthetic construct
  source 1..9: note = Description of Artificial Sequence: Synthetic peptide; note = XENP021106 vlCDR3
QQSNEDPFT

SEQ ID NO: 30814 - protein, 226 aa, synthetic construct; identical to SEQ ID NO: 29134
  source 1..226: note = Description of Artificial Sequence: Synthetic polypeptide; note = XENP021107 7G8_H0_L0.30_Fab Heavy Chain

SEQ ID NO: 30815 - protein, 121 aa, synthetic construct; identical to SEQ ID NO: 17586
  source 1..121: note = Description of Artificial Sequence: Synthetic polypeptide; note = VH of XENP021107

SEQ ID NO: 30816 - protein, 5 aa, synthetic construct
  source 1..5: note = Description of Artificial Sequence: Synthetic peptide; note = XENP021107 vhCDR1
DAWMD

SEQ ID NO: 30817 - protein, 19 aa, synthetic construct
  source 1..19: note = Description of Artificial Sequence: Synthetic peptide; note = XENP021107 vhCDR2
EIRTKANNHATYYAESVKG

SEQ ID NO: 30818 - protein, 10 aa, synthetic construct
  source 1..10: note = Description of Artificial Sequence: Synthetic peptide; note = XENP021107 vhCDR3
LANWDWYFDV

SEQ ID NO: 30819 - protein, 218 aa, synthetic construct; identical to SEQ ID NO: 19990
  source 1..218: note = Description of Artificial Sequence: Synthetic polypeptide; note = XENP021107 7G8_H0_L0.30_Fab Light Chain

SEQ ID NO: 30820 - protein, 111 aa, synthetic construct; identical to SEQ ID NO: 19991
  source 1..111: note = Description of Artificial Sequence: Synthetic polypeptide; note = VL of XENP021107

SEQ ID NO: 30821 - protein, 15 aa, synthetic construct
  source 1..15: note = Description of Artificial Sequence: Synthetic peptide; note = XENP021107 vlCDR1
KASQSVDYDSDSYMN

SEQ ID NO: 30822 - protein, 7 aa, synthetic construct
  source 1..7: note = Description of Artificial Sequence: Synthetic peptide; note = XENP021107 vlCDR2
AASNLES

SEQ ID NO: 30823 - protein, 9 aa, synthetic construct
  source 1..9: note = Description of Artificial Sequence: Synthetic peptide; note = XENP021107 vlCDR3
QQSNEDPFT

SEQ ID NO: 30824 - protein, 226 aa, synthetic construct; identical to SEQ ID NO: 29134
  source 1..226: note = Description of Artificial Sequence: Synthetic polypeptide; note = XENP021108 7G8_H0_L0.31_Fab Heavy Chain

SEQ ID NO: 30825 - protein, 121 aa, synthetic construct; identical to SEQ ID NO: 17586
  source 1..121: note = Description of Artificial Sequence: Synthetic polypeptide; note = VH of XENP021108

SEQ ID NO: 30826 - protein, 5 aa, synthetic construct
  source 1..5: note = Description of Artificial Sequence: Synthetic peptide; note = XENP021108 vhCDR1
DAWMD

SEQ ID NO: 30827 - protein, 19 aa, synthetic construct
  source 1..19: note = Description of Artificial Sequence: Synthetic peptide; note = XENP021108 vhCDR2
EIRTKANNHATYYAESVKG

SEQ ID NO: 30828 - protein, 10 aa, synthetic construct
  source 1..10: note = Description of Artificial Sequence: Synthetic peptide; note = XENP021108 vhCDR3
LANWDWYFDV

SEQ ID NO: 30829 - protein, 218 aa, synthetic construct; identical to SEQ ID NO: 20000
  source 1..218: note = Description of Artificial Sequence: Synthetic polypeptide; note = XENP021108 7G8_H0_L0.31_Fab Light Chain

SEQ ID NO: 30830 - protein, 111 aa, synthetic construct; identical to SEQ ID NO: 20001
  source 1..111: note = Description of Artificial Sequence: Synthetic polypeptide; note = VL of XENP021108

SEQ ID NO: 30831 - protein, 15 aa, synthetic construct
  source 1..15: note = Description of Artificial Sequence: Synthetic peptide; note = XENP021108 vlCDR1
KASQSVDYDTDSYMN

SEQ ID NO: 30832 - protein, 7 aa, synthetic construct
  source 1..7: note = Description of Artificial Sequence: Synthetic peptide; note = XENP021108 vlCDR2
AASNLES

SEQ ID NO: 30833 - protein, 9 aa, synthetic construct
  source 1..9: note = Description of Artificial Sequence: Synthetic peptide; note = XENP021108 vlCDR3
QQSNEDPFT

SEQ ID NO: 30834 - protein, 226 aa, synthetic construct; identical to SEQ ID NO: 29134
  source 1..226: note = Description of Artificial Sequence: Synthetic polypeptide; note = XENP021109 7G8_H0_L0.32_Fab Heavy Chain

SEQ ID NO: 30835 - protein, 121 aa, synthetic construct; identical to SEQ ID NO: 17586
  source 1..121: note = Description of Artificial Sequence: Synthetic polypeptide; note = VH of XENP021109

SEQ ID NO: 30836 - protein, 5 aa, synthetic construct
  source 1..5: note = Description of Artificial Sequence: Synthetic peptide; note = XENP021109 vhCDR1
DAWMD

SEQ ID NO: 30837 - protein, 19 aa, synthetic construct
  source 1..19: note = Description of Artificial Sequence: Synthetic peptide; note = XENP021109 vhCDR2
EIRTKANNHATYYAESVKG

SEQ ID NO: 30838 - protein, 10 aa, synthetic construct
  source 1..10: note = Description of Artificial Sequence: Synthetic peptide; note = XENP021109 vhCDR3
LANWDWYFDV

SEQ ID NO: 30839 - protein, 218 aa, synthetic construct; identical to SEQ ID NO: 20010
  source 1..218: note = Description of Artificial Sequence: Synthetic polypeptide; note = XENP021109 7G8_H0_L0.32_Fab Light Chain

SEQ ID NO: 30840 - protein, 111 aa, synthetic construct; identical to SEQ ID NO: 20011
  source 1..111: note = Description of Artificial Sequence: Synthetic polypeptide; note = VL of XENP021109

SEQ ID NO: 30841 - protein, 15 aa, synthetic construct
  source 1..15: note = Description of Artificial Sequence: Synthetic peptide; note = XENP021109 vlCDR1
KASQSVDYDQDSYMN

SEQ ID NO: 30842 - protein, 7 aa, synthetic construct
  source 1..7: note = Description of Artificial Sequence: Synthetic peptide; note = XENP021109 vlCDR2
AASNLES

SEQ ID NO: 30843 - protein, 9 aa, synthetic construct
  source 1..9: note = Description of Artificial Sequence: Synthetic peptide; note = XENP021109 vlCDR3
QQSNEDPFT

SEQ ID NO: 30844 - protein, 226 aa, synthetic construct; identical to SEQ ID NO: 29134
  source 1..226: note = Description of Artificial Sequence: Synthetic polypeptide; note = XENP021110 7G8_H0_L0.33_Fab Heavy Chain

SEQ ID NO: 30845 - protein, 121 aa, synthetic construct; identical to SEQ ID NO: 17586
  source 1..121: note = Description of Artificial Sequence: Synthetic polypeptide; note = VH of XENP021110

SEQ ID NO: 30846 - protein, 5 aa, synthetic construct
  source 1..5: note = Description of Artificial Sequence: Synthetic peptide; note = XENP021110 vhCDR1
DAWMD

SEQ ID NO: 30847 - protein, 19 aa, synthetic construct
  source 1..19: note = Description of Artificial Sequence: Synthetic peptide; note = XENP021110 vhCDR2
EIRTKANNHATYYAESVKG

SEQ ID NO: 30848 - protein, 10 aa, synthetic construct
  source 1..10: note = Description of Artificial Sequence: Synthetic peptide; note = XENP021110 vhCDR3
LANWDWYFDV

SEQ ID NO: 30849 - protein, 218 aa, synthetic construct; identical to SEQ ID NO: 20020
  source 1..218: note = Description of Artificial Sequence: Synthetic polypeptide; note = XENP021110 7G8_H0_L0.33_Fab Light Chain

SEQ ID NO: 30850 - protein, 111 aa, synthetic construct; identical to SEQ ID NO: 20021
  source 1..111: note = Description of Artificial Sequence: Synthetic polypeptide; note = VL of XENP021110

SEQ ID NO: 30851 - protein, 15 aa, synthetic construct
  source 1..15: note = Description of Artificial Sequence: Synthetic peptide; note = XENP021110 vlCDR1
KASQSVDYDHDSYMN

SEQ ID NO: 30852 - protein, 7 aa, synthetic construct
  source 1..7: note = Description of Artificial Sequence: Synthetic peptide; note = XENP021110 vlCDR2
AASNLES

SEQ ID NO: 30853 - protein, 9 aa, synthetic construct
  source 1..9: note = Description of Artificial Sequence: Synthetic peptide; note = XENP021110 vlCDR3
QQSNEDPFT

SEQ ID NO: 30854 - protein, 226 aa, synthetic construct; identical to SEQ ID NO: 29134
  source 1..226: note = Description of Artificial Sequence: Synthetic polypeptide; note = XENP021111 7G8_H0_L0.34_Fab Heavy Chain

SEQ ID NO: 30855 - protein, 121 aa, synthetic construct; identical to SEQ ID NO: 17586
  source 1..121: note = Description of Artificial Sequence: Synthetic polypeptide; note = VH of XENP021111

SEQ ID NO: 30856 - protein, 5 aa, synthetic construct
  source 1..5: note = Description of Artificial Sequence: Synthetic peptide; note = XENP021111 vhCDR1
DAWMD

SEQ ID NO: 30857 - protein, 19 aa, synthetic construct
  source 1..19: note = Description of Artificial Sequence: Synthetic peptide; note = XENP021111 vhCDR2
EIRTKANNHATYYAESVKG

SEQ ID NO: 30858 - protein, 10 aa, synthetic construct
  source 1..10: note = Description of Artificial Sequence: Synthetic peptide; note = XENP021111 vhCDR3
LANWDWYFDV

SEQ ID NO: 30859 - protein, 218 aa, synthetic construct; identical to SEQ ID NO: 20030
  source 1..218: note = Description of Artificial Sequence: Synthetic polypeptide; note = XENP021111 7G8_H0_L0.34_Fab Light Chain

SEQ ID NO: 30860 - protein, 111 aa, synthetic construct; identical to SEQ ID NO: 20031
  source 1..111: note = Description of Artificial Sequence: Synthetic polypeptide; note = VL of XENP021111

SEQ ID NO: 30861 - protein, 15 aa, synthetic construct
  source 1..15: note = Description of Artificial Sequence: Synthetic peptide; note = XENP021111 vlCDR1
KASQSVDYDDDSYMN

SEQ ID NO: 30862 - protein, 7 aa, synthetic construct
  source 1..7: note = Description of Artificial Sequence: Synthetic peptide; note = XENP021111 vlCDR2
AASNLES

SEQ ID NO: 30863 - protein, 9 aa, synthetic construct
  source 1..9: note = Description of Artificial Sequence: Synthetic peptide; note = XENP021111 vlCDR3
QQSNEDPFT

SEQ ID NO: 30864 - protein, 226 aa, synthetic construct; identical to SEQ ID NO: 29134
  source 1..226: note = Description of Artificial Sequence: Synthetic polypeptide; note = XENP021112 7G8_H0_L0.35_Fab Heavy Chain

SEQ ID NO: 30865 - protein, 121 aa, synthetic construct; identical to SEQ ID NO: 17586
  source 1..121: note = Description of Artificial Sequence: Synthetic polypeptide; note = VH of XENP021112

SEQ ID NO: 30866 - protein, 5 aa, synthetic construct
  source 1..5: note = Description of Artificial Sequence: Synthetic peptide; note = XENP021112 vhCDR1
DAWMD

SEQ ID NO: 30867 - protein, 19 aa, synthetic construct
  source 1..19: note = Description of Artificial Sequence: Synthetic peptide; note = XENP021112 vhCDR2
EIRTKANNHATYYAESVKG

SEQ ID NO: 30868 - protein, 10 aa, synthetic construct
  source 1..10: note = Description of Artificial Sequence: Synthetic peptide; note = XENP021112 vhCDR3
LANWDWYFDV

SEQ ID NO: 30869 - protein, 218 aa, synthetic construct; identical to SEQ ID NO: 20040
  source 1..218: note = Description of Artificial Sequence: Synthetic polypeptide; note = XENP021112 7G8_H0_L0.35_Fab Light Chain

SEQ ID NO: 30870 - protein, 111 aa, synthetic construct; identical to SEQ ID NO: 20041
  source 1..111: note = Description of Artificial Sequence: Synthetic polypeptide; note = VL of XENP021112

SEQ ID NO: 30871 - protein, 15 aa, synthetic construct
  source 1..15: note = Description of Artificial Sequence: Synthetic peptide; note = XENP021112 vlCDR1
KASQSVDYDKDSYMN

SEQ ID NO: 30872 - protein, 7 aa, synthetic construct
  source 1..7: note = Description of Artificial Sequence: Synthetic peptide; note = XENP021112 vlCDR2
AASNLES

SEQ ID NO: 30873 - protein, 9 aa, synthetic construct
  source 1..9: note = Description of Artificial Sequence: Synthetic peptide; note = XENP021112 vlCDR3
QQSNEDPFT

SEQ ID NO: 30874 - protein, 226 aa, synthetic construct; identical to SEQ ID NO: 29134
  source 1..226: note = Description of Artificial Sequence: Synthetic polypeptide; note = XENP021113 7G8_H0_L0.36_Fab Heavy Chain

SEQ ID NO: 30875 - protein, 121 aa, synthetic construct; identical to SEQ ID NO: 17586
  source 1..121: note = Description of Artificial Sequence: Synthetic polypeptide; note = VH of XENP021113

SEQ ID NO: 30876 - protein, 5 aa, synthetic construct
  source 1..5: note = Description of Artificial Sequence: Synthetic peptide; note = XENP021113 vhCDR1
DAWMD

SEQ ID NO: 30877 - protein, 19 aa, synthetic construct
  source 1..19: note = Description of Artificial Sequence: Synthetic peptide; note = XENP021113 vhCDR2
EIRTKANNHATYYAESVKG

SEQ ID NO: 30878 - protein, 10 aa, synthetic construct
  source 1..10: note = Description of Artificial Sequence: Synthetic peptide; note = XENP021113 vhCDR3
LANWDWYFDV

SEQ ID NO: 30879 - protein, 218 aa, synthetic construct; identical to SEQ ID NO: 20050
  source 1..218: note = Description of Artificial Sequence: Synthetic polypeptide; note = XENP021113 7G8_H0_L0.36_Fab Light Chain

SEQ ID NO: 30880 - protein, 111 aa, synthetic construct; identical to SEQ ID NO: 20051
  source 1..111: note = Description of Artificial Sequence: Synthetic polypeptide; note = VL of XENP021113

SEQ ID NO: 30881 - protein, 15 aa, synthetic construct
  source 1..15: note = Description of Artificial Sequence: Synthetic peptide; note = XENP021113 vlCDR1
KASQSVDYDLDSYMN

SEQ ID NO: 30882 - protein, 7 aa, synthetic construct
  source 1..7: note = Description of Artificial Sequence: Synthetic peptide; note = XENP021113 vlCDR2
AASNLES

SEQ ID NO: 30883 - protein, 9 aa, synthetic construct
  source 1..9: note = Description of Artificial Sequence: Synthetic peptide; note = XENP021113 vlCDR3
QQSNEDPFT

SEQ ID NO: 30884 - protein, 226 aa, synthetic construct; identical to SEQ ID NO: 29134
  source 1..226: note = Description of Artificial Sequence: Synthetic polypeptide; note = XENP021114 7G8_H0_L0.37_Fab Heavy Chain

SEQ ID NO: 30885 - protein, 121 aa, synthetic construct; identical to SEQ ID NO: 17586
  source 1..121: note = Description of Artificial Sequence: Synthetic polypeptide; note = VH of XENP021114

SEQ ID NO: 30886 - protein, 5 aa, synthetic construct
  source 1..5: note = Description of Artificial Sequence: Synthetic peptide; note = XENP021114 vhCDR1
DAWMD

SEQ ID NO: 30887 - protein, 19 aa, synthetic construct
  source 1..19: note = Description of Artificial Sequence: Synthetic peptide; note = XENP021114 vhCDR2
EIRTKANNHATYYAESVKG

SEQ ID NO: 30888 - protein, 10 aa, synthetic construct
  source 1..10: note = Description of Artificial Sequence: Synthetic peptide; note = XENP021114 vhCDR3
LANWDWYFDV

SEQ ID NO: 30889 - protein, 218 aa, synthetic construct; identical to SEQ ID NO: 20060
  source 1..218: note = Description of Artificial Sequence: Synthetic polypeptide; note = XENP021114 7G8_H0_L0.37_Fab Light Chain

SEQ ID NO: 30890 - protein, 111 aa, synthetic construct; identical to SEQ ID NO: 20061
  source 1..111: note = Description of Artificial Sequence: Synthetic polypeptide; note = VL of XENP021114

SEQ ID NO: 30891 - protein, 15 aa, synthetic construct
  source 1..15: note = Description of Artificial Sequence: Synthetic peptide; note = XENP021114 vlCDR1
KASQSVDYDYDSYMN

SEQ ID NO: 30892 - protein, 7 aa, synthetic construct
  source 1..7: note = Description of Artificial Sequence: Synthetic peptide; note = XENP021114 vlCDR2
AASNLES

SEQ ID NO: 30893 - protein, 9 aa, synthetic construct
  source 1..9: note = Description of Artificial Sequence: Synthetic peptide; note = XENP021114 vlCDR3
QQSNEDPFT

SEQ ID NO: 30894 - protein, 226 aa, synthetic construct; identical to SEQ ID NO: 29134
  source 1..226: note = Description of Artificial Sequence: Synthetic polypeptide; note = XENP021115 7G8_H0_L0.38_Fab Heavy Chain

SEQ ID NO: 30895 - protein, 121 aa, synthetic construct; identical to SEQ ID NO: 17586
  source 1..121: note = Description of Artificial Sequence: Synthetic polypeptide; note = VH of XENP021115

SEQ ID NO: 30896 - protein, 5 aa, synthetic construct
  source 1..5: note = Description of Artificial Sequence: Synthetic peptide; note = XENP021115 vhCDR1
DAWMD

SEQ ID NO: 30897 - protein, 19 aa, synthetic construct
  source 1..19: note = Description of Artificial Sequence: Synthetic peptide; note = XENP021115 vhCDR2
EIRTKANNHATYYAESVKG

SEQ ID NO: 30898 - protein, 10 aa, synthetic construct
  source 1..10: note = Description of Artificial Sequence: Synthetic peptide; note = XENP021115 vhCDR3
LANWDWYFDV

SEQ ID NO: 30899 - protein, 218 aa, synthetic construct; identical to SEQ ID NO: 20070
  source 1..218: note = Description of Artificial Sequence: Synthetic polypeptide; note = XENP021115 7G8_H0_L0.38_Fab Light Chain

SEQ ID NO: 30900 - protein, 111 aa, synthetic construct; identical to SEQ ID NO: 20071
  source 1..111: note = Description of Artificial Sequence: Synthetic polypeptide; note = VL of XENP021115

SEQ ID NO: 30901 - protein, 15 aa, synthetic construct
  source 1..15: note = Description of Artificial Sequence: Synthetic peptide; note = XENP021115 vlCDR1
KASQSVDYDGNSYMN

SEQ ID NO: 30902 - protein, 7 aa, synthetic construct
  source 1..7: note = Description of Artificial Sequence: Synthetic peptide; note = XENP021115 vlCDR2
AASNLES

SEQ ID NO: 30903 - protein, 9 aa, synthetic construct
  source 1..9: note = Description of Artificial Sequence: Synthetic peptide; note = XENP021115 vlCDR3
QQSNEDPFT

SEQ ID NO: 30904 - protein, 226 aa, synthetic construct; identical to SEQ ID NO: 29134
  source 1..226: note = Description of Artificial Sequence: Synthetic polypeptide; note = XENP021116 7G8_H0_L0.39_Fab Heavy Chain

SEQ ID NO: 30905 - protein, 121 aa, synthetic construct; identical to SEQ ID NO: 17586
  source 1..121: note = Description of Artificial Sequence: Synthetic polypeptide; note = VH of XENP021116

SEQ ID NO: 30906 - protein, 5 aa, synthetic construct
  source 1..5: note = Description of Artificial Sequence: Synthetic peptide; note = XENP021116 vhCDR1
DAWMD

SEQ ID NO: 30907 - protein, 19 aa, synthetic construct
  source 1..19: note = Description of Artificial Sequence: Synthetic peptide; note = XENP021116 vhCDR2
EIRTKANNHATYYAESVKG

SEQ ID NO: 30908 - protein, 10 aa, synthetic construct
  source 1..10: note = Description of Artificial Sequence: Synthetic peptide; note = XENP021116 vhCDR3
LANWDWYFDV

SEQ ID NO: 30909 - protein, 218 aa, synthetic construct; identical to SEQ ID NO: 20080
  source 1..218: note = Description of Artificial Sequence: Synthetic polypeptide; note = XENP021116 7G8_H0_L0.39_Fab Light Chain

SEQ ID NO: 30910 - protein, 111 aa, synthetic construct; identical to SEQ ID NO: 20081
  source 1..111: note = Description of Artificial Sequence: Synthetic polypeptide; note = VL of XENP021116

SEQ ID NO: 30911 - protein, 15 aa, synthetic construct
  source 1..15: note = Description of Artificial Sequence: Synthetic peptide; note = XENP021116 vlCDR1
KASQSVDYDGESYMN

SEQ ID NO: 30912 - protein, 7 aa, synthetic construct
  source 1..7: note = Description of Artificial Sequence: Synthetic peptide; note = XENP021116 vlCDR2
AASNLES

SEQ ID NO: 30913 - protein, 9 aa, synthetic construct
  source 1..9: note = Description of Artificial Sequence: Synthetic peptide; note = XENP021116 vlCDR3
QQSNEDPFT

SEQ ID NO: 30914 - protein, 226 aa, synthetic construct; identical to SEQ ID NO: 29134
  source 1..226: note = Description of Artificial Sequence: Synthetic polypeptide; note = XENP021117 7G8_H0_L0.40_Fab Heavy Chain

SEQ ID NO: 30915 - protein, 121 aa, synthetic construct; identical to SEQ ID NO: 17586
  source 1..121: note = Description of Artificial Sequence: Synthetic polypeptide; note = VH of XENP021117

SEQ ID NO: 30916 - protein, 5 aa, synthetic construct
  source 1..5: note = Description of Artificial Sequence: Synthetic peptide; note = XENP021117 vhCDR1
DAWMD

SEQ ID NO: 30917 - protein, 19 aa, synthetic construct
  source 1..19: note = Description of Artificial Sequence: Synthetic peptide; note = XENP021117 vhCDR2
EIRTKANNHATYYAESVKG

SEQ ID NO: 30918 - protein, 10 aa, synthetic construct
  source 1..10: note = Description of Artificial Sequence: Synthetic peptide; note = XENP021117 vhCDR3
LANWDWYFDV

SEQ ID NO: 30919 - protein, 218 aa, synthetic construct; identical to SEQ ID NO: 20090
  source 1..218: note = Description of Artificial Sequence: Synthetic polypeptide; note = XENP021117 7G8_H0_L0.40_Fab Light Chain

SEQ ID NO: 30920 - protein, 111 aa, synthetic construct; identical to SEQ ID NO: 20091
  source 1..111: note = Description of Artificial Sequence: Synthetic polypeptide; note = VL of XENP021117

SEQ ID NO: 30921 - protein, 15 aa, synthetic construct
  source 1..15: note = Description of Artificial Sequence: Synthetic peptide; note = XENP021117 vlCDR1
KASQSVDYDGHSYMN

SEQ ID NO: 30922 - protein, 7 aa, synthetic construct
  source 1..7: note = Description of Artificial Sequence: Synthetic peptide; note = XENP021117 vlCDR2
AASNLES

SEQ ID NO: 30923 - protein, 9 aa, synthetic construct
  source 1..9: note = Description of Artificial Sequence: Synthetic peptide; note = XENP021117 vlCDR3
QQSNEDPFT

SEQ ID NO: 30924 - protein, 226 aa, synthetic construct; identical to SEQ ID NO: 29134
  source 1..226: note = Description of Artificial Sequence: Synthetic polypeptide; note = XENP021118 7G8_H0_L0.41_Fab Heavy Chain

SEQ ID NO: 30925 - protein, 121 aa, synthetic construct; identical to SEQ ID NO: 17586
  source 1..121: note = Description of Artificial Sequence: Synthetic polypeptide; note = VH of XENP021118

SEQ ID NO: 30926 - protein, 5 aa, synthetic construct
  source 1..5: note = Description of Artificial Sequence: Synthetic peptide; note = XENP021118 vhCDR1
DAWMD

SEQ ID NO: 30927 - protein, 19 aa, synthetic construct
  source 1..19: note = Description of Artificial Sequence: Synthetic peptide; note = XENP021118 vhCDR2
EIRTKANNHATYYAESVKG

SEQ ID NO: 30928 - protein, 10 aa, synthetic construct
  source 1..10: note = Description of Artificial Sequence: Synthetic peptide; note = XENP021118 vhCDR3
LANWDWYFDV

SEQ ID NO: 30929 - protein, 218 aa, synthetic construct; identical to SEQ ID NO: 20100
  source 1..218: note = Description of Artificial Sequence: Synthetic polypeptide; note = XENP021118 7G8_H0_L0.41_Fab Light Chain

SEQ ID NO: 30930 - protein, 111 aa, synthetic construct; identical to SEQ ID NO: 20101
  source 1..111: note = Description of Artificial Sequence: Synthetic polypeptide; note = VL of XENP021118

SEQ ID NO: 30931 - protein, 15 aa, synthetic construct
  source 1..15: note = Description of Artificial Sequence: Synthetic peptide; note = XENP021118 vlCDR1
KASQSVDYDGSSYMN

SEQ ID NO: 30932 - protein, 7 aa, synthetic construct
  source 1..7: note = Description of Artificial Sequence: Synthetic peptide; note = XENP021118 vlCDR2
AASNLES

SEQ ID NO: 30933 - protein, 9 aa, synthetic construct
  source 1..9: note = Description of Artificial Sequence: Synthetic peptide; note = XENP021118 vlCDR3
QQSNEDPFT

SEQ ID NO: 30934 - protein, 226 aa, synthetic construct; identical to SEQ ID NO: 29134
  source 1..226: note = Description of Artificial Sequence: Synthetic polypeptide; note = XENP021119 7G8_H0_L0.42_Fab Heavy Chain

SEQ ID NO: 30935 - protein, 121 aa, synthetic construct; identical to SEQ ID NO: 17586
  source 1..121: note = Description of Artificial Sequence: Synthetic polypeptide; note = VH of XENP021119

SEQ ID NO: 30936 - protein, 5 aa, synthetic construct
  source 1..5: note = Description of Artificial Sequence: Synthetic peptide; note = XENP021119 vhCDR1
DAWMD

SEQ ID NO: 30937 - protein, 19 aa, synthetic construct
  source 1..19: note = Description of Artificial Sequence: Synthetic peptide; note = XENP021119 vhCDR2
EIRTKANNHATYYAESVKG

SEQ ID NO: 30938 - protein, 10 aa, synthetic construct
  source 1..10: note = Description of Artificial Sequence: Synthetic peptide; note = XENP021119 vhCDR3
LANWDWYFDV

SEQ ID NO: 30939 - protein, 218 aa, synthetic construct; identical to SEQ ID NO: 20110
  source 1..218: note = Description of Artificial Sequence: Synthetic polypeptide; note = XENP021119 7G8_H0_L0.42_Fab Light Chain

SEQ ID NO: 30940 - protein, 111 aa, synthetic construct; identical to SEQ ID NO: 20111
  source 1..111: note = Description of Artificial Sequence: Synthetic polypeptide; note = VL of XENP021119

SEQ ID NO: 30941 - protein, 15 aa, synthetic construct
  source 1..15: note = Description of Artificial Sequence: Synthetic peptide; note = XENP021119 vlCDR1
KASQSVDYDGRSYMN

SEQ ID NO: 30942 - protein, 7 aa, synthetic construct
  source 1..7: note = Description of Artificial Sequence: Synthetic peptide; note = XENP021119 vlCDR2
AASNLES

SEQ ID NO: 30943 - protein, 9 aa, synthetic construct
  source 1..9: note = Description of Artificial Sequence: Synthetic peptide; note = XENP021119 vlCDR3
QQSNEDPFT

SEQ ID NO: 30944 - protein, 226 aa, synthetic construct; identical to SEQ ID NO: 29134
  source 1..226: note = Description of Artificial Sequence: Synthetic polypeptide; note = XENP021120 7G8_H0_L0.43_Fab Heavy Chain

SEQ ID NO: 30945 - protein, 121 aa, synthetic construct; identical to SEQ ID NO: 17586
  source 1..121: note = Description of Artificial Sequence: Synthetic polypeptide; note = VH of XENP021120

SEQ ID NO: 30946 - protein, 5 aa, synthetic construct
  source 1..5: note = Description of Artificial Sequence: Synthetic peptide; note = XENP021120 vhCDR1
DAWMD

SEQ ID NO: 30947 - protein, 19 aa, synthetic construct
  source 1..19: note = Description of Artificial Sequence: Synthetic peptide; note = XENP021120 vhCDR2
EIRTKANNHATYYAESVKG

SEQ ID NO: 30948 - protein, 10 aa, synthetic construct
  source 1..10: note = Description of Artificial Sequence: Synthetic peptide; note = XENP021120 vhCDR3
LANWDWYFDV

SEQ ID NO: 30949 - protein, 218 aa, synthetic construct; identical to SEQ ID NO: 20120
  source 1..218: note = Description of Artificial Sequence: Synthetic polypeptide; note = XENP021120 7G8_H0_L0.43_Fab Light Chain

SEQ ID NO: 30950 - protein, 111 aa, synthetic construct; identical to SEQ ID NO: 20121
  source 1..111: note = Description of Artificial Sequence: Synthetic polypeptide; note = VL of XENP021120

SEQ ID NO: 30951 - protein, 15 aa, synthetic construct
  source 1..15: note = Description of Artificial Sequence: Synthetic peptide; note = XENP021120 vlCDR1
KASQSVDYDGLSYMN

SEQ ID NO: 30952 - protein, 7 aa, synthetic construct
  source 1..7: note = Description of Artificial Sequence: Synthetic peptide; note = XENP021120 vlCDR2
AASNLES

SEQ ID NO: 30953 - protein, 9 aa, synthetic construct
  source 1..9: note = Description of Artificial Sequence: Synthetic peptide; note = XENP021120 vlCDR3
QQSNEDPFT

SEQ ID NO: 30954 - protein, 226 aa, synthetic construct; identical to SEQ ID NO: 29134
  source 1..226: note = Description of Artificial Sequence: Synthetic polypeptide; note = XENP021121 7G8_H0_L0.44_Fab Heavy Chain

SEQ ID NO: 30955 - protein, 121 aa, synthetic construct; identical to SEQ ID NO: 17586
  source 1..121: note = Description of Artificial Sequence: Synthetic polypeptide; note = VH of XENP021121

SEQ ID NO: 30956 - protein, 5 aa, synthetic construct
  source 1..5: note = Description of Artificial Sequence: Synthetic peptide; note = XENP021121 vhCDR1
DAWMD

SEQ ID NO: 30957 - protein, 19 aa, synthetic construct
  source 1..19: note = Description of Artificial Sequence: Synthetic peptide; note = XENP021121 vhCDR2
EIRTKANNHATYYAESVKG

SEQ ID NO: 30958 - protein, 10 aa, synthetic construct
  source 1..10: note = Description of Artificial Sequence: Synthetic peptide; note = XENP021121 vhCDR3
LANWDWYFDV

SEQ ID NO: 30959 - protein, 218 aa, synthetic construct; identical to SEQ ID NO: 20130
  source 1..218: note = Description of Artificial Sequence: Synthetic polypeptide; note = XENP021121 7G8_H0_L0.44_Fab Light Chain

SEQ ID NO: 30960 - protein, 111 aa, synthetic construct; identical to SEQ ID NO: 20131
  source 1..111: note = Description of Artificial Sequence: Synthetic polypeptide; note = VL of XENP021121

SEQ ID NO: 30961 - protein, 15 aa, synthetic construct
  source 1..15: note = Description of Artificial Sequence: Synthetic peptide; note = XENP021121 vlCDR1
KASQSVDYDGTSYMN

SEQ ID NO: 30962 - protein, 7 aa, synthetic construct
  source 1..7: note = Description of Artificial Sequence: Synthetic peptide; note = XENP021121 vlCDR2
AASNLES

SEQ ID NO: 30963 - protein, 9 aa, synthetic construct
  source 1..9: note = Description of Artificial Sequence: Synthetic peptide; note = XENP021121 vlCDR3
QQSNEDPFT

SEQ ID NO: 30964 - protein, 226 aa, synthetic construct; identical to SEQ ID NO: 29134
  source 1..226: note = Description of Artificial Sequence: Synthetic polypeptide; note = XENP021122 7G8_H0_L0.45_Fab Heavy Chain

SEQ ID NO: 30965 - protein, 121 aa, synthetic construct; identical to SEQ ID NO: 17586
  source 1..121: note = Description of Artificial Sequence: Synthetic polypeptide; note = VH of XENP021122

SEQ ID NO: 30966 - protein, 5 aa, synthetic construct
  source 1..5: note = Description of Artificial Sequence: Synthetic peptide; note = XENP021122 vhCDR1
DAWMD

SEQ ID NO: 30967 - protein, 19 aa, synthetic construct
  source 1..19: note = Description of Artificial Sequence: Synthetic peptide; note = XENP021122 vhCDR2
EIRTKANNHATYYAESVKG

SEQ ID NO: 30968 - protein, 10 aa, synthetic construct
  source 1..10: note = Description of Artificial Sequence: Synthetic peptide; note = XENP021122 vhCDR3
LANWDWYFDV

SEQ ID NO: 30969 - protein, 218 aa, synthetic construct; identical to SEQ ID NO: 20140
  source 1..218: note = Description of Artificial Sequence: Synthetic polypeptide; note = XENP021122 7G8_H0_L0.45_Fab Light Chain

SEQ ID NO: 30970 - protein, 111 aa, synthetic construct; identical to SEQ ID NO: 20141
  source 1..111: note = Description of Artificial Sequence: Synthetic polypeptide; note = VL of XENP021122

SEQ ID NO: 30971 - protein, 15 aa, synthetic construct
  source 1..15: note = Description of Artificial Sequence: Synthetic peptide; note = XENP021122 vlCDR1
KASQSVDYDGGSYMN

SEQ ID NO: 30972 - protein, 7 aa, synthetic construct
  source 1..7: note = Description of Artificial Sequence: Synthetic peptide; note = XENP021122 vlCDR2
AASNLES

SEQ ID NO: 30973 - protein, 9 aa, synthetic construct
  source 1..9: note = Description of Artificial Sequence: Synthetic peptide; note = XENP021122 vlCDR3
QQSNEDPFT

SEQ ID NO: 30974 - protein, 226 aa, synthetic construct; identical to SEQ ID NO: 29134
  source 1..226: note = Description of Artificial Sequence: Synthetic polypeptide; note = XENP021123 7G8_H0_L0.46_Fab Heavy Chain

SEQ ID NO: 30975 - protein, 121 aa, synthetic construct; identical to SEQ ID NO: 17586
  source 1..121: note = Description of Artificial Sequence: Synthetic polypeptide; note = VH of XENP021123

SEQ ID NO: 30976 - protein, 5 aa, synthetic construct
  source 1..5: note = Description of Artificial Sequence: Synthetic peptide; note = XENP021123 vhCDR1
DAWMD

SEQ ID NO: 30977 - protein, 19 aa, synthetic construct
  source 1..19: note = Description of Artificial Sequence: Synthetic peptide; note = XENP021123 vhCDR2
EIRTKANNHATYYAESVKG

SEQ ID NO: 30978 - protein, 10 aa, synthetic construct
  source 1..10: note = Description of Artificial Sequence: Synthetic peptide; note = XENP021123 vhCDR3
LANWDWYFDV

SEQ ID NO: 30979 - protein, 218 aa, synthetic construct; identical to SEQ ID NO: 20150
  source 1..218: note = Description of Artificial Sequence: Synthetic polypeptide; note = XENP021123 7G8_H0_L0.46_Fab Light Chain

SEQ ID NO: 30980 - protein, 111 aa, synthetic construct; identical to SEQ ID NO: 20151
  source 1..111: note = Description of Artificial Sequence: Synthetic polypeptide; note = VL of XENP021123

SEQ ID NO: 30981 - protein, 15 aa, synthetic construct
  source 1..15: note = Description of Artificial Sequence: Synthetic peptide; note = XENP021123 vlCDR1
KASQSVDYDGYSYMN

SEQ ID NO: 30982 - protein, 7 aa, synthetic construct
  source 1..7: note = Description of Artificial Sequence: Synthetic peptide; note = XENP021123 vlCDR2
AASNLES

SEQ ID NO: 30983 - protein, 9 aa, synthetic construct
  source 1..9: note = Description of Artificial Sequence: Synthetic peptide; note = XENP021123 vlCDR3
QQSNEDPFT

SEQ ID NO: 30984 - protein, 226 aa, synthetic construct; identical to SEQ ID NO: 29134
  source 1..226: note = Description of Artificial Sequence: Synthetic polypeptide; note = XENP021124 7G8_H0_L0.47_Fab Heavy Chain

SEQ ID NO: 30985 - protein, 121 aa, synthetic construct; identical to SEQ ID NO: 17586
  source 1..121: note = Description of Artificial Sequence: Synthetic polypeptide; note = VH of XENP021124

SEQ ID NO: 30986 - protein, 5 aa, synthetic construct
  source 1..5: note = Description of Artificial Sequence: Synthetic peptide; note = XENP021124 vhCDR1
DAWMD

SEQ ID NO: 30987 - protein, 19 aa, synthetic construct
  source 1..19: note = Description of Artificial Sequence: Synthetic peptide; note = XENP021124 vhCDR2
EIRTKANNHATYYAESVKG

SEQ ID NO: 30988 - protein, 10 aa, synthetic construct
  source 1..10: note = Description of Artificial Sequence: Synthetic peptide; note = XENP021124 vhCDR3
LANWDWYFDV

SEQ ID NO: 30989 - protein, 218 aa, synthetic construct; identical to SEQ ID NO: 20160
  source 1..218: note = Description of Artificial Sequence: Synthetic polypeptide; note = XENP021124 7G8_H0_L0.47_Fab Light Chain

SEQ ID NO: 30990 - protein, 111 aa, synthetic construct; identical to SEQ ID NO: 20161
  source 1..111: note = Description of Artificial Sequence: Synthetic polypeptide; note = VL of XENP021124

SEQ ID NO: 30991 - protein, 15 aa, synthetic construct
  source 1..15: note = Description of Artificial Sequence: Synthetic peptide; note = XENP021124 vlCDR1
KASQSVDYDGDSYMN

SEQ ID NO: 30992 - protein, 7 aa, synthetic construct
  source 1..7: note = Description of Artificial Sequence: Synthetic peptide; note = XENP021124 vlCDR2
AASNLES

SEQ ID NO: 30993 - protein, 9 aa, synthetic construct
  source 1..9: note = Description of Artificial Sequence: Synthetic peptide; note = XENP021124 vlCDR3
QQSNEDPFT

SEQ ID NO: 30994 - protein, 226 aa, synthetic construct; identical to SEQ ID NO: 29134
  source 1..226: note = Description of Artificial Sequence: Synthetic polypeptide; note = XENP021125 7G8_H0_L0.48_Fab Heavy Chain

SEQ ID NO: 30995 - protein, 121 aa, synthetic construct; identical to SEQ ID NO: 17586
  source 1..121: note = Description of Artificial Sequence: Synthetic polypeptide; note = VH of XENP021125

SEQ ID NO: 30996 - protein, 5 aa, synthetic construct
  source 1..5: note = Description of Artificial Sequence: Synthetic peptide; note = XENP021125 vhCDR1
DAWMD

SEQ ID NO: 30997 - protein, 19 aa, synthetic construct
  source 1..19: note = Description of Artificial Sequence: Synthetic peptide; note = XENP021125 vhCDR2
EIRTKANNHATYYAESVKG

SEQ ID NO: 30998 - protein, 10 aa, synthetic construct
  source 1..10: note = Description of Artificial Sequence: Synthetic peptide; note = XENP021125 vhCDR3
LANWDWYFDV

SEQ ID NO: 30999 - protein, 218 aa, synthetic construct; identical to SEQ ID NO: 20170
  source 1..218: note = Description of Artificial Sequence: Synthetic polypeptide; note = XENP021125 7G8_H0_L0.48_Fab Light Chain

SEQ ID NO: 31000 - protein, 111 aa, synthetic construct; identical to SEQ ID NO: 20171
  source 1..111: note = Description of Artificial Sequence: Synthetic polypeptide; note = VL of XENP021125

SEQ ID NO: 31001 - protein, 15 aa, synthetic construct
  source 1..15: note = Description of Artificial Sequence: Synthetic peptide; note = XENP021125 vlCDR1
KASQSVDYDGDSYMN

SEQ ID NO: 31002 - protein, 7 aa, synthetic construct
  source 1..7: note = Description of Artificial Sequence: Synthetic peptide; note = XENP021125 vlCDR2
SASNLES

SEQ ID NO: 31003 - protein, 9 aa, synthetic construct
  source 1..9: note = Description of Artificial Sequence: Synthetic peptide; note = XENP021125 vlCDR3
QQSNEDPFT

SEQ ID NO: 31004 - protein, 226 aa, synthetic construct; identical to SEQ ID NO: 29134
  source 1..226: note = Description of Artificial Sequence: Synthetic polypeptide; note = XENP021126 7G8_H0_L0.49_Fab Heavy Chain

SEQ ID NO: 31005 - protein, 121 aa, synthetic construct; identical to SEQ ID NO: 17586
  source 1..121: note = Description of Artificial Sequence: Synthetic polypeptide; note = VH of XENP021126

SEQ ID NO: 31006 - protein, 5 aa, synthetic construct
  source 1..5: note = Description of Artificial Sequence: Synthetic peptide; note = XENP021126 vhCDR1
DAWMD

SEQ ID NO: 31007 - protein, 19 aa, synthetic construct
  source 1..19: note = Description of Artificial Sequence: Synthetic peptide; note = XENP021126 vhCDR2
EIRTKANNHATYYAESVKG

SEQ ID NO: 31008 - protein, 10 aa, synthetic construct
  source 1..10: note = Description of Artificial Sequence: Synthetic peptide; note = XENP021126 vhCDR3
LANWDWYFDV

SEQ ID NO: 31009 - protein, 218 aa, synthetic construct; identical to SEQ ID NO: 20180
  source 1..218: note = Description of Artificial Sequence: Synthetic polypeptide; note = XENP021126 7G8_H0_L0.49_Fab Light Chain

SEQ ID NO: 31010 - protein, 111 aa, synthetic construct; identical to SEQ ID NO: 20181
  source 1..111: note = Description of Artificial Sequence: Synthetic polypeptide; note = VL of XENP021126

SEQ ID NO: 31011 - protein, 15 aa, synthetic construct
  source 1..15: note = Description of Artificial Sequence: Synthetic peptide; note = XENP021126 vlCDR1
KASQSVDYDGDSYMN

SEQ ID NO: 31012 - protein, 7 aa, synthetic construct
  source 1..7: note = Description of Artificial Sequence: Synthetic peptide; note = XENP021126 vlCDR2
TASNLES

SEQ ID NO: 31013 - protein, 9 aa, synthetic construct
  source 1..9: note = Description of Artificial Sequence: Synthetic peptide; note = XENP021126 vlCDR3
QQSNEDPFT

SEQ ID NO: 31014 - protein, 226 aa, synthetic construct; identical to SEQ ID NO: 29134
  source 1..226: note = Description of Artificial Sequence: Synthetic polypeptide; note = XENP021127 7G8_H0_L0.50_Fab Heavy Chain

SEQ ID NO: 31015 - protein, 121 aa, synthetic construct; identical to SEQ ID NO: 17586
  source 1..121: note = Description of Artificial Sequence: Synthetic polypeptide; note = VH of XENP021127

SEQ ID NO: 31016 - protein, 5 aa, synthetic construct
  source 1..5: note = Description of Artificial Sequence: Synthetic peptide; note = XENP021127 vhCDR1
DAWMD

SEQ ID NO: 31017 - protein, 19 aa, synthetic construct
  source 1..19: note = Description of Artificial Sequence: Synthetic peptide; note = XENP021127 vhCDR2
EIRTKANNHATYYAESVKG

SEQ ID NO: 31018 - protein, 10 aa, synthetic construct
  source 1..10: note = Description of Artificial Sequence: Synthetic peptide; note = XENP021127 vhCDR3
LANWDWYFDV

SEQ ID NO: 31019 - protein, 218 aa, synthetic construct; identical to SEQ ID NO: 20190
  source 1..218: note = Description of Artificial Sequence: Synthetic polypeptide; note = XENP021127 7G8_H0_L0.50_Fab Light Chain

SEQ ID NO: 31020 - protein, 111 aa, synthetic construct; identical to SEQ ID NO: 20191
  source 1..111: note = Description of Artificial Sequence: Synthetic polypeptide; note = VL of XENP021127

SEQ ID NO: 31021 - protein, 15 aa, synthetic construct
  source 1..15: note = Description of Artificial Sequence: Synthetic peptide; note = XENP021127 vlCDR1
KASQSVDYDGDSYMN

SEQ ID NO: 31022 - protein, 7 aa, synthetic construct
  source 1..7: note = Description of Artificial Sequence: Synthetic peptide; note = XENP021127 vlCDR2
GASNLES

SEQ ID NO: 31023 - protein, 9 aa, synthetic construct
  source 1..9: note = Description of Artificial Sequence: Synthetic peptide; note = XENP021127 vlCDR3
QQSNEDPFT

SEQ ID NO: 31024 - protein, 226 aa, synthetic construct; identical to SEQ ID NO: 29134
  source 1..226: note = Description of Artificial Sequence: Synthetic polypeptide; note = XENP021128 7G8_H0_L0.51_Fab Heavy Chain

SEQ ID NO: 31025 - protein, 121 aa, synthetic construct; identical to SEQ ID NO: 17586
  source 1..121: note = Description of Artificial Sequence: Synthetic polypeptide; note = VH of XENP021128

SEQ ID NO: 31026 - protein, 5 aa, synthetic construct
  source 1..5: note = Description of Artificial Sequence: Synthetic peptide; note = XENP021128 vhCDR1
DAWMD

SEQ ID NO: 31027 - protein, 19 aa, synthetic construct
  source 1..19: note = Description of Artificial Sequence: Synthetic peptide; note = XENP021128 vhCDR2
EIRTKANNHATYYAESVKG

SEQ ID NO: 31028 - protein, 10 aa, synthetic construct
  source 1..10: note = Description of Artificial Sequence: Synthetic peptide; note = XENP021128 vhCDR3
LANWDWYFDV

SEQ ID NO: 31029 - protein, 218 aa, synthetic construct; identical to SEQ ID NO: 20200
  source 1..218: note = Description of Artificial Sequence: Synthetic polypeptide; note = XENP021128 7G8_H0_L0.51_Fab Light Chain

SEQ ID NO: 31030 - protein, 111 aa, synthetic construct; identical to SEQ ID NO: 20201
  source 1..111: note = Description of Artificial Sequence: Synthetic polypeptide; note = VL of XENP021128

SEQ ID NO: 31031 - protein, 15 aa, synthetic construct
  source 1..15: note = Description of Artificial Sequence: Synthetic peptide; note = XENP021128 vlCDR1
KASQSVDYDGDSYMN

SEQ ID NO: 31032 - protein, 7 aa, synthetic construct
  source 1..7: note = Description of Artificial Sequence: Synthetic peptide; note = XENP021128 vlCDR2
HASNLES

SEQ ID NO: 31033 - protein, 9 aa, synthetic construct
  source 1..9: note = Description of Artificial Sequence: Synthetic peptide; note = XENP021128 vlCDR3
QQSNEDPFT

SEQ ID NO: 31034 - protein, 226 aa, synthetic construct; identical to SEQ ID NO: 29134
  source 1..226: note = Description of Artificial Sequence: Synthetic polypeptide; note = XENP021129 7G8_H0_L0.52_Fab Heavy Chain

SEQ ID NO: 31035 - protein, 121 aa, synthetic construct; identical to SEQ ID NO: 17586
  source 1..121: note = Description of Artificial Sequence: Synthetic polypeptide; note = VH of XENP021129

SEQ ID NO: 31036 - protein, 5 aa, synthetic construct
  source 1..5: note = Description of Artificial Sequence: Synthetic peptide; note = XENP021129 vhCDR1
DAWMD

SEQ ID NO: 31037 - protein, 19 aa, synthetic construct
  source 1..19: note = Description of Artificial Sequence: Synthetic peptide; note = XENP021129 vhCDR2
EIRTKANNHATYYAESVKG

SEQ ID NO: 31038 - protein, 10 aa, synthetic construct
  source 1..10: note = Description of Artificial Sequence: Synthetic peptide; note = XENP021129 vhCDR3
LANWDWYFDV

SEQ ID NO: 31039 - protein, 218 aa, synthetic construct; identical to SEQ ID NO: 20210
  source 1..218: note = Description of Artificial Sequence: Synthetic polypeptide; note = XENP021129 7G8_H0_L0.52_Fab Light Chain

SEQ ID NO: 31040 - protein, 111 aa, synthetic construct; identical to SEQ ID NO: 20211
  source 1..111: note = Description of Artificial Sequence: Synthetic polypeptide; note = VL of XENP021129

SEQ ID NO: 31041 - protein, 15 aa, synthetic construct
  source 1..15: note = Description of Artificial Sequence: Synthetic peptide; note = XENP021129 vlCDR1
KASQSVDYDGDSYMN

SEQ ID NO: 31042 - protein, 7 aa, synthetic construct
  source 1..7: note = Description of Artificial Sequence: Synthetic peptide; note = XENP021129 vlCDR2
QASNLES

SEQ ID NO: 31043 - protein, 9 aa, synthetic construct
  source 1..9: note = Description of Artificial Sequence: Synthetic peptide; note = XENP021129 vlCDR3
QQSNEDPFT

SEQ ID NO: 31044 - protein, 226 aa, synthetic construct; identical to SEQ ID NO: 29134
  source 1..226: note = Description of Artificial Sequence: Synthetic polypeptide; note = XENP021130 7G8_H0_L0.53_Fab Heavy Chain

SEQ ID NO: 31045 - protein, 121 aa, synthetic construct; identical to SEQ ID NO: 17586
  source 1..121: note = Description of Artificial Sequence: Synthetic polypeptide; note = VH of XENP021130

SEQ ID NO: 31046 - protein, 5 aa, synthetic construct
  source 1..5: note = Description of Artificial Sequence: Synthetic peptide; note = XENP021130 vhCDR1
DAWMD

SEQ ID NO: 31047 - protein, 19 aa, synthetic construct
  source 1..19: note = Description of Artificial Sequence: Synthetic peptide; note = XENP021130 vhCDR2
EIRTKANNHATYYAESVKG

SEQ ID NO: 31048 - protein, 10 aa, synthetic construct
  source 1..10: note = Description of Artificial Sequence: Synthetic peptide; note = XENP021130 vhCDR3
LANWDWYFDV

SEQ ID NO: 31049 - protein, 218 aa, synthetic construct; identical to SEQ ID NO: 20220
  source 1..218: note = Description of Artificial Sequence: Synthetic polypeptide; note = XENP021130 7G8_H0_L0.53_Fab Light Chain

SEQ ID NO: 31050 - protein, 111 aa, synthetic construct; identical to SEQ ID NO: 20221
  source 1..111: note = Description of Artificial Sequence: Synthetic polypeptide; note = VL of XENP021130

SEQ ID NO: 31051 - protein, 15 aa, synthetic construct
  source 1..15: note = Description of Artificial Sequence: Synthetic peptide; note = XENP021130 vlCDR1
KASQSVDYDGDSYMN

SEQ ID NO: 31052 - protein, 7 aa, synthetic construct
  source 1..7: note = Description of Artificial Sequence: Synthetic peptide; note = XENP021130 vlCDR2
DASNLES

SEQ ID NO: 31053 - protein, 9 aa, synthetic construct
  source 1..9: note = Description of Artificial Sequence: Synthetic peptide; note = XENP021130 vlCDR3
QQSNEDPFT

SEQ ID NO: 31054 - protein, 226 aa, synthetic construct; identical to SEQ ID NO: 29134
  source 1..226: note = Description of Artificial Sequence: Synthetic polypeptide; note = XENP021131 7G8_H0_L0.54_Fab Heavy Chain

SEQ ID NO: 31055 - protein, 121 aa, synthetic construct; identical to SEQ ID NO: 17586
  source 1..121: note = Description of Artificial Sequence: Synthetic polypeptide; note = VH of XENP021131

SEQ ID NO: 31056 - protein, 5 aa, synthetic construct
  source 1..5: note = Description of Artificial Sequence: Synthetic peptide; note = XENP021131 vhCDR1
DAWMD

SEQ ID NO: 31057 - protein, 19 aa, synthetic construct
  source 1..19: note = Description of Artificial Sequence: Synthetic peptide; note = XENP021131 vhCDR2
EIRTKANNHATYYAESVKG

SEQ ID NO: 31058 - protein, 10 aa, synthetic construct
  source 1..10: note = Description of Artificial Sequence: Synthetic peptide; note = XENP021131 vhCDR3
LANWDWYFDV

SEQ ID NO: 31059 - protein, 218 aa, synthetic construct; identical to SEQ ID NO: 20230
  source 1..218: note = Description of Artificial Sequence: Synthetic polypeptide; note = XENP021131 7G8_H0_L0.54_Fab Light Chain

SEQ ID NO: 31060 - protein, 111 aa, synthetic construct; identical to SEQ ID NO: 20231
  source 1..111: note = Description of Artificial Sequence: Synthetic polypeptide; note = VL of XENP021131

SEQ ID NO: 31061 - protein, 15 aa, synthetic construct
  source 1..15: note = Description of Artificial Sequence: Synthetic peptide; note = XENP021131 vlCDR1
KASQSVDYDGDSYMN

SEQ ID NO: 31062 - protein, 7 aa, synthetic construct
  source 1..7: note = Description of Artificial Sequence: Synthetic peptide; note = XENP021131 vlCDR2
LASNLES

SEQ ID NO: 31063 - protein, 9 aa, synthetic construct
  source 1..9: note = Description of Artificial Sequence: Synthetic peptide; note = XENP021131 vlCDR3
QQSNEDPFT

SEQ ID NO: 31064 - protein, 226 aa, synthetic construct; identical to SEQ ID NO: 29134
  source 1..226: note = Description of Artificial Sequence: Synthetic polypeptide; note = XENP021132 7G8_H0_L0.55_Fab Heavy Chain

SEQ ID NO: 31065 - protein, 121 aa, synthetic construct; identical to SEQ ID NO: 17586
  source 1..121: note = Description of Artificial Sequence: Synthetic polypeptide; note = VH of XENP021132

SEQ ID NO: 31066 - protein, 5 aa, synthetic construct
  source 1..5: note = Description of Artificial Sequence: Synthetic peptide; note = XENP021132 vhCDR1
DAWMD

SEQ ID NO: 31067 - protein, 19 aa, synthetic construct
  source 1..19: note = Description of Artificial Sequence: Synthetic peptide; note = XENP021132 vhCDR2
EIRTKANNHATYYAESVKG

SEQ ID NO: 31068 - protein, 10 aa, synthetic construct
  source 1..10: note = Description of Artificial Sequence: Synthetic peptide; note = XENP021132 vhCDR3
LANWDWYFDV

SEQ ID NO: 31069 - protein, 218 aa, synthetic construct; identical to SEQ ID NO: 20240
  source 1..218: note = Description of Artificial Sequence: Synthetic polypeptide; note = XENP021132 7G8_H0_L0.55_Fab Light Chain

SEQ ID NO: 31070 - protein, 111 aa, synthetic construct; identical to SEQ ID NO: 20241
  source 1..111: note = Description of Artificial Sequence: Synthetic polypeptide; note = VL of XENP021132

SEQ ID NO: 31071 - protein, 15 aa, synthetic construct
  source 1..15: note = Description of Artificial Sequence: Synthetic peptide; note = XENP021132 vlCDR1
KASQSVDYDGDSYMN

SEQ ID NO: 31072 - protein, 7 aa, synthetic construct
  source 1..7: note = Description of Artificial Sequence: Synthetic peptide; note = XENP021132 vlCDR2
KASNLES

SEQ ID NO: 31073 - protein, 9 aa, synthetic construct
  source 1..9: note = Description of Artificial Sequence: Synthetic peptide; note = XENP021132 vlCDR3
QQSNEDPFT

SEQ ID NO: 31074 - protein, 226 aa, synthetic construct; identical to SEQ ID NO: 29134
  source 1..226: note = Description of Artificial Sequence: Synthetic polypeptide; note = XENP021133 7G8_H0_L0.56_Fab Heavy Chain

SEQ ID NO: 31075 - protein, 121 aa, synthetic construct; identical to SEQ ID NO: 17586
  source 1..121: note = Description of Artificial Sequence: Synthetic polypeptide; note = VH of XENP021133

SEQ ID NO: 31076 - protein, 5 aa, synthetic construct
  source 1..5: note = Description of Artificial Sequence: Synthetic peptide; note = XENP021133 vhCDR1
DAWMD

SEQ ID NO: 31077 - protein, 19 aa, synthetic construct
  source 1..19: note = Description of Artificial Sequence: Synthetic peptide; note = XENP021133 vhCDR2
EIRTKANNHATYYAESVKG

SEQ ID NO: 31078 - protein, 10 aa, synthetic construct
  source 1..10: note = Description of Artificial Sequence: Synthetic peptide; note = XENP021133 vhCDR3
LANWDWYFDV

SEQ ID NO: 31079 - protein, 218 aa, synthetic construct; identical to SEQ ID NO: 20250
  source 1..218: note = Description of Artificial Sequence: Synthetic polypeptide; note = XENP021133 7G8_H0_L0.56_Fab Light Chain

SEQ ID NO: 31080 - protein, 111 aa, synthetic construct; identical to SEQ ID NO: 20251
  source 1..111: note = Description of Artificial Sequence: Synthetic polypeptide; note = VL of XENP021133

SEQ ID NO: 31081 - protein, 15 aa, synthetic construct
  source 1..15: note = Description of Artificial Sequence: Synthetic peptide; note = XENP021133 vlCDR1
KASQSVDYDGDSYMN

SEQ ID NO: 31082 - protein, 7 aa, synthetic construct
  source 1..7: note = Description of Artificial Sequence: Synthetic peptide; note = XENP021133 vlCDR2
YASNLES

SEQ ID NO: 31083 - protein, 9 aa, synthetic construct
  source 1..9: note = Description of Artificial Sequence: Synthetic peptide; note = XENP021133 vlCDR3
QQSNEDPFT

SEQ ID NO: 31084 - protein, 226 aa, synthetic construct; identical to SEQ ID NO: 29134
  source 1..226: note = Description of Artificial Sequence: Synthetic polypeptide; note = XENP021134 7G8_H0_L0.57_Fab Heavy Chain

SEQ ID NO: 31085 - protein, 121 aa, synthetic construct; identical to SEQ ID NO: 17586
  source 1..121: note = Description of Artificial Sequence: Synthetic polypeptide; note = VH of XENP021134

SEQ ID NO: 31086 - protein, 5 aa, synthetic construct
  source 1..5: note = Description of Artificial Sequence: Synthetic peptide; note = XENP021134 vhCDR1
DAWMD

SEQ ID NO: 31087 - protein, 19 aa, synthetic construct
  source 1..19: note = Description of Artificial Sequence: Synthetic peptide; note = XENP021134 vhCDR2
EIRTKANNHATYYAESVKG

SEQ ID NO: 31088 - protein, 10 aa, synthetic construct
  source 1..10: note = Description of Artificial Sequence: Synthetic peptide; note = XENP021134 vhCDR3
LANWDWYFDV

SEQ ID NO: 31089 - protein, 218 aa, synthetic construct; identical to SEQ ID NO: 20260
  source 1..218: note = Description of Artificial Sequence: Synthetic polypeptide; note = XENP021134 7G8_H0_L0.57_Fab Light Chain

SEQ ID NO: 31090 - protein, 111 aa, synthetic construct; identical to SEQ ID NO: 20261
  source 1..111: note = Description of Artificial Sequence: Synthetic polypeptide; note = VL of XENP021134

SEQ ID NO: 31091 - protein, 15 aa, synthetic construct
  source 1..15: note = Description of Artificial Sequence: Synthetic peptide; note = XENP021134 vlCDR1
KASQSVDYDGDSYMN

SEQ ID NO: 31092 - protein, 7 aa, synthetic construct
  source 1..7: note = Description of Artificial Sequence: Synthetic peptide; note = XENP021134 vlCDR2
AASDLES

SEQ ID NO: 31093 - protein, 9 aa, synthetic construct
  source 1..9: note = Description of Artificial Sequence: Synthetic peptide; note = XENP021134 vlCDR3
QQSNEDPFT

SEQ ID NO: 31094 - protein, 226 aa, synthetic construct; identical to SEQ ID NO: 29134
  source 1..226: note = Description of Artificial Sequence: Synthetic polypeptide; note = XENP021135 7G8_H0_L0.58_Fab Heavy Chain

SEQ ID NO: 31095 - protein, 121 aa, synthetic construct; identical to SEQ ID NO: 17586
  source 1..121: note = Description of Artificial Sequence: Synthetic polypeptide; note = VH of XENP021135

SEQ ID NO: 31096 - protein, 5 aa, synthetic construct
  source 1..5: note = Description of Artificial Sequence: Synthetic peptide; note = XENP021135 vhCDR1
DAWMD

SEQ ID NO: 31097 - protein, 19 aa, synthetic construct
  source 1..19: note = Description of Artificial Sequence: Synthetic peptide; note = XENP021135 vhCDR2
EIRTKANNHATYYAESVKG

SEQ ID NO: 31098 - protein, 10 aa, synthetic construct
  source 1..10: note = Description of Artificial Sequence: Synthetic peptide; note = XENP021135 vhCDR3
LANWDWYFDV

SEQ ID NO: 31099 - protein, 218 aa, synthetic construct; identical to SEQ ID NO: 20270
  source 1..218: note = Description of Artificial Sequence: Synthetic polypeptide; note = XENP021135 7G8_H0_L0.58_Fab Light Chain

SEQ ID NO: 31100 - protein, 111 aa, synthetic construct; identical to SEQ ID NO: 20271
  source 1..111: note = Description of Artificial Sequence: Synthetic polypeptide; note = VL of XENP021135

SEQ ID NO: 31101 - protein, 15 aa, synthetic construct
  source 1..15: note = Description of Artificial Sequence: Synthetic peptide; note = XENP021135 vlCDR1
KASQSVDYDGDSYMN

SEQ ID NO: 31102 - protein, 7 aa, synthetic construct
  source 1..7: note = Description of Artificial Sequence: Synthetic peptide; note = XENP021135 vlCDR2
AASHLES

SEQ ID NO: 31103 - protein, 9 aa, synthetic construct
  source 1..9: note = Description of Artificial Sequence: Synthetic peptide; note = XENP021135 vlCDR3
QQSNEDPFT

SEQ ID NO: 31104 - protein, 226 aa, synthetic construct; identical to SEQ ID NO: 29134
  source 1..226: note = Description of Artificial Sequence: Synthetic polypeptide; note = XENP021136 7G8_H0_L0.59_Fab Heavy Chain

SEQ ID NO: 31105 - protein, 121 aa, synthetic construct; identical to SEQ ID NO: 17586
  source 1..121: note = Description of Artificial Sequence: Synthetic polypeptide; note = VH of XENP021136

SEQ ID NO: 31106 - protein, 5 aa, synthetic construct
  source 1..5: note = Description of Artificial Sequence: Synthetic peptide; note = XENP021136 vhCDR1
DAWMD

SEQ ID NO: 31107 - protein, 19 aa, synthetic construct
  source 1..19: note = Description of Artificial Sequence: Synthetic peptide; note = XENP021136 vhCDR2
EIRTKANNHATYYAESVKG

SEQ ID NO: 31108 - protein, 10 aa, synthetic construct
  source 1..10: note = Description of Artificial Sequence: Synthetic peptide; note = XENP021136 vhCDR3
LANWDWYFDV

SEQ ID NO: 31109 - protein, 218 aa, synthetic construct; identical to SEQ ID NO: 20280
  source 1..218: note = Description of Artificial Sequence: Synthetic polypeptide; note = XENP021136 7G8_H0_L0.59_Fab Light Chain

SEQ ID NO: 31110 - protein, 111 aa, synthetic construct; identical to SEQ ID NO: 20281
  source 1..111: note = Description of Artificial Sequence: Synthetic polypeptide; note = VL of XENP021136

SEQ ID NO: 31111 - protein, 15 aa, synthetic construct
  source 1..15: note = Description of Artificial Sequence: Synthetic peptide; note = XENP021136 vlCDR1
KASQSVDYDGDSYMN

SEQ ID NO: 31112 - protein, 7 aa, synthetic construct
  source 1..7: note = Description of Artificial Sequence: Synthetic peptide; note = XENP021136 vlCDR2
AASELES

SEQ ID NO: 31113 - protein, 9 aa, synthetic construct
  source 1..9: note = Description of Artificial Sequence: Synthetic peptide; note = XENP021136 vlCDR3
QQSNEDPFT

SEQ ID NO: 31114 - protein, 226 aa, synthetic construct; identical to SEQ ID NO: 29134
  source 1..226: note = Description of Artificial Sequence: Synthetic polypeptide; note = XENP021137 7G8_H0_L0.60_Fab Heavy Chain

SEQ ID NO: 31115 - protein, 121 aa, synthetic construct; identical to SEQ ID NO: 17586
  source 1..121: note = Description of Artificial Sequence: Synthetic polypeptide; note = VH of XENP021137

SEQ ID NO: 31116 - protein, 5 aa, synthetic construct
  source 1..5: note = Description of Artificial Sequence: Synthetic peptide; note = XENP021137 vhCDR1
DAWMD

SEQ ID NO: 31117 - protein, 19 aa, synthetic construct
  source 1..19: note = Description of Artificial Sequence: Synthetic peptide; note = XENP021137 vhCDR2
EIRTKANNHATYYAESVKG

SEQ ID NO: 31118 - protein, 10 aa, synthetic construct
  source 1..10: note = Description of Artificial Sequence: Synthetic peptide; note = XENP021137 vhCDR3
LANWDWYFDV

SEQ ID NO: 31119 - protein, 218 aa, synthetic construct; identical to SEQ ID NO: 20290
  source 1..218: note = Description of Artificial Sequence: Synthetic polypeptide; note = XENP021137 7G8_H0_L0.60_Fab Light Chain

SEQ ID NO: 31120 - protein, 111 aa, synthetic construct; identical to SEQ ID NO: 20291
  source 1..111: note = Description of Artificial Sequence: Synthetic polypeptide; note = VL of XENP021137

SEQ ID NO: 31121 - protein, 15 aa, synthetic construct
  source 1..15: note = Description of Artificial Sequence: Synthetic peptide; note = XENP021137 vlCDR1
KASQSVDYDGDSYMN

SEQ ID NO: 31122 - protein, 7 aa, synthetic construct
  source 1..7: note = Description of Artificial Sequence: Synthetic peptide; note = XENP021137 vlCDR2
AASSLES

SEQ ID NO: 31123 - protein, 9 aa, synthetic construct
  source 1..9: note = Description of Artificial Sequence: Synthetic peptide; note = XENP021137 vlCDR3
QQSNEDPFT

SEQ ID NO: 31124 - protein, 226 aa, synthetic construct; identical to SEQ ID NO: 29134
  source 1..226: note = Description of Artificial Sequence: Synthetic polypeptide; note = XENP021138 7G8_H0_L0.61_Fab Heavy Chain

SEQ ID NO: 31125 - protein, 121 aa, synthetic construct; identical to SEQ ID NO: 17586
  source 1..121: note = Description of Artificial Sequence: Synthetic polypeptide; note = VH of XENP021138

SEQ ID NO: 31126 - protein, 5 aa, synthetic construct
  source 1..5: note = Description of Artificial Sequence: Synthetic peptide; note = XENP021138 vhCDR1
DAWMD

SEQ ID NO: 31127 - protein, 19 aa, synthetic construct
  source 1..19: note = Description of Artificial Sequence: Synthetic peptide; note = XENP021138 vhCDR2
EIRTKANNHATYYAESVKG

SEQ ID NO: 31128 - protein, 10 aa, synthetic construct
  source 1..10: note = Description of Artificial Sequence: Synthetic peptide; note = XENP021138 vhCDR3
LANWDWYFDV

SEQ ID NO: 31129 - protein, 218 aa, synthetic construct; identical to SEQ ID NO: 20300
  source 1..218: note = Description of Artificial Sequence: Synthetic polypeptide; note = XENP021138 7G8_H0_L0.61_Fab Light Chain

SEQ ID NO: 31130 - protein, 111 aa, synthetic construct; identical to SEQ ID NO: 20301
  source 1..111: note = Description of Artificial Sequence: Synthetic polypeptide; note = VL of XENP021138

SEQ ID NO: 31131 - protein, 15 aa, synthetic construct
  source 1..15: note = Description of Artificial Sequence: Synthetic peptide; note = XENP021138 vlCDR1
KASQSVDYDGDSYMN

SEQ ID NO: 31132 - protein, 7 aa, synthetic construct
  source 1..7: note = Description of Artificial Sequence: Synthetic peptide; note = XENP021138 vlCDR2
AASRLES

SEQ ID NO: 31133 - protein, 9 aa, synthetic construct
  source 1..9: note = Description of Artificial Sequence: Synthetic peptide; note = XENP021138 vlCDR3
QQSNEDPFT

SEQ ID NO: 31134 - protein, 226 aa, synthetic construct; identical to SEQ ID NO: 29134
  source 1..226: note = Description of Artificial Sequence: Synthetic polypeptide; note = XENP021139 7G8_H0_L0.62_Fab Heavy Chain

SEQ ID NO: 31135 - protein, 121 aa, synthetic construct; identical to SEQ ID NO: 17586
  source 1..121: note = Description of Artificial Sequence: Synthetic polypeptide; note = VH of XENP021139

SEQ ID NO: 31136 - protein, 5 aa, synthetic construct
  source 1..5: note = Description of Artificial Sequence: Synthetic peptide; note = XENP021139 vhCDR1
DAWMD

SEQ ID NO: 31137 - protein, 19 aa, synthetic construct
  source 1..19: note = Description of Artificial Sequence: Synthetic peptide; note = XENP021139 vhCDR2
EIRTKANNHATYYAESVKG

SEQ ID NO: 31138 - protein, 10 aa, synthetic construct
  source 1..10: note = Description of Artificial Sequence: Synthetic peptide; note = XENP021139 vhCDR3
LANWDWYFDV

SEQ ID NO: 31139 - protein, 218 aa, synthetic construct; identical to SEQ ID NO: 20310
  source 1..218: note = Description of Artificial Sequence: Synthetic polypeptide; note = XENP021139 7G8_H0_L0.62_Fab Light Chain

SEQ ID NO: 31140 - protein, 111 aa, synthetic construct; identical to SEQ ID NO: 20311
  source 1..111: note = Description of Artificial Sequence: Synthetic polypeptide; note = VL of XENP021139

SEQ ID NO: 31141 - protein, 15 aa, synthetic construct
  source 1..15: note = Description of Artificial Sequence: Synthetic peptide; note = XENP021139 vlCDR1
KASQSVDYDGDSYMN

SEQ ID NO: 31142 - protein, 7 aa, synthetic construct
  source 1..7: note = Description of Artificial Sequence: Synthetic peptide; note = XENP021139 vlCDR2
AASLLES

SEQ ID NO: 31143 - protein, 9 aa, synthetic construct
  source 1..9: note = Description of Artificial Sequence: Synthetic peptide; note = XENP021139 vlCDR3
QQSNEDPFT

SEQ ID NO: 31144 - protein, 226 aa, synthetic construct; identical to SEQ ID NO: 29134
  source 1..226: note = Description of Artificial Sequence: Synthetic polypeptide; note = XENP021140 7G8_H0_L0.63_Fab Heavy Chain

SEQ ID NO: 31145 - protein, 121 aa, synthetic construct; identical to SEQ ID NO: 17586
  source 1..121: note = Description of Artificial Sequence: Synthetic polypeptide; note = VH of XENP021140

SEQ ID NO: 31146 - protein, 5 aa, synthetic construct
  source 1..5: note = Description of Artificial Sequence: Synthetic peptide; note = XENP021140 vhCDR1
DAWMD

SEQ ID NO: 31147 - protein, 19 aa, synthetic construct
  source 1..19: note = Description of Artificial Sequence: Synthetic peptide; note = XENP021140 vhCDR2
EIRTKANNHATYYAESVKG

SEQ ID NO: 31148 - protein, 10 aa, synthetic construct
  source 1..10: note = Description of Artificial Sequence: Synthetic peptide; note = XENP021140 vhCDR3
LANWDWYFDV

SEQ ID NO: 31149 - protein, 218 aa, synthetic construct; identical to SEQ ID NO: 20320
  source 1..218: note = Description of Artificial Sequence: Synthetic polypeptide; note = XENP021140 7G8_H0_L0.63_Fab Light Chain

SEQ ID NO: 31150 - protein, 111 aa, synthetic construct; identical to SEQ ID NO: 20321
  source 1..111: note = Description of Artificial Sequence: Synthetic polypeptide; note = VL of XENP021140

SEQ ID NO: 31151 - protein, 15 aa, synthetic construct
  source 1..15: note = Description of Artificial Sequence: Synthetic peptide; note = XENP021140 vlCDR1
KASQSVDYDGDSYMN

SEQ ID NO: 31152 - protein, 7 aa, synthetic construct
  source 1..7: note = Description of Artificial Sequence: Synthetic peptide; note = XENP021140 vlCDR2
AASTLES

SEQ ID NO: 31153 - protein, 9 aa, synthetic construct
  source 1..9: note = Description of Artificial Sequence: Synthetic peptide; note = XENP021140 vlCDR3
QQSNEDPFT

SEQ ID NO: 31154 - protein, 226 aa, synthetic construct; identical to SEQ ID NO: 29134
  source 1..226: note = Description of Artificial Sequence: Synthetic polypeptide; note = XENP021141 7G8_H0_L0.64_Fab Heavy Chain

SEQ ID NO: 31155 - protein, 121 aa, synthetic construct; identical to SEQ ID NO: 17586
  source 1..121: note = Description of Artificial Sequence: Synthetic polypeptide; note = VH of XENP021141

SEQ ID NO: 31156 - protein, 5 aa, synthetic construct
  source 1..5: note = Description of Artificial Sequence: Synthetic peptide; note = XENP021141 vhCDR1
DAWMD

SEQ ID NO: 31157 - protein, 19 aa, synthetic construct
  source 1..19: note = Description of Artificial Sequence: Synthetic peptide; note = XENP021141 vhCDR2
EIRTKANNHATYYAESVKG

SEQ ID NO: 31158 - protein, 10 aa, synthetic construct
  source 1..10: note = Description of Artificial Sequence: Synthetic peptide; note = XENP021141 vhCDR3
LANWDWYFDV

SEQ ID NO: 31159 - protein, 218 aa, synthetic construct; identical to SEQ ID NO: 20330
  source 1..218: note = Description of Artificial Sequence: Synthetic polypeptide; note = XENP021141 7G8_H0_L0.64_Fab Light Chain

SEQ ID NO: 31160 - protein, 111 aa, synthetic construct; identical to SEQ ID NO: 20331
  source 1..111: note = Description of Artificial Sequence: Synthetic polypeptide; note = VL of XENP021141

SEQ ID NO: 31161 - protein, 15 aa, synthetic construct
  source 1..15: note = Description of Artificial Sequence: Synthetic peptide; note = XENP021141 vlCDR1
KASQSVDYDGDSYMN

SEQ ID NO: 31162 - protein, 7 aa, synthetic construct
  source 1..7: note = Description of Artificial Sequence: Synthetic peptide; note = XENP021141 vlCDR2
AASGLES

SEQ ID NO: 31163 - protein, 9 aa, synthetic construct
  source 1..9: note = Description of Artificial Sequence: Synthetic peptide; note = XENP021141 vlCDR3
QQSNEDPFT

SEQ ID NO: 31164 - protein, 226 aa, synthetic construct; identical to SEQ ID NO: 29134
  source 1..226: note = Description of Artificial Sequence: Synthetic polypeptide; note = XENP021142 7G8_H0_L0.65_Fab Heavy Chain

SEQ ID NO: 31165 - protein, 121 aa, synthetic construct; identical to SEQ ID NO: 17586
  source 1..121: note = Description of Artificial Sequence: Synthetic polypeptide; note = VH of XENP021142

SEQ ID NO: 31166 - protein, 5 aa, synthetic construct
  source 1..5: note = Description of Artificial Sequence: Synthetic peptide; note = XENP021142 vhCDR1
DAWMD

SEQ ID NO: 31167 - protein, 19 aa, synthetic construct
  source 1..19: note = Description of Artificial Sequence: Synthetic peptide; note = XENP021142 vhCDR2
EIRTKANNHATYYAESVKG

SEQ ID NO: 31168 - protein, 10 aa, synthetic construct
  source 1..10: note = Description of Artificial Sequence: Synthetic peptide; note = XENP021142 vhCDR3
LANWDWYFDV

SEQ ID NO: 31169 - protein, 218 aa, synthetic construct; identical to SEQ ID NO: 20340
  source 1..218: note = Description of Artificial Sequence: Synthetic polypeptide; note = XENP021142 7G8_H0_L0.65_Fab Light Chain

SEQ ID NO: 31170 - protein, 111 aa, synthetic construct; identical to SEQ ID NO: 20341
  source 1..111: note = Description of Artificial Sequence: Synthetic polypeptide; note = VL of XENP021142

SEQ ID NO: 31171 - protein, 15 aa, synthetic construct
  source 1..15: note = Description of Artificial Sequence: Synthetic peptide; note = XENP021142 vlCDR1
KASQSVDYDGDSYMN

SEQ ID NO: 31172 - protein, 7 aa, synthetic construct
  source 1..7: note = Description of Artificial Sequence: Synthetic peptide; note = XENP021142 vlCDR2
AASYLES

SEQ ID NO: 31173 - protein, 9 aa, synthetic construct
  source 1..9: note = Description of Artificial Sequence: Synthetic peptide; note = XENP021142 vlCDR3
QQSNEDPFT

SEQ ID NO: 31174 - protein, 226 aa, synthetic construct; identical to SEQ ID NO: 29134
  source 1..226: note = Description of Artificial Sequence: Synthetic polypeptide; note = XENP021143 7G8_H0_L0.66_Fab Heavy Chain

SEQ ID NO: 31175 - protein, 121 aa, synthetic construct; identical to SEQ ID NO: 17586
  source 1..121: note = Description of Artificial Sequence: Synthetic polypeptide; note = VH of XENP021143

SEQ ID NO: 31176 - protein, 5 aa, synthetic construct
  source 1..5: note = Description of Artificial Sequence: Synthetic peptide; note = XENP021143 vhCDR1
DAWMD

SEQ ID NO: 31177 - protein, 19 aa, synthetic construct
  source 1..19: note = Description of Artificial Sequence: Synthetic peptide; note = XENP021143 vhCDR2
EIRTKANNHATYYAESVKG

SEQ ID NO: 31178 - protein, 10 aa, synthetic construct
  source 1..10: note = Description of Artificial Sequence: Synthetic peptide; note = XENP021143 vhCDR3
LANWDWYFDV

SEQ ID NO: 31179 - protein, 218 aa, synthetic construct; identical to SEQ ID NO: 20350
  source 1..218: note = Description of Artificial Sequence: Synthetic polypeptide; note = XENP021143 7G8_H0_L0.66_Fab Light Chain

SEQ ID NO: 31180 - protein, 111 aa, synthetic construct; identical to SEQ ID NO: 20351
  source 1..111: note = Description of Artificial Sequence: Synthetic polypeptide; note = VL of XENP021143

SEQ ID NO: 31181 - protein, 15 aa, synthetic construct
  source 1..15: note = Description of Artificial Sequence: Synthetic peptide; note = XENP021143 vlCDR1
KASQSVDYDGDSYMN

SEQ ID NO: 31182 - protein, 7 aa, synthetic construct
  source 1..7: note = Description of Artificial Sequence: Synthetic peptide; note = XENP021143 vlCDR2
AASNLQS

SEQ ID NO: 31183 - protein, 9 aa, synthetic construct
  source 1..9: note = Description of Artificial Sequence: Synthetic peptide; note = XENP021143 vlCDR3
QQSNEDPFT

SEQ ID NO: 31184 - protein, 226 aa, synthetic construct; identical to SEQ ID NO: 29134
  source 1..226: note = Description of Artificial Sequence: Synthetic polypeptide; note = XENP021144 7G8_H0_L0.67_Fab Heavy Chain

SEQ ID NO: 31185 - protein, 121 aa, synthetic construct; identical to SEQ ID NO: 17586
  source 1..121: note = Description of Artificial Sequence: Synthetic polypeptide; note = VH of XENP021144

SEQ ID NO: 31186 - protein, 5 aa, synthetic construct
  source 1..5: note = Description of Artificial Sequence: Synthetic peptide; note = XENP021144 vhCDR1
DAWMD

SEQ ID NO: 31187 - protein, 19 aa, synthetic construct
  source 1..19: note = Description of Artificial Sequence: Synthetic peptide; note = XENP021144 vhCDR2
EIRTKANNHATYYAESVKG

SEQ ID NO: 31188 - protein, 10 aa, synthetic construct
  source 1..10: note = Description of Artificial Sequence: Synthetic peptide; note = XENP021144 vhCDR3
LANWDWYFDV

SEQ ID NO: 31189 - protein, 218 aa, synthetic construct; identical to SEQ ID NO: 20360
  source 1..218: note = Description of Artificial Sequence: Synthetic polypeptide; note = XENP021144 7G8_H0_L0.67_Fab Light Chain

SEQ ID NO: 31190 - protein, 111 aa, synthetic construct; identical to SEQ ID NO: 20361
  source 1..111: note = Description of Artificial Sequence: Synthetic polypeptide; note = VL of XENP021144

SEQ ID NO: 31191 - protein, 15 aa, synthetic construct
  source 1..15: note = Description of Artificial Sequence: Synthetic peptide; note = XENP021144 vlCDR1
KASQSVDYDGDSYMN

SEQ ID NO: 31192 - protein, 7 aa, synthetic construct
  source 1..7: note = Description of Artificial Sequence: Synthetic peptide; note = XENP021144 vlCDR2
AASNLDS

SEQ ID NO: 31193 - protein, 9 aa, synthetic construct
  source 1..9: note = Description of Artificial Sequence: Synthetic peptide; note = XENP021144 vlCDR3
QQSNEDPFT

SEQ ID NO: 31194 - protein, 226 aa, synthetic construct; identical to SEQ ID NO: 29134
  source 1..226: note = Description of Artificial Sequence: Synthetic polypeptide; note = XENP021145 7G8_H0_L0.68_Fab Heavy Chain

SEQ ID NO: 31195 - protein, 121 aa, synthetic construct; identical to SEQ ID NO: 17586
  source 1..121: note = Description of Artificial Sequence: Synthetic polypeptide; note = VH of XENP021145

SEQ ID NO: 31196 - protein, 5 aa, synthetic construct
  source 1..5: note = Description of Artificial Sequence: Synthetic peptide; note = XENP021145 vhCDR1
DAWMD

SEQ ID NO: 31197 - protein, 19 aa, synthetic construct
  source 1..19: note = Description of Artificial Sequence: Synthetic peptide; note = XENP021145 vhCDR2
EIRTKANNHATYYAESVKG

SEQ ID NO: 31198 - protein, 10 aa, synthetic construct
  source 1..10: note = Description of Artificial Sequence: Synthetic peptide; note = XENP021145 vhCDR3
LANWDWYFDV

SEQ ID NO: 31199 - protein, 218 aa, synthetic construct; identical to SEQ ID NO: 20370
  source 1..218: note = Description of Artificial Sequence: Synthetic polypeptide; note = XENP021145 7G8_H0_L0.68_Fab Light Chain

SEQ ID NO: 31200 - protein, 111 aa, synthetic construct; identical to SEQ ID NO: 20371
  source 1..111: note = Description of Artificial Sequence: Synthetic polypeptide; note = VL of XENP021145

SEQ ID NO: 31201 - protein, 15 aa, synthetic construct
  source 1..15: note = Description of Artificial Sequence: Synthetic peptide; note = XENP021145 vlCDR1
KASQSVDYDGDSYMN

SEQ ID NO: 31202 - protein, 7 aa, synthetic construct
  source 1..7: note = Description of Artificial Sequence: Synthetic peptide; note = XENP021145 vlCDR2
AASNLKS

SEQ ID NO: 31203 - protein, 9 aa, synthetic construct
  source 1..9: note = Description of Artificial Sequence: Synthetic peptide; note = XENP021145 vlCDR3
QQSNEDPFT

SEQ ID NO: 31204 - protein, 226 aa, synthetic construct; identical to SEQ ID NO: 29134
  source 1..226: note = Description of Artificial Sequence: Synthetic polypeptide; note = XENP021146 7G8_H0_L0.69_Fab Heavy Chain

SEQ ID NO: 31205 - protein, 121 aa, synthetic construct; identical to SEQ ID NO: 17586
  source 1..121: note = Description of Artificial Sequence: Synthetic polypeptide; note = VH of XENP021146

SEQ ID NO: 31206 - protein, 5 aa, synthetic construct
  source 1..5: note = Description of Artificial Sequence: Synthetic peptide; note = XENP021146 vhCDR1
DAWMD

SEQ ID NO: 31207 - protein, 19 aa, synthetic construct
  source 1..19: note = Description of Artificial Sequence: Synthetic peptide; note = XENP021146 vhCDR2
EIRTKANNHATYYAESVKG

SEQ ID NO: 31208 - protein, 10 aa, synthetic construct
  source 1..10: note = Description of Artificial Sequence: Synthetic peptide; note = XENP021146 vhCDR3
LANWDWYFDV

SEQ ID NO: 31209 - protein, 218 aa, synthetic construct; identical to SEQ ID NO: 20380
  source 1..218: note = Description of Artificial Sequence: Synthetic polypeptide; note = XENP021146 7G8_H0_L0.69_Fab Light Chain

SEQ ID NO: 31210 - protein, 111 aa, synthetic construct; identical to SEQ ID NO: 20381
  source 1..111: note = Description of Artificial Sequence: Synthetic polypeptide; note = VL of XENP021146

SEQ ID NO: 31211 - protein, 15 aa, synthetic construct
  source 1..15: note = Description of Artificial Sequence: Synthetic peptide; note = XENP021146 vlCDR1
KASQSVDYDGDSYMN

SEQ ID NO: 31212 - protein, 7 aa, synthetic construct
  source 1..7: note = Description of Artificial Sequence: Synthetic peptide; note = XENP021146 vlCDR2
AASNLHS

SEQ ID NO: 31213 - protein, 9 aa, synthetic construct
  source 1..9: note = Description of Artificial Sequence: Synthetic peptide; note = XENP021146 vlCDR3
QQSNEDPFT

SEQ ID NO: 31214 - protein, 226 aa, synthetic construct; identical to SEQ ID NO: 29134
  source 1..226: note = Description of Artificial Sequence: Synthetic polypeptide; note = XENP021147 7G8_H0_L0.70_Fab Heavy Chain

SEQ ID NO: 31215 - protein, 121 aa, synthetic construct; identical to SEQ ID NO: 17586
  source 1..121: note = Description of Artificial Sequence: Synthetic polypeptide; note = VH of XENP021147

SEQ ID NO: 31216 - protein, 5 aa, synthetic construct
  source 1..5: note = Description of Artificial Sequence: Synthetic peptide; note = XENP021147 vhCDR1
DAWMD

SEQ ID NO: 31217 - protein, 19 aa, synthetic construct
  source 1..19: note = Description of Artificial Sequence: Synthetic peptide; note = XENP021147 vhCDR2
EIRTKANNHATYYAESVKG

SEQ ID NO: 31218 - protein, 10 aa, synthetic construct
  source 1..10: note = Description of Artificial Sequence: Synthetic peptide; note = XENP021147 vhCDR3
LANWDWYFDV

SEQ ID NO: 31219 - protein, 218 aa, synthetic construct; identical to SEQ ID NO: 20390
  source 1..218: note = Description of Artificial Sequence: Synthetic polypeptide; note = XENP021147 7G8_H0_L0.70_Fab Light Chain

SEQ ID NO: 31220 - protein, 111 aa, synthetic construct; identical to SEQ ID NO: 20391
  source 1..111: note = Description of Artificial Sequence: Synthetic polypeptide; note = VL of XENP021147

SEQ ID NO: 31221 - protein, 15 aa, synthetic construct
  source 1..15: note = Description of Artificial Sequence: Synthetic peptide; note = XENP021147 vlCDR1
KASQSVDYDGDSYMN

SEQ ID NO: 31222 - protein, 7 aa, synthetic construct
  source 1..7: note = Description of Artificial Sequence: Synthetic peptide; note = XENP021147 vlCDR2
AASNLAS

SEQ ID NO: 31223 - protein, 9 aa, synthetic construct
  source 1..9: note = Description of Artificial Sequence: Synthetic peptide; note = XENP021147 vlCDR3
QQSNEDPFT

SEQ ID NO: 31224 - protein, 226 aa, synthetic construct; identical to SEQ ID NO: 29134
  source 1..226: note = Description of Artificial Sequence: Synthetic polypeptide; note = XENP021148 7G8_H0_L0.71_Fab Heavy Chain

SEQ ID NO: 31225 - protein, 121 aa, synthetic construct; identical to SEQ ID NO: 17586
  source 1..121: note = Description of Artificial Sequence: Synthetic polypeptide; note = VH of XENP021148

SEQ ID NO: 31226 - protein, 5 aa, synthetic construct
  source 1..5: note = Description of Artificial Sequence: Synthetic peptide; note = XENP021148 vhCDR1
DAWMD

SEQ ID NO: 31227 - protein, 19 aa, synthetic construct
  source 1..19: note = Description of Artificial Sequence: Synthetic peptide; note = XENP021148 vhCDR2
EIRTKANNHATYYAESVKG

SEQ ID NO: 31228 - protein, 10 aa, synthetic construct
  source 1..10: note = Description of Artificial Sequence: Synthetic peptide; note = XENP021148 vhCDR3
LANWDWYFDV

SEQ ID NO: 31229 - protein, 218 aa, synthetic construct; identical to SEQ ID NO: 20400
  source 1..218: note = Description of Artificial Sequence: Synthetic polypeptide; note = XENP021148 7G8_H0_L0.71_Fab Light Chain

SEQ ID NO: 31230 - protein, 111 aa, synthetic construct; identical to SEQ ID NO: 20401
  source 1..111: note = Description of Artificial Sequence: Synthetic polypeptide; note = VL of XENP021148

SEQ ID NO: 31231 - protein, 15 aa, synthetic construct
  source 1..15: note = Description of Artificial Sequence: Synthetic peptide; note = XENP021148 vlCDR1
KASQSVDYDGDSYMN

SEQ ID NO: 31232 - protein, 7 aa, synthetic construct
  source 1..7: note = Description of Artificial Sequence: Synthetic peptide; note = XENP021148 vlCDR2
AASNLGS

SEQ ID NO: 31233 - protein, 9 aa, synthetic construct
  source 1..9: note = Description of Artificial Sequence: Synthetic peptide; note = XENP021148 vlCDR3
QQSNEDPFT

SEQ ID NO: 31234 - protein, 226 aa, synthetic construct; identical to SEQ ID NO: 29134
  source 1..226: note = Description of Artificial Sequence: Synthetic polypeptide; note = XENP021149 7G8_H0_L0.72_Fab Heavy Chain

SEQ ID NO: 31235 - protein, 121 aa, synthetic construct; identical to SEQ ID NO: 17586
  source 1..121: note = Description of Artificial Sequence: Synthetic polypeptide; note = VH of XENP021149

SEQ ID NO: 31236 - protein, 5 aa, synthetic construct
  source 1..5: note = Description of Artificial Sequence: Synthetic peptide; note = XENP021149 vhCDR1
DAWMD

SEQ ID NO: 31237 - protein, 19 aa, synthetic construct
  source 1..19: note = Description of Artificial Sequence: Synthetic peptide; note = XENP021149 vhCDR2
EIRTKANNHATYYAESVKG

SEQ ID NO: 31238 - protein, 10 aa, synthetic construct
  source 1..10: note = Description of Artificial Sequence: Synthetic peptide; note = XENP021149 vhCDR3
LANWDWYFDV

SEQ ID NO: 31239 - protein, 218 aa, synthetic construct; identical to SEQ ID NO: 20410
  source 1..218: note = Description of Artificial Sequence: Synthetic polypeptide; note = XENP021149 7G8_H0_L0.72_Fab Light Chain

SEQ ID NO: 31240 - protein, 111 aa, synthetic construct; identical to SEQ ID NO: 20411
  source 1..111: note = Description of Artificial Sequence: Synthetic polypeptide; note = VL of XENP021149

SEQ ID NO: 31241 - protein, 15 aa, synthetic construct
  source 1..15: note = Description of Artificial Sequence: Synthetic peptide; note = XENP021149 vlCDR1
KASQSVDYDGDSYMN

SEQ ID NO: 31242 - protein, 7 aa, synthetic construct
  source 1..7: note = Description of Artificial Sequence: Synthetic peptide; note = XENP021149 vlCDR2
AASNLYS

SEQ ID NO: 31243 - protein, 9 aa, synthetic construct
  source 1..9: note = Description of Artificial Sequence: Synthetic peptide; note = XENP021149 vlCDR3
QQSNEDPFT

SEQ ID NO: 31244 - protein, 226 aa, synthetic construct; identical to SEQ ID NO: 29134
  source 1..226: note = Description of Artificial Sequence: Synthetic polypeptide; note = XENP021150 7G8_H0_L0.73_Fab Heavy Chain

SEQ ID NO: 31245 - protein, 121 aa, synthetic construct; identical to SEQ ID NO: 17586
  source 1..121: note = Description of Artificial Sequence: Synthetic polypeptide; note = VH of XENP021150

SEQ ID NO: 31246 - protein, 5 aa, synthetic construct
  source 1..5: note = Description of Artificial Sequence: Synthetic peptide; note = XENP021150 vhCDR1
DAWMD

SEQ ID NO: 31247 - protein, 19 aa, synthetic construct
  source 1..19: note = Description of Artificial Sequence: Synthetic peptide; note = XENP021150 vhCDR2
EIRTKANNHATYYAESVKG

SEQ ID NO: 31248 - protein, 10 aa, synthetic construct
  source 1..10: note = Description of Artificial Sequence: Synthetic peptide; note = XENP021150 vhCDR3
LANWDWYFDV

SEQ ID NO: 31249 - protein, 218 aa, synthetic construct; identical to SEQ ID NO: 20420
  source 1..218: note = Description of Artificial Sequence: Synthetic polypeptide; note = XENP021150 7G8_H0_L0.73_Fab Light Chain

SEQ ID NO: 31250 - protein, 111 aa, synthetic construct; identical to SEQ ID NO: 20421
  source 1..111: note = Description of Artificial Sequence: Synthetic polypeptide; note = VL of XENP021150

SEQ ID NO: 31251 - protein, 15 aa, synthetic construct
  source 1..15: note = Description of Artificial Sequence: Synthetic peptide; note = XENP021150 vlCDR1
KASQSVDYDGDSYMN

SEQ ID NO: 31252 - protein, 7 aa, synthetic construct
  source 1..7: note = Description of Artificial Sequence: Synthetic peptide; note = XENP021150 vlCDR2
AASNLIS

SEQ ID NO: 31253 - protein, 9 aa, synthetic construct
  source 1..9: note = Description of Artificial Sequence: Synthetic peptide; note = XENP021150 vlCDR3
QQSNEDPFT

SEQ ID NO: 31254 - protein, 226 aa, synthetic construct; identical to SEQ ID NO: 29134
  source 1..226: note = Description of Artificial Sequence: Synthetic polypeptide; note = XENP021151 7G8_H0_L0.74_Fab Heavy Chain

SEQ ID NO: 31255 - protein, 121 aa, synthetic construct; identical to SEQ ID NO: 17586
  source 1..121: note = Description of Artificial Sequence: Synthetic polypeptide; note = VH of XENP021151

SEQ ID NO: 31256 - protein, 5 aa, synthetic construct
  source 1..5: note = Description of Artificial Sequence: Synthetic peptide; note = XENP021151 vhCDR1
DAWMD

SEQ ID NO: 31257 - protein, 19 aa, synthetic construct
  source 1..19: note = Description of Artificial Sequence: Synthetic peptide; note = XENP021151 vhCDR2
EIRTKANNHATYYAESVKG

SEQ ID NO: 31258 - protein, 10 aa, synthetic construct
  source 1..10: note = Description of Artificial Sequence: Synthetic peptide; note = XENP021151 vhCDR3
LANWDWYFDV

SEQ ID NO: 31259 - protein, 218 aa, synthetic construct; identical to SEQ ID NO: 20430
  source 1..218: note = Description of Artificial Sequence: Synthetic polypeptide; note = XENP021151 7G8_H0_L0.74_Fab Light Chain

SEQ ID NO: 31260 - protein, 111 aa, synthetic construct; identical to SEQ ID NO: 20431
  source 1..111: note = Description of Artificial Sequence: Synthetic polypeptide; note = VL of XENP021151

SEQ ID NO: 31261 - protein, 15 aa, synthetic construct
  source 1..15: note = Description of Artificial Sequence: Synthetic peptide; note = XENP021151 vlCDR1
KASQSVDYDGDSYMN

SEQ ID NO: 31262 - protein, 7 aa, synthetic construct
  source 1..7: note = Description of Artificial Sequence: Synthetic peptide; note = XENP021151 vlCDR2
AASNLES

SEQ ID NO: 31263 - protein, 9 aa, synthetic construct
  source 1..9: note = Description of Artificial Sequence: Synthetic peptide; note = XENP021151 vlCDR3
QQTNEDPFT

SEQ ID NO: 31264 - protein, 226 aa, synthetic construct; identical to SEQ ID NO: 29134
  source 1..226: note = Description of Artificial Sequence: Synthetic polypeptide; note = XENP021152 7G8_H0_L0.75_Fab Heavy Chain

SEQ ID NO: 31265 - protein, 121 aa, synthetic construct; identical to SEQ ID NO: 17586
  source 1..121: note = Description of Artificial Sequence: Synthetic polypeptide; note = VH of XENP021152

SEQ ID NO: 31266 - protein, 5 aa, synthetic construct
  source 1..5: note = Description of Artificial Sequence: Synthetic peptide; note = XENP021152 vhCDR1
DAWMD

SEQ ID NO: 31267 - protein, 19 aa, synthetic construct
  source 1..19: note = Description of Artificial Sequence: Synthetic peptide; note = XENP021152 vhCDR2
EIRTKANNHATYYAESVKG

SEQ ID NO: 31268 - protein, 10 aa, synthetic construct
  source 1..10: note = Description of Artificial Sequence: Synthetic peptide; note = XENP021152 vhCDR3
LANWDWYFDV

SEQ ID NO: 31269 - protein, 218 aa, synthetic construct; identical to SEQ ID NO: 20440
  source 1..218: note = Description of Artificial Sequence: Synthetic polypeptide; note = XENP021152 7G8_H0_L0.75_Fab Light Chain

SEQ ID NO: 31270 - protein, 111 aa, synthetic construct; identical to SEQ ID NO: 20441
  source 1..111: note = Description of Artificial Sequence: Synthetic polypeptide; note = VL of XENP021152

SEQ ID NO: 31271 - protein, 15 aa, synthetic construct
  source 1..15: note = Description of Artificial Sequence: Synthetic peptide; note = XENP021152 vlCDR1
KASQSVDYDGDSYMN

SEQ ID NO: 31272 - protein, 7 aa, synthetic construct
  source 1..7: note = Description of Artificial Sequence: Synthetic peptide; note = XENP021152 vlCDR2
AASNLES

SEQ ID NO: 31273 - protein, 9 aa, synthetic construct
  source 1..9: note = Description of Artificial Sequence: Synthetic peptide; note = XENP021152 vlCDR3
QQANEDPFT

SEQ ID NO: 31274 - protein, 226 aa, synthetic construct; identical to SEQ ID NO: 29134
  source 1..226: note = Description of Artificial Sequence: Synthetic polypeptide; note = XENP021153 7G8_H0_L0.76_Fab Heavy Chain

SEQ ID NO: 31275 - protein, 121 aa, synthetic construct; identical to SEQ ID NO: 17586
  source 1..121: note = Description of Artificial Sequence: Synthetic polypeptide; note = VH of XENP021153

SEQ ID NO: 31276 - protein, 5 aa, synthetic construct
  source 1..5: note = Description of Artificial Sequence: Synthetic peptide; note = XENP021153 vhCDR1
DAWMD

SEQ ID NO: 31277 - protein, 19 aa, synthetic construct
  source 1..19: note = Description of Artificial Sequence: Synthetic peptide; note = XENP021153 vhCDR2
EIRTKANNHATYYAESVKG

SEQ ID NO: 31278 - protein, 10 aa, synthetic construct
  source 1..10: note = Description of Artificial Sequence: Synthetic peptide; note = XENP021153 vhCDR3
LANWDWYFDV

SEQ ID NO: 31279 - protein, 218 aa, synthetic construct; identical to SEQ ID NO: 20450
  source 1..218: note = Description of Artificial Sequence: Synthetic polypeptide; note = XENP021153 7G8_H0_L0.76_Fab Light Chain

SEQ ID NO: 31280 - protein, 111 aa, synthetic construct; identical to SEQ ID NO: 20451
  source 1..111: note = Description of Artificial Sequence: Synthetic polypeptide; note = VL of XENP021153

SEQ ID NO: 31281 - protein, 15 aa, synthetic construct
  source 1..15: note = Description of Artificial Sequence: Synthetic peptide; note = XENP021153 vlCDR1
KASQSVDYDGDSYMN

SEQ ID NO: 31282 - protein, 7 aa, synthetic construct
  source 1..7: note = Description of Artificial Sequence: Synthetic peptide; note = XENP021153 vlCDR2
AASNLES

SEQ ID NO: 31283 - protein, 9 aa, synthetic construct
  source 1..9: note = Description of Artificial Sequence: Synthetic peptide; note = XENP021153 vlCDR3
QQQNEDPFT

SEQ ID NO: 31284 - protein, 226 aa, synthetic construct; identical to SEQ ID NO: 29134
  source 1..226: note = Description of Artificial Sequence: Synthetic polypeptide; note = XENP021154 7G8_H0_L0.77_Fab Heavy Chain

SEQ ID NO: 31285 - protein, 121 aa, synthetic construct; identical to SEQ ID NO: 17586
  source 1..121: note = Description of Artificial Sequence: Synthetic polypeptide; note = VH of XENP021154

SEQ ID NO: 31286 - protein, 5 aa, synthetic construct
  source 1..5: note = Description of Artificial Sequence: Synthetic peptide; note = XENP021154 vhCDR1
DAWMD

SEQ ID NO: 31287 - protein, 19 aa, synthetic construct
  source 1..19: note = Description of Artificial Sequence: Synthetic peptide; note = XENP021154 vhCDR2
EIRTKANNHATYYAESVKG

SEQ ID NO: 31288 - protein, 10 aa, synthetic construct
  source 1..10: note = Description of Artificial Sequence: Synthetic peptide; note = XENP021154 vhCDR3
LANWDWYFDV

SEQ ID NO: 31289 - protein, 218 aa, synthetic construct; identical to SEQ ID NO: 20460
  source 1..218: note = Description of Artificial Sequence: Synthetic polypeptide; note = XENP021154 7G8_H0_L0.77_Fab Light Chain

SEQ ID NO: 31290 - protein, 111 aa, synthetic construct; identical to SEQ ID NO: 20461
  source 1..111: note = Description of Artificial Sequence: Synthetic polypeptide; note = VL of XENP021154

SEQ ID NO: 31291 - protein, 15 aa, synthetic construct
  source 1..15: note = Description of Artificial Sequence: Synthetic peptide; note = XENP021154 vlCDR1
KASQSVDYDGDSYMN

SEQ ID NO: 31292 - protein, 7 aa, synthetic construct
  source 1..7: note = Description of Artificial Sequence: Synthetic peptide; note = XENP021154 vlCDR2
AASNLES

SEQ ID NO: 31293 - protein, 9 aa, synthetic construct
  source 1..9: note = Description of Artificial Sequence: Synthetic peptide; note = XENP021154 vlCDR3
QQGNEDPFT

SEQ ID NO: 31294 - protein, 226 aa, synthetic construct; identical to SEQ ID NO: 29134
  source 1..226: note = Description of Artificial Sequence: Synthetic polypeptide; note = XENP021155 7G8_H0_L0.78_Fab Heavy Chain

SEQ ID NO: 31295 - protein, 121 aa, synthetic construct; identical to SEQ ID NO: 17586
  source 1..121: note = Description of Artificial Sequence: Synthetic polypeptide; note = VH of XENP021155

SEQ ID NO: 31296 - protein, 5 aa, synthetic construct
  source 1..5: note = Description of Artificial Sequence: Synthetic peptide; note = XENP021155 vhCDR1
DAWMD

SEQ ID NO: 31297 - protein, 19 aa, synthetic construct
  source 1..19: note = Description of Artificial Sequence: Synthetic peptide; note = XENP021155 vhCDR2
EIRTKANNHATYYAESVKG

SEQ ID NO: 31298 - protein, 10 aa, synthetic construct
  source 1..10: note = Description of Artificial Sequence: Synthetic peptide; note = XENP021155 vhCDR3
LANWDWYFDV

SEQ ID NO: 31299 - protein, 218 aa, synthetic construct; identical to SEQ ID NO: 20470
  source 1..218: note = Description of Artificial Sequence: Synthetic polypeptide; note = XENP021155 7G8_H0_L0.78_Fab Light Chain

SEQ ID NO: 31300 - protein, 111 aa, synthetic construct; identical to SEQ ID NO: 20471
  source 1..111: note = Description of Artificial Sequence: Synthetic polypeptide; note = VL of XENP021155

SEQ ID NO: 31301 - protein, 15 aa, synthetic construct
  source 1..15: note = Description of Artificial Sequence: Synthetic peptide; note = XENP021155 vlCDR1
KASQSVDYDGDSYMN

SEQ ID NO: 31302 - protein, 7 aa, synthetic construct
  source 1..7: note = Description of Artificial Sequence: Synthetic peptide; note = XENP021155 vlCDR2
AASNLES

SEQ ID NO: 31303 - protein, 9 aa, synthetic construct
  source 1..9: note = Description of Artificial Sequence: Synthetic peptide; note = XENP021155 vlCDR3
QQVNEDPFT

SEQ ID NO: 31304 - protein, 226 aa, synthetic construct; identical to SEQ ID NO: 29134
  source 1..226: note = Description of Artificial Sequence: Synthetic polypeptide; note = XENP021156 7G8_H0_L0.79_Fab Heavy Chain

SEQ ID NO: 31305 - protein, 121 aa, synthetic construct; identical to SEQ ID NO: 17586
  source 1..121: note = Description of Artificial Sequence: Synthetic polypeptide; note = VH of XENP021156

SEQ ID NO: 31306 - protein, 5 aa, synthetic construct
  source 1..5: note = Description of Artificial Sequence: Synthetic peptide; note = XENP021156 vhCDR1
DAWMD

SEQ ID NO: 31307 - protein, 19 aa, synthetic construct
  source 1..19: note = Description of Artificial Sequence: Synthetic peptide; note = XENP021156 vhCDR2
EIRTKANNHATYYAESVKG

SEQ ID NO: 31308 - protein, 10 aa, synthetic construct
  source 1..10: note = Description of Artificial Sequence: Synthetic peptide; note = XENP021156 vhCDR3
LANWDWYFDV

SEQ ID NO: 31309 - protein, 218 aa, synthetic construct; identical to SEQ ID NO: 20480
  source 1..218: note = Description of Artificial Sequence: Synthetic polypeptide; note = XENP021156 7G8_H0_L0.79_Fab Light Chain

SEQ ID NO: 31310 - protein, 111 aa, synthetic construct; identical to SEQ ID NO: 20481
  source 1..111: note = Description of Artificial Sequence: Synthetic polypeptide; note = VL of XENP021156

SEQ ID NO: 31311 - protein, 15 aa, synthetic construct
  source 1..15: note = Description of Artificial Sequence: Synthetic peptide; note = XENP021156 vlCDR1
KASQSVDYDGDSYMN

SEQ ID NO: 31312 - protein, 7 aa, synthetic construct
  source 1..7: note = Description of Artificial Sequence: Synthetic peptide; note = XENP021156 vlCDR2
AASNLES

SEQ ID NO: 31313 - protein, 9 aa, synthetic construct
  source 1..9: note = Description of Artificial Sequence: Synthetic peptide; note = XENP021156 vlCDR3
QQHNEDPFT

SEQ ID NO: 31314 - protein, 226 aa, synthetic construct; identical to SEQ ID NO: 29134
  source 1..226: note = Description of Artificial Sequence: Synthetic polypeptide; note = XENP021157 7G8_H0_L0.80_Fab Heavy Chain

SEQ ID NO: 31315 - protein, 121 aa, synthetic construct; identical to SEQ ID NO: 17586
  source 1..121: note = Description of Artificial Sequence: Synthetic polypeptide; note = VH of XENP021157

SEQ ID NO: 31316 - protein, 5 aa, synthetic construct
  source 1..5: note = Description of Artificial Sequence: Synthetic peptide; note = XENP021157 vhCDR1
DAWMD

SEQ ID NO: 31317 - protein, 19 aa, synthetic construct
  source 1..19: note = Description of Artificial Sequence: Synthetic peptide; note = XENP021157 vhCDR2
EIRTKANNHATYYAESVKG

SEQ ID NO: 31318 - protein, 10 aa, synthetic construct
  source 1..10: note = Description of Artificial Sequence: Synthetic peptide; note = XENP021157 vhCDR3
LANWDWYFDV

SEQ ID NO: 31319 - protein, 218 aa, synthetic construct; identical to SEQ ID NO: 20490
  source 1..218: note = Description of Artificial Sequence: Synthetic polypeptide; note = XENP021157 7G8_H0_L0.80_Fab Light Chain

SEQ ID NO: 31320 - protein, 111 aa, synthetic construct; identical to SEQ ID NO: 20491
  source 1..111: note = Description of Artificial Sequence: Synthetic polypeptide; note = VL of XENP021157

SEQ ID NO: 31321 - protein, 15 aa, synthetic construct
  source 1..15: note = Description of Artificial Sequence: Synthetic peptide; note = XENP021157 vlCDR1
KASQSVDYDGDSYMN

SEQ ID NO: 31322 - protein, 7 aa, synthetic construct
  source 1..7: note = Description of Artificial Sequence: Synthetic peptide; note = XENP021157 vlCDR2
AASNLES

SEQ ID NO: 31323 - protein, 9 aa, synthetic construct
  source 1..9: note = Description of Artificial Sequence: Synthetic peptide; note = XENP021157 vlCDR3
QQDNEDPFT

SEQ ID NO: 31324 - protein, 226 aa, synthetic construct; identical to SEQ ID NO: 29134
  source 1..226: note = Description of Artificial Sequence: Synthetic polypeptide; note = XENP021158 7G8_H0_L0.81_Fab Heavy Chain

SEQ ID NO: 31325 - protein, 121 aa, synthetic construct; identical to SEQ ID NO: 17586
  source 1..121: note = Description of Artificial Sequence: Synthetic polypeptide; note = VH of XENP021158

SEQ ID NO: 31326 - protein, 5 aa, synthetic construct
  source 1..5: note = Description of Artificial Sequence: Synthetic peptide; note = XENP021158 vhCDR1
DAWMD

SEQ ID NO: 31327 - protein, 19 aa, synthetic construct
  source 1..19: note = Description of Artificial Sequence: Synthetic peptide; note = XENP021158 vhCDR2
EIRTKANNHATYYAESVKG

SEQ ID NO: 31328 - protein, 10 aa, synthetic construct
  source 1..10: note = Description of Artificial Sequence: Synthetic peptide; note = XENP021158 vhCDR3
LANWDWYFDV

SEQ ID NO: 31329 - protein, 218 aa, synthetic construct; identical to SEQ ID NO: 20500
  source 1..218: note = Description of Artificial Sequence: Synthetic polypeptide; note = XENP021158 7G8_H0_L0.81_Fab Light Chain

SEQ ID NO: 31330 - protein, 111 aa, synthetic construct; identical to SEQ ID NO: 20501
  source 1..111: note = Description of Artificial Sequence: Synthetic polypeptide; note = VL of XENP021158

SEQ ID NO: 31331 - protein, 15 aa, synthetic construct
  source 1..15: note = Description of Artificial Sequence: Synthetic peptide; note = XENP021158 vlCDR1
KASQSVDYDGDSYMN

SEQ ID NO: 31332 - protein, 7 aa, synthetic construct
  source 1..7: note = Description of Artificial Sequence: Synthetic peptide; note = XENP021158 vlCDR2
AASNLES

SEQ ID NO: 31333 - protein, 9 aa, synthetic construct
  source 1..9: note = Description of Artificial Sequence: Synthetic peptide; note = XENP021158 vlCDR3
QQKNEDPFT

SEQ ID NO: 31334 - protein, 226 aa, synthetic construct; identical to SEQ ID NO: 29134
  source 1..226: note = Description of Artificial Sequence: Synthetic polypeptide; note = XENP021159 7G8_H0_L0.82_Fab Heavy Chain

SEQ ID NO: 31335 - protein, 121 aa, synthetic construct; identical to SEQ ID NO: 17586
  source 1..121: note = Description of Artificial Sequence: Synthetic polypeptide; note = VH of XENP021159

SEQ ID NO: 31336 - protein, 5 aa, synthetic construct
  source 1..5: note = Description of Artificial Sequence: Synthetic peptide; note = XENP021159 vhCDR1
DAWMD

SEQ ID NO: 31337 - protein, 19 aa, synthetic construct
  source 1..19: note = Description of Artificial Sequence: Synthetic peptide; note = XENP021159 vhCDR2
EIRTKANNHATYYAESVKG

SEQ ID NO: 31338 - protein, 10 aa, synthetic construct
  source 1..10: note = Description of Artificial Sequence: Synthetic peptide; note = XENP021159 vhCDR3
LANWDWYFDV

SEQ ID NO: 31339 - protein, 218 aa, synthetic construct; identical to SEQ ID NO: 20510
  source 1..218: note = Description of Artificial Sequence: Synthetic polypeptide; note = XENP021159 7G8_H0_L0.82_Fab Light Chain

SEQ ID NO: 31340 - protein, 111 aa, synthetic construct; identical to SEQ ID NO: 20511
  source 1..111: note = Description of Artificial Sequence: Synthetic polypeptide; note = VL of XENP021159

SEQ ID NO: 31341 - protein, 15 aa, synthetic construct
  source 1..15: note = Description of Artificial Sequence: Synthetic peptide; note = XENP021159 vlCDR1
KASQSVDYDGDSYMN

SEQ ID NO: 31342 - protein, 7 aa, synthetic construct
  source 1..7: note = Description of Artificial Sequence: Synthetic peptide; note = XENP021159 vlCDR2
AASNLES

SEQ ID NO: 31343 - protein, 9 aa, synthetic construct
  source 1..9: note = Description of Artificial Sequence: Synthetic peptide; note = XENP021159 vlCDR3
QQYNEDPFT

SEQ ID NO: 31344 - protein, 226 aa, synthetic construct; identical to SEQ ID NO: 29134
  source 1..226: note = Description of Artificial Sequence: Synthetic polypeptide; note = XENP021160 7G8_H0_L0.83_Fab Heavy Chain

SEQ ID NO: 31345 - protein, 121 aa, synthetic construct; identical to SEQ ID NO: 17586
  source 1..121: note = Description of Artificial Sequence: Synthetic polypeptide; note = VH of XENP021160

SEQ ID NO: 31346 - protein, 5 aa, synthetic construct
  source 1..5: note = Description of Artificial Sequence: Synthetic peptide; note = XENP021160 vhCDR1
DAWMD

SEQ ID NO: 31347 - protein, 19 aa, synthetic construct
  source 1..19: note = Description of Artificial Sequence: Synthetic peptide; note = XENP021160 vhCDR2
EIRTKANNHATYYAESVKG

SEQ ID NO: 31348 - protein, 10 aa, synthetic construct
  source 1..10: note = Description of Artificial Sequence: Synthetic peptide; note = XENP021160 vhCDR3
LANWDWYFDV

SEQ ID NO: 31349 - protein, 218 aa, synthetic construct; identical to SEQ ID NO: 20520
  source 1..218: note = Description of Artificial Sequence: Synthetic polypeptide; note = XENP021160 7G8_H0_L0.83_Fab Light Chain

SEQ ID NO: 31350 - protein, 111 aa, synthetic construct; identical to SEQ ID NO: 20521
  source 1..111: note = Description of Artificial Sequence: Synthetic polypeptide; note = VL of XENP021160

SEQ ID NO: 31351 - protein, 15 aa, synthetic construct
  source 1..15: note = Description of Artificial Sequence: Synthetic peptide; note = XENP021160 vlCDR1
KASQSVDYDGDSYMN

SEQ ID NO: 31352 - protein, 7 aa, synthetic construct
  source 1..7: note = Description of Artificial Sequence: Synthetic peptide; note = XENP021160 vlCDR2
AASNLES

SEQ ID NO: 31353 - protein, 9 aa, synthetic construct
  source 1..9: note = Description of Artificial Sequence: Synthetic peptide; note = XENP021160 vlCDR3
QQSDEDPFT

SEQ ID NO: 31354 - protein, 226 aa, synthetic construct; identical to SEQ ID NO: 29134
  source 1..226: note = Description of Artificial Sequence: Synthetic polypeptide; note = XENP021161 7G8_H0_L0.84_Fab Heavy Chain

SEQ ID NO: 31355 - protein, 121 aa, synthetic construct; identical to SEQ ID NO: 17586
  source 1..121: note = Description of Artificial Sequence: Synthetic polypeptide; note = VH of XENP021161

SEQ ID NO: 31356 - protein, 5 aa, synthetic construct
  source 1..5: note = Description of Artificial Sequence: Synthetic peptide; note = XENP021161 vhCDR1
DAWMD

SEQ ID NO: 31357 - protein, 19 aa, synthetic construct
  source 1..19: note = Description of Artificial Sequence: Synthetic peptide; note = XENP021161 vhCDR2
EIRTKANNHATYYAESVKG

SEQ ID NO: 31358 - protein, 10 aa, synthetic construct
  source 1..10: note = Description of Artificial Sequence: Synthetic peptide; note = XENP021161 vhCDR3
LANWDWYFDV

SEQ ID NO: 31359 - protein, 218 aa, synthetic construct; identical to SEQ ID NO: 20530
  source 1..218: note = Description of Artificial Sequence: Synthetic polypeptide; note = XENP021161 7G8_H0_L0.84_Fab Light Chain

SEQ ID NO: 31360 - protein, 111 aa, synthetic construct; identical to SEQ ID NO: 20531
  source 1..111: note = Description of Artificial Sequence: Synthetic polypeptide; note = VL of XENP021161

SEQ ID NO: 31361 - protein, 15 aa, synthetic construct
  source 1..15: note = Description of Artificial Sequence: Synthetic peptide; note = XENP021161 vlCDR1
KASQSVDYDGDSYMN

SEQ ID NO: 31362 - protein, 7 aa, synthetic construct
  source 1..7: note = Description of Artificial Sequence: Synthetic peptide; note = XENP021161 vlCDR2
AASNLES

SEQ ID NO: 31363 - protein, 9 aa, synthetic construct
  source 1..9: note = Description of Artificial Sequence: Synthetic peptide; note = XENP021161 vlCDR3
QQSHEDPFT
